United States Patent Application Publication US 2022/0096574 A1 - sequence listing, part 18

SEQ ID NO: 81460 - protein, 289 aa, Synechocystis sp.
  misc_feature (1)..(289): sp|P73526|QUEG_SYNY3 Epoxyqueuosine reductase OS=Synech ocystis sp. (strain PCC 6803 / Kazusa) OX=1111708 GN=qu eG PE=3 SV=1
MGIAPVSETENDEAAQRLQSWIALGYNADMAWMANPKRQNIRELLPSARSVIAVGLNYYTPHQRSGDPAHGKISRYAWGRDYHRVLTKKLKALNLWLEQQVPDLQSRYYVDTGPIQEKAWAERAGLGWVGKNGNLISRDYGSWLFLGEIVTNITLQGDRPHSQHCGTCTRCLEACPTQAIVEPFVVDSNKCIAYHTIENRAEILPTAIADNLQGWVAGCDICQDVCPWNQRFAQPTDVADFDPYEGNLNPELETLANITEADWQQQFTASALRRIKPAMLRRNAQANLQ

SEQ ID NO: 81461 - protein, 353 aa, Synergistaceae bacterium
  misc_feature (1)..(353): tr|A0A3D3CHL3|A0A3D3CHL3_9BACT PBS lyase OS=Synergistac eae bacterium OX=2053624 GN=DIC53_08210 PE=4 SV=1
MKVTDIIKRKGLELGFSHIGITTAEPFIEYAQELLRRPDYAIWADPDRSKYPGRTYLTETATPKNYYPQGTSIICATLGYSQYLYPEELTRHVARAYLCRSYVPQPNDLAGIRVAEYKRFIKSLGIGMYEGECDLPQRAACARAGIITYGKNNFAYTKEDGSFNILFTFLVDTVLDYDEPTVRCDCPESCHKCIDACPSQAIAAPGRLLPRNCAMNNHQLPLGAFPDDLWDKFSTSIHGCDICQLACPRNAAVLKRASRKDPFLETLKDEFDLEKVLFLDEDYYETAIRPIMYNYIRDMDLFRRNAAIAMGNSGNSAYITPLEKALTVYKDKPELLKPIVWALGRLRGEEKSN

SEQ ID NO: 81462 - protein, 235 aa, Synergistetes bacterium
  misc_feature (1)..(235): tr|A0A1V6A3E1|A0A1V6A3E1_9BACT Epoxyqueuosine reductase OS=Synergistetes bacterium ADurb.Bin155 OX=1852914 GN= queG PE=4 SV=1
MSDDLTLELEKVVREAGGSGCGFSDLSDLQDLPYPGLTRGVTVLLALAPAIIAAIGEGPTRDYHDEYERANKELARIGFEVVRFLEKAGYRAGLIDPTTQEYDEGTLSAPFPHKTAALRAGVGWIGKCDLLVTEEFGSAFRMCTIFTDAPLTPGDPSRESRCGPCTDCVLACPVKAPTGKDWMEGVYRDELVDIFACNRYARKLSADNGWSHVICGICIQACPWTRRYINSRSVP

SEQ ID NO: 81463 - protein, 257 aa, Synergistetes bacterium
  misc_feature (1)..(257): tr|A0A1V5HQF8|A0A1V5HQF8_9BACT Epoxyqueuosine reductase OS=Synergistetes bacterium ADurb.BinA166 OX=1852916 GN =queG PE=4 SV=1
MNYLTRHATLREQPELLLPGVKTILVAALRHAPTASPGYAAYAAGADYHAVIRTRLQPLADLIRSRAPEARTRIAVDSAPVAERDWAMRCGIGWRGRQGQVLNAEAGAHLLLGEILTTVELPPTPPVENRCGECRLCVDACPTGALQADGTVDARLCRSYWTIEHRGPIPESVRASIGDCLFGCDRCVSICPWNARATAPIPPEFTPRDLPPVEVCLTLDAAGFTERFGDSAVLRTGLDGLQRNARIVMDNQRPTPP

SEQ ID NO: 81464 - protein, 95 aa, Syntrophaceae bacterium
  misc_feature (1)..(95): tr|A0A3D4QZL3|A0A3D4QZL3_9DELT 4Fe-4S ferredoxin-type d omain-containing protein OS=Syntrophaceae bacterium OX= 2052184 GN=DIW05_00310 PE=4 SV=1
MVTDAVIEADPMLPADPCPPNCTACAKICPSKAFDAEGKFNKMTCLGYTIKHAIYPLALSSEAGLKNIERVINTAGHNYWIGCDECLKVCPLNKG

SEQ ID NO: 81465 - protein, 256 aa, Syntrophaceae bacterium
  misc_feature (1)..(256): tr|A0A1V5ECP3|A0A1V5ECP3_9DELT Epoxyqueuosine reductase OS=Syntrophaceae bacterium PtaU1.Bin231 OX=1811718 GN= queG_2 PE=4 SV=1
MANSFEDIRKTLLEEGADLVGFADVTAVAAEERRGMPRAISIAAALQPAIVSRIAKGPTQEYFREYGRANSLLSSLAHRAAGLLKERGFAAIALEPTTEEFDAVRLRAGLSHKIAATRSGLGWIGKNALVITKPFGSAVRFTTVLADAPLETGTPLDESRCGTCTACVDVCPAKAPSGKNWRLGTGRDEFFDAHACCRKATEFCKAAGIDSTICGICIEACPWTRKYLKRASRRKGITKNPLFAPLLRSAGRPGNE

SEQ ID NO: 81466 - protein, 326 aa, Syntrophobacter sp.
  misc_feature (1)..(326): tr|A0A2U3KUU6|A0A2U3KUU6_9DELT Putative Fe-S protein OS =Syntrophobacter sp. SbD1 OX=2043167 GN=SBDP1_440007 PE =4 SV=1
MTKSNMGRENMIYSAAEIKKICLDAGADDAGLVELDRESLQNEREGILNIYSLARTVIAVVIANNRENIQSPARYVANEEFHHGGDRTSSISREILRRLNQLGIRGVVVNKGWPMAMDRYPGKIWDVSHKVMAVEAGLGHMGMNRLVLHQKYGSCIGLESILINGVVDEYDRPLKENPCIKCNLCAVVCPTGAITKDRPFDFFACITHTYRDNFAGFQNWVDAMVTSDDMGEYRTHFDDLETALMWQSLMFRIGYRCSYCMAVCPAGEDIKPDYLENKKEHVERVLKPLRDRQERVYVMAGSKAESRARKNPLKEVRIVTGMMRKP

SEQ ID NO: 81467 - protein, 376 aa, Syntrophobacterales bacterium
  misc_feature (1)..(376): tr|A0A2M7BP90|A0A2M7BP90_9DELT Epoxyqueuosine reductase OS=Syntrophobacterales bacterium CG03_land_8_20_14_0_8 0_58_14 OX=1974100 GN=COS57_00515 PE=4 SV=1
MVGKREVIEKALECGFEDTGFTTAAPFDAQRAYIEERREDYAWAIRSGLDLIAGTDPKSILPEAKSIIVIMEAYFREAFPPSLERHFGRCYLDDDRMTKGRLAKRVKAFRAFLRENGIHSKVPFHLPHRMAAARAGMGTFGKNCLFYSRKVAAHGSWVLPIALVVDREFEPDEPTIEVGCPDWCKNACMAACPTGALVGPRRINPRRCISYLTYFGGEMTPRELRAPMGLCVYGCDRCQNVCPRNAPWLARELKMNEKAAGMVEDFRLEKLLGMDKAWFTERIWPHMFYMSAADLWRWKMNAARAMGNTLDETYIPHLTLAFRRESDERVKAMAAWALGRIGGPAAKQPLTAFLAKSAGSIRSEILAALEGASRRF

SEQ ID NO: 81468 - protein, 378 aa, Syntrophobacterales bacterium
  misc_feature (1)..(378): tr|A0A1G3UP61|A0A1G3UP61_9DELT PBS lyase OS=Syntrophoba cterales bacterium GWC2_56_13 OX=1802287 GN=A2X96_11860 PE=4 SV=1
MVGKREVIEKARECGFEDTGFTTAAPFDSQRSLLDQRREEYGWAIRSGLDLIAGTDPQTILPGAKSIIVLVDAYFREAFPPSLERHFGRCYLDDDRMTGTRLGKRVKALRVYLRENGIDSKVPFHLPHRLAAARAGLGTFGKNCLFYSRKVAAGGSWVTPIVLVVDREFEPDEPTLEVGCPDWCRNACIAACPTGALKGPRHLDPRRCISYLTYFGEELTPRELRAPMGLCVYGCDRCQNVCPRNAPWLARELTMNRKAEGMVEDFRLENLLHMDKAYFTAKIWQHMFYMSDAGLWRWKANAARAMGNTLDEKYVSELARAFRENGDERTSAMIAWALGRIGGPAAKQVLEAALPGSSSPVREEILAALEGTPATGEC

SEQ ID NO: 81469 - protein, 375 aa, Syntrophomonas sp.
  misc_feature (1)..(375): tr|A0A3B8HSJ7|A0A3B8HSJ7_9FIRM Epoxyqueuosine reductase OS=Syntrophomonas sp. OX=2053627 GN=DCD98_01940 PE=4 S V=1
MLTKEQIIGEALRLGFDDVGFTSAEPFDSHKEILLSRLELYDWCIDKGINLIQGTDPQAVWPQCRSIIVLIENYHRQSFPASMLGKFGRCYMDDDRVTKDGVSKRIKAFRSFLRENSIDSRVPFNVPQRLAAARAGLGTFGKNCLFYSRRAARQSSWVSPITVLVDVEFTPDTPTMEVGCPNWCRNACIASCPTGALLGPRKIDPRRCISYLSYYGEDITPLPLREPMGMKVYGCDRCQEVCPRNESWMVQVQELEVNPRAGAIAPHFELRALLHMDVEYYKTHIWPHMFYMEPKDLWRFQMNVARAMGNSRDPVYLPDLIKAFQENNDERVVGMAAWAIGRIGGDEAQRFLKGELNRASGLVREEIEQALQVTV

SEQ ID NO: 81470 - protein, 236 aa, Syntrophorhabdaceae bacterium
  misc_feature (1)..(236): tr|A0A1V5CD89|A0A1V5CD89_9DELT Epoxyqueuosine reductase OS=Syntrophorhabdaceae bacterium PtaU1.Bin034 OX=18117 15 GN=queG_1 PE=4 SV=1
MNEKSMSSSIRNSELKTQNLPLVALLKEMGADVFGIADMARYDREILGLGDDISAKYPFAISFGLLVSRGVLKTLTDGPTLFYLHHYRQVNYRLDMIAYLLAKKLEGMGYDALPLAASQMVDWQNQKGHISHKHIGQAAGIGWIGRNNLLVHPRYGSRVRYNTILTNMPLAPDEPAEFGCGWCTACMSSCPASAIREEPADFDHRGCFAMLQVFKNKRNLGHHICGLCVRACGGKE

SEQ ID NO: 81471 - protein, 303 aa, Syntrophorhabdaceae bacterium
  misc_feature (1)..(303): tr|A0A1V5BRZ6|A0A1V5BRZ6_9DELT Epoxyqueuosine reductase OS=Syntrophorhabdaceae bacterium PtaU1.Bin034 OX=18117 15 GN=queG_2 PE=4 SV=1
MSHLTKDLKEYAYSQGADLCGIARAEDLNETFTPPHRPIDLLPEVKTIVVASLHIPDGALEAQRAGITNYSYNMFGYAYLNREMDFVAYRITRFLERQGYQALPIPARGMHYWEKKKYHGPFSFRHAAVAAGLGNFGWSGIVLTPEFGSRQRFIAILTDAPLTPDPQRENEDNPCEKCYECVKNCPAGAVTKKPWSCVIGGKTHTYGVVEADRCYWVCKGLTTKAWPGAPFNPAVNVEKPENMTGEEKFKAIWEKRDARIRLSEHDEGNYGATLCGRCMIFCSAGRTAMERRLKKPKGNASNG

SEQ ID NO: 81472 - protein, 222 aa, Syntrophorhabdus sp.
  misc_feature (1)..(222): tr|A0A1V4W835|A0A1V4W835_9DELT Epoxyqueuosine reductase OS=Syntrophorhabdus sp. PtaB.Bin006 OX=1811698 GN=queG PE=4 SV=1
MESNDTWLKEYCEREGLDVFGVGKMAVYEKELVGIDDSVKDRFPFAISFGLVLSKGVIGTVKNGPNVLYLHHYRQANYRLDMVAYLLSKEIEKRGYQAMPFPASQLVDWRNQKGHISHKRVGEITGVGWIGRNNLLIHPLFGARARYNTVLTDMPLTAHEPLRAGCGECRACISVCPAGAIKDDRSEFDHIGCFNMITQLKNKRNLGHHICGICIAVCQGEE

SEQ ID NO: 81473 - protein, 221 aa, Syntrophorhabdus sp.
  misc_feature (1)..(221): tr|A0A1V5CZE0|A0A1V5CZE0_9DELT Epoxyqueuosine reductase OS=Syntrophorhabdus sp. PtaU1.Bin153 OX=1811705 GN=que G PE=4 SV=1
MESNDTWLKDYCEREGLDVFGVGNMARYDKELVGVDDSVKDRFPFAISFGLVLSKGVIGTVEDGPNVLYLHHYRQANYRLDMVAYLLSKEIEKKGYQAMPFPASQLVDWRNQKGHICHKRVGEISGLGWIGRNNLLVHPLFGARARYNTVLTDMPLTAHEPLQAGCGDCRACISVCPAGAIKDDRSEFDHIGCFNMITQLKNKRNLGHHICGICIAVCQGQ

SEQ ID NO: 81474 - protein, 287 aa, Syntrophus gentianae
  misc_feature (1)..(287): tr|A0A1H7WEP9|A0A1H7WEP9_9DELT Epoxyqueuosine reductase QueG (Queuosine biosynthesis) OS=Syntrophus gentianae OX=43775 GN=SAMN04489760_10691 PE=4 SV=1
MESKKQNLKEEVLRFCRERDVELVGFAPVERWDAFGEVPPEFRPRALWPFSRTVIVMGLPMLLPIVETTPSVLHKEMYTVVNHKLDTLAYELANFLNGKGYASSFFCRDTYANLKALRSAPFAAFSHVMAAKYAGLGTIGVSHCLLTQAFGPRVRFVSVLTAAELPGDPLLTEELCIKCGACAKCCPKQALVMRKDQVIGDYDKAACLEMHEELVRRRCYPCGICTKVCPIGEDRRLYGGKELQRKYLEEAKALAANPDDPAYASWAHIRKWGSLPEVPSDGKKQQG

SEQ ID NO: 81475 - protein, 227 aa, Syntrophus sp.
  misc_feature (1)..(227): tr|A0A3C0KPR0|A0A3C0KPR0_9DELT PBS lyase (Fragment) OS= Syntrophus sp. (in: Bacteria) OX=48412 GN=DCG53_02960 P E=4 SV=1
MSLSEEIKDYALALGYSRVGIATAEPFPLYAQSMEERADDYDWAVDSGLRLERGVDPQDRLPGARSIIVAVYDYVREHFPEELVGKIGRLYQSRSYIEPPTSLGGARVQLMRQFLEGKGMQVGRWFLISSGVPDRLAAVRAGVGEIGRNTFVCAPGIGTFVIIHTFIVDAELEYDTPTNGTHCPPACRLCIEACPTGAIVADFRMNPRRCLTFNHVVNVHGFRNTSP

SEQ ID NO: 81476 - protein, 391 aa, Syntrophus sp.
  misc_feature (1)..(391): tr|A0A1G3W1S2|A0A1G3W1S2_9DELT PBS lyase (Fragment) OS= Syntrophus sp. RIFOXYC2_FULL_54_9 OX=1802292 GN=A3J94_1 0080 PE=4 SV=1
MREVSLISATTRDEAQRSIRTFYEAIKKGGYQMPSKQEIIEKAYECGFEDAGFTTAEPFASQRALLDQRREEYGWAIRSGLDLPAGTDPQTILPGAKSIIVVIEAYFREAFPPALERHFGRCYLDDDRMTGNRLGKRIKAFRAYLRDNGIDSKVPFHLPHRLAAARAGLGTFGNNCLFYSRKVAAGGSWVTPIALVVDRSFAPDEPTLDVGCPDWCKNACIAACPTGALKGPRHIDPRRCISYLTYFGRGATPTDLREPMGLCVYGCDRCQNVCPRNSPWLARELPMNRKAAGMVEDFRLEKLLHMDKAFFTEKIWPHMFYMSDADLWRWKSNAARAMGNTRDEAYVPELARAFGESVDERVAAMIAWALGRIGGDSARRALEAFLPGSRS

SEQ ID NO: 81477 - protein, 340 aa, Tabrizicola sp.
  misc_feature (1)..(340): tr|A0A411Z3E5|A0A411Z3E5_9RHOB tRNA epoxyqueuosine(34) reductase QueG OS=Tabrizicola sp. DJC OX=2305252 GN=que G PE=4 SV=1
MTDDLKSRLHARALGEGFSAMRVTAPGAVPQVAARLAEFVAQGRHGQMGWMAERMAWRGDPSALWPEARSVIMLAESYAPEENPLPLLEQRDRGVISVYAQGKDYHDLVKRRLKRLGRWLIDQAECQIKVFVDTAPVMEKPLAEAAGLGWQGKHTNLLSRDLGNWFFLGAIFTTLDLAKDAAEVSHCGSCTACLTICPTGAFPAPYQLDARRCISYLTIEHSGPVDEALRGLMGNRIYGCDDCLAVCPWNKFAKAASDIGYAPRHGAPPLAELAVLDDAAFRARFVGSPIKRIGRGRFVRNVLYAIGNSGELALKAVAQGLCDDADVAVADAARWAVTRL

SEQ ID NO: 81478 - protein, 340 aa, Tabrizicola sp.
  misc_feature (1)..(340): tr|A0A4Z0LRL4|A0A4Z0LRL4_9RHOB Epoxyqueuosine reductase OS=Tabrizicola sp. WMC-M-20 OX=2528693 GN=queG PE=3 SV =1
MTNDLKSRLHSRALAEGFSAMRVTTPDAIPLAAERLAAFVAQGRHGQMGWMAERMAWRGDPTALWPQARSVIMLAESYAPEENPLPLLELRDRGVISVYAQGKDYHDLVKRRLKRLGRWLIDQAECEIKVFVDTAPVMEKPLAQAAGLGWQGKHTNVLSRDLGNWFFLGAIFTTLELPPDKPEVSHCGSCTACLTICPTGAFPAPYQLDARRCISYLTIEHSGPVDEELRGLMGNRIYGCDDCLAVCPWNKFAKAARDIGYAPRHGAPPLAELAGLDDATFRARFAGSPVKRIGRGRFVRNVLYAIGNSGDAALREVAQGLCGDADSTVADAARWAVARL

SEQ ID NO: 81479 - protein, 353 aa, Tahibacter aquaticus
  misc_feature (1)..(353): tr|A0A4R6YX55|A0A4R6YX55_9GAMM Epoxyqueuosine reductase OS=Tahibacter aquaticus OX=520092 GN=queG PE=3 SV=1
MDYAELAVAIRRWGAELGFQQVGIAGTELAADETHLLNWLEAGRHGEMDYMQRHGTKRSRPQELQPGTLRVVSVRMDYAPPGIANGWEVLADTSLGYVSRYALGRDYHKLMRNRLQQLADRIAAQIGPFGYRAFVDSAPVLERALARNAGLGWIGKHTCLINRDAGSWFFLGELYTDLPLPLDQAATAHCGSCTRCLDICPTQAIVAPYQVDARRCISYLTIELHGSIPEPLRKPMGNRIYGCDDCQLICPWNKFSEPTAEADFSPRHKLDGAALIDLFAWSEDEFLRRTEGSAIRRIGHERWLRNIAVALGNARDTAGVVAALQSRAAHPSELVREHVQWALQQHATAAPAT

SEQ ID NO: 81480 - protein, 312 aa, Taibaiella chishuiensis
  misc_feature (1)..(312): tr|A0A2P8D1K9|A0A2P8D1K9_9BACT Epoxyqueuosine reductase OS=Taibaiella chishuiensis OX=1434707 GN=queG PE=3 SV= 1
MNLSTQTTFIKTLSRELGFDYCGIARAQRLDDDARKLEQWLTKGYQGKMGYMENHFDMRVDPTLLVPGAKSVVTLLLNYYPEEQQAEGAPKIAKYAYGTDYHLVIREKMNEFLYRIREKIGQVEGRGFVDSAPVLERSWAVRSGLGWVGKNGNLIHKQTGSFFFIATLIIDLELEYDDPFAKDYCGSCTRCLDACPTGAIVDPTLIDGSRCISYLTIELKDELIAPEFRDKMEGWMFGCDICQDVCPWNRFARPHQQDAFAPIPLLLNLGTAEWEAMDEQFFRTLLKNSPMKRSKWKGIQRNIRFLENPGKI

SEQ ID NO: 81481 - protein, 310 aa, Taibaiella soli
  misc_feature (1)..(310): tr|A0A2W2BCE0|A0A2W2BCE0_9BACT Epoxyqueuosine reductase OS=Taibaiella soli OX=1649169 GN=queG PE=3 SV=1
MSLAEKHSIIIKQEAARLGFESCGIAVAQRLDEDARKLESWLSKGFHGKMQYMENHFDLRVDPRKLVPGAKSVVTLLMNYFPSEEQQRDAPKIAKYSWGIDYHYVIREKLNELLDFIRANIGEVDGRGFVDSAPVLERSWAVRTGLGWVGKNGNLLTKKNGSFFFIATLITDLELQPDAPFTTDHCGSCTRCLDACPTGAIVSPSLVDGSKCISYLTIELKDALIPDEFHSKMDGWMFGCDVCQDVCPWNRFAKPNHEPAFTPVPEILNLSTSQWQEMTDESFRRIFKNSPLKRSKWQGIQRNLQAIKIV

SEQ ID NO: 81482 - protein, 309 aa, Taibaiella sp.
  misc_feature (1)..(309): tr|A0A3N7A5W9|A0A3N7A5W9_9BACT Epoxyqueuosine reductase OS=Taibaiella sp. KBW10 OX=2153357 GN=queG PE=3 SV=1
MTAAQHTRIVKELSKRLGFDYCGIAKAEQLEDDARHLEAWLHKGYNAGMSYMERNFDLRINPQLLVPGAQSVITLMMNYYPDQKQDTDAPQIAKYAYGHDYHEVIRAKLHEFLFEIQAQIGEVQGRGFVDSAPVLERSWAQRTGLGWIGKNANLINKQSGSFFFLATLIVDLSLEYDDPFAKDFCGTCTKCIDACPTQAIVSPSVIDANKCISYLTIELKDELIPDELSGKFKNWMFGCDICQDVCPWNRFSQPHQQEAFKPIPEILNFSSGDWESLDEDFFKVLLKNSPIKRSKWKGIRRNISFIKTS

SEQ ID NO: 81483 - protein, 356 aa, Tamilnaduibacter salinus
  misc_feature (1)..(356): tr|A0A2U1CUG7|A0A2U1CUG7_9ALTE Epoxyqueuosine reductase OS=Tamilnaduibacter salinus OX=1484056 GN=queG PE=3 SV =1
MPTETLDSLPGKIRRWAAELGFQDVGITEADTGDHGDYLQDWLDRGYHGELFFMDAHGDKRYRPEKLMEGTRRVISVRLDYLPAPDNPSHILRDGEKAYVSRYAVGRDYHKLMRKRLAKLSRWIDEELEGHQHRAFVDSAPVMERALAQRAGLGWFGKNTMIIHPRAGSYFFLGEIYTTAPLPVDPPFETEHCGSCSACLDICPTDAFDGPHRLDARRCISYLTIELKGSIPQELRPLMGNRVFGCDDCQLICPWNKFSKPTAEPDFQPRHNLDNADLAELFLWSEETFLDRTAGSAIRRTGYEGWLRNLAVGLGNAPSTIPVIEALKQRAHYPSELVREHVHWALKRHGIDPVTA

SEQ ID NO: 81484 - protein, 356 aa, Tamilnaduibacter salinus
  misc_feature (1)..(356): tr|A0A2A2I5A3|A0A2A2I5A3_9ALTE Epoxyqueuosine reductase OS=Tamilnaduibacter salinus OX=1484056 GN=queG PE=3 SV =1
MPTETLDSLPGKIRRWAAELGFQDVGITEADTGDHGDYLQDWLDRGYHGELSFMDAHGDKRYRPEKLMEGTRRVISVRLDYLPAPDNPSHILRDGEKAYVSRYAVGRDYHKLMRKRLAKLSRWIDEELEGHQHRAFVDSAPVMERALAQRAGLGWFGKNTMIIHPRAGSYFFLGEIYTTAPLPVDPPFETEHCGSCSACLDICPTDAFDGPHRLDARRCISYLTIELKGSIPQELRPLMGNRVFGCDDCQLICPWNKFSKPTAEPDFQPRHNLDNTDLAELFLWSEETFLDRTAGSAIRRTGYEGWLRNLAVGLGNAPSTIPVIEALKQRAHYPSELVREHVHWALKRHGIDPVTA

SEQ ID NO: 81485 - protein, 307 aa, Tamlana nanhaiensis
  misc_feature (1)..(307): tr|A0A0D7VZX6|A0A0D7VZX6_9FLAO Epoxyqueuosine reductase OS=Tamlana nanhaiensis OX=1382798 GN=queG PE=3 SV=1
MNLQSKYSQLIKTEAKRLGFMSCGISKAQFLEEEAPRLEKWLKQNMNGEMRYMENHFDKRLDPTKLVEDSKSVVSLLLNYYPSETQNSDSFKLSKYAYGTDYHFVIKDKLKSLLHYIQEEIGEVHGRAFVDSAPVLDKTWAAKSGLGWIGKNSNLLSQKVGSFFFIAELIIDLELEYDTITTDHCGTCTACIDACPTQAIVEPYVVDGSKCISYFTIELKDNIPSEFKGKFDDWMFGCDVCQDVCPWNRFSKSHNEPLFNPHPELLLMSKKDWEEITEDTFRKVFKNSAVKRTKYAGLTRNIKFLKS

SEQ ID NO: 81486 - protein, 308 aa, Tamlana sedimentorum
  misc_feature (1)..(308): tr|A0A0D7W8Q2|A0A0D7W8Q2_9FLAO Epoxyqueuosine reductase OS=Tamlana sedimentorum OX=1435349 GN=queG PE=3 SV=1
MVNNKSKYSQLIKSEAKRLGFLSCGISKAAFLEEEAPRLEKWLNKNMNGEMRYMENHFDKRLDPTKLVEDSKSVVSLLLNYYPDKIQNEDSYKLSRYAYGTDYHFVIKDKLKSLLYFIQEEIGEVSGRAFVDSAPVLDKAWAAKSGLGWIGKHSNLLSQKVGSFFFIAELIIDLELDYDTPTTDHCGTCTACIDACPTQAITEPYVVDGSKCISYFTIELKENIPTEFKGKFDDWMFGCDVCQDVCPWNRFSKPHNEPLFNPHPELLSMSKKDWEDITEETFRKVFKNSAVKRTKYSGLTRNIKFLKT

SEQ ID NO: 81487 - protein, 306 aa, Tamlana sp.
  misc_feature (1)..(306): tr|A0A5C4SET0|A0A5C4SET0_9FLAO Epoxyqueuosine reductase OS=Tamlana sp. CW2-9 OX=2583814 GN=queG PE=3 SV=1
MKSYNHSKFIKTEAKRLGFLSCGISKAQFLEEEAPRLEKWLTNNMHGKMQYMENHFDKRLDPTKLVEGSKSVISLLLNYYPNETQNTDSYKLSKYAYGTDYHFVIKDKLRLFLQSIRDEIGEVNGRAFVDSAPVLDKAWAAKSGLGWIGKHSNLITQQVGSFYFIAELIVDLELEYDPPTTDHCGTCTACIDACPTQAITAPYVVDGSKCISYFTIELKDNLPTAFKDQFDDWMFGCDVCQDVCPWNRFSKPHSEPLFNPNPELLNMTKRDWEDLTQETFSKVFKKSAVKRTKFSGLKRNIDFLKI

SEQ ID NO: 81488 - protein, 311 aa, Tamlana sp.
  misc_feature (1)..(311): tr|A0A2I7SG36|A0A2I7SG36_9FLAO Epoxyqueuosine reductase OS=Tamlana sp. UJ94 OX=2069432 GN=queG PE=3 SV=1
MLNNKTKYSQFIKTEAKRLGFLSCGISKAEFLEEEAPRLEKWLKNNMNGEMRYMENHFDKRLDPTKLVEGSKSVVSLLLNYYPKDIQTENSYKLSKYAFGTDYHFVIKDKLKDLLHFIQDEIGEVDGRAFVDSAPVLDKAWAAKSGLGWVGKHSNLLTQKVGSFYFIAELIIDLDLEYDARVTDHCGTCTACIDACPTEAITAPYVVDGSKCISYFTIELKENIPSEFQGKFDDWMFGCDVCQDVCPWNRFSKPHNEPLFNPHPELLSMTKKDWEDITAETFQKVFKKSAVKRTKFAGLNRNINFLKDTNL

SEQ ID NO: 81489 - protein, 314 aa, Tangfeifania diversioriginum
  misc_feature (1)..(314): tr|A0A1M6ABW2|A0A1M6ABW2_9BACT Epoxyqueuosine reductase OS=Tangfeifania diversioriginum OX=1168035 GN=queG PE= 3 SV=1
MQNQNNISEKIKSKAKELGFLDCVILPATELTEEKEHFQNWLDADMNGKMGYMERNKEKRLNPRLLFENAKSILIVLQNYHTHKTQEDPDAPVISKYAYGTDYHFVMKDKLKSLLQFINNEFGPCNGRPFVDSAPVLERAWARRAGLGWVGKNSNLISVEHGSFFFIGELILDIELPFDQPKIVSDHCGNCTRCIDACPTNAIVDNRVIDARKCISYQTIELRGDLDENLKGQFENRVFGCDICQDVCPWNLKPEPHDEPHLKPAPKLLELTREEWYKMEKPQFNQLFKKSAVKRTGFKGLKRNLEFIQTNTDE

SEQ ID NO: 81490 - protein, 313 aa, Tannerella sp.
  misc_feature (1)..(313): tr|G9S575|G9S575_9BACT Uncharacterized protein OS=Tanne rella sp. 6_1_58FAA_CT1 OX=665949 GN=HMPREF1033_01911 P E=4 SV=1
MNEFSLKNKIFERAFALGFSACGITPVKEVDADCRLHFDKWLQKGKEARMQYMKNYKDKRFDPRLLVENARSVLVVALNYYPSIHIPENHPQFALYSYGQDYHIVLKEKLNELFSYINTLIPIEGRIFCDTAPVMERYWAQQAGIGFIGKNTQLIIPGKGSFFFLGEIISSLELPWDTPMQNRCGHCNSCIKHCPTQALIPGDFTTLDSNRCISYQTIENRSDIPFEIGSKMNNRVYGCDTCQKVCPWNRFSIPTTIPEFEPSSEFLSLDQEKLEHLTHEDYNRIFKKSAVKRVKYEGLLRNINMLRKNKSES

SEQ ID NO: 81491 - protein, 313 aa, Tannerella sp.
  misc_feature (1)..(313): tr|R7DHE8|R7DHE8_9BACT Uncharacterized protein OS=Tanne rella sp. CAG:51 OX=1262979 GN=BN686_02455 PE=4 SV=1
MNEFSLKNKIFERAFALGFSACGITPVKEVDADCRLHFDKWLQKGKEARMQYMRNYKDKRFDPRLLVENARSVLVVALNYYPSIHIPENHPQFALYSYGQDYHIVLKEKLNELFSYINTLTPIEGRIFCDTAPIMERYWAQQAGIGFIGKNTQLIIPGKGSFFFLGEIISSLELPWDTPMQNRCGHCNSCIEHCPTQALIPGDFTTLDSNRCISYQTIENRSDIPFEIGSKMNNRVYGCDTCQKVCPWNRFSIPTTIPEFEPSSEFLSLDQEKLEHLTHEDYNRIFKKSAVKRIKYEGLLRNINILRKNKSES

SEQ ID NO: 81492 - protein, 346 aa, Tanticharoenia sakaeratensis
  misc_feature (1)..(346): tr|A0A0D6MPW6|A0A0D6MPW6_9PROT Epoxyqueuosine reductase OS=Tanticharoenia sakaeratensis NBRC 103193 OX=1231623 GN=queG PE=3 SV=1
MPPDLTTRIAEHARDLGFDAVGFCAAELGPEAGDRLREAVELGWHADLSWLAERQEARAQPRALWAEARSVIALGLSYAPDGDPLETLREPSCGNISVYARHRDYHDVMKGMLKHLAQFVVKLAGPDGAQVKVFVDTAPVSEKALAEQARLGWQGKHTNLVSREHGSWLLLGEIYTTLELAPSEPRAGSCGSCSKCLNACPTDAFPAPYRMDARRCISYLTIEHKGPIPHEFRKAIGNHIYGCDDCLSVCPWNRFAVESRHLKLRAREDLIAPTLAELASLDDAGFRAKFSGSPIKRIGRNRFVRNVLIAIGNASDPALLPCAQALMGDPDPVVAEAAVWAAAQYT

SEQ ID NO: 81493 - protein, 411 aa, Tardiphaga robiniae
  misc_feature (1)..(411): tr|A0A164B5N1|A0A164B5N1_9BRAD Epoxyqueuosine reductase OS=Tardiphaga robiniae OX=943830 GN=queG PE=3 SV=1
MAGGRAGIADLCGSRFLSTSADDERVALPIDLRDRLAREARALGFDSIGITDPDSIAGVRERLQEFLNAGAHGDMEWLADNPNRRADPKVMWQDVRSVIMLGVNYGPDENPLEILKQRSHAAISVYARGDDYHDLIKKRLKLLARWLIAQAGGDVKVFVDTAAVMEKPLAGAAGLGWQGKHTNLVSREFGSWLFLGAIFTTLELPRDARTIDHCGSCQACLDSCPTAAFPAPYKLDARRCISYLTIENKGPIPHEFRKPMGNRIYGCDDCLAACPWNKFAQEGREIKLAARDELRAPSLAELAKLDDAAFRAFFTKSPVKRIGRNRFIRNVLIAIGNSNDLSLVSDAQQLLGDKSPVVRGAAIWALSQLMPADEFAALATQLGDAEKDESVNDEWQLALSSSDVAPSPAAL

SEQ ID NO: 81494 - protein, 411 aa, Tardiphaga sp.
  misc_feature (1)..(411): tr|A0A370QYX7|A0A370QYX7_9BRAD Epoxyqueuosine reductase OS=Tardiphaga sp. CF115 OX=2135486 GN=queG PE=3 SV=1
MAGGRAGIADLCGSRFLSPSADDDRATLSADLRDRLTREAKALGFDSIGITDPDAIAGVRERLQEFLNAGAHGDMEWLADNPDRRADPKVMWQDVRSVIMLGVNYGPDENPLEILKQRSHAAISVYARGDDYHDLIKKRLKLLARWLIAQAGGEVKVFVDTAAVMEKPLAGAAGLGWQGKHTNLVSREFGSWLFLGAIFTTLELPRDARTIDHCGSCQACLDSCPTSAFPAPYKLDARRCISYLTIENKGPIPHEFRKPMGNRIYGCDDCLAACPWNKFAQEGREIKLAARDELRAPSLAELAKLDDAAFRAFFTKSPVKRIGRNRFIRNVLIAIGNSNDLSLVSDAQQLLGDESPVVRGAAIWALSQLMPADEFAALATQLGDAEKDGSVNDEWQLALNSSDVAPSPAAL

SEQ ID NO: 81495 - protein, 411 aa, Tardiphaga sp.
  misc_feature (1)..(411): tr|A0A420B572|A0A420B572_9BRAD Epoxyqueuosine reductase OS=Tardiphaga sp. YR296 OX=2135488 GN=queG PE=3 SV=1
MAGGRAGIADLCGSRFLSPSADDAIATLPADLKDTLTREAKALGFDSIGITDPDAIAGVRERLQEFLNAGAHGDMEWLADNPDRRADPKVMWQDVRSVIMLGVNYGPDENPLEILKQRSHAAISVYARGDDYHDLIKKRLKLLARWLIAQAGGDVKVFVDTAAVMEKPLAGAAGLGWQGKHTNLVSREFGSWLFLGAIFTTLELPRDARTIDHCGSCQACLDSCPTSAFPAPYKLDARRCISYLTIENKGPIPHEFRKPMGNRIYGCDDCLAACPWNKFAQEGREIKLAARDELRAPSLAELAKLDDAAFRAFFTKSPVKRIGRNRFIRNVLIAIGNSNDLSLVSDAQQLLGDESPVVRGAAIWALSQLMPADEFAALATQLGDAEKDGSVNDEWQLALSSSGVAPSPVAL

SEQ ID NO: 81496 - protein, 347 aa, Tateyamaria omphalii
  misc_feature (1)..(347): tr|A0A1P8MYS1|A0A1P8MYS1_9RHOB tRNA epoxyqueuosine(34) reductase QueG OS=Tateyamaria omphalii OX=299262 GN=BWR 18_17270 PE=4 SV=1
MGLKEKVIGRALDEGFVMARVCLPDAVPEVAGRLEAFVEGGRHGQMGWMAERMHWRGNPAALWPEARSVIMLAESYAPEHDPLAALERPALGAVSVYAQGRDYHDIVKKRLKRLARWLIAEAGGEVKVFVDTAPVPEKALGQAAGLGWQGKHTNLVSREWGNWAFLGSVFTTLELEPDEAEVDHCGSCRACLDVCPTDAFPAPYQLDARRCISYLTIEHKGPVDDALRPALGNRIYGCDDCLAVCPWNKFAVAASDMRYLGAVGAPPLAELAALDDAGFRARFSGSPIKRIGRDRFVRNVAYAIGNSGTIDLLPAVQALVDDPDPAVADAARWAVTQLGATGREQAR

SEQ ID NO: 81497 - protein, 344 aa, Tateyamaria sp.
  misc_feature (1)..(344): tr|A0A0B4D4Q5|A0A0B4D4Q5_9RHOB Epoxyqueuosine reductase OS=Tateyamaria sp. ANG-S1 OX=1577905 GN=RA29_08440 PE= 4 SV=1
MDLKERVIGRALDEGFIMARVCRPDAVPEVAERLEAFVEAGRHGQMGWMAERMHWRGNPAALWPEARSVIMLAESYAPEHDPLAVLERPELGAVSVYAQGRDYHDIVKKRLKRLARWLIAEAGGEVKVFVDTAPVPEKALGQAAGLGWQGKHTNLVSREWGNWAFLGSVFTTLELEPDASEVDHCGSCRACLDVCPTNAFPAPYQLDARRCISYLTIEHKGPVDEALRSGLGNRIYGCDDCLAVCPWNKFAVAASDMRYLGAVGAPPLAELAALDDAGFRARFSGSPIKRIGRDRFVRNVAYAIGNSGLPELVHAAQALVDDADPAVADAARWALTQLGATDRE

SEQ ID NO: 81498 - protein, 366 aa, Telmatospirillum siberiense
  misc_feature (1)..(366): tr|A0A2N3PPL2|A0A2N3PPL2_9PROT Epoxyqueuosine reductase OS=Telmatospirillum siberiense OX=382514 GN=queG PE=3 SV=1
MKEAIRAKALELGFAEARFAPAAPVPGAAPGLAGYLAAGCHGEMAWMAETAERRAQPRALWPEAASVIVLGENYGPGRHPLAALDHPDRGHISVYARGRDYHDVLKKRLKALARWLVERHGGEVKVFSDTAPVMEKPLAAVAGLGWQGRHTNLVSQRFGSWLFLGEVFTTLEIPPDPPEGDHCGRCRACETSCPTGALVEGRIDPRRCVSYLTIEHKGHIPRELRALMGNRIYGCDDCLAVCPWNKFAVPTAHADYLPRAELLAPRLADLASLDDEAFRSFFSASPIKRIGRDRFLRNVLIALGNSTDPAFAPVARRMVGDASPLVRGSAIWALRRLLPIDDFTALRALLAGEESDAAVALEWGEV

SEQ ID NO: 81499 - protein, 308 aa, Tenacibaculum caenipelagi
  misc_feature (1)..(308): tr|A0A4R6TGA6|A0A4R6TGA6_9FLAO Epoxyqueuosine reductase OS=Tenacibaculum caenipelagi OX=1325435 GN=queG PE=3 S V=1
MNQKQQYSNFIKTQAKRLGFLGCGIAKADFLEEEAPRLEKWLQNGYHGEMHYMENHFDKRLDPRLLVEGAKSVISLSYNYFPSEVQQEGSYKISKYAYGQDYHHIIKDKLRELLQLINDEIGEVSGRCFVDSAPVLERAWAAKSGLGWNGKHSLLIQKQQGSFFFLAELIIDLELEYDAPFKTDHCGSCTRCIDACPTQAILPNNTVDGSKCISYLTIELKDAIPSGFEGQLQDWMFGCDVCQDVCPWNRFSKPHEESLFTPQESLLDMTKRDWQELTQETFSKVFKKSAVKRTKFSGLSRNIDFLKK

SEQ ID NO: 81500 - protein, 308 aa, Tenacibaculum discolor
  misc_feature (1)..(308): tr|A0A497ZIP8|A0A497ZIP8_9FLAO Epoxyqueuosine reductase OS=Tenacibaculum discolor OX=361581 GN=queG PE=3 SV=1
MNKKQQYSNFIKTQAKRLGFLGCGIAKADFLEEEAPRLEKWLQNGYHGEMHYMENHFDKRLDPRLLVDGAKSVISLSYNYFPSEVQEEGSYKISKYAYGQDYHHIIKGKLRELLQLINDEIGEVSGRCFVDSAPVLERAWAQKSGLGWNGKHSLLIQKQQGSFFFLAELIIDLELEYDEPFKTDHCGSCTRCIDACPTQAILPNNTVDGSKCISYLTIELKDAIPSEFKGEMQDWMFGCDVCQDVCPWNRFSQPHEESLFAPQENLLQMNKRDWQELTQETFSKVFKKSAVKRTKFSGLLRNIDFIKQ

SEQ ID NO: 81501 - protein, 308 aa, Tenacibaculum gallaicum
  misc_feature (1)..(308): tr|A0A3E0ICL4|A0A3E0ICL4_9FLAO Epoxyqueuosine reductase OS=Tenacibaculum gallaicum OX=561505 GN=queG PE=3 SV=1
MNRRKQYSSFIKEQAKRLGFLGCGIAKADFLEEEAPRLEEWLQNGYHGEMRYMENHFDKRLDPRLLVDGAKSVISLSYNYFPSEVQEEGSYKISKYAYGQDYHHIIKDKLRELLQLINDEIGEVSGRCFVDSAPVLERAWAEKSGLGWNGKHSLLIQKQQGSFFFLAELIIDLELEYDEPFKTDHCGSCTRCIDACPTQAILPNNTVDGSKCISYLTIELKDAIPSEFKGEMQDWMFGCDVCQDVCPWNRFSQPHEESLFTPQESLLQMTKRDWQELTQETFSKVFKKSAVKRTKFSGILRNIDFIKE

SEQ ID NO: 81502 - protein, 308 aa, Tenacibaculum holothuriorum
  misc_feature (1)..(308): tr|A0A1Y2PAE9|A0A1Y2PAE9_9FLAO Epoxyqueuosine reductase OS=Tenacibaculum holothuriorum OX=1635173 GN=queG PE=3 SV=1
MKIKEQYSQFIKAQAKRLGFLECGIAKADFLEEEAPRLENWLQNNYHGEMRYMENHFDKRLDPRLLVEGAKSVVSLSYNYFPKEVQKNQDYKISKYAYGQDYHHIIKAKLRELLSLINDEIGEVSGRCFVDSAPVLERAWAEKAGLGWNGKHTLLIQKQQGSFFFLAELIIDLELAYDNPFATDHCGKCRRCIDACPTEAILPNNTVDGSKCISYLTIELRDAIPSEFKDKTDNWMFGCDVCQDVCPWNRFSKPHSEPLFAPQEDLLEMTKRDWEEITQETFSKVFKKSAVKRTKYAGLQRNISFLKK

SEQ ID NO: 81503 - protein, 311 aa, Tenacibaculum jejuense
  misc_feature (1)..(311): tr|A0A238UED4|A0A238UED4_9FLAO Epoxyqueuosine reductase OS=Tenacibaculum jejuense OX=584609 GN=queG PE=3 SV=1
MKKTAEYSQFIKKEAKRLGFMSCGIAKADFLEEEAPRLETWLKNGFHGEMHYMENHFDKRLDPRLLVEGAKSVISLSYNYFPEEVQNSDSYKLAKYAYGEDYHHVIKNKLFELLESLREEIGEINGRCFVDSAPVMERSWAEKAGLGWNGKHTLLIQKQQGSFFFLAELIIDLELEYDHPFETDHCGKCTRCIDACPTDAILPNNQIDGSKCISYLTIELRDNIPSQFKENMEDWMFGCDICQDVCPWNRFSKPHSEPLFNPKENLLGLEKRDWEELTQETFSKVFKKSAVKRAKFKGLTSTIDFIKKTTP

SEQ ID NO: 81504 - protein, 307 aa, Tenacibaculum litoreum
  misc_feature (1)..(307): tr|A0A427SG98|A0A427SG98_9FLAO Epoxyqueuosine reductase OS=Tenacibaculum litoreum OX=321269 GN=queG PE=3 SV=1
MNKKQQYSNFIKTQAKRLGFLGCGIAKADFLEEEAPRLEQWLQNGYHGEMRYMENHFDKRLDPRLLVDGAKSVISLSYNYFPPEVQQEGGYKISKYAYGQDYHHIIKDKLRELLQLINDEIGEVSGRCFVDSAPVLERAWAQKSGLGWNGKHSLLIQKQQGSFFFLAELIIDLELEYDEPFKTDHCGSCTRCIDACPTQAILPNNTVDGSKCISYLTIELKDAIPSEFKGKMQDWMFGCDVCQDVCPWNRFSQPHEESLFTPQENLLQMNKRDWQELTQETFSKVFKKSAVKRTKFSGLLRNIDFIK

SEQ ID NO: 81505 - protein, 308 aa, Tenacibaculum lutimaris
  misc_feature (1)..(308): tr|A0A420E5A0|A0A420E5A0_9FLAO Epoxyqueuosine reductase OS=Tenacibaculum lutimaris OX=285258 GN=queG PE=3 SV=1
MNQKLQYSNFIKEQAKRLGFLGCGIAKADFLEEEAPRLEKWLQNGYHGEMHYMENHFDKRLDPRLLVDGAKSVISLSYNYFPSEVQQEGSYKISKYAYGQDYHHIIKDKLRELLQLINDEIGEVSGRCFVDSAPVMERAWAQKSGLGWNGKHSLLIQKQQGSFFFLAELIIDLELEYDKPFKTDHCGSCTRCIDACPTQAILPNNTVDGSKCISYLTIELKDAIPSEFKGEMQDWMFGCDVCQDVCPWNRFSQPHEESLFAPQENLLQMNKRDWQELTQETFSKVFKKSAVKRTKFSGLLRNIDFIKQ

SEQ ID NO: 81506 - protein, 308 aa, Tenacibaculum maritimum
  misc_feature (1)..(308): tr|A0A2H1EEB3|A0A2H1EEB3_9FLAO Epoxyqueuosine reductase OS=Tenacibaculum maritimum NCIMB 2154 OX=1349785 GN=qu eG PE=3 SV=1
MLKKEDYAQFIKEQAKRLGFLDCGIAKATFLEEEAFGLEQWLANGFHGEMHYMENHFDKRLDPRLLVDGAKSVISLSYNYYPPKVQKEDSYKISKYAYGEDYHQVIKTKLRELLSLIHDEIGEVSGRAFVDSAPVLERAWAKKTGLGWTGKNTLLIQKQQGSFFFLAELIIDLELAYDDPFVTDHCGRCTRCIDACPTNAILPNSTVDGSKCISYVTIELKDQIPASFKDKMEGWMFGCDICQDVCPWNRFSKAHSEPLFSPKEHLLEMTKRDWEEVTEETFRKVFKKSPVKRTKFSGLTRNIRFLKE

SEQ ID NO: 81507 - protein, 307 aa, Tenacibaculum mesophilum
  misc_feature (1)..(307): tr|A0A1M5DG72|A0A1M5DG72_9FLAO Epoxyqueuosine reductase OS=Tenacibaculum mesophilum OX=104268 GN=queG PE=3 SV= 1
MNKKQQYSNFIKAQAKRLGFLGCGIAKADFLEEEAPRLEQWLQNGYHGEMHYMENHFDKRLDPRLLVDGAKSVISLSYNYFPSEVQQEGSYKISKYAYGQDYHHIIKDKLRELLQLINDEIGEVSGRCFVDSAPVLERAWAKKSGLGWNGKHSLLIQKQQGSFFFLAELIIDLELEYDDPFKTDHCGSCTRCVDACPTQAILPNNTVDGSKCISYLTIELKDAIPSGFKGEMQDWMFGCDVCQDVCPWNRFSQPHKESLFTPQENLLQMTKRDWQELTQETFSKVFKKSAVKRTKFSGLLRNIDFIK

SEQ ID NO: 81508 - protein, 309 aa, Tenacibaculum skagerrakense
  misc_feature (1)..(309): tr|A0A4R2P2C9|A0A4R2P2C9_9FLAO Epoxyqueuosine reductase OS=Tenacibaculum skagerrakense OX=186571 GN=queG PE=3 SV=1
MKKIQQYSNLIKRHAKRLGFLDCGIAKADFLEKEAPRLESWLQNNYHGEMQYMENHFDKRLDPRLLVEGAKSVISLSYNYFPEEHQQKDAYKIAKYAYGEDYHHVIKNKLFELLECLREDIGEINGRCFVDSAPVLERAWAERSGLGWNGKHTLLIQKKQGSFFFLAELIIDLELEYDAPFTTDHCGKCTRCIDACPTEAILPNNNIDASKCISYATIELRDNIPVTFKDKMEDWMFGCDICQDVCPWNRFSKSHNEPLFSPKSPMLEMNKRDWEELTEETFKKVFKKSAVKRTKFTGLTRNINFIKEK

SEQ ID NO: 81509 - protein, 311 aa, Tenacibaculum sp.
  misc_feature (1)..(311): tr|A0A354GF21|A0A354GF21_9FLAO Epoxyqueuosine reductase OS=Tenacibaculum sp. OX=1906242 GN=queG PE=3 SV=1
MILGGSLKNKYRNFIKEQAKRLGFLSCGIAKAEFLEEEAPRVEKWLKKGYHGKMHYMENHFDKRLDPRLLVEGAKSVISLSYNYFPENQQKSKEYKLSKYAYGQDYHYVIKDKLKELLQLINDEIGEVSGRCFVDSAPVLERSWAERSGLGWNGKNSLLIQKQEGSFFFLAELIVDIELSYDYPFQTDHCGSCTRCIDACPTQAILSNSTVDGSKCISYLTIELKDAIPNEFKNKTEGWMFGCDICQDVCPWNRFSKPHSEPLFNPHKELLEMDTRDWQELTQETFGKIFKKSAVKRTKFSGLQRNIKFLQ

SEQ ID NO: 81510 - protein, 309 aa, Tenacibaculum sp.
  misc_feature (1)..(309): tr|A0A2K8VFN2|A0A2K8VFN2_9FLAO Epoxyqueuosine reductase OS=Tenacibaculum sp. SZ-18 OX=754423 GN=queG PE=3 SV=1
MKKARQFSKLIKKHASYLGFLDCGIAKADFLEKEAPRLETWLQNNYHGQMQYMENHFDKRLDPRLLVEGAKSVISLSYNYYPEQIQEKNSYKVAKYAYGEDYHHVIKSKLFALLEFLREEIGNINGRCFVDSAPVLERAWAERAGLGWNGKHTLLIQKKQGSFFFLAELIIDLELEYDQPFTTDHCGSCTRCIDACPTDAILPNNSIDASKCISYATIELKDNIPLTFKDKMEDWMFGCDICQDVCPWNRFSKPHNQPLFSPKDSMLEMDKRDWQELTEETFKKVFKKSAVKRTKYAGLTRNISFLKEK

SEQ ID NO: 81511 - protein, 297 aa, Tenericutes bacterium
  misc_feature (1)..(297): tr|A0A1V5HR77|A0A1V5HR77_9BACT Epoxyqueuosine reductase OS=Tenericutes bacterium ADurb.BinA124 OX=1852921 GN=q ueG PE=4 SV=1
MKRHEQINHPFVGVIAKESYPHQEVFKPYPLVKSVVVALFPYSNQNKLAPKGTYLPAKMFYGRDYHLVVKDKLQEFVVKWELPDAVIGVDTSPLDERLCAYLAGLGTFGDHNLLINPTLGTFFAIGTIMTSAVFHEYQQPIAELCTHCGACLKACPTQALTGGFHKERCLSNLSQKASSDFSLYDLMHHTCYGCDLCQDACFYNSHPDYSLPELAWDGLSVLTWEGFLQLDAKQYFDYYRDKSWSWIAYERMLRNLMVLRHHDQALSEQEVIQLATKTTKPWFLKHLQYLRGQHGKS

SEQ ID NO: 81512 - protein, 311 aa, Tenericutes bacterium; identical to SEQ ID NO: 73966
  misc_feature (1)..(311): tr|A0A1G3X388|A0A1G3X388_9BACT 4Fe-4S ferredoxin-type d omain-containing protein OS=Tenericutes bacterium RIFOX YB2_FULL_36_25 OX=1802357 GN=A2308_06755 PE=4 SV=1

SEQ ID NO: 81513 - protein, 412 aa, Tengunoibacter tsumagoiensis
  misc_feature (1)..(412): tr|A0A401ZWX9|A0A401ZWX9_9CHLR Epoxyqueuosine reductase OS=Tengunoibacter tsumagoiensis OX=2014871 GN=queG PE= 4 SV=1
MLETQTIKDYAYSLGFDLVRVTTALPFREANQAIKDRVSRGYFAGLPWFSAERADVSCDPTALLPEAQSIIALGMCYLTEQPDEGGPLQGRISRYAWGEDYHDLIKPKLQQFTTWINEAVQERPGELPGERLETRLFVDTGRMVDRAVAQRAGLGWYGKNTNILTKGWGSWVFLAEIVTNLPLIPDEPLKSNCGNCEICLHACPTGALPHPYELDSTRCISFLTIELKGSIPIELRPLMGNLIFGCDICQEVCPVNQVAERRLGLRDEQGAPLIGLTTIKRRSTDKPAFQGRTEFQTRPPIGTTPELIPLLALTEEEFRLRFRHSPIKRTKRRGFLRNVCVALGNSGDRSAVPALRLALQDEEPLIRGHAAWALGRLGGDEALQALQAAMAQEADQEVRQEVRYALSLLNAL

SEQ ID NO: 81514 - protein, 379 aa, Tenuibacillus multivorans
  misc_feature (1)..(379): tr|A0A1H0ETZ6|A0A1H0ETZ6_9BACI Epoxyqueuosine reductase OS=Tenuibacillus multivorans OX=237069 GN=queG PE=3 SV =1
MNVQQLKEELIAYSKEIGIQKIGFASTDTFETLKQRLVVQQSLKFQSGFEKGSIDERTTPTQLMPKAQSIISIALAYPSRMKDAPKSKKSDRRGIFARASWGKDYHDVLREKLNLLGEFLQEKMDGVAYKAMVDTGELSDRAVAERAGVGFVGKNCALITEEYGSWVYLGELVTNLPFEPDEPIEEGCGDCNICVDACPTGALVQGGQLNAQRCIAYQSITKSFLPDEFRTKLGNRLYGCDTCQLVCPKNKGMDFHLHPEMEPDPELAKPKLVPLLTISNREFKERFGYMAGSWRGKKPIQRNTIVALAHYKDETAVDTLADLMVNDPRTVIRGTAAWAIGKIGREDAHEMIGQAKEHEEDEDVLYEMEKGLEFLSQHI

SEQ ID NO: 81515 - protein, 395 aa, Tepidamorphus gemmatus
  misc_feature (1)..(395): tr|A0A4R3M706|A0A4R3M706_9RHIZ Epoxyqueuosine reductase OS=Tepidamorphus gemmatus OX=747076 GN=queG PE=3 SV=1
MSISTSEHRGYAAQRLKSALIDAALAAGFDIVRVTAPDAAPMAGPRLRAFLDAGQHGDMDWMAATADRRSEPRALWPEVRSVVMLGMNYGPQADPLEGLAQRDRGLISVYARGDDYHDVIKGRLKTVAGAFAARAGAEVKVFVDTAPVMEKPLAEAAGIGWQGKHTNLVSRRFGSWLFLGAIFTTAELPRDGSERDHCGSCRACLDICPTDAFPAPYRLDARRCISYLTIELKGPIPHPLRPAIGNRIYGCDDCLAVCPWNKFAQAGREARLAARAELDLPSLAELAKLDDAAFRSLFRKSPVKRIGRDRFVRNVMIAIGNSGDPALTACLIERLDDAAALVRGAAVWALSRLAETGQFAALAARHGAAEGDPDVRAEWRRGLTAGAESRSKCAS

SEQ ID NO: 81516 - protein, 344 aa, Tepidanaerobacter acetatoxydans
  misc_feature (1)..(344): tr|F4LWE2|F4LWE2_TEPAE Uncharacterized protein OS=Tepid anaerobacter acetatoxydans (strain DSM 21804 / JCM 1604 7 / Re1) OX=1209989 GN=TEPIRE1_1723 PE=4 SV=1
MDIKQDIIYFSKEIGLDKVGFTTAKPFLQEKEVLLERKAKNLISPFEEQDIEIRCDPEKSLPGAKTIICFAMGYLIYSQSSLEAVSSHIESRSEGKISRYAQVKDYHVILSEKLRHVVDFISKKRPGRFKIIVDTGSLIEKAAARRAGLGWIGENTCFFTPELGSWIFLGEILTDIEIEPDSHIESNCNGCGSCVSACPTGALMAPFQINPYRCLSYITQIRGHIPEEFRKALGDRVFGCDTCQEVCPCNQKVKIPNHKEFIPDIPAERDLEKLAILSKQDFNMMFNNIAAGWRGRNVIRRNAVCALGNLRSENTRNLLKVLTKDPSEIVREQARWSLQNYLCR

SEQ ID NO: 81517 - protein, 342 aa, Tepidanaerobacter syntrophicus
  misc_feature (1)..(342): tr|A0A0U9HGL3|A0A0U9HGL3_9THEO Epoxyqueuosine reductase OS=Tepidanaerobacter syntrophicus OX=224999 GN=TSYNT_9 193 PE=4 SV=1
MNLKSEIIRFSKEIGIDKVGFASADPFLKEKEILQERKRKQLISPFEEQDMEARCNPQRLLDGAKTIICFAIGYLIEPSVKKEFSSVDIPEGEISKYAQIKDYHNVLNEKLIRIADFISEKEPGKFKIMVDTGALIERAAAARAGIGWIGENTCLFTPEFGSWVFVGEILTDIEIESDDPAETYCDKCGRCIAVCPTGALIEPFKLNPHKCLSYITQMRGQIPKEFRETLGNMIFGCDICQDVCPYNKDVNIPNHQEFFPDVPLEKNLEKLAILSKQDFIRMFKPTAAGWRGRNIIRRNAICALGNIRYKGAIKTLEYLTTDPSEIIREQASWSLRQIIQSV

SEQ ID NO: 81518 - protein, 381 aa, Tepidibacillus decaturensis
  misc_feature (1)..(381): tr|A0A135L1N7|A0A135L1N7_9BACI Epoxyqueuosine reductase OS=Tepidibacillus decaturensis OX=1413211 GN=U473_0109 0 PE=4 SV=1
MNEKLKQKVIDYAQQIGIDKIGFTSAEPFRELEKILHRHRELGYESGFEEKDIDKRVNPKFTLKNAKSIIAIAIAYPSKIPQPPKGVEGEYRGFVARLAWGIDYHLILQEKLNQLGIYLKQMVPDAEYVAMTDTGVLSDHAVAERAGIGWIGKNSLLITPEFGSYVYLGEMITNISFPEDHPMENQCGDCTRCLDACPTQAIVQAGQVNAKRCLSYITQRKDMLEEELMEKLGNRLYGCDTCQIVCPKNKGINFGHQEKTLPNPELAKPLLKPLLTISNKEFKETWRQTAAAWRGKKPIQRNVIIALAHFKDKTALPLLKDLLINDERPVIRQTSAWSLGKIGGKEVEEILLQAKIKEKDDKVLQEIIRSLNKLANEGILS

SEQ ID NO: 81519 - protein, 386 aa, Tepidibacillus fermentans
  misc_feature (1)..(386): tr|A0A4R3KJ45|A0A4R3KJ45_9BACI Epoxyqueuosine reductase OS=Tepidibacillus fermentans OX=1281767 GN=EDD72_10417 0 PE=4 SV=1
MNQELKKQLIKYAKKIGIDKIGFTSADPFPELKEILIRHRELGYESGFEEKDLEKRTDPKLSLSDAKSMIAIAIAYPSKIETPPKSTKGEYRGFVSRSAWGIDYHLILHKKLNHLGQFLKELVPSAEYVVMSDTGALSDHAVAERAGIGWIGKNSLLITPEFGSYVYLGQIITNIFFPEDHPMENQCGDCTRCIDACPTQAIVNPYQVNAKQCLSFITQRKDMLEEHWMEKLGNRIYGCDTCQIVCPKNKGINPIHQELTLPNPELAKPLLKPLLTISNKEFKQTWGQTAAAWRGKKPLQRNAIIGLAHFKDESSLPLLKKILEEDERPMIRQTTAWAIGKIGGEKAKEILESAKFKEKDGKVFNQIIKSLKSLANEDILDSPCKK

SEQ ID NO: 81520 - protein, 296 aa, Tepidibacter formicigenes
  misc_feature (1)..(296): tr|A0A1M6N476|A0A1M6N476_9FIRM Epoxyqueuosine reductase OS=Tepidibacter formicigenes DSM 15518 OX=1123349 GN=S AMN02744037_01151 PE=4 SV=1
MKKKLKDFCKSLGIENVGIAHIGPYKELEEILKDRINKGYYTGLEEEDIKKRVDPRITMENVKSIIVCLFPYFSGNVKKTNISKYTYSIDYHIIVKNKLENICSYLKDNINDFEYKIFVDTGPLVDRYLAKISGVGYFGINNNIITDKYGSYVSIGYILSNYPFEIDKPIDKTCIKCGLCIKKCPGGAILGNFEINPNKCLSFVTQKKGELSQEEKEMFIKNPSVFGCDICQDVCPHNKRVEVTNIEEFKNDLIYKLEYEEIKNISNREFKRRYGNRAFSWRGKSIILRNLEIINS

SEQ ID NO: 81521 - protein, 392 aa, Tepidibacter formicigenes
  misc_feature (1)..(392): tr|A0A1M6Q642|A0A1M6Q642_9FIRM Epoxyqueuosine reductase QueG (Queuosine biosynthesis) OS=Tepidibacter formicig enes DSM 15518 OX=1123349 GN=SAMN02744037_01751 PE=4 SV =1
MKKSKDEIITYDDLVRKWNDEKKQMIEQTSEDRIYRWNPDGMYNIYENTGKAITDNNPYVNLVDIEEFDLIIENEPYPVAPPPMNKGKNKEKSKSAKFFGLMHKEITGDSMYYIKDQRISMERIENEAKGINIPKPAKEKEKDLLKVKKEIFEYAKSLGFASVGVTKVDRRYVSMGVDDEIIFDTIILLGYEMPKDVMKHYPNPKGELGAFGAYTGCARNVHKVADFIRTKGYDCRARGWDGSIKYSPHAVNAGLGNYSTYGVCVTPEAGTRLKYCSILIDAELPLDKPKDFNIEEFCSRCRMCQKSCPSNSIPKEEKKYKGSIKRQTRFSTCLELMTTQKECLKCVRVCPFSMIGYEQCMESLPQYYMYNLERDELDKGFLLSKKEGEHNE

SEQ ID NO: 81522 - protein, 297 aa, Tepidibacter thalassicus
  misc_feature (1)..(297): tr|A0A1M5RQE2|A0A1M5RQE2_9FIRM Epoxyqueuosine reductase OS=Tepidibacter thalassicus DSM 15285 OX=1123350 GN=SA MN02744040_01464 PE=4 SV=1
MKEKLKYFCKNHLNIESVGIAHIGPYKELEEILKDRIDKGYYTGLEEKDIKKRVDPRITMENVKSIVVCLFPYFSGNVKKSNISKYTYSIDYHIIIKNKLEYICEFLKNNIDNFEYKVFVDNGPLVDRYLANISGLGYFGINNNIITEKYGSYVCIGYILCNYPFEADNPIDKTCIKCGLCIEKCPGGAILGNFEINPNKCLSFITQKKGELSKEEKEMFVKNPSVFGCDVCQDVCPHNKNVEFTNIEEFKSNLIYNLDYDEIKNISNREFKRRYNDRAFSWRGKSVILRNLEIIKG

SEQ ID NO: 81523 - protein, 388 aa, Tepidicaulis marinus
  misc_feature (1)..(388): tr|A0A081BBE4|A0A081BBE4_9RHIZ Epoxyqueuosine reductase OS=Tepidicaulis marinus OX=1333998 GN=queG PE=3 SV=1
MTTPARPETTEEMTGEKSAELVRRIGEAAREAGFDAVRLVRAVDVPDRTEFLRGWVGAGRHGEMGWMEETAARRGHPSSLWPDVKSIIVLGQNYGPEENPLPDLEKKEQGTVSVYARHKDYHDLIKKRLKRIARWLVAETGCELKVFVDTAPVMEKPLAEAAGLGWQGKHTNLVSREFGSWLFLGSIFTTLDLPADAPEKDHCGSCRACLDICPTKAFPAPYELDARRCISYLTIEHKGSIPLEFRKAMGNRIYGCDDCLAACPWNKFAAQTGEVAFHPRGALKAPLLSELMELDDAAFREMFSGSPVKRIGRNRFLRNVLIAAGNSGAPSLLAPVRARLEDDASEVRAMAVWALGELAPAEEIKTLKARYLPHEREEAVRAEWARLD

SEQ ID NO: 81524 - protein, 367 aa, Tepidicella xavieri
  misc_feature (1)..(367): tr|A0A4R6UDC2|A0A4R6UDC2_9BURK Epoxyqueuosine reductase OS=Tepidicella xavieri OX=360241 GN=queG PE=3 SV=1
MFDGVQFVSQIRAWARELGFSQIGVAGVDLRDAEPGLLAWLQAGFHGEMAYMASHGLKRARPQELLPGTLSVVTASMDYLPRQRGSDWCEQEWARLRRPQEAVISMYARGRDYHKVLRQRLQKLAERMQQALDAQRQGDGFTYRAFTDSAPVMEVELAQRSGIGWRGKHTLALRRDGGSLFFLGEIFVNVALPPTPAVSAHCGSCSACLTACPTGALVGPYRLDARRCISYLTIEHAGPIPLALRPLMGNRIYGCDDCQLACPWNKFARRSPLSDFDERAGFSGALLVEYLSWTEAEFLRRTEGSPIRRIGHERWLRNVAVALGNALASGLPAAEQAQALAALHARASHPSPLVREHVCWAMAQAGR

SEQ ID NO: 81525 - protein, 372 aa, Tepidimicrobium xylanilyticum
  misc_feature (1)..(372): tr|A0A1H2ZYR8|A0A1H2ZYR8_9FIRM Epoxyqueuosine reductase OS=Tepidimicrobium xylanilyticum OX=1123352 GN=SAMN056 60923_01918 PE=4 SV=1
MNLKQFIVDKSKALNIDLIGFTDCEPLFDLEDYLVLRQRKSMETEFEEKDLKKRINPKLIFPACKTIIVIGLSYNVDYNENPDYDLKGILSKSSWGLDYHRVLKDKFEQLIAEIKRIKDFEYKYYVDTGPLIDRELANRAGIGYYGKNCSIINDEYGSFIFIGYMLTNLELDVEHSKKESKCGNCSLCIDYCPTKALERPYRVNPKKCISYLTQTKNWIPYELRDKMGVKIYGCDTCQKVCPKNNGVKKSYHEEFIPWTTMGYINIEELLCISNKQFKARYGDMAGSWRGKNILKRNGIIALANMKDKGNIKLLEPLLKDPNPMIRECAAWAIQKLDCNYGKAVIEKRIRIENDEDTKKKMRNLLNNFLTNL

SEQ ID NO: 81526 - protein, 379 aa, Tepidimonas alkaliphilus
  misc_feature (1)..(379): tr|A0A554WA24|A0A554WA24_9BURK Epoxyqueuosine reductase OS=Tepidimonas alkaliphilus OX=2588942 GN=queG PE=3 SV =1
MEQPAPATPQPAAAAQLWQRLRGWARELGFSQIGVADIDLSRAEPGLLAWLREGHHGTMDYMARHGLKRARPAELVPGTVSVITARMDYLPRTAPPDWREREWARLRQPHEAVVSLYARGRDYHKVLRRRLQTLAERLQSAWAELEPRQPAPTCRVFADSAPVLEVELAARSGLGWRGKHTLLLSRQAGSMFFLGEIFIDRWLPRTLPESPHCGRCRACLEVCPTQAIVAPYRLDARRCISYLTIEHAGSIPPALRPLIGNRIYGCDDCQLVCPWNKFAQRSALPDFDPRHQLDRATLLELWSWTAADFAQRTEGSAIRRIGYERWRRNLAVALGNARRAAQAGGAATAADAIAQALRVALQEGGDTPMVREHILWALD

SEQ ID NO: 81527 - protein, 378 aa, Tepidimonas aquatica
  misc_feature (1)..(378): tr|A0A554WVK7|A0A554WVK7_9BURK Epoxyqueuosine reductase OS=Tepidimonas aquatica OX=247482 GN=queG PE=3 SV=1
MDRAAPTPPADAAHDWLARIEGWARELGFSQIGVADVDLSSAEPGLQAWLAAGYHGTMDYMARHGLKRARPAELVPGTVSVITARMDYLPRSAASDWRAVEWARLHDGRQACVSLYARGRDYHKVLRQRLQRLAQRLQQAWADAYPDDAPLAYRVFTDSAPVLEVELARRSGLGWRGKHTLLLSRQAGSMFFLGEIFIDRWLPRSAPTDGHCGRCRACLDVCPTGAIVAPYRLDARRCLSYLTIEHAGAIPVELRPALGNRIYGCDDCQLVCPWNKFAQRSPLPDFDARPALADATLLQLWAWDATAFECHTEGSPIRRIGYARWRRNLAVALGNARRSALQRGDGGYAQAVQQALHDALRHGGDDALVREHIVWALG

SEQ ID NO: 81528 - protein, 364 aa, Tepidimonas fonticaldi
  misc_feature (1)..(364): tr|A0A1A6DSL5|A0A1A6DSL5_9BURK Epoxyqueuosine reductase OS=Tepidimonas fonticaldi OX=1101373 GN=queG PE=3 SV=1
MVERIRGWAHALGFSQIGVSGVDLSSAEPGLQAWLAAGFHGGMAYMARHGLRRARPAELVPGTLSVITARMDYLPRGAPPDWRDREWARLADPDAATVSLYARGRDYHKVLRRRLQQLAQRIEAELAGPAGGDARPVLRPFTDSAPVLEVELASRSGLGWRGKHTLALHRDAGSMFFLGEIFIDRALPPTPPVAAHCGRCRACLDVCPTGAIAAPYRLDARRCISYLTIEHDGPIPVPLRRALGNRIYGCDDCQLVCPWNKYARRSPLPDFDAREALAAPRLLDLWAWSEADFLRHTEGSAIRRIGYERWRRNLAVALGNARAAARARGDGAAQAALAAALATARDDPATPPLVREHIDWALLD

SEQ ID NO: 81529 - protein, 396 aa, Tepidimonas fonticaldi
  misc_feature (1)..(396): tr|A0A554XPL5|A0A554XPL5_9BURK Epoxyqueuosine reductase OS=Tepidimonas fonticaldi OX=1101373 GN=queG PE=3 SV=1
MDFLQWRGMQPPPALGPQPDLPSEPAGASGEGLVERIRGWAHALGFSQIGVSGVDLSSAEPGLQAWLAAGFHGGMAYMARHGLRRARPAELVPGTLSIITARMDYLPRGAPPDWRDREWARLADPDAATVSLYARGRDYHKVLRRRLQQLAQRIEAELAGPAGGDARPVLRPFTDSAPVLEVELASRSGLGWRGKHTLALHRDAGSMFFLGEIFIDRALPPTPPVAAHCGRCRACLDVCPTGAIAAPYRLDARRCISYLTIEHDGPIPVPLRRALGNRIYGCDDCQLVCPWNKYARRSPLPDFDAREALAAPRLLDLWAWSEADFLRHTEGSAIRRIGYERWRRNLAVALGNARAAARARGDGAAQAALAAALATARDDPATPPLVREHIDWALLD

SEQ ID NO: 81530 - protein, 378 aa, Tepidimonas ignava
  misc_feature (1)..(378): tr|A0A4R3LIW8|A0A4R3LIW8_9BURK Epoxyqueuosine reductase OS=Tepidimonas ignava OX=114249 GN=queG PE=3 SV=1
MDRAAPTPPADAAPDWLARLGAWARELGFSQIGVADVDLSSAEPGLLAWLAAGHHGTMAYMARHGLKRARPAELVPGTVSVITACMDYLPPGGRDDWRAAEWARLHDARQACVSLYARGRDYHKVLRQRLQRLAQRLQQAWAAAYPDQAALAYRVFTDSAPVLEVELARRSGLGWRGKHTLLLSRQAGSMFFLGEIFIDRWLPRTAPTDGHCGRCRACLDVCPTGAIVAPYRLDARRCLSYLTIEHAGAIPVELRPALGNRIYGCDDCQLVCPWNKYARRSPLPDFEPRPALADATLLQLWAWDAAAFERHTEGSPIRRIGYARWRRNLAVALGNARRAALARGDTGHAQAVQQALQQALAQGDDDPLVREHIAWALG

SEQ ID NO: 81531 - protein, 379 aa, Tepidimonas sediminis
  misc_feature (1)..(379): tr|A0A554WPB1|A0A554WPB1_9BURK Epoxyqueuosine reductase OS=Tepidimonas sediminis OX=2588941 GN=queG PE=3 SV=1
MEPPPPGSLEAAAAHALLRRLRGWAQELGFSQIGVAGIDLQDAEAGLLAWLREGCHGTMDYMARHGCKRARPAELVPGTVSIITARMDYLPAAAAPDWRAREWGRLHDPQAAVVSLYARGRDYHKVLRQRLQKLAERLRAAWVELQPHAPPPACRVFTDSAPVLEVELAARSGLGWRGKHTLLLSRQAGSTFFLGEIFIDRWLPRTPSESSRCGRCRACLDACPTQAIVAPYRLDARRCISYLTIEHAGPIPPALRPLIGNRIYGCDDCQLACPWNKFARRSALPDFEPRHALDAATLLELWRWDTAAFERRTEGSAIRRIGHERWRRNLAVALGNARRALMASGDQATAQAVAHALVAALQTGADTPLVREHVAWALG

SEQ ID NO: 81532 - protein, 391 aa, Tepidimonas sp.
  misc_feature (1)..(391): tr|A0A554X7L6|A0A554X7L6_9BURK Epoxyqueuosine reductase OS=Tepidimonas sp. SPSP-6 OX=2267262 GN=queG PE=3 SV=1
MQACTRPESAATANADAVAHHPDVREGAALLQHIRQWARALGFSQIGVADVDLSSAEPALQAWLQAGFHGDMDYMARHGMRRARPAELVPGTLSVITARLDYLPRDAPPDWRAREWARVADPDAAVVSLYARGRDYHKVLRQRLQRLADRIEAALTEAGSPPPRQRPFTDSAPVWETELAARSGLGWRGRHTLVLHRAAGSLFFLGEIFIDRWLPRTAATSAHCGQCRACLDICPTQAIVAPYRLDARRCISYLTIEHPGPIPEPLRPALGNRIYGCDDCQLICPWNKYAQRSTLPDFDERAPFQAPRLLTLWAWSEAAFLHHTEGSAIRRIGYLRWRRNLAVALGNARRAARMRGDADTAAAIAVALQAVWDDAATPALVREHIAWALAQ

SEQ ID NO: 81533 - protein, 399 aa, Tepidimonas taiwanensis
  misc_feature (1)..(399): tr|A0A554X6S3|A0A554X6S3_9BURK Epoxyqueuosine reductase OS=Tepidimonas taiwanensis OX=307486 GN=queG PE=3 SV=1
MATAAPTPPRAAGAGGAIAAKVPGTPPTTASHIPLLDRIRAWARDLGFSQIGVSGVDLASAEPGLLAWLAAGFHGQMDYMARHGLRRARPAELVPGTVSVITVRMDYLPRNAPPDWRAREWARLGDPHAATVSLYARGRDYHKVLRQRLQRLAERIDAALRAEDPAGPPLGYRVFTDSAPVLEVELAARAGLGWRGKHTLLLQRDAGSMFFLGEIYVDRALPPTPPAPAHCGRCRACLDVCPTQAIVAPYRLDARRCISYLTIEHDGPIPPALRRAIGNRIYGCDDCQLVCPWNKYARRSALSDFDVRAPFAAPRLLALWAWDEADFLRHTEGSAIRRIGYGRWRRNLAVALGNARAAARDSGDTAAAAAIAAALAPARDDPATPPLVREHVAWALEAP

SEQ ID NO: 81534 - protein, 152 aa, Tepidimonas thermarum
  misc_feature (1)..(152): tr|A0A554X9A7|A0A554X9A7_9BURK Epoxyqueuosine reductase OS=Tepidimonas thermarum OX=335431 GN=queG PE=4 SV=1
MAPYRLDARRCISYVTIEHDGPIPEPLRRPMGNRIYGCDDCQLVCPWNKYARRSPLPDFDARAPLAAPRLLELWAWTEADFERLTEGSAIRRIGYARWRRNLAVALGNARAAARARGDTASAAAITAALASACNDPDPTGWVREHIVWALEG

SEQ ID NO: 81535 - protein, 351 aa, Tepidiphilus thermophilus
  misc_feature (1)..(351): tr|A0A0K6IV70|A0A0K6IV70_9PROT Epoxyqueuosine reductase OS=Tepidiphilus thermophilus OX=876478 GN=queG PE=3 SV =1
MEPIDWAVRKRAIAEAAARLGFSAMRVVEPDLSACEAGLLAWLEAGFHGEMDYMRRHGLLRARPAELVPGTVRVISLRFPYWPADAAPAQEVLADPGLGYVSRYALGRDYHKAVRARLARLVAFMEAMGPHRGRVFVDSAPVMEVALAERAGLGWRGKHTLLLNREEGSFFFLGEIFTDWPLPVDAPIEAHCGRCTRCLDLCPTRAIVAPYRLDARRCISYLTIEHPGPIPEVLRPAIGNRIYGCDDCQLVCPWNRFARRVDLPEFTPRHGLDAPMLTSLFAWSEGEFLEKFAGSPIRRIGWERWLRNLAVALGNAPTSPEVVAALMARREHPSALVREHVAWALARHGVS

SEQ ID NO: 81536 - protein, 382 aa, Terasakiispira papahanaumokuakeensis
  misc_feature (1)..(382): tr|A0A1E2V5Y1|A0A1E2V5Y1_9GAMM Epoxyqueuosine reductase OS=Terasakiispira papahanaumokuakeensis OX=197479 GN=q ueG PE=3 SV=1
MTQTLSSTQAHALAQEIKTWARELGFSDCGISDIDLDEHETYLERWLAAGYHGEMAWMAHHGHKRSRPDELVPGTLRIISLRLDYLPPEVETTQLLSQPQKAYISRYALGRDYHKLMRKRIAQLAQQIESVAGPYGYRAFVDSAPVLERAVATKAGLGWIGKNAMLIHPKAGSMFFLGELYTDLPLPADSPYPKDHCGKCNACQTGCPTDAFVDDKVLDARRCISYLTIELKSAIPEALRPLMGNRVFGCDDCQLVCPWTRFTRITQEADFHPRHDLDRRDLLDLFLWDEATFLSRTEGSAIRRIGYERWLRNLAVGLGNAPYDPDIVEALTQRLDYPSELVAEHIQWALQQQSHKQSAGLKRIPTEFIPTVSAPSITTKHR

SEQ ID NO: 81537 - protein, 383 aa, Teredinibacter sp.
  misc_feature (1)..(383): tr|A0A509DT66|A0A509DT66_9GAMM Epoxyqueuosine reductase OS=Teredinibacter sp. ISS155 OX=2584524 GN=queG PE=3 S V=1
MTSEAYQSQNIVMAAQNDFTELRNLLNNWAQDLGFQQVGITETGLDEDLVRFREWLAKGYHGSMQWMQENAALREDPSLLVPGAVRVISLRMNYLPDDTHPIKILKSSEKAYISRYSLGRDYHKLIRKRLAQLAKQLEAYCTDNQLFGDAQQRAFVDSAPVLERPYAEKAGLGSTGKHTLIINRDAGSWFFLGEIITNIPLPVDKASKEDLCGECDACLKVCPTDAFPKPYQLDARRCISYLTIENKDAIPLEFREPIGNRVFGCDDCQAICPWNKQAPTTAETDFQPRHELDSSDLLRLFLWSEDEFLKFTEGSAIRRIGYERWLRNLSVGLGNAPKSEKIIEALKMRLASAEGMLHEHFSWALDRQLHFKGMRKRKIKRKP

SEQ ID NO: 81538 - protein, 392 aa, Teredinibacter turnerae
  misc_feature (1)..(392): tr|C5BRI3|C5BRI3_TERTT Epoxyqueuosine reductase OS=Tere dinibacter turnerae (strain ATCC 39867 / T7901) OX=3776 29 GN=queG PE=3 SV=1
MTYISPQNQKTVTALDQTQLNALAELIQLWGREQGFQQIAITDTDLDAEQSRLESWLDKGYHGSMQWLAEHREMRTKPDQLVPGARRVISARMDYLPPDTDQIKVLKSADQAYISRYSLGRDYHKLIRKRLAKIADNIRQHCDAVGIEQRPFVDSAPVMERPLAQKAGLGWVGKHTLLLNPHAGSWFFLGEIFTNLPLPVNNQRHKDQCGTCQACLQICPTDAFPKPYELDARRCISYLTIENKGPIPEEYREPIGNRVFGCDDCQAICPWNKFAKPTCEKDFHPRHGLQNSRLIDLFLWDERTFLKHTEGSAIRRIGYERWLRNLAVGLGNANPSVEVIAALQKKKEVGVSPLVEEHIDWAIHRQQNPRRRRRKIKRTSDTLPVRSAFYSQ

SEQ ID NO: 81539 - protein, 392 aa, Terrabacteria group
  misc_feature (1)..(392): tr|A0A537LIU3|A0A537LIU3_9BACT tRNA epoxyqueuosine(34) reductase QueG OS=Terrabacteria group bacterium ANGP1 O X=2569760 GN=queG PE=4 SV=1
MACGTCSTHACRPDRLTLMDRQLSLDVKACARGLGFDLVGITTADPLPEDGARMAQWVAAGMHGEMDYMSRHMPTAAHPAHVAAGARSIVVVGLAYHWDASEPPSGSLRGRISSYARGTDYHAVMERKLADLSRFLIGRGAGLARYYVDTGPLLDRAVAHRAGLGWFGKNTMLITKAGYGSYVFLGEVLTDLELQPDQPAEGSCGRCRLCLDQCPTGAIVAPFVVDARRCISYLTIELRGWIPRELRPLMQTWVFGCDVCQDVCPHNGLVRQGIHQEFAPRKDVAFPDLVELLHIDEVTYQERFRHSAIKRAKRQGLRRNAAVALGNLRDARAVPSLARALDDDDPLIRGHAAWALGRIADPQAAGVLRARLARESNPPVREEIEFALAGSP

SEQ ID NO: 81540 - protein, 414 aa, Terrabacteria group
  misc_feature (1)..(414): tr|A0A537IWU4|A0A537IWU4_9BACT Epoxyqueuosine reductase OS=Terrabacteria group bacterium ANGP1 OX=2569760 GN=q ueG PE=3 SV=1
MALNLSRSGDLSHGDGVQSAGRRPAGPARPAHADLIHSSLMDHALTLEVKAYAHGLGFDLVGITTADPLPEHGERMAQWVAAGMHGEMEYVSRHAPKAANPAYTAAGARSVVVVGLAYRWDAPAPSPDSLSGRISSYARGTDYHEVMEHRLRDLAGFLSERGAGLARYYVDTGPLLDRAIAHRAGLGWFGKNTMLITKTGHGSYVFLGEILTDLELESDQPAEGSCGRCRICLDQCPTGAIVAPFVVDARRCISYLTIELRGWIPRELRPLMQTWVFGCDVCQDVCPHNALVREGIHQEFAPRKDVAFPDLVELLHIDEAAYQERFRHSAIKRAKRQGLRRNAAVALGNLRDPRAVPALVRALDDEDSIVRGHAAWALGRIAHPQARATLRDRLEQESDPRVREEIEFALTSLS

SEQ ID NO: 81541 - protein, 382 aa, Terribacillus aidingensis
  misc_feature (1)..(382): tr|A0A285P346|A0A285P346_9BACI Epoxyqueuosine reductase OS=Terribacillus aidingensis OX=586416 GN=SAMN05421503 _2498 PE=4 SV=1
MDTEKLKQELIAYSKEIGVDKIRFTTADVFQELKERLKQQQEKNYQSGFEKGTIEERTEPKKLMPSAQSIIAIALAYPSRLPNAPKSTKEEPRGLFCRASWGMDYHEVLRDRLNKLSAFLAERVEGFAYRSMVDTGELSDRAVAERAGIGFSAKNSFVITPEFGSYVYLGEMITNVPFQPDEAVEDSCGSCTKCIDSCPTGALVQGGQLNAQRCIAYLTQTKDFLPDEFRTKIGNRIYGCDTCQLVCPKNKGMNFHLHEEMEPDPEIVKPLLKPLLKMSNKEFKTKFGVISGSWRGKKPIQRNAILTMAHYKTTTAVPDLIELMEKDPRPVIRGTAAWAIGKIGLPEGFEAIKRAVEEEEDAQVREEMEKGLQFEKEYAKAH

SEQ ID NO: 81542 - protein, 382 aa, Terribacillus goriensis
  misc_feature (1)..(382): tr|A0A075LH03|A0A075LH03_9BACI Iron-sulfur cluster-bind ing protein OS=Terribacillus goriensis OX=386490 GN=GZ2 2_04480 PE=4 SV=1
MDTEQLKQELIAYSKKIGVDKIRFTTADVFQELKERLKQQQENNYQSGFEKGTIEERTEPKKLMPSAQSIIAIALAYPSRLPNAPKSTKEEPRGLFCRASWGMDYHEVLRDRMNKLTAFLSERVEGFTYRSMVDTGELSDRAVAERAGIGFSAKNSFVITPEFGSYVYLGEVITNIPFLPDEAVEDSCGTCTKCIDSCPTGALVQGGQLNAQRCIAYLTQTKDFLPDEFRSKIGNRIYGCDTCQLVCPKNKGMDFHLHEEMEPDPEVVKPLLKPLLKMSNKEFKAKFGLISGSWRGKKPIQRNAILAIAHYKTTSAVPDLIELMEQDPRPVIRGTAAWAIGKIGLPEGFDAVRKAMDKEQDDQVIEEMRKGLQFEEEYAETH

SEQ ID NO: 81543 - protein, 382 aa, Terribacillus halophilus
  misc_feature (1)..(382): tr|A0A1G6WFE7|A0A1G6WFE7_9BACI Epoxyqueuosine reductase OS=Terribacillus halophilus OX=361279 GN=queG PE=3 SV= 1
MDAEKLKQELIAYSKTIGVDKIRFTTADVFQELKERLKQQQENNYQSGFEKGTIEERTEPKKLMPSAKSIIAIALAYPSRLPNAPKSTKEEPRGLFCRASWGMDYHEVLRDRLNKLAAFLAERVDGFTYRSMVDTGELSDRAVAERAGIGFSAKNSFVITPEFGSYVYLGEMITNIPFLPDEPVEDSCGTCTKCIDSCPTGALVQGGQLNAQRCIAYLTQTKDFLPDEFRSKIGNRVYGCDTCQLVCPKNKGMDFHLHEEMEPDPEIVKPLLKPLLKMSNKEFKAKFGLISGSWRGKKPIQRNAILAIGHYKSTSAVPDLIELMEQDPRPVIRGTAAWAIGKIGLPEGYEAIRNALVKEREEQVREEMEKGLQFEQQYAETH

SEQ ID NO: 81544 - protein, 382 aa, Terribacillus saccharophilus
  misc_feature (1)..(382): tr|A0A268A8W4|A0A268A8W4_9BACI tRNA epoxyqueuosine(34) reductase QueG OS=Terribacillus saccharophilus OX=36127 7 GN=queG PE=4 SV=1
MDTEQLKQELIAYSKKIGVDKIRFTTADVFQELKERLKQQQENNYQSGFEKGTIEERTEPKKLMPSAQSIIAIALAYPSRLPNAPKSTKEEPRGLFCRASWGMDYHEVLRDRMNKLTAFLSERVEGFTYRSMVDTGELSDRAVAERAGIGFSAKNSFVITPEFGSYVYLGEVITNIPFLPDEAVEDSCGTCTKCIDSCPTGALVQGGQLNAQRCIAYLTQTKDFLPDEFRSKIGNRIYGCDTCQLVCPKNKGMDFHLHEEMEPDPEVVKPLLKPLLKMSNKEFKARFGLISGSWRGKKPIQRNAILAIAHYKTTSAVPDLIELMEQDPRPVIRGTAAWAIGKIGLPEGFDAVRKAMDKEQDEQVLEEMRKGLQYEEEYAEAH

SEQ ID NO: 81545 - protein, 382 aa, Terribacillus saccharophilus
  misc_feature (1)..(382): tr|A0A268HA03|A0A268HA03_9BACI tRNA epoxyqueuosine(34) reductase QueG OS=Terribacillus saccharophilus OX=36127 7 GN=queG PE=4 SV=1
MDAEQLKQELIAYSKEIGVDKIRFTTADVFQELKERLKQQQENNYQSGFEKGTIEERTEPKKLMPSAQSIIAIALAYPSRLPNAPKSTKEEPRGLFCRASWGMDYHEVLRDRMNKLTAFLSERVEGFTYRSMVDTGELSDRAVAERAGIGFSAKNSFVITPEFGSYVYLGEVITNIPFLPDEAVEDSCGTCTKCIDSCPTGALVQGGQLNAQRCIAYLTQTKDFLPDEFRSKIGNRIYGCDTCQLVCPKNKGMDFHLHEEMEPDPEVVKPLLKPLLKMSNKEFKAKFGLISGSWRGKKPIQRNAILAIAHYKTTSAVPDLIELMEQDPRPVIRGTAAWAIGKIGLPEGFDAVRKAMDKEQDDQVLEEMRKGLQFEEEYAESH

SEQ ID NO: 81546 - protein, 382 aa, Terribacillus sp.
  misc_feature (1)..(382): tr|A0A268BLQ6|A0A268BLQ6_9BACI tRNA epoxyqueuosine(34) reductase QueG OS=Terribacillus sp. 7520-G OX=2025389 G N=queG PE=4 SV=1
MDAEKLKQELIAYSKTIGVDKIRFTTADVFQELKERLKQQQEKNYQSGFEKGTIEERTEPKKLMPSAQSIIAIAMAYPSRLPNAPKSTREEPRGLFCRASWGMDYHEVLRDRLNKLAAFLAERVEGFSYRSMVDTGELSDRAVAERAGIGFSAKNSFVITPEFGSYVYLGEMITNIPFLPDEPVEDSCGTCTKCIDSCPTGALVQGGQLNAQRCIAYLTQTKDFLPDEFRSKIGNRIYGCDTCQLVCPKNKGMDFHLHEEMEPDPEIVKPLLKPLLKMSNKEFKAKFGLISGSWRGKKPIQRNAILAIAHYKSSSAVPDLIELMERDPRPVIRGTAAWAIGKIGLPEGFEAIRNAMEKEQDEQVREEMEKGLQFEQQYAQTH

SEQ ID NO: 81547 - protein, 378 aa, Terriglobus albidus
  misc_feature (1)..(378): tr|A0A5B9ELZ9|A0A5B9ELZ9_9BACT tRNA epoxyqueuosine(34) reductase QueG OS=Terriglobus albidus OX=1592106 GN=que G PE=4 SV=1
MGNPVTSIGSELRDALVARALECGFSAAGIAAVPEDNPDLRRRYESWVDQGYAGEMGYLQRRDEAGQLLRSSLRVAIPWARSVIVCSLNYNAAHPKSIDPAPEGAGWIARYAWSGRPEGDTLSPTDYHDVLLSKLRGVEEFLREHAGPDLEVRSYVDTGPVVERGFAEAADVGWVGKNTCLIRQGTGSWTLLAVIVTSLPLAREAELLPAADRCGTCTRCLDACPTGALIAPRQMDARKCIAYLTIEKKGEIEEELRPLMGRQIFGCDICQDVCPWNRKAPIGATTEMQARIELVNPDLAMLAAMTPAEFRTRFRGSPLERTRLKRLRRNIAIAMGNSEDARYLPQLEAWQQSEDTVLRTTAAWAVQRITHSRQRASV

SEQ ID NO: 81548 - protein, 377 aa, Terriglobus roseus
  misc_feature (1)..(377): tr|A0A1H4IWL2|A0A1H4IWL2_9BACT Epoxyqueuosine reductase OS=Terriglobus roseus OX=392734 GN=SAMN05443244_0160 P E=4 SV=1
MITPRLREQLVARALCAGFDLAGVAAVPERDSPQERLQSERFTEWARAGFAGDMAWMLRADADGVPLRSSLQRAVPWARSVVLCAVNYNSAQPRSVDAAPAGAGWIARYAWSGTGTGEDSVPTDYHEVLLARLKQVEADLHATVPAGEEAIQTRCYVDTGPVVERWFAQLAGIGWIGKNTCVLNQGQGSWMLLGVLLTSLPLSDEAVLLPTADRCGTCTRCIDACPTDALIAPRKMDASRCIAYLTIEKKGSIDESLRPQMGRQVFGCDICQDVCPWNRRAPIGTAQDMQARTALVNPSLEDLAAIDTPEFKRRFRGSPLERTGRRRLQRNVAIAMGNSHDACHVPRLEAWAAGEDEMLREAALWALEQIAGSATSL

SEQ ID NO: 81549 - protein, 399 aa, Terriglobus roseus
  misc_feature (1)..(399): tr|I3ZGC1|I3ZGC1_TERRK Uncharacterized Fe-S protein OS= Terriglobus roseus (strain DSM 18391 / NRRL B-41598 / K BS 63) OX=926566 GN=Terro_2003 PE=4 SV=1
MITPRLRENLIASALGAGFDLAGVAAVPERDSPEEKLQSERFAEWARAGFAGDMAWMLREDADGVPLRSSLQRAVPWARSVVLCAINYNSAQPRSIDAAPDGAGWIARYAWSGDSTGDEAVPTDYHEVLLARLKRVEADLHAMVPPGEEAIQTRCYVDTGPVVERWFAQLSGIGWIGKNTCMLNQQQGSWLLLGVLLTSLPLTNDAVLLPAADRCGTCTRCIDACPTDALIAPRRMDATRCIAYLTIEKKGSIDESLRPLMGRQVFGCDICQDVCPWNRRAPVGTAPDMQARTSLVNPSLEDLAAMDTPAFKRRFRGSPLERTGRRRLQRNVAIAMGNSGDARHTQRLQTWAAGEDEMLREAAAWALEQIVGTGTSLDQQTPQAFKEEKITPDSSASIV

SEQ ID NO: 81550 - protein, 367 aa, Terriglobus saanensis
  misc_feature (1)..(367): tr|E8V469|E8V469_TERSS 4Fe-4S ferredoxin-type domain-co ntaining protein OS=Terriglobus saanensis (strain ATCC BAA-1853 / DSM 23119 / SP1PR4) OX=401053 GN=AciPR4_1753 PE=4 SV=1
MRARIVARSLEAGFHAAAIAPAPESGSEGERLLRERFLAFIAQGRGAEMHYLQRADEQGNMLRTSIHTAFPWARSVVLCAFNYNAAASRSIDPAGKSEGWIARYAWSGDGEKATDYHNVLLAKLRAVEQTIQDAAPGVQTRSYVDTGPLVERHFAQLAGLGWIGKNTCVMSQELGSWLLLGVIVTSLEVQSGAVLGPAADRCGSCTRCIDACPTDALIAPRQMDAGRCIAYLTIEKKGSIPEEMRAPMGRQIFGCDICQDVCPWNRKSPVGGDEGMHARDELINPSLHWIAEMGNAEFRAHFRGSPLERTGRKRLHRNTAIAMGNSGDVTFLPKLKEWAAGDDVVLAETATWAIAEIQRKSSEGLLC

SEQ ID NO: 81551 - protein, 311 aa, Terrimonas sp.
  misc_feature (1)..(311): tr|A0A2T7QDU5|A0A2T7QDU5_9BACT Epoxyqueuosine reductase OS=Terrimonas sp. NS-102 OX=2171976 GN=queG PE=3 SV=1
MNTFGNSHIIKQIATQSGFDYCGIARALPLDEDARRLETWLNKGYNGNMQYMENHFELRINPQKLVPGAKSVITLLLNYYPADIPTAGRDVPKISKYAWGNDYHEVIKAKLRSFIEEIKLRIGDVHGRGFVDSAPVLERAWAQRSGLGWIGKNGNLINKQSGSFFFIATLIVDIELEYDDPLAKDFCGTCTKCIDACPTNAILDNRVVDGSKCISYYTIELKDALIPDNMKGKFDNWMFGCDVCQDVCPWNRFSSPTTETRFTPIPEILDFTKENWEELTEESFKKIFRHSPLKRSKFQGIKRNLKFITKA

SEQ ID NO: 81552 - protein, 301 aa, Terrisporobacter glycolicus
  misc_feature (1)..(301): tr|A0A354KQN8|A0A354KQN8_9FIRM tRNA epoxyqueuosine(34) reductase QueG OS=Terrisporobacter glycolicus OX=36841 GN=queG PE=4 SV=1
MNKDEIKKLFYNKGLDVVGVAPIGPYYELRKTLEEKVNANLVTGMEEPDIEKRINPKLIMEDASSIIVCAFPYYIEQNQKSNISKYCYGLDYHLVIKERLNNICEEIKKIDETFDYKVFADNGPLVDRHLAYLSGIGYYGINNNIITDKYGSYVFIGYIVNNYDLEPDKPTNKTCIKCKKCVKYCPGNALEGNYKMNPKNCVSFITQKKEELTLEEIEKIKKNESIFGCDICQQVCPHNKNICESNIEEFALNLITNLNEEEINNISNKEFKRRYKNRAFSWRGKNIIKRNMDILKEKSMK

SEQ ID NO: 81553 - protein, 301 aa, Terrisporobacter glycolicus
  misc_feature (1)..(301): tr|A0A1I3SZ90|A0A1I3SZ90_9FIRM Epoxyqueuosine reductase OS=Terrisporobacter glycolicus OX=36841 GN=SAMN0291035 5_3434 PE=4 SV=1
MNKDEIKNLFYNKGLDVVGVAPIGPYYELRKTLEEKVNANLVTGMEEPDIEKRINPKLIMEDASSIIVCAFPYYIEQNQKSNISKYCYGLDYHLVIKERLNNICEEIKKIDETFDYKVFADNGPLVDRHLAYLSGIGYYGINNNIITDKYGSYVFIGYIVNNYDLEPDKPTNKTCIKCNKCVKYCPGNALEGNYKMNPKNCVSFITQKKEELTLEEIEKIKKNESIFGCDICQQVCPHNKNICKSNIEEFTLNLITNLNEEEINNISNKEFKRRYKNRAFSWRGKNIIKRNMDILKEKSMK

SEQ ID NO: 81554 - protein, 302 aa, Terrisporobacter othiniensis
  misc_feature (1)..(302): tr|A0A0B3W7F5|A0A0B3W7F5_9FIRM Iron-sulfur cluster-bind ing protein OS=Terrisporobacter othiniensis OX=1577792 GN=QX51_03210 PE=4 SV=1
MNKEEIKELFKNKGLDAIGIASVGPYYELKEILEEKVNKGLVTGMEEPDIEKRINPKLIMEDAASIIVCAFPYHIEQENESNISKYCYGLDYHLVIKEKLNNLCEEIKEVDESFNYKIFADNGPLVDRYLAYLAGIGYYGINNNLITDKYGSYVFIGYIVNNYDLEPDNPTSKTCIKCNKCVKYCPGNALEGNYKMDPKKCVSFITQKKEELTSEEVEKMKKNKSIFGCDICQQVCPHNKDICETNIKEFNTNLITTLSEEEINNISNKEFKRRYKDRAFSWRGRNIIKRNIDILKEKSMKR

SEQ ID NO: 81555 - protein, 381 aa, Tetragenococcus halophilus
  misc_feature (1)..(381): tr|A0A3G5FJQ4|A0A3G5FJQ4_TETHA tRNA epoxyqueuosine(34) reductase QueG OS=Tetragenococcus halophilus OX=51669 G N=queG PE=4 SV=1
MPSLKEKIIAESKNLGIDKIGFTTAEPFDELKASLIAQKAADHTSGFEHKNIDERLYPELTFENPQSIIAIALAYPTKIHEKVPRDEKRGQMARASWGTDYHDILKDRLTKLIDFIKKEAENTQDAENWRFSPQVDTGELVDVAVAQRAGLGFIGRNGLLITEEYGSFVYLGEIITNIQFEADEPGTFGCGECRRCITHCPTGALLGDGKMDAQKCLSYQTQTKTMMPKKYRKQIHNVIYGCDICQLVCPYNQGKDFHFHKEMEPSVDEVRPKLAPLLSVSNREFKEQFGHLAGTWRGKKPLQRNALIALANLGGRENLVKIFKCLEDVRPVIRGTAVWAIGELTKRQPEQAIDLLYELQEKETDEEVLNELEETLTMLGK

SEQ ID NO: 81556 - protein, 386 aa, Tetragenococcus halophilus
  misc_feature (1)..(386): tr|A0A424XTN4|A0A424XTN4_TETHA tRNA epoxyqueuosine(34) reductase QueG OS=Tetragenococcus halophilus subsp. hal ophilus DSM 20339 OX=1123358 GN=queG PE=4 SV=1
MPSLKEKIIAESKNLGIDKIGFTTAEPFDELKESLIAQKAAGHTSGFEHKNIDERLYPELTFENPQSIIAIALAYPTKIHEKVPRDEKRGQMARASWGIDYHDILKNRLTKLIAFIQKEAANTQDAENWRFLPQVDTGELVDVAVAQRAGLGFIGRNGLLITEEYGSFVYLGEIITNIQFEPDEPGTFGCGECRRCITHCPTGALLGDGKMNAQKCLSYQTQTKTMMPKKYRKQIHNVIYGCDICQLVCPYNQGKDFHFHKEMEPSIDEMRPKLAPLLSVSNREFKEQFGHLAGTWRGKKPLQRNALIALANLGGRQSLVKICQCLEDVRPVIRGTAVWAIGELTKRQPEQAIDLLYELEEKETDGEVLNELEETLIMLEERKKKA

SEQ ID NO: 81557 - protein, 386 aa, Tetragenococcus koreensis
  misc_feature (1)..(386): tr|A0A3G5F901|A0A3G5F901_9ENTE tRNA epoxyqueuosine(34) reductase QueG OS=Tetragenococcus koreensis OX=290335 G N=queG PE=4 SV=1
MSNLKEKIIAESKRLGIDKIGFTTAEPFAELKESLVAQKAAGHTSGFEHPNIDERLYPELTFENPQSIIAIALAYPTKINEKVPRDEKRGQFARASWGIDYHDILKDRLTKLIHFIEEIAEDEKETENWRFAPQVDTGELVDVAVAQRAGLGFIGRNGLLITEEYGSFVYLGEIITNIQFEPDEPKPFGCGDCTRCITHCPTGALLGDGKMDAQKCLSYQTQTKGMMPKKYRKQIHNVIYGCDICQLVCPYNQGKDFHFHEEMEPSIDEVRPKLAPMLSMSNKEFKKQFGHLAGFWRGKKPLQRNALIALANLGGRESLVKICKCLEDPRPVIRGTAVWSIGELTKKHPEQAIDLLYELQETETDEEVLTELTETLTMLETNKKKA

SEQ ID NO: 81558 - protein, 386 aa, Tetragenococcus muriaticus
  misc_feature (1)..(386): tr|A0A091BZ26|A0A091BZ26_9ENTE Iron-sulfur cluster-bind ing protein OS=Tetragenococcus muriaticus 3MR10-3 OX=13 02648 GN=TMU3MR103_1296 PE=4 SV=1
MPSLKERIITKSKQLGIDKIGFTTAEPFDELKDSLVAQKAAGHTSGFEHPNIDERLYPELTFDNPQSIIAIALAYPTKIHEKVPRDEKRGQFARASWGIDYHDILNDRLTKLIEFIKKEAQDASEASTWRFAPQVDTGELVDVAVAQRAGLGFIGRNGLLITEEYGSFVYLGEIITNIQFEPDTPKAFACGDCTRCITQCPTGALLGDGKMDAQKCLSYQTQTKGMMPKKYRKQMHNVIYGCDICQLVCPYNQGKDFHFHQEMESSVEEVRPKLAPMLSMSNKEFKKQFSHLSGFWRGKKPLQRNALIALANLGGRESLVKIFQCLEDPRPVIRGTAVWSIGELTKKQPDQAIDLLYELQEKETDTDVLQELKETIMMLETRKKDM

SEQ ID NO: 81559 - protein, 311 aa, Tetragenococcus muriaticus
  misc_feature (1)..(311): tr|A0A091CD19|A0A091CD19_9ENTE Iron-sulfur cluster-bind ing protein OS=Tetragenococcus muriaticus PMC-11-5 OX=1 302649 GN=TMUPMC115_1458 PE=4 SV=1
MPSLKERIITKSKQLGIDKIGFTTAEPFDELKDSLVAQKAAGHTSGFEHPNIDERLYPELTFDNPQSIIAIALAYPTKIHEKVPRDEKRGQFARASWGIDYHDILNDRLTKLIEFIKKEAQDASEASTWRFAPQVDTGELVDVAVAQRAGLGFIGRNGLLITEEYGSFVYLGEIITNIQFEPDTPKAFACGDCTRCITQCPTGALLGDGKMDAQKCLSYQTQTKGMMPKKYRKQMHNVIYGCDICQLVCPYNQGKDFHFHQEMESSVEEVRPKLAPMLSMSNKEFKKQFSHLSGFWRGKKTTAAKCAYRFS

SEQ ID NO: 81560 - protein, 386 aa, Tetragenococcus osmophilus
  misc_feature (1)..(386): tr|A0A3G5FE93|A0A3G5FE93_9ENTE tRNA epoxyqueuosine(34) reductase QueG OS=Tetragenococcus osmophilus OX=526944 GN=queG PE=4 SV=1
MPSLKERIIAKSKQLGIDKIGFTTAEPFDELKDSLVAQKAAGHTSGFEHPNIDERLYPELTFDNPQSIIAIALAYPTKIHEKVPRDEKRGQFARASWGIDYHDILNDRLTKLIEFIRKEAQDASEASTWRFAPQVDTGELVDVAVAQRAGLGFIGRNGLLITEEYGSFVYLGEIITNIQFEPDTPKAFACGDCTRCITQCPTGALLGDGTMDARKCLSYQTQTKGMMPKKYRKQMHNVIYGCDICQLVCPYNQGKDFHFHQEMEPSIEEVRPKLAPMLSMSNKEFKKQFSHLSGFWRGKKPLQRNALIALANLGSRENLVNIFKCLEDPRPVIRGTAVWSIGELTKKQPDQAIDLLYELQEKETSGDVLQELTETITMLETRRKEV

SEQ ID NO: 81561 - protein, 377 aa, Tetzosporium hominis
  misc_feature (1)..(377): tr|A0A264W7K8|A0A264W7K8_9BACL tRNA epoxyqueuosine(34) reductase QueG OS=Tetzosporium hominis OX=2020506 GN=qu eG PE=4 SV=1
MNVRDFQQQLIHYAHSIGIDKIGFASAAPFPDLKQRLLVQQQLGYASGFEEPDITKRTEPVQLLDGVQTIISIALAYPSKMKDAPQSKRGARRGIFARASWGMDYHTVLREKLAKLEAFILVHAPDAKLKSMVDTGELSDRAVAERAGIGWSAKNCSIITPEFGSYVYLGEMLTNLPFEPSVPMEDECGDCTLCLDVCPTGALIEGGQLNAKRCIAFLTQTKTMVPKEFRAKIGNRLYGCDTCQTVCPKNKGKHSAHQHDFTPDPELVKPLLMPLLEHTNRTFKETYGHMSGAWRGKNPIQRNAIIALVHFKEREAISKLMTILSEDPRPVMRGTAAWALGELTSTEGMEALRNQLDQEKEGLVIEEIQEALLKGEQ

SEQ ID NO: 81562 - protein, 377 aa, Thalassobacillus cyri
  misc_feature (1)..(377): tr|A0A1H4GZF6|A0A1H4GZF6_9BACI Epoxyqueuosine reductase OS=Thalassobacillus cyri OX=571932 GN=queG PE=3 SV=1
MDYKQLKEEVIAYSKEIGIDKIGFASVDVFGELKARLKRQEELSYQSGFEKGTVEERTEPSRLLPEAQSIISIALAYPSKMKDAPKSKKGDRRGIFCRASWGQDYHDVLRDRLQKLGEFLTEKFPEVSIKSMVDTGELADRAVAERAGIGFSGKNCAIITPEFGSYVYLGEMVTNIPFEADEPVEDSCGDCNICVDACPTGALVQGGQLDANKCIAFLTQTKDFLADEYRVKIGNRLYGCDTCQTVCPKNKKKDFHLHEEFEPDPEVTKPRLKPLLSISNREFKEQFGPIAGSWRGKKPIQRNAILALGHYKDETAVDDLIRLMKEDPRPVIRGTAAWSLGKIGSPGAYEAIEAAMEKESDEQVLFEMEKGLGFQLN

SEQ ID NO: 81563 - protein, 351 aa, Thalassobacter sp.
  misc_feature (1)..(351): tr|A0A099TB30|A0A099TB30_9RHOB Epoxyqueuosine reductase OS=Thalassobacter sp. 16PALIMAR09 OX=1225651 GN=queG P E=3 SV=1
MRTSTSDPSPAELRAGLEAQARDAGFASMGICAPDAVPELPARLKAFVDANRHGQMAWMAERMAWRGDPGALWPEARSVIMLAEPYTPDSDPLDDITHRENGVISVYARNRDYHDLVKKRLKRVARWLVAAAECEVKVFVDTAPVMEKPLAQAAGLGWQGKHTNLLSRKLGNWFFLGAVFTTADLPKDTPEAEHCGNCRACLDICPTQAFPAPFQLDARRCISYLTIEHKGPVDDSLRPALGNRIYGCDDCLAVCPWNKFAVEATELRYHARDDLRQPALAELATLDDAAFRARFSGSPIKRIGRDRFVRNVLYAIGNSAQPDLRPVAQSLCEDNDPTVADAARWAEERLR

SEQ ID NO: 81564 - protein, 351 aa, Thalassobacter stenotrophicus
  misc_feature (1)..(351): tr|A0A0N7LTG5|A0A0N7LTG5_9RHOB Epoxyqueuosine reductase OS=Thalassobacter stenotrophicus OX=266809 GN=queG PE= 3 SV=1
MRTSTSDPSPAELRARLEAEARDAGFASMGICAPDAVPELPARLKAFVDANRHGQMAWMAERMAWRGNPSALWPEARSVIMLAEPYTPDSDPLDDITHRENGVISVYARNRDYHDLVKKRLKRVARWLVAAAECEVKVFVDTAPVMEKPLAQAAGLGWQGKHTNLLSRKLGNWFFLGAVFTTADLPKDTPEAEHCGNCRACLDICPTQAFPAPFQLDARRCISYLTIEHKGPVDENLRPALGNRIYGCDDCLAVCPWNKFAVEATELRYHARDDLRQPALAELAALDDAGFRARFSGSPIKRIGRDRFVRNVLYAIGNSAQPDLRPVAQSLCEDNDPTVADAARWAEERLR

SEQ ID NO: 81565 - protein, 375 aa, Thalassobaculum litoreum
  misc_feature (1)..(375): tr|A0A1G7Q4N7|A0A1G7Q4N7_9PROT Epoxyqueuosine reductase OS=Thalassobaculum litoreum DSM 18839 OX=1123362 GN=qu eG PE=3 SV=1
MTDAPTLAERIEAKARAAGFDAVGITRAEVGAREQARLDAFVAAGQHGEMAWMADTHDRRRDPKTLWPEARSVVVCAMNYGPEHDPLDDLRRTDRGVIAAYARNRDYHDLVKKRLKRVARWMHAELDCEVKVFVDTAPVLEKPLAASAGVGWQGKHSNLVSREHGSWLFLGEIFTTLDLTPDAAETDHCGSCRRCLDICPTDAFPAPYTLDARRCISYLTIEHKGPVPREFRAAMGNRIYGCDDCLAVCPWNKFAETAREAAFVAREDLTLPLLSELAGLDDAAFRARFSGSPIKRTGRDRFVRNVLIALGNSGTADALPSVASLLDDDSALVRGAAVWAYLRLGGAPGDRPARENDREVLAEWAAGPDERGLRR

SEQ ID NO: 81566 - protein, 366 aa, Thalassobium sp.
  misc_feature (1)..(366): tr|A0A2G2Q3A8|A0A2G2Q3A8_9RHOB Epoxyqueuosine reductase OS=Thalassobium sp. OX=2030825 GN=queG PE=3 SV=1
MTERSSDNAPDCAELSPSWAGLRAQLDEWATELGFQQLGITGVELAEHEQRLQQWLAAGYHGDMAYMADHGNMRSRPAELLPGTLRVISVRMDYLAPDIRISEQLSDKNQAYISRYALGRDYHKLVRKRLTELGKRLQQAAGEMGFRAFVDSAPVLERALANQAGLGWIGKNTMLINRKAGSYFFLGEILTDLPLPIDKPYTQDHCGRCTACLDICPTQAFVGPHVLDARRCISYLTIELNGPIPQDLRPGIGNRIFGCDDCQIGCPWNRFSNASKEGDFSPRHQLDKASLLELFAWDEATFLSRTEGMPIRRTGYENWLRNIAVALGNAPRSLEVTDALQRKRPQVSALVQEHIDWALQQQQNPR

SEQ ID NO: 81567 - protein, 342 aa, Thalassobium sp.
  misc_feature (1)..(342): tr|C7DE39|C7DE39_9RHOB Epoxyqueuosine reductase OS=Thal assobium sp. R2A62 OX=633131 GN=queG PE=3 SV=1
MSEALKQALLARSLDEGFSAMGVCRPDAMPELPARLAQFVEAGRHGQMGWMAERMHWRGAPDALWPEARSVVMLAEAYTPEHDPLAVLEQTSKAAVSVYAQGRDYHDIVKKRLKRVGRWLLDQAEGEAIKVFVDTAPVMEKPLAAAAGLGWQGKHTNLLSRELGNWSFLGAIFTTIDLPVDEPVEDRCGSCRACLDICPTDAFPAPNQLDARRCISYLTIEHKGPVDVELRAKMGNRIYGCDDCLAICPWNKFAREARELRYASSPDAPDLNELVGLDDAAFRARYSGSPIKRIGRDQFVRNVLYAIGNSGDVALKSGAQALVDDADETVADAARWAVERLT

SEQ ID NO: 81568 - protein, 372 aa, Thalassobius activus
  misc_feature (1)..(372): tr|A0A0P1IS10|A0A0P1IS10_9RHOB Epoxyqueuosine reductase OS=Thalassobius activus OX=1715691 GN=queG PE=3 SV=1
MGQRRSFGTPNRSDIRSNQSDPTLGKEQAALLKTRLINEAHEIGFDLCRICRPDAVPQVPEGLRGFLAKNYEGQMNWLAERVHWRENPAELWPEAKSVIMLAQSYSPDEDPRIVHGMPDCGAISVYARNKDYHDLVKKRLKRLARWLIAEVGDETQVKVFVDTAPVPEKPLGQAAGLGWQGKHTNLLSRDLGSWFFIGSIFTTVELEVDAPEVNNCGSCTACLTACPTDAFPEPHKIDARRCISYLTIEHHGPVDEDLRPLMGNRIYGCDDCLAACPWNKFAVEAREIRYHARDDLRAPSLAELAALDDTEFRAKFSGSPIKRIGRNRFVRNVLYAMGNSGIQDYLLQIEDLIQDPDETVADAARWAKERLK

SEQ ID NO: 81569 - protein, 351 aa, Thalassobius autumnalis
  misc_feature (1)..(351): tr|A0A0P1G9U2|A0A0P1G9U2_9RHOB Epoxyqueuosine reductase OS=Thalassobius autumnalis OX=2072972 GN=queG PE=3 SV= 1
MADGLKQRLVAQAHAEGFDAARICRPWDVPEVPARLQAFLEAGYHGQMGWMAERVHWRENPAALWPEARSVIMLAESYTPEHDPTEILQHADLGAISVYAQNKDYHDLVKKRLKRLARWLIAETGDETQVKVFVDTAPVPEKPLGQAAGLGWQGKHTNLVSRDLGSWFFIGSIFTTLEIDSDPAEIDRCGSCVACQVACPTEAFPAPYQLDARRCISYLTIEHHGPVDEDLRAKMGNRIYGCDDCLAACPWNKFAVEARELRYAARDELKAPKLAELAQLDDAGFRAFFSGSPIKRIGRNRFVRNVLYAIGNSGDAALREVAQSLCEDEDATVQDAARWAVGQLHTKSPAR

SEQ ID NO: 81570 - protein, 349 aa, Thalassobius gelatinovorus
  misc_feature (1)..(349): tr|A0A0P1F6S8|A0A0P1F6S8_THAGE Epoxyqueuosine reductase OS=Thalassobius gelatinovorus OX=53501 GN=queG PE=3 SV =1
MKQGLKQSLVSQALQEGFDACRICRPGDIPQVPKRLSAFLAKGRHGQMAWMENRAEWRGNPSALWPEARSVIVLAESYTPEHDPLQILQQRDCGAISVYAQNKDYHDLVKKRLKRLARWLIAEAGGEVKVFVDTAPVAEKPLGQAAGLGWQGKHTNLVSRELGSWFFIGSIFSTLELDPDPAETDHCGSCTACQDICPTAAFPAPYQIDARRCISYLTIEHHGPVEQDLRPLLGNRIYGCDDCLAVCPWNKFAIEARELRYHAREELKAPKLAELAVLDDAGFRAFFSGSPIKRIGRNRFVRNVLYAIGNSGQSDLLPVARRLTEDTDATVADAARWAVLRLNTNATKD

SEQ ID NO: 81571 - protein, 351 aa, Thalassobius mediterraneus
  misc_feature (1)..(351): tr|A0A0P1HDJ2|A0A0P1HDJ2_9RHOB Epoxyqueuosine reductase OS=Thalassobius mediterraneus OX=340021 GN=queG PE=4 S V=1
MADGLKQRLVAQAIAEGFDLARICRPWDVPEMPDRLQAFLDAGYHGQMGWMAERIHWRSNPAALWPEAQSVIMLGESYTPQHDPAEVLVHPDLGAISVYAQNKDYHDLVKKRLKRLARWLIAEVGDDAQVKVFVDTAPVPEKPLGQAAGLGWQGKHTNLVSRDLGSWFFIGSIFTTVKLDTDPAERDHCGSCDACQVACPTDAFPAPYQLDARRCISYLTIEHHGPVDEDLRALMGNRIYGCDDCLNACPWNKFAVEARELRYLARDELKAPKLAELAVLDDAGFRAFFSGSPIKRIGRNRFVRNVLYAIGNSGDAALLRVAQGLTEDEDDTVRDAARWALGRLRTIATAG

SEQ ID NO: 81572 - protein, 313 aa, Thalassobius sp.
  misc_feature (1)..(313): tr|A0A2E9FXV9|A0A2E9FXV9_9RHOB Epoxyqueuosine reductase OS=Thalassobius sp. OX=1979401 GN=queG PE=3 SV=1
MHIEQQIVKNTRLIKESAKKLGFDFVGISKAAFLEEDAPKLESWLNNNMHGEMAYLANHFDKRLDPTKLVPGAKSVISLMCNYYPSENLNNKTGYKIAKYAYGEDYHFVIKKKLKSLVKIIHDEIGEVEGRVFVDSAPVMERQWAAKSGLGWIGKNSLLLNKGAGSFFFLAELIIDLELQEDGPVKDYCGTCTRCLDACPTDAIPAPFVVDGSKCISYFTIELKDELPAQYSDKFKDWIFGCDICQDVCPWNRFSKPHQTIEFNPHPDLNKMDKESWHDLTEDVFKVLFKKSAVKRTKFEGLKRNIKFVKATN

SEQ ID NO: 81573 - protein, 346 aa, Thalassococcus halodurans
  misc_feature (1)..(346): tr|A0A1H5YHT5|A0A1H5YHT5_9RHOB Epoxyqueuosine reductase OS=Thalassococcus halodurans OX=373675 GN=queG PE=3 SV =1
MSVTDLKEKLVAEARDIGFELARVCRPWDVPQVPERLGVFLSEDRHGTMSWMEERVHWRGAPQVLWPDAKSVIMLGESYTPDHDPLDVLNMPDRAGISVYAQNRDYHDVLKKKLKRLARWLIAEAGGEVKVFVDTAPVPEKPLGQAAGLGWQGKHTNLVSRQMGSWFFLGSVFTTLDLPADAPEVDHCGSCHACLDICPTDAFPAPYQLDARRCISYLTIEHKEPVDEALRPLLGNRVYGCDDCLAACPWNKFAAEAREAKYHARPELVAPALADLAVLDDAGFRAHFSGSPIKRIGRGRFVRNVLYAIGNSNDPALLPVAQSLVDDPEHVVADAARWAVGCLTES

SEQ ID NO: 81574 - protein, 347 aa, Thalassococcus profundi
  misc_feature (1)..(347): tr|A0A369TYX9|A0A369TYX9_9RHOB Epoxyqueuosine reductase OS=Thalassococcus profundi OX=2282382 GN=queG PE=3 SV= 1
MDRLTELLRAEAGAVGFDLCRICRPWDVGHVPARLAAFLDRGYHGQMSWLEDRAEWRGAPDRLWPEARSVIVLGESYTPEHDPLAVLEHPEQAAISVYAQNRDYHDTVKKRLKRLARWLIAEAGPDTEVKVFVDTAPVPEKPLGQAAGLGWQGKHTNLVSRDLGSWFFIGSIFTTLDLPVDAAETDHCGSCRACLDICPTDAFPAPYQLDARRCISYLTIEHKGPVDEELRARMGNRIYGCDDCLAACPWNKFAREAREVKYHARPDLVSPDLAELARLDDAGFRARFSGSPIKRIGRDRFVRNVLYAIGNSGAARLRPVAQGLCEDADETVRDAARWAVLRLEDAT

SEQ ID NO: 81575 - protein, 359 aa, Thalassococcus sp.
  misc_feature (1)..(359): tr|A0A4P6MKF9|A0A4P6MKF9_9RHOB Epoxyqueuosine reductase OS=Thalassococcus sp. S3 OX=2017482 GN=queG PE=3 SV=1
MGDRFKDRLVARALEEGFIACRVCRPWDVPEVPERLSAFVEAGYHGQMGWLAERMHWRGNPAALWPEARSVVMLAESYTPERDPMERLGWRDRGVISVYAQNRDYHDLVKKRLKRLARWMIAEGARELHANTLPEVKVFVDTAPVPEKALGQAAGLGWQGKHTNLLSREWGNWAFLGSVFTTLEIEADAPEVDHCGSCRACLDVCPTEAFVGPYRLDARKCISYLTIEHKGPVDEDLRARMGNRIYGCDDCLAVCPWNKFAVEASDLRYAARDELEAPRLAELARLDDAAFRALFSGSPIKRIGRDRFVRNVLYAIGNSGEPELAAAARELVEDTDEAVADAARWAVAMLTQMGETGRE

SEQ ID NO: 81576 - protein, 356 aa, Thalassolituus oleivorans
  misc_feature (1)..(356): tr|A0A1L6KAD3|A0A1L6KAD3_9GAMM Epoxyqueuosine reductase OS=Thalassolituus oleivorans OX=187493 GN=queG PE=3 SV =1
MNQSATTSLTAEQLTRLRDDIRQWATELGFQQAGIAGVALGEHEDLLQEWLENGYHGEMDYMASHGNMRSRPAELLPGTLSVISVRMDYLPPDGNMREQLGDPNKAYVSRYALGRDYHKLIRKRLTELGKRIKQAAGQMGFRAFVDSAPVLERALAEQAGLGWIGKNTMLINRKAGSYFFLGEILTDLPLPADNNPESDHCGRCTSCLDICPTQAFVGPHVLDARRCISYLTIELNGPIPEDLRSGMGNRIFGCDDCQIGCPWNRFSKATSETDFTPRHQLDKATLLELWAWDEAEFLSKTEGMPIRRTGYENWRRNIAVALGNAPKSIEIEQALRARLGDSALVDEHIEWALRQS

SEQ ID NO: 81577 - protein, 356 aa, Thalassolituus oleivorans
  misc_feature (1)..(356): tr|W8G2G7|W8G2G7_9GAMM Epoxyqueuosine reductase OS=Thal assolituus oleivorans R6-15 OX=1208320 GN=queG PE=3 SV= 1
MNQSATTSLTAEQLTRLRDDIRQWATELGFQQAGIAGVALGEHEDLLQEWLENGYHGEMDYMASHGNMRSRPAELLPGTLSVISVRMDYLPPDGNMREQLGDPNKAYVSRYALGRDYHKLIRKRLTELGKRIKQAAGQMGFRAFVDSAPVLERALAEQAGLGWIGKNTMLINRKAGSYFFLGEILTDLPLPADNNPESDHCGRCTSCLDICPTQAFVGPHVLDARRCISYLTIELNGPIPEDLRSGMGNRIFGCDDCQIGCPWNRFSKATSETDFTPRHQLDKATLLELWAWDEAEFLSKTEGMPIRRTGYENWRRNIAVALGNAPKSIEIEQALRARLGESALVDEHIEWALRQS

SEQ ID NO: 81578 - protein, 365 aa, Thalassolituus sp.
  misc_feature (1)..(365): tr|A0A558NJI7|A0A558NJI7_9GAMM Epoxyqueuosine reductase OS=Thalassolituus sp. C2-1 OX=2597518 GN=queG PE=3 SV= 1
MTERSSDNAPDCTDLSPSWAILRAQLHSWAEELGFQQLGITGVDLGEHEQRLQQWLAAGYHGEMGYMADHGNMRSRPAELLPGTLRVISVRMDYLAPDIRITDQLSDKNQAYISRYALGRDYHKLVRKRLTELGKRLQQAAGEMGFRAFVDSAPVLERALANRAGLGWIGKNTMLINRKAGSYFFLGEILTDLPLPLDEPYTQDHCGRCTACLDICPTQAFVGPHVLDARRCISYLTIELNGPIPEDLRSGIGNRIFGCDDCQIGCPWNRFSNASKEGDFSPRHQLDKASLLQLFAWDEATFLNRTEGMPIRRTGYENWLRNIAVALGNAPRSLEVADALQRRRPQVSALVQEHIDWALQQQQTP

SEQ ID NO: 81579 - protein, 386 aa, Thalassomonas actiniarum
  misc_feature (1)..(386): tr|A0A0D8CUS5|A0A0D8CUS5_9GAMM Epoxyqueuosine reductase OS=Thalassomonas actiniarum OX=485447 GN=queG PE=3 SV= 1
MSSSTINYQELAEKIKFWGRELGFSQVGISDIDLSEHEAALKHWLEQGYHGNMDYMARHGMMRARPDELEPGTVSVISVRLDYLPTDAKFAKLLKKKDHAYISRYALGRDYHKLMRKRLQQLGKKIKEHCQQFNFRPFVDSAPVLERPLAEKAGLGWVGKHSLLINKQAGSWFFLGELLVDIPLPSDSAPKNDCGHCVACLKICPTQAIVAPYTVDARRCISYLTIELRDAIPEEFRPLIGNRIYGCDDCQLICPWNKFAKLGQEDDFQPRNNFDDISLLTLFAWSETEFLDKTQGSPIRRIGYACWQRNIAVALGNAGFSQEIVSALTAKLPDADAMVAEHIQWALTQQQLKAEQAKHEIKVIEVNQRLTGRLIRSIEKGLPRDA

SEQ ID NO: 81580 - protein, 383 aa, Thalassomonas sp.
  misc_feature (1)..(383): tr|A0A553FKV6|A0A553FKV6_9GAMM Epoxyqueuosine reductase OS=Thalassomonas sp. M1454 OX=2594477 GN=queG PE=3 SV= 1
MSEQPTINYQDLAEKIKLWGKELGFSDVGICDVDLKTHEQALTKWLENGYHGDMDYMARHDLMRARPADLLPGTLRVISARLDYLPTGAKFAKILKQSDHAYISRYALGRDYHKLMRNRLKQLGDKITAHCEQLNFRPFVDSAPVLERPLAEKAGLGWVGKHSLLLNEQAGSWFFLGELMVNIELPIDQPKANQCGACVSCIKICPTQAIIEPYVVDARRCISYLTIELRDSIPVEFRPLIGNRIYGCDDCQLICPWNRFSQLTSEDDFQPRNHFDHVTLLELFAWDEATFLKKTEGSPIRRIGFDCWQRNIAVALGNAKYDQSIVEDLTKQKQISSEMVIEHIDWALEQQQLKLNKLNEETNLRLTQRLIRTIEKGLPRDAN

SEQ ID NO: 81581 - protein, 386 aa, Thalassomonas viridans
  misc_feature (1)..(386): tr|A0A0D8D8X8|A0A0D8D8X8_9GAMM Epoxyqueuosine reductase OS=Thalassomonas viridans OX=137584 GN=queG PE=3 SV=1
MSSSTINYQELAEKIKFWGRELGFSQVGISDIDLSEHEAALSRWLEQGYHGNMDYMVRHGMMRARPGELEPGTVSVISVRLDYLPANAKFAKLLKKKDHAYISRYALGRDYHKLMRKRLQQLGKKIKEHCRQFNFRPFVDSAPVLERPLAEKAGLGWVGKHSLLINKEAGSWFFLGELLVDIPLPSDSAPANDCGNCVACLKICPTNAIVAPYTVDARRCISYLTIELRDAIPVEFRPLIGNRIYGCDDCQLICPWNKFAKLGQEDDFQPRNNFDDVSLLTLFAWSESEFLDNTQGSPIRRIGYACWQRNIAVALGNAGYSPEITEALTAKLPGADAMVAEHIQWALEQQQMKADQAVQVIKITEVNQRLTGRLIRSIEKGLPRDA

SEQ ID NO: 81582 - protein, 386 aa, Thalassospira alkalitolerans
  misc_feature (1)..(386): tr|A0A1Y2LFB1|A0A1Y2LFB1_9PROT Epoxyqueuosine reductase OS=Thalassospira alkalitolerans OX=1293890 GN=queG PE= 3 SV=1
MTVVAAITFEDLQAKAREIGFDVCGVARPQIDERNQRRLDEFVAGAEYGTMDWMNDPERLPRRRDPKVLWPEVKSVIVLGSNYGPAENPLTLLDHPDRAMISVYAKNRDYHDLIKKRLKQLARWMIEQAQKSGVGGEQVKVFVDTAPVLEKPLGQAAGIGWQGKHTNLVSREYGSWLFLGEVFTTLEFDLAEPEIDHCGSCSNCLSACPTDAFPAPYKLDARKCISYLTIEHDGLIPIEFRRAMGNRIYGCDDCLAVCPWNKFASRTQELAFIPRAELTAPRLADFLDLDDAAFRTFFTGSPIKRIGRAKFLRNVLTAVGNSAVISLVPRVENLLTDESPLVRGSAVWALAQLTNADAFDDLRARHEQLESDPVVLAEWSRPSAVI

SEQ ID NO: 81583 - protein, 388 aa, Thalassospira lohafexi
  misc_feature (1)..(388): tr|A0A2N3LC48|A0A2N3LC48_9PROT Epoxyqueuosine reductase OS=Thalassospira lohafexi OX=744227 GN=queG PE=3 SV=1
MAAHSADAITLERLQAKAREIGFDVCGVARPSIDARNQKRLDEFVAGGEYGSMDWMNDPERLPRRRDPVALWPDVKTVIVLGSNYGPAENPMALLDHPDRAMISVYAKNKDYHDLIKKRLKQLARWLMEQAQKSGAGGEQVKVFVDTAPVLEKPLGQSAGIGWQGKHTNLVSREFGSWLFLGEVFTTLEFEEAAPEIDHCGSCSKCVAACPTDAFPAPYKLDARKCISYLTIEHDDVIPHQFRRAMGNRIYGCDDCLAACPWNKFASRTEELAFIPRAELTAPRLADFLELDEAEFRAFFNGSPIKRIGRAKFLRNVLIAAGNSGSKSLIPRVENLLADDSALIRASAVWALTQLMSPDAFATLKSDHYTAEENPVVRDEWDQATKAA

SEQ ID NO: 81584 - protein, 388 aa, Thalassospira lucentensis
  misc_feature (1)..(388): tr|A0A358HRT7|A0A358HRT7_9PROT Epoxyqueuosine reductase OS=Thalassospira lucentensis OX=168935 GN=queG PE=3 SV =1
MAAHSADAITLERLQAKAREIGFDVCGVARPSIDARNQKRLDEFVAGGEYGSMDWMNDPERLPRRRDPVALWPDVKSVIVLGSNYGPAENPMALLDHPDRAMISVYAKNKDYHDLIKKRLKQLARWLMEQAQKSGAGGEQVKVFVDTAPVLEKPLGQSAGIGWQGKHTNLVSRDYGSWLFLGEVFTTLEFEEATPEIDHCGSCSKCVAACPTDAFPAPYKLDARKCISYLTIEHDDVIPHQFRRAMGNRIYGCDDCLAACPWNKFASRTEELAFIPRAELTAPRLADFLELDEAEFRAFFTGSPIKRIGRAKFLRNVLIAAGNSGSESLIPRVKKLLSDESSLIRASAVWALTQLIPSDAFATLKSDHYAAEENPVVRDEWDQATQAA

SEQ ID NO: 81585 - protein, 388 aa, Thalassospira lucentensis
  misc_feature (1)..(388): tr|A0A367V434|A0A367V434_9PROT Epoxyqueuosine reductase OS=Thalassospira lucentensis MCCC 1A00383 = DSM 14000 OX=1123365 GN=queG PE=3 SV=1
MAAHSADAITLERLQAKAREIGFDVCGVARPSIDARNQKRLDEFVAGGEYGSMDWMNDPERLPRRRDPVALWPDVKSVIVLGSNYGPAENPMALLDHPDRAMISVYAKNKDYHDLIKKRLKQLARWLMEQAQKSGAGGEQVKVFVDTAPVLEKPLGQSAGIGWQGKHTNLVSREFGSWLFLGEVFTTLEFEQATPEIDHCGSCSKCISACPTDAFPAPYKLDARKCISYLTIEHDDVIPHQFRRAMGNRIYGCDDCLAACPWNKFASRTEELAFIPRAELTAPRLADFLELDEAEFRAFFTGSPIKRIGRAKFLRNVLIAAGNSGAESLIPRVEKLLSDESSLIRASAVWALTQLMPSDAFATLKSDHYTGEESSVVRDEWDQATKAA

SEQ ID NO: 81586 - protein, 383 aa, Thalassospira marina
  misc_feature (1)..(383): tr|A0A2N3KXE4|A0A2N3KXE4_9PROT Epoxyqueuosine reductase OS=Thalassospira marina OX=2048283 GN=queG PE=3 SV=1
MKARPAKLISFDMLWTKAREIGFDVCGVARPEIAARNQLRLDEFVAGQEFGSMAWMADPERLPRRRDPRVLWEDVKSVIVLGTNYGPAQDPLTLLDQPDRAMISVYAQNRDYHDLIKKRLKQLARWLIEQSEAGEQVKVFVDTAPVLEKPLAQSAAIGWQGKHTNVVSRTYGSWLFLGEVFTTLEFADAPNRAEIDHCGSCRNCLDACPTAAFPAPYKLDARKCISYLTIEHDGMIPREFRVAMGNRIYGCDDCLSVCPWNKFASRTEELAFIPRAELTAPRLADFLDMDDTAFRAFFTGSPIKRIGREKFFRNVLTAIGNAGDRQVIPQLRSLLADPSALIRASAVWALSRLMGRDEFAEIRQSHLADERDETVLTEWDATA

SEQ ID NO: 81587 - protein, 378 aa, Thalassospira mesophila
  misc_feature (1)..(378): tr|A0A1Y2L0Q1|A0A1Y2L0Q1_9PROT 4Fe-4S ferredoxin OS=Tha lassospira mesophila OX=1293891 GN=TMES_11080 PE=4 SV=1
MRFDALQAKAREIGFDVCGVAKPEIDSRNQQRLDEFVAGEEFGSMAWMADPERLPRRRDPKVLWGDVQSVIVLGTNYGPAENPLALLDHSDRAMISVYAQNRDYHDLIKKRLKQLARWLVEQTGGAEQVKVFVDTAPVLEKPLAQAGGIGWQGKHTNVVSRDYGSWLFLGEVFTTLQFDDAPQKPEIDHCGSCRNCLDACPTNAFPEPYKLDARRCISYLTIEHDGVIPREFRRAIGNRIYGCDDCLSVCPWNKFSSRTEELAFIARAELTAPRLADFLAMDDDAFRAFFAGSPIKRIGRAKFLRNVLIAIGNDKNGGDASTIAQLHNLLADPSALIRASTVWAMAQLMDDAAFHEVRQHQLAAETDATVLAEWRDAV

SEQ ID NO: 81588 - protein, 384 aa, Thalassospira permensis
  misc_feature (1)..(384): tr|A0A074J6J5|A0A074J6J5_9PROT Epoxyqueuosine reductase OS=Thalassospira permensis NBRC 106175 OX=1353532 GN=q ueG PE=3 SV=1
MTVAAAITLESLQAKAREIGFDVCGVARPQIDERNQARLDEFVAAAEYGTMDWMNDPERLPRRRDPKMLWPDVKSVIVLGSNYGPAENPLTLLDHPDRAMISVYARNRDYHDLIKKRLKQLARWMMEQAQKAGADGEQVKVFVDTAPVLEKPLGQAAGIGWQGKHTNLVSREYGSWLFLGEVFTTLEFDLAAPEIDHCGSCDKCLSACPTDAFPGPYKLDARKCISYLTIEHDGLIPPQFRRAMGNRIYGCDDCLAVCPWNKFASRTQEMAFIPRAELTAPRLADFLDLDDETFRSFFTGSPIKRIGRAKFLRNVLTAVGNSGAVNLVPHVESLLTDESPLVRGSAVWALSQLMDGKAFDALRSRHERMESDPVVLAEWARPAP

SEQ ID NO: 81589 - protein, 378 aa, Thalassospira profundimaris
  misc_feature (1)..(378): tr|A0A199YGV0|A0A199YGV0_9PROT Epoxyqueuosine reductase OS=Thalassospira profundimaris OX=502049 GN=queG PE=3 SV=1
MTTNTRQNITFEMLQAKAREIGFDVCGVARPKIDARNQQRLDEFVAGGEYGSMAWMNDPERLPRRRDPEMLWPDVKSVIVLGSNYGPAENPMALLDHPDRAMISVYAKNKDYHDLIKKRLKQLARWVVEQSGGAEQVKVFVDTAPVLEKPLGQASGIGWQGKHTNLVSREFGSWLFLGEIFTTLELPEAEPEIDHCGSCTKCLSACPTDAFPAPYKLDARKCISYLTIEHDGPIPLEFRKPMGNRIYGCDDCLAVCPWNKFATRTEELAFIPRVELTAPRLADFLDLDDAGFRAFFTGSPIKRIGRAKFLRNVLIAAGNSKAPRLIPRIENLLSDESALIRASAIWALSQLMSAAEFASLKDIHAKIESDPVVLAEWD

SEQ ID NO: 81590 - protein, 384 aa, Thalassospira profundimaris
  misc_feature (1)..(384): tr|K2KV36|K2KV36_9PROT Epoxyqueuosine reductase OS=Thal assospira profundimaris WP0211 OX=1177928 GN=queG PE=3 SV=1
MTTKTRQNITFEILQAKAREIGFDVCGVARPKIDARNQQRLDEFVAGGEYGSMAWMNDPERLPRRRDPEMLWPDVKSVIVLGSNYGPAENPMALLDHPDRAMISVYAKNKDYHDLIKKRLKQLARWVVEQSGGVEQVKVFVDTAPVLEKPLGQASGIGWQGKHTNLVSREFGSWLFLGEIFTTLDLPEAEPEIDHCGSCTKCLSACPTDAFPAPYKLDARKCISYLTIEHDGPIPLEFRKPMGNRIYGCDDCLAVCPWNKFATRTEELAFIPRAELTAPRLADFLDLDDAGFRAFFTGSPIKRIGRAKFLRNVLIAAGNSKAPRLIPRIENLLSDESALIRASAVWALSQLMSAAEFASLKDIHAKIESDPVVLAEWDQASNAA

SEQ ID NO: 81591 - protein, 386 aa, Thalassospira sp.
  misc_feature (1)..(386): tr|A0A2E2SX27|A0A2E2SX27_9PROT Epoxyqueuosine reductase OS=Thalassospira sp. OX=1912094 GN=queG PE=3 SV=1
MTVAAAITLESLQAKAREIGFDVCGVARPQIDERNQARLDEFVAAAEYGTMDWMNDPERLPRRRDPKMLWPDVKSVIVLGSNYGPAENPLTLLDHPDRAMISVYARNRDYHDLIKKRLKQLARWMIETAQKSGAGGEQVKVFVDTAPVLEKPLGQSAGIGWQGKHTNLVSRDYGSWLFLGEVFTTLEFDLAAPEIDHCGSCSKCLSACPTDAFPDPYKLDARKCISYLTIEHDGLIPLQFRRAMGNRIYGCDDCLAVCPWNKFASRTQEMAFIPRAELTAPRLADFLDLDDETFRSFFTGSPIKRIGRAKFLRNVLTAVGNSGAVNLVPRVESLLTDESPLVRGSAVWALSQLMDDSGFDALRSRHERMESDPVVLAEWARPASPA

SEQ ID NO: 81592 - protein, 380 aa, Thalassospira sp.
  misc_feature (1)..(380): tr|A0A1Q4URQ4|A0A1Q4URQ4_9PROT Epoxyqueuosine reductase OS=Thalassospira sp. TSL5-1 OX=1544451 GN=queG PE=3 SV =1
MLAHSISFRDIQDKAKDIGFDVCGVARPEIDPRNQQRLDEFVAGREYGSMEWMADPERLPRRRDPRVLWEDVKSVIVLGTNYGPAEDPLTLLDHPDRAMISVYAQNRDYHDLIKKRLKQLARWLMEQSREGEQVKVFVDTAPVLEKPLAQSAAIGWQGKHTNVVSRQYGSWLFLGEVFTTLEFDDAPNRAEIDHCGSCRNCLDACPTNAFPAPYKLDARKCISYLTIEHDGVIPREFRVAMGNRIYGCDDCLSVCPWNKFASRTEELAFIPRAELTAPRLADFLDMDDAAFRAFFTGSPIKRIGRAKFLRNVLIAIGNAGDRQVLPHLRALLKDPAAVIRASVVWALFRLMTTEEFAEIRQIQLAGEQDETVRAEWEAVA

SEQ ID NO: 81593 - protein, 384 aa, Thalassospira xiamenensis
  misc_feature (1)..(384): tr|A0A285U025|A0A285U025_9PROT Epoxyqueuosine reductase OS=Thalassospira xiamenensis OX=220697 GN=queG PE=3 SV =1
MTVAAAITLESLQAKAREIGFDVCGVARPQIDERNQVRLDEFVAAAEYGTMDWMNDPERLPRRRDPKMLWPDVKSVIVLGSNYGPAENPLTLLDHPDRAMISVYARNRDYHDLIKKRLKQLARWMIETGQKSGAGGEQVKVFVDTAPVLEKPLGQAAGIGWQGKHTNLVSRDYGSWLFLGEVFTTLEFDLAEPENDHCGSCSKCLSACPTDAFPGPYKLDARKCISYLTIEHDGLIPLQFRRAMGNRIYGCDDCLAVCPWNKFASRTQEMAFIPRAELTAPRLADFLDLDDETFRSFFTGSPIKRIGRAKFLRNLLTAVGNSGAAYLVPRVEGLLTDESPLVRGSAVWALSQLMDDSGFDVLRSRHERMESDPAVLAEWAREAS

SEQ ID NO: 81594 - protein, 384 aa, Thalassospira xiamenensis
  misc_feature (1)..(384): tr|A0A0B4XYA6|A0A0B4XYA6_9PROT Epoxyqueuosine reductase OS=Thalassospira xiamenensis M-5 = DSM 17429 OX=112336 6 GN=queG PE=3 SV=1
MTVGAAITLESLQAKAREIGFDVCGVARPQIDERNQARLDEFVAAAEYGTMDWMNDPERLPRRRDPKMLWPEVKSVIVLGSNYGPAENPLTLLDHPDRAMISVYARNRDYHDLIKKRLKQLARWMMEQAQKSGVGGEQVKVFVDTAPVLEKPLGQAAGIGWQGKHTNLVSRDYGSWLFLGEVFTTLEFDLAAPEIDHCGSCAKCLSACPTDAFPGPYKLDARKCISYLTIEHDGLIPPQFRRAMGNRIYGCDDCLAVCPWNKFASRTQEMAFIPRAELTAPRLADFLDLDDETFRSFFTGSPIKRIGRAKFLRNVLTAVGNSGAVNLVPRVESLLTDESPLVRGSAVWALSQLMDGKAFDALRSRHERMESDPVVLAEWARPAP

SEQ ID NO: 81595 - protein, 384 aa, Thalassospira xianhensis
  misc_feature (1)..(384): tr|A0A367U697|A0A367U697_9PROT Epoxyqueuosine reductase OS=Thalassospira xianhensis MCCC 1A02616 OX=1177929 GN =queG PE=3 SV=1
MTVAAAITLESLQAKAREIGFDVCGVARPQIDERNQVRLDEFVAAAEYGTMDWMNDPERLPRRRDPKMLWPDVKSVIVLGSNYGPAENPLTLLDHPDRAMISVYAKNRDYHDLIKKRLKQLARWMIEQAQKSGAGGEQVKVFVDTAPVLEKPLGQSAGIGWQGKHTNLVSRDYGSWLFLGEVFTTLEFDLAEPEIDHCGSCSKCLSACPTDAFPGPYKLDARKCISYLTIEHDGLIPPQFRRAMGNRIYGCDDCLAVCPWNKFASRTQEMAFIPRAELTAPRLADFLDLDDETFRSFFTGSPIKRIGRAKFLRNVLTAVGNSGAVNLVPRVESLLTDESPLVRGAAVWALSQLMDDDRFDALRSRHERMESDPVVLAEWARPAP

SEQ ID NO: 81596 - protein, 379 aa, Thalassotalea agarivorans
  misc_feature (1)..(379): tr|A0A1I0CHQ6|A0A1I0CHQ6_THASX Epoxyqueuosine reductase OS=Thalassotalea agarivorans OX=349064 GN=queG PE=3 SV =1
MAEPTINYQQLAEKIKSWGEELGFAGVGICGIDLAEHEKPLLDWLDNNYHGSMDYMARHGLMRARAYELVPGTLRVVSVRMNYLPEGAKFAQTLKQPDKAYVSRYALGRDYHKLMRKRLKQLGEKIKSHCASFNYRPFVDSAPVLERPLAENAGLGWVGKHSLVIDEKSGSWFFLGELLVDIPLPVDTKPENKCGSCVACMTICPTGAIVEPYVVDARKCISYLTIEHKGVIDEALRPLMGNRIYGCDDCQLICPWNKYASLSNESDFQSRHNLDNSNLLDLFAFDEPTFMKTFEGSPIRRIGIDAWHRNIAIALGNAPYQQEVVDALEQKLSQCSDLVAEHVTWALHQQHKKATLVVEPKRQTLRLIRAVEKGLPRDA

SEQ ID NO: 81597 - protein, 414 aa, Thalassotalea euphylliae
  misc_feature (1)..(414): tr|A0A3E0TX28|A0A3E0TX28_9GAMM Epoxyqueuosine reductase OS=Thalassotalea euphylliae OX=1655234 GN=queG PE=3 SV =1
MTAAINYQDLAEKIKLWGQSLGFAQLGIADIDLSEHEPRLQAWLDNQYHGEMDYMARHGMMRARPNELEPGTVRVISARMNYLPPNAKFAATLKDKELGYVSRYALGRDYHKLMRKRLQQLGKKIQDYCTEFNFRPFVDSAPVLERPLAEKAGLGWVGKHSLLINQEAGSWFFLGELLVNLPLPVDNAPSNQCGHCVACMKICPTNAIVEPYVVDAKRCISYLTIENQSAIPVEFRKALGNRIYGCDDCQLICPWNKFSSLTEEVDFHPRQQLDGSTLLTLFAWRESEFLSRTEGSPIRRIGYHSWLRNIAVALGNAPFQPAIVGALTARAAQLRDESSEQAAKMVLEHIEWALAEQAAKQHSIAVNVPRNDTLLQDNEANSTSTNHDNANDNKTKRLNQRLIRAIEKGLPRDA

SEQ ID NO: 81598 - protein, 401 aa, Thalassotalea euphylliae
  misc_feature (1)..(401): tr|A0A3E0UK66|A0A3E0UK66_9GAMM Epoxyqueuosine reductase OS=Thalassotalea euphylliae OX=1655234 GN=queG PE=3 SV =1
MTAAINYQDLAEKIKLWGESLGFAQIGIADIDLKSHEPYLQAWLDNQYHGSMDYMARHGMMRARPQELEPGTVRVISARLNYLPPNAKFAQTLKNKKLGYVSRYALGRDYHKLMRKRLQQLGKKIQDYCSEFNFRPFVDSAPVLERPLAEKAGLGWVGKHSLLINQQAGSWFFLGELLVNLPLPVDSAPENQCGSCVACIKICPTNAIVAPYVVDAKRCISYLTIENQGAIPLEFRKALGNRIYGCDDCQLICPWNKFGSITLEDDFHPRQQLDASELVSLFTWQENEFLARTEGSPIRRIGYQSWLRNLAVALGNAPYEEQIVEVLTAKKQQADLASNTALSVMVIEHIDWALAEQQNKAKAIAVELVTIDSSITECDKKAQRLNQRLIRSIEKGLPRDA

SEQ ID NO: 81599 - protein, 382 aa, Thalassotalea sp.
  misc_feature (1)..(382): tr|A0A1Y5GSC4|A0A1Y5GSC4_9GAMM Epoxyqueuosine reductase OS=Thalassotalea sp. 42_200_T64 OX=1856287 GN=queG PE= 3 SV=1
MNESAAINYQELAEKIKLWGKEFGFADVGICDVDLKSHEKALQHWLEQGYHGNMDYMARHDLMRARPDELLPGTLRVISVRLDYLPTEAKFAKTLKRDQHAFISRYALGRDYHKLMRNRLKQLGKKIENYCHNLNFRPFVDSAPVLERPLAEKAGLGWVGKHSLLLNNQAGSWFFLGELMVDIPLPVDTPKTNQCGQCVSCIKICPTNAIVAPYVVDARRCISYLTIELREAIPLEFRPLIGNRIYGCDDCQLICPWNKFAKLSAEDDFQPRNRLDNIHLLEVFAWDEDEFLKNTEGSPIRRIGFDCWQRNIAVALGNARYDEQIVSALAQQHIGASEMVKEHIDWALAQQQLKLEQLGENKNQRLTARLIRTIEKGLPRDA

SEQ ID NO: 81600 - protein, 380 aa, Thalassotalea sp.
  misc_feature (1)..(380): tr|A0A4U1B7U1|A0A4U1B7U1_9GAMM Epoxyqueuosine reductase OS=Thalassotalea sp. ZS-4 OX=2572245 GN=queG PE=3 SV=1
MDKKSKINYLELAEKIKHWGQELGFAEVGICEPDLQQHEQALQDWLDNLYHGDMEYMARHGMMRARATELLPGTLRVISTRMDYLPANAKFARVLKQTDHAYVSRYALGRDYHKLLRQRLKRLGENIKNYCEQLNYRPFVDSAPILERPLAAKAGLGWVGKHSLLLNQQAGSWFFLGELLVDIPLPTDTPVKEKCGSCVACIKICPTDAIVAPYVVDARRCISYLTIELRTAIPEEFRPLLGNRIYGCDDCQLICPWNRFANITQEDDFQPRQNLDEITLLELFAWSEFEFDKNLQGSPIRRIGYECWQRNLAVALGNAKPSEVIYQALNDKHPDSTPMVQEHIDWAIEQQRSKQQAVAATLRNKERLIRSIEKGLPRDA

SEQ ID NO: 81601 - protein, 366 aa, Thauera aminoaromatica
  misc_feature (1)..(366): tr|A0A5C7SLU8|A0A5C7SLU8_9RHOO Epoxyqueuosine reductase OS=Thauera aminoaromatica OX=164330 GN=queG PE=3 SV=1
METKLPTPDGAAVDGTVLDGAALVARIRQWGRELGFDAVGVGGVDLADAEPGLVAWLEAGFHGDMDYMVRHGMKRARAAELLPGSVRVISVRMGYWPDAAPAMDVLGDPERAYVSRYALGRDYHKLVRNRLQKLADRISAEVPHQYRVFTDSAPILEVEHASRKGLGWRGKHTLLLDRTAGSWFFLGEILTDLPLPVDAPVASHCGRCTACIDACPTGAIVAPYRVDARRCISYLTIELHGAIPEELRPLLGNRIYGCDDCQLVCPWNRFAQLGREPDFAPRQGLDDARLAELFAWTAEEFSERTAGSPIHRIGHARWLRNIAVALGNGPATPAARAALQARADDEDAVVREHVAWALARLAAAAG

SEQ ID NO: 81602 - protein, 337 aa, Thauera aminoaromatica
  misc_feature (1)..(337): tr|N6YYJ5|N6YYJ5_9RHOO Iron-sulfur cluster binding prot ein (Fragment) OS=Thauera aminoaromatica S2 OX=1234381 GN=C665_11631 PE=3 SV=1
MPTPDGAAVDGTVLDGAALVARIRQWGRELGFDAVGVGGVDLADAEPGLVAWLEAGFHGDMDYMVRHGMKRARAAELLPGSVRVISVRMGYWPDAAPAMDVLGDPERAYVSRYALGRDYHKLVRNRLQKLADRISAEVPHQYRVFTDSAPILEVEHASRKGLGWRGKHTLLLDRTAGSWFFLGEILTDLPLPVDAPVASHCGRCTACIDACPTGAIVAPYRLDARRCISYLTIELHGAIPEELRPLLGNRIYGCDDCQLVCPWNRFAQLGREPDFAPRQGLDGARLAELFAWTAAEFSERTAGSPIHRIGHARWLRNIAVALGNGPATPAARAALQA

SEQ ID NO: 81603 - protein, 382 aa, Thauera aromatica
  misc_feature (1)..(382): tr|A0A2R4BML0|A0A2R4BML0_THAAR Epoxyqueuosine reductase OS=Thauera aromatica K172 OX=44139 GN=queG PE=3 SV=1
MAAGLGGDTDNGVDNNAGEPAGNRLRLDAAGLVARIRQWGQALGFSAIGVGGTDLSGAEPGLAAWVEAGFHGDMDYMARHGMKRARAAELVPGTLRVISARMDYWPDAAPAQAVLDDPARAYVSRYALGRDYHKVLRARLQKLAERIAAETAHQYRVFTDSAPVLEVEHASRNGLGWRGKHTLLLDRAAGSWFFLGEIFTDLPLPLDPPVAPHCGRCSACIDACPTGAIVAPYRVDARRCISYLTIELHGAIPEPLRPLLGNRIYGCDDCQLACPWNRFAGLSCEPDFTPRHGLDGATLAELFAWTAADFAERTAGSPIHRIGHERWLRNLAVALGNAPSAPEVLAALESRAGDDSALVREHVAWARARHRRNGATAEDGAG

SEQ ID NO: 81604 - protein, 384 aa, Thauera chlorobenzoica
  misc_feature (1)..(384): tr|A0A1L6FEG9|A0A1L6FEG9_9RHOO Epoxyqueuosine reductase OS=Thauera chlorobenzoica OX=96773 GN=queG PE=3 SV=1
MVMAAGLGGDTDNGVDNNAGEPAGDPLRLDAAGLVARIRQWGQALGFSAIGVGGTDLSDAEPGLAAWLEAGFHGGMDYMARHGMKRARAAELLPGTLRVISARMDYWPDAAPARAVLDDPARAYVSRYALGRDYHKVLRARLQKLAERIAAETAHQYRVFTDSAPVLEVEHACRNGLGWRGKHTLLLDRAAGSWFFLGEIFTDLPLPLDPPVAPHCGRCTACIDACPTGAIVAPYRVDARRCISYLTIELHGAIPGPLRPLLGNRIYGCDDCQLACPWNRFAGLSCEPDFAPRHGLDGATLAALFAWTAADFAERTAGSPIHRIGHERWLRNLAVALGNAPSTPEVRAALQSRAGDDSALVREHVAWALARHRRNGATAGDGAG

SEQ ID NO: 81605 - protein, 367 aa, Thauera humireducens
  misc_feature (1)..(367): tr|A0A140IDQ8|A0A140IDQ8_9RHOO Epoxyqueuosine reductase OS=Thauera humireducens OX=1134435 GN=queG PE=3 SV=1
MAENAAADGMAGADGTPFDGAALLARIRQWAAELGFGAVGVADTDLHEAEPGLTAWLNAGFHGGMDYMARHGMKRARPAELVPGTLRVISLRLDYWPDAADAGANLADGQRAYVSRYALGRDYHKVLRNRLQKLAERIAAEVPHAYRVFTDSAPVLEVELASRNGLGWRGKHTLLLDRSAGSYFFLGEIFTDLPLPVDEPVEPHCGRCTACIDACPTGAIVAPYQVDARRCISYLTIELHGPIPEALRPSLGNRIYGCDDCQLACPWNRFARLTAEGDFAPRHGLDTARLVELFAWSEAVFAERTAGSPIHRIGHERWLRNIAVALGNAPAAPDVLAALQARADHPSALVREHVAWALARHGAPLAG

SEQ ID NO: 81606 - protein, 365 aa, Thauera linaloolentis
  misc_feature (1)..(365): tr|N6Z9U0|N6Z9U0_9RHOO Epoxyqueuosine reductase OS=Thau era linaloolentis 47Lol = DSM 12138 OX=1123367 GN=queG PE=3 SV=1
MLMMANGLAGEADALVDGAALLARIRQWAAELGFGAIGVAGVDLGGAEPGLAAWLEAGFHGEMDYMLRHGMKRARPAELVPGTLRVISARLDYWPDAAGAEANLADGARAYVSRYALGRDYHKVLRNRLQKLAERIAAETPHAFRVFTDSAPVLEVELASRNGLGWRGKHTLLLDRGAGSYFFLGEIFTDLPLPLDAPVDAHCGRCTACIDACPTGAIVAPYSVDARRCISYLTIELKDAIPEALRPMLGNRIYGCDDCQLVCPWNRFARLTKEPDFAPRHGLDSAGLAALFAWSEVDFAERTAGSAIHRIGHERWLRNIAVALGNAPTTAEVLAALQSRADHPSALVREHVVWALARHGRQPAG

SEQ ID NO: 81607 - protein, 362 aa, Thauera phenylacetica
  misc_feature (1)..(362): tr|N6YVZ7|N6YVZ7_9RHOO Epoxyqueuosine reductase OS=Thau era phenylacetica B4P OX=1234382 GN=queG PE=3 SV=1
MPAPGGAAVDGTVLDGAALVARIRQWGRELGFDAVGVGGVDLTDAEPGLAAWLEAGFHGHMDYMARHGMKRARAAELLPGSVRVISVRMGYWPDAAPALEVLADGERAYVSRYALGRDYHKLVRNRLQKLADRISAEVAHQYRVFTDSAPILEVEHASRKGLGWRGKHTLLLDRTAGSWFFLGEILTDLPLPVDAPVDSHCGRCTACIDACPTGAIVAPYRVDARRCISYLTIELHGAIPEALRPLLGNRIYGCDDCQLVCPWNRFAQLGREPDFAPRQGLDDARLAELFAWTAAQFSERTAGSPIHRIGHARWLRNIAVALGNGPATPAARAALQARADDEDAMVREHVAWALARLDAAAG

SEQ ID NO: 81608 - protein, 367 aa, Thauera propionica
  misc_feature (1)..(367): tr|A0A235EVQ6|A0A235EVQ6_9RHOO Epoxyqueuosine reductase OS=Thauera propionica OX=2019431 GN=queG PE=3 SV=1
MAENAVADGMAGADGTPLDGAALLARIRQWAAELGFGAVGVADTDLHEAEPGLTAWLDAGFHGGMDYMARHGMKRARPAELVPGTLRVISLRLDYWPDAADAGANLADGQRAYVSRYALGRDYHKVLRNRLQKLADRIAAEMPHAYRVFTDSAPVLEVELASRNGLGWRGKHSLLLDRDAGSYFFLGEIFTDLPLPIDAPVESHCGRCTACIDTCPTGAIVAPYQVDARRCISYLTIELHGPIPEDLRPLLGNRIYGCDDCQLACPWNRFARLTAEGDFAPRHGLDSAGLVELFAWSEAEFVERTAGSPIHRIGHERWLRNIAVALGNAPTAPEVLAALRARAEHPSAVVREHVAWALARHGAPLAS

SEQ ID NO: 81609 - protein, 367 aa, Thauera sp.
  misc_feature (1)..(367): tr|A0A351A4D4|A0A351A4D4_9RHOO Epoxyqueuosine reductase OS=Thauera sp. OX=1905334 GN=queG PE=3 SV=1
MSSAAGAQPAAVSGWGPSDGLEFVAQIRQWGREFGFNAIGVGGIDLTDAEPGLMAWVEAGFHGDMDYMARHGLKRARAAELVPGTVRVISARMDYWPAAADAGAALADPQRAYVSRYALGRDYHKVLRARLQKLAERIAAAVPHQYRVFTDSAPVLEVEHASRNGLGWRGKHTLLLDRSAGSWFFLGEIFTDLPLPVDERLEPHCGRCTACIDACPTGAIVAPYRVDARRCISYLTIELQGAIPEALRPQVGNRIYGCDDCQLACPWNRFAQLSCEPDFAPRHRLDSATLVELFAWSAADFAERTAGSPIYRIGHERWLRNIAVALGNAPTTAAVLAALQARAQDDSAIVREHVAWALDRHGGAASG

SEQ ID NO: 81610 - protein, 366 aa, Thauera sp.
  misc_feature (1)..(366): tr|A0A0C3HXU1|A0A0C3HXU1_9RHOO Epoxyqueuosine reductase OS=Thauera sp. SWB20 OX=1572758 GN=queG PE=3 SV=1
METKLPAPDGAAVDGTVLDGAALVARIRQWGRELGFDAVGVGGVDLADAEPGLVAWLEAGFHGDMDYMVRHGMKRARAAELLPGSVRVISVRMGYWPDAAPAMDVLGDPERAYVSRYALGRDYHKLVRNRLQKLADRISAEVPHQYRVFTDSAPILEVEHASRKGLGWRGKHTLLLDRTAGSWFFLGEILTDLPLPVDAPVASHCGRCTACIDACPTGAIVAPYRLDARRCISYLTIELHGAIPEELRPLLGNRIYGCDDCQLVCPWNRFAQLGREPDFAPRQGLDDARLAELFAWTAAEFSERTAGSPIHRIGHARWLRNIAVALGNGPATPAARAALQARADDEDAVVREHVAWALARLAAAAG

SEQ ID NO: 81611 - protein, 369 aa, Thauera terpenica
  misc_feature (1)..(369): tr|S9ZS83|S9ZS83_9RHOO Epoxyqueuosine reductase OS=Thau era terpenica 58Eu OX=1348657 GN=queG PE=3 SV=1
MESSSLMAADSFSDADGVAIDGVALLARIREWALELGFGAIGVADIDLSTAEPGLAAWLEAGFHGEMDYMLRHGMKRARAAELVPGTRRVISARLDYWPAAADAQAVLADGSLAYVSRYALGRDYHKVLRKRLQQLAERIATAVPHAFRVFTDSAPVLEVELASRSGLGWRGKHTLLLERNAGSYFFLGEIFTDLPLPLDAPAEAHCGRCTACIDACPTAAIVAPYQVDARRCISYLTIELKGAIPEDLRPLLGNRIYGCDDCQLVCPWNRFARLTAEGDFAPRHGLDSAALAALFAWSEADFAERTAGSPIHRIGYERWLRNIAVALGNAPSAPEVLAALQSRLEHPSALVREHVGWALARHAAPACG

SEQ ID NO: 81612 - protein, 473 aa, Thermaerobacter marianensis
  misc_feature (1)..(473): tr|E6SLU5|E6SLU5_THEM7 4Fe-4S ferredoxin-type domain-co ntaining protein OS=Thermaerobacter marianensis (strain ATCC 700841 / DSM 12885 / JCM 10246 / 7p75a) OX=644966 GN=Tmar_1281 PE=4 SV=1
MAGRPSTYATPAALKAALQAEARRLGFAAVGVAAAEPLFDLAALLRLRQERAMATPWEDPDPARRSDPASLLPGARSVVAVAMAYDPPRAAAQAGERAVPGDGDANGWRGPDPSRPDPARQDPDRSRRRPEPPGEVALRGYVAAAGRTRSYQHVMRRRLEALGRWLEAAVPGCRWAVQVDTGPLVDRAWAERAGIGWIGKNACVIVPGRGSWVFLGELVTDVALPPDQPLADACGDCDLCLRACPTGAFLGPRQLDPRRCVSFLSQKPGMLDPDERAALGQSLYGCDACQVVCPYNRGAGPGHPALRPAAFWGTGPADEPAPAGEGNAGTAGSEAASAGPDGTGDSPVAPDLVALLRMGRADFRRRYRSLTGAWRGRKTWQRNAVVALGNRGAAARAAVSVLAELLRADPRPDMRALAAWALGRIGGGAARQALAGVLEREADHRVRAAVREALARMGGDPGDPAGHAVRPVP

SEQ ID NO: 81613 - protein, 504 aa, Thermaerobacter sp.
  misc_feature (1)..(504): tr|A0A4P7GV56|A0A4P7GV56_9FIRM tRNA epoxyqueuosine(34) reductase QueG OS=Thermaerobacter sp. FW80 OX=2546351 G N=queG PE=4 SV=1
MADAQATAQSRAALKTALLAEARRLGFVAAGVAAAAPLLDLEALLRWRQERGMATPWEDPDPARRADPATLLPGARSVVAVAMAYDPPGRRTASRPASAQDRAAGGGDRAAGGGTGRRRDGRAAGGSRDGGDGGPPLRGYVAAAGRTRSYQHVMRQRLEALGRWLEARVPGCRWAVQVDTGPLVDRAWAERAGLGWVGKNACLIVPGRGSWVFLGELVTDVALPPDQPVADACGDCDLCLRACPTQAFIGPRQLDPRRCVSFLSQKPGMLAPDERAALGQSLYGCDACQVVCPYNRSAGPGHPALRPDDTAPAGGAGNGTTSVPAAPVPSGAPTQARTGGAGGGRAPTAEAAAGPELDASRRAGDPAPDDGPPDATGRPDLVALLRMGRAEFRRRYRSLTGAWRGRKTWQRNALVALGNRGPAARSAVPALVRVLRDDPRPDLRALAAWALGRIGGECAQRALAEARAREDDPAVRAAIADALRPAPGAGRGGGRAEAYGAQAF

SEQ ID NO: 81614 - protein, 413 aa, Thermaerobacter sp.
  misc_feature (1)..(413): tr|A0A371Z866|A0A371Z866_9FIRM tRNA epoxyqueuosine(34) reductase QueG OS=Thermaerobacter sp. PB12/4term OX=229 3838 GN=queG PE=4 SV=1
MACPDPAGLKRALLAQARRLGFVAAGVAAAAPQVDLEWLLRRRQAQGMATPWEDPDPGRRTDPSSLLPGARSVVAVAMAYDPPRTRRRAPEGRSPREGAGHRGESRDPAALRGAALRGYVAAAGRTRSYQHVMTRRLQALGRWLEATVPGGCRWAVQVDTGPLVDRAWAQQAGIGWIGKNACLIVPGTGSWVFLGELVTDVEFPPDQPLADACAGCDLCLRACPTGAFIAPRQLDPRRCISFLSQKPGMLDEEERAALGQSLYGCDACQAVCPFNRRAVPGHPALRPRPGDPEDPAAPLLPDLLAMGRAAFQSRYRPLTGAWRGRKAWQRNAIVALGNRGPAARPAVPALARVLLGDPRPDLRALAAWALGRIGGHAAREALERARAKDRDAAVRQAAARALAEGARAVKGPD

SEQ ID NO: 81615 - protein, 408 aa, Thermaerobacter subterraneus
  misc_feature (1)..(408): tr|K6Q3Y6|K6Q3Y6_9FIRM Putative Fe-S protein OS=Thermae robacter subterraneus DSM 13965 OX=867903 GN=ThesuDRAFT _01594 PE=4 SV=1
MACPDPAGLKRALLAEARRLGFVAAGVAAAAPQVDLEWLLRRRQAQGMATPWEDPDPARRADPSSLLPGARSVVAVAMAYDPPRTRRRAAEGQGPREGTGDRGGRREPPSLRGYVAAAGRTRSYQHVMTRRLQALGRWLEATVPGGCRWAVQVDTGPLVDRAWARQAGIGWIGKNACLIVPGAGSWVFLGELVTDVELPPDQPLADACAGCDLCLRACPTGAFLAPRQLDPRRCISFLSQKPGMLDEEERAALGQSLYGCDACQAVCPFNRRAVPGHPALRPRPGDPEDPAAPLLPDLLAMGRAAFQARYRPLTGAWRGRKAWQRNAIVALGNRGPAARPAVPALARVLLGDPRPDLRALAAWALARIGGDAAREALERARAQDPDAAVRQAAARALAEGARPARKPV

SEQ ID NO: 81616 - protein, 366 aa, Thermanaeromonas toyohensis
  misc_feature (1)..(366): tr|A0A1W1VHP5|A0A1W1VHP5_9THEO Epoxyqueuosine reductase OS=Thermanaeromonas toyohensis ToBE OX=698762 GN=SAMN0 0808754_0644 PE=4 SV=1
MALLEALLGKASELGFKAGVIEARVVFERGLARLKEREEYRWVTPFVSGSLEQRCRPLSLYPGARTVIALAYPWYFPDPAPWKPGQGIIAMSARGEDYHRVLRRRLEPLVSWLREQGARLVVTQVDNGPLLEREAAFWAGLGYYGYNCSLIVPGWGSWVALGLIVTDLEIEPTPYQEERRCKECGQCFAACPSGALIGPYILNPSRCLSYLTQKRGFLPREVRSLLGARLYGCDTCQEVCPENEGLSREQAQLAKPFPFPDLVNVLQLDNHSFKEQFGATALAWRGKGVLKRNALIALGNSGYATEEAIKIMEQFLSSPSAILRAHAAWALGQLKVPHSHLALEMALQKEQDPMVRQELEKALFSY

SEQ ID NO: 81617 - protein, 385 aa, Thermanaerothrix daxensis
  misc_feature (1)..(385): tr|A0A0P6XLP3|A0A0P6XLP3_9CHLR 4Fe-4S ferredoxin-type d omain-containing protein OS=Thermanaerothrix daxensis O X=869279 GN=SE15_04495 PE=4 SV=1
MSGSSNTNSLIEILHFKAEQLGLELLGITVPVAPPHLSTYLGWIAQGHHAGMAYMASERNRFLRTHPEAILPEAQALLVVGMRYPAPHALPPPSSHPVGRIASYAWGKDYHLTLPALLQELLKVAEEYLGHPIPSRLYCDTGPVLERDFAQQAGLGWIGKNTCLIHPRKGSYFFLGEAFIGAPLPPTPAFSTDHCGTCRRCIEACPTQCILPNRTIDAGRCISYLTIENKGAIPRALRPRMGNWVFGCDICQMVCPWNLRFAKADGSPAFEMYPEIAYPDLRRELRLTPEAFKERYGKTPVIRARRRGFLRNLAVALGNAADPSTVPTLGQVLQEEPEPLIRSHAAWALGRIQTRAARYVLEKARKSEPIPEVQMEINAALEETP

SEQ ID NO: 81618 - protein, 382 aa, Thermoactinomyces sp.
  misc_feature (1)..(382): tr|A0A151Z016|A0A151Z016_9BACL Epoxyqueuosine reductase OS=Thermoactinomyces sp. AS95 OX=1811386 GN=queG PE=3 SV=1
MNAEELKQRLKEKAKEIGIDKIGFASADPFTELKERLKESREKGYASGFEEPDIEKRVDPSLSLPQAKTIIAIALSYPSRLKNAPRSEEGAYRGYFCRASWGQDYHDVLKERLRQLEAALKEWVPEARTMIMVDTGALSDRAVAERAGIGWSGKNTAIITEEFGSWVYLGEMITDVYLPPDEPVTDGCGDCTLCLDACPTGALVQPGQLNAQSCIAYLTQTKGFLPDEYRGKIGNRLYGCDTCQIVCPKNRKIDFDHQPEFRPDAEKVKPLLKPLLSISNREFKETYGSMAGSWRGKKPIQRNAILALAHFRDRSAVSGLVRLLRDDPRPVIRGTAAWALGKIGGDEAKEALLEAKEKETDPDVLREIDKGLEFFAGDPVVS

SEQ ID NO: 81619 - protein, 393 aa, Thermoactinomyces sp.
  misc_feature (1)..(393): tr|A0A1H3QPI6|A0A1H3QPI6_9BACL Epoxyqueuosine reductase OS=Thermoactinomyces sp. DSM 45892 OX=1882753 GN=SAMN0 5444416_114109 PE=4 SV=1
MNAMELKQKLIEKANEIGIDKIGFTTADPFVELKQKLVQHRESGYESGFEEPDLNLRTIPTLTLPEAKSIIAIAIAYPSKMSNPPRSEPGAYRGIFARASWGQDYHDVLRDKLAQLEAYLLELVPTARIQSMVDTGALSDRAVAERAGIGWSAKNTSILTEEFGSWIYLGEMITDLYLPPDESVLDGCGDCTLCLDVCPTGALVEPGQLDSTKCIAFLTQTKGFIDEFYREKIGNRLYGCDTCQTVCPKNRKRNFTHHAEFEPDPELVKPLLQPLLTMSNREFKEKYGYMSGSWRGKKPIQRNAIIALAHFKDQSAVPLLKNLLRQDPRPVIRGMSAWALSKISGTGAEEILNQAFHEEQDEEVLREIRFGLEQIQKSATSPKTKEDYHDYSL

SEQ ID NO: 81620 - protein, 378 aa, Thermoactinomyces vulgaris
  misc_feature (1)..(378): tr|A0A0N0Y5Q6|A0A0N0Y5Q6_THEVU Epoxyqueuosine reductase OS=Thermoactinomyces vulgaris OX=2026 GN=queG PE=3 SV= 1
MNSADLKQKLISKAKEIGIDKIGFTTADPFIALRERLKESQEKGYASGFEEPDIEKRVRPERSLPEAKSIIAIALAYPSKLKNPPRSEAGAYRGIFCRASWGEDYHHVLREKLTLLSAYLQELVPDARTQVMVDTGALSDRAVAERAGIGWSGKNTSIITKEFGSWVYLGEMITDVYIPPDTPATDECGDCTICIDACPTGAIVQAGQLNAQACIAYLTQTKGFLAEEYRSKLGNRLYGCDTCQTVCPKNRKRHFDHQTAFQPDPEKVKPLLKPLLQMSNREFRERFGRMSGAWRGKKPIQRNAIIALAHFKDQTAIPDLVRLLAEDPRPVIRGTAAWALGKIGGKEVLEALQKAQEKEGDQEVLHEIGKALDMAQNA

SEQ ID NO: 81621 - protein, 380 aa, Thermoanaerobacter brockii
  misc_feature (1)..(380): tr|E8UQL3|E8UQL3_THEBF 4Fe-4S ferredoxin-type domain-co ntaining protein OS=Thermoanaerobacter brockii subsp. f innii (strain ATCC 43586 / DSM 3389 / AKO-1) OX=509193 GN=Thebr_0745 PE=4 SV=1
MDCVTKEEIKKFAQQIGVDLVGFASPDCLKEYDNFLKERENLGYSCSIEERDIQKRISPEFILPEVKSIIAIALSYNVEYEIKYYSRSFGIVSRSSWGIDYHKVLKEKMEKLSEFIKSKCEGVKTVCLVDNNPLLEREIAYHAGIGWFGKNGLIINDEYGSYIFLGEILINKYFEPDAPQKTKCGDCDLCIKACPTNAIVEPYIINAHKCLSYITVKKGKIEEKMSKKMGRRIYGCDTCQHVCPFNKRAKKVVRSEFVPDKLLPRHDLIEILNMSKKEFAEIFGPTSSSWRGKSIIIRNAIIACVNTKEKSCIEPLKNLLKSQSPLLRGYSAWALSHLCDKEILSEIENALLKEKDEMAKKMMIEVLNKLKGDKIENNER

SEQ ID NO: 81622 - protein, 374 aa, Thermoanaerobacter ethanolicus
  misc_feature (1)..(374): tr|C7IV20|C7IV20_THEET 4Fe-4S ferredoxin-type domain-co ntaining protein OS=Thermoanaerobacter ethanolicus CCSD 1 OX=589861 GN=TeCCSD1DRAFT_2131 PE=4 SV=1
MDCVTKEEIKKFAQQIGVDLVGFASPDCLKEYDNFLKERENLGYSCSIEERDIQKRISPEFILPEVKSIIAIALSYNVEYEIKYYSRSFGIVSRSSWGIDYHKVLKEKMEKLSEFIKSKCEGVKTVCLVDNNPLLEREIAYHAGIGWFGKNGLIINDEYGSYIFLGEILINKYFEPDAPQKTKCEDCNLCIKACPTNAIAEPYIIDANKCLSYITVKKGKIEEKIAKKMGRRIYGCDTCQQVCPFNKRAKKVVRPEFVPDKLLPRHDLIEILNMSKKEFAEIFGPTSSSWRGKSIIIRNAIIACVNTKEKSCIEPIKNLLKSQSPLLRGYSAWALSHLCDKDKEVVVEIKEALIEEKDEFAKEMMAKAINRLKG

SEQ ID NO: 81623 - protein, 380 aa, Thermoanaerobacter italicus
  misc_feature (1)..(380): tr|D3T3L4|D3T3L4_THEIA 4Fe-4S ferredoxin-type domain-co ntaining protein OS=Thermoanaerobacter italicus (strain DSM 9252 / Ab9) OX=580331 GN=Thit_1563 PE=4 SV=1
MGCVTKQEIENYARQIGIDLIGFASPDCLKEYKNFLKERENLGYSCSIEERDIQKRISPEFILPEVKSIIAIALSYNVKYEIKNYSRNFGIISRTSWGIDYHKVLKEKMEKLSEFIKSKCEGVETICLVDNNPLLEREIAYHAGIGWYGKNGLIINDEYGSYIFLGEILINKYFESDIPKQSKCGDCDLCVKACPTKAIVKPYIINANKCLSYITVKKGKIDEKMAKKMGRRIYGCDTCQQVCPFNKRAKKVVRPEFLPDKLLPRHELIEILNMSKKEFEEIFGPTSSSWRGKSIIIRNAIISCVNTKEKNCIEPIKNLLKSQSPLLRGYSAWALSNLCDKEILSEIENALLREKDEMAKKMMTEALNKLKGDKIENHKG

SEQ ID NO: 81624 - protein, 380 aa, Thermoanaerobacter kivui
  misc_feature (1)..(380): tr|A0A097ASJ4|A0A097ASJ4_THEKI Epoxyqueuosine reductase QueG OS=Thermoanaerobacter kivui OX=2325 GN=queG PE=4 SV=1
MECITKEQIRDFAREIGIDLVGFAKPDCLKEDQERLKEREALGLSCSIEERDVLKRISPEFILPEVKSIITIAVSYNVDYDIRHSNRSYGIISRSSWGIDYHKVLKEKMEKLSEFIKSKCQEVKTVCLVDNNPLLEREIAYHAGIGWFGKNGLIINDEYGSYIFLGEILINKYFEPDAPQKTKCGDCNLCIKACPTNAIAEPYIIDTNKCLSYITVKKGKIEEKIAKKMGRRIYGCDTCQQVCPFNKRAKKVVRPEFVPDKLLPRHDLIEILNMSKKEFAEIFGPTSSSWRGKSIIIRNAIIACVNTKEKSCIEPIKNLLKSQSPLLRGYSAWALSHLCEKEILSEIEDALLKEKDEMAKKMMIEALNKLKGDKIENNKG

SEQ ID NO: 81625 - protein, 380 aa, Thermoanaerobacter mathranii
  misc_feature (1)..(380): tr|D7AQ38|D7AQ38_THEM3 4Fe-4S ferredoxin-type domain-co ntaining protein OS=Thermoanaerobacter mathranii subsp. mathranii (strain DSM 11426 / CIP 108742 / A3) OX=5833 58 GN=Tmath_1570 PE=4 SV=1
MGCVTKQEIENYARQIGIDLIGFASPDCLKEYKNFLKERENLGYSCSIEERDIQKRISPEFILPEVKSIIAIALSYNVKYEIKNYSRNFGIISRTSWGIDYHKVLKEKMEKLSEFIKSKCEGVETICLVDNNPLLEREIAYHAGIGWYGKNGLIINDEYGSYIFLGEILINKYFESDIPKQSKCGDCDLCVKACPTKAIVKPYIINANKCLSYITVKKGKIDEKMAKKMGRRIYGCDTCQQVCPFNKRAKKVIRPEFLPDKLLPRHELIEILNMSKKEFEEIFGPTSSSWRGKSIIIRNAIISCVNTKEKNCIEPIKNLLKSQSPLLRGYSAWALSNLCDKEILSEIENALLREKDEMAKKMMTEALNKLKGDKIENHKG

SEQ ID NO: 81626 - protein, 380 aa, Thermoanaerobacter pseudethanolicus; identical to SEQ ID NO: 81621
  misc_feature (1)..(380): tr|B0K870|B0K870_THEP3 4Fe-4S ferredoxin-type domain-co ntaining protein OS=Thermoanaerobacter pseudethanolicus (strain ATCC 33223 / 39E) OX=340099 GN=Teth39_0723 PE= 4 SV=1

SEQ ID NO: 81627 - protein, 374 aa, Thermoanaerobacter siderophilus
  misc_feature (1)..(374): tr|I9KU18|I9KU18_9THEO Iron-sulfur cluster binding prot ein, putative OS=Thermoanaerobacter siderophilus SR4 OX =880478 GN=ThesiDRAFT1_1510 PE=4 SV=1
MDCVTKEEIKKFAQQIGIDLVGFASPDCLKEYNNFLKERENLGYSCSIEERDIQKRISPEFILPEVKSIIAIALSYNVEYEVKYYSRSFGIVSRSSWGVDYHKVLKEKMEKLSEFIKSKCQEVKTVCLVDNNPLLEREIAYHAGIGWFGKNGLIINDEYGSYIFLGEILINKYFEPDAPQKTKCGDCNLCIKACPTNAIVEPYIIDANKCLSYITVKKGKIEEKIAKKMGRRIYGCDTCQQVCPFNKRAKKVVRPEFVPDKLLPRHDLIEILNMSKKEFAEIFGPTSSSWRGKSIIIRNAIIACVNTKEKSCIEPIKNLLKSQSPLLRGYSAWALSHLCDKDKEVVVEIKEALIEEKDEFAKEMMAKAINRLKG

SEQ ID NO: 81628 - protein, 380 aa, Thermoanaerobacter sp.; identical to SEQ ID NO: 81621
  misc_feature (1)..(380): tr|A0A358VZF7|A0A358VZF7_THESB tRNA epoxyqueuosine(34) reductase QueG OS=Thermoanaerobacter sp. OX=1755 GN=que G PE=4 SV=1

SEQ ID NO: 81629 - protein, 374 aa, Thermoanaerobacter sp.
  misc_feature (1)..(374): tr|A0A0B3BEH8|A0A0B3BEH8_9THEO Epoxyqueuosine reductase OS=Thermoanaerobacter sp. YS13 OX=1511746 GN=THYS13_09 970 PE=4 SV=1
MDCVTKEEIKKFAQQIGIDLVGFASPDCLKEYDNFLKERKNLGYSCSIEERDIQKRISPEFILPEVKSIIAIALSYNVEYEVKYYSRSFGIVSRSSWGIDYHKVLKEKMEKLSKFIKSKCQEVKTVCLVDNNPLLEREIAYHAGIGWFGKNGLIINDEYGSYIFLGEILINKYFEPDAPQKTKCGDCNLCIKACPTNAIVEPYIINANKCLSYITVKKGKIEEKMSKKMGRRIYGCDTCQQVCPFNKRAKKVVRPEFLPDKLLPRHDLIEILNMSKKEFAEIFGPTSSSWRGKSIIIRNAIIACVNTKGKSCIEPIKNLLKSQSPLLRGYGAWALSHLCDKNKEVVVEIKEALIEEKDEFAKEMMTKAINRLKG

SEQ ID NO: 81630 - protein, 380 aa, Thermoanaerobacter thermocopriae
  misc_feature (1)..(380): tr|A0A101D7H0|A0A101D7H0_9THEO 4Fe-4S ferredoxin-type d omain-containing protein OS=Thermoanaerobacter thermoco priae OX=29350 GN=XD37_1353 PE=4 SV=1
MDCVTKEEIKKFAQQIGVDLVGFASPDCLKEYDNFLKERENLGYSCSIEERDIQKRISPEFILPEVKSIIAIALSYNVEYEIKYYSRSFGIVSRSSWGIDYHKVLKEKMEKLSEFIKSKCEGVKTVCLVDNNPLLEREIAYHAGIGWFGKNGLIINDEYGSYIFLGEILINKYFEPDAPQKTKCGDCDLCIKACPTNAIVEPYIINAHKCLSYITVKKGKIEEKMSKKMGRRIYGCDTCQHVCPFNKRAKKVVRPEFVPDKLLPRHDLIEILNMSKKEFAEIFGPTSSSWRGKSIIIRNAIIACVNTKETSCIEPIKNLLKSQSPLLRGYSAWALSYLCDKEILSEIENALLKEKDEMAKKMMIEVLNKLKGDKIENNER

SEQ ID NO: 81631 - protein, 374 aa, Thermoanaerobacter thermohydrosulfuricus
  misc_feature (1)..(374): tr|A0A1G7SL22|A0A1G7SL22_THETY Epoxyqueuosine reductase OS=Thermoanaerobacter thermohydrosulfuricus OX=1516 GN =SAMN04244560_01999 PE=4 SV=1
MDCVTKEEIKKFAQQIGIDLVGFASPDCLKEYNNFLKERENLGYSCSIEERDIQKRISPEFILPEVKSIIAIALSYNVEHEIKYYSRSYGIISRSSWGVDYHKVLKEKMEKLSEFIKSKCQEVKTVCLVDNNPLLEREIAYHAGIGWFGKNGLIINDEYGSYIFLGEILINKYFESDAPQKTKCGDCNLCIKACPTNAIAEPYIIDANKCLSYITVKKGKIEEKIAKKMGRRIYGCDTCQQVCPFNKRAKKVVRPEFVPDKLLPRHDLIEILNMSKKEFAEIFGPTSSSWRGKSIIIRNAIIACVNTKEKSCIEPIKNLLKSQSPLLRGYSAWALSHLCDKDKEVVVEIKEALIEEKDEFAKEMMAKAINRLKG

SEQ ID NO: 81632 - protein, 374 aa, Thermoanaerobacter thermohydrosulfuricus
  misc_feature (1)..(374): tr|M8DPM2|M8DPM2_THETY Iron-sulfur cluster binding prot ein, putative OS=Thermoanaerobacter thermohydrosulfuric us WC1 OX=1198630 GN=TthWC1_1996 PE=4 SV=1
MDCVTKEEIKKFAQQIGIDLVGFASPDCLKEYNNFLKERENLGYSCSIEERDIQKRISPEFILPEVKSIIAIALSYNVEHEIKYYSRSYGIISRSSWGVDYHKVLKEKMEKLSEFIKSKCQEVKTVCLVDNNPLLEREIAYHAGIGWFGKNGLIINDEYGSYIFLGEILINKYFESDAPQKTKCEDCNLCIKACPTNAIAEPYIIDANKCLSYITVKKGKIEEKIAKKMGRRIYGCDTCQQVCPFNKRAKKVVRPEFVPDKLLPRHDLIEILNMSKKEFAEIFGPTSSSWRGKSIIIRNAIIACVNTKEKSCIEPIKNLLKSQSPLLRGYSAWALSHLCDKDKEVVVEIKEALIEEKDEFAKEMMAKAINRLKG

SEQ ID NO: 81633 - protein, 374 aa, Thermoanaerobacter uzonensis
  misc_feature (1)..(374): tr|A0A1M4WKK3|A0A1M4WKK3_9THEO Epoxyqueuosine reductase OS=Thermoanaerobacter uzonensis DSM 18761 OX=1123369 G N=SAMN02745195_01196 PE=4 SV=1
MDCVTKEEIKNFAKQIGIDLIGFASPDCLKEYDNFLKERENLGYSCSIEERDIQKRISPEFILPEVKSIIAIALSYNIEYEIKYYSRSFGIVSRSSWGIDYHKVLKEKMEKLSEFIKSKCQEVKTVCLVDNNPLLEREIAYYAGIGWFGKNGLIINDEYGSYIFLGEILVNKYFEPDAPQKTKCGDCNLCIKACPTNAIVEPYIINANKCLSYITVKKGKIEEKMSKKMGRRIYGCDTCQHVCPFNKRAKKVVRPEFVPDKLLPRHDLIEILNMSKKEFAEIFGPTSSSWRGKSIIIRNAIIACVNTKEKSCIEPIKNLLKSQSPLLRGYSAWALSHLCDKNKEVVVEIKEALIEEKDEFAKEMMAKAIDRLKG

SEQ ID NO: 81634 - protein, 374 aa, Thermoanaerobacter wiegelii
  misc_feature (1)..(374): tr|G2MVH0|G2MVH0_9THEO 4Fe-4S ferredoxin-type domain-co ntaining protein OS=Thermoanaerobacter wiegelii Rt8.B1 OX=697303 GN=Thewi_1698 PE=4 SV=1
MDCVTKEEIKKFAQQIGIDLVGFASPDCLKEYNNFLKERENLGYSCSIEERDIQKRISPEFILPEVKSIIAIALSYNVEHEIKYYSRSYGIISRSSWGVDYHKVLKEKMEKLSEFIKSKCQEVKTVCLVDNNPLLEREIAYHAGIGWFGKNGLIINDEYGSYIFLGEILINKYFEPDVPQKTKCGGCDLCIKACPTKAIIEPYIIDANKCLSYITVKKGKIEEKIAKKMGRRIYGCDTCQQVCPFNKRAKKVVRPEFVPDKLLPRHDLIEILNMSKKEFAEIFGPTSSSWRGKSIIIRNAIIACVNTKEKSCIEPIKNLLKSQSPLLRGYSAWALSHLCDKDKEVVVEIKEALIEEKDEFAKEMMAKAINRLKG

SEQ ID NO: 81635 - protein, 367 aa, Thermoanaerobacteraceae bacterium
  misc_feature (1)..(367): tr|A0A5D8Q9W2|A0A5D8Q9W2_9THEO tRNA epoxyqueuosine(34) reductase QueG OS=Thermoanaerobacteraceae bacterium A05 MB OX=2606906 GN=queG PE=4 SV=1
MICVKDEIREYALSIGFDVVGFTGADVFDIADVLKERGEKGYLSGLEKGGIEERIDPRKVLPEARSIISVGIYYGGTKRSEKNKGMISQSGRGRDYHLILDKMMGELVDYLKCEYNAEAVCLADNDPLVDREIARRAGVGFFGKNCSIINPFMGSWIFLGEILTDLDILPDVPLMHACGDCDRCIKACPTGAIAAPYVLNAKRCLSYVTVMKGFVPSEFRERLQNRIYGCDTCQEACPYNRVDLPVNSCLAQDIPYDMEDIGFILSMDSKQFKESFKNTSAGWRGRTVIQRNGLIAAGNMRLKGQAENIIRLLSDERPVIRGTAAWAISRIMGKEALGILYEASKIEKDSEVRREIEEAISWIKKGQ

SEQ ID NO: 81636 - protein, 350 aa, Thermoanaerobacteraceae bacterium
  misc_feature (1)..(350): tr|A0A3A9JR94|A0A3A9JR94_9THEO tRNA epoxyqueuosine(34) reductase QueG OS=Thermoanaerobacteraceae bacterium SP2 OX=2292448 GN=queG PE=4 SV=1
MGLKEDIKKFAKDIGLDAVGFASAEPFLEEKKILEQKKAKGLLSPFEEQDIEQRCYPEKLLPGARTIICFAMGYLINPYRPVETGLKGPLFGKISRYALVKDYHYVLMDKLKAVIEFISKRKQGRFMIFVDTGSLMDKAAARRAGIGWIGENTCLFTPDLGSWVFLGEILTDIEIEPDEPARDLCDHCGRCVKACPTGALMAPFQINPHHCLSYITQIRGSLPEEFRKPMGSRIFGCDTCQEACPKNNSVRIPHHPEFVPDQPLTSNLLKLATIDKRDFERIFKPTAAGWRGRNVLRRNAICALGNMGKGETDKENVMLLLKKLACDPSEMIREQAGWSFEQLLSSRRRY

SEQ ID NO: 81637 - protein, 350 aa, Thermoanaerobacterales bacterium; identical to SEQ ID NO: 81636
  misc_feature (1)..(350): tr|A0A3G2R6Q5|A0A3G2R6Q5_9FIRM tRNA epoxyqueuosine(34) reductase QueG OS=Thermoanaerobacterales bacterium SK-G 1 OX=2316383 GN=queG PE=4 SV=1

SEQ ID NO: 81638 - protein, 380 aa, Thermoanaerobacterium aotearoense
  misc_feature (1)..(380): tr|W9E7Y0|W9E7Y0_9FIRM 4Fe-4S ferredoxin-type domain-co ntaining protein OS=Thermoanaerobacterium aotearoense S CUT27 OX=1421016 GN=V518_2117 PE=4 SV=1
MACVTKEEIKEFAYKSGIDVIGFASPDCLFEYRDLLLYRFNNGLNCNIEEKDAEKRINPYYLLDDVKTIISVAISYNVDYKFDPPKSGYGTISKTAWGVDYHKVMIDLLRNLEKFISSKCGAVKTVLLVDNNPLLERAIAYNAGIGFFGKNNMIINEEYGSYLFLGEMLINVPFEPDSKVESKCGSCARCLKACPGKALIEEYKIDANKCLSYATIQKGYLSDSTLKRLGTRIYGCDTCQDVCPFNEKAKKVTRREFTPQNLKPKHDLKDILCLDNKKFKELFGATSASWRGKNTIIRNAIIAAINLNDKDSIQQLRKLISSESAYIRGYSAYALSILDKENAFPHIEKAYLNEKDETAKEFMKKAMMNIRGETFEDNER

SEQ ID NO: 81639 - protein, 380 aa, Thermoanaerobacterium saccharolyticum; identical to SEQ ID NO: 81638
  misc_feature (1)..(380): tr|I3VY97|I3VY97_THESW 4Fe-4S ferredoxin-type domain-co ntaining protein OS=Thermoanaerobacterium saccharolytic um (strain DSM 8691 / JW/SL-YS485) OX=1094508 GN=Tsac_2 494 PE=4 SV=1

SEQ ID NO: 81640 - protein, 380 aa, Thermoanaerobacterium sp.
  misc_feature (1)..(380): tr|A0A1X2G115|A0A1X2G115_9FIRM tRNA epoxyqueuosine(34) reductase QueG OS=Thermoanaerobacterium sp. PSU-2 OX=19 30849 GN=BVF91_00280 PE=4 SV=1
MTCVTKEEIKEFAYKSGIDVIGFASPDCLFEYRDLLLYRLNNGLNCNIEEKDVEKRINPYYLFSDVKTIISVAVSYNVDYEFEVPKSGYGVISKTAWGTDYHKVMIDLLKNLENFISSKCGGTKTVLLVDNNPLLERAIAYNAGIGFFGKNNMIINEEFGSYLFLGEMLINVQFEPDSKIESKCGSCTRCLKACPGKALIEEYKIDANKCLSYATIKKGYLSDSTLKRLGTRIYGCDTCQDVCPFNEKAKKVTRREFMPQNLKPKHDLKDILCLDNKKFKELFGATSASWRGKNTIIRNAIIAAINSNDKDSIEPLKKLINSESAYIRGYSAYALSILDKENAFPYIEKAYLNEKDESTKEFMKKAITNIRGETFDDNER

SEQ ID NO: 81641 - protein, 225 aa, Thermoanaerobacterium sp.
  misc_feature (1)..(225): tr|A0A285BJ91|A0A285BJ91_9FIRM Epoxyqueuosine reductase QueG (Queuosine biosynthesis) OS=Thermoanaerobacterium sp. RBIITD OX=1550240 GN=SAMN05660242_2869 PE=4 SV=1
MDNEKILIKKIKEWGASDIGFSDLIDVLPESLKDLRYGITVIVKLSNRIIDEISDKPTYTYFHHYRSVNTLIDQITLRAVLMLEEWGYNALAVPASQSIKELGEYRGLFQHKTAATKAGLGWIGKNGLLITEKYGPRVRLGTILTDMKLSSGTPIEISKCGNCNLCVRNCPAMALYGKTWKAGMLRNEIVDARACSEYMNKKFKHIGRGSVCGICIKVCPYGKKI

SEQ ID NO: 81642 - protein, 380 aa, Thermoanaerobacterium thermosaccharolyticum
  misc_feature (1)..(380): tr|A0A231VL31|A0A231VL31_THETR Putative fe-s protein OS =Thermoanaerobacterium thermosaccharolyticum OX=1517 GN =queG PE=4 SV=1
MTCVTKDEIREFAYKSGIDIVGFASPDCLFKYRDLLKNRYENGLSCNIEEKDIEKRINPYYFLKDVKSIVSIAVSYNIVYEADSPKSAYGTISRTAWGVDYHKVLINLLEKLRIFILSKCDDAKTVLLVDNNPLLERAIAYNAGIGFYGKNNMIINEKYGSYLFLGEMLLNIYFEPDKKVETKCGSCTRCLKACPGKALVGEYKIDANKCLSYATIKKGYLSDDTIKKIGTRIYGCDTCQDVCPFNKTAKRVIKDEFIPRGLKPKHDLKEILSLNKEKFQEVFGPTSASWRGKNTMIRNAIIASINSNDKNAIEPLKSLLDGESSYLRGYSAYALSILDGENSLPYIEKAYFKETDVSAKMFMKKAIKKIRGEVFEDNER

SEQ ID NO: 81643 - protein, 380 aa, Thermoanaerobacterium thermosaccharolyticum
  misc_feature (1)..(380): tr|L0ILJ7|L0ILJ7_THETR Uncharacterized Fe-S protein OS= Thermoanaerobacterium thermosaccharolyticum M0795 OX=69 8948 GN=Thethe_02051 PE=4 SV=1
MTCATKDEIREFAYKSGIDIVGFASPDCLFKYRDLLKNRYENGLSCNIEEKDIEKRINPYYFLKDVKSIVSIAVSYNIIYEADSPKSAYGTVSRTAWGVDYHKVLINLLKKLRNFILSKCNDAKAVLLVDNNPLLERAIAYNAGIGFYGKNNMIINEKYGSYLFIGEMLLNIFFEPDKKIVSKCGSCTRCLKACPGKALVGEYKIDANKCLSYATIKKGYLSDDTIKKIGTRIYGCDTCQDVCPFNKTAKRVIKDEFIPRGLKPKHDLKEILSLNKEKFQEVFGPTSASWRGKNTMIRNAIIASINSNDKNAIEPLKSLLDGESSYLRGYSAYALSILDGENSLPYIEKAYFKETDVSAKMFMKKAIKKIRGEVFEDNER

SEQ ID NO: 81644 - protein, 380 aa, Thermoanaerobacterium xylanolyticum
  misc_feature (1)..(380): tr|F6BJ15|F6BJ15_THEXL 4Fe-4S ferredoxin-type domain-co ntaining protein OS=Thermoanaerobacterium xylanolyticum (strain ATCC 49914 / DSM 7097 / LX-11) OX=858215 GN=Th exy_0806 PE=4 SV=1
MTCVTKEEIKDFAYKSGIDVIGFASPDCLFEYRDLLLYRLNNGLNCNIEEKDVDKRINPYYLLSDVKSIISVAISYNVDYEFEAPRYGYGTISKTAWGVDYHKVMIDLLKKLEKFISSKCGDAKTVLLVDNNPLLERAIAYNAGIGFFGKNNMIINEEYGSYIFLGEMLINISFEPDSKVESKCGSCRRCLKACPGKALIEEYKIDANKCLSYATIKKGYLSDSTLKRLGTRIYGCDICQDVCPFNQKAKKVTRREFTPQNLKPKHDLKDILRLDNKKFKELFGDTSASWRGKNTIIRNAIIAAINSNDKDAIEPLKKLINSESAYIRGYSAYALSILDKENAFSYIEKAYLNEKDESTKEFMKKAIMNIRGETFEGNER

SEQ ID NO: 81645 - protein, 315 aa, Thermoanaerobaculum aquaticum
  misc_feature (1)..(315): tr|A0A062XYC7|A0A062XYC7_9BACT 4Fe-4S ferredoxin-type d omain-containing protein OS=Thermoanaerobaculum aquatic um OX=1312852 GN=EG19_11865 PE=4 SV=1
MERAHHEAKEALRAYALKTLGFDLFGVAPAEPLEGQRHLAAWLAMGFHGEMAYMARTATLRGNPDALLPGARSVICVACAYHDPPDGPLPSGHVRVARYARRRDYHKVIRKKLLKLGEHLVGLFPEAQFRIVVDSGPLLEKEVAQRAGLGWIGKNTCLINRRLGSELLLGELITTVALPPDSPETDHCGSCTACLAACPTEALRGPYQLDARRCISYLTIEHKSAFDADHPPQLSGYLFGCDLCQTCCPWNRHAPLQVNPHLPTRAHLATLSVSELAGLDAEAWAKLAEGSPLRRLTYERLRRNLGALDSTAKQE

SEQ ID NO: 81646 - protein, 418 aa, Thermobacillus composti
  misc_feature (1)..(418): tr|L0EHE2|L0EHE2_THECK Epoxyqueuosine reductase OS=Ther mobacillus composti (strain DSM 18247 / JCM 13945 / KWC 4) OX=717605 GN=queG PE=3 SV=1
MTERPAAFYAELKAEMKAAARSLGIDKIGVASAEPFTELRRTLERHRALGRESGFEEPDLDKRTNPALLMEDPQSIIAIAVAYPSKLRDAPKSEPGARRGILSRSAWGRDYHEVLRDRLSRLEAWLRERAPELRALSMTDTGALVDRAVAERAGIGWSGKNCSIITPEFGSWVYLGEMITNLPLPPDAPVTEMCGECTKCIDACPTGALVGPGELNAQACVSYLTQTKGYLSDGQMRKIGNRLYGCDTCQIVCPVNRGKDWTHHEELQPDPDTVKPLLVPLLSMSNREFKERFGASAAAWRGKKPIQRNAVIALGHFREASAVPDLIRVLTDDPRPVLRGTAAWALGRIGGPEAERALRQALDREADPETSARIKAALEALENPEPRDAAGGRADDRRHGGADSGVPIYEEGAAKPGV

SEQ ID NO: 81647 - protein, 446 aa, Thermobacillus sp.
  misc_feature (1)..(446): tr|A0A3E0R0J8|A0A3E0R0J8_9BACL Epoxyqueuosine reductase OS=Thermobacillus sp. OX=2108467 GN=queG PE=3 SV=1
MEQPVRRAGPGRDPAAVAAGLTKEARSAMTERPAAFYAELKAEMKAAARSLGIDKIGVASAEPFTELRRTLERHRALGRESGFEEPDLDKRTNPALLMEDPQSIIAIAVAYPSKLRDAPKSEPGARRGILSRSAWGRDYHEVLRDRLSRLEAWLRERAPELRALSMTDTGALVDRAVAERAGIGWSGKNCSIITPEFGSWVYLGEMITNLPLPPDAPVTEMCGECTKCIDACPTGALVGPGELNAQACVSYLTQTKGYLSDGQMRKIGNRLYGCDTCQIVCPVNRGKDWTHHEELQPDPDTVKPLLVPLLSMSNREFKERFGASAAAWRGKKPIQRNAVIALGHFREASAVPDLIRVLTDDPRPVLRGTAAWALGRIGGPEAERALRQALDREADPETSARIKAALEALENPEPRDAAGGRADDRRHGGADSGVPIYEEGAAKPGV

SEQ ID NO: 81648 - protein, 395 aa, Thermobacillus sp.
  misc_feature (1)..(395): tr|A0A1Y3QE26|A0A1Y3QE26_9BACL Epoxyqueuosine reductase OS=Thermobacillus sp. ZCTH02-B1 OX=1858795 GN=queG PE= 3 SV=1
MTAVTERPAAFYANLKAEMKAAAGSLGIDKIGVASAEPFDELRARLERHRWLGRESGFEEPDLDKRTNPALLMEDARSIIAIAVAYPSKLRDAPKSEPGARRGILSRSAWGRDYHEVLRDRLARLEAWLRERVPELRALSMTDTGALVDRAVAERAGIGWSGKNCSIITPEFGSWVYLGEMITNLPLPPDQPVTEMCGACTKCLDACPTGALVGPGELNAQACVSYLTQTKGFLSDDAMRKIGNRLYGCDTCQIVCPANRGMDWTHHEEFRPDPDTVKPLLVPLLKMGNREFRERFGSSAAAWRGRKPIQRNAVIALGHFREKSAVPDLVRVLMDDPRPVLRGTAAWALGRIGGSDAERALREALEREADPEAAERIRAALAVLEGSTDQDRREV

SEQ ID NO: 81649 - protein, 383 aa, Thermobaculum terrenum
  misc_feature (1)..(383): tr|D1CFG3|D1CFG3_THET1 Uncharacterized protein OS=Therm obaculum terrenum (strain ATCC BAA-798 / YNP1) OX=52590 4 GN=Tter_0752 PE=4 SV=1
MQTSLVLTIEDIKKLATECSLDVVGVTSADSFDDVRQIYLERYAKGYFGEMRWITPERINLGCSPQDMLPGARSILVFAYSYLRDSNVPNENDGVIRGRVARYALGEDYHYFLKEKIELFLDKLKVITGKDFASRISVDSGPVIDRAVAARAGVGWYGKNTNILIPGYGSWVLLGTALVDIDLPLSSHIRKSCGSCTRCISACPTGALVAPGVLDSRRCISYLTIELKGPIPRDLRPLIGDWIFGCDICQEVCPVNIKGKKPNHPEFSDLPGWGHRPDLVSLMRMTEDEFRNKFRRSPVKRTKRRGLLRNVAVALGNSGDRRAVPVLVEALSDHEPLVRGHAAWALGRLGGSEAKYALESRLQIEEDSYVREEIQLALDEIEV

SEQ ID NO: 81650 - protein, 333 aa, Thermobrachium celere
  misc_feature (1)..(333): tr|R7RQH4|R7RQH4_9CLOT Epoxyqueuosine (OQ) reductase Qu eG OS=Thermobrachium celere DSM 8682 OX=941824 GN=TCEL_ 01500 PE=4 SV=1
MSIKEEIIDFARSIGIEYIGFCSANFSNDFINRLSHNLKMKYNCEFQINDIEKRINIKDYMEDAKTFISIALPYKTIEIDKSKPYFSKASLGKDYHIVLKQKLKLIEEFLQNNYNAKTISFVDTGPFHDREIAYMCGIGFYGKNSTIITEKYGSFVFLGEILTDLYIEPSTPKKSLCGSCTICIKSCPMGAIEEEYFINSNKCLSYITQKKGDLTAIEQEKMGLRIYGCDTCQDVCPFNIKAQKSNILDFLPEEWNININEEDFLKMSNSQFNKTFRSTSSGWRGKKILQRNLIIAMGNSKNKKYTSLLKNISMDNSFEGYIKNSLKKLEGEE

SEQ ID NO: 81651 - protein, 297 aa, Thermoclostridium caenicola
  misc_feature (1)..(297): tr|A0A1M6IM11|A0A1M6IM11_9FIRM Epoxyqueuosine reductase OS=Thermoclostridium caenicola OX=659425 GN=SAMN054443 73_104510 PE=4 SV=1
MNETEELLTKNIDNLGGKVKTVSINILPFVREQLEKTDLNDGMLKDYFDFSLDPDIKSLVIIALPSPPCYIEIEWDFGILEADIPPVYIYRDQQLSMIKETVSNVFERYYLKSWPVVLPKKILAAMCGFGKYGRNNLLYIEGMGSCHRLTVFGTDMICTEELELAADLRMDRCSQCGVCINQCQTGAIDREKTQIAAERCLTFYNERKDAIPEWIHHDWHHSLIGCIRCQEKCPANKGLWNRKKVAEFSYDETRSLLKSTAFEDLDMALQNKLTELNLYRYFDVLSRNISLFIRANY

SEQ ID NO: 81652 - protein, 376 aa, Thermodesulfobacteriales bacterium
  misc_feature (1)..(376): tr|A0A524JTV4|A0A524JTV4_9BACT Epoxyqueuosine reductase OS=Thermodesulfobacteriales bacterium OX=2528040 GN=qu eG PE=3 SV=1
MDRAQFTSSIKEKARELGFNLIGISPVDSFPENQFYKEWLNKGFSGEMAYLERNPEKREDIQNVLPGAKSVISCAMNYNTDYPYSIEKTDKTKGWISRYAWGDDYHDTIKDGLKILMDYISSEFSDEVKSKLYVDTGPVLERTYGKYAGVGWVGKNTCLINQEIGSWIFLGEIITNIELEYDTPAPDRCGTCTRCIDACPTDAIIEPYVLDSRLCISYLTIELKDKIPSELREGVQNNIYGCDICQDVCPWNKRAHVSDKTEFQPREDLFNPDLSYISKLTVEEFRKQFKGSPIKRTKRRGLLRNAVVAMGNSGEKDFIPYIRECLGDEEPLIRAHAVWALWKIEGGQAKNILVSHMKTETDEMVNDEIDDILSSI

SEQ ID NO: 81653 - protein, 257 aa, Thermodesulforhabdus norvegica
  misc_feature (1)..(257): tr|A0A1I4R802|A0A1I4R802_9DELT Epoxyqueuosine reductase QueG (Queuosine biosynthesis) OS=Thermodesulforhabdus norvegica OX=39841 GN=SAMN05660836_00459 PE=4 SV=1
MKVTLLSIKDRVLGSIEAWLLERGYSSLWREPLVGAVDARDARLLELKKAVAPDHALPPDLLPSARSVVVYFLPFVEDVAKDNGKFHPFASRLWAFAYVETNALIARINQDLASFLGDQGYETAVTPATHNFDSRRLVSRWSHKHLAYYAGLGTFGLNHLLITASGCCGRFGSLVTSAPVETSAKPQEEFCLSKRGLPCEACLKRCPVGALSVNGLNRSLCYQRLLENNERFSDLPLTDVCGQCSCNVPCSFSIPRN

SEQ ID NO: 81654 - protein, 268 aa, Thermodesulfovibrio sp.
  misc_feature (1)..(268): tr|A0A1G3Y6F7|A0A1G3Y6F7_9BACT tRNA epoxyqueuosine(34) reductase QueG OS=Thermodesulfovibrio sp. RBG_19FT_COMB O_42_12 OX=1802373 GN=A2Z47_06390 PE=4 SV=1
MTFLGRYPERRSNPFLVFPEVKSVVVVSMNYYPGGYHRECLDNPEKGYIANYALNADYHEVIKSKLIELLIQINAMTGGKAQGKIYTDTGPVLEKAFAVKSGIGWMGKNSLIISPDAGSWLLLGVILLDTELEPDESLSDSCGECTGCIDACPTGAIVAPYVIDARRCISYLLGELKGEIPDGLKSMIGNRIFGCDDCQWACPWNKMAKVSTEIGFVPRNELTSPLLAVLMELGEGNFKNVFHDNPVIRIKWERFLRNVVVAVGNQVS

SEQ ID NO: 81655 - protein, 315 aa, Thermoflavifilum aggregans
  misc_feature (1)..(315): tr|A0A2M9CVL7|A0A2M9CVL7_9BACT Epoxyqueuosine reductase OS=Thermoflavifilum aggregans OX=454188 GN=queG PE=3 S V=1
MNPAAARHTALVKQLARKLGFDYCGIARAAALDEDARRLEKWLNKGYQGTMAYMERYFDLRIDPRKLVPEAQSVITLLMNYFPARRQRTDSYRVSKYAYGRDYHRVIKKKLKQFLKSLQEQIGEIQGRGFVDSAPVLERAWAVRSGLGWVGKNGNLITRQQGSFLFIATLITDLELVYDDPFAKDYCGTCTRCIDACPTQAILPDKIIDASRCISYYTIELKAHIYPQEAEGKWKDWIFGCDICQDVCPWNRFSRVSQEADLEPVPEILDFSTQEWEQLTEEKFVELFGHTPLKRAGWEGLQRNIRLIKKNQTYS

SEQ ID NO: 81656 - protein, 372 aa, Thermoflavimicrobium dichotomicum
  misc_feature (1)..(372): tr|A0A1I3N048|A0A1I3N048_9BACL Epoxyqueuosine reductase OS=Thermoflavimicrobium dichotomicum OX=46223 GN=SAMN0 5421852_103267 PE=4 SV=1
MFGPTEPAAVALQQAAEERGFVVAWAPTDLPSFVVSRYRNWVEDMRQAGMGQLARNIEVRLNPSSRLAWARSALVLAAPHGFPDPGPPPGGVRIGRVGRIFWVREQDYIQRRVQPHLDELKEICHRLGGRCRDYVEQGPLSFRSYGVLAGLGWIGRNGMLINQHLGSYMTLAVLLTSFELADASEHPFRCGRCKLCVESCPTGALIGDGTLDANRCISYWTTQHLDLIPFKFRESLGDWLFGCDECQSVCPWSPEASRFWEGYEPDPDLAHPDLTDFLVLSNHAFAQKYAQSAFERVGRPRMARNALVVLANTRDSGYLPLVRLGCEDPSPLVRATAAWACVRLGGRKDAERLLSDPELLVRDEARRALELG

SEQ ID NO: 81657 - protein, 378 aa, Thermoflavimicrobium dichotomicum
  misc_feature (1)..(378): tr|A0A1I3LI18|A0A1I3LI18_9BACL Epoxyqueuosine reductase OS=Thermoflavimicrobium dichotomicum OX=46223 GN=queG PE=3 SV=1
MKPGELKQKLIDKAKQIGIDKIGFASADPFVELRERLREQQEKGYASGFEEPDIEKRVRPDLNLPEAKTIIAIALAYPSKLKNPPKSAPGAYRGIFCRASWGEDYHRVLRNKLDQLEAYLLELVPTAKTMSMVDTGALSDRAVAERAGIGWSGKNTSIITEEFGSWVYLGEMITDIYLPPDQPAEDGCGDCNLCIEACPTGALVQPGQLNARACIAYLTQTKGFLEEKYRDKMGNRLYGCDTCQTVCPKNRGIHFDHHQEFQPDPEKVKPLLKPILTMSNREFKETFGQMAGSWRGKKPIQRNAIIALAHFRDESAIADLSHLLEQDPRPVIRGTAAWALGKIGGIEAEKALKQAEIKEKDPEVQTEIMRALDRLKKQ

SEQ ID NO: 81658 - protein, 377 aa, Thermoflavimicrobium sp.
  misc_feature (1)..(377): tr|A0A364K9M7|A0A364K9M7_9BACL Epoxyqueuosine reductase OS=Thermoflavimicrobium sp. FBKL4.011 OX=2137476 GN=qu eG PE=3 SV=1
MSPNELKQKIIVKAKEIGIDKIGFASADPFVELRERLVEHQQKGYASGFEEPDIEKRVRPDLSLPEAKTIIAIALAYPSKLKNPPKSAPGANRGIFCRASWGEDYHHVLRDKLNQLQMYLHELIPEANIMSMVDTGALSDRAVAERAGIGWIGKNTSLITEEFGSWVYLGEMITDIYIPPDHPVEDGCGDCNICVDACPTGALVQPGQLNAQACIAYLTQTKGFLADKYREKIGNRLYGCDTCQTVCPKNRGLHFDHHPEFAPEPEKVKPLLKPLLTMSKREFNKEFGQMSGSWRGKKPIQRNAMIALAHFRDQTAIPELSRLLLEDPRPVIRGTAAWALGKIGGFEAEDALVQAKNIEHNTEVQIEIERALKKLES

SEQ ID NO: 81659 - protein, 324 aa, Thermoflexia bacterium
  misc_feature (1)..(324): tr|A0A3M1DQ04|A0A3M1DQ04_9CHLR tRNA epoxyqueuosine(34) reductase QueG OS=Thermoflexia bacterium OX=2420334 GN= queG PE=4 SV=1
MEIDSLRTLARSLGFDLLGVSPPTPPDWALRAYREWLARGFHGEMAYMARPDRVARREDPAQILPGVRAVVCVAVNYYPGPPPPETTDPSRGRISNYAWGRDYHDWMVPRLEELAAHLRAATGGVARYRVYADTGPILERALAAQAGLGFIGKNTCLIHPRIGSWLFLGEILVDADLPFTGPPIPPRCGTCTRCLDACPTGALVAPYVLDARRCISYLTIECRGEIPPDLRARMGNWIYGCDICQEVCPWNRFARRTSVTDFLPPSLDRIAPLRKALLALDEDSFQRQFGESPVVRAGRKRLREQILRPPPEETAGETTPPVMP

SEQ ID NO: 81660 - protein, 311 aa, Thermoflexibacter ruber
  misc_feature (1)..(311): tr|A0A1I2I055|A0A1I2I055_9BACT Epoxyqueuosine reductase OS=Thermoflexibacter ruber OX=1003 GN=queG PE=3 SV=1
MLKKQDYTTFIKQKAKELGFDFCGISKAEFLEEEAPRLEKWLNQKMHGQMSYMENHFDKRLDPRLLVPDAKSVVSLLYNYYPSKKILHTDETLKISKYAYGADYHFVIKDKLKTFFKAIQDQIGEVSGRVFVDSAPVMDKVWAAKSGLGWIGKHTNLLNRERGSFFFVAELILDLELEVDAPTKDYCGTCTRCIDACPTEAIVSPYVVDGSKCISYFTIELKDEIPEDYKGKFENWIFGCDICQDVCPWNRFAKPHQEPQFEPSEDLAKMKKNDWKDITEEIFHNIFKKSAVHRTKLMGLKRNINFVTEQK

SEQ ID NO: 81661 - protein, 385 aa, Thermoflexus hugenholtzii
  misc_feature (1)..(385): tr|A0A2A9HDE6|A0A2A9HDE6_9CHLR Epoxyqueuosine reductase OS=Thermoflexus hugenholtzii OX=1495650 GN=A9A59_1255 PE=4 SV=1
MNGELKRRVLAVCREAGFPLAGVARAAPAGGARAAAERALAEGLFGEMRWMDADWVERATDPGRFLAGARSLVVVALPAHAPDPPRPADGRARGLVARYARGRDYHRVFEGRLRKAVRRLREEFGAEARATVDYGPLLERPYAAAAGLGWLGKSTMLLAPGFGPWVLLGVIATTLELEPDPPLRKSCGSCRRCIVACPTQAIAPDGGVVDARRCISYLTIEHRGVVPRDLRAAIGARVFGCDDCLDACPVGASRWEADPELQAASAERAWPELRAFVEMDQAEFEAAYRGTALMRAKREGMARNACIALGNVGSAEEAPVLARALEDGSAVVRGHAAWALGRLAARTGADVQELLTWRLTAEDDPWVREEIALALEEADARTRTG

SEQ ID NO: 81662 - protein, 355 aa, Thermoflexus hugenholtzii
  misc_feature (1)..(355): tr|A0A212QQU1|A0A212QQU1_9CHLR Epoxyqueuosine reductase OS=Thermoflexus hugenholtzii JAD2 OX=877466 GN=queG PE =3 SV=1
MVLKERLKAYARSLGFDLIGVAAAGPTPSADRYEEWVRAGRAATMAYLTRPEAIEKRRDVRHLWPEARSVIVGAMNYYAGDFPPPREDVPQGRVARYAWGEDYHEVLRERLEALLEFLNREAGRPVRGRIYVDTGPVLERAWAVQAGLGWIGKNSMLIHPRLGSYLFLGILLVDLELEPDPPFPTDHCGTCTRCIEACPTRCIRPDRTLEAERCLSYLTIERREEIPMERRAAIGDWIFGCDICQEVCPWNRRFARPTAEPAFQPREGIPRLALAEILGMDEAAFRARFRRSAIRRAKRRGLVRNALVVAGNLRARSLRPLLERWRADEDPILQEHAAWALERIEEAQVLLEGPG

SEQ ID NO: 81663 - protein, 420 aa, Thermogemmatispora argillosa
  misc_feature (1)..(420): tr|A0A455T0K9|A0A455T0K9_9CHLR Epoxyqueuosine reductase OS=Thermogemmatispora argillosa OX=2045280 GN=queG PE= 4 SV=1
MDMLLDAAPIKAYGYELGFDLVRITGAEAFPETERVIKERIAAGLMDGLPWFTSERAEVSCHPDALLPEARSIIALAMCYLSEPPEEPQDDLPRGRISRYAWGEDYHEVIKPKLKQFAEWLREYARREAGQELEARLFVDTGRMVDRAVAQRAGIGWYGKNTTILTRGWGSWVFLAEIVTNLPLPADEPLQANCGKCERCLHACPTGALPAPYVLDNRRCISYLTIELRGSIPLELRPLMGNLIFGCDICQEVCPVNQVVEKRLGLRQADRTQEPAADTLAGREADGQKQRPRIWLRKRDEFRPRPQIGGAPELIPLLSLSEEEFRARFRHTPIWRAKRRGLLRNVCVALGNLGDRRAVPALIQALNDSEALVRGHAAWALGRLGGEEARQALLARRDQEEDPEVRQEILYALNMLGDHS

SEQ ID NO: 81664 - protein, 419 aa, Thermogemmatispora aurantia
  misc_feature (1)..(419): tr|A0A5J4KAD3|A0A5J4KAD3_9CHLR Epoxyqueuosine reductase OS=Thermogemmatispora aurantia OX=2045279 GN=queG PE=4 SV=1
MKMLDAAPIKAYGYELGFDLVRITGAEAFPETERVIKERIAAGLMDGLPWFTSERAEVSCHPDALLPEARSIIALAMSYLSEPPEEPEDDQPRGRISRYAWGEDYHEIIKPKLKQFADWLREYARREAGQELEARLFVDTGRMVDRAVAQRAGIGWYGKNTTILTRGWGSWVFLAEIVTNLPLPADEPLQANCGKCERCLYACPTGALPAPYVLDNRRCISYLTIELRGSIPLELRPLMGNLIFGCDICQEVCPVNQVVEKRLGLRQAGRTAEQAGDGKTEAAAVRSRQRPQMWLRRRDEFRPRPQVGGVPELIPLLALSEEEFRARFRHTPIWRAKRRGLLRNVCVALGNLGDRRAVPALIQALCDAEALVRGHAAWALGCIGGEEARRALRERLEQEEDPEVRQEILQALTMLDGKN

SEQ ID NO: 81665 - protein, 417 aa, Thermogemmatispora tikiterensis
  misc_feature (1)..(417): tr|A0A328VTJ3|A0A328VTJ3_9CHLR tRNA epoxyqueuosine(34) reductase QueG OS=Thermogemmatispora tikiterensis OX=18 25093 GN=A4R35_17995 PE=4 SV=1
MLDAAPIKAYGYELGFDLVQITGAEAFPETERVIKERIAAGLMDGLPWFTSERAEVSCHPDALLPEARSIIALAMSYLSEPPEEPEDDQPRGRISRYAWGEDYHEIIKPKLKQFADWLREYARREAGQELEARLFVDTGRMVDRAVAQRAGIGWYGKNTTILTRGWGSWVFLAEIVTNLPLPADEPLQANCGKCERCLHACPTGALPAPYVLDNRRCISYLTIELRGSIPLELRPLMGNLIFGCDICQEVCPVNQVVEKRLGLRQAERAVEQAGDGKTEAATVRSKQRPQMWLRRRDEFRPRPQVGGVPELIPLLALSEEEFRARFRHTPIWRAKRRGLLRNVCVALGNLGDRRAVPALIQALWDAEALVRGHAAWALGCIGGEEARRALTERLEQEEDPEVRQEILQALTMLDGKN

SEQ ID NO: 81666 - protein, 367 aa, Thermogemmatispora tikiterensis
  misc_feature (1)..(367): tr|A0A328VBJ5|A0A328VBJ5_9CHLR Epoxyqueuosine reductase OS=Thermogemmatispora tikiterensis OX=1825093 GN=A4R35 _01350 PE=4 SV=1
MAAEARGFLVAWAPIELPGEWKQSYQQWVAEGRHAGLGQLARALEVRLDPRLRFAWASSVMILAAPHTYPDPGPPSGGVRIGQVARKFWVREPDPFLLKRLLEPHIAALKEVASRLGVRVRDYVEQGPLPLNLYAVLSGRFWRGYNAMPNSTDFGTRVTLTCLLTDIALDRFPPPSHPDRCGECRRCLSSCPTGALLGDRRVDLRLCISYWTTSYQGVIPLAFRPAIGNWLLGCDVCQDVCPWNWKTERLPQWWKGFSVDPELAHPDLCDALLLSTRDFALKYRQSAFERLGRVQIARNALIVLANTGEQVYAPLVKQAAADPAPVIRATASWALLRLGQRGEAEKLLRDPSDLVRAETREALEHFQ

SEQ ID NO: 81667 - protein, 466 aa, Thermogutta terrifontis
  misc_feature (1)..(466): tr|A0A286RLX1|A0A286RLX1_9PLAN Epoxyqueuosine reductase OS=Thermogutta terrifontis OX=1331910 GN=queG PE=3 SV= 1
MNNLPWYETLPPRYTTRAIEALRRNGCTARFFLGFTLSLFPKMEDGRNRRVFLSALSYHFSGCQPMAVDREEVTRQVRKAAEDLGFSPVGICSAVEPPHFSFFVEWLEKGYHGEMMYLERRREAYAHPRSVLEGVRTIVMLGFPYRTVEPSPGAAGKGRISRYAWGKDYHDLIRRRLKSLGQTVKELCPGSEVRGVVDTAPLLEREFAQLAGLGWIGKNTLLINPRLGSWLFLAALLTTADLVADRPFEANHCGTCTACLRACPTGALVAPYVLDARRCLSYLTIELRGPIPQEWRSSIGDWLFGCDICQEVCPWNRRAPVTGEPSLMPRWGTHIELTELFHWSDEQFRSAFRDMPLWRAKRRGLLRNAAIVLGNQRCTEAVPALIRGLEDVDPVVREACGWALVEIGTEHALSAARTRIEREPDAWVRDQLTRHLERIVQTTARHDGAEEPCPLGSGPSKIPEKR

SEQ ID NO: 81668 - protein, 191 aa, Thermohalobacter berrensis
  misc_feature (1)..(191): tr|A0A419T0Y6|A0A419T0Y6_9CLOT 4Fe-4S ferredoxin OS=The rmohalobacter berrensis OX=99594 GN=BET03_03690 PE=4 SV =1
MDTTDLQRYITKKALNNGALLVGYTKIRRTEPVIIMGFEYSDKWFFNFPITLTKKLGEVYFISKNVQDMIAKELKREGYITNYKTILSIYGDFRPLVVSAGLGEWGRNGLVVNKKYGSGLLYAAIFTNAPFKTENTLILQTSEKHCTECEECIKSCPANAFENNTFHLYRCMPYALKGCAQCLKVCKGNNC

SEQ ID NO: 81669 - protein, 378 aa, Thermohalobacter berrensis
  misc_feature (1)..(378): tr|A0A419SV38|A0A419SV38_9CLOT tRNA epoxyqueuosine(34) reductase QueG OS=Thermohalobacter berrensis OX=99594 G N=BET03_05875 PE=4 SV=1
MNIKDYIIKEAEKIGIDIIGFTGVKPFENMKKLLKERRDKGYETEFEENDIELRYNPKKVMPNSKSIIVIGVSYNLHYKSSKKFNARGRLSKSSWGRDYHTVLKNKLEELADAIKKVKEFDYKIFVDTGPLIDREIAKRAGIGWYGKNCSIINDKYGSFIFIGYMITNLDLEENSPLEEKCKTCDLCIRACPTNALEENYKINATRCISYLTQTKRKIPYDLRDKMGIKIYGCDTCQLVCPKNKGVNKGNCESFLPEKTRGYIEIEELFNLSNKEFKKKYGHMAGSWRGKNVLKRNCIIAIGNMKDKTYLDLLKQTLKDPSPMIREYTAWALLKIEPNEGKKVIKEHLKIEKDDNVKNEMKKLLEYFEGGIIENRYNV

SEQ ID NO: 81670 - protein, 383 aa, Thermohydrogenium kirishiense
  misc_feature (1)..(383): tr|A0A4R4A7G6|A0A4R4A7G6_9FIRM Epoxyqueuosine reductase OS=Thermohydrogenium kirishiense OX=937254 GN=EDC21_11 614 PE=4 SV=1
MFNVTCVTKDEIREFAYKSGIDIVGFASPDCLFKYRDLLKNRYENGLSCNIEEKDIEKRINPYYFLKDVKSIVSIAVSYNIVYEADSPKSAYGTISRTAWGVDYHKVLINLLEKLRIFILSKCNDAKTVLLVDNNPLLERAIAYNAGIGFYGKNNMIINEKYGSYLFLGEMLLNIFFEPDKKIVSKCGSCTRCLKACPGKALVGEYKIDANKCLSYATIKKGYLSDDTIKKIGTRIYGCDTCQDVCPFNKTAKRVIKDEFIPRGLKPKHDLKEILSLDKKKFQEVFGPTSASWRGKNTMIRNAIIASINSNDKNAIEPLKSLLDGESSYLRGYSAYALSILDGENSLPYIEKAYFKETDVSAKMFMKKAIKKIRGEVFEDNER

SEQ ID NO: 81671 - protein, 344 aa, Thermoleophilia bacterium
  misc_feature (1)..(344): tr|A0A2G4H4X2|A0A2G4H4X2_9ACTN 4Fe-4S ferredoxin-type d omain-containing protein OS=Thermoleophilia bacterium O X=2026888 GN=CK540_03570 PE=4 SV=1
MSPRPAGYALRMGMPTMDELAALVRDDGIVLGAAPASAYTEVEAALKDRVERGYWADMRFTAARTEVSCHPETAVRNAQTVVTAILPVWRPLPPKPDGPVGRLPRYAWSDPYATLREALGRVRDALKAEGFRCVVHVDANHHVDREGARRAGLTFPGKNTMAIAPGLGSFISIGTLITDAPLVTETPEPAREGCGSCTLCIDACPTGALDEEYVLNAEQCLSYWTQSRREIPDEIADALGDQVYGCDICQDVCPWNQGPEKRGADLLAEGEAWVRLDAWLDATDEDLVEHNQRLYIPGLDGRYLKRNALIALGNGPEEYRSLAEPFAATDDPIFGSAARRATNR

SEQ ID NO: 81672 - protein, 379 aa, Thermolongibacillus altinsuensis
  misc_feature (1)..(379): tr|A0A4R1QFI6|A0A4R1QFI6_9BACI Epoxyqueuosine reductase OS=Thermolongibacillus altinsuensis OX=575256 GN=queG PE=3 SV=1
MDVAALKKEIIEYSRTIGIDKIGFASADPFTELKERLYQQQQLGYQSGFEEPDIEKRTNPSLLLPHARSIIAIALAYPSKMKNAPRSTREERRGIFCRASWGQDYHRILRDCLEKLEQFILERVPNAKLKSMVDTGELVDRAVAERAGIGWSGKNCSIITPEFGSYVYLGEMITNIPFPPDTPIEDQCGTCNKCVEMCPTGALVQGGQLNAQRCIAFLTQTKGFIADEFREKIGNRLYGCDTCQLVCPKNKGKDFHLHPEMEPDPEIAKPKLKPLLHLSNREFKEKFGHLSGAWRGKKPIQRNAILALAHYKDETAIDDLLKLLKEDPRPVIRGTAAWALGKIGNKRVIDELKKAKQEEKDEEVIKEIEKGIHMLQEIK

SEQ ID NO: 81673 - protein, 385 aa, Thermomicrobiales bacterium
  misc_feature (1)..(385): tr|A0A5C7JMU7|A0A5C7JMU7_9CHLR tRNA epoxyqueuosine(34) reductase QueG OS=Thermomicrobiales bacterium OX=248279 0 GN=queG PE=4 SV=1
MSGVGARGADSAWVRQLAQECGLQVAAITSPEPFDGLETHLRERIAHGHYDGFTWFTSERASVSANPVNLHDQVRSIVSVGLPYYQATPAIPGDGVLRGRIARYAWGRDYHDILKRRMSDLLGRIEERVGRPVEARRLVDTARIVDRAVAGRSGLGWYGKHTCIIVPGYGSWVLLGELLIDLELEPDAPLDRNCGRCHACIDRCPTGAIVAPYEVDSGRCISFHTIEQRDAIPHELRARFGNWVFGCDECQDVCPYTGAAQTVTDPDLEPVSLRNAAPELEWLLSMTESEFRCTYRGTAVLRTKRRGLARNAAIALGNSSDEQAVPLLANALVDHDEPLVRGHAAWALGRHAGRLALSALERARANESDDSVSREIIRALEEIEP

SEQ ID NO: 81674 - protein, 392 aa, Thermomicrobium roseum
  misc_feature (1)..(392): tr|B9L0J0|B9L0J0_THERP PBS lyase HEAT-like repeat domai n protein OS=Thermomicrobium roseum (strain ATCC 27502 / DSM 5159 / P-2) OX=309801 GN=trd_1061 PE=4 SV=1
MCIAKDELRELAERSGLSLLAVTTADPFPGLTDLLLARIRAGYLDGMDWFDEERARIAGDPHNLHPTARSIVSVALPYWLPDIVPPNDGIVRGRIARYAWGHDYHRVLRDRMRRLHQSLQERCGRPIEARFLVDTARIVDREIAARAGLGWQGKNTMILVPRYGSWVLLGELLLDIDIEPDAPLRPRCGRCQRCLDACPTGALIHPYELFAPRCISYLTIEHRGPLPWEVRPLVANWVFGCDICQEVCPYTAAAQRADDPVVFPERLEHCFPSLEWLLTMSEDEFRSVYRDRPVLRAKRVGLARNAAVALGNVGDQRHLETLAWAVLAHDEPLVRSHAAWAMARIDYTASLPVLQRALAQESDSSARQEIERVLVSPPAPLNRSSATLLRSH

SEQ ID NO: 81675 - protein, 354 aa, Thermomonas haemolytica
  misc_feature (1)..(354): tr|A0A4R3NC85|A0A4R3NC85_9GAMM Epoxyqueuosine reductase OS=Thermomonas haemolytica OX=141949 GN=queG PE=3 SV=1
MSASDPATLADRIRALARAAGFQRVGISGIDLREDEAHLLDWLAQGLYGSMDWMARHGALRARPAELLPGTVRVISVGLDYGQDPDAAWQALADGERAYVARYALGRDYHKLLRNRLQKLAEQVQAEIGPFGYRAFTDSAPVLERALARNAGLGWIGKHTCLIDKDGGSWFFLGELFVDIPLPVDPPASAHCGSCTRCIDICPTQAIVAPYRLDARRCIAYLTIEHEGSIDEDLRPLIGNRIFGCDDCQLVCPWNKFARRTDEPDFRARNGLDRATLAELFAWDEDEFLRRTEGSAIRRSGHERWLRNIAIALGNAPTTPEVLTALERRRAHPSPVVREHVAWALARHAARPSP

SEQ ID NO: 81676 - protein, 354 aa, Thermomonas hydrothermalis
  misc_feature (1)..(354): tr|A0A1M4XIC1|A0A1M4XIC1_9GAMM Epoxyqueuosine reductase OS=Thermomonas hydrothermalis OX=213588 GN=queG PE=3 S V=1
MDTPTPAALADRIRTLARAAGFQRVGISGIELDDDEAHLRDWLAQGLYGSMDWMARHGTLRARPAELVPGTIRVISVGLDYGQDPDAAWRTLNDGERAYVARYALGRDYHKLLRNRLQKLAEQVQAEIGPFGYRAFTDSAPVLERALARNAGLGWIGKHTCLIDRHGGSWFFLGELFVDIPLPIDPPASAHCGTCTRCIDICPTRAITAPYRLDARRCISYLTIEHDGSIDEALRPLIGNRIFGCDDCQLVCPWNKFARRTDEPDFRARNNLDRASLVELFAWEEDEFLRRTEGSAIRRSGYERWLRNIAVALGNAPTTPEVLAALASRRDHPSPVVREHVAWALRQHAARSAP

SEQ ID NO: 81677 - protein, 353 aa, Thermomonas sp.
  misc_feature (1)..(353): tr|A0A5B7ZU47|A0A5B7ZU47_9GAMM Epoxyqueuosine reductase OS=Thermomonas sp. SY21 OX=2202149 GN=queG PE=3 SV=1
MSAIAPDYAALAARIRALAQAAGFQRFGISGVELPEDEAFLRSWLQQGLHGSMAWMARHGDKRARPAELVPETLRVVSVGLDYGQDADAAWDNLRDGERAYVARYALGRDYHKLMRNRLQKLADDVAREIGPFGHRVFVDSAPVLERALARNAGLGWIGKHTCLIDKDGGSWFFLGELFVDLPLPIDPPASAHCGTCTRCIEVCPTQAIVAPYRLDARRCISYLTIEHEGSIDEDLRPLIGNRIFGCDDCQLVCPWNKFAQRTDEPDFRARNNLDQATLAELFAWDEDEFLRRTEGSAIRRSGHERWLRNIAVALGNAPKTDAVIDALQSRREHPSSVVREHVEWALAQHARI

SEQ ID NO: 81678 - protein, 311 aa, Thermophagus xiamenensis
  misc_feature (1)..(311): tr|A0A1I1Y485|A0A1I1Y485_9BACT Epoxyqueuosine reductase OS=Thermophagus xiamenensis OX=385682 GN=queG PE=3 SV= 1
MDLVSLERGRLIREEALRLGFDEVGFTSVDELKEDSSFLQKWLEMGFHAGMEYMSRNVEKRINPQKLVEDAKSVIVVLQNYYPSKSDKLTSGLNLAKYAYGRDYHKVLKKRLKQLMNYINSDISAEAKGRFFVDSAPVLERSLAIRAGLGWRGKNTNLIHPRLGSFVFIGEIFLNIELPSNEPIKEACGGCTRCIEACPTNALVAPYHLDANKCISYLTIENKNEIPNRFRGQMNDWFFGCDICQDVCPWNWKARPHKEPDFRLRPVFREMSKDEWLMMDEKTFDEISKGSPIRRAGFKGLKRNLKFISGI

SEQ ID NO: 81679 - protein, 339 aa, Thermosediminibacter oceani
  misc_feature (1)..(339): tr|D9RXZ5|D9RXZ5_THEOJ 4Fe-4S ferredoxin-type domain-co ntaining protein OS=Thermosediminibacter oceani (strain ATCC BAA-1034 / DSM 16646 / JW/IW-1228P) OX=555079 GN= Toce_1469 PE=4 SV=1
MVIFMGIKEKIINFAKSIGLDKVGFTTAEPFLSEREILLERKEKGLFSPFEENDVELRCDPNELLPGARTIICFAMGYLIEHSDDTKSNAEKPLGIISKYASIKDYHRVMGEKLRLVADYIFSNWGGNFRILVDTGGLMDRAAARRAGLGWIGQNTCLFTEEYGSWVFLGEIITDLEVEPDEPSANRCDNCGRCVRACPTGALEAPYRINPFRCLSYVTQMRGSIPEEFRPLLGVRLFGCDTCQEACPKNKNVGIPSHEEFIPDFSLERRLIRLINIDSREFEKIFKPTPIGWRGKNVLRRNAILALSNAGPGHKEHFEKLLEDPSPVIREHALWALKR

SEQ ID NO: 81680 - protein, 300 aa, Thermosinus carboxydivorans
  misc_feature (1)..(300): tr|A1HNV0|A1HNV0_9FIRM Uncharacterized protein OS=Therm osinus carboxydivorans Nor1 OX=401526 GN=TcarDRAFT_2402 PE=4 SV=1
MKEKLKQFCRSLGLDLVGIAPPGPYHELAAILYDRMAKGQSTAFDEPDIAKRIDPRHTMPDVQSVIVCLFPYYTGEQRPTNLAKYTHGLDYHHIIRRKLDEIGHYLQANILDFAYQPFVDTGPLVDRYLAYLAGLGFYGINSHIITEKYGSYVFIGYLLTNYPFAPDQPLNRTCIQCGQCVRMCPGQIILGNFAIDPRGCRSYLTQKKGELSPAEISIIRKTSLVFGCDVCQDVCPHNQGVNLTPLAEFKDQLLPWLDENEVAALSNKEFTRRYGDRAFSWRGKKILLRNFAYTQGQQCR

SEQ ID NO: 81681 - protein, 410 aa, Thermosporothrix hazakensis
  misc_feature (1)..(410): tr|A0A326U3B7|A0A326U3B7_9CHLR Epoxyqueuosine reductase OS=Thermosporothrix hazakensis OX=644383 GN=EI42_04000 PE=4 SV=1
MLDTQTIKEQAYALGFDIARVTTAQPFPEAKKVIKERIGRGLMDGLSWFTAERADVSCHPEALLPTAQSIISLGMVYLTEMPENAHEGTPRGRIARYAWGDDYHDIIKPKLKQFAEWLREYARSEVSQEDFETRLFVDTGRMVDRAVAQRAGLGWYGKNTNILTHGWGSWLFLAEIVTNLPLTPDEPLKANCGNCEICLHACPTGALPNPYELDNTRCISFLTIELRGSIPLELRPLMGTWIFGCDICQEVCPVNKVAERRLGVRQEGQKQMIAVDSITRRKSGPFQPHQEYRVRPAVGSTPELLPLLELSEEEFRERFRRSPIRRTKRRGLLRNVCVALGNIRDPQAVPALIKALHDDDPLIRGHAAWALGQIGGEQATNALQERMQTEEDSEVQKEIRCALTELVASS

SEQ ID NO: 81682 - protein, 410 aa, Thermosporothrix sp.
  misc_feature (1)..(410): tr|A0A455SSX1|A0A455SSX1_9CHLR Epoxyqueuosine reductase OS=Thermosporothrix sp. COM3 OX=2490863 GN=queG PE=4 S V=1
MLDTQTIKEQAYALGFDIARVTTAQPFPEAKKVIKERIGRGLMDGLSWFTAERADVSCHPEALLPTAQSIISLGMVYLTEMPEDAHEGTPRGRIARYAWGDDYHDIIKPKLKQFAEWLREYARSEVSREDFETRLFVDTGRMVDRAVAQRAGLGWYGKNTNILTHGWGSWLFLAEIVTNLPLTPDEPLKANCGNCEICLHACPTGALPNPYELDNTRCISFLTIELRGSIPLELRPLMGTWIFGCDICQEVCPVNKVAERRLGVRQEGQKQMIAVDSITRRKSGPFQPHQEYRVRPTVGSTPELLPLLELSEEEFRERFRRSPIKRTKRRGLLRNVCVALGNIRDPQAVPALIKALHDDEPLIRGHAAWALGQIGGEQATNALQECMQTEEDSEVQKEIRCALTELVASS

SEQ ID NO: 81683 - protein, 312 aa, Thermosynechococcus elongatus
  misc_feature (1)..(312): sp|Q8DLA9|QUEG_THEEB Epoxyqueuosine reductase OS=Thermo synechococcus elongatus (strain BP-1) OX=197221 GN=queG PE=3 SV=2
MVTAAAIKEFAHQLGFHRVGIVDLRTYTDDHPSGVAALQRWLAQGFQGEMAWMANPRRQKIQAVLPGAKSVISVALNYYQPDPQPPPKVKIARYAWGRDYHRVLGKRLQVLGQWLQSQVPEMDYRWYVDTGPVQDKVWAEQAGIGWIGKHSNVISRQYGSWILLGELITTLELTGDRPHTNHCGTCTRCLAACPTGAIVEPYVVDANRCIAYHTIESRAPELPAAIAAHLEGWVAGCDICQEVCPWNQRFAQPTDVEDFAARSPLLQTSLEELATLSDAAWDELTRGSALRRIKSAQWRRNAQAVLSSNPYD

SEQ ID NO: 81684 - protein, 229 aa, Thermotalea metallivorans
  misc_feature (1)..(229): tr|A0A140KZC2|A0A140KZC2_9CLOT Epoxyqueuosine reductase OS=Thermotalea metallivorans OX=520762 GN=queG_2 PE=4 SV=1
MDQGWILKNKIMEWGASKVGYADLGDVLPEEYKHLKTGISIAVRLSDEIMSQIQEAPTHTYFHHYRTVNFFIDQITLKITMQLQEWGYLAMAIAASQSVNIDGRHYRGVFQHKTAATRSGMGWIGKNGCLVTEEYGPRVRLGTVLTNMDVVYDPPVVASKCGACKKCVQACPAMALRGGLWYPGMPREEMVDARACSMHMHAHYQHIGRGSVCGICIKTCPQGNKIIKR

SEQ ID NO: 81685 - protein, 374 aa, Thermotalea metallivorans
  misc_feature (1)..(374): tr|A0A140LEH6|A0A140LEH6_9CLOT Epoxyqueuosine reductase OS=Thermotalea metallivorans OX=520762 GN=queG_1 PE=4 SV=1
MKLEDKIKHYAMEIGIDLIGFASAESFERIGKIQACRKKRGHLSGFEEQDIEKRKNPLLTMENTKTIIAAAVGYYMPEEPWTEAGDEPAGEIARVAWGRDYHQILREKLKMLMAYIEGIAGSFDYKIYVDTGPLSDREVAFRAGIGWFGKNNMLITEKYGSWVFLGYALTSLELEPDRPLEKQCLDCQACIRACPGGALAEGFAMNEKRCLSYITQAKEEIDEEMKRKLANRIYGCDVCQGVCPQNRSASMARNRDFMPENRSHRPNLARLIQMTKKEFQEIYGETAAGWRGRNYFRRNAIIAAGNSKDPRLLPSLAGALQDESTMIRKHAAWAIHQIGQGGHELLRRHLSIEKEKEVIDLIKGYIEEAKKIKG

SEQ ID NO: 81686 - protein, 346 aa, Thermovenabulum gondwanense
  misc_feature (1)..(346): tr|A0A161REG6|A0A161REG6_9FIRM Epoxyqueuosine reductase OS=Thermovenabulum gondwanense OX=520767 GN=queG PE=4 SV=1
MMNIQKIKNEIINYSKLIGFDLIGFAKADPFINEYNLLKERKQRGLISPFEETDLEKRCFPDKIMKGAKTIIVFALNYLNHYNSSIRFTKEYLEEKKKEGVFSKYACIVDYHTIIKDKLFKVAKFIKDRFNADSRFFVDSGAILERAAAQRAGIGYIGANTCLFTKEYGSYVFLGEIITNIDLPEDEPIESLCNRCEKCIFACPTGALYEPFKLNPFKCLSYLTQSKKAITDKKMIKAFANRLFGCDSCQDVCPNNQLKNVLIKNHREFLLDYKLPLDPFYIFKIGNKEYKEHFGSTPIEWRGKNILRRNALIVISNAGELDKLDKNVILKDTSEIVREQAKVLLI

SEQ ID NO: 81687 - protein, 408 aa, Thermus aquaticus
  misc_feature (1)..(408): tr|A0A0N0BL47|A0A0N0BL47_THEAQ Epoxyqueuosine reductase OS=Thermus aquaticus OX=271 GN=queG PE=4 SV=1
MKDLLEETAQAMGLIPAWAPLKPLEEAERRFRAWLEAGRHGGMAYLQRPEERFWPEKRFPWAKSALLLFAPYAYEDPGRPPGGLRVGRVARYAWSRDYHLVLGEALGALAALARSLGLEARGYVDHGPLPERALAVLSGAGWVGKSSMFLSQAFGVHAFIGVLLTPLEVEAPPRHPSRCGRCVRCLQACPTGALLGDGTLDARICISYLTVEERGFIPPGLWPRMGDWLLGCDLCQDTCPWGRFGGVFPALRPEPHLAHPDLLDFFRLSGRAFAKKYAGTAFARPDRVRMARNALIVLSNLGLGEALMAEAARDPNPLVRRTALHALHRAGKPLEGFLKDPDPLVRAEALALLGEAAGAVHPLQNGGEAPGLQVKEEGAQVVGDLEEAGLEGVGVQDEGVGPGLPGEA

SEQ ID NO: 81688 - protein, 408 aa, Thermus aquaticus
  misc_feature (1)..(408): tr|B7A6S0|B7A6S0_THEAQ 4Fe-4S ferredoxin-type domain-co ntaining protein OS=Thermus aquaticus Y51MC23 OX=498848 GN=TaqDRAFT_4519 PE=4 SV=1
MKDLLEEAARAMGLIPAWAPLKPLEEAERRFRAWLEAGRHGGMAYLRRPEERFWPEKRFPWAKSALLLFAPYAYEDPGRPPGGLRVGRVARYAWSRDYHLVLGEALGALAALARSLGLEARGYVDHGPLPERALAVLSGAGWVGKSGMFLSQAFGVHAFIGVLLTPLEVEAPPLHPSRCGRCVRCLQACPTGALLGDGTLDARICISYLTVEERGFIPPGLWPRMGDWLLGCDLCQNTCPWGRFGGVFPALRPEPHLAHPDLLDFFRLSGRAFAKKYAGTAFARPGRVRMARNALIVLSNLGLGEALMAEAARDPNPLVRRTALHALHRAGKPLEGFLKDPDPLVRAEALALLGEAAGAVHPLQNGGEAPGLQVKEDGAQVVGDLEEAGLEGVGVQDEGVGPGLPGEA

SEQ ID NO: 81689 - protein, 379 aa, Thermus arciformis
  misc_feature (1)..(379): tr|A0A1G7ETE6|A0A1G7ETE6_9DEIN Epoxyqueuosine reductase OS=Thermus arciformis OX=482827 GN=SAMN04488243_10675 PE=4 SV=1
MVKDLLEERARALGLLFAWAPLDLPPKAEARHRAWLEAGRHGGMAYLESPERFHPRRRFPWAKSALLLFAPYAYPDPGTPPGGLRVGRVARYAWTRDYHLVLGEALKALEEVARGLGLEAKGYVDHGPLPERTLAALSGAGWIGKSGYFLSQAFGVHAFIGVLLTSLEVEPAPLYPSRCGRCARCLMACPTEALLGDGTLDARRCVSYLTIEHKGFIPPSLWPGIGEWLFGCDLCGEACPWERFGKVWKALRPEPELAHPDLLDFFRLSGRAFGRKYAGTAFLRAGKPRLARNALIVLFNLGLGEALSLEAAKDPSPLVRRTALHALFRAGRGVEGFLQDPEPRVRAEALALLGEAPGAVDLLQDGGKPPGPEVKEEGA

SEQ ID NO: 81690 - protein, 410 aa, Thermus brockianus
  misc_feature (1)..(410): tr|A0A1J0LUT6|A0A1J0LUT6_THEBO Iron-sulfur protein OS=T hermus brockianus OX=56956 GN=A0O31_01891 PE=4 SV=1
MDPKALLEEAARERGLGVAWAPLAPQEEAKARFQAWLGAGRHGGMAYLEGRVEERFDPRRRFPMAHSALLLFAPYAFPDPGKPPGGLRVGRVARYAWVRDYHLLLGEELRRLERVAEGLGVFAKGYVDHGPLSERTLAALSGAGWIGRNGYFLSQGFGVHAFIAVLLTSLEVAPSPLHPPRCGRCSRCLPACPTGALLGDGTLDARVCVSYLTVEHKGFIPPGLWPGIGAWLLGCDLCGEACPWGRFGKAWPGFAPEPELAHPDLRDFFRLSGHAFRKKYAGTAFLRPGRARMARNALIVLANLGLGESLMAEAAQDPNPLVRRTALHALFRAGKPIQGFLKDPDPTVRQDAQALLEAPGAVDLLQGGGQAPGPEVKEQGTEVVGYLEEAGLEGIRVQEEGVGPRLPGEA

SEQ ID NO: 81691 - protein, 376 aa, Thermus filiformis
  misc_feature (1)..(376): tr|A0A0A2X767|A0A0A2X767_THEFI (Fe-S)-binding protein O S=Thermus filiformis OX=276 GN=THFILI_08730 PE=4 SV=2
MVKDLLEERARGLGFLVAWAPLALPEEVKARFLAWLRSGRHAGMAYLARHPEVRLDPALRFPARSALLLAAPHAYPDPGRPPGGVRLGRVARYAWARDYHLLLEPHLRALEEVARGLGLWARGYVDHGPLPERSLAALAGLGFIGRSGMLIRVGGGSYLSLAVLLTDLPPPPPAPVPGRCGRCVRCLAACPTNALLGDGTLDARRCVSYWTIEHRGAIPYPFWDGVGEWLFGCDLCQEACPWNRFGSVWTGFRPEPDLAHPDLQDFFQLSGRAFGRKYAGTAFLRPGRARMARNALIVLANLGEGLGLIRQGLSDPHPLVRLTALQAAHRVGRPDWGRRLLLDPDPRVAREARRLWRGEPPSPVDLFQDEGEAPGP

SEQ ID NO: 81692 - protein, 376 aa, Thermus oshimai
  misc_feature (1)..(376): tr|K7RKC2|K7RKC2_THEOS Uncharacterized Fe-S protein OS= Thermus oshimai JL-2 OX=751945 GN=Theos_1820 PE=4 SV=1
MEGARRLLEEAAREEGLFFAWAPLELPEAAKARYRAWLEAGRQAGMAYLARGVEERLEPRRRFPEAHSALLLFAPYALEDPGAPKGGLRVGRVARYAWSRDYHLVLGESLARLEGVAQALGLWARGYVDHGPLPERSLAALSGAGWVGKSGMFLSPQLGVHAFIGVLLTSLEVAAPPPHPSRCGRCTRCLSACPTGALPGDGTLEAGRCVSYLTIEHKGPVPEALWEGIGDWLFGCDLCQEVCPWGRFGKAWERLRPEPELAHPDLLDFFRLSGRAFQRKYQGTAFLRAGRARMARNALIVLANLGLGERLMEEALKDPHPLVRRTALRALHRLGREVGAFLRSPDEALRAEALDLLGEAPGAVDGLQDGGQVPGP

SEQ ID NO: 81693 - protein, 377 aa, Thermus parvatiensis
  misc_feature (1)..(377): tr|A0A0X8D8C0|A0A0X8D8C0_9DEIN Epoxyqueuosine reductase OS=Thermus parvatiensis OX=456163 GN=AV541_08275 PE=4 SV=1
MVKDLLEERARALGLLFAWAPLDLPPKAEARHRAWLEAGRHGGMAYLEAPERFHPRKRFPWAKSALLLFAPYAYPDPGTPPGGLRVGRVARYAWTRDYHLVLGEALKALEEVARGLGLEAKGYVDHGPLPERTLAALSGAGWIGKSGYFLSQAFGVHAFIGVLLTSLEVEPAPLHPSRCGRCTRCLSACPTEALLGDGTLDARRCVSYLTIEHKGPIPPSLWPGIGDWLFGCDLCGEACPWERFGKVWKALRPEPELAHPDLLDFFRLSGRAFQRKYAGTAFLRAGRARMARNALIVLFNLGLGEALFLEATRDPNPLVRRTALRALHLTGKPLDPFLQDPGLREEALALLGEAPEAVHLLQDGREAPGPEVKEQGA

SEQ ID NO: 81694 - protein, 377 aa, Thermus parvatiensis
  misc_feature (1)..(377): tr|H7GFA0|H7GFA0_9DEIN Iron-sulfur protein OS=Thermus p arvatiensis OX=456163 GN=RLTM_03951 PE=4 SV=1
MVKDLLEERARELGLLFAWAPLDLPQEAEARHRAWLEAGRHGGMAYLEAPERFHPRKRFPWAKSALLLFAPYAYPDPGTPPGGLRVGRVARYAWTRDYHLVLGEALKALEETARGLGLKAKGYVDHGPLPERTLAALSGAGWIGKSGYFLSQAFGVHAFIGVLLTPLEVEPAPLHPSRCGRCTRCLSACPTEALLGDGTLDARRCVSYLTIEHKGPIPPSLWPGIGDWLFGCDLCGEACPWERFGKVWKALRPEPELAHPDLLDFFRLSGRAFQRKYAGTAFLRAGRARMARNALIVLFNLGLGEALFLEATRDPNPLVRRTALRALHLTGKPLDPFLQDPGLREEALALLGEAPEAVHLLQDGREAPGPEVKEQGA

SEQ ID NO: 81695 - protein, 382 aa, Thermus scotoductus
  misc_feature (1)..(382): tr|A0A430S704|A0A430S704_THESC tRNA epoxyqueuosine(34) reductase QueG OS=Thermus scotoductus OX=37636 GN=queG PE=4 SV=1
MEARPLLEEALRERGLLYAWAPLAIPEEAEGRFRRFLAEGRHGGMAYLERGVEARFHLEHRFPWARSALVVFAPYAYPDPGIPKGGIRVGRVARYAWVRDYHLVLGEEVRALEGLARSLGVEAKGYVDHGPIPERTLAALTGMGWIGKSGMFLSQGFGVHAFIGVLLTSLEVEAPFPNPGRCGRCTRCLVSCPTGALLGDGTLDARVCVSYLTVEHKDFIPPALWPGMGDWLLGCDLCQEVCPWERFGKVWQGFRPEPELAHPNLEEFFRLSGRAFQRKFGDTAFARPGRTRMARNALIVLSNLGLGEDLLREAAKDPHPLVRRTALHALFLAGLGIERFLRDPDEGIRAEVSVLLGEAPRAVDLFEDGGKSPGPEVKDEGS

SEQ ID NO: 81696 - protein, 382 aa, Thermus scotoductus
  misc_feature (1)..(382): tr|E8PMV3|E8PMV3_THESS Iron-sulfur cluster-binding prot ein OS=Thermus scotoductus (strain ATCC 700910 / SA-01) OX=743525 GN=TSC_c19550 PE=4 SV=1
MEARPLLEEALRERGLLYAWAPLAIPEEAEGRFRRFLAEGRHGGMAYLERGVEARFHLEHRFPWARSALVVFAPYAYPDPGIPKGGIRVGRVARYAWVRDYHLVLGEEVRALEGLARSLGVEAKGYVDHGPIPERTLAALTGMGWIGKSGMFLSQGFGVHAFIGVLLTSLEVEAPFPNPGRCGRCTRCLVSCPTGALLGDGTLDARVCVSYLTVEHKDFIPPALWPGMGDWLLGCDLCQEVCPWERFGKVWQGFRPEPELAHPNLEEFFRLSGRAFQRKFGDTAFARPGRTRMARNALIVLSNLGLGEDLLREAAKDPHPLVRRTALHALFLAGLGIERFLRDPDEGIRAEASVLLGEAPRAVDLFEDGGKSPGPEVKDEGS

SEQ ID NO: 81697 - protein, 410 aa, Thermus sp.
  misc_feature (1)..(410): tr|A0A0B0SAJ1|A0A0B0SAJ1_9DEIN (Fe-S)-binding protein O S=Thermus sp. 2.9 OX=1577051 GN=QT17_08015 PE=4 SV=1
MEAKALLEEAARARGLGVAWAPLSPSEAAKARFQAWLEGGRHGGMAYLERRVEERFDPRRRFPEARSALLLFAPYAYPDPGKPPGGLRVGRVARYAWTRDYHLALGEELGRLEAVAEDLGVWAKGYVDHGPLSERTLAACSGAGWIGRSGYFLSQAFGVHAFLAVLLTSLEVEPPPLHPNRCGRCARCLPACPTGALLGDGTLDARLCVSYLTIEHKGFIPPSLWPGIGDWLFGCDLCGEACPWERFGRAWPGFRPEPELAHPDLWDFFRLSHRAFQRKYAGTAFLRAGRPRLARNALIVLSNLGLGEDLMAEAALDPSPLVRRTALHALFRAGRPIEGFFKDPDPEVRRDAQALVEAPGAVDLFQGGGQAPGPEVKEDGAQVVGDLEEAGLEGVRVQEEGVGPGFPREA

SEQ ID NO: 81698 - protein, 382 aa, Thermus sp.
  misc_feature (1)..(382): tr|W2U848|W2U848_9DEIN (Fe-S)-binding protein OS=Thermu s sp. NMX2.A1 OX=570924 GN=TNMX_00960 PE=4 SV=1
MEARPLLEEALRERGLLYAWAPLAIPEEAEGRFRRFLAEGRHGGMAYLERGVEARFHLEHRFPWARSALVVFAPYAYPDPGIPKGGIRVGRVARYAWVRDYHLVLGEEVRALEGLARSLGVEAKGYVDHGPIPERTLAALTGMGWIGKSGMFLSQGFGVHAFIGVLLTSLEVEAPFPNPGRCGRCTRCLVSCPTGALLGDGTLDARVCVSYLTVEHKDFIPPALWPGMGDWLLGCDLCQEVCPWERFGKVWQGFRPEPELAHPNLEEFFRLSGRAFQRKFGDTAFARPGRTRMARNALIVLSNLGLGEDLLREAAKDPHPLVRRTALHVLFLTGLGIERFLRDPDEGIRAEASVLLGEAPRAVDLFEDGGKSPGPEVKDEGS

SEQ ID NO: 81699 - protein, 382 aa, Thermus tengchongensis
  misc_feature (1)..(382): tr|A0A4Y9EXP8|A0A4Y9EXP8_9DEIN tRNA epoxyqueuosine(34) reductase QueG OS=Thermus tengchongensis OX=1214928 GN= queG PE=4 SV=1
MDPKALLEEAARERGLEVAWAPLEPMAGAEARFRRWLAEGRHGGMAYLERGVAERFYPQSRFPWARSALLLLAPYAYPDPGVPKGGFRVGRVARYAWVRDYHLLLGEELRRLEALAQGLGLPAKGYVDHGPLPERTLAALTGVGWIGKSGMFLSPAFGVHAFIGVLLTPLEVEAPPPHPDRCGRCTRCLTACPTGALLGDGTLDARRCVSYLTVEHRGFIPPALWRGMGEWLLGCDGCTEVCPWGRFGKVWRGFRPEPELAHPDLTEFFRLSGHAFQRKYGGTAFARPGRARMARNALIVLSNLGLGEGLMREAAKDPNPLVRRTALHALHRAGLGVEAFRQDPDPQVRAEALVLLGEAPGAVDLFQNRRESPGPEVKDERA

SEQ ID NO: 81700 - protein, 382 aa, Thermus tengchongensis
  misc_feature (1)..(382): tr|A0A4Y9FEL9|A0A4Y9FEL9_9DEIN tRNA epoxyqueuosine(34) reductase QueG OS=Thermus tengchongensis OX=1214928 GN= queG PE=4 SV=1
MDPKALLEEAARERGLEVAWAPLEPMAGAEARFRRWLAEGRHGGMAYLERGVAERFHPQSRFPWARSALLLLAPYAYPDPGVPKGGFRVGRVARYAWVRDYHLLLGEELRRLEALVQGLGLPAKGYVDHGPLPERTLAALTGVGWIGKSGMFLSPAFGVHAFIGVLLTPLEVEAPPSHPDRCGRCTRCLTACPTGALLGDGTLDARRCVSYLTVEHRGFIPPALWRGMGEWLLGCDGCTEVCPWGRFGKVWRGFRPEPELAHPDLTEFFRLSGHAFQRKYGGTAFARPGRARMARNALIVLSNLGLGEGLMREAAKDPNPLVRRTALHALHRAGLGVEAFRQDPDPQVRAEALALLGEAPGAVDLFQNRRESPGPEVKDQRA

SEQ ID NO: 81701 - protein, 379 aa, Thermus thermophilus
  misc_feature (1)..(379): tr|A0A1J1EJX0|A0A1J1EJX0_THETH Iron-sulfur protein OS=T hermus thermophilus OX=274 GN=TTMY_0958 PE=4 SV=1
MVKDLLEERARALGLLFAWAPLDLPPKAEARHRAWLEAGRHGGMAYLESPERFHPKRRFPWAKSALLLFAPYAYPDPGTPPGGLRVGRVARYAWARDYHLVLGEALKALEEVARGLGLEAKGYVDHGPLPERTLAALSGAGWIGKSGYFLSQAFGVHAFIGVLLTSLEVEPAPLHPSRCGRCARCLMACPTEALLGDGTLDARRCVSYLTIEHKGFIPPSLWPGIGEWLFGCDLCGEACPWERFGKVWKALRPEPELAHPDLLDFFRLSGRAFGRKYAGTAFLRAGRPRLARNALIVLFNLGLGEALFLEAAKDPSPLVRRTALHALFRAGRGVEGFLQDPEPAVRAEALALLGEAPGAVDLLQDGRKPPGPEVKEEGA

SEQ ID NO: 81702 - protein, 377 aa, Thermus thermophilus
  misc_feature (1)..(377): tr|H9ZT08|H9ZT08_THETH Uncharacterized Fe-S protein OS= Thermus thermophilus JL-18 OX=798128 GN=TtJL18_1592 PE= 4 SV=1
MVKDLLEERARALGLLFAWAPLDLPQEAEARHRAWLEAGRHGGMAYLESPERFHPRKRFPWAKSALLLFAPYAYPDPGTPPGGLRVGRVARYAWTRDYHLVLGEALKALEETARGLGLKAKGYVDHGPLPERTLAALSGAGWIGKSGYFLSQAFGVHAFLGVLLTDLEVEASPVHPNRCGRCARCLAACPTHALLGDGTLDARACVSYLTIEHKGPIPPSLWPGIGDWLFGCDLCGEACPWERFGKVWKALRPEPELAHPDLLDFFRLSGRAFGRKYAGTAFLRAGRARMARNALIVLFNLGLGEALFLEATRDPNPLVRRTALRILHLTGKPLDPFLQDPGLREEALALLREAPEAVHLLQDGREAPGPEVKEQGA

SEQ ID NO: 81703 - protein, 369 aa, Thioalbus denitrificans
  misc_feature (1)..(369): tr|A0A369BWY6|A0A369BWY6_9GAMM Epoxyqueuosine reductase OS=Thioalbus denitrificans OX=547122 GN=queG PE=3 SV=1
MPPPAPDQLADLARAIRRWGVDLGFQQVGIGGVDLDRHEARFLHWLERGFHGEMEYMARHGTRRSRPAELEPGTVRVISARMDYWPPGRDAVAVLRDPARGYVSRYALGRDYHKLLRKRLARLVERVREAAGGFGARVFVDSAPVLEKALAEQAGLGWIGKHSNLIHPRAGSWFFLGEIYTDLPLPVDDAPTGNHCGTCAACIDACPTRAIVAPYQVDARLCISYLTIELHGPIPPALRPLLGNRIYGCDDCQLVCPWNRFARLTGEGDFAPRNDLDAPELTALLGWEETEFLRRTEGSPIRRIGHERWLRNVAVALGNGAATPAALAALRARLAHPSVLVREHVQWALERLDRAAAAAGPAGGGGPGP

SEQ ID NO: 81704 - protein, 358 aa, Thioalkalivibrio denitrificans
  misc_feature (1)..(358): tr|A0A1V3NRA7|A0A1V3NRA7_9GAMM Epoxyqueuosine reductase OS=Thioalkalivibrio denitrificans OX=108003 GN=queG PE =3 SV=1
MHMPRALSSTDARDLAEQVKAWGRELGFQQVGITDTDLQAHEARLLGWLEGGRHGEMDYMARHGTKRARPAELVPGTLRVISVRMDYQPPDARESWSVIGDPSLGFVSRYALGRDYHKLMRNRLQKLASRIEEVIGQFGYRAFVDSAPVLEKALAEKAGLGWIGKHTNLLSREAGSWYFLGELYTDLPLPADPPGDAHCGTCTACIDVCPTRAIVAPYQLDARLCISYLTIELKNAIPEPLRPLIGNRIYGCDDCQLVCPWNRFAGLAAEPDFRARHGLDAPDLVDLFNWDEKTFLNRTEGSAIRRIGHERWLRNVAVALGNGPSRPEAIAALSTRMDHPSGLVREHAGWALTRLGAR

SEQ ID NO: 81705 - protein, 416 aa, Thioalkalivibrio halophilus
  misc_feature (1)..(416): tr|A0A1V2ZWD7|A0A1V2ZWD7_9GAMM Epoxyqueuosine reductase OS=Thioalkalivibrio halophilus OX=252474 GN=queG PE=3 SV=1
MSVPLLAGLSIVPDHPDPRQCAELADRIRQWGRELGFAELRIGPARVPEADRRHLDAWLERGSHGDMQWMADRAALRHDPDALVPGVQRIISVRMDYFPPRTRRPAAQLADPEGAYVSRYALGRDYHKLLRKRLTELGRRIEAEAPHGYRAFTDSAPVLEKALAQQAGLGWIGKHTNLLARGTGSWFFLGELFTDLPLPLDPGPAEDHCGSCRACLDVCPTQAFRGPHDLDARRCISYLTIELKGSIPEDLRPLIGNRIYGCDDCQLVCPWNRFAEVAAEPDFIARHGLDSASLVELFGWDEASFLEHTTGMAIRRIGHEQWLRNLAVALGNGPATDAAREALAARAGHPSALVREHVAWARARLDERAAGRLAEPPAIPVKALTRAPVDPAARPASPPASKDGTAGEPEDPTTGS

SEQ ID NO: 81706 - protein, 369 aa, Thioalkalivibrio nitratireducens
  misc_feature (1)..(369): tr|L0E1C6|L0E1C6_THIND Epoxyqueuosine reductase OS=Thio alkalivibrio nitratireducens (strain DSM 14787 / UNIQEM 213 / ALEN2) OX=1255043 GN=yjeS [H] PE=3 SV=1
MGCSPIVPQTLTPSQCLDLAGRIRDWGHELGFRAVGITRASVGIHAERLDAWLAQGSHGEMRWMADRAELRRDPARLVPGVQRIVSLRMDYLPPATARPEAILADPDRAYVSRYALGRDYHKLIRRRIQTLADWIETEVGPFGYRAFTDSAPVLEKALAERAGLGWIGKHTNLLAREAGSWFFLGELFTDLPLPIDDPSEAHCGSCRACLDICPTQAFRGPYDLDARRCISYLTIEHPGAIPESLRPMLGNRVYGCDDCQLVCPWNRFAGLSVEPDFAARHGLDAAGLIDLFAWDEARFLERTAGMAIRRIGHERWLRNLAVALGNGPATPEAIAALERRAGHPSALVREHVGWALERLRRGPGPRRRA

SEQ ID NO: 81707 - protein, 361 aa, Thioalkalivibrio paradoxus
  misc_feature (1)..(361): tr|W0DQE6|W0DQE6_9GAMM Epoxyqueuosine reductase OS=Thio alkalivibrio paradoxus ARh 1 OX=713585 GN=queG PE=3 SV= 1
MPQTLTPSQCRELAARIREWGHALGFQAVGITDASVGVHAEHLDAWLAQGSHGAMRWMADRAELRRDPAQLLPGVQRIVSLRMDYLPPDCARPETILGDSTRAYVSRYALGRDYHKLIRRRIQTLANRIETAVGPFGYRAFTDSAPILEKALAERAGLGWIGKHTNLLAREAGSWFFLGELFTDLPLPVDAPTEAHCGSCRACLDICPTQAFRGPYDLDARRCISYLTIEHPGAIPEPLRPMLGNRVYGCDDCQLVCPWNRFASLSVEPDFAARHGLDSAGLIELLAWDEPTFLERTAGMAIRRIGHPRWLRNVAVALGNGPATPEAIAALERRAGHPSALVREHVGWALERLRLRKRPAR

SEQ ID NO: 81708 - protein, 380 aa, Thioalkalivibrio sp.
  misc_feature (1)..(380): tr|D3SEG0|D3SEG0_THISK Epoxyqueuosine reductase OS=Thio alkalivibrio sp. (strain K90mix) OX=396595 GN=queG PE=3 SV=1
MIAEIVPEPLDPRQCAALAEQIRAWGRELGFQALRIAPATVPEADRQHLDRWLEKGSHGEMGWMAERAALRHDPAQLMAGVQRVISVRMDYFPPRTRRPAIQLAERDRAYVSRYALGRDYHKLIRKRLTELGRRIESEAGPHGYRAFTDSAPILEKALAARAGLGWIGKNTNLLARESGSWFFLGELFTDLPLPVDDPVGEHCGACTACLDICPTQAFRGPYDLDARRCISYLTIELKGSIPEDLRPLIGNRIYGCDDCQLVCPWNRFAEVSAEPDFVARHGLDAASLVELFGWDETIFLHRTKGMAIRRIGHEQWLRNLAVALGNGPPSAEAEAALRARADHPSPLVREHVGWALERLRSPSPSPAVDHLSRLTQAPGQ

SEQ ID NO: 81709 - protein, 405 aa, Thioalkalivibrio sp.
  misc_feature (1)..(405): tr|A0A318VY97|A0A318VY97_9GAMM Epoxyqueuosine reductase OS=Thioalkalivibrio sp. ALE21 OX=1158175 GN=queG PE=3 SV=1
MPDHPDPRQCAELADRIRQWGRELGFAELRIGPARVPEADRRHLDAWLERGSHGDMQWMADRAALRHDPDALVPGVQRIISVRMDYFPPRTRRPAAQLADPEGAYVSRYALGRDYHKLLRKRLTELGRRIEAEAPHGYRAFTDSAPVLEKALAQQAGLGWIGKHTNLLARGTGSWFFLGELFTDLPLPLDPGPAEDHCGSCRACLDVCPTQAFRGPHDLDARRCISYLTIELKGSIPEDLRPLIGNRIYGCDDCQLVCPWNRFAEVAAEPDFIARHGLDSASLVELFGWDEASFLEHTTGMAIRRIGHEQWLRNLAVALGNGPATDAAREALAARAEHPSPLVREHVAWARTRLDERAAGRLAEPPAIPVKALTRAPVDPAARPAGTPASKDGTAGEPKDPTTGS

SEQ ID NO: 81710 - protein, 363 aa, Thioalkalivibrio sulfidiphilus
  misc_feature (1)..(363): tr|B8GNC1|B8GNC1_THISH Epoxyqueuosine reductase OS=Thio alkalivibrio sulfidiphilus (strain HL-EbGR7) OX=396588 GN=queG PE=3 SV=1
MHKALNDTEAMELARRIKAWGLELGFQQVGISDTDLDEHESRLLAWLDAGRHGEMDYMARHGTRRSRPVELHPGTLRVISVRMDYQPPEARESWSVIHDPALGFVSRYALGRDYHKVLRNRLQQLATRIEAEIGPFGYRAFVDSAPVLEKALAEKAGLGWIGKHTNLLSREAGSWFFLGELYTDLPLPTDPPGEAHCGTCTACIEVCPTRAIVAPYELDARLCISYLTIELKGAIPEPLRPLMGNRIYGCDDCQLVCPWNRFARLSAEPDFRARHGLDGPALAELLAWDEATFLARTEGSAIRRIGHERWLRNVAVALGNGEALPGSIGVLESRTDHPSPLVREHAGWALARLRRRDTGVQHS

SEQ ID NO: 81711 - protein, 389 aa, Thioalkalivibrio versutus
  misc_feature (1)..(389): tr|A0A0G3G3Y1|A0A0G3G3Y1_9GAMM Epoxyqueuosine reductase OS=Thioalkalivibrio versutus OX=106634 GN=queG PE=3 SV =1
MIHAITSVAEAEIVPQRLDPRQSAELAERIRDWGRELGFQAVRIAPAEVPEADRRHLDDWLAQGSHGDMDWMADRAPLRHAPDALVPGVQRIISVRMDYFPPATRRPAIQLAERDHAYVSRYALGRDYHKLLRKRLTTLARRIEAEVGPFGYRAFTDSAPILEKALAARAGLGWIGKNTNLLARESGSWFFLGELFTDLPLPLDEPVDEHCGQCTACLDVCPTRAFRGPYDLDARRCISYLTIELKGAIPEDLRPLIGNRIYGCDDCQLVCPWNRFAEVTAEPDFIARHGLDSASLIELFAWDEATFLARTEGMAIRRIGHAQWLRNLAVALGNGPATPEADAALAARAEHPSELVREHAAWAREQLRNPPHSAPLSTENLSRLTQAPG

SEQ ID NO: 81712 - protein, 389 aa, Thioalkalivibrio versutus
  misc_feature (1)..(389): tr|A0A1V3BN95|A0A1V3BN95_9GAMM Epoxyqueuosine reductase OS=Thioalkalivibrio versutus OX=106634 GN=queG PE=3 SV =1
MIHAITSVAEAEIVPQRLDPRQSTELAERIRDWGRELGFQAVRIAPAEVPEADRRHLDDWLAQGSHGDMDWMADRAPLRHAPDALVPGVQRIISVRMDYFPPATRRPAIQLAERDHAYVSRYALGRDYHKLLRKRLTTLARRIEAEVGPFGYRAFTDSAPILEKALAARAGLGWIGKNTNLLARESGSWFFLGELFTDLPLPLDEPVDEHCGQCTACLDVCPTRAFRGPYDLDARRCISYLTIELKGAIPEDLRPLIGNRIYGCDDCQLVCPWNRFAEVTAEPDFIARHGLDSASLIELFAWDEATFLARTEGMAIRRIGHAQWLRNLAVALGNGPATPEADAALAARAEHPSELVREHAAWAREQLRNPPHSAPLSTENLSRLTQAPG

SEQ ID NO: 81713 - protein, 353 aa, Thiobacillus denitrificans
  misc_feature (1)..(353): tr|A0A106BKX2|A0A106BKX2_THIDE Epoxyqueuosine reductase OS=Thiobacillus denitrificans OX=36861 GN=queG PE=3 SV =1
MHERDLRRLAGQIKHWGRELGFAAVGIADGDLSAAEAGLQEWLDRGFHGEMDYMAAHGTKRSRPAELVPGTVRIISARLDYFPPASADPHEVLNDADAAYVSRYALGRDYHKVLRNRLQSLAEKIGTEVGAHHFRVFTDSAPVLEVELAAKSGLGWRGKHTLLLNRQHGSWFFLGEIYTDLPLPVDAPEAGHCGTCSACIDICPTQAIVAPYTLDARRCISYLTIELKGSIPTELRPLLGNRIYGCDDCQLVCPWNRFAQTAALPDFEVRNGLDSAQLVELFAWSETDFNDRLAGSPIRRIGHERWLRNIAVALGNAPPAPATQAALGARVDHPSELVREHVAWALARQQTTP

SEQ ID NO: 81714 - protein, 438 aa, Thiobacillus denitrificans
  misc_feature (1)..(438): tr|Q3SIQ2|Q3SIQ2_THIDA Epoxyqueuosine reductase OS=Thio bacillus denitrificans (strain ATCC 25259) OX=292415 GN =queG PE=3 SV=1
MIQIKRGKIVGFNERVGRAFHPAQVAEPAQHAPHQRRLARTEVAFQIEGHAGRQAGRKPRAERKRGGLVGKVATRRRGIIRGMHEQDSPRDFGRLAAQIKQWGRELGFAAIGITDADLSAAEAGLHTWLDKGFHGEMDYMAAHGTKRSRPAELVPGTLRIISARLDYFPPDAVDPDTILATPDAAYVSRYALGRDYHKVLRQRLQTLAERIGAAAGEHHFRVFSDSAPVMEVELATRAGLGWRGKHTLLLNRHHGSWFFLGEIYSDLPLPVDAPEAEHCGTCHACLDACPTQAIVAPYSVDARRCISYLTIELKGSIPLELRSLIGNRIYGCDDCQLVCPWNRFAGTAAVPDFAVRNGLDSAQLVDLFAWSEADFNDRLAGSPIRRIGHERWLRNIAVALGNARPAPAIEAALGTRLDHPSAMVREHVAWALARQQER

SEQ ID NO: 81715 - protein, 352 aa, Thiobacillus sp.
  misc_feature (1)..(352): tr|A0A5C7RNB0|A0A5C7RNB0_9PROT Epoxyqueuosine reductase OS=Thiobacillus sp. OX=924 GN=queG PE=3 SV=1
MHERDLTRLAQQIKQWGRELGFAAVGIADGELSTAEAGLQAWLDRGFHGEMDYMAAHGTKRSRPAELIPGTVRVISARLDYFPPDALDPHAVLDDAAAAYVSRYALGRDYHKVLRNRLQGLAEKISAEIGDHHFRVFTDSAPVLEVELATKSGLGWRGKHTLLLNRQHGSWFFLGEIYTDLQLPVDVPEAEHCGTCQACIDICPTQAIVTPYALDARRCISYLTIELKGSIPPELRPLIGNRIYGCDDCQLVCPWNRFAQTTALPDFEVRNGLDRVRLVELFAWSEADFNNRLAGSAIRRIGHVRWLRNIAVALGNAPPSPAIEAALNARLDHPSELVREHVAWALARQKAA

SEQ ID NO: 81716 - protein, 357 aa, Thiobacillus sp.
  misc_feature (1)..(357): tr|A0A1E4NDH1|A0A1E4NDH1_9PROT Epoxyqueuosine reductase OS=Thiobacillus sp. SCN 65-179 OX=1660144 GN=queG PE=3 SV=1
MIGSMHAQDSGRLAAQIKQWGRELGFAEVGIAGCELGDAEAGLLEWLAKGFHGEMNYMAAHGTKRSRPAELVPGTLRVISVRLDYLPPGAADPHAVMADSEAAYLSRYALGRDYHKVLRSRLQTLVERIAAKAGHGQFRVFTDSAPVLEVELATQSGLGWRGKHTLLLNRDRGSWFFLGEIYTDLPLPVDTPETGHCGTCRACLDICPTQAIVAPYQLDARRCISYLTIELKGSIPVELRPPIGNRIYGCDDCQLVCPWNRFAQTTALPDFAVRNGLDRARLAALFAWSETDFNDRLAGSAIRRIGYERWLRNIAVALGNAAPSEAAANALRTRRDHPSALVREHVEWALSQHGPSA

SEQ ID NO: 81717 - protein, 348 aa, Thiocapsa marina
  misc_feature (1)..(348): tr|F9UFS1|F9UFS1_9GAMM Epoxyqueuosine reductase OS=Thio capsa marina 5811 OX=768671 GN=queG PE=3 SV=1
MIPPAELVARIKHRGLELGFQQVGITDTDLASAESRLLAWLAEGRQGTMDYMARHGVKRSRPADLVPGTVRVISVRMDYLPESHRAMQTALEDPPRAFISRYALGRDYHKLLRRRLQRLAEHILAEIGPFGYRVFVDSAPVLEKPLAEKAGLGWIGKHTNLIHPKAGSWFFLGEIYTDLALPIDTPLTDHCGRCRACIDVCPTRAIVAPYELDARLCISYLTIEHAGTIPEPLRPLMGNRIYGCDDCQLVCPWNRFARLAVEPDFQARQGLDTASLVELFGWDETTFLDRTQGSAIRRIGHIRWLRNIAVALGNAPASPEVKQALVSRADHPQALVREHVGWALERVG

SEQ ID NO: 81718 - protein, 348 aa, Thiocapsa rosea
  misc_feature (1)..(348): tr|A0A495VE80|A0A495VE80_9GAMM Epoxyqueuosine reductase OS=Thiocapsa rosea OX=69360 GN=queG PE=3 SV=1
MIPTGELVARIKRRGSELGFQQVGITDTDLASAESRLLTWLAEGRHGTMDYMARHGLKRSRPADLVPGTVRVISVRMDYLPESHRAMQAALEDPPRAFISRYALGRDYHKLLRRRLQRLAEHILAEIGPFGYRVFVDSAPVLEKPLAAKAGLGWIGKHTNLIHPQAGSWFFLGEIYTDLALPIDTPIADHCGRCRACIEVCPTRAIIAPYRLDARLCISYLTIEHAGSIPQPLRPLMGNRIYGCDDCQLVCPWNRFAQLAAEPDFQARHGLDTASLVEVFGWDESTFLDRTQGSAIRRIGHLRWLRNIAVALGNAPASAEVKQALSTRADHPDALIREHVGWALRRIG

SEQ ID NO: 81719 - protein, 348 aa, Thiocapsa roseopersicina
  misc_feature (1)..(348): tr|A0A1H2Z0Z5|A0A1H2Z0Z5_THIRO Epoxyqueuosine reductase OS=Thiocapsa roseopersicina OX=1058 GN=queG PE=3 SV=1
MIPPDEIVARIKRRGLELGFQQVGITDTDLASAEARLLSWLDEGRHGTMDYMARHGLKRSRPADLVPGTVRVISVRMDYLPESHRAMQAALDDPPRAFISRYALGRDYHKVLRARLQRLAENILAEIGPFGYRVFVDSAPVLEKPLAAKAGLGWIGKHTNLIHPKAGSWFFLGEIYTDLALPIDSPIADHCGRCRACIEVCPTRAIVAPYALDARLCISYLTIEHAGGIPEPLRPLMGNRIYGCDDCQLVCPWNRFARLAAEPDFQARHALDTASLVEVFGWDEPTFLDRTQGSAIRRIGHSRWLRNIAVALGNAPSSPAIKQALNARVDHPDALIREHVGWALGRIG

SEQ ID NO: 81720 - protein, 348 aa, Thiocapsa sp.
  misc_feature (1)..(348): tr|A0A0U5IP31|A0A0U5IP31_9GAMM Epoxyqueuosine reductase OS=Thiocapsa sp. KS1 OX=610332 GN=queG PE=3 SV=1
MIATGGLATRVKAWGRELGFQQVGITDTDLGAAEARLRDWLAEGRHGTMDYMARHGLKRSRPADLVPGTIRVISVRMDYLPESQRVMQARLEDPQGAFISRYALGRDYHKVLRQRLQRLAEHILAEIGPFGHRVFVDSAPVLEKPLAAKAGLGWIGKHTNLIHPKAGSWFFLGEIYTDLALPVDTPMADHCGRCRACIEVCPTRAIVAPYVLDARLCISYLTIEHAGSIPEELRALIGNRIYGCDDCQLVCPWNRFARLGTEPDFQARHGLDTVSLIEVFAWDEATFLDRTQGSAIRRIGHIRWLRNIAVALGNAPASPEVKQALSRRADHPDALIREHVGWALRRIG

SEQ ID NO: 81721 - protein, 344 aa, Thioclava arenosa
  misc_feature (1)..(344): tr|A0A2A4CUJ7|A0A2A4CUJ7_9RHOB Epoxyqueuosine reductase OS=Thioclava arenosa OX=1795308 GN=queG PE=3 SV=1
MQDLKSRLIDQALSEGFSKARICRPDAVPEIAARLQAFVAAGRHGQMGWMKERMSWRGAPDQLWPEARSVIMLAETYTPDEDPMAVVGLPDRGAISVYARGRDYHDIVKKRLKRVGRWLLDQAEGEAIKVFVDTAPVMEKPLGQASGLGWQGKHTNLLARDLGSWFFLGAIFTTIELPPDPPEDSHCGNCTACLDACPTGAFPAPYQLDARRCISYLTIEHKGPIAQDLRAAMGNRIYGCDDCLAACPWNKFAAEAREMRYADQVGHPPLAELAALDDAAFRARFSGSPIKRVGRDRMLRNVLYAIGNSGDPALTDAARPHLADPDPVVREAAQWALERLGAAP

SEQ ID NO: 81722 - protein, 346 aa, Thioclava atlantica
  misc_feature (1)..(346): tr|A0A085U1F2|A0A085U1F2_9RHOB Epoxyqueuosine reductase OS=Thioclava atlantica OX=1317124 GN=queG PE=3 SV=1
MAVEDLKTRLVAKALEEGFSKARITTPDAIPEAAGRLEAFVGAGMHGQMGWMEERRNWRGDPAALWPEARSVVMLAESYTPDYDPLALLAQRDRGVISAYAQGRDYHDLVKKRLKRVGRWLLDQVENEEIKVFVDTAPVMEKPLGQASGLGWQGKHTNLLARDLGSWFFLGAIFTTVELAPDAPEISHCGSCRACLDICPTEAFPAPYRLDARRCISYLTIEHKGPIAPELREKLGNRIYGCDDCLAICPWNKFAAEAREASYHGGVGAPPLAELAALDDAAFRARFAGSPIKRIGRDRFLRNVLYAIGNSGDPALAAAARPHLGAEDPVVAEAARWALARLGAVS

SEQ ID NO: 81723 - protein, 345 aa, Thioclava dalianensis
  misc_feature (1)..(345): tr|A0A074TG49|A0A074TG49_9RHOB Epoxyqueuosine reductase OS=Thioclava dalianensis OX=1185766 GN=queG PE=3 SV=1
MTDLKSRLIAQALEEGFSKARVTTPDAIPQAAGRLEAFVEAGLHGQMGWMAERMGWRGAPDALWPEAKSVLMLAESYSPDYDPLDLLQERDRGVVSAYAQGRDYHDLVKKRLKRVGRWLLEQAPEGEIKVFVDTAPVMEKPLAQAAGLGWQGKHTNLLARDLGNWFFLGAIFTTVELAPDAPEREHCGRCTACLDICPTQAFPAPFQLDARRCISYLTIEHKGPVPEELRAKMGNRIYGCDDCLAICPWNKFAATAREARYHGGVGAPPLAELAALDDAGFRARFAGSPIKRIGRERFLRNVLYAIGNSQDRALAEAARPHLSDPDPVVAEAARWALARLGAEPG

SEQ ID NO: 81724 - protein, 346 aa, Thioclava electrotropha
  misc_feature (1)..(346): tr|A0A1W9XP73|A0A1W9XP73_9RHOB tRNA epoxyqueuosine(34) reductase QueG OS=Thioclava electrotropha OX=1549850 GN =AKL02_11280 PE=4 SV=1
MSAELKARLIETALAEGFSKARITTPDAIPQAAERLAAFVGAGMHGQMGWMEERMGWRGDPAALWSEARSVVMLAETYTPDYDPLDLLKARDHGVISAYAQGKDYHDLVKKRLKRVGRWLLDQAPEGAEIKVFVDTAPVMEKPLGEASGLGWQGKHTNLLARDLGSWFFLGAIFTTVELPPDAPEMSHCGSCTACLDICPTEAFPAPYQLDARRCISYLTIEHKGPIDEELRAKMGNRIYGCDDCLAVCPWNKFAAEAREARYHGGVGAPPLAELAALDDAGFRARFSGSPIKRIGRDRFLRNVLYAIGNSGDPGLAEAARPHLDDPDPVVAEAAQWALSRLEQAA

SEQ ID NO: 81725 - protein, 370 aa, Thioclava indica
  misc_feature (1)..(370): tr|A0A074JY90|A0A074JY90_9RHOB Epoxyqueuosine reductase OS=Thioclava indica OX=1353528 GN=queG PE=3 SV=1
MASWISERALGVLHPQTPAGYFYQEEEAVDDLKSRLVGKALEEGFSKARVTTPDAIPQAATRLEAFVGAGMHGEMGWMEERRVWRGDPTALWPQARSVLMLAESYSPDYDPLKLLEQHDRGVISAYAQGRDYHDLVKKRLKRVGRWLLEQAPEGEIKVFVDTAPVMEKPLAQAAGLGWQGKHTNLLARDLGNWFFLGAIFTTLELAPDSPEVEHCGNCTACLDICPTQAFPAPFQLDARRCISYLTIEHSGPIDLELRAKMGNRIYGCDDCLAACPWNKFAAAARETRYHGGVGAPPLAELAALDDAAFRARFSGSPVKRIGRDRFLRNVLYAIGNSGDEALAQAARVHLTDPNPVVAEAASWALAQLGA

SEQ ID NO: 81726 - protein, 338 aa, Thioclava pacifica
  misc_feature (1)..(338): tr|A0A074K384|A0A074K384_9RHOB Uncharacterized protein OS=Thioclava pacifica DSM 10166 OX=1353537 GN=TP2_00475 PE=4 SV=1
MKTRLVEKALEEGFSKARVTTPDAIPQAAERLDAFVSAGMHGQMGWMEERQNWRGAPDALWPEARSVVMLAEAYTPDYDPLELLEQRDRGVISAYAQGRDYHDLVKKRLKRVGRWLLDQAEGAQIKVFVDTAPVMEKPLGQASGLGWQGKHTNLLARDLGNWFFLGAIFTTVELEPDAPEVSHCGSCTACLDICPTEAFPAPYQLDARRCISYLTIEHKGPIAPELRAKMGNRIYGCDDCLAVCPWNKFAAEARELRYHGGVGAPPLAELAGLDDAAFRARFAGSPIKRIGRDRFLRNVLYAIGNSGDPSLVEAARAHLEDPDPVVAEAASWARAQLA

SEQ ID NO: 81727 - protein, 346 aa, Thioclava sp.
  misc_feature (1)..(346): tr|A0A1T2AZ99|A0A1T2AZ99_9RHOB tRNA epoxyqueuosine(34) reductase QueG OS=Thioclava sp. DLFJ4-1 OX=1915313 GN=B MI85_13950 PE=4 SV=1
MSAELKARLIETALAEGFSKARITTPDAIPQAAERLAAFVGAGMHGQMGWMEERMGWRGDPTALWSEARSVVMLAETYTPEYDPLDLLKARDHGVISAYAQGKDYHDLVKKRLKRVGRWLLDQAPEGEEIKVFVDTAPVMEKPLGEASGLGWQGKHTNLLARDLGSWFFLGAIFTTVELPPDAPEISHCGSCTACLDICPTEAFPAPYQLDARRCISYLTIEHKGPIDEELRAKMGNRIYGCDDCLAVCPWNKFAAEAREARYHGGVGAPPLAELAALDDAGFRARFAGSPIKRIGRDRFLRNVLYAIGNSGDPGLAEAARPHLDDPDPVVAEAAQWALSRLEQAA

SEQ ID NO: 81728 - protein, 344 aa, Thioclava sp.
  misc_feature (1)..(344): tr|A0A1C2HQF4|A0A1C2HQF4_9RHOB tRNA epoxyqueuosine(34) reductase QueG OS=Thioclava sp. SK-1 OX=1889770 GN=BFP7 0_07460 PE=4 SV=1
MDLKAQLTQHALAEGFSAIRITRPDAIPEVAQRLAQFVDAGMHGQMAWMAERMHWRGAPDALWPEARSVIMLAETYTPDHDPLQVLTQPERGAVSVYAQGKDYHDLVKKRLKRVGRWLLDTVKDGAPQIKVFVDTAPVMEKPLAQAAGLGWQGKHTNLLSRDLGSWFFLGAIFTTIELTIDPPQHSHCGSCRACLDACPTDAFPAPYQLDARRCISYLTIEHKGPVDLDLRSKMGNRIYGCDDCLAACPWNKFAQAALELRYHGPHGAPDLADLATLDDAAFRARYSGSPIKRIGRDRMVRNVLYAIGNSGLAHLRPVAQTLCDDPDPTVADAAQWAARRLPHS

SEQ ID NO: 81729 - protein, 358 aa, Thiocystis violascens
  misc_feature (1)..(358): tr|I3YH89|I3YH89_THIV6 Epoxyqueuosine reductase OS=Thio cystis violascens (strain ATCC 17096 / DSM 198 / 6111) OX=765911 GN=queG PE=3 SV=1
MHPQNSCVRRNPAQPLADRIKTWGRQLGFQQIGIADTDLGEAEARLLDWLAAGYQGTMEYLERHGSRRSRPAELVPGTLRVISARMDYLVGSPDAMRKALDDPASAFLSRYALGRDYHKVLRRRLQRLAERIEAEVGPFGYRVFVDSAPVLEKPLAAKAGLGWIGKHTNLIHPRAGSWFFIGEIYTDLPLTIDAPIRDHCGRCHACLDICPTQAIVAPYQLDARRCISYLTIELRDSIPETLRPLIGNRIYGCDDCQLVCPWNRFAHRTREPDFSPRHGLDTATLLELFAWDEATFLRRTEGSAIRRIGHVQWLRNLAVALGNAPASSEVTAALRARASHPSQLVREHVAWGMKRSLA

SEQ ID NO: 81730 - protein, 366 aa, Thioflavicoccus mobilis
  misc_feature (1)..(366): tr|L0GX77|L0GX77_9GAMM Epoxyqueuosine reductase OS=Thio flavicoccus mobilis 8321 OX=765912 GN=queG PE=3 SV=1
MSTCESLLPPSGKVPSPAELAALIKHWGGELGFQQVGIADTDLRLAEARLIRWLEQDLHGTMDYMARHGTRRSRPAELVPGTLRIVSVRMDYLPEPLDRTQPVLADPTHAFVSRYALGRDYHKVLRRRLQRLAERIRTAVGDFGFRVFVDSAPVMEKPLAAKAGLGWIGKHTNLINARAGSWFFLGELYTDLPLPVDRPAADHCGDCQACLAACPTGAIVAPYRLDARRCISYLTIEHQGPIPEPLRASLGNRIYGCDDCQIACPWNRFARLSSEDDFQPRQGLDRATLIALFGWDEPEFVARTEGSAIRRIGHRRWLRNLAVALGNATPGAPVQAALNARAEHPDPLVREHVAWARGAQARKVCG

SEQ ID NO: 81731 - protein, 350 aa, Thioflexothrix psekupsii
  misc_feature (1)..(350): tr|A0A251X8G7|A0A251X8G7_9GAMM Epoxyqueuosine reductase OS=Thioflexothrix psekupsii OX=1570016 GN=queG PE=3 SV =1
MSNTPTVLLQHLQHWSKELGFQELGVSDVDLTQAEQRLHIWLARQYHGQMDYMARHGDKRSRPAELLPGTLRVISLRINYLTATREDLWSQLQDAEHGYISIYAQGRDYHKVLRQRLKQLAMRLEQAIGSYQWRVFVDSAPVLEKPLAEKAGLGWIGKNTNLIHPRAGSFFFLGEIYTDLPLPITEQRHSDHCGRCQACLPSCPTQAFVAPYLLDARRCISYLTIEYKGIIPENLRPLIGNRIYGCDDCQLVCPWNRFASRSVEVDFQARAPWKNTRLLDLWAWSEADFLRHTEGSAIRRVGYLCWLRNLAIALGNAPKSDTIRLALNARLDFPSDLLQEHVRWALARHE

SEQ ID NO: 81732 - protein, 368 aa, Thiogranum longum
  misc_feature (1)..(368): tr|A0A4R1HFP3|A0A4R1HFP3_9GAMM Epoxyqueuosine reductase OS=Thiogranum longum OX=1537524 GN=queG PE=3 SV=1
MTLSPKSNISPGRDSIDFVQLARDIKTWARDLGFQQAGVADTDLDKDEAHLLSWLGENLHGEMNYMAAHDGKRSRPQELVPGTLRVISVRMDYWPGQADQADTVLDDPARAYVSRYALGRDYHKVLRKRLQKLAERIAEQVGPFGFRAFTDSAPVLEKALAQKAGLGWIGKHTNLINRREGSWFFLGELFTDLPLPVDDPSENHCGSCQACIDICPTQAIIAPYRLDARRCISYLTIELHGSIPEALRKGIGNRIYGCDDCQLICPWNRFSRPSEESDFTPRHRLDSRTLIDLFKWDEAEFLRVTEGTAIRRIGHISWLRNIAVALGNSSRSEAVIEALQSRSNHPSELVREHVQWALGQHNPGDKTA

SEQ ID NO: 81733 - protein, 353 aa, Thiohalobacter thiocyanaticus
  misc_feature (1)..(353): tr|A0A426QLK3|A0A426QLK3_9GAMM Epoxyqueuosine reductase OS=Thiohalobacter thiocyanaticus OX=585455 GN=queG PE= 3 SV=1
MSTSPAINDLDQLARDIKAWGAELGFDQIGITGTDLSDAETHLLNWLAAGRHGEMGYMARHGTRRSRPAELEPGTLRVISVRLNYWPDAADPDTVLQSPGQAFISRYALGRDYHKLLRKRLQQLARRIEQVTGPFGYRAFTDSAPVLEKALAEQAGLGWIGKHTNLIHKQTGSWFFLGELYTDLPLPVDSPAENHCGTCRSCIDACPTGAIVAPYELDARLCISYLTIELHGPIPVELRPLLGNRIYGCDDCQLVCPWNRFARITAEDDFQPRHGLDTAGLIECFGWDEPTFLARTEGSAIRRIGHERWLRNIAVALGNAPTSPGVIAALQARADHPSELVREHVAWALAQHT

SEQ ID NO: 81734 - protein, 362 aa, Thiohalobacter thiocyanaticus
  misc_feature (1)..(362): tr|A0A1Z4VTS0|A0A1Z4VTS0_9GAMM Epoxyqueuosine reductase OS=Thiohalobacter thiocyanaticus OX=585455 GN=queG PE= 3 SV=1
MPANPVIDDLDQLARDIKSWGAELGFDQIGITGTDLSDAETHLLNWLAAGRHGEMDYMARHGTKRSRPAALEPGTLRVISARLNYWPEAADADSVLQSPAQAFISRYALGRDYHKLLRKRLQQLARRIEQAIGPFGYRAFTDSAPVLEKALAEQAGLGWIGKHTNLIHKQTGSWFFLGELYTDLPLPVDAPGDNHCGTCRSCLDACPTGAIVGPYELDARLCISYLTIELHGPIPVELRPLLGNRIYGCDDCQLVCPWNRFAQLTAEDDFQPRHGLDTAGLIECFGWDEATFLDRTEGSAIRRIGHERWLRNIAVALGNAPTSAEVITALQARSDHSSELVREHVAWALSRHGDNNAQDAAR

SEQ ID NO: 81735 - protein, 365 aa, Thiohalomonas denitrificans
  misc_feature (1)..(365): tr|A0A1G5PKG4|A0A1G5PKG4_9GAMM Epoxyqueuosine reductase OS=Thiohalomonas denitrificans OX=415747 GN=queG PE=3 SV=1
MAISYNMDRQNLEPNDLARHIRSWGRELGFQAVGITDIDLSAAERRFLDWLKAGFHGEMEYMARHGTRRSRPPELVEGTCRVISVRMDYRPAGAADADAVLADSRQGYISRYALGRDYHKLMRKRLANLAKRIEAAVGPFGHRVFVDSAPVLEKPLAEKAGLGWVGKHSNLLHREGSWFFLGEIYVDLPLPIDTATEPHCGSCRACIDACPTRAIVAPYVVDARLCISYLTIELHGSIPEELRPLIGNRIYGCDDCQLCCPWNRFTANTAEGDFEPRHELDSTSLVELFAWDEARFLQRTEGSAIRRLGHERWLRNIAVALGNAPAEPAIIEALQARREACSPLVREHVEWALGQHGIETPESAG

SEQ ID NO: 81736 - protein, 369 aa, Thiohalophilus thiocyanatoxydans
  misc_feature (1)..(369): tr|A0A4R8IGU9|A0A4R8IGU9_9GAMM Epoxyqueuosine reductase OS=Thiohalophilus thiocyanatoxydans OX=381308 GN=queG PE=3 SV=1
MIMSHSQNKQAAQNTDWSALAAQIKQWGAELGFQQTAITDTDLDDYETRLQQWLARDYHGDMQWMAEYGHKRSRPADLVSDTRRIISVRLDYLPEERIDLKALLDHPDKAYISRYALGRDYHKLMRKRLQQLADHIQQQIGPFGYRAFVDSAPVMEKALAEKAGLGWIGKHSNLLQRHTGSWFFLGELYTDLPLPVDEPASNHCGTCQACIDVCPTKAIVEPYVVDARRCISYLTIELKGSIPVALRKPMGNRIYGCDDCQLYCPWNRFADSSQEPDFDPRQRLDEAQLVELFQWDEETFNRNLEGSAIRRIGHERWLRNIAVALGNAATSSEVIAALQARTDHPSELVREHVHWALEQHQPVGKESSS

SEQ ID NO: 81737 - protein, 385 aa, Thiohalorhabdus denitrificans
  misc_feature (1)..(385): tr|A0A0P9CQG6|A0A0P9CQG6_9GAMM Epoxyqueuosine reductase OS=Thiohalorhabdus denitrificans OX=381306 GN=queG PE= 3 SV=1
MRDPKESIRAKALEVGFDAVGFARAELSAEARANLAEFLGRGRHGDMGWLARNTDRRGDPRTLWPEAATVIVLGMNYGPDHDPLEDLEHRDTGTVSVYARGRDYHDVVKKRLKQLGRWLIDQWGGEIKVFVDTAPVMEKPLGQAAGVGWQGKHTNLVSRAFGSWLFLGEVFTTLELAPDDPEGDFCGSCHRCLDACPTNAFPAPYQLDATRCISYLTIEHPGHIPREFRAALGNRIYGCDDCLAVCPWNKFASRARNEWLQARESLNRPALAELARLDDPAFRARFSGSPVKRLGRDRFVRNVLIALGNSGDPGLAEVAAGLLADGSALVRAMAVWALGELDPARLAREAARHRGGEGDPDVRAEWDAALAGQEGPGPGSPQKDS

SEQ ID NO: 81738 - protein, 361 aa, Thiohalospira halophila
  misc_feature (1)..(361): tr|A0A1I1NAW5|A0A1I1NAW5_9GAMM Epoxyqueuosine reductase OS=Thiohalospira halophila DSM 15071 OX=1123397 GN=que G PE=3 SV=1
MAARQNHPDATTADTDALLHRLRARARELGFAAVGVTDTDLTAAETYLFDWLADGRHGEMEWMARHGTLRSRPAELEPGTVRVISARMDYLPEPAAEPWSVLADGALGYVSRYALGRDYHRLMRRRLQHLARWLEAEAGPLGYRVFTDSAPVMEKPLAEKAGLGWIGKHTNLLSREGGSWFFLGEIYTDLPLPVDEPATAHCGSCRACIDACPTGAITAEGELDARLCISYLTIEHPGPIPEELRALMGNRIYGCDDCQLVCPFNREANATAEADFHPRQGLDAPRLVELFAWDEDEFLARTEGSAIRRIGHARWLRNLAVALGNAPTTGEVVAALRARADHPEPLVREHVAWALARHDPG

SEQ ID NO: 81739 - protein, 356 aa, Thiolapillus brandeum
  misc_feature (1)..(356): tr|W0TN20|W0TN20_9GAMM Epoxyqueuosine reductase OS=Thio lapillus brandeum OX=1076588 GN=queG PE=3 SV=1
MPCTVQQRDGKQLAQQIKQWAGELGFQQTGIADTDLELAGERLNRWLELGRHGDMDYMWKHGSKRYRPGELVPGTLRVISVRMDYLPPDDDPVSVLQDPAAAFISRYALGRDYHKLMRKRLQKLAGRIREAVGDFGYRVFVDSAPVLEKPLAVKAGLGWMGKHTCIINREAGSWFFLGELYTDLPLPLDEPVEEHCGRCSACMDICPTRAIVAPYELDARRCISWLTIERHGPIPVALRPLMGNHIYGCDDCLMACPWNRFSTPTPEVDFLPRQGLDKSTLLELFSWDEASFLKRTEGSPIRRIGHERWLRNIAVALGNSNGGSAVMEALKKRLENSSALVAEHIRWALEQLDRNA

SEQ ID NO: 81740 - protein, 408 aa, Thiomicrorhabdus sp.
  misc_feature (1)..(408): tr|A0A4P9K5V0|A0A4P9K5V0_9GAMM Epoxyqueuosine reductase OS=Thiomicrorhabdus sp. G1 OX=2580412 GN=queG PE=3 SV= 1
MTDTVSAQPTLVLSSEQFAQIKGWAAQLGFADISVCDIDLSDYEKGYFDWLAQDYHGDMEYMSRHGIKRSRPEELEPGTLSILSVRLNYFDCSAEHAARQIQQTDKAYISRYALQKDYHKLMRKRLQQLADKIGQHFNGFQYRAFCDSAPVLERSIAHKAGLGFIGKNSLIIHPRAGSWFFLGELYTNLTISTDLSEKTHPQGCGPCNACIVECPTQAIIDNGIVDSRRCISYLTIEYKGAIPLELRALMGNRIYGCDDCQLVCPWNKFTADTNEDVFRAQQNRLDKATLLELWQWDENQFLQNFAGSPIRRIGYPQWCRNLAVALGNIKASNHEKSAIIQALISKKTIINDLVDEHIDWAISHLGKTPESENHALPHKQIFAIDPKNIRPFKAKKYYLPKMPDNIDK

SEQ ID NO: 81741 - protein, 399 aa, Thiomicrospira aerophila
  misc_feature (1)..(399): tr|W0DWA1|W0DWA1_9GAMM Epoxyqueuosine reductase OS=Thio microspira aerophila AL3 OX=717772 GN=queG PE=3 SV=1
MSNASENADDLNQLSRLISQHAYSLGFSHCGISNTDLSAHEADYFNWIGLGYHGTMDYMEKHGTKRTRPTELIPGTQSVISVLMPYFEYEQHHPITQLQSSQQAYISRYALGRDYHKVLRKKLAKLAEYILTLEPQAALRGFVDSAPVLERQLAHKAGLGFLGKNSLLIHPKAGSWFFIGEIYTNLILPTHTRSVKDGCGSCQACIQECPTQAIVADGVVDARRCISYLTIEHPGPIDEVLRPLMGNRIYGCDDCQLVCPWNHFTPPNQQVDFKVRHQLDQASLIELFSWTEAEFEQNTAGSPIRRIGYEKWQRNIATALGNAQFDVDIVTLLEKNLGKVSEMVDQHINWALQQQLNKQKPEVKDQNLQKPGRPFHAAKYYLPKAIKTTTQTGFLDRPE

SEQ ID NO: 81742 - protein, 395 aa, Thiomicrospira cyclica
  misc_feature (1)..(395): tr|F6DBP3|F6DBP3_THICA Epoxyqueuosine reductase OS=Thio microspira cyclica (strain DSM 14477 / JCM 11371 / ALM1 ) OX=717773 GN=queG PE=3 SV=1
MIKDHAYQLGFSHCGFSHTDLSAYEADYFNWLGLNYHGTMSYMAAHGTKRTRPSELIPGTQSVISVLMPYFEYDQYDPIIQLQSKQHAYVSRYALGRDYHKVLRKKLAKLAEFILSQVPDAALRGFVDSAPVLERQLAYQAGLGFLGKNSLLIHPKAGSWFFIGEIYTNLTLASDSTPVRDGCGQCQACIQECPTQAIVADGVVDARRCISYLTIEHQGAIDEELRPLMGNRIYGCDDCQLVCPWNHFTPPNQQDDFKARHELDQALLIDLFSWSQQEFEVQMAGSPIRRIGYEKWQRNIAIALGNADFDEDIITQLKSRLGQVSDMVDEHIYWAITQQQQAGTLTNAVEKSNYPTSPIGLPSSAAKYYLPKSAKAQFKTKRVLPVRTDSQDSLD

SEQ ID NO: 81743 - protein, 247 aa, Thiomicrospira sp.
  misc_feature (1)..(247): tr|A0A356VTC1|A0A356VTC1_9GAMM tRNA epoxyqueuosine(34) reductase QueG (Fragment) OS=Thiomicrospira sp. OX=935 GN=queG PE=4 SV=1
MSKNPTNSPLYSLSLLIKKWGQELGFADVGITHTDLSAYETDYFNWVGDNYHGDMDYMTKHGTKRTRPNELVPGTQSIISVRMNYFDTLAENPVQQLKGENKAYVSRYALNKDYHKIMRKRLQQLANKISEHSTKLEQDFNYRAFADSAPVLERPIAQQAGLGFIGKNSLIIHPRAGSWFFLGELYCNIKLPADPPFTKQGCGPCTACIVECPTQAILDNNKIDARRCISYLTIEYKGIISDELKEK

SEQ ID NO: 81744 - protein, 395 aa, Thiomicrospira sp.
  misc_feature (1)..(395): tr|A0A0X3THB3|A0A0X3THB3_9GAMM Epoxyqueuosine reductase OS=Thiomicrospira sp. XS5 OX=1775636 GN=queG PE=3 SV=1
MPEAPLYQLAEKIKHWGQALGFADVGITDTDLSAYEADYFNWLGEHYHGDMEYMARHGTKRTRPAELEPGTVSVISVRLNYFDPDAHSPVEQLHANGQAYVSRYALHKDYHKLMRKRLQQLAAKIEAELVKKAESFHYRAFVDSAPVLERPLAEKAGLGFIGKNSLIIHPRAGSWFFLGELYTNLPLPNDPPFDKQGCGPCTACIDECPTQAIVDNAVVDARRCISYLTIEYKGVIAPELREKMGNRIYGCDDCQLVCPWNKFTEATEETAFKPKHALDAASLLELLDWNETQFLTQFEGSPIRRIGFEQWQRNLCIALGNALEDTDLSQRIVQALETLSSDSELVLEHRDWALKRQTDALTASDKTARPLYPLGCGRFPKPLKPAVAKKYYLPK

SEQ ID NO: 81745 - protein, 375 aa, Thiomonas arsenitoxydans
  misc_feature (1)..(375): tr|D6CUA2|D6CUA2_THIA3 Epoxyqueuosine reductase OS=Thio monas arsenitoxydans (strain DSM 22701 / CIP 110005 / 3 As) OX=426114 GN=queG PE=3 SV=1
MEQLSTSPERLRALAQDIKQQGRALGFSQIGITGVDLRSAEAPLLDWLAAGHHGSMDYMQRHGLKRARPAELVPGTLRVITARLDYLPRASPADWRDAEWQRLAQPEAATISVYARGRDYHKVLRRKLQQLADYIAAQIDPGVVRVFTDSAPVLEVELAARAGLGWRGKHTLLLQRDSGSMFFLGEIFIGLPLPVDAPASAHCGTCRKCIVICPTQAILGPEQLDARRCISYLTIEHAGPIPLELRPLIGNRIYGCDDCQLICPWNRYAQRSSLPDFDPRHGFDQAQLLDLWNWSEAQFEQRTEGSPIRRIGFERWQRNLAVALGNGLRGNHETAWRQAAIQALHSALPHARALLQEHVRWALAQAETDPREITR

SEQ ID NO: 81746 - protein, 375 aa, Thiomonas bhubaneswarensis
  misc_feature (1)..(375): tr|A0A0K6I9C3|A0A0K6I9C3_9BURK Epoxyqueuosine reductase OS=Thiomonas bhubaneswarensis OX=339866 GN=queG PE=3 S V=1
MEPISASPEDLRLLAQDIKQQGRALGFSQIGITGVDLREAEAPLLDWLAAGHHGGMDYMQRHGLKRARPAELVPGTLRVITARMDYLPRNAPGNWRGVEWQRLEQPEAATVSLYARGRDYHKVLRRKLKQLADHIAARVDPGVVRVFTDSAPVLEVELAARAGLGWRGKHTLLLQRDGGSMFFLGEIFVGLPLPVDAPTSAHCGSCRKCIDICPTRAIIGPQQLDARRCISYLTIEHEGAIPVELRPLIGNRIYGCDDCQLICPWNRHAQRSPLPDFEVRNDLDRVMLLDLWAWTEAEFSQRTEGSAIHRIGYIRWRRNLAVAIGNGLREHPDAAWREAAIKALREARAMEPPLVQDHLDWALAQAHTRRLGTAR

SEQ ID NO: 81747 - protein, 386 aa, Thiomonas delicata
  misc_feature (1)..(386): tr|A0A238D7J6|A0A238D7J6_THIDL Epoxyqueuosine reductase OS=Thiomonas delicata OX=364030 GN=yjeS PE=3 SV=1
MQERSEPSNSRPAPHAEALRVLVGEIRAEARQLGFSQIAISDVHLAEAEAALQRWLDAGYHGEMGYMAHHGTKRARPAELVPGTLRVITARMDYLPGDASAGAGWQEIEWARLHDPKAATVSLYARGRDYHKVLRSRLQKLADFIAARVDPGVVRVFTDSAPVLEVALASRAGLGWRGKHTLLLNREAGSMFFLGEIFIGIPLPVDAPQGGHCGSCTRCIDVCPTRAIVAPYVLDARRCISYLTIELAGPIPEPLRPLMGNRVYGCDDCQLACPWNKYAQLAPLPDFAARHGLDQATLLDLWSWTEEQFLARTEGSAIRRIGFARLRRNLAVALGNARRGLPASDAAQAGIETALRAALPTASPLVAEHIAWALAQSPGAGAGQAA

SEQ ID NO: 81748 - protein, 378 aa, Thiomonas intermedia
  misc_feature (1)..(378): tr|D5X220|D5X220_THIK1 Epoxyqueuosine reductase OS=Thio monas intermedia (strain K12) OX=75379 GN=queG PE=3 SV= 1
MARMEQLSTSPERLRALAQDIKQQGRALGFSQIGITGVDLRSAEAPLLDWLAAGHHGSMDYMQRHGLKRARPTELVPGTLRVITARLDYLPRASPADWRDAEWQRLAQPAAATISVYARGRDYHKVLRRKLQQLADHIAAQIDPGVVRVFTDSAPVLEVELAARAGLGWRGKHTLLLQRDSGSMFFLGEIFIGLPLPVDAHASAHCGSCRKCIDICPTQAILGPEQLDARRCISYLTIEHAGPIPLELRPLIGNRIYGCDDCQLICPWNRYAQRSSLPDFDPRHGFDQAQLLDLWNWSEAQFEQRTEGSPIRRIGFERWQRNLAVALGNGLRGNHETAWRQAATQALHSALPHARALLQEHVRWALAQAETDPREITR

SEQ ID NO: 81749 - protein, 386 aa, Thiomonas sp.
  misc_feature (1)..(386): tr|A0A259QQ19|A0A259QQ19_9BURK Epoxyqueuosine reductase OS=Thiomonas sp. 13-66-29 OX=1970448 GN=queG PE=3 SV=1
MQERSEPSNSRPAPHAEALRVLVGEIRAEARQLGFSQIAISDVHLAEAEAALQRWLDAGYHGEMGYMAHHGTKRARPAELVPGTLRVITARMDYLPGDASAGAGWQEIEWARLHDPKAATVSLYARGRDYHKVLRSRLQKLADFIAARVDPGVVRVFTDSAPVLEVALASRAGLGWRGKHTLLLNREAGSMFFLGEIFIGIPLPVDAPQGGHCGSCTRCIDVCPTRAIVAPYVLDARRCISYLTIELAGPIPEPLRPLMGNRVYGCDDCQLACPWNKYAQLAPLPDFAARHGLDQATLLDLWSWTEEQFLARTEGSAIRRIGFARLRRNLAVALGNARRGLPASDAAQAGIEAALRAALPTASPLVAEHIAWALAQSPGAGAGQAA

SEQ ID NO: 81750 - protein, 414 aa, Thiomonas sp.
  misc_feature (1)..(414): tr|A0A238DSA7|A0A238DSA7_9BURK Epoxyqueuosine reductase OS=Thiomonas sp. X19 OX=1050370 GN=yjeS PE=3 SV=1
MDDRREQMEVNPAPDEAALAALAVDIRTEAKRLGFSQIAISDVHLGAAEAELQRWLDAGFHGEMGYMARHGSKRARPAELVPGTLRVITARMDYLPAHLSTSLATEPPTASPPETPTAAADWRDAEWARIADPQAAVVSVYARGRDYHKVLRARLQKLADFIAARTDPGVVRVFTDSAPVLEVALAARAGLGWRGKHTLLLNREAGSTFFLGELFIGLPLPVDAPQQEHCGSCSRCIDICPTRAIVAPYTLDARRCISYLTIELAGPIPEDLRPLMGNRVYGCDDCQLICPWNKYAQTSPLPDFAPRHGLDSASLLQLWAWSEADILQRTEGSAMRRIGFERLRRNVAVALGNARRSLPAAHALQRDIETALRAALPAATPLVAEHIVWALAQQAGSSRVEASAKVHQAEEHGQ

SEQ ID NO: 81751 - protein, 354 aa, Thiopseudomonas denitrificans
  misc_feature (1)..(354): tr|A0A4R6U377|A0A4R6U377_9GAMM Epoxyqueuosine reductase OS=Thiopseudomonas denitrificans OX=1501432 GN=queG PE =3 SV=1
MPLKNIDPEQLLDSIAGWAHELGFAQTGISSIDLSAEEDYLQKWLDAGYHGGMDYLHKHGMLRARPGELVPGTLSVISVRMDYLPGDTAAIQRLADGEAAYISRYALGRDYHKMMRKRLQKLAERIAEAIGPYGYRVFVDSAPLLEKALARNAGLGWVGKNTLILNRKAGSFFFLGEILIDFPLPANQEQARNHCGSCTACLDLCPTSAFVDANTLDARRCISYLTIEYKGSIDPELRPLMGNRVFGCDDCQLVCPWNRFAKPTAETDFLPRHGLDNVNLAELFMWTEEEFLQRTEGSPIRRAGYESWLRNLAIGLGNAPSTIPVLEALQARRDHPSELVREHVEWALKRHGVL

SEQ ID NO: 81752 - protein, 352 aa, Thiorhodococcus drewsii
  misc_feature (1)..(352): tr|G2E5J4|G2E5J4_9GAMM Epoxyqueuosine reductase OS=Thio rhodococcus drewsii AZ1 OX=765913 GN=queG PE=3 SV=1
MDTHPNQWLSERIKAWGHELGFQQVGITDTDLTTAEGRLMEWIASGRHGDMEYMARHGTKRSRPAELVPGTLRVISVRMDYLPETPETTRQILADSATAFISRYALGRDYHKLIRRRLQHLAERIQDAIAPTACRVFVDSAPVLEKPLAEKAGLGWMGKHTNLINSQAGSWFFLGEIYTDLALPIDHSQGSHCGRCQACIDICPTQAIIAPYQLDARRCVSYLTIEHQGGIPEALRPLIGNRIYGCDDCQLVCPWNRFAQPTRETDFLPRAGLDTVTLIELFGWDEATFLKRTEGSAIRRIGHLRWLRNIAVALGNAGSAPEVSATLRVHASHPSALVREHVAWALDRQGLT

SEQ ID NO: 81753 - protein, 364 aa, Thiorhodospira sibirica
  misc_feature (1)..(364): tr|G4E1L2|G4E1L2_9GAMM Epoxyqueuosine reductase OS=Thio rhodospira sibirica ATCC 700588 OX=765914 GN=queG PE=3 SV=1
MRPCLPPSPANCTPGPLDLNTLWHEIERWANGLGFAKVGVADIDLKAHEPHLQRWLEAGYHGEMEYMARHGLRRARPTELLPGTVRVLCARMAYHPPQARPAAEVLADPQRAYLSRYALGRDYHKVMRTRLQHLARQIETASGPFGYRVFCDSAPVLEKALAQQAGLGWVGKHSNLLAADAGSWFFLGEIYTDLPFPCSRPVAAQCGACAACMHACPTQAIIAPYIVDARRCISYLTIEHPGSIPIRLRPLLGNRIYGCDSCQLACPWNRLASPTPLADFHIRHALDNPALLELFAWDEATFLARTEGSVIRRIGYPRWQRNLAVALGNAPPSPAIHRALQIRYPHADELVREHIRWALTRHGD

SEQ ID NO: 81754 - protein, 371 aa, Thiorhodovibrio sp.
  misc_feature (1)..(371): tr|H8Z510|H8Z510_9GAMM Epoxyqueuosine reductase OS=Thio rhodovibrio sp. 970 OX=631362 GN=queG PE=3 SV=1
MTPTTLAAHIKTWGRELGFQQVGIAGCELSGPESYLHDWLARGWHGEMDYMARHGSKRSRPAELLPGTKRVICARMDYMPEALEDTRAACDHPIEAFISRYALGRDYHKLLRARLKQLALRIEAESGPFQWRPLVDSAPVMEKPLAQAAGLGWIGKHTNLINPGAGSWFFLGELYVDLLLPIDEPLPSHCGRCRACMDICPTGAIVKPYELDARLCISYLTIELAGAIPAPLRPLLGNRIYGCDDCQLVCPWNRFAHVTKEADFCPRHGLDGASLIALFSWDEAEFLKRTEGSAIRRIGHQRWLRNIAVALGNAAPSPVARQALEARSDHPSDLIREHVHWALARQCQRRENDDLSEKAPGTPSSQQEPRA

SEQ ID NO: 81755 - protein, 348 aa, Thiothrix caldifontis
  misc_feature (1)..(348): tr|A0A1H3W9G2|A0A1H3W9G2_9GAMM Epoxyqueuosine reductase OS=Thiothrix caldifontis OX=525918 GN=queG PE=3 SV=1
MKIAQIQAIGQALGFNAVGVSNIDLSFAEQRLLDWLAQGYHGDMAWMAHHGTKRSRPAELVSGTLSVISVRMDYLPPDSMDAVSILNHPERAYISRYALGRDYHKVIRQRLEKFAQQLQTEIGAFGYRAFTDSAPVLEKPLAVKAGLGWMGKHTNVLSRDAGSWFFLGEIYTDLPLDETGSVSEHCGQCTACIDVCPTQAILAPYVLDARRCISYLTIEYQGSIPLELRPLMGNRIYGCDDCQLICPWNRFAQTSPEADFAVRNGLDSARLSELFQWSESEFMRKLEGSPIRRIGYERWLRNIAVALGNAPVSVSVMALLQHRKMAISSELVREHIDWALEQQKQSDS

SEQ ID NO: 81756 - protein, 349 aa, Thiothrix eikelboomii
  misc_feature (1)..(349): tr|A0A1T4XDM7|A0A1T4XDM7_9GAMM Epoxyqueuosine reductase OS=Thiothrix eikelboomii OX=92487 GN=queG PE=3 SV=1
MALMADISAKLPEWGAELGFDALGISSIDLSSAEQSLWAWLAQGYQGDMEWMQRHGTKRSRPAELVEGTLSIISVRMNYWPEPSTPAEMVLNHPELAYISRYALGRDYHKVLRQRLEKLAERLQTEIGFLRYRVFVDSAPVLEKPIAVKAGLGWLGKHTNLIHRSAGSYFFLGELYTDLPLPETGASTEHCGSCTACLDICPTQAIIQPYLLDANRCISYLSIEYAGSIPLEFRPLMGNRIYGCDDCQLICPWNRFAQVSTEYDFQIRHQLDRASLLELFAWDETTFLAKLAGTAIRRIGHERWLRNLAIALGNAPPSHHIRDALLAKLDTALSPLVREHVEWALQRQT

SEQ ID NO: 81757 - protein, 349 aa, Thiothrix lacustris
  misc_feature (1)..(349): tr|A0A1Y1QW40|A0A1Y1QW40_9GAMM Epoxyqueuosine reductase OS=Thiothrix lacustris OX=525917 GN=queG PE=3 SV=1
MKIERIQAIGRVLGFNAVGVSNVDLSLAEQRLLDWLAQGYHGDMAWMAHHGTKRSRPTELVSGTLSVISVRMDYLPPDSMDAVMILNHPERAYISRYALGRDYHKVLRQRLEKFAQRLQAEIGAFGYRVFTDSAPVLEKPIAVKAGLGWMGKHTNILSRDAGSWFFLGEIYTDLPLAETGAVSEHCGQCSACLAVCPTQAILAPYVLDARRCISYLTIEYKGSIPLELRPLMGNRIYGCDDCQLICPWNRFAQTSPEADFAVRNGLDSARLSALFQWSESEFMRKLEGSPLRRIGYERWLRNIAVALGNAPPSRSTLKLLQHTYGVLESALVKEHVQWAIAQQKQGISG

SEQ ID NO: 81758 - protein, 355 aa, Thiothrix lacustris
  misc_feature (1)..(355): tr|A0A1Y1QHB5|A0A1Y1QHB5_9GAMM Epoxyqueuosine reductase OS=Thiothrix lacustris OX=525917 GN=queG PE=3 SV=1
MNNAVPTPDHWLQTLQTLSKNLGFNAVGVSGIALEAAEQRLLDWLDKGYHGDMAWMASHGTKRSRPAELVAGTLSVISVRMDYFPPDTVDAVMLLNHPERAYISRYALGRDYHKLLRQRLEKLAQQLQPLLGQFNYRVFTDSAPVLEKPLAVNAGLGWMGKHTNLLSREAGSWFFLGEIYTDLPLPETGAVTEHCGQCQACITVCPTQAIIAQYELDARRCISYLTIEHQGSIPLELRPLLGNRIYGCDDCQLICPWNRFAQTSPEADFAARHGLDSARLGELLQWTQAEFLQRFEGSPIRRIGYARWSRNLAVALGNSPASAATLALLLQRRGDCGDEMVLEHLDWAIAQQQKV

SEQ ID NO: 81759 - protein, 356 aa, Thiothrix sp.
  misc_feature (1)..(356): tr|A0A432URN2|A0A432URN2_9GAMM Epoxyqueuosine reductase OS=Thiothrix sp. OX=1032 GN=queG PE=3 SV=1
MNNKSVSLAMPALAQRIKTWGMALGFQQIGITDIDLQEAETRLLNWLDKGYHGNMEYMSRHGSKRSRPAELVPGTLRVISARMDYFPPKSSDEWQVLSSKKLAYISRYALGRDYHKLIRKRLQQLAQHIETETGPFGYRVFTDSAPVLEKPLAQKAGLGWIGKHTNLLNRRAGSWFFLGEIYTDLPLTIDAQESSHCGQCTACIDICPTQAIVAPYELDARRCISYLTIELQGSIPEALRSLIGNRIYGCDDCQLVCPWNRFAQRSVETDFSIRNELDTPELVSLFSWTEQVFLSRMEGSPIRRIGHTRWLRNIAVALGNARPDPEALHALQQRIDHPSGLVREHVRWAIKQHSSS

SEQ ID NO: 81760 - protein, 355 aa, Thiothrix sp.
  misc_feature (1)..(355): tr|A0A5C7S3M2|A0A5C7S3M2_9GAMM Epoxyqueuosine reductase OS=Thiothrix sp. OX=1032 GN=queG PE=3 SV=1
MDHPKKAALIADISAKLPRWGAELGLDAVGVSSIDLSNAEQKLWTWLEQGYHGDMDWMQRHGTKRSRPNELVEGTLSIISVRMNYWPEASAPAEMVLNHPELAYISRYALGRDYHKVLRQRLEKLAQRLQAELGRLRYRVFVDSAPVLEKPLAVKAGLGWLGKHTNVLNRSSGSYFFLGEIYTDLPLIETGAVAEHCGSCNACISICPTQAIIQPYVLDANRCISYLTIEYAGSIPLEFRPLIGNRIYGCDDCQLICPWNRFATTSQEVDFKIRHQLDSAYLIELFAWDEAEFLEKMAGSPIRRIGYERWLRNLAVALGNAPRQARTQRALLAKLEQTISPLVREHIEWALEQYV

SEQ ID NO: 81761 - protein, 359 aa, Thiotrichaceae bacterium
  misc_feature (1)..(359): tr|A0A2A5FVQ9|A0A2A5FVQ9_9GAMM Epoxyqueuosine reductase OS=Thiotrichaceae bacterium OX=2030882 GN=queG PE=3 SV =1
  misc_feature (348)..(348): Xaa can be any naturally occurring amino acid
MSDTQSNIDYTRLLQQITKWSEDLGFQQLGVSDIDLTKHEAHLNDWLQAGFHGEMDYMQKHGSKRSHPEQLVEKTCRVISVRMDYMPPDCALSDAVLANPEMGFISRYALGRDYHKVMRKRLQKLADKIKNYIGEFGYRAFVDSAPVLEKALAEKSGLGWIGKHSNLINQKAGSWFFLGEIYTDLPLPVSLEATQETTQDHCGSCTACIDICPTQAIIAPYKVDARRCISYLTIELHGSIPIEFRKDMGNRIYGCDDCQLCCPWNRFSQPTTEQDFFTRHPLDAPDLIELFNWSEATFLKNTEGSAIRRIGYQRWLRNIAVAMGNAPTSKDMIKALEQRKLDATEMVXEHIDWALEQHT

SEQ ID NO: 81762 - protein, 361 aa, Thiotrichales bacterium
  misc_feature (1)..(361): tr|A0A2E2BE26|A0A2E2BE26_9GAMM Epoxyqueuosine reductase OS=Thiotrichales bacterium OX=2026796 GN=queG PE=3 SV= 1
MILDSSKILNDLKIWSHELGFQDLGVAGLNVKDDFSQLENWIQNGYHGSMSYLEKNKDKRLDPSKLVPDTTCVITVRANYLPEPLDHAVSTLKDPRLAYVSRYALGRDYHKVLRGKLRQLARKLNDKIGDFGYRAFTDSAPILERALARNSGLGWVGKHTNLINKADGSMFFLGEIFTDLPLDITARLKKNHCGTCVSCIDVCPTKAIVSPYKLDARKCISYLTIESKDSIPTELRASIGNRIFGCDDCQLFCPWNKYAKVTPIKDFMPRSRLNNRTLLELFSMNRDEFELLTRGSAIRRISYEQWVRNLAVAMGNSRYSRKTLSALYKRRFFPDQMVREHIEWAITRLENNSLNPDAIDK

SEQ ID NO: 81763 - protein, 356 aa, Thiotrichales bacterium
  misc_feature (1)..(356): tr|A0A0S8EIW6|A0A0S8EIW6_9GAMM Epoxyqueuosine reductase OS=Thiotrichales bacterium SG8_50 OX=1703416 GN=queG P E=3 SV=1
MCSERNYSVDFTELGERIKHWGESLGFQQVGVSDVNLGEAESRLQHWLENKFHGAMDYMAEHGTRRSRPAELVPGTIRVISARMDYLPPDAADSDAVMRNPALAMISRYALGRDYHKLVRKRLQKLADRIEREVGEFGYRVFSDSAPVLEKALAEKAGLGWIGKHTNLIARDAGSWFFLGEIYTDLPLPVDSQQDNHCGTCQACIDVCPTNAIVAPYELDARRCISYLTIELKESIPEEFRPLIGNRIYGCDDCQLVCPWNRFAKKSNEADFHVRHGLDRAGLIEMFGWSEQTFLQMTEGSAIRRIGHERWLRNIAVALGNMPSSPEVIDALRHRERHDSAIVREHVAWALARQSA

SEQ ID NO: 81764 - protein, 410 aa, Thorsellia anophelis
  misc_feature (1)..(410): tr|A0A1I0BCF0|A0A1I0BCF0_9GAMM Epoxyqueuosine reductase OS=Thorsellia anophelis DSM 18579 OX=1123402 GN=queG P E=3 SV=1
MPISSEPIQCNRSESISESSLIPKEILFSLRNQIETLSLEFGFSEIGFCDLDLNDHAQALQSWLDKQYHGEMSWMENHQLFRTSPDKMVPGALSAITVRLDYLPPNAQFAKVLGTPTLGYVSRYALGKDYHKILRKQLKAFATAINDLLVKEALDFSFEYRPFVDSAPILERPLAAKSGLGFVGKHSLLINHEAGSWFFIGELLTNLPLHLTNPPNQSLEHQSDCGKCQACRTICPTGAIVDDYIVDARRCISYLTIEHKSAIAVELRPLMGNRIYGCDDCQLICPYNKVAPLTKEPAFIKHSQLSAPELLTLLNWSESVFLKETEGSAIRRIGFDSWQRNIAVALGNVPPSAPLSTEIIDALTAQLGRSTLVDEHLNWAIERHLSLSAEVTMQQKRLVRSIEKGLPRDA

SEQ ID NO: 81765 - protein, 387 aa, Tibeticola sediminis
  misc_feature (1)..(387): tr|A0A3N4V6U9|A0A3N4V6U9_9BURK Epoxyqueuosine reductase OS=Tibeticola sediminis OX=1917811 GN=queG PE=3 SV=1
MGFSGTQIDPHRLLEQIRAWARALGLSQIGVSDVDLRHAEPGLSAWLAAGFHGGMHYMAAHGLKRARPAELVPGTVRVLTARLDYLPRGTTAGWAAAERARLAQPQEAVVSVYARGRDYHKVLRARLQALATRIGEVIGPFGYRVFCDSAPVLEVELATRSGLGWRGKHTLALSRDAGSMFFLGEIYLDLALPVTEPVRAHCGRCRACIDVCPTQAILAPGRLDARRCISYLTIEHDGPIPPELRVQMGNRIYGCDDCQLVCPWNKFAQPSMLADFDPRPGFAGASITTLLGWDEAEFLRRTEGSAIRRIGHVRWLRNLAVAAGNALRAQPRAPEAEALRLALQRWQSHPSALVREHVVWALGNAEQVPRASRIPGAGGLLRCKSSP

SEQ ID NO: 81766 - protein, 232 aa, Tindallia californiensis
  misc_feature (1)..(232): tr|A0A1H3JVB9|A0A1H3JVB9_9CLOT Epoxyqueuosine reductase QueG (Queuosine biosynthesis) OS=Tindallia californien sis OX=159292 GN=SAMN05192546_102112 PE=4 SV=1
MSEKNQEIREILQDLGADVIGFGDVENYLPASLRDMPRAISYAVRLSNRIIEEIDPVIGPSQTYFHHYRTVNTLIDQISLKIMLKIQKMGYSAYAIPASQSINEKPPQYRGRISHRMAATRSGLGWIGKSGNLITEAFGPEVRLGTVLTSLPLTVHSPIETSRCGSCNICVKACPGYALPGNHDWKPGIERELIVDPVRCSQHMKKAYQHIGRGAVCGICMRVCPYGKEKKR

SEQ ID NO: 81767 - protein, 345 aa, Tindallia californiensis
  misc_feature (1)..(345): tr|A0A1H3IAI0|A0A1H3IAI0_9CLOT Epoxyqueuosine reductase OS=Tindallia californiensis OX=159292 GN=SAMN05192546_ 10180 PE=4 SV=1
MLLSVKELKQEAKKKNIIDIGVIRPNKSPLLKKLIEDRHANQYLTNFEEISIDKRIDASLIMPEAKSVIVAAMSYFNKEETDVSYRPLFCGSLARFSRGTDYHRVLKMRLSQLMESIPFKEEPYHWLVYADTGPLVDRHLAAEAGLGYFGRNNCFFHSEYGSYIVIGYVVTSLEFFEEDYRSMPYLKCNECGKCQRACPVNAITTPFVINNQRCLANQLQQKGVMDSVSMKKSGTMLYGCDICQDVCPNNKGIRETSEKMFYNNFELAWINLEELLNMNNKEFKKRYESMAFAWRGLRVMKRNALKSLGNMGNPMAIPIIEPFVDDEREDINNAAKWALKQLTLA

SEQ ID NO: 81768 - protein, 232 aa, Tindallia magadiensis
  misc_feature (1)..(232): tr|A0A1I3FU55|A0A1I3FU55_9CLOT Epoxyqueuosine reductase QueG (Queuosine biosynthesis) OS=Tindallia magadiensis OX=69895 GN=SAMN05192551_10737 PE=4 SV=1
MSEKNQEIREMLLDLGADVIGFGDVENHLPASLRDMPRAISYAVRLSSRIIEEIDPAVGPSQTYFHHYRTVNTLIDQISLKTMLKIQQMGYSAYAIPASQSINEKPPQYRGRISHRMAATRSGLGWIGKSGNLITEAFGPEVRLGTVLTSLPLTVHSPIEISRCGSCNICVKACPGYALPGNHEWKPGIERELIVDPVRCSQHMKKAYQHIGRGAVCGICMRVCPYGKAKKR

SEQ ID NO: 81769 - protein, 345 aa, Tindallia magadiensis
  misc_feature (1)..(345): tr|A0A1I3AT05|A0A1I3AT05_9CLOT Epoxyqueuosine reductase OS=Tindallia magadiensis OX=69895 GN=SAMN05192551_1013 91 PE=4 SV=1
MVLSVEALKMEAKKKNIIDIGVIRPNKSPLLKKLIKNRHANQYMTNFEEISVDKRTDASLIMPEVKSIIVALMSYFKKENLETSHRPMLYGTLARFSRGIDYHRVLNVRLNQLMESITCKEKPHSWRVYADTGPLVDRHLAAEAGLGYFGRNNCFFHSEYGSYIVIGYIVTSLEFFEKDYRSMPYLKCDECGKCQRACPVNAITTPFIINNQRCLSNQLQQKGIMDNNSMKQSSTMLYGCDICQDVCPNNKEIKETPEKMFYDKVESTWINLEELLNMSNKEFKQRYESTGFAWRGLRVMKRNALKSLGNSRNPIAIPIIESFVNDKREDISSAAKWALEQITFV

SEQ ID NO: 81770 - protein, 347 aa, Tindallia sp.
  misc_feature (1)..(347): tr|A0A424Y4K2|A0A424Y4K2_9CLOT tRNA epoxyqueuosine(34) reductase QueG OS=Tindallia sp. MSAO_Bac2 OX=2293856 GN =queG PE=4 SV=1
MKCSIEKLRQLAFANNIIDIAVIKPERSVELKKILVSRHQNKRLTDFEESIIEKRINPKLIMPEAKSIIVGLMSYHMDKPPDNSKRPQFYGTLARCARGKDYHRIVHIRMKELMESLTHSQSGAEWKIFVDTGPLVDRHLAAKAGLGFFGRNNCFIHPQYGSFIVIGYILTTLEFKENDYVSKTYDKCSECGECQQSCPAKAINTPFQIDNQVCLSHALQQKGIMDKETMLQSGVMMYGCDICQDVCPHNYFARNTPEPLFHYKDEEAWLNLPEILQVSNREFNRRYRSASFGWRGRRIMQRNALKSLGNTGNTMVTDHVKPFLEDQREDIRKAAEWAMDRLSKADE

SEQ ID NO: 81771 - protein, 308 aa, Tissierella creatinini
  misc_feature (1)..(308): tr|A0A4T9WE81|A0A4T9WE81_9FIRM tRNA epoxyqueuosine(34) reductase QueG OS=Tissierella creatinini OX=43143 GN=qu eG PE=4 SV=1
MLMKKYIIEKAKELKIDMIGFTDGNPLTTIKDYLEYRRLNNIETEFEEENILLRIDPKLTLETCKSIIVIALSYNVVFDEKSEIKYSGNLSKSSWGIDYHRVLKNKLEALIEEIKKITPFEYKYFVDTGPLVDRELAHKAGIGYYGKNCNIINEEYGSFIFIGYILTDLDIEPNEGLLESQCGVCEICLKACPDKALEEGYRLNAKKCISYHTQTKDMDLEIMKKIGNNIYGCDTCQNVCPKNKNIRFSIHDEFLPHVTKGVIDIEELLIMSNKQFKEKYGSMSGSWRGRNILRRNALIALENIKTSI

SEQ ID NO: 81772 - protein, 342 aa, Tissierella creatinophila
  misc_feature (1)..(342): tr|A0A1U7M970|A0A1U7M970_TISCR Epoxyqueuosine reductase OS=Tissierella creatinophila DSM 6911 OX=1123403 GN=qu eG PE=4 SV=1
MNIEKYIRDISKEIGIDIIGFTSSSPLNVKRFILEKRNSGKYTEFEEKDIEKRIDPKLTMENCKSIIIIGVSYNMDFKPKKSYDLNGNISMSSWGTDYHKVLKTKLESLIEKIKEKRDFEYKSFVDTGPLVDRELAKRAGIGFYGKNCSIINKDYGSFIFLGYILTDIEITPDNPLEDGCGDCDLCLRACPTGALESSYDLNPKKCISYLTQTKETISRELRKKMGTKIYGCDTCQRVCPKNKGVKLSSHEEFIPTITGGVMDLEKLLFMSNKEFKREFGSMAGSWRGKNILKRNAIIAIGNIGDEKNIPLLLEVKKDSNLLLEEYIDWAIENILTNSKQSK

SEQ ID NO: 81773 - protein, 344 aa, Tissierella praeacuta
  misc_feature (1)..(344): tr|A0A3F3S1I2|A0A3F3S1I2_9FIRM Epoxyqueuosine reductase OS=Tissierella praeacuta OX=43131 GN=queG PE=4 SV=1
MNLLNQYIIDKSKELNIDICGFTDSLPLYNLSDYLIYREKNNIKTEFEEKDLNKRIDPKITMPNCRTIIVVGVSYNVDYNEKPNYNLKGKLSKSSWGIDYHKVLKEKIELLINEIKRKVDFDYKYFVDTGPLIDRELARKAGIGYYGKNCSIINDEYGSFIFLGYILTDLELEFSEEVSNKCGDCDLCLRACPTGALEGEYSFNPKKCISYLTQTKDNIPIELRRKMGIKIYGCDTCQLVCPQNKGIKKANHKEFIPKTTKGYMDLNELLYISNKEFKKKYGEMAGSWRGKNILKRNAIIALGNMKKEANIEILIPMLRDSNPMIREYAEWAIVNIFLTMVSTK

SEQ ID NO: 81774 - protein, 344 aa, Tissierella praeacuta; identical to SEQ ID NO: 81773
  misc_feature (1)..(344): tr|A0A1M4VZX8|A0A1M4VZX8_9FIRM Epoxyqueuosine reductase OS=Tissierella praeacuta DSM 18095 OX=1123404 GN=SAMN0 2745784_01646 PE=4 SV=1

SEQ ID NO: 81775 - protein, 343 aa, Tissierella sp.
  misc_feature (1)..(343): tr|A0A265Q8J6|A0A265Q8J6_9FIRM tRNA epoxyqueuosine(34) reductase QueG OS=Tissierella sp. P1 OX=1280483 GN=queG PE=4 SV=1
MNSLNQYIIDKSKELNIDICGFTDSLPLDKLQDYLIYREKINIKTEFEENDIDKRIDPKLTMPNCRSIIVVGLSYNVDYTEKPDYLLKGKLSKSTYGIDYHKVLKQKIEELIQEIKKVVEFEYKYFVDTGPLIDRELAKKAGVGYYGKNSSIINDEYGSFVFLGYILTNLDLEFSKEASNKCGDCDLCLRACPTGALEGPYKFNPKKCISYLTQTKNDIPVSLREKMGIKIYGCDTCQLVCPKNKDIKKSNHKEFIPEITRGYMDIEELLSISNREFNKKYGDMAGSWRGKNILKRNAIIALGNMKKEENIHLLIPMLKDSNPMIREYAEWAIVNIFFNNCIH

SEQ ID NO: 81776 - protein, 343 aa, Tissierellales bacterium
  misc_feature (1)..(343): tr|A0A3D3QRI0|A0A3D3QRI0_9FIRM tRNA epoxyqueuosine(34) reductase QueG OS=Tissierellales bacterium OX=2053631 G N=queG PE=4 SV=1
MLKQICYNHLRGRFGMIKTISDIAKGLDIDIVGFAGNEVLSGLQGVLESRISKGLATEFEPKSVKDRIDPTMTLRECKGIITIAVPYNTACETSSRVTIKGSLSRSSWGLDYHIVVKKLLKELSGRLESVLGGSYLTFADTGPLVDRELAYRSGLGYYGKNCCIINPIYGSYVFIGYILTSLELSSDAIPIESQCGDCRLCLDACPTGALEAPGVLNPHKCISYLTQTKEYIPEELQKRMGVKIYGCDTCQAVCPKNKGVRSSRYKEFQPLKTGGCVDIKELLEMSKRDYTDKYGDMAGNWRGRSVLIRNALIAIKNMGIESELEDQLENLRKREVELWKPYL

SEQ ID NO: 81777 - protein, 371 aa, Tistlia consotensis
  misc_feature (1)..(371): tr|A0A1Y6CEW5|A0A1Y6CEW5_9PROT Epoxyqueuosine reductase OS=Tistlia consotensis USBA 355 OX=560819 GN=queG PE=3 SV=1
MSELKAAIRERALAEGFDAVGFAPATSSESARAAFRDFLEAGFHGDMGWLAETAERRCDPRALWPEARSVVVLGQNYGPESDPLALLGEPELASVSVYARNRDYHDTVKKRLKRVARWLAAEAGCQVKVFIDTAPVLEKPLAQAGGLGWQGKHSNLLSRDWGNWLFLGEIFTDLALPPDPPEADHCGRCRRCLDACPTDAFPAPYRLDARRCISYLTIEHRGPIPREFRRAIGNRIYGCDDCLAVCPWNKFARTAAEADFRPRAALEAPRLAALAGLDDAAFRQLFSGSPIKRIGLARFLRNVLIAIGNSGAPGLLPSVRARLDDPQPLVRGAAAWALRRLAPEAEATAEARRRLAVESDAEARAEWAGPP

SEQ ID NO: 81778 - protein, 404 aa, Tistrella mobilis
  misc_feature (1)..(404): tr|A0A3B9IU17|A0A3B9IU17_9PROT Epoxyqueuosine reductase OS=Tistrella mobilis OX=171437 GN=queG PE=3 SV=1
MATSISDRRPPAPPPPRRKGPPLDLDPAGWTAAIRARAREIGFDAVGFAPARLPPATGEALDRFVELGRHGDMRWIEDRIDWRRSPDALWPEARSAIVLAQNYGPATDPLANLSCPETGSLSVYARGDDYHEVIKAKLRRLARWLWDESAVELKFFVDTAPVMEKPLAALAGLGWQGRHTNLVSRDFGSWTFLAVMLTGLDLVHDRPHGDRCGSCHACLDACPTDAFPAPYELDARRCISYLTIELDGPVPAELRAAMGNRIYGCDDCLAVCPWNKFARGAAEMKLAGREALTAPALADLAGLDDGAFRTMFAKTAVKRIGRDRFVRNVAIAIGNSGRPDLVPALRPLLADGAAQVRAMAVWAASRLMSPAEFAGAAAGRLPGETDPVVLSEWRAAGVLSEEGP

SEQ ID NO: 81779 - protein, 404 aa, Tistrella mobilis
  misc_feature (1)..(404): tr|I3TGZ0|I3TGZ0_TISMK Epoxyqueuosine reductase OS=Tist rella mobilis (strain KA081020-065) OX=1110502 GN=yjeS PE=3 SV=1
MATSISDRRPPAPPPPRRKGPPLDLDPAGWTAAIRARAREIGFDAVGFAPARLPPATGEALDRFVELGRHGDMRWIEDRIDWRRSPDALWPEARSAIVLAQNYGPDIDPLANLSHPETGSLSVYARGDDYHEVIKAKLRRLARWLWDESAVELKFFVDTAPVMEKPLAALAGLGWQGRHTNLVSRDFGSWTFLAVMLTGLDLVHDRPHGDRCGSCQACLDACPTDAFPAPYELDARRCISYLTIELDGPVPAEFRAAMGNRIYGCDDCLAVCPWNKFARGAAETKLAGREALTAPALADLAGLDDGAFRTMFAKTAVKRIGRDRFVRNVAIAIGNSGRPDLVPALRPLLADGAAQVRAMAVWAASRLMSPAEFAGAAAGRLPGETDPVVLTEWRAAGVLSEEGP

SEQ ID NO: 81780 - protein, 404 aa, Tistrella sp.; identical to SEQ ID NO: 81778
  misc_feature (1)..(404): tr|A0A2E3EPZ5|A0A2E3EPZ5_9PROT Epoxyqueuosine reductase OS=Tistrella sp. OX=2024861 GN=queG PE=3 SV=1

SEQ ID NO: 81781 - protein, 404 aa, Tistrella sp.
  misc_feature (1)..(404): tr|A0A2D8Q7Y0|A0A2D8Q7Y0_9PROT Epoxyqueuosine reductase OS=Tistrella sp. OX=2024861 GN=queG PE=3 SV=1
MATSISDRRPPAPPPPRRKGPPLDLDPAGWTAAIRARAREIGFDAVGFAPARLPLATGEALDRFVELGRHGDMRWIEDRIDWRRSPDVLWPEARSAIVLAQNYGPDIDPLANLSHPETGSLSVYARGDDYHEVIKAKLRRLARWLWDESAVELKFFVDTAPVMEKPLAALAGLGWQGRHTNLVSRDFGSWTFLAVLLTGLDLVHDRPHGDRCGSCQACLDACPTDAFPAPYELDARRCISYLTIELDGPVPAEFRAAMGNRIYGCDDCLAVCPWNKFARGAAETKLAGREALTAPALADLAGLDDGAFRTMFAKTAVKRIGRDRFVRNVAIAIGNSGRPDLVPALRPLLADGAAQVRAMAVWAASRLMSPAEFAGAAARRLPGETDPVVLSEWRAAGVLSEEGP

SEQ ID NO: 81782 - protein, 375 aa, Tolumonas auensis
  misc_feature (1)..(375): tr|C4L9N5|C4L9N5_TOLAT Epoxyqueuosine reductase OS=Tolu monas auensis (strain DSM 9187 / TA4) OX=595494 GN=queG PE=3 SV=1
MTFTLDLQKLAHDIKLWGLELGFDQVGITDCDLTHEETRLESWLAKGYHGEMEYMARHGLMRARPSELQPGTRSVISVRMNYLPPVAKVAETLDNPAHAYISRYALGRDYHKVLRNRLKQLGERIQQACGELQFRPFVDSAPVMERPLADKAGLGWTGKHTLLLNQQAGSFFFLGELLIDLPLPADQPVEPACGNCSACLQICPTNAIVAPYELDARRCISYLTIELNGPIPEEFRPLIGNRIYGCDDCQLICPWNRYAVSSPEADFSPRHQLHTPELLTLWSWDENTFLKATEGSPIRRIGFEKWQRNIAVALGNGPASESVLHALLEKRSHTTELVQEHIDWALQQLQTKQIADNKKHARLIRCIYKGLPEHS

SEQ ID NO: 81783 - protein, 376 aa, Tolumonas sp.
  misc_feature (1)..(376): tr|A0A5C7QVT4|A0A5C7QVT4_9GAMM Epoxyqueuosine reductase OS=Tolumonas sp. OX=1978237 GN=queG PE=3 SV=1
MTSTPDLQKLAHDIKQWGLELGFDQVGITDCDLTSEESKLEAWLASGYHGEMEYMARYGLMRARPAELQPGTLRVISVRMNYLPSGAQIAKTLADPTRGYVSRYALGRDYHKTLRNRLKQLGERIQQASQDMLQFRPFVDSAPIMERPLADKAGLGWTGKHTLLLNKNAGSFFFLGELLVDLPLPIDHPIEPACGNCSACIQICPTGAIVAPYQVDARRCISYLTIELNGPIPEELRPLIGNRIYGCDDCQLICPWNRYAVTSPEPDFSPRQSLHTPDLLTLWAWDEAMFLKTTEGSAIRRIGFEKWQRNIAIALGNGPASDDVIHALEYKRAQASPLVQEHIDWALCQLRSLVSSENRKHDKLIRCIYKGLADHA

SEQ ID NO: 81784 - protein, 235 aa, Tolypothrix bouteillei
  misc_feature (1)..(235): tr|A0A0C1N6K3|A0A0C1N6K3_9CYAN Epoxyqueuosine reductase (Fragment) OS=Tolypothrix bouteillei VB521301 OX=14794 85 GN=DA73_0217140 PE=4 SV=1
QRPEGQEYAKISRYAWGRDYHKVMHKKLKALTMWLQEGSETVQARYYADTGPIQDKVWAQQAGIGWIAKNGNVITREYGSWVFLGEVLTNLELECDRPHTQHCGNCTRCIDACPTSAITKPFVLDANLCIAYHTIENRNEELPEEVKSNFHGWVAGCDICQDVCPWNQRFAKETDVSEFQPYPGNVAPKLVELAEISDRDWDQRFPASALRRIKPEMLRRNSRVNLDALKNKDEG

SEQ ID NO: 81785 - protein, 86 aa, Tolypothrix bouteillei
  misc_feature (1)..(86): tr|A0A0C1QXQ6|A0A0C1QXQ6_9CYAN Uncharacterized protein OS=Tolypothrix bouteillei VB521301 OX=1479485 GN=DA73_0 217150 PE=4 SV=1
MNRSPGTSSSSIKEKALSLGFHKVGIAAVTGVESTEIQRLRAWLALGYHADMEWMTNPKRQDIFSVMPEVRSVICVALNYLSLIHI

SEQ ID NO: 81786 - protein, 318 aa, Tolypothrix campylonemoides
  misc_feature (1)..(318): tr|A0A0C2LG18|A0A0C2LG18_9CYAN Epoxyqueuosine reductase OS=Tolypothrix campylonemoides VB511288 OX=1245935 GN= queG PE=3 SV=1
MNRSPGTNSTEVKKKALELGFHKVGIAAVDGEDVTQTERLQAWLALGYGADMEWMANPKRQDIRQVMPEVQTIISVALNYYTPQKRPEGTEYAKISRYAWGRDYHKVMHKKLKALTTWLQGLHEGIQARYYADTGPVQDKVWAQKAGIGWIAKNGNVITREYGSWVFLGEVLTNLQLESDRPHTEHCGSCTRCIEACPTGAITQPFVVDANRCIAYHTIENRDEELPQTVTPHLQGWVAGCDICQEVCPWNQRFAKETDVAEFEPYSGNVAPKLVELAQISDQEWDRQFPASALRRIKPQMLRRNARANLNALHKAKE

SEQ ID NO: 81787 - protein, 316 aa, Tolypothrix sp.
  misc_feature (1)..(316): tr|A0A218QBI5|A0A218QBI5_9CYAN Epoxyqueuosine reductase OS=Tolypothrix sp. NIES-4075 OX=2005459 GN=queG PE=3 S V=1
MNQFPATSSSVVKEKALELGFHKVGIAAVDEADTTHAQRLQAWLELGYHADMKWMASQKRQDIRLVMPEARSLICVALNYYTPHERPEGEEYAKMSRYGWGRDYHKVMHKKLKALTTWLQEQGEEIQALGYADTGPVQDKVWAQQAGIGWIAKNGNVITREYGSWVFLGEVLTNLELESDRPHTQHCGTCTRCLDACPTNAITQEFVIDANRCIAYHTIENRAEKLPLTITPHLQGWVAGCDICQDVCPWNQRFARTTDVVEFQPYSGNLAPKLIELAKISNEEWNRQFPASAFRRIKPEMLRRNARANLDNKLDG

SEQ ID NO: 81788 - protein, 343 aa, Tolypothrix sp.
  misc_feature (1)..(343): tr|A0A0D6L172|A0A0D6L172_9CYAN Epoxyqueuosine reductase OS=Tolypothrix sp. PCC 7601 OX=1188 GN=queG PE=3 SV=1
MLCDHEVVLWIEAKIKLREMNSSGITTTDVVKKKAQELGFHKVGIAAVDGVDETAAQRLQAWLALGYNADMAWMANPKRQDIRLIMPEARSLICVALNYYTPHQRPTGEEYGKISRYGWGRDYHKVMHKRLKALNNWVQSLSENVQARYYADTGPVPDKLWAQKSGIGWIAKNGNVITREYGSWVFLGEIITNLELECDRPATEHCGTCTRCLEACPTGAITQPYVVDANRCIAYHTIENRAEQLPPNVKPHLQGWVAGCDICQDVCPWNQRFAKSTDVEEFNPYPGNLAPKLLELAEISEEEWEQQFTASALRRIKPEMLRRNARANLDASRQQNDSDSDYF

SEQ ID NO: 81789 - protein, 324 aa, Tolypothrix tenuis; identical to SEQ ID NO: 74629
  misc_feature (1)..(324): tr|A0A1Z4N5Y8|A0A1Z4N5Y8_9CYAN Epoxyqueuosine reductase OS=Tolypothrix tenuis PCC 7101 OX=231146 GN=queG PE=3 SV=1

SEQ ID NO: 81790 - protein, 379 aa, Trabulsiella guamensis
  misc_feature (1)..(379): tr|A0A085AAM7|A0A085AAM7_9ENTR Epoxyqueuosine reductase OS=Trabulsiella guamensis ATCC 49490 OX=1005994 GN=que G PE=3 SV=1
MSQPLDLNQLAQQIKQWGTELGFQQVGITDTDLSASEPKLQAWLDKQYHGEMEWMARHGMMRARPHELVPGTLRVISVRMNYLPANAAFARTLKNPALGYVSRYALGRDYHKLLRNRLKKLGEKIQEQYASLNFRPFVDSAPVLERPLAEKAGLGWTGKHSLILNRDAGSFFFLGELLVDIPLPVDKPVEEECGRCVACMTICPTGAIVEPYTVDARRCISYLTIELEGAIPEEFRPLIGNRIYGCDDCQLICPWNRYSQLTGEDDFSPRKALHAPELVELFGWSEEKFLKVTEGSAIRRIGHLRWLRNIAVALGNAPWDEANMQALESRRGEHPLLDEHIAWAIARQIEKRNSCVIEVQPPKKLRLVRVVEKGLPRDA

SEQ ID NO: 81791 - protein, 379 aa, Trabulsiella odontotermitis
  misc_feature (1)..(379): tr|A0A0L0GVQ0|A0A0L0GVQ0_9ENTR Epoxyqueuosine reductase OS=Trabulsiella odontotermitis OX=379893 GN=queG PE=3 SV=1
MSQPLDLNQLAQKIKQWGTELGFQQVGITDTDLSASEPKLQAWLDKQYHGEMAWMARHGMMRARPHELLPGTLRVISVRMNYLPANAAFARTLKNPALGYVSRYALGRDYHKLLRNRLKKLGEMIQEQYTSLNFRPFVDSAPVLERPLAEKAGLGWTGKHSLILSRDAGSFFFLGELLVDIPLPVDKPVEEGCGRCVACMTICPTGAIVEPYTVDARRCISYLTIELEGAIPEEFRPLIGNRIYGCDDCQLICPWNRYSQVTDEDDFNPRKALHAPELVELFGWSEERFLKVTEGSAIRRIGHLRWLRNIAVALGNAPWGDANMRALESRRGEHPLLDEHIEWAIAKQIEKRNACVIEVQPPKKLRLVRVIEKGLPRDA

SEQ ID NO: 81792 - protein, 349 aa, Tranquillimonas alkanivorans
  misc_feature (1)..(349): tr|A0A1I5U2A1|A0A1I5U2A1_9RHOB Epoxyqueuosine reductase OS=Tranquillimonas alkanivorans OX=441119 GN=queG PE=3 SV=1
MERDLKARLGDFAIEAGFGKMRVTTPDAIPEAAERLEAFVGAGRHGQMRWMEERRGWRGDPAALWPDAKSVVMLAESYGPEHDPLEVLAYPDRAAISVYAQGRDYHDVVKKRLKRVGRWLLEQCPDEAIKVFVDTAPVMEKPLAQAAGLGWQGKHTNLLARDLGNWVFLGAIFTTVKLEPDAPEPEHCGSCTRCLDVCPTDAFPAPFQLDARRCISYLTIEHAGPVEPELRAKLGNRIYGCDDCLAVCPWNKFAVTARDQRLSARADLLAPPLAELAVLDDAAFRSRFSGSPIKRIGRGRFVRNVCYAIGNSGDPSLLPVLDPLTRDDDATVADAARWAAMRLKEDDGD

SEQ ID NO: 81793 - protein, 370 aa, Tranquillimonas sp.
  misc_feature (1)..(370): tr|A0A438AF82|A0A438AF82_9RHOB Epoxyqueuosine reductase OS=Tranquillimonas sp. M0103 OX=2486419 GN=queG PE=3 S V=1
MSADLKSRLVAQALSDGFVACGVTRPDAAPQTAGRLRSFLAQGRHGQMDWMEAREGWRGSPSALWPQARSVIMLAESYAPETDPMAVLDLRDRAAISVYAQGRDYHDVVKKRLKRVGRWLLEQAPGEEIKVFVDTAPVMEKPLAQAAGLGWQGKHTNLLSREFGNWVFLGAIFTTIDLPPDTAEDEHCGSCTRCLDICPTNAFPAPFQLDARRCISYLTIEHDGPVDPDLRPALGNRIYGCDDCLAVCPWNKFAVEARDLRLLGDGSLVAPPLAELAALDDAAFRARFSGSPIKRIGRGRFVRNVCYAIGNSQDPSLLPAVQALTGDGDDTVADAAAWAVGRLNGGRQECRLPARSSTGSPSGSSGSQND

SEQ ID NO: 81794 - protein, 305 aa, Treponema caldarium
  misc_feature (1)..(305): tr|F8F4E0|F8F4E0_TRECH Putative iron-sulfur protein OS= Treponema caldarium (strain ATCC 51460 / DSM 7334 / H1) OX=744872 GN=Spica_2482 PE=4 SV=1
MDPASIADYIRTEAYDKGFSRVRFLSPYNPGTIFNRLDGTDNHWKGAPSLLVVALPYGNSGIAGALGQPSTIAPFARRNYYAEAVTRLKDVAKNVRARFGGQRSDYRILCNSPVPEKPLALLCGLGWLGKNSLIITPEAGSLVIIAAMTLPFQLPGDSPLSGVFLGARALAFPACKVCGDSPACMNACPTKALSGDGTVQTDRCIQWYASGNGTTVPNFVADVWENQLYGCTYCQDACPYNKKKIKGSDTERGKLPEFFTAEWVLSSSDESIRKAVQGSALGMQWLGPVSLRRNASLVLRRKSSV

SEQ ID NO: 81795 - protein, 349 aa, Treponema primitia
  misc_feature (1)..(349): tr|F5YHN1|F5YHN1_TREPZ 4Fe-4S ferredoxin, iron-sulfur b inding protein OS=Treponema primitia (strain ATCC BAA-8 87 / DSM 12427 / ZAS-2) OX=545694 GN=TREPR_1046 PE=4 SV =1
MINEKLIKEKALELGYEDCGIINISEINDYAEKINDRIIKFPNTKNTLEKLNRFTNLNERFPWAKSIIVCVRKYGKYSIPNNLKNLIAKYYLVDGRINEQSIDFQASIEFETFLNKVGLKTATERKFGLTALRWAAFKAGLGIIRRNNFFYTEKSGSWVYLEAWLIDCDMEMKNNDNSKPCPNNCNKCIKACPTKSLHEPYSMDRSTCVSCLTTFEGWDMSKESNNHNIGNWIYGCDVCQDICPFNKNKWMENEQFPRLNELAEHISLEKIIEMDYTYLEGIISSKFFYIGKGDVYKWKTNALNAMLNNYNENYLFYIRKACNDSNEHVRNMAEWVLDKITNYVPSMTE

SEQ ID NO: 81796 - protein, 353 aa, Treponema sp.
  misc_feature (1)..(353): tr|A0A3D3FSP1|A0A3D3FSP1_9SPIO Uncharacterized protein OS=Treponema sp. OX=166 GN=DIC34_16555 PE=4 SV=1
MAGIEEEAEEGGEERAAEQTGAIRTLAMASGFSRARFLAARGTATAFLVVALPYGNDDPDARLPRATEPSAEPACPARIAAFARRNYYAEAVARLKAVVAELRLRFGGSKGDYRILCNSSVPEKPLALAAGIGAAGRNSLIITPEAGSLVVLAALSLPFPVQADKPLGRSVCGSCTACVDACPTGALAPEDSFDRSRCIQWYASGNGEPSAEVVVRWGQRLYGCSVCQDVCPYNHRPIPGTATERGALPPAFDARDLVAASDEEIRKLFRGSAMGMAWLGAAAIRKNAERALAAALAPAALALPPAMAPAAAPAAAAPAAAAPAAAPAAAAPAAPAAAPSATGGSPDHPSRYP

SEQ ID NO: 81797 - protein, 371 aa, Treponema sp.
  misc_feature (1)..(371): tr|A0A4R4BPX4|A0A4R4BPX4_9SPIO Uncharacterized protein OS=Treponema sp. J25 OX=2094121 GN=C5O22_07895 PE=4 SV= 1
MVQSSIDLKQLRAYLLERARQSGFVAVRLLEQSRYAHLPEVLEYVEGAPTLLLVALPYGNRLASPFPPPPGWKVLALQEPPLVGLPGSEERDRSEEKPLASGEGLVEEKALPERRETPGTLKRPIAPQAVPGYIAPFAVRNYYGELVHRLKLLAADLRSRWGGTKGDFRIFCNSHLPERELCLRSGLGWQGRHGLLITPQAGSLVVLGGMGLPWPLAGDTPFPGVLEGDFPACRRCMKRYPPESLPCVAACPTAALTADGTLRRERCIQWYASGHAAPPPDIQAVWGHRLYGCTNCQDACPYNQRYIPGVPTNRGALPAVMDVQRVLSLEEGELASYLRGTTLGMRWLGAAVLKQNAARILTWHERFFCGE

SEQ ID NO: 81798 - protein, 385 aa, Trichococcus collinsii
  misc_feature (1)..(385): tr|A0A143YC16|A0A143YC16_9LACT Armadillo-type fold OS=T richococcus collinsii OX=157076 GN=Tcol_655 PE=4 SV=1
MNFAALKAEIIEESKKLGIDKLGFTTAEPFEYMLESLKEQHAKGHSVGFEHPVLDERIYPDRIFDAPQAILSLALAYPSKMTEKSERMRGERRGKFSRASWGTDYHVILRDRMDRLITFIQEKIPDARFKPMVDTGELIDTVVAQRAGLGFIGRNGLLITREFGSYVYLGEIITDIPFPADEPGVFGCGECTRCVDFCPTGAILGNGQLNPNICLSYQTQTKGYMPEEYRKKIGHVIYGCDICQQVCPYNRGMDYHLHPEMEPEPESVTPVLQPMLTISNREFKEQFGHLAGSWRGKKPLQRNAVIALANYRDRTAIPELLRMIEKDPRPVLRGTAAWAVAEIVREANPELLAFFSERLIIEADKETKAEMEKAYLKILEINEAD

SEQ ID NO: 81799 - protein, 385 aa, Trichococcus flocculiformis
  misc_feature (1)..(385): tr|A0A143YAF2|A0A143YAF2_9LACT Armadillo-type fold OS=T richococcus flocculiformis OX=82803 GN=TFLO_586 PE=4 SV =1
MDFAALKAEIIEESKKLGIDKVGFTTAEPFEYMLESLKEQHAKGHTVGFEHPVLEERIYPDRIFDNPQAILSIALAYPSKMTEKAERVRGERRGNFSRASWGTDYHVILRERMDRLIAFIQEKMPDARFKPMVDTGELIDTVVAQRARLGFIGRNGLLITREFGSYVYLGEIITDIPFPADEPGVFGCGECTRCVDFCPTGAILGNGQLNPNICLSYQTQTKGYMPEEYRQKIGHVIYGCDICQQVCPYNRGMDHHLHPEMEPEPASVTPVLQPMLTISNREFKEQFGHLAGSWRGKKPLQRNAVIALANYRDRTAIPELLRMIEQDPRPVLRGTAAWAIAEIVREPNPEMLAFFSERLIIETDEETKAEMEKAYLKMLEIQKTD

SEQ ID NO: 81800 - protein, 385 aa, Trichococcus ilyis
  misc_feature (1)..(385): tr|A0A143YA24|A0A143YA24_9LACT Armadillo-type fold OS=T richococcus ilyis OX=640938 GN=TR210_476 PE=4 SV=1
MDFAALKAEIIEESKKLGIDKLGFTTAEPFEYMLESLKEQHAKGHTVGFEHPDLDERIYPERIFENPQAILSIALAYPSKMTEKAERARGERRGNFSRASWGTDYHVILRDRMERLIAFIQEKIPDARFKPMVDTGELIDTVVAQRAGLGFIGRNGLLITREFGSYVYLGEIITDIPFPADEPGVNGCGECRRCVDFCPTGAVLGNGQLNPNICLSYQTQTKGYMPEEFRKKIGHVIYGCDICQQVCPYNRGMDHHLHPEMEPEPASVTPVLQPMLTISNRDFKEQFGHLAGSWRGKKPLQRNAVIALANYRDRTAIPELLRMIEQDPRPVLRGTAAWAIAEIVREANPELLAFFSESLKTETDEETKAELEKAYLKMLGTKEAD

SEQ ID NO: 81801 - protein, 381 aa, Trichococcus palustris
  misc_feature (1)..(381): tr|A0A143YJ89|A0A143YJ89_9LACT Armadillo-type fold OS=T richococcus palustris OX=140314 GN=Tpal_1486 PE=4 SV=1
MDYTALKAEILQESKRLGIDKLGFTTAEPFDYMLEDLKEQHRKGHTVGFEHQVMEERIYPELIFDRPQAILSLALAYPSKMTAKAERVKGERRGNFARASWGTDYHVILRDKMDQLITFIQSKVPDARFKPMVDTGELIDTVVAQRAGLGFIGRNGLLITREYGSYIYLGEVMTDIPFPPDEPGVFGCGECTRCVDYCPTGAILGNGQLNPNVCLSYQTQTKGFMPEEFRKKMSHVIYGCDICQQVCPYNKGMDFHLHPEMEPEPESVSPVLQPMLTISNREFKEQFGHLAGSWRGKKPLQRNAIIALANYRDRTAIPALLQLIEQDPRPVMRGTAGWAIGEIVREANPELLAFYEERIAAETDEETRLELEKAHQKIKAL

SEQ ID NO: 81802 - protein, 385 aa, Trichococcus pasteurii
  misc_feature (1)..(385): tr|A0A1W1II69|A0A1W1II69_9LACT Armadillo-type fold OS=T richococcus pasteurii OX=43064 GN=TPAS_2398 PE=4 SV=1
MDFAALKAEIIEESKKLGIDKLGFTTAEPFEHMLESLKEQHAKGHTVGFEHPVLDERIYPDRIFDNPQAILSIALAYPSKMTEKAERVRGERRGNFSRASWGIDYHVILRERMDRLIAFIQEKVPGARFKPMVDTGELIDTVVAQRAGLGFIGRNGLLITREFGSYVYLGEIITDIPFPADEPGVFGCGECTRCVDFCPTGAILGNGQLNPNICLSYQTQTKGYMPEEYRQKIGHVIYGCDICQQVCPYNRGMDHHLHPEMEPEPESVTPVLQPMLTISNREFKEQFGHLAGSWRGKKPLQRNAVIALANYRDRTAIPELLRMIEQDPRPVLRGTAAWAIAEIVREANPELLAFFSERLIIETDEETKAEMEKAYLKILEIKEKD

SEQ ID NO: 81803 - protein, 385 aa, Trichococcus patagoniensis
  misc_feature (1)..(385): tr|A0A2T5IQU5|A0A2T5IQU5_9LACT Epoxyqueuosine reductase OS=Trichococcus patagoniensis OX=382641 GN=C8U37_10127 PE=4 SV=1
MNFAALKAEIIEESKKMGIDKLGFTTAEPFEYMLESLKEQHAKGHTVGFEHPVLDERIYPDRIFDKPQSILSIALAYPSKMTENAERVRGERRGNFSRASWGTDYHVILRERMDRLIAFIQEKIPGARFKAMVDTGELIDTVVAQRAGLGFIGRNGLLITREFGSYVYLGEIITDIPFPADEPGIFGCGECTRCVDFCPTGAILGNGQLNPNSCLSYQTQTKGYMPEAYRQKIGHVIYGCDICQQVCPYNRGMDHHLHPEMEPEPESVTPVLQPMLTISNREFKEQFGHLAGSWRGKKPLQRNAVIALANYRDRTAIPELLRMIEQDPRPVLRGTAAWAIAEIVRESNPELLAFFSERLIIETDEETKAEMEKAYLKMLELKDTD

SEQ ID NO: 81804 - protein, 385 aa, Trichococcus sp.
  misc_feature (1)..(385): tr|A0A383TEM9|A0A383TEM9_9LACT Armadillo-type fold OS=T richococcus sp. ART1 OX=2094020 GN=TART1_1605 PE=4 SV=1
MNFAALKAEIIEESKKLGIDKLGFTTAEPFEYMLESLKEQHSKGHTVGFEHPVLDERIYPDRIFEKPQSILSIALAYPSRMTEKAERTRGERRGNFSRASWGTDYHVILRDRMDRLIAFIQEKIPEARFKPMVDTGELIDTVVAQRAGLGFIGRNGLLITREFGSYVYLGEIITDIPFPADDPGVFGCGECTRCVDFCPTGAILGNGQLNPKICLSYQTQTKGYMPEEYRKKISHVIYGCDICQQVCPYNRGMDHHLHPEMEPEPESVTPVLQPMLTISNREFKEQFGHLAGSWRGKKPLQRNAVIALANYRDRTAIPELLRMVEQDPRPVLRGTAAWAIAEIVREANPELLAFFSERLIIETDEETKAEMEKAYLKILDIKEAD

SEQ ID NO: 81805 - protein, 385 aa, Trichococcus sp.
  misc_feature (1)..(385): tr|A0A5C5E8B4|A0A5C5E8B4_9LACT tRNA epoxyqueuosine(34) reductase QueG OS=Trichococcus sp. SKBG OX=2585775 GN=q ueG PE=4 SV=1
MNFAALKAEIIEESKKLGIDKLGFTTAEPFEYMLESLKEQHSKGHTVGFEHPVLDERIYPDRIFEKPQSILSIALAYPSRMTEKAERTRGERRGNFSRASWGTDYHVILRDRMDRLIAFIQEKIPEARFKPMVDTGELIDTVVAQRAGLGFIGRNGLLITREFGSYVYLGEIITDIPFPADDPGVFGCGECTRCVDFCPTGAILGNGQLNPKICLSYQTQTKGYMPEEYRKKISHVIYGCDICQQVCPYNRGMDHHLHPEMEPEPESVTPVLQPMLTISNREFKEQFGHLAGSWRGKKPLQRNAVIALANYRDRTAIPELLRMVEQDPRPVLRGTAAWAIAEIVREANPELLAFFSERLIIETNEETKAEMEKAYLKILDIKEAD

SEQ ID NO: 81806 - protein, 308 aa, Trichodesmium erythraeum
  misc_feature (1)..(308): tr|Q10VF8|Q10VF8_TRIEI Epoxyqueuosine reductase OS=Tric hodesmium erythraeum (strain IMS101) OX=203124 GN=queG PE=3 SV=1
MKLYISSSQIKQKALEVGFHKVGITSANKLSSEINRLQSWLNKGYQADLEWMANPKRQDLKKVMPEVKSVICVALNYYTPHKHSESSEIGKISRYGWGRDYHKVMHKKLKSLVNWLQEQDQEILTRYYVDTGPIMEKPLAEQAGVGWIAKNGNLITREYGSWVFLGEVLTNLELTNDRPHTEHCGSCTRCLEACPTNAIVESFVIDANLCIAYHTIENRNPKLPVHIKSNLKGWVAGCDICQDVCPWNQRFAQETNIDEFQPYPNNLVPKLTKLAEISQEDWNKQFPASALRRIKPEMLQRNARANLE

SEQ ID NO: 81807 - protein, 324 aa, Trichormus variabilis; identical to SEQ ID NO: 74448
  misc_feature (1)..(324): tr|Q3MAY9|Q3MAY9_TRIV2 Epoxyqueuosine reductase OS=Tric hormus variabilis (strain ATCC 29413 / PCC 7937) OX=240 292 GN=queG PE=3 SV=1

SEQ ID NO: 81808 - protein, 324 aa, Trichormus variabilis
  misc_feature (1)..(324): tr|A0A3S1AEZ6|A0A3S1AEZ6_ANAVA Epoxyqueuosine reductase OS=Trichormus variabilis SAG 1403-4b OX=447716 GN=queG PE=3 SV=1
MNDCALTSSSVVKEKARELGFHQVGIASVDGVDATEVQRLQAWMELGYHGDMEWMANPKRQDIRLVMPEVRSLVCVALNYYTPDQRPEGEEYAKISRYGWGRDYHKVLHKKLKQLATWLESLDEGVKARYYADTGPVQDKVWAQKAGIGWIAKNGNVITREYGSWVFLGEVLTNIELESDRPATQHCGTCTRCLEACPTGAITEPFVVDANRCIAYHTIENRAETLPETLTPHLQGWVAGCDICQDVCPWNQRFAKVSDVTDFRPYAGNLAPKLVELAQISDQEWDRQFTASALRRIKPEMLRRNARANLDASRLKNDSESNNI

SEQ ID NO: 81809 - protein, 440 aa, Trinickia caryophylli
  misc_feature (1)..(440): tr|A0A1X7H2B4|A0A1X7H2B4_TRICW Epoxyqueuosine reductase OS=Trinickia caryophylli OX=28094 GN=queG PE=3 SV=1
MNQCPEHAAKGGRANPCDTAAARQDVSRADDAHDVRANRLDDATLAALAQRIKAWGRELGFGALGISDTDLSSAEAGLAAWLEAGCHGEMDYMAKHGTKRARPAELVAGTRRVITARMAYMPASVLAPAASGDASAAAAPQDWRARERARLADPSAAVVSIYARGRDYHKVMRQRLQRLAERIEQEVGPYGYRVFTDSAPVLEVELAQKSQIGWRGKHTLLLERDAGSLFFLGEIYVDLPLPVDAPSTGTADEASAVAAAPAQAPARAAGAHCGHCTRCIEACPTGAIVAPYRVDARRCISYLTIELAGSIPEPLRPLIGNRVYGCDDCQLACPWNKFAQAAPVDDFDVRHGLDRATLVELFEWSAETFDARMQGSAIRRIGYERWLRNVAVGLGNALRSASPTALAAGERERIVAALRGRADDESPLVREHVLWALAAA

SEQ ID NO: 81810 - protein, 422 aa, Trinickia soli
  misc_feature (1)..(422): tr|A0A2N7WAS3|A0A2N7WAS3_9BURK Epoxyqueuosine reductase OS=Trinickia soli OX=380675 GN=queG PE=3 SV=1
MKRSPQQAATDSRVPDEVGPSHAAADVAGKLDAAALAALAQRIKTWGRELGFGAVGISDTDLSDAEAALTAWLEAGCHGEMDYMAKHGAKRARPAELVAGTRRVISARMAYMPASVLARNEAESTPSAAAHGEGKEAGDWRAREWERLADPSAAVVSIYARGRDYHKVMRQRLQQLAERIEREVGAYGYRVFTDSAPVLEVALAQKAGIGWRGKHTLLLERDAGSLFFLGEIYVDIPLPTDARSAPGPATRAQGAHCGHCTRCIDVCPTGAIVGPYRVDARRCISYLTIELKGSIPESLRPLIGNRVYGCDDCQLVCPWNKFAQAAPVDDFDVRHGLDRARLVDLFAWSAEEFDVRLQGSAIRRIGHERWLRNLAVAMGNALRNSETLAADERARIVAALRARADDASSLVREHVQWALQAA

SEQ ID NO: 81811 - protein, 403 aa, Trinickia sp.
  misc_feature (1)..(403): tr|A0A4U1HNP6|A0A4U1HNP6_9BURK Epoxyqueuosine reductase OS=Trinickia sp. 7GSK02 OX=2571161 GN=queG PE=3 SV=1
MNRCPEHSMSRTPLSDDDCRASRRFDEAALAALAQRVKEWGRELGFGAVGISDIDLTDAEAGLAAWLEAGCHGEMDYMAKHGVKRARPAELVAGTLRVITARMAYLPASTRDESEPSGGWRAREMARLADPSTAVVSIYARGRDYHKVMRNRLQQLAQRIEDEIGAYGYRVFTDSAPVLEIELAQKAGIGWRGKHTLLLQRDAGSLFFVGEILVDVPLPTDAETSPERAPEAPGAHCGQCTRCIDACPTGAIVAPYRVDARRCISYLTIELKGSIPEDLRPLIGNRVYGCDDCQLVCPWNKFAQAAPVDDFDVRHGLDRATLVELFGWSAGEFDTRMQGSAIRRIGYERWLRNIAVAMGNALRSDAASIGDAARAEIVAALESRADDDSPLVREHVQWALAAA

SEQ ID NO: 81812 - protein, 491 aa, Trinickia symbiotica
  misc_feature (1)..(491): tr|A0A2N7WTJ7|A0A2N7WTJ7_9BURK Epoxyqueuosine reductase OS=Trinickia symbiotica OX=863227 GN=queG PE=3 SV=1
MTALHAAASSAETYRFDGAALAALARRIKAWGRELGFGAIGVSDTDLSQAEAALSAWLAAGCHGEMDYMAKHGMKRARPAELVAGTLRIITARMAYLPAATLAVADDESASSDSKAAAMAEDAPASAERERNESDQPDERDERDERAGALDWRARERARLDDPTAAVVSLYARGRDYHKVMRQRLQQLAERIEREIGPYGHRVFTDSAPVLEVELAQKASIGWRGKHTLLIERDAGSLFFLGEIYVDVPLPVDVDVDVDVDVDVDVDVDADVDADVDADVDADVDADADADADADAVADADAEADAEAEKPAVKKAPRTAGESCGRCTRCIDVCPTGAIVGPYRVDARRCISYLTIELKGSIPEALRPLIGNRVYGCDDCQLVCPWNKFAQAAPVDDFDTRHGLDRASLVDLFSWSAEEFDTRMQGSAIRRIGYECWLRNLAVGLGNALRAGGGTALGQADRSRIVDALRRRADDASPLVREHVEWALEAA

SEQ ID NO: 81813 - protein, 436 aa, Trinickia symbiotica
  misc_feature (1)..(436): tr|A0A2T3XKS3|A0A2T3XKS3_9BURK Epoxyqueuosine reductase OS=Trinickia symbiotica OX=863227 GN=queG PE=3 SV=1
MTALHAAASSAETSRFDDAALAALARRIKAWGRELGFGAIGVSDTDLSQAEAALSAWLAAGCHGEMDYMAKHGMKRARPAELVAGTLRIITARMAYLPAATLAAADDESASSDSKAPGAAEDAPASAERERNERDERAGAVDWRARERARLDDPTAAVVSLYARGRDYHKVMRQRLQQLAERIEREIGPYGHRVFTDSAPVLEVELAQKASIGWRGKHTLLIERDAGSLFFLGEIYVDIPLPVDVDVAAEARAEEPAVTKAPRTAGESCGRCTRCIDVCPTGAIVGPYRVDARRCISYLTIELKGSIPEALRPLIGNRVYGCDDCQLVCPWNKFAQAAPVDDFDTRHGLDRASLVDLFSWSVEEFDTRMQGSAIRRIGYECWLRNLAVGLGNALRAGGGAALGQADRSRIVDALRKRADHASPLVREHVEWALEAA

SEQ ID NO: 81814 - protein, 347 aa, Tritonibacter horizontis
  misc_feature (1)..(347): tr|A0A132C4D1|A0A132C4D1_9RHOB Epoxyqueuosine reductase OS=Tritonibacter horizontis OX=1768241 GN=queG PE=3 SV =1
MTDTPDLKQRLVAEARAEGFVSARICRPWDVPEVPARLDAFLDAGFHGQMSWMAERVNWRADPAALWPEAKSVIMLAESYTPDENPMDVVGLPDRAAISVYARGKDYHDLVKKRLKRLARWLIAEAGDATQVKVFVDTAPVPEKALGQAAGLGWQGKHTNLLSRDWGNWAFLGSIFTTLELAVDPAEPDHCGSCRACLSACPTDAFPAPYQLDARRCISYLTIEHKGPIEEDLRAKLGNRIYGCDDCLAACPWNKFAVAASDVRYAAREGTVAPPLAELARLDDATFRARYAGSPIKRIGRDRFVRNVLYAIGNSGEARLRSVAQELCADPDPTVADAAQWAVMRLS

SEQ ID NO: 81815 - protein, 346 aa, Tropicibacter naphthalenivorans
  misc_feature (1)..(346): tr|A0A0P1GAM7|A0A0P1GAM7_9RHOB Epoxyqueuosine reductase OS=Tropicibacter naphthalenivorans OX=441103 GN=queG P E=3 SV=1
MEGLAARLKAEAQAVGFSACRVCRPSDVPQVAARLAAFVEQERHGQMAWMAERMHWRGAPDVLWPEARSVIMLAESYGQAHDPMAVVGQGDRGAISVYAQNRDYHDVVKKRLKRLGRWLIDAAGPETQIKVFVDTAPVMEKPLGQAAGLGWQGKHTNLVSRELGSWFFLGAIFTTVELPVDGAERDHCGSCRACLDACPTGAFPAPYQLDARRCISYLTIEHSGPVPEDLRAGLGNRIYGCDDCLAACPWNKFAQMAAEVKYHARPELIGPRLAELAALDDAGFRALFSGSPIKRIGRDRFVRNVCYAIGNSGDMGLRPAVQALADDPDAAVSDAASWAVGRLDGR

SEQ ID NO: 81816 - protein, 348 aa, Tropicibacter phthalicicus
  misc_feature (1)..(348): tr|A0A238J934|A0A238J934_9RHOB Epoxyqueuosine reductase OS=Tropicibacter phthalicicus OX=1037362 GN=queG PE=3 SV=1
MSGDLKQALVVEAAEVGFADCRICRPDAVPQVMARLQAFLEAGRHGQMGWMGERVHWRGAPDALWPEARSVIMLAENYGPDFDPRAVLEQKDRGAISVYAQNKDYHDVAKKRLKRLGRWLIEAAHRQRQEAEIKVFVDTAPVMEKPLGMAAGLGWQGKHTNLVSRKLGSWFFLGAIFTTLELEPDEAGVDRCGQCRACLDVCPTDAFPAPYQLDARRCISYLTIEHTGPVDEALREGLGNHIYGCDDCLAACPWNKFAQEAHEAKYHARDELKAPKLAELVVLDDAGFRALFSGSPIKRAGRDRFVRNVLYAIGNSGDSGLAEYVRPLCDDPDVAVADAARWALARIG

SEQ ID NO: 81817 - protein, 342 aa, Tropicimonas isoalkanivorans
  misc_feature (1)..(342): tr|A0A1I1M6K8|A0A1I1M6K8_9RHOB Epoxyqueuosine reductase OS=Tropicimonas isoalkanivorans OX=441112 GN=SAMN04488 094_10943 PE=4 SV=1
MRLEAQARAEGFAAMGVCRPDAIGHVPAELAAFIGQGLHGQMSWLAERMGWRGDPAQLWPEARSIVVLAESYSPDLDPRENLKRPDVGNVSVYARGKDYHDIVKKRLKRLARWLIAEAGGEVKVFVDTAPLAEKPLGQAAGLGWQGKHTNLLSRDLGNWFFLGSIFTTLDLPEDVAETDHCGSCRACLDACPTEAFLGPYRMDARRCISYLTIEHRGPVDVELRARMGNRIYGCDDCLAACPWNKFAVDASDMRYAARDDLSAPDLRDLVRLDDASFRARFSGSPIKRIGRDRFVRNVLYAIGNSEDRSLMDPAKALRADSDPAVADAARWAVERLSSRSQS

SEQ ID NO: 81818 - protein, 343 aa, Tropicimonas sediminicola
  misc_feature (1)..(343): tr|A0A239J4A8|A0A239J4A8_9RHOB Epoxyqueuosine reductase OS=Tropicimonas sediminicola OX=1031541 GN=queG PE=3 S V=1
MEGLKERLEAQALAEGFVATGICRPDAIGHVPEALGAFVAQGFHGQMSWMAERMGWRGDPSALWPEARSVVMLAESYTPEHDPREDLGRPEIGNVSVYARGRDYHDLVKKRLKRLARWLIAEAGGEVKVFVDTAPVAEKPLAQAAGLGWQGKHTNLVSRGLGNWIFLGSIFTTLELPADTAEVDHCGSCRACLDACPTEAFVAPYRMDARRCISYLTIEHRGPVAEDLRARMGNRIYGCDDCLAACPWNKFAVAARELRYAARPDLEAPPLEELARLDDAGFRARFSGSPIKRIGRDRFVRNVLYAIGNSGERRLAPVAAGLVSDPDPAVADAAGWALARLAG

SEQ ID NO: 81819 - protein, 354 aa, Tropicimonas sp.
  misc_feature (1)..(354): tr|A0A4Q3ZHY7|A0A4Q3ZHY7_9RHOB Epoxyqueuosine reductase OS=Tropicimonas sp. IMCC6043 OX=2510645 GN=queG PE=3 S V=1
MPTSISETPTTPLKERLLQQATVEGFTRLRLCRPDAIPQVAKDLEKFVGGGYHGQMHWMERRIGWRGDPRALWPEVRSVIVLAESYSPDAPPEASLDRPELGTVSVYARGKDYHDIVKKRLKRLARWLIAEAGGAVKVFVDTAPVAEKPLGQAAGLGWQGKHTNLVSREIGNWFFIGAIFTTLEIPPDAPEVDHCGSCRACLDACPTDAFLAPYRLDARRCISYLTIEHSGPVAPELRARMGNRIYGCDACLAACPWNKFAAAATELRYAAKDDLDAPPLAELAALDDAAFRRRFAGSPIKRIGRDRLVRNVLYAIGNSGRADLGAAAERLLDDPDETVAEAARWALTRLARSI

SEQ ID NO: 81820 - protein, 384 aa, Tumebacillus algifaecis
  misc_feature (1)..(384): tr|A0A223CZG0|A0A223CZG0_9BACL tRNA epoxyqueuosine(34) reductase QueG OS=Tumebacillus algifaecis OX=1214604 GN =queG PE=4 SV=1
MGKHEIDKETIAQIGEELGIDGIGVTTAEPFHDVYEHLVMYRESGHESGFEHGVLEERVDPKTFFPEAKSIVAIAMAYRTEKYAGQKKPEGLRGQMSVYAWGMDYHKVLKQKLELLVARLEVEVGRPIVVHNSVDTGPLVDRAVAQRAGIGWVGKNCSLITEKHGSWVFLGQLVCDVDIEPNEPSLLPQCADCPDLCLKACPTKALVNPFQTDSSKCLSYITQMKGLIPEEYRAKLGRRLWGCDTCQVVCPKNKDVAFGTAIEFDPEPEFAFPDLMHLLELSNKQFRREFGESAAAWRGAKVMQRNAIIALGNMREKAALPKLLSMLQQDERPEIRGTIAWALRKIDAEGTCEAVAEAFERETEDEVKQEMAWAVKLREGGAEA

SEQ ID NO: 81821 - protein, 379 aa, Tumebacillus avium
  misc_feature (1)..(379): tr|A0A1Y0IJS4|A0A1Y0IJS4_9BACL tRNA epoxyqueuosine(34) reductase QueG OS=Tumebacillus avium OX=1903704 GN=CBW6 5_00900 PE=4 SV=1
MRKYEIDNETILRIGAELGIDGIGVTTAEPFHDVHEHLVMYRESGHESGFEHDVLEERVDPKAFFPEAKSIVAIAMAYRTEKYVGQKKPEGLRGQMSVYAWGMDYHKVLKGKLELLAARLEQELGRPVAVHNSVDTGPLVDRAVAQRAGIGWVGKNCSLITETHGSWVFLGQLVCDVDIEPSVPTPLPQCEDCPDLCLKACPTKALVSPFQTDSSKCLSYITQMKGLIPEEYRAKLGRRLWGCDTCQVVCPKNKEVAFGTAIEFDPEPEYAFPDLMHLLTLSNKQFRREFGESAAAWRGAKVMQRNAIIALGNMREQAAVPKLLEMLERDERPEIRGTIAWALQKIDPDGTREKVAQAYAREPEEEIKQEMAWAVDGAE

SEQ ID NO: 81822 - protein, 379 aa, Tumebacillus permanentifrigoris
  misc_feature (1)..(379): tr|A0A316D9G6|A0A316D9G6_9BACL Epoxyqueuosine reductase OS=Tumebacillus permanentifrigoris OX=378543 GN=C7459_ 10695 PE=4 SV=1
MAGYEIDNATIRQLAEELGIDGIGVTTAEPFAELEEQLTNYRDLGHESGFEHPVIQERIDPRQTWPNAQSIIAIAMGYRTEQYVGAKKPAGLRGQMSVYAWGMDYHQVLKQKLDQLGKRLQELLGRPIEIYNTVDTGPLVDRAVAQRCGIGWLGKNCSIITDTHGSWVFLGQLVTDISIEPNVPSPPPQCGDCPDLCLKACPTKALVNPFMTDSSKCLSYITQMKGFVPEQYRAKLGRRLWGCDTCQVVCPKNKDVAFGTAIEFDPEPEYAFPDLMRLLDLSNKQFRREYGTSAAAWRGVKVMQRNAIIALGNMRETQAIARLLELLSQDERPEIRGTIAWALKKIDPDATREAVAHAYEVEEHAEAKQEMAWAIEDPA

SEQ ID NO: 81823 - protein, 397 aa, Tumebacillus sp.
  misc_feature (1)..(397): tr|A0A4R2QXB9|A0A4R2QXB9_9BACL Epoxyqueuosine reductase OS=Tumebacillus sp. BK434 OX=2512169 GN=EV586_105143 P E=4 SV=1
MNWRGQPFRSEDGEAAMRKYEIDRATILRLGEELGIDGIGVTTAEPFHDVHEHLVMYRESGHESGFEHDVLEERVDPKAFFPEAKSIVAIAMAYRTEKYAGQKKPEGLRGQMSVYAWGMDYHKVLKAKLELLAARLEQEAGRPIAVHNSVDTGPLVDRAVAQRAGIGWVGKNCSLITEKHGSWVFLGQLVCDVDIEPSEPSLLPQCEDCPDLCLKACPTKALVNPFQTDSSKCLSYITQMKGLIPLEYRAKLGRRLWGCDTCQVVCPKNREVAFGTAIEFDPEPEYAFPDLMRLLTLSNKQFRREFGESAAAWRGAKVMQRNAIIALGNMREQAALPKLLEMLEQDERREIRGTIAWALQKIDPEGTRALVAAAYAREPDEEIRQEMAWAVEEAPEA

SEQ ID NO: 81824 - protein, 365 aa, Turicibacter sanguinis
  misc_feature (1)..(365): tr|A0A174ENV4|A0A174ENV4_9FIRM Epoxyqueuosine reductase OS=Turicibacter sanguinis OX=154288 GN=queG PE=4 SV=1
MKKEKQKQGVIDKQDLTIIENSEAYELKEKLIEYSKEVGIDVIGFSDVKPFLFLETELKRREELGWSSGLTKGSIEERTNPLLSMENAKSFVSIGVSYPRQTELPKQDKEDPFVQFCRSSWGMDYHDIVGKKLQLLEDWLKEHISGIEVIGSVDTGVFNDRAVALRSGIGFSGKNSSIINETFGSYIYLGELLVSYEFPPDTPIERLCGTCDRCVRACPTKAIQPDGSLNEKRCLSYVTQSKEYLAPELYEKISKNVYGCDICQEVCPFNREVDFHLHAEMEPTGAEFPKISELLTMTNKEFKSKYGHLAGSWRGVSVLKRNAMFNAGFYKYKAALPEIAKIRDGQGPDWLKEAAKQAYERLDNK

SEQ ID NO: 81825 - protein, 339 aa, Turicibacter sanguinis
  misc_feature (1)..(339): tr|D4W1M3|D4W1M3_9FIRM Putative iron-sulfur cluster-bin ding protein OS=Turicibacter sanguinis PC909 OX=702450 GN=CUW_2343 PE=4 SV=1
MKDKLIEYSKSIGIDVIGFCSVDPFLELADEIRRRDELGWSSGLTKGSILERTNPLLSMENAKTFISIGVSYPRNTQFPVQDKEDPYVQFSRSSWGVDYHVIVGEKLQLLEEWLKKEIPGIEVIVSVDTGVFNDRAVALRSGIGFSGKNSSIINETFGSYLYLGELLVSYEFPSDNPIERQCGTCDRCVRACPTKAIQPDGSLNEKRCLSYVTQSKEFLDPELYKKISKNIYGCDICQEACPYNREVDFHLHEKMEPTGVEFPKIDEILKMSNKEFKQKYGHLAGSWRGVSVLKRNAMFNASFYKYKEALPEIAKLRDGQAPDWLREAAIVAYEELEKK

SEQ ID NO: 81826 - protein, 347 aa, Turicibacter sp.
  misc_feature (1)..(347): tr|A0A109RMR1|A0A109RMR1_9FIRM Epoxyqueuosine reductase OS=Turicibacter sp. H121 OX=1712675 GN=AT726_08755 PE= 4 SV=1
MENSEAYELKEKLIEYSKEVGIDVIGFSDVKPFLFLETELKRREELGWSSGLTKGSIEERTNPLLSMENAKSFVSIGVSYPRQTELPKQDKEDPFVQFCRSSWGMDYHDIVGKKLQLLEDWLKEHISGIEVIGSVDTGVFNDRAVALRSGIGFSGKNSSIINETFGSYIYLGELLVSYEFPPDTPIERLCGTCDRCVRACPTKAIQPDGSLNEKRCLSYVTQSKEYLAPELYEKISKNVYGCDICQEVCPFNREVDFHLHAEMEPTGAEFPKISELLTMTNKEFKSKYGHLAGSWRGVSVLKRNAMFNAGFYKYKAALPEIAKIRDGQGPDWLKEAAKQAYERLDNK

SEQ ID NO: 81827 - protein, 332 aa, Turneriella parva
  misc_feature (1)..(332): tr|I4BBM5|I4BBM5_TURPD Uncharacterized protein OS=Turne riella parva (strain ATCC BAA-1111 / DSM 21527 / NCTC 1 1395 / H) OX=869212 GN=Turpa_4048 PE=4 SV=1
MAAHRVLLAVIGRTRLDAIARVAAGVGFSAVAAVPVTEPSAEFRNWWLAFLARGGHSDLAYLEGPQRFDLRAVLPEAQSLLLFRYPYRFREVDEKLRLAPYKVARYAWQKDYHVILKAKLAEVMQACSLAGRAVTDSAPLAERYWARLAGLGKIGRNGMLIAAGSGSYFLIAAVLTNEVLAAEVVESLAQTKGPNDIADICGECNLCVEACPTAALTGDGLMKTDRCISYQTIEKRENEVDVSLNQKRHHWVFGCDVCQQVCPHNKTALAFAEPRFNDEHAAAAAIAAGELPATRSSLKLSSFYRRGLAKLAGNLRAVMSFSDSAPGPHDGE

SEQ ID NO: 81828 - protein, 311 aa, Tychonema bourrellyi
  misc_feature (1)..(311): tr|A0A2G4F594|A0A2G4F594_9CYAN Epoxyqueuosine reductase OS=Tychonema bourrellyi FEM_GT703 OX=2040638 GN=queG P E=3 SV=1
MKTSTNSDRIKQKSLELGFHKVGIALVDEGTDQESQRLQAWLDKGYQGDMGWMANPKRQDIRASMPEVKSLICVAINYYTPHQRPESSEYAKISRYGWGRDYHKILHKKLKVLADWVRSQGEGIEARYYADTGPIQDKVWAQRAGIGWIAKNGNVISREYGSWVFLGEVLTNLELVPDSGHTQHCGTCTRCIEACPTGAITEPFVVNADRCIAYHTIENRAEKLPDEIASNLQGWVAGCDICQDVCPWNQRFAKPTDVAEFEPYPENIAPTLAELAEISDEEWNRRFTASALRRIKPEMLRRNAIANQTNS

SEQ ID NO: 81829 - protein, 356 aa, Uliginosibacterium sp.
  misc_feature (1)..(356): tr|A0A2N4XRG1|A0A2N4XRG1_9RHOO Epoxyqueuosine reductase OS=Uliginosibacterium sp. TH139 OX=2067453 GN=queG PE= 3 SV=1
MHPDSLIPQTDELLRQIRSWAHELGFAGLGVSGVDLGSAEQGLLDWLAAGFHGGMDYMARHGLKRARPAELVPGTVSVLMLRMDYWPEPDLTEAIRLQGEAGRAAISRYALGRDYHKVLRTRLQKLAERIAAVVGDYGHRVFVDSAPVLEVELASRAGLGWRGKHTLLINREAGSFFFLGEIYVDLALPPDTPVRAHCGSCTACIPACPTQAIVEPYRLDARRCISYLTIEHAGPIPEALRPLIGNRVYGCDDCQLACPWNRFARLTQEPDFAVRNGLDRATLVELFAWREDEFAQRLAGSPIYRIGHERWLRNLAVGLGNAPTSPAVLEALQSRADDPSALVREHVAWALARHGR

SEQ ID NO: 81830 - protein, 308 aa, Ulvibacter antarcticus
  misc_feature (1)..(308): tr|A0A3L9ZG46|A0A3L9ZG46_9FLAO Epoxyqueuosine reductase OS=Ulvibacter antarcticus OX=442714 GN=queG PE=3 SV=1
MIENPSKYAAEIKQEAKRLGFMSCGISKAEFLEEEAPRLEKWLQKNRHGEMSYMENHFDKRLDPTKLVPGSKSVISLLLNYFPSETQDESAYKISKYAYGTDYHFVIKDKLKQLLAFIQDEIGDVHGRAFVDSAPVLDKAWAAKSGLGWIGKHSNLLTKQVGSFYFIAELIVDLDLAYDSPVTDHCGACTACIDACPTQAIVEPYVVDGSKCISYFTIELKNELPTSMNGKFDDWMFGCDVCQDVCPWNRFSKAHREPLFNPNPELLSMSKKDWEEITEEVFQEIFRKSAVKRTKFSGLQRNIDFLKK

SEQ ID NO: 81831 - protein, 306 aa, Ulvibacter litoralis
  misc_feature (1)..(306): tr|A0A1G7DUQ5|A0A1G7DUQ5_9FLAO Epoxyqueuosine reductase OS=Ulvibacter litoralis OX=227084 GN=queG PE=3 SV=1
MNEAQHTRLIKEEAKRLGFLSCGVSKAEFLEEEAPRLERWLKQNRNGEMGYMENHFDKRLDPTLLVPDSKSVISLLLNYYPSEVQSDDTYHISKYAYGTDYHFVIKDKLKHLLAFIQEEIGEVHGRAFVDSAPVLDKVWAAKSGLGWIGKHSNVLTKQVGSFYFIAELIVDLKLAYDSPVTDHCGSCTACIDACPTQAIVEPYVVDGSKCISYFTIELKNEIPSNVRGQFDDWIFGCDVCQDVCPWNRFSKSHNEPLFNPNPELLSMTKKDWEEITESVFQTVFKNSAVKRTKFSGLQRNINFVKD

SEQ ID NO: 81832 - protein, 289 aa, Ulvibacter marinus
  misc_feature (1)..(289): tr|A0A5J4IXJ5|A0A5J4IXJ5_9FLAO Epoxyqueuosine reductase OS=Ulvibacter marinus OX=1397112 GN=queG PE=4 SV=1
MSCGVSKAGFLEEEAPRLESWLNKNMNGEMAYMENHFDKRLDPTLLVEGSKSVISLLLNYYPQELQKDTSYKISKYAYGTDYHFVIKDKLKKLLHFIREEIGEVNGRAFVDSAPVLDKAWAAKSGLGWIGKHSNLLSQKVGSFYFIAELIVDLELEYDYAVTDHCGNCTACIDACPTQAIVDPYIVDGSKCISYFTIELKDELPSSFKGKFDDWMFGCDVCQDVCPWNRFSKSHKEPLFNPNPSLLTNSKKDWEEITRDVFAEIFKKSAVKRTKFEGLIRNINFLNNSD

SEQ ID NO: 81833 - protein, 265 aa, Ulvibacter sp.
  misc_feature (1)..(265): tr|A0A5J4FSQ7|A0A5J4FSQ7_9FLAO Epoxyqueuosine reductase OS=Ulvibacter sp. KK4 OX=2494560 GN=queG PE=4 SV=1
MHGEMGYMENHFDKRLDPTKLVEGSKSVISLLLNYYPSQFQNQDSYKISKYAYGTDYHFVIKDKLKQLLHFIEENIGKVHGRAFVDSAPVLDKAWAAKSGLGWIGKHSNLLSKQTGSFYFIAELIVDLDLEYDAPVTDHCGSCTACIDACPTQAIVEPYKVDGSKCISYFTIELKKEIPTAFKNTFDEWMFGCDICQDVCPWNRFSKSHNEPLFDPNPQLLSMDKKDWEEITKEVFNNIFKKSPVKRTKFTGLKRNIDFLKNDSF

SEQ ID NO: 81834 - protein, 307 aa, Ulvibacter sp.
  misc_feature (1)..(307): tr|A0A2N0ET27|A0A2N0ET27_9FLAO Epoxyqueuosine reductase OS=Ulvibacter sp. MAR_2010_11 OX=1250229 GN=queG PE=3 SV=1
MNSKTKHTALIKAEAKRLGFLSCGISKAEFLEEEAPRLEKWLRNGMQGEMSYMENHFDKRLDPTKLVPDSKSVISLLLNYFPSETQDEASYKISKYAYGTDYHFVIKDKLKQLLAFISEEIGDVHGRAFVDSAPVLDKAWAAKSGLGWMGKHSNLLTKQVGSFYFIAELIVDLDLEYDRPVTDHCGACTACIDACPTEAIIAPYVVDGSKCISYFTIELKNEIPSNVRGQFDDWVFGCDVCQDVCPWNRFSKSHNEPLFNPNPELLSMTKKDWEEITDEVFQKLFKNSAVQRTKFSGLQRNINFLKD

SEQ ID NO: 81835 - protein, 399 aa, Umboniibacter marinipuniceus
  misc_feature (1)..(399): tr|A0A3M0ABJ8|A0A3M0ABJ8_9GAMM Epoxyqueuosine reductase OS=Umboniibacter marinipuniceus OX=569599 GN=queG PE=3 SV=1
MNEIVIVYNLYAKIRKSSLLMIAAIPPLTDASVMTQTHSHSLQIAANQIKAWGAELGFNDVRITDTDLDLDAARLKAWLGKSMHMPLEWMTDHGDMRYTPNSLLAGTQRVISVRLNYLPADVDLVAPLKQENTAYISRYALGRDYHKLVRKRLAKLAAKIATAYPGSAQRALVDSAPVMEKALARKAGHGWVGKNSLIIHPEDGSYFFLGEIYTDLELPIDQPDDHDRCDDCEACLKVCPTDAFVAPYQLEVKRCISYLTIENSGPIPLEFREAIGNRVFGCDDCQIICPWNKQAATTQEEDFSPRNDLDSADLSRLFRWTEDEFLAATIGSPLRRTGYHNFLRNLAVGLGNAPSNDEHVTLLKQRLDENLSEMLNEHIQWAIERQQSQRKRRRKSRRS

SEQ ID NO: 81836 - protein, 374 aa, Alphaproteobacteria bacterium
  misc_feature (1)..(374): tr|A0A212JUK5|A0A212JUK5_9PROT Epoxyqueuosine reductase OS=uncultured Alphaproteobacteria bacterium OX=91750 G N=queG PE=3 SV=1
MTEAIKDTIRGWAREAGFDACGFAPAAAVPGAAEALEAFVAAGRHGGMAWMAERMAERGGLERLWPGARSAVVLGLNYGPAVGPRAALARPEAGAISVYARHRDYHDVVKAKLKQVARRIHGETGAEVKVFVDTAPVMEKPLAERAGLGWIGKHSNMVSRDFGSWLFLGVIATALEIVPDPPHANRCGLCRRCIDACPTDAFDGPQRLDARRCISYLTIEHAGPIPRDLREKIGNRIYGCDDCLAACPWNRFARLGREAKLAARDDLLAPPLAELAALDDAGFRAWFSGSPIKRIGRDRFVRNVVIAIGNAGDAGRAAAIAPLLGDGSPLVRGATIWALCRLLGEDGFLSGFSHIQKSESDETVLAEWPRGGGA

SEQ ID NO: 81837 - protein, 276 aa, Anaerotruncus sp.
  misc_feature (1)..(276): tr|A0A1C6KAG9|A0A1C6KAG9_9FIRM Epoxyqueuosine reductase OS=uncultured Anaerotruncus sp. OX=905011 GN=queG_2 PE =4 SV=1
MDLVEQWLRDRPGVSWGCVPVPPPAQWFACRRAGLLPSGRLWALVFCFPYAHPPAFGGNISCYAAVPDYHRVIGDQLAQLAQQLAKATGHPFVPFVDSSPLDEVALAASCGLGIVGDNGLLITRQYGSYVFIGELITSCPLPRRTAALFRAGGCLHCGACQKVCPGGAIADGAVCTDRCLSHISQKKGELTGWEQRLVAGSELLWGCDRCQLCCPMNRQASPTALPGFLKDTVATVSKEQLRPLCKTRAFGFRGPQVLERNWALQHPGPAGEVTEQ

SEQ ID NO: 81838 - protein, 220 aa, Anaerotruncus sp.
  misc_feature (1)..(220): tr|A0A1C6J4C7|A0A1C6J4C7_9FIRM Epoxyqueuosine reductase OS=uncultured Anaerotruncus sp. OX=905011 GN=queG_1 PE =4 SV=1
MREKIQALCRQLGLAGAEFVTVPDMPGTPYAVSIAVPLSNAIVDEIDGAPTHSYFHHYRTVNAYIDHCLLRIGLLLGQHGYRYIPIGASQSVNLPGSSYQGRYSHKKVACMAGAGYIGKSCLFIHHQYGPRVRLGTLFCDCPALDTPPRPTGESCGSCTVCQQACPALAILGKNWNEVRCREEMFDPAACSQHMKRAYQHIGRGAVCGICMRVCPKGGHH

SEQ ID NO: 81839 - protein, 167 aa, Unknown
  misc_feature (1)..(167): tr|U5S3J7|U5S3J7_9BACT Putative reductive dehalogenase subunit A (Fragment) OS=uncultured bacterium OX=77133 G N=rdhA PE=4 SV=1
MADVCDYDAGKALRGPLVEGTGKTSCMVSDFPAYQMECIIRSIGYDAKANAICDTATMSEPIAVRAGLGELGRSGLVISPWGGNFRLTECFTNLPLIPDKPIDFGLQEFCKVCKKCAVNCPAGAISMEDEPSEVVKSARFIGWDTDSHKCLTERIVHGCSTCQAICP

SEQ ID NO: 81840 - protein, 359 aa, Unknown
  misc_feature (1)..(359): tr|H9BWK0|H9BWK0_9BACT Iron-sulfur cluster binding prot ein OS=uncultured bacterium W5-102b OX=1130996 PE=4 SV= 1
MHDDAETFDASTTPTAATVATRALDLQLDAVGITRAEAYDDTEQYIVERREAGLFADLKFTMAQPDVSCHPESLVDGARSVISAALSYWHPDGDVPEAAHGTGTIARFARADPYVTLRDRLEQIADWLRTHGHECRVLVDSNDHVDRAAAIRSGVGFSGKNTMLITPRHGSWVVLGTIVTTAELEPTEPMRPGCGSCTACIDACPTDAINADGGVLDTGACIGYWTQSHHQVPDEIAQHMDDMVYGCDICQDVCPWNRGTEKRRAAEEPWQGQVDLVAWLEADRDELNEAYDRFFVPRRNVSFLRRNALIAMGNRRNERDVPIIAAQLEHSDRIVRRAARQALRLNGTTAAINVLESNS

SEQ ID NO: 81841 - protein, 233 aa, Bacteroides sp.
  misc_feature (1)..(233): tr|A0A1C6KXR4|A0A1C6KXR4_9BACE Epoxyqueuosine reductase OS=uncultured Bacteroides sp. OX=162156 GN=queG PE=4 S V=1
MKYLNQEIENELNNQGAELIRFVSISHLDEKQNRQLPNAIVFALPLTAEYAKMVFNIPDYVQVRIADNYNFDDDEYSQTEHKAGEIADELAKFITGKGYKAISQSDTGLLADGVFDYETKESVLPHKTVALLGGLGWIGKNNLLITPEYGAAQCLGTVLTDAPLETVLHEPLSPKCGNCITCVNICERKVLKGKIWSKSVSRDEIVNIHGCSTCLKCLVHCPSTQTYIKRNIV

SEQ ID NO: 81842 - protein, 304 aa, Bacteroidetes bacterium
  misc_feature (1)..(304): tr|H5SK57|H5SK57_9BACT Fe-S cluster binding protein OS= uncultured Bacteroidetes bacterium OX=152509 GN=HGMM_F4 0B03C31 PE=4 SV=1
MSLALTQAVKALAKGLGFPAFGVASAHPLTDTFTPTSLAYRRYLAWIAKGKHADMTYLAEGAALRGDPAHVLPGAQALLLTLASYFHSRTHRSPIAQYAWGADYHRVLRRKLQIIADYLVRKGYAARPFVDTAPLLEKAWAVEAGLGWIGKNTLLLNRKLGSYTFIGGVITTAPLVPDDPFVGDGCGTCQRCIEACPTQALQPYELDARRCIAYWTIEAPTLEGSPPLHGWIFGCDVCQQVCPWNRFAQPQGDFVPAAYAFLPRQRWATLSKAAVRRFQRGSALRRARPEKLLAAAQTPHPIKG

SEQ ID NO: 81843 - protein, 365 aa, Chloroflexi bacterium
  misc_feature (1)..(365): tr|H5SER1|H5SER1_9CHLR Epoxyqueuosine reductase OS=uncu ltured Chloroflexi bacterium OX=166587 GN=queG PE=3 SV= 1
MASLEEAIKGEARRLGFDLAGITTPDPPAHFHLFERWLEAGYHGEMGYLANERSRQRRADPRQILPECRSILVLAMRYPASHPPEPRPWAQGQIASYAWGEDYHLVLEKRLQQLADFIIAQVGHEIPYRYYTDSGPILERELAQRAGLGWIGKNSCLIHPRYGSYLLLAELLLGLELQPDEPFPSDHCGRCTRCLEACPTACILPDRTLDARRCISYLTIENKSAIPLELRTAIGNWIFGCDECQRVCPWNRFADPEGHPALAPQAPQTDQALREELKLDAVAFAERFRRRAVKRAKRRGYLRNVAVALGNCGTPEDLPALEQALQEENDPLLCEHLNWAIQQIRHRHALPGISSHEPAASTGHE

SEQ ID NO: 81844 - protein, 379 aa, Citrobacter sp.
  misc_feature (1)..(379): tr|A0A212IB76|A0A212IB76_9ENTR Epoxyqueuosine reductase OS=uncultured Citrobacter sp. OX=200446 GN=yjeS PE=3 S V=1
MSEPLDLNQLAQNIKQWGLELGFQQVGIADTDLSEAEPKLQAWLDKQYHGEMDWMARHGMMRARPHELLPGTLRVICVRMNYLPAKAAFASTLKNPSLGYVSRYALGRDYHKLLRNRLKKLGEMIQQHCVSLNFRPFVDSAPILERPLAEKAGLGWTGKHSLILNREAGSFFFLGELLIDLPLPVDQPAEEGCGKCVACMTICPTGAIVEPYTVDARRCISYLTIELEGPIPEEFRPLLGNRIYGCDDCQLICPWNRYSQLTTEDDFNPRKQLHAPELIELFSWSEAWFLKVTEGSAIRRIGHLRWLRNIAVALGNAPWNDAVILALESRRGEHPLLDEHIDWAVAQQIEKRNACVVEVQLPKKQRLVRVIEKGLPRDA

SEQ ID NO: 81845 - protein, 273 aa, Clostridiales bacterium
  misc_feature (1)..(273): tr|A0A212KI66|A0A212KI66_9FIRM Putative iron-sulfur clu ster-binding protein OS=uncultured Clostridiales bacter ium OX=172733 GN=KL86CLO1_13214 PE=4 SV=1
MTPADLNVRFAAVGAAAWGCVAYDALLPHMGAAAREKAGCLLPNPTTVLVAAFPYFTGETEGNLSVYARGSDYHAVLRERLNTICDFLLEEYDSYTFFSAADSSPLPEREAAWLAGLGLRGENGLLILPPYGSYVFLGTILTDAPLPFQEVASAPGCIGCGACKAACPTRALEGLGPCLSDLTQKKGELTPEETALLKTHPYVWGCDLCQTACPYNRTPRVAPLTEFTQGYLSDLTPDMLEGLTNRAFQEQFGHRAFAWRGPAVLKRNLSLKK

SEQ ID NO: 81846 - protein, 235 aa, Clostridium sp.
  misc_feature (1)..(235): tr|A0A1C6EQ40|A0A1C6EQ40_9CLOT Epoxyqueuosine reductase OS=uncultured Clostridium sp. OX=59620 GN=queG PE=4 SV =1
MDMELTEELKRILRCQGADLVGIGDMSKVENCNFKRGVAVAVALPQNVIIDLQEAPTKEYYNLYYSLNEKLNEIIMAGGEFLRNRGFEVYEQTTDRVKIDQNNISRLPHKTVATRAGLGWIGKNCLLVTPQYGAAIRISSFLTNAPLECNDPINQSRCGYCNLCVKKCPAQALKGTLWEVGIQREEIVDINKCYKKQVEIMLQKTGIETDLCGRCFAVCVYTQKYLKSIAADFKD

SEQ ID NO: 81847 - protein, 269 aa, Clostridium sp.
  misc_feature (1)..(269): tr|A0A1C5WFI7|A0A1C5WFI7_9CLOT Epoxyqueuosine reductase OS=uncultured Clostridium sp. OX=59620 GN=queG PE=4 SV =1
MKGRVAKYYLTDGRRHTDSEGYKTSVAFEKYLADCGLQVATDRDFGITALRWAGMKAGIGIIRKNNFFYTEKGSYQYLEAFLIDEPLQYIVENQIRPCAEKCNLCMRSCPTESLEAPYMMCRNTCVSCLTTWDGWDLRTEPLQNKFEKWIYGCDACQDAWPHNRKAWKDTEEFPELEAWSSHFTDTEIVLAEYSWLRSVVQPKLWYIPQGKEWRYKTNALNAMLNNYDPKYLPVIKKVCQDEYCEVRDMAEWVLEEIERKGIGESENGQ

SEQ ID NO: 81848 - protein, 311 aa, Desulfobacterium sp.
  misc_feature (1)..(311): tr|A0A445N2J6|A0A445N2J6_9DELT Putative iron-sulfur clu ster-binding protein OS=uncultured Desulfobacterium sp. OX=201089 GN=PITCH_A780036 PE=4 SV=1
MISDLIEKAKGLGFISLGVSRAETPPFFDQFSKWICAGRHGEMSWLERHMEIRQHPRRLLEGCNSIISLVYPYTKIKPCTPDGFTIARYSEPKKNDYHRRLRQMCLALAESISERYPKTNSRICIDSAPLLERSFAYASGIGFIGKNNSLIIPGYGSYFFLAEILTTAPLPAYETSPMENLCGQCKSCIEACPSGALEAPFNLDAAKCLSYLTIEHKGPTDRSVAMKMGRCFIGCDICQEVCPYNHVNAQAESEEIMLPSTEEILNMDDRQFSDTFGDTALSRPGLCKIKQNILAIRSLPSRDPGQEKTIY

SEQ ID NO: 81849 - protein, 307 aa, Dysgonomonas sp.
  misc_feature (1)..(307): tr|A0A212J3J7|A0A212J3J7_9BACT Epoxyqueuosine reductase OS=uncultured Dysgonomonas sp. OX=206096 GN=queG PE=4 SV=1
MITSAQIKEYALTLGFDACGICSAEEVDLENQEGYKNWIDNSFYAGMDYMARNEDKRCNPALLVEGARSVVCVALNYYPEAKAPEENPQFAYYAYGKDYHDVVKAKLQQLFDFIKSLNPSAEGRPFVDTAPVLERYWAAKAGLGFIGKNSLLIIPKRGSYFFLGELILNLDLEYDKPLSLSCGNCTRCLDACPTKAIVAPRIVDANKCISYQTIENKGEIDEAIVPHLNNRFYGCDICQQVCPWNRYSKPHKTEEFDPSQAFLDLSFEKLDNLTVEEYQVIFKGSAVKRAKYSGLKRNLEALKRSKK

SEQ ID NO: 81850 - protein, 311 aa, Dysgonomonas sp.
  misc_feature (1)..(311): tr|A0A212JHI8|A0A212JHI8_9BACT Epoxyqueuosine reductase OS=uncultured Dysgonomonas sp. OX=206096 GN=queG PE=3 SV=1
MLANKDISLQIKDYAYSLGFDACGICKAEPIEVEEQQHFKDWISDSYHADMDYMARNTEKRCDPTLLVEGSRSVISVALNYYPETKQPQENPQFAYYAYGKDYHDVVKSKLQILLDYIKSIEPTTEGRAFVDTAPILERYWAAKAGLGFIGKNSLLIIPKKGSYFFLGELIINLELTYDTPLNLSCGNCTRCLAACPTSAIVKPRVVNARRCISYQTIENRGEIDVQVIPNMNNRFYGCDICQQVCPWNRYSRPHRTAEFNPSQSFLDLSFDRLDNLSVEDYQKIFKDSAVKRAKFTGLKRNLEALRQNLK

SEQ ID NO: 81851 - protein, 306 aa, Flavobacteriia bacterium
  misc_feature (1)..(306): tr|H6RH30|H6RH30_9BACT Epoxyqueuosine reductase OS=uncu ltured Flavobacteriia bacterium OX=212695 GN=queG PE=3 SV=1
MLPSKKRTNLIKSAAKDLGFLSCGISKAEFLEEEAPRLEQWLQDGKHGKMAYMEKHFDKRLDPRLLVPGAKSVVSLLLNYYNDEIQKEGVPKISKYAYGADYHIVFKQKLNKLLQTIHDEVGEINGRVFVDSAPVMDKAWATRSGLGWMGKNTNLITQKVGSFFFIAELIIDLELEYDTPVTDHCGNCTACIDSCPTEALTPYNIDASKCISYLTIELKDQIPDEFQNKMDNWAFGCDVCQDVCPWNRFSKSHSEPLFDPQPQILDFTKKDWEELTEATFETIFKNSALKRTRFDGFKRNLSFLSQ

SEQ ID NO: 81852 - protein, 310 aa, Flavobacteriia bacterium
  misc_feature (1)..(310): tr|H6RGW0|H6RGW0_9BACT Epoxyqueuosine reductase OS=uncu ltured Flavobacteriia bacterium OX=212695 GN=queG PE=3 SV=1
MTTTEKDRIASAIKSESNRLGFISCGISKAEFLEEEAERLENWLKIGMHGKMSYMERNFDKRLDPTLLVEGAKSVISLSYNYYPQTKIDDTDFKISKYAYGKDYHFVIKEKLKNLLEFIREEVGDVHGRVFVDSAPILERAWAKKSGLGWIGKNSNLVSKKIGSYFFLCEIILDLELTYDHQDFDHCGTCTACIDACPTQAIEQPRVVNGSKCISYHTIELKENIPSEFKGKFDDWIFGCDICQDVCPWNRFSKSHNEPLFNPDDNLRLMDKSDWLEMTKETFDKVFQKSPLKRTGFDGIKRNIEFLKKV

SEQ ID NO: 81853 - protein, 278 aa, Flavonifractor sp.
  misc_feature (1)..(278): tr|A0A1C6D1J0|A0A1C6D1J0_9FIRM Epoxyqueuosine reductase OS=uncultured Flavonifractor sp. OX=1193534 GN=queG PE =4 SV=1
MIPELNGAFAACGAAAWGGLTWADALPHLTHDAVEKTLALCPKPRAVLVAAFPYYAGDTPGNLSLYARGRDYHLVLTEKLNTVCDVLRQEYPSYSFLPGADNSPLPERQLAWACGMGLRGQNGLLILPPWGSYVFLGTILTDCPLEFSTSEPSNVCISCGKCAAACPGGALDGAGFQLSRCLSDISQKKGELSPEETALLSAQECLWGCDLCQRVCPYNVYPALSPISDFREDLISSLTSDDLEGLTNRTFREKYGDRAFAWRGPAVLRRNLALKENT

SEQ ID NO: 81854 - protein, 275 aa, Flavonifractor sp.
  misc_feature (1)..(275): tr|A0A1C6GIY7|A0A1C6GIY7_9FIRM Epoxyqueuosine reductase OS=uncultured Flavonifractor sp. OX=1193534 GN=queG PE =4 SV=1
MNAWFEAAGAAAWGAVGFGGLSRWMDPPARARAERLCPSPTGVFVAAFPYYAGDDPGNLSRYARGEDYHAAVVRRLEQVCARLRARWPEHIFRPSADSSPIPERAAALCAGLGVLGDNGLVLLDKWGSWIFLGTILTNLTGYPWPEPVPLRRCVHCGACAAACPGGALEADGVRTDRCLSHLTQKTGELTPEEAALLSAHPLIWGCDVCQQVCPYNRAAPVTPLPEFRDDLVPALTLPDVAGQTRRQFLERYPGRAFTWRGPGPLQRNLELKDGE

SEQ ID NO: 81855 - protein, 360 aa, Gammaproteobacteria bacterium
  misc_feature (1)..(360): tr|H5SD92|H5SD92_9GAMM Epoxyqueuosine reductase OS=uncu ltured Gammaproteobacteria bacterium OX=86473 GN=queG P E=3 SV=1
MNAPWTALKQQIQTWGKALSFDAIGIASIDLNAASARFKRFLAAGWHGQMDYLAKHGEKRFRPELLVPGTVSVICARLNYLPEPLQAMRQALGDPNRAYLSRYALGRDYHKLIKRRLLVLARKLEERIGPFGYRVFCDSAPVLEKPLAQQAGLGFYGKHTNLIALKQGSFFFLGEIYTDLPLPPDPPLPKSYCGSCRACLEVCPTQAIVAPYQLDARRCISYLTIELHGPIPEELRPKIGNRVFGCDDCQLVCPWNRKAQLTRERDFLPRHGLEKASLVELFAWSEAEFLAKTEGSAIRRLGYERWLRNLAVGLGNAPPSLKVLSALKARLNHPSALVREHVSWALAKHTAQLKTSATAT

SEQ ID NO: 81856 - protein, 363 aa, Unknown
  misc_feature (1)..(363): tr|Q6SGT1|Q6SGT1_9BACT Epoxyqueuosine reductase OS=uncu ltured marine bacterium 463 OX=257394 GN=queG PE=3 SV=1
MSSQGGSQITLPEPEALLAKIRLWADELGFQQLGVSDVDLGEHESYLQKWLDAGYHGSMEYMARHGNKRSRPAELVPDTCRVISLRMDYLADHSAMEVLASSEKAYISRYTLGRDYHKLIRKRLAQLAARIEKEITGGQFRAFVDSAPVLERAIAEQAGLGWIAKNTMLINPDAGSWFFLGEIYTDLPLPETRSQESKHCGTCTACLDLCPTDAFVGPFELDARRCISYLTIEHHGSIDPELRPLMGNRVFGCDDCQLVCPWTKFAQETGESDFKARHGLADAELVDLFLWDKETYLSRTEGSAIRRIGHERWLRNLAVGLGNGPASNEAIAALRSRSEFPSELVREHVEWALGQLEGKSAGV

SEQ ID NO: 81857 - protein, 349 aa, Unknown
  misc_feature (1)..(349): tr|A9QPB0|A9QPB0_9BACT Epoxyqueuosine reductase OS=uncu ltured marine bacterium EB000_55B11 OX=480665 GN=queG P E=3 SV=1
MNENLKNLLLEQSHEIGFSMVRICAPSDIPSAASKLDSFLKKNHHGSMNWMAERIEWRGNPASLWPDAKSIIMLADNYSPNHDPLHILAHRNRGAISVYAQNKDYHEVVKKKLKKLGRWLIQQENSTQIKVFVDTAPVMEKPLGAAAGLGWQGKHTNLVSRDLGSWFFLGAIFTTLELPKDTGEEDHCGSCSACLDICPTSAFPAPYELDARKCISYLTIEHAGPVELSLRDQLGNRIYGCDDCLAVCPWNKFAKEANEIGYHARTELKAPKLSELVTLDDNSFRKLFSKSPIKRIGRNRFVRNVLYAIGNSGNVELIDSAKKLQLDLDPVVKDAADWAIAKLKGSTNG

SEQ ID NO: 81858 - protein, 306 aa, Megasphaera sp.
  misc_feature (1)..(306): tr|A0A1C5NNB2|A0A1C5NNB2_9FIRM Epoxyqueuosine reductase OS=uncultured Megasphaera sp. OX=165188 GN=queG_2 PE=4 SV=1
MIDSTDMKRFAAALGLDCAGVAPADLPRPPYAEEPPCPLAAGVGDERYEPRRILPSCRSVIVVLVPYYTAQTEQANLSLYCRSADYHAVVRAYLEQIAAYLQRQYPGSEQRCVVDTSPLSDRWLAYQAGLGFFGDNRCLINDTYGSYVFIGSVLTSLPFAPDQPLQQECSHCGACQSACPGQCFSGGAYDYSRCKSYITQKKGSFMLPEIQCMEKTPLIFGCDVCQESCPHNAGAKATPLPEFYRSRLSQLCPSDIESLSNKQFQQAFGDRAFAWRGKKVLLRNLEYAANPAAASAENRNDGKDDV

SEQ ID NO: 81859 - protein, 322 aa, Megasphaera sp.
  misc_feature (1)..(322): tr|A0A1C5MUT3|A0A1C5MUT3_9FIRM Epoxyqueuosine reductase OS=uncultured Megasphaera sp. OX=165188 GN=queG_1 PE=4 SV=1
MSRSSLAQAIYETALSCGFDNCGIIPISALDGYKQRLQEREEAVPQSRPVYQDIEHLAAVRELYPWAKSVVVCITWLGAYRYPLSLQGLYGKAFLLSPDTVPDCEAHRQKLRFEAWLAEQGLRFEGGETNAPARIIPLRYAAVAAGLGIFRKNNFFYGEKGSYYELEGYLIDQLCEYTHECRLRPCADSCTLCQKACRTKALSAPYTMNPLSCTSFWTTFGQGAVPPHRTADQFTTWLCGCDACQDACPYNRHDWSQGKEFPGLQELEPLLQPENIVAASDTVLRRYVIPKTDLHVSPDQVQTLKTSASRVLEYLAKGVMQQ

SEQ ID NO: 81860 - protein, 348 aa, Unknown
  misc_feature (1)..(348): tr|E7C7P4|E7C7P4_9BACT Uncharacterized Fe-S protein OS= uncultured nuHF1 cluster bacterium HF0770_35I22 OX=7235 86 PE=4 SV=1
MTSCETKKQIKILALEEGFDSVAITSASANPKDFQSLEKFLRLKYHGEMSWLEKNRVKRGNPKKLMPNVNSIITLGKNYSPQVNPLNYKNDPVCGKISCYAQTMKDYHKVIKKALKRICQRIAFEYESEIKLFVDTAPIMEKPLAARAGLGWQGKHTNLVSRSFGSWLFLGEIFTSLKLEPDLPEADHCGSCSACLQACPTGAFPKPYQLDSNKCISYLTIEHSGLIDGKLMELMGNHIYGCDDCLAVCPWNKFSSPTADPNFQPRPELVKPKLKDLVKLTDKEFRSLFSGSAIKRTGRDRFIRNVLIAIGNSRDQSFFTVLRKLKDDPSPLVAKTAEWALLKLKNRS

SEQ ID NO: 81861 - protein, 338 aa, Pleomorphomonas sp.
  misc_feature (1)..(338): tr|A0A212LJN6|A0A212LJN6_9RHIZ Epoxyqueuosine reductase OS=uncultured Pleomorphomonas sp. OX=442121 GN=queG PE =3 SV=1
MNWRARARDLGFSAIGVAPVDRLGEAARRLRAFVDLGRHGSMAWMEETLERRADPRVLWPEARSAVVLAMNYGPDSDPLANLARPAVGNISVYARHRDYHDVLKGRLKEVAGLIARDTGADVKVFVDTAPLMEKPLAALAGVGWQGKHTNLVSRDFGSWLLLGVILSAADLPPDEPATDRCGACRRCLDACPTGALPAPYQIDARLCISYLTIEHAGPIPEDLRPLIGNRIYGCDDCLAVCPWNKFASEAAEMKLRPRPELTAPSLTALAALDDAAFRALFSGSPVKRIGRNRFVRNVAIAIGNSGDPALAPALTPLLDDPDPVVAEAARWAIDRLPP

SEQ ID NO: 81862 - protein, 306 aa, Ruminococcus sp.; identical to SEQ ID NO: 81858
  misc_feature (1)..(306): tr|A0A1C5ZVD2|A0A1C5ZVD2_9FIRM Epoxyqueuosine reductase OS=uncultured Ruminococcus sp. OX=165186 GN=queG_1 PE= 4 SV=1

SEQ ID NO: 81863 - protein, 279 aa, Ruminococcus sp.
  misc_feature (1)..(279): tr|A0A1C6BRZ0|A0A1C6BRZ0_9FIRM Epoxyqueuosine reductase OS=uncultured Ruminococcus sp. OX=165186 GN=queG PE=4 SV=1
MKPQDEFGSSFETAKELPETSWKRKAIQAASSQAEPIRKSGGFQGSALPTPVELREKLEAFLLSLGVSDVGFSKPEAEGLEKTPYAVTLVVRLSNAIVDEIEGEPTLTYFSHYRAVNAFLDQCLLKAGLFLDRAGYQYITVAASQSMNQKGWNYQGRFSHKQAACAAGLGVIGKSSLFLHHRFGPRVRLATLFTDCPFPVENALPASLCGSCRKCVDSCPSGAILGPEWVPGMPRKLLFDPEKCSQHMKRQYQHIGRGAVCGICMRVCPRYERSVIRWE

SEQ ID NO: 81864 - protein, 354 aa, Sphingopyxis sp.
  misc_feature (1)..(354): tr|A0A1Y5Q5F2|A0A1Y5Q5F2_9SPHN Epoxyqueuosine reductase OS=uncultured Sphingopyxis sp. OX=310581 GN=queG PE=3 SV=1
MVAEALPPPDDRLEDRLEAVARAHGFAAFGIARADAAPETAERLNQWLAEGRHGDMIWMESRAEQRGSPQGLWPEVRSVIALGMSYAPALDPLALAAHRTRGRISVYAQGGDYHDVVKKALKGVARWLIGEAEDAEVKVFVDTAPVMEKPLSAAAGLGWQGKHTNLVSREHGSWLFLGAIYTTLDLTPSKAGRDTCGSCAACQDACPTDAFPAPYRLDARRCISYLTIEHNGPIPVALRRGIGNRIYGCDDCLAVCPWNKFADTAHRHRAFLPRAELAAPSLGDLLDLDDAAFREVFAGSPIKRIGRGRMVRNAAIAAGNSGDRGFVPVLERLAKDESPMVADAALWALDELAS

SEQ ID NO: 81865 - protein, 380 aa, Unknown
  misc_feature (1)..(380): tr|A0A3P3XUZ7|A0A3P3XUZ7_9SPIR Putative Iron-sulfur pro tein OS=uncultured spirochete OX=156406 GN=SPIRO4BDMA_8 0066 PE=4 SV=1
MTVEEVQGGPPVKLQGEAGARAARWLLFHVQEQGFFSYAILGKEEWETVLLERGFAEEEGILETARSDAAGAMLVVALRYAPDVEPEPAAGRAARGLPPLPLPGAGKPVAKVGRFARGNWYREVIDRLATSAKATATDMVAVGLPFFPPKRWHRFANSRFPEKALAVAAGLGATGRNGLVIAEASETGGQARGSAAGGGLPSGGVIRAYFHSSARSSAVLLGLMLLPFDLEQAIIPPRHSPQAMLSLCGNCRRCVDACPSRALHFAPEPASWRASGRVFDRHRCIQHYASISGPLPDFIEASWQNQLYGCDLCLEACPYFRPDPDAHVSSGHIGGLFDAKVIAGMEDTQLRALFRGSALDQRWIEPEALRRDATLAVKNC

SEQ ID NO: 81866 - protein, 393 aa, Unknown
  misc_feature (1)..(393): tr|A0A3P3XJN5|A0A3P3XJN5_9SPIR 4Fe-4S ferredoxin-type d omain-containing protein OS=uncultured spirochete OX=15 6406 GN=SPIROBIBN47_30012 PE=4 SV=1
MVLEGGVGRWYAEALLRSAASQHFFSFAILRKEEWVRVFRVQGVAEEEGGAHVDEGAPESGAQKSQNAPDSGSASQNSENLWARYQLDSAGAMLVVALRYAPDVEPESDEERAVRGLPPLPIAKEGRPAAAVGRFARANWYRETIARLADCVKSISDEARARGLPVFAPREWHRFSNSRFPEKALAVAAGLGTIGRNGLLIAQRTGNAEASDSGCAETSSWPLWSSAVVLGLMLLPFDIGKEAGTLHDEPIMPLALCGTCQRCIDACPTGALALAELPRYERARCIQNYTSGAGPLPEDIEAAWGNQLYGCDICLEACPYFKPNSEACTALGRIGGAFDAAFIAAMSEAELRAVFKGSALDQKWIAPEALRRNVAIVASLFIGKSSDVPSRLL

SEQ ID NO: 81867 - protein, 363 aa, Stenotrophomonas sp.
  misc_feature (1)..(363): tr|A0A1Y5Q6H2|A0A1Y5Q6H2_9GAMM Epoxyqueuosine reductase OS=uncultured Stenotrophomonas sp. OX=165438 GN=yjeS P E=3 SV=1
MLEAVSAADMAQLSLRIRQLAREAGFQRCGISNIELHEDEAHLADWLGKGLYGTMEWMARHGAMRARPHELLPGTVRVISVGLDYGPKEDAEAWATLNDAERAYVARYALGRDYHKLMRNRLQKLAERVAAEVGPFGHRVFVDSAPVLERALARNAGLGWIGKHTCLIDKDGGSWFFLGEIYVDLPLPVDAPATAHCGTCTRCIEVCPTAAIIAPYRLDARRCISYLTIEHDGAIPLEMRPLMGNRIYGCDDCQLVCPWNKFARRTDEPDFRARNNLDTATLPELFAWEEDEFLRRTEGSPLRRSGHERWLRNIAVALGNAAPSPAAREALESRIGHPSELVREHVAWGLEQHGGKPGIGNGE

SEQ ID NO: 81868 - protein, 376 aa, Thiohalocapsa sp.; identical to SEQ ID NO: 75698
  misc_feature (1)..(376): tr|V4J8F7|V4J8F7_9GAMM Epoxyqueuosine reductase OS=uncu ltured Thiohalocapsa sp. PB-PSB1 OX=1385625 GN=queG PE= 3 SV=1

SEQ ID NO: 81869 - protein, 357 aa, Undibacterium parvum
  misc_feature (1)..(357): tr|A0A3Q9BNV5|A0A3Q9BNV5_9BURK Epoxyqueuosine reductase OS=Undibacterium parvum OX=401471 GN=queG PE=3 SV=1
MTDFVQLAQELKLKGNELGFADLRITDVDLAHVEPGFQAWLEAGYHGEMAYMAAHGSKRWRPDELVPGTIRVISARMNYLPGSADADWRSAEQNRAADAAVISVYARGRDYHKVLRAKLQLLAEYIQERIGEFGYRVFTDSAPVMEVALAEKSGLGWKGKHTLLLNRDAGSMFFLGEILVDIPLPIDAPISNHCGQCSACIQVCPTQAILAPYQLDARRCISYLTIELQGAIPLELRSLIGNRVYGCDDCQLFCPWNKFAQRASLNDFEVRNGLDNASMISLFAWTEAEFMRKLEGSPIRRIGHERWLRNLAVGLGNAATSLPADPDILRALHSRKDHPSELVREHVEWALQQHEMN

SEQ ID NO: 81870 - protein, 360 aa, Undibacterium pigrum
  misc_feature (1)..(360): tr|A0A318J8Y7|A0A318J8Y7_9BURK Epoxyqueuosine reductase OS=Undibacterium pigrum OX=401470 GN=queG PE=3 SV=1
MSLDSTALADLAVQIRLWGKELGFAELRIGDVDLSHIEGSFQAWLDAGYHGEMAYMASHGSKRTRPAELVPGTVRVISARMNYLPKTESWRAEEQGQAADKAVISLYARGRDYHKVLRTRLQQLAERIEKAIGPFGYRVFTDSAPVMEVALAAKAGLGWRGKHSLLLSREAGSMFFLGEILIDIPLPVDEPVGQHCGQCSACMDVCPTKAIVAPYTVDARLCVSYLTIELHGSIPVELRPLIGNRVYGCDDCQLVCPWNKFAQAAAVDDFSVRNGLDNARMVHLFAWTEEQFLRMLEGSPIRRIGHERWLRNIAVGLGNAATAMRGDAEIVAALQSRLAHPSEMVREHVVWALGQHGVAV

SEQ ID NO: 81871 - protein, 359 aa, Undibacterium sp.
  misc_feature (1)..(359): tr|A0A431TAT6|A0A431TAT6_9BURK Epoxyqueuosine reductase OS=Undibacterium sp. S11R28 OX=2495591 GN=queG PE=3 SV =1
MSDYLQLAQEIKQWGRDAGFADVRITDVDLSHVEAGFQAWLDAGYHGEMAYMAAHGSKRSRPDELVPGTIRVISARMNYLPESDDADWRTKERQHAADTAVISVYARGRDYHKVIRNRLQQLAERIQERIGEFGYRVFTDSAPVMEVALAEKSGMGWRGKHTLLLNRDAGSMFFLGEILVDIPLPVDQAISNHCGQCRSCIDVCPTQAILAPYQLDARRCISYLTIELHGSIPVELRPLIGNRVYGCDDCQLYCPWNKFAQRASVNDFEVRNGLDSASMSSLFAWSEAEFMRKLEGSPIRRIGHERWLRNLAVGMGNAATAAKGMLGDAMILAALQSRLEHPSEIVREHVVWALAQHQA

SEQ ID NO: 81872 - protein, 308 aa, Unknown
  misc_feature (1)..(308): tr|A6EPZ9|A6EPZ9_9BACT Epoxyqueuosine reductase OS=unid entified eubacterium SCB49 OX=50743 GN=queG PE=3 SV=1
MLQKSKHTSLIKTEAKRLGFLSCGISKAGFLEEEAPRLEKWLTKNMHGEMSYMENHFDKRLDPTKLVEGSKSVISLLLNYYPDQQQNEDAFKISKYAYGTDYHFVIKDKLKELLHTITTEIGAVHGRAFVDSAPVLDKAWAAKSGLGWIGKHSNLLTKQTGSFYFIAELIVDLDLEYDTPVTDHCGSCTACIDACPTQAIVDPYVVDGSKCISYATIELKNEIPAHFSNKMDDWMFGCDVCQDVCPWNRFSKSHKEPLFNPNPKLLSMDKKDWEEITQAVFSEIFKKSPVKRTKFTGLKRNIDFLKKG

SEQ ID NO: 81873 - protein, 378 aa, Ureibacillus terrenus
  misc_feature (1)..(378): tr|A0A540V203|A0A540V203_9BACL Epoxyqueuosine reductase OS=Ureibacillus terrenus OX=118246 GN=queG PE=3 SV=1
MKIEQLKNELKEYAKSIGVDKIGFTSASPFDEMKNRLKRQQELNFQSGFEEKDIEKRTNPKGLLPEGESIIAIALAYPSKMKDPPSGKKGERRGIFARASWGLDYHAAVRERLDLIEKWLRERVPDVVVKSMVDTGELVDRAVAERAGIGWSGKNCSIITPEFGSYVYLGEMITNIPFPPDQPIENACGDCRLCLDACPTGALVDAGQLNAKRCIAYLTQTKEFLPDEFRTKIGNRLYGCDTCQIVCPKNKGKTNWIHGEFMPDPELAKPLLEPLLKLSNKEFKRKFGSMAGTWRGKKPIQRNAILALAHFKEQSAVPILIELLKEDERPVIRGTCAWALGKIGGGKAKEALHEALHHEKDEEVIREIQKGLALLEES

SEQ ID NO: 81874 - protein, 377 aa, Ureibacillus thermophilus
  misc_feature (1)..(377): tr|A0A4P6UU29|A0A4P6UU29_9BACL tRNA epoxyqueuosine(34) reductase QueG OS=Ureibacillus thermophilus OX=367743 G N=queG PE=4 SV=1
MLEQLKQDLIEYAKSIGVDKIRFTTASPFIEMKNRLKRQQELNYQSGFEEEDIEKRTEPKQLLPEGESIIAIALAYPSKMKNPPTGKRGERRGIFARASWGLDYHVAVRERLDLIENWLRERVSNLSVKSMVDTGELVDRAVAERAGIGWSGKNCSIITPEFGSYVYLGEMITNIPFPPDEPIENECGDCRLCLDACPTGALVDAGRLNAKRCIAFLTQTKDFLPDEFRGKIGNRIYGCDTCQTVCPKNKGKANWIHDEFMPDPELAKPLLTPLLKLSNKEFKKKFGTMAGSWRGKKPIQRNAILALAHFKEQSAVPDLIELLKEDERPVIRGTSAWALGVIGGEKAKEALLEALHYEKDEDVIIEIKKGLELLGKA

SEQ ID NO: 81875 - protein, 382 aa, Vagococcus acidifermentans
  misc_feature (1)..(382): tr|A0A430ASW6|A0A430ASW6_9ENTE tRNA epoxyqueuosine(34) reductase QueG OS=Vagococcus acidifermentans OX=564710 GN=CBF27_08540 PE=4 SV=1
MFTQLKEKIIAESKKLGIDKIGFASADSFEALKDSLVEQKKSGHTSGFEHPVIDERIYPDKIFDQPRSIIAIALAYPTRLPQPPQKIRGEKRGRFARASWGIDYHDILNERMARLIDFIKRESPETDGLTFKPMVDTGELIDVAVAQRAGLGFIGKNGLLITEEFGSYVYLGEIITNIPFEPDTPITSQCGSCTKCIDLCPTSCLLGDGRMNAQRCLSYQTQTKGMMPKEFRPKIRTIIYGCDICQEVCPYNKGKNFHFHREMTPEPDVVFPLLKPLLTISNKEFKQTYGHLAGSWRGKKPIQRNAIIALANARDTTAVPQLLKLIEDDPRPVIRGTAVWAVGELTRSANQHLLDFLIDRQSKETAEEVLQELTEVIAKLTE

SEQ ID NO: 81876 - protein, 382 aa, Vagococcus carniphilus
  misc_feature (1)..(382): tr|A0A430B9L3|A0A430B9L3_9ENTE tRNA epoxyqueuosine(34) reductase QueG OS=Vagococcus carniphilus OX=218144 GN=C BF28_01705 PE=4 SV=1
MYHTLKKEIIKASQEIGIDKIGFTTAEPFDHLKESLYEQKENLHTTGFEHPNIEERIYPDLIFQEPKSIISIALAYPSRLSQRPEKIRGEKRGKFAKASWGIDYHDILRDRMDKLIDFIKEATDNNPDISFKPMVDTGELIDVAVAQRAGIGFIGKNGLLITEEFGSYVYLGEIVTNIPFEADNPKVNQCGECTKCVDYCPTSALLGDGRMNGKRCLSYQTQTKGMMPEEFRPKIRTVIYGCDICQEVCPFNQGQNNHFHQEMEIDPEIIQPLLKPMLTISNKEFKQTFGILAGSWRGKKPLQRNAIIALANARDKTAVPNLLRCLEEDPRPVIRGTAAWALSILAKGNEAVLSFLEESLVKETDEEATTEIEKAITSLKKG

SEQ ID NO: 81877 - protein, 388 aa, Vagococcus elongatus
  misc_feature (1)..(388): tr|A0A430B4J1|A0A430B4J1_9ENTE tRNA epoxyqueuosine(34) reductase QueG OS=Vagococcus elongatus OX=180344 GN=CBF 29_02480 PE=4 SV=1
MNQALKEKIIAESKKIGIDKIGFTDGAPFSHLEESLREQKDAGHTTGFEHPDFEERIYPQKIFEDPRSIIAIALAYPTKMTQKAEMIRGERRGSFARASWGTDYHIILRERMNRLISFIEKEVPHELGPKFKPIVDTGELIDVAVAQRAGLGFIGKNGLLITEEFGSYVYLGEIITNIPFEKDVPMESQCGECTKCIDLCPTSALLGDGRMNGQRCLSYQTQTRGMMPEEYREKIRTVIYGCDICQQVCPFNQGKDTHYHKEMEPEPEIVTPLLRPLLTISNKEFKDKFGHLAGSWRGKKPIQRNAIIALGNARQKNALPDLLMVAEKDPRADIRATAFWSIGKIMGSRLDESMKASLVRLSAHEKDEVVRSEIKKILASFSEQEENN

SEQ ID NO: 81878 - protein, 389 aa, Vagococcus entomophilus
  misc_feature (1)..(389): tr|A0A430AIA0|A0A430AIA0_9ENTE tRNA epoxyqueuosine(34) reductase QueG OS=Vagococcus entomophilus OX=1160095 GN =CBF30_00285 PE=4 SV=1
MYAELKQQIIKKSQEIGIDKIGFTTAAPFKHLEASLTEQKEQGHTTGFEHPNIQERIYPDKIFDQPRSIISIALAYPTKLASQPKRIKGEKRGSFARVSWGTDYHDILRERLDTLKNFITDISQQEVDFKPMVDTGELIDVAVAQRAGVGFIGKNGLLITEEFGSYVYLGEMITNIPFEPDQPIENKCGSCTRCIDLCPTQALLGDGRMNGKKCLSYQTQTKELMPKEYRKKIRTIIYGCDICQEVCPFNKGKDFHFHPEMEPDPEIVKPLLKPLLTISNKEFKQTYGHLSGSWRGKKPIQRNAILALGNSRDKSAIPNLLKCLAEDVRPVIRGSAAWAIGEIVNGNNEELILFFKKQLAQEKEEEVRLEIQAVLQNWQKEREKNDEIE

SEQ ID NO: 81879 - protein, 382 aa, Vagococcus fessus
  misc_feature (1)..(382): tr|A0A430A5I3|A0A430A5I3_9ENTE tRNA epoxyqueuosine(34) reductase QueG OS=Vagococcus fessus OX=120370 GN=CBF31_ 09940 PE=4 SV=1
MYTQLKNDIIQASKDIGIDKIGFASAEPFTHLKESLEEQKAAGHTTGFEHPNIEERLNPDLIFDKPRSIISIALAYPTKLTKKPTSVLGERRGSFARASWGMDYHDILKDRLTKLIQTIQEKAEDTDEITFKPMVDTGELIDVAVAQRAGLGFIGKNGLLITEEFGSYVYLGEIITNIPFEPDTPIESKCGDCTKCIDLCPTTALLGDGRMNGKKCLSYQTQTKDMMPLEYRSKIRTIIYGCDICQQVCPYNKGKDFHLHDEMEPDPDVVNPLLVPLLTISNREFKETYGPLAGSWRGKKPIQRNAIIALANARQKSALPHLLELIEKDPRPVIRGTAVWAAGELAPKDPSELIAFLTRLQENETEQEVLTELNDVLEKLNK

SEQ ID NO: 81880 - protein, 381 aa, Vagococcus fluvialis
  misc_feature (1)..(381): tr|A0A369AUK7|A0A369AUK7_9ENTE Epoxyqueuosine reductase OS=Vagococcus fluvialis OX=2738 GN=CBF32_08840 PE=4 SV =1
MYETLKQQIITASKDIGIDKIGFTTAEPFDHLKESLLEQKENNHTTGFEHQNIDERLYPELIFDKPKSIISIALAYPSRMNTRPEKIRGEKRGKFARASWGVDYHNILKDRMEKLIEAIKELSLDNPDLTFKPMVDTGELIDVVVAQRAGLGFIGKNGLLITEEFGSYVYLGEIITNIPFEADTPIENQCGTCTKCIDQCPTSALLGDGRMNGQLCLSYQTQTKGMMPEEFRPKIRTIIYGCDICQEVCPFNKGKNSHFHEEMEPDPEVVQPLLKPLLTISNKEFKEKFGYLAGSWRGKKPIQRNAIIALANARDKTSVPNILRCLDEDPRPVIRGTAAWALGILGKGNEEVLLFLEEHLEKESDEEVITELEKSIINIKE

SEQ ID NO: 81881 - protein, 382 aa, Vagococcus fluvialis
  misc_feature (1)..(382): tr|A0A1X6WMK0|A0A1X6WMK0_9ENTE Epoxyqueuosine (OQ) redu ctase QueG OS=Vagococcus fluvialis bH819 OX=1255619 GN= FM121_05090 PE=4 SV=1
MYENLKEQIIAGSKKIGIDKIGFTSADPFDHLKPSLVEQKENNHTTGFEHPNIDERVYPELIFDQPKSIISIALAYPSRMTSRPEKIRGEKRGKFARASWGTDYHDVLKDRMAKLINYIQDISIDHPEITFKPMVDTGELIDVAVAQRAGLGFIGKNGLLITEEFGSYVYLGEIITNIPFEPDNPKENQCGSCTKCIDYCPTSALLGDGRMNATRCLSYQTQTKGMMPEEFRPKIRTIIYGCDICQEVCPFNKGKDSHYHKEMEPDPEIVQPLLKPLLTISNKEFKTKFGILAGSWRGKKPIQRNAIIALANSRDKTAVPNLLRCIEEDPRPVIRGTAAWALGILGTGNEEIKHFLIEFLDKEDDEESKKEFINAIKLLDNQ

SEQ ID NO: 81882 - protein, 387 aa, Vagococcus lutrae
  misc_feature (1)..(387): tr|A0A429ZED6|A0A429ZED6_9ENTE Epoxyqueuosine reductase OS=Vagococcus lutrae OX=81947 GN=queG PE=3 SV=1
MTATLKKQIIAESKKIGIDKIGFTDASPFAHLEESLHEQKAAGHTTGFEHPVIEERLYPDKIFDKPASIISIALAYPTKIKEKAPRVRGERRGSFARASWGTDYHDILRDRMAKLIAFIEEVAPNSAELSFKPMVDTGELIDVAVAQRAGLGFIGKNGLLITEEFGSYVYLGEIITNIPFEPDTPIENQCGSCTKCIDFCPTSALLGDGRMNGQRCLSYQTQTRGMMPEEYREKIRTVIYGCDICQQVCPFNKGKDFHFHEEMEPDPEVVTPLLTPLLTISNREFKEQFGYLAGSWRGKKPIQRNAIIALGNAKQTSALPNLLACAEEDPRPEIRGTAYWSIGKIGSPSNDALVSFLLERFEKEENEEARLEITKVLNNWKIDDKKR

SEQ ID NO: 81883 - protein, 387 aa, Vagococcus lutrae
  misc_feature (1)..(387): tr|V6Q291|V6Q291_9ENTE Epoxyqueuosine reductase OS=Vago coccus lutrae LBD1 OX=1408226 GN=queG PE=3 SV=1
MTATLKKQIIAESKKIGIDKIGFTDASPFAHLEESLHEQKAAGHTTGFEHPVIEERLYPDKIFDKPTSIISIALAYPTKIKEKAPRVRGERRGSFARASWGTDYHDILRDRMAKLIAFIEEVAPNSAKLSFKPMVDTGELIDVAVAQRAGLGFIGKNGLLITEEFGSYVYLGEIITNIPFEPDTPIENQCGSCTKCIDFCPTSALLGDGRMNGQRCLSYQTQTRGMMPEEYREKIRTVIYGCDICQQVCPFNKGKDFHFHEEMEPDPEVVTPLLTPLLTISNREFKEQFGYLAGSWRGKKPIQRNAIIALGNAKQTSALPNLLACAEEDPRPEIRGTAYWSIGKIGSPSNDALVSFLLERFEKEENEEARIEITKVLNNWKIDDKKR

SEQ ID NO: 81884 - protein, 382 aa, Vagococcus martis
  misc_feature (1)..(382): tr|A0A1V4DFS1|A0A1V4DFS1_9ENTE Epoxyqueuosine reductase OS=Vagococcus martis OX=1768210 GN=queG PE=3 SV=1
MDTELLKQKIIEASKDIGIDKIGFTTAEPFDHLKTSLIEQKENNHTTGFEHGNIDERLYPDLIFNQPQSIISIALAYPTRMNERLKSVRGEKRGKFARASWGTDYHHILKDRLDKLITFIKEQAPKELELDFKPMVDTGELIDVVVAQRAGLGFIGKNGLLITEEFGSYVYLGEIITNIPFEPDTPMENQCGECTKCIDQCPTSALLGDGRMNAQKCLSYQTQTKGFMPEEYRPKIRSIIYGCDICQEVCPFNKGKNFHFHEEMEPDPEIVTPLLKPLLTISNREFKERFGYLAGSWRGKKPIQRNAIIALGNVRDKTSIPHLLSCIEQDPRPVIRGTAAWSLSKIDPTNPAIYDFLVEYLEKETDEEAKEEMRNAIDRMRI

SEQ ID NO: 81885 - protein, 391 aa, Vagococcus penaei
  misc_feature (1)..(391): tr|A0A1Q2D738|A0A1Q2D738_9ENTE Epoxyqueuosine reductase OS=Vagococcus penaei OX=633807 GN=queG PE=3 SV=1
MYHVLKEKIIAASQDIGIDKIGFTTADPFDHLKDSLEEQKANGHTTGFEHPIIDERLYPELIFDQPQSIISIALAYPTRAKNRPQAIRGEKRGRFARASWGTDYHHILRDRLDKLMAFIREACDNDESITFKPMVDTGELIDVAVAQRAGLGFIGKNGLLITEEFGSYVYLGEIITNIPFEPDTPIANQCGDCTKCIDFCPTSALLGDGRMNATKCLSYQTQTKGFMPKEYRPKIRTIIYGCDICQEVCPFNKGKDFHFHPEMEPDPDITQPLLKPLLTISNKEFKQRFGTLAGSWRGKKPIQRNAIIALANARDKTCLPNLLQCIEQDPRPVIRGTAAWALSQIAPTNQEVKNFLEDYLAKETDDDAQIEFLDAIAHMNEQIILTKQNKS

SEQ ID NO: 81886 - protein, 385 aa, Vagococcus salmoninarum
  misc_feature (1)..(385): tr|A0A429ZTN1|A0A429ZTN1_9ENTE Epoxyqueuosine reductase OS=Vagococcus salmoninarum OX=2739 GN=queG PE=3 SV=1
MYQELKQKIINASQDLGIDKIGFTDATPFDHLKASLIEQKAAGHTTGFEHQEIDERLYPELIFDQPQSIISIALAYPTKMKTKAPSIKGERRGSFARASWGIDYHDILKERLEKLMAFIQEACENDESIRFKPMVDTGELIDVAVAQRAGLGFIGKNGLLITEEFGSYVYLGEVITNIPFEPDTPIENQCGSCTKCIDLCPTEALLGDGRMNGQKCLSYQTQTKGYMPTEYRPKIRTIIYGCDICQQVCPFNKGKDSHFHPEMEPEPEVVTPLLKPLLTISNREFKETFGPLAGSWRGKKPIQRNAIIALANAKEKSAIPNLLALVENDPRPVIRGTAIWAISILATPGNIGIIDFISEQLTTETDPETIVEIEEALLRLKIQER

SEQ ID NO: 81887 - protein, 387 aa, Vagococcus sp.
  misc_feature (1)..(387): tr|A0A4S3B5Q3|A0A4S3B5Q3_9ENTE tRNA epoxyqueuosine(34) reductase QueG OS=Vagococcus sp. 2B-2 OX=2508885 GN=que G PE=4 SV=1
MNSILKDKIIHASQDLGIDKIGFTTAAPFDHLKQSLEEQKVNEHTTGFEHPIIDERLYPDQIFNQPQSIISIALAYPSRIKTRPKSIRGEKRGKFARASWGTDYHHILEDRLQKLITFIKEEADQDQTLTFKPMVDTGELIDVAVAQRAGLGFIGKNGLLITEEFGSYVYLGEIITNIPFEPDTPIENKCGECTKCIDLCPTSALLGDGRMNARRCLSYQTQTKGYMPEEFRPKIRTIIYGCDICQEVCPYNKGKDSHFHEEMEPDPEVVMPLLKPLLTISNKEFKTKFGYLAGSWRGKKPIQRNAIIALANARDKTSIPNLLRCIEEDPRPMIRGTSAWALSMIDPNNEEILAFLKSVLTQETDEETQHELLTAIQKMEKTIKGES

SEQ ID NO: 81888 - protein, 390 aa, Vagococcus sp.
  misc_feature (1)..(390): tr|A0A429ZV74|A0A429ZV74_9ENTE Epoxyqueuosine reductase OS=Vagococcus sp. SS1995 OX=1977869 GN=queG PE=3 SV=1
MYQTLKQQIIEASKDIGIDKIGFTTADPFDHLKASLEEQKAKGHTTGFEHPMIDERLYPELIFDQPKSIISIALAYPTRAKQRPKSIRGEKRGRFARASWGIDYHHILRDRLNKLIDFINTTCETDASFTFKPMVDTGELIDVAVAQRAGLGFIGKNGLLITEEFGSFVYLGEIITNIPFEPDIPIENQCGDCTKCIDFCPTSALLGDGRMNAMRCLSYQTQTKGFMPKEFRPKIRTIIYGCDICQEVCPYNKGKNFHFHEEMEPDPETTQPLLKPILTISNKEFKQRFGYLAGSWRGKKPIQRNAIIALANARDKTAVPNLLQCIDHDPRPVIRGTAAWALSMIAPTNTEIRSFLEDFLNKEEDPEARKETEEAIAYMIETEKKQKEKD

SEQ ID NO: 81889 - protein, 387 aa, Vagococcus teuberi
  misc_feature (1)..(387): tr|A0A1J0A7E5|A0A1J0A7E5_9ENTE Epoxyqueuosine reductase OS=Vagococcus teuberi OX=519472 GN=queG PE=3 SV=1
MEVYLVDTELLKQKIIEASKDIGIDKIGFTTAEPFDHLRTSLIEQKENNHTTGFEHGNIDERLYPDLIFNQPQSIISIALAYPTRMNERLKSVRGEKRGKFARASWGTDYHHILKDRLDKLITFIKEETPKELELDFKPMVDTGELIDVVVAQRAGLGFIGKNGLLITEEFGSYVYLGEIITNIPFEPDTPMENQCGECTKCIDQCPTSALLGDGRMNAQKCLSYQTQTKGFMPEEYRPKIRSIIYGCDICQEVCPFNKGKNFHFHEEMEPDPEVVTPLLKPLLTISNREFKERFGYLAGSWRGKKPIQRNAIIALGNVRDKTSIPHLLSCIEQDPRPVIRGTAAWSLSKIDPTNPAIYDFLVEYHEKETDEEAKEEMRNAIDRMRI

SEQ ID NO: 81890 - protein, 292 aa, Variibacter gotjawalensis
  misc_feature (1)..(292): tr|A0A0S3PVG8|A0A0S3PVG8_9BRAD Epoxyqueuosine reductase OS=Variibacter gotjawalensis OX=1333996 GN=queG PE=4 S V=1
MTDPRRGNPRALWSDVQRVIMLGMNYGPDRDPRETLLAKERAAISVYAQGDDYHEIIKPKLKSIARWLIANAGGDVKVFVDTAALMEKPLAEAAGLGWQGKHTNLVSRVRGSWLFLGAIMTTLELPEDAADIDHCGSCRACLDACPTEAFPAPYRLDARRCISYLTIEHKGPIPLELRPLMGNRIYGCDDCLAACPWNKFAVAANEMKLSAREELTAPKLADLATLDDTAFRALFRKSPVKRIGRDRFIRNVMIAIGNSGDASLAASAQARLNDDSELVRDAARWALDRLAA

SEQ ID NO: 81891 - protein, 350 aa, Variovorax boronicumulans
  misc_feature (1)..(350): tr|A0A286SFI6|A0A286SFI6_9BURK Epoxyqueuosine reductase OS=Variovorax boronicumulans OX=436515 GN=queG PE=3 SV =1
MQALARELGFSQIGIAGVDLSSAEDGLMQWLAHGFHGEMQYMATHGTRRARPAELVPGTVSVITARMDYLPRDTDAEWQAIEFDRLRRPGEAIVSLYARGRDYHKVLRNRLAKLAEKIAEEVGPFGHRAFTDSAPVLEAELASRSGQGWRGKHTLVLDRDAGSMFFLGEIYVDMALPPSEPVSAHCGSCSACIDVCPTRAIVAPQRLDARRCISYLTIEHAGAIPVELRPLMANRIYGCDDCQLICPWNKFAKKSTLPDFDAREGLTGRTLAELFAWSEEDFLRRTEGSPIRRIGHERWLRNIAVALGNAVRSGEGGAKEALATRAGHPSELVREHVAWGLAQQPEDQPI

SEQ ID NO: 81892 - protein, 350 aa, Variovorax boronicumulans
  misc_feature (1)..(350): tr|A0A1E7U8K8|A0A1E7U8K8_9BURK Epoxyqueuosine reductase OS=Variovorax boronicumulans OX=436515 GN=queG PE=3 SV =1
MQALARELGFSQIGIAGVDLSSAEDGLMQWLAHGFHGEMQYMATHGTRRARPAELVPGTVSVITARMDYLPRDTDAEWQAIEFDRLRRPGEAIVSLYARGRDYHKVLRNRLAKLAEKIAEEVGPFGHRAFTDSAPVLEAELASRSGQGWRGKHTLVLDRDAGSMFFLGEIYVDMALPPSEPVSAHCGSCSACIDVCPTRAIVAPQRLDARRCISYLTIEHAGAIPVELRPLMANRIYGCDDCQLICPWNKFAKKSTLPDFDAREGLTGRTLAELFAWSEEDFLRRTEGSPIRRIGHERWLRNIAVALGNAVRSGEGGAKEALATRAEHPSELVREHVAWGLAQQPEDQPT

SEQ ID NO: 81893 - protein, 347 aa, Variovorax gossypii
  misc_feature (1)..(347): tr|A0A431TUF2|A0A431TUF2_9BURK Epoxyqueuosine reductase OS=Variovorax gossypii OX=1679495 GN=queG PE=3 SV=1
MQALARELGFSQIGIAGVDLSSAEAGLMQWLAHGFHGEMQYMETHGTRRARPAELVPGTVSVITARMDYLPRSTSPEWQTVEFDRLKRPGEAIVSVYARGRDYHKVLRNRLAKLAERIAEEVGPFGHRAFTDSAPVLEAELASRSGQGWRGKHTLVLDRDAGSMFFLGEIYVDMELPPSEPVTAHCGSCSACIDVCPTQAIVAPKRLDARRCISYLTIEHGGPIPVELRPLMANRIYGCDDCQLICPWNKFAKKSTLPDFDAREELTGRTLADLFAWTEQDFLRRTEGSPIRRIGHERWLRNIAVALGNAVRAGEGGAKEALATRAEHPSELVREHVAWGLAQQATH

SEQ ID NO: 81894 - protein, 348 aa, Variovorax guangxiensis
  misc_feature (1)..(348): tr|A0A502E3Q2|A0A502E3Q2_9BURK Epoxyqueuosine reductase OS=Variovorax guangxiensis OX=1775474 GN=queG PE=3 SV= 1
MQAMAREFGFSQIGIAGIDLSSAEDGLMQWLAQGFHGEMHYMATHGTRRARPAELVPGTVSVITARMDYLPRKTPADWQAVEFARLERPSEAIVSVYARGRDYHKVLRNRLAKLAERIAEEVGPFGHRAFTDSAPVMEAELASRSGQGWRGKHTLVLDRDAGSMFFLGEIYVDMALPESAPVTPHCGSCSACIDICPTQAIVAPQRLDARRCISYLTIEHPGPIPVELRPLIGNRIYGCDDCQLVCPWNKFAKKSALPDFDARDGLTGRQLAELFAWTEDEFLRHTEGSPIRRIGHARWLRNIAVALGNAVRAGQPGSREALAARIDDPDAMVREHVAWALSSEASVG

SEQ ID NO: 81895 - protein, 346 aa, Variovorax guangxiensis
  misc_feature (1)..(346): tr|A0A433MCY3|A0A433MCY3_9BURK Epoxyqueuosine reductase OS=Variovorax guangxiensis OX=1775474 GN=queG PE=3 SV= 1
MQALARELGFSQIGIAGVDLSSAEAGLMQWLAHGFHGEMQYMETHGTRRARPAELVPGTVSVITARMDYLPRSTEPEWQAIEFDRLKRPGEAIVSVYARGRDYHKVLRNRLARLAERIAEEVGPFGHRAFTDSAPVLEAELASRSGQGWRGKHTLVLDRDAGSMFFLGEIYVDMELPPSEPVTAHCGSCSACIDVCPTQAIVAPKRLDARRCISYLTIEHGGSIPVELRPLMANRIYGCDDCQLICPWNKFAKKSTLPDFDAREELTSRTLANLFAWTEQDFLRRTEGSPIRRIGHERWLRNIAVALGNAARVGEGGAKEALATRAEHPSELVREHVAWGLAQRAD

SEQ ID NO: 81896 - protein, 346 aa, Variovorax paradoxus
  misc_feature (1)..(346): tr|A0A0D0LUQ1|A0A0D0LUQ1_VARPD Epoxyqueuosine reductase OS=Variovorax paradoxus OX=34073 GN=queG PE=3 SV=1
MQALARELGFSQIGIAGVDLSSAEDGLMQWLAHGFHGEMQYMATHGTRRARPAELVPGTVSVITARMDYLPRDTPPEWQAVEFDRLARPGEAIVSVYARGRDYHKVLRNRLAKLAEKIAEEVGPFGHRAFTDSAPVLEAELASRSGQGWRGKHTLVLDRDAGSMFFLGEIYVDMALPESEPVTAHCGSCSACIDVCPTQAIVAPRRLDARRCISYLTIEHGGPIPEELRPLMANRIYGCDDCQLICPWNKFAKKSALPDFDAREGLTGRTLAELFAWTEDEFLRRTEGSPIRRIGHERWLRNIAVALGNAVRSGEVGAKEALATRAEHPSELVREHVAWGSMQQST

SEQ ID NO: 81897 - protein, 321 aa, Variovorax paradoxus
  misc_feature (1)..(321): tr|T1XCL3|T1XCL3_VARPD Putative iron-sulfur cluster bin ding protein OS=Variovorax paradoxus B4 OX=1246301 GN=V APA_1c35680 PE=4 SV=1
MQWLAHGFHGEMKYMATHGTRRARPAELVPGTVSVITARMDYLPRDTPLDDWQAVEFDRLARPGEAIVSVYARGRDYHRVLRARLARLAERIAEEVGPFGHRAFTDSAPVLEAELASRSGQGWRGKHTLVLDRSAGSMFFLGEIYVDMALPESEPVTAHCGSCSACIDVCPTKAIVAPYRLDARRCISYLTIEHGGPIPLELRPLMGNRIYGCDDCQLICPWNKFAKKSALPDFDAREGLTGQALASLFAWSEEDFLRFTQGSPIRRIGHERWLRNIAVALGNALRAGESGAAEALATRASDPSELVREHVAWALAQRPER

SEQ ID NO: 81898 - protein, 349 aa, Variovorax sp.
  misc_feature (1)..(349): tr|A0A520H263|A0A520H263_9BURK Epoxyqueuosine reductase OS=Variovorax sp. OX=1871043 GN=queG PE=3 SV=1
MQALAREFGFSQIGIAGVDLSSAEPGLMQWLARGFHGEMHYMEAHGVRRARPAELVPGTVSVITARMDYLPRDTPPGWQAAELSRLDRPGEAIVSVYARGRDYHKVLRSRLAKLAERIAQEVGPFGHRAFTDSAPVLEAELASRSGQGWRGKHTLVLDRDAGSMFFLGEIYVDLALPPSEPVTAHCGSCSACIDVCPTQAIVAPQRLDARRCISYLTIEHAGAIPVELRPLIGNRIYGCDDCQLICPWNKFARRSALPDFDAREGLTGRQLGELFAWTEADFLRLTEGSPIRRIGHERWLRNVAVALGNAAHAGAPGAREALATRASHPSALVREHVAWALEAAPAPAG

SEQ ID NO: 81899 - protein, 357 aa, Variovorax sp.
  misc_feature (1)..(357): tr|A0A286B4A8|A0A286B4A8_9BURK Epoxyqueuosine reductase OS=Variovorax sp. YR752 OX=1884383 GN=queG PE=3 SV=1
MIVSHPLVVRIQALARELGFSQIGIAGVDLSSAEAGLMQWLAHGFHGEMQYMETHGTRRARPAELVPGTVSVITARMDYLPRSTQPEWQAIEFDRLTRPGEAIVSVYARGRDYHKVLRNRLAKLAERIAEEVGPFGHRAFTDSAPVLEAELASRSGQGWRGKHTLVLDRDAGSMFFLGEIYVDMELPPSEPVTAHCGSCSACIDICPTQAIIAPQRLDARRCISYLTIEHGGPIPLELRPLMGNRIYGCDDCQLICPWNKFAKKSELPDFDAREGLTGRTLAELFAWTEEDFLRRTEGSPIRRIGHERWLRNIAVALGNAARAGEGDAQEALATRAEHPSELVREHVAWGLAQRATS

SEQ ID NO: 81900 - protein, 351 aa, Varunaivibrio sulfuroxidans
  misc_feature (1)..(351): tr|A0A4R3J782|A0A4R3J782_9PROT Epoxyqueuosine reductase OS=Varunaivibrio sulfuroxidans OX=1773489 GN=queG PE=3 SV=1
MTALSPADKEHLRQEAHAIGFDAVGFAAAGDDGAPARALASYVAQGLHGDMAWMADTQERRKSPTALWPEVQSVIALGVNYSPGRDPLAVHSHKDRGAISVYAQGRDYHDVVKKRLKRLARWIVAAHPSALKVFVDTAPVMEKPIAQRAGIGWRGRHTNIVSREFGSWLFLGEIFTTLTIPPDAPHTDHCGQCRLCIDACPTQALNVEGKIDPRRCVSYLTIETKTSVPEALRGDLGNRIYGCDDCLAVCPWNKFAKPAREDAFHPRVELTAPRLADLIQLDDAQFRALFAGSPVKRSKRGRFVRNVLYAIANGDGRSHDLLARVRALCADPDPQVGEAARWALAHIEKFP

SEQ ID NO: 81901 - protein, 315 aa, Veillonella atypica
  misc_feature (1)..(315): tr|A0A133S1U7|A0A133S1U7_9FIRM Uncharacterized protein OS=Veillonella atypica OX=39777 GN=HMPREF3233_01653 PE= 4 SV=1
MNTLLAQEIHDKALACGYDSCGIVPLDALDFYKDRLTKRLEDVPESEDVYAHSKDFLALKDNYPWAQSIVVCTEYFGNYKFPVSLQKRYAKGLLLSLANIPDGVEAKRRRSFETWLHSKNIQCIGGETARPAGVVPLRPASVAAGLGIYRKNNFFYGPKGSNYELVAYLIDKSCEYIQHLEIPPCPDTCDLCQQGCKTKSLSAPFTMNPLTCVSFINTFGDGNLPEGVTEDMLEEWIIGCDNCQDSCPFNKNHDWSVGKDYPGLDELEPMLQPEFILKASDEEIIEQMIPKFCFHLTNEQIPLLRKSAKRVIERK

SEQ ID NO: 81902 - protein, 318 aa, Veillonella atypica
  misc_feature (1)..(318): tr|E1LED4|E1LED4_9FIRM Uncharacterized protein OS=Veill onella atypica ACS-134-V-Col7a OX=866778 GN=HMPREF9684_ 0092 PE=4 SV=1
MNTLLAQEIHDKALACGYDSCGIVPLDALDFYKDRLTKRLEDVPESEDVYAHSKAFLTLKENYPWAQSIVVCTEYFGNYKFPVSLQKRYAKGLLLSLSNIPDGVEFKRRQSFETWLQSQNIQYIGGETAKPAGVVPLRPASVAAGLGIYRKNNFFYGPKGSNYELVAYLIDKSCEYIHDTDIPPCPDSCNLCQQGCKTKSLSAPFTMNPLTCVSFINTFGDGNMPEGVTEDMLEEWIIGCDNCQDSCPFNKNHDWSIGKDYPGLDELEPMLQPEFILKASDEEIIEQMIPKFCFHLRNEQIPLLRQSARRAIEYKKIR

SEQ ID NO: 81903 - protein, 304 aa, Veillonella criceti
  misc_feature (1)..(304): tr|A0A380NLG6|A0A380NLG6_9FIRM Epoxyqueuosine reductase OS=Veillonella criceti OX=103891 GN=queG PE=4 SV=1
MITRNIINNIAKQLNIPAIGIAPWPLPKNASQFIDTNKPCPFINGTLEERLTGNTQLINPRSAIVCLFPYYIRPEDMPANQKINLPRYAWGPDYHLVIPNYLTRFGNALQALDKTVEFEIHCDTSPLADRYMAYLAGLGVFGKNRALIHPTWGSYTSIGTLLTSCEIPADTPMEGTCLNCHSCIKACPGQSLGTPVFGYDTCKSYLTQKKGHLTDSEIATLQRSSLIWGCDICQEVCPHNRNVPTTPIPEFQQIDPYVNPIDLESLTNKTFKAAFGHRAFAWRGKATLLRNAQIIDKDYSSKDE

SEQ ID NO: 81904 - protein, 315 aa, Veillonella denticariosi
  misc_feature (1)..(315): tr|A0A2S7Z8R9|A0A2S7Z8R9_9FIRM Epoxyqueuosine reductase OS=Veillonella denticariosi JCM 15641 OX=1298594 GN=VE HSUH05_09010 PE=4 SV=1
MTTLTAKQIHDKALECGFDDCGIISIDALDSYKDRLAQRLEAVPESEDIYAHTKSFLELKEKYPWAQSIVVCTEYYGNYKFPVSLRKRYAKGLLLSLSNIPRSDEFKRRRSFETWLGENGIRYIGGETAKPAGIIPLRPASVAAGLGIYRKNNFFYGPKGSSYELVAYLIDEPCEYIRQLGIPPCPDSCDLCQQGCKIKSLSAPFTMNPLTCVSFINTFGDGKLPDGVTDDMLEAWILGCDNCQDACPFNADHEWSIGVDYPGLDELEPLLQPEYILKASDEELIKKVIPKCCFHLTDEQIPLLRKSAKRAMQDT

SEQ ID NO: 81905 - protein, 300 aa, Veillonella denticariosi
  misc_feature (1)..(300): tr|A0A2S7ZCT9|A0A2S7ZCT9_9FIRM DUF1730 domain-containin g protein OS=Veillonella denticariosi JCM 15641 OX=1298 594 GN=VEHSUH05_01310 PE=4 SV=1
MINSINLQKICKELHIPIVGIAPWPLPADAKNILYESNPCPFTAADVAERTRGPKDFEPHSAIVCLFPYYVNYTGPANVSRYTWAKDYHLVINDYLTRLVNELSILEPSAQFSIHCDTSPLADRYMAYLAGLGFYGRNKCFINPTWGSYIVIGTVLTTLKLEPDMPSTESCIGCNRCITSCLGQCLGNNGFSYATCKSYLTQKKGDLTDTERAIIGKTPLIFGCDVCQEVCPHNKNLPTTPIVEFQSIEPVVDTSELKSLTNKEFKAKFGHRAFSWRGKKILIRNHEIIDSKKHKDRIGQ

SEQ ID NO: 81906 - protein, 321 aa, Veillonella dispar
  misc_feature (1)..(321): tr|A0A3D2WRL4|A0A3D2WRL4_9FIRM Epoxyqueuosine reductase OS=Veillonella dispar OX=39778 GN=DHW37_03585 PE=4 SV= 1
MNTLLAREIHDKALACGYDSCGIVPLDALDFYKDRLTKRLEDVPESEDVYAHSKAFLALKENYHWAQSIVVCTEYFGNYKFPASLQKRYAKGLLLSLSNIPDGVEFKRRQSFETWLQSQNIQYIGGETAKPAGVVPLRPASVAAGLGIYRKNNFFYGPKGSNYELVAYLIDKSCEYIHDTDIPPCPDSCNLCQQGCKTKSLSAPFTMNPLTCVSFINTFGDGNLPEGVTEDMLEEWIIGCDNCQDSCPFNKNHDWSIGKDYPGLDELEPILQPEFILKASDEEIIEQMIPKFCFHLTNEQIPLLRKSAKRAIEYKNRWQKQ

SEQ ID NO: 81907 - protein, 294 aa, Veillonella dispar
  misc_feature (1)..(294): tr|W1V5F0|W1V5F0_9FIRM DUF1730 domain-containing protei n OS=Veillonella dispar DORA_11 OX=1403949 GN=Q619_VDC0 0511G0004 PE=4 SV=1
MKDINLQEICKELHIYEFGIASWPLPEQAKTILFESNPCPFTTADVEARLLGTKQFIPKSAIVCLFPYHVQHKGQSNLSRYTWSTDYHLVINEYLERLIERLQIIDDSAQFSIHCDTSPLADRYMAYLAGLGFYGKNNCFINPKWGSYVVIGTILTTLELKPNTPLEQSCMGCNRCITACLGQCLGHDDFKYNTCKSFLTQKKGELTDEEENILAKTPLVFGCDVCQEVCPHNKDIPTTPIPEFQQIEPYVNIDELEALTNKEFKAKYGRRAFSWRGKKILMRNQEIIDRKSKL

SEQ ID NO: 81908 - protein, 297 aa, Veillonella montpellierensis
  misc_feature (1)..(297): tr|A0A096AJB2|A0A096AJB2_9FIRM (Fe-S)-binding protein O S=Veillonella montpellierensis DNF00314 OX=1401067 GN=H MPREF0872_06700 PE=4 SV=1
MNKLKLIDYCQQLHIHAVGIAPWPLPMEEARRILFEQDPCPFTASELQARLQGNTTLVNPRCAIVCLFPYYVPTNEPTNIARYTWATDYHLVVPHYLSQIISYLQQEEPSAEFEIHCDTSPLADRYMAYLAGLGFYGKNHCFIHPSLGSYVVIGTILTSIPFEPDRPLHATCLGCNRCLQACPGQALQADHFHYHTCKSYLTQKKGDLSETEQQIIGKTPLLFGCDICQEVCPHNAHLPITPFAEFRHIDPQISTEELANMTNKQFKERYGHRAFSWRGKKILLRNEAYIKSKKDST

SEQ ID NO: 81909 - protein, 294 aa, Veillonella parvula
  misc_feature (1)..(294): tr|A0A418PKB2|A0A418PKB2_9FIRM DUF1730 domain-containin g protein OS=Veillonella parvula OX=29466 GN=D3219_0137 5 PE=4 SV=1
MNDINLQEICKELHIYEFGIASWPLPEQAKTILFESNPCPFTTADVEARLLGTTQFMPKSAIVCLFPYHVQHKGHANLSHYTWSTDYHLVINEYLERLIERLQIIDDSAQFSIHCDTSPLADRYMAYLAGLGFYGKNNCFISPKWGSYVVIGTILTTLELKPNTPLEQSCIGCNRCITACLGQCLGHDEFKFATCKSYLTQKKGELTDEEEQILAKTPLVFGCDVCQEVCPHNKDIPTTPIPEFQQIKPYINIDELETLTNKEFKAKYGHRAFSWRGKKILMRNQEIIDRKSKL

SEQ ID NO: 81910 - protein, 294 aa, Veillonella parvula
  misc_feature (1)..(294): tr|T0T1X6|T0T1X6_9FIRM Iron-sulfur cluster-binding prot ein OS=Veillonella parvula HSIVP1 OX=1316254 GN=HSIVP1_ 1050 PE=4 SV=1
MKDINLQEICKELHIYEFGIASWPLPEQAKTILFESNPCPFTTEDVEARLLGTTQFMPKSAIVCLFPYHVQHKGHANLSRYTWSTDYHLVINEYLERLIERLQIIDDSAQFSIHCDTSPLADRYMAYLAGLGFYGKNNCFISPKWGSYVVIGTILTTLELKPNAPLEQSCIGCNRCITACLGQCLGHDEFKFATCKSYLTQKKGELTDEEEQILAKTPLVFGCDVCQEVCPHNKDIPTTPIPEFQQIEPYINIDELETLTNKEFKAKYGHRAFSWRGKKILMRNQEIIDRKNKL

SEQ ID NO: 81911 - protein, 315 aa, Veillonella rodentium
  misc_feature (1)..(315): tr|A0A239ZJC1|A0A239ZJC1_9FIRM Epoxyqueuosine reductase OS=Veillonella rodentium OX=248315 GN=queG_2 PE=4 SV=1
MTTLTAKQVHDKALECGFDDCGIISIDALDSYKDRLAQRLEAVPESEDIYTHTKSFLELKENYPWAHSIVVCTEYYGSYKFPLSLRKRYAKGLLLSLSNIPHSDEFKRRRSFETWLGEKGIRYIGGETAKPAGIIPLRPASVAAGLGIYRKNNFFYGPKGSCYELAAYLIDESCEYIQQSEIPPCPDSCDLCQQGCKTKSLSAPFTMNPLTCVSFINTFGDGKLPDGVTDDMLEVWILGCDNCQDACPFNVDHDWSIGLDYPGLDELEPLLQPEYILKASDAELIKKVIPKCCFHLTDEQIPLLRKSAERAMRGK

SEQ ID NO: 81912 - protein, 300 aa, Veillonella rodentium
  misc_feature (1)..(300): tr|A0A239YHD1|A0A239YHD1_9FIRM Epoxyqueuosine reductase OS=Veillonella rodentium OX=248315 GN=queG_1 PE=4 SV=1
MINSINLQKICKELHIPAVGIAPWPLPADAQNILYESNPCPFTAADVTERIKSPEDFKPNGAIVCLFPYYVNYTGPTNLSRYTWAKDYHLVINDYLTRLVNELGRLEPSAQFSIHCDTSPLADRYMAYLAGLGFYGKNKCFINPTWGSYIVIGTVLTTLELKPDTPSTESCIGCNRCIRSCLGQCLENDEFSYTTCKSYLTQKKGDLTDTERTIIGKTPLIFGCDVCQEVCPHNKNLPTTPIVEFQSIEPVVDTAELETLTNKEFKAKFGQRAFSWRGKKILIRNHEIIDSEKHKDRIGQ

SEQ ID NO: 81913 - protein, 294 aa, Veillonella rogosae
  misc_feature (1)..(294): tr|A0A2S7YXZ6|A0A2S7YXZ6_9FIRM DUF1730 domain-containin g protein OS=Veillonella rogosae JCM 15642 OX=1298595 G N=VRHSUH09_05065 PE=4 SV=1
MKYINLQEICKELNIYEFGVASWPLPENAKSILYESNPCPFTAANVEERLLGTSLFTPKSAIVCLFPYYVEHKSPSNLSRYTWAKDYHLVINEYLKKLIEKLQIMNTDAQFSIHCDTSPLADRYMAYLAGLGFYGKNNCFISPKWGSYVVIGTILTTLELEPNTPLTQSCMGCNRCITACLGQCLGHDEFKFDTCKSYLTQKKGELTSEEEHIIAKTPLVFGCDVCQEVCPHNKDIPTTPIPEFQSVEPYIDIDELDSLTNKEFKAKYGPRAFSWRGKKILMRNQEIIESKKML

SEQ ID NO: 81914 - protein, 325 aa, Veillonella seminalis
  misc_feature (1)..(325): tr|K9DHG5|K9DHG5_9FIRM Uncharacterized protein OS=Veill onella seminalis ACS-216-V-Col6b OX=883156 GN=HMPREF928 2_01158 PE=4 SV=1
MITRNDIFQIAKKLNIPAVGIAPWPLPEDAPNYIDTNKPCPFINGTLEERLTANTQLQTPKSAIVCLFPYYIKTDQPVNLPRYAWGPDYHLVIPDYLKRFGAALQELDQTVEFEIHCDTSPMADRYIAYLAGLGIFGKNRSLIHPVWGSYTSIGTLLTSCELTPDEPMQGTCLSCNRCIKSCPGQSLGHKDFGFETCKSYLTQKKRDLPPDEVAIIQKSPLIWGCDICQEVCPHNRNVPTTPIPEFQTVEPYVNPVQLPELTNKTFKAEYGHRAFAWRGKAVLLRNANYIAETNTTGTDSNAITSSADSAAKPVAPLTTHSSNDE

SEQ ID NO: 81915 - protein, 297 aa, Veillonella sp.
  misc_feature (1)..(297): tr|A0A496P9Z7|A0A496P9Z7_9FIRM DUF1730 domain-containin g protein OS=Veillonella sp. OX=1926307 GN=D8B58_11400 PE=4 SV=1
MTNLELEELAIQLNIPAVGVASWPLPVEASLHLDTPYPCPFTNGSIEERLQGSTTIASPKSAIVCLFPYYMPREGVTNLARYCWGDDYHVVVRQYLERLVDILRERYPDEIYEIHCDTSPLADRYMAYLAGLGFYGWNQTFINPTWGSYTVIGTIMTTLELSPSVPLAQSCLQCGACLRACPGKALQGDHLDYRTCKSYLTQCKGELSEEEERIIGKTPLIFGCDVCQEVCPHNRDIPMTPIPEFQQVTSYIEMEELEGMTNKEFKAKYGHKAWAWRGKKVLLRNAEIVRKEKHEGK

SEQ ID NO: 81916 - protein, 315 aa, Veillonella sp.
  misc_feature (1)..(315): tr|A0A2S7ZDR9|A0A2S7ZDR9_9FIRM Epoxyqueuosine reductase OS=Veillonella sp. T34266-5 OX=2027457 GN=VIHSUH07_070 25 PE=4 SV=1
MNTLLAQEIHDKALACGYDSCGIVPLDALDFYKERLTKRLEDVPESEKVYAHSKDFLALKDNYPWAQSIVVCTEYFGNYKFPVSLQKRYAKGLLLSLANIPDGVEAKRRRSFETWLHSKNIQFIGGETARPAGVVPLRPASVAAGLGIYRKNNFFYGPKGSNYELVAYLIDKSCEYIQNLEIPPCPDTCDLCQQGCKTKSLSAPFTMNPLTCVSFINTFGDGNLPEGVTEEMLEEWIIGCDNCQDSCPFNKNHDWSVGKDYPGLDELEPILQPEFILKASDEEIIEQMIPKFCFHLTNEQIPLLRKSAKRVIERK

SEQ ID NO: 81917 - protein, 246 aa, Veillonella tobetsuensis
  misc_feature (1)..(246): tr|A0A480B5C7|A0A480B5C7_9FIRM Epoxyqueuosine reductase OS=Veillonella tobetsuensis OX=1110546 GN=PAGU1579_058 20 PE=4 SV=1
MGTPDFMPRSAIVCLFPYHVPYSGATNLARYTWATDYHLVVTDYLQRLVDELSSTNPSELFSIHCDTSPLADRYMAYLAGLGFYGKNKCFINPIWGSYIVIGTVLTTLEFEPNTPMTETCLGCNRCISACLGKCLDHNEFKYDTCKSYLTQKKGDLTNNEQSIIKKSPLVFGCDVCQEVCPHNKDLPTTPIVEFQSIEPYVDIEELESISNKEFKSKYGHRAFSWRGKKILIRNNKYIDSKTLQKK

SEQ ID NO: 81918 - protein, 315 aa, Veillonella tobetsuensis
  misc_feature (1)..(315): tr|A0A480B7B7|A0A480B7B7_9FIRM Fe-S oxidoreductase OS=V eillonella tobetsuensis OX=1110546 GN=PAGU1579_10330 PE =4 SV=1
MNTLLAQEIHDKALACGYDSCGIVSLDALDFYKDRLTKRLEDVPESEEVYAHSKDFLVLKDNYPWAQSIVVCTEYFGNYKFPVSLQKRYAKGLLLSLANTPDGVEAKRRRSFERWLRSKNIQCIGGETAKPAGVVPLRPASVAAGLGIYRKNNFFYGPKGSNYELVAYLIDKSCEYIQNLEIPPCPDTCDLCQQGCKTKSLSAPFTMNPLTCVSFINTFGDGILPEGVTEDMLEEWIIGCDNCQDSCPFNKNHDWSIGKDYPGLDELEPKLQPEFILKASDEEIIEKMIPKFCFHLTNEQIPLLRKSAKRVTERK

SEQ ID NO: 81919 - protein, 270 aa, Veillonellaceae bacterium
  misc_feature (1)..(270): tr|A0A349N1N2|A0A349N1N2_9FIRM Epoxyqueuosine reductase (Fragment) OS=Veillonellaceae bacterium OX=2049049 GN= DCS74_03850 PE=4 SV=1
MNSAYLLKQKIKEKASSMSLEYIGICALPFSPDLKHILQQSGPVPLCPDDTNMRLNAEALLPGVRCAIVILFPYGPPAAKSNIAAYAQLADYHIISRRYLSILEKFLSSLCPAASFYAAADTSPLCDRWMAYAAGLGFLGKNHCLINSKYGSWITIGTLLTTLDLPPDHPVSQQCGNCSACLKACPGQALKDGGPMQFTKCKSWLTQKQGILSEAETGIIQRTPLIFGCDVCQQVCPWNQSAAPSPLPEYKNGRIQNLARQAFELLPTKN

SEQ ID NO: 81920 - protein, 310 aa, Veillonellaceae bacterium
  misc_feature (1)..(310): tr|A0A134CJJ2|A0A134CJJ2_9FIRM Putative iron-sulfur clu ster-binding protein OS=Veillonellaceae bacterium KA001 82 OX=1588748 GN=HMPREF3182_00513 PE=4 SV=1
MERDTNLIKQYIHTLGIPCVGIAPGTFSIPSYPQDICPLAAGEGDARYQPTTLLPSCQSVIVLLFPYYVKDPHPYNLSLYCRSIDYHTIIHHYLNEVTCFLTQTYPHQDFLSIVDTAPLSDRYLAYLAGLGFIGDNNCFINETYGSFCFIGSILTSLPLKPDHPQQRECFHCGACKRSCLGHCLDTAEYDYHLCKSYLTQKKGELSPMEIQVIQKTPLVFGCDICQDVCPHNHDIPETPIKEFHQSRIAYLKKSDLQELSNRQFQQLYKNRAFSWRGKGILLRNIQYLEEVQSNSEQRQNPNTKNDPSHK

SEQ ID NO: 81921 - protein, 348 aa, Verminephrobacter eiseniae
  misc_feature (1)..(348): tr|A1WIL1|A1WIL1_VEREI Epoxyqueuosine reductase OS=Verm inephrobacter eiseniae (strain EF01-2) OX=391735 GN=que G PE=3 SV=1
MQEWARALGFSQLGVAGVDLSAAEPGLLAWLAQGLHGDMHYMAVHGLKRARPAELLPGTVSVITARMDYLPRNTGAGAPQGWQAVELGRLARPQEGIVSVYARGRDYHKVLRTRLQTLSARIAAAVGPFGHRVFTDSAPVLEAELAARSGLGWRGKHTLVLNRAAGSMFFLGEIYVDMALPASAPVAAHCGSCNACMALCPTQAIIAPHRLDARRCISYLTIEHAGPIPLALRPLLGNRIYGCDDCQLVCPWNKFAQVSRLPDFDERQGLSGQQLVQLFAWDEATFARLTEGGPIRRIGHERWLRNVAVALGNALRATGDEALRAALRLRARDASPLVREHVAWALGG

SEQ ID NO: 81922 - protein, 346 aa, Verminephrobacter sp.
  misc_feature (1)..(346): tr|A0A4Q2LGR0|A0A4Q2LGR0_9BURK tRNA epoxyqueuosine(34) reductase QueG OS=Verminephrobacter sp. Larva24 OX=2509 434 GN=queG PE=4 SV=1
MAARRPVAPAANAVALAQDRAQEKAHFVRCGVRCAPYAVIASAEQLAAAPAELLPGTVSVITARMDYLPRNTGAGAPQGWQAVELGRLARPQEGIVSVYARGRDYHKVLRTRLQTLSARIAAAVGPFGHRVFTDSAPVLEAELAARSGLGWRGKHTLVLNRAAGSMFFLGEIYVDMALPASAPVAAHCGSCNACMALCPTQAIIAPHRLDARRCISYLTIEHAGPIPLALRPLLGNRIYGCDDCQLVCPWNKFAQVSRLPDFDERQGLSGQQLVQLFAWDEATFARLTEGGPIRRIGHERWLRNVAVALGNALRATGDEALRAALRLRARDASPLVREHVAWALGG

SEQ ID NO: 81923 - protein, 534 aa, Verrucomicrobia bacterium
  misc_feature (1)..(534): tr|A0A2V5ZLR0|A0A2V5ZLR0_9BACT Shikimate kinase OS=Verr ucomicrobia bacterium OX=2026799 GN=queG PE=3 SV=1
MISIQPYSILVGHSVTATSFQLSLPAAYCDMSAAKSIVLIGMMGAGKSSVGRCLQRLTGLARIDTDEIIAAEFGIPIAQIFATHGEEKFRDAETNVLLKLAPDRPAIITTGGGIILRPGNVDLLKKLGTVIWLTADERTLFERASRRNERPLLQKENPQTVFSDLFAKREPLYASAADLQIDTSGKSHDEVADAILAKLQELAPERPAIVVTGGGIVGNTENLDLLKRLGTVVWAHGEMNYMARAEEKRRDPQNVLPGARSIIVLALNYFQGGENASAGRIARYAWGDDYHDVIEAKLRKIDNYLRELGGEQKCYVDTGPVLERDHAATAGIGWHGKSTMLLNEKLGTWFFLAEILTTLELPPDEAARDRCGTCERCITACPTGAITAPHKLDARRCISYLTIELKSAIPLELRPLIGDRIFGCDDCLEACPWNRFAKVSRETSFTARRSTATLALRDYLTLSEAEFRNLFRNSPIKRVKRRGFLRNVCVALGNVGTFDDLPALRRAAADSEPLIAEHATWAIEQILNRVGPTA

SEQ ID NO: 81924 - protein, 341 aa, Verrucomicrobia bacterium
  misc_feature (1)..(341): tr|A0A2A2R8D6|A0A2A2R8D6_9BACT tRNA epoxyqueuosine(34) reductase QueG OS=Verrucomicrobia bacterium Tous-C9LFEB OX=1982333 GN=B9S32_04610 PE=4 SV=1
MPPTTLTATQIKDQARALGFDLCGIAAATRPAQAEYYQQWITDGRHGEMGWLARDPQRRTDPQQVLPEARSVIAVGLNHYQPAPTRRGRIATYALGEDYHTLFEEKLAAFQGWLTATAGGSHKFYADTGPVLEKNVAQLAGLGWQAKSTMLLNAKFGPWLFLGEILTTLDLPADEPARDRCGSCTRCIDVCPTQAITAPYELDARRCISYLTIELKGSIPEELRPLIGDHLYGCEECLTVCPWNRFAKQSQELRFAATASTQLDLRDYLALSPQEFKQRFAGSPILRVKRRGLLRNVCVVLGNIGTADDLPALHRALSDEEPLVREHAAWAVARIRERTTT

SEQ ID NO: 81925 - protein, 341 aa, Verrucomicrobia subdivision
  misc_feature (1)..(341): tr|A0A3C1V7E0|A0A3C1V7E0_9BACT tRNA epoxyqueuosine(34) reductase QueG OS=Verrucomicrobia subdivision 3 bacteri um OX=2052186 GN=queG PE=4 SV=1
MKNAIRQRAQELGFDDCRFTTAAPPASAEKFQYWLAQKQNGEMLWLERNAEKRVEPQQVLAGAKSVIVLTVSYENSNSKLKTKNSKLGVVARYARFEDYHDVLGGRLKALTQFVNELGGAETRSLWYVDTGPVLERDLAQRAGTGFVGKHTNLISRKLGNWIFLAEILTTLELEPDAPEKNHCGSCTRCLTACPTNAITAPFQLDARKCISYLTIELKGSIPVELRPAIGNRIYGCDDCLAACPWNRFAREGNLMKPHARQDLAAPDLIELLQLDDAGFKSRFAGTPMLRTKRRGVLRNVCVALGNVGDETALPFLEKAARDQEPLIAEHAHWAMGQIYQP

SEQ ID NO: 81926 - protein, 339 aa, Verrucomicrobia subdivision
  misc_feature (1)..(339): tr|A0A0R2XDH0|A0A0R2XDH0_9BACT Uncharacterized protein OS=Verrucomicrobia subdivision 6 bacterium BACL9 MAG-12 0924-bin69 OX=1655635 GN=ABS33_02205 PE=4 SV=1
MSRAEELKKAAQSLGFDALGITSADIPPHADHLKEWLSLSYQGEMKWMANRPEIRSDPQKYDSIAKTIIVAGITSRQTSSPLPRGRIAAYAQGEDYHEVLRDKLEQLAQKSLAQWGGHYRVCVDSSPLLEKPIAAMAGLGWQGKNTLLIHSQHGPWLMLGSILTDLEISPDSSSPDHCGTCTRCLDACPTQAFPQPYVLDARRCLAYLTIEHPGSIPEEFRPLIGDRLFGCDECLEVCPWNRHAQESRELRFTPIPRTDLSEMLTWDDARFRQEFRHTPIFRLKRGRWLRNICIVLGNIGTTQDLPALQKAAEDSDPLVQEHAQWGIARIGQRNRKTND

SEQ ID NO: 81927 - protein, 369 aa, Verrucomicrobiaceae bacterium
  misc_feature (1)..(369): tr|A0A4Q2Y2A9|A0A4Q2Y2A9_9BACT tRNA epoxyqueuosine(34) reductase QueG OS=Verrucomicrobiaceae bacterium OX=2026 800 GN=queG PE=4 SV=1
MAASVKRIATTLGLDDCRIAAVTGPAGHAEQYQQWIDAGEHGEMDWMAKNPNRRKDPREVLPGIRSVITVALNYYQAEPPPLAHTLPSPAGSGPVPSVPGLSPLRGRIARYAWGDDYHEVLNGKLRDLCEWLEDQGGAQRLYADTGPVLERDWASASGLGWNGKSTIQIHPRMGCYFFLGEILTTLAIAPDKPLADHCGKCTRCINACPTGAITSPRHVDAKRCVSYLTIESKSAIPLEFRRAIGDRLYGCDDCLAACPWNRFAQDSREAAFAARPFVAQWSPRDFLTLTDDTFRSLFRHSPIRRIKRPAFLRNVCTVLGNTGTAADLPALRAAAEDPHPLIAEHAVWAVTEITAREADAGKTENSQHP

SEQ ID NO: 81928 - protein, 344 aa, Verrucomicrobiaceae bacterium
  misc_feature (1)..(344): tr|A0A1Z8ZR55|A0A1Z8ZR55_9BACT tRNA epoxyqueuosine(34) reductase QueG OS=Verrucomicrobiaceae bacterium TMED86 OX=1986881 GN=CBC46_11230 PE=4 SV=1
MTPETVKRNVQFVARQLGFDDCRVSAAQRAPHADNYLDWVEQGHAGDMGWLERNVERRCDPREVLPGCRSVISLALNYLPAKDHPDTGYRIARYSWNDDYHDLIEEKLKDLNLALEDMGGQQRYYVDTGPILERDFASASGLGWNGKSTVQIHRKLGTWFFLCELLTTLELEPDKASSDHCGKCTACIQACPTEAITGPRQLAAKRCISYLTIEHKGSIPLEFRRAIGDRIYGCDDCLDACPWNRFAQVSREASLHARPGLFEHRLRDFLALDLEQFRALFAKSPIKRIKRDRFLRNVCVALGNTGGQDDLPALYATAHNEASLVTEHAQWAIGEINERVQATP

SEQ ID NO: 81929 - protein, 347 aa, Verrucomicrobiae bacterium
  misc_feature (1)..(347): tr|A0A2A2YFB4|A0A2A2YFB4_9BACT Epoxyqueuosine reductase OS=Verrucomicrobiae bacterium AMD-G2 OX=1982328 GN=que G PE=3 SV=1
MSLGNAPIDDELVARVRTIARECGFDDCRIATANRATHADDYLHWVEQGMHGEMTWLERNQERRCDPREVLPGCRAVICLGMNYYPGSSSANDQYRIARYSWNEDYHDLIGDRLKAMDAALQALGGTQRYYVDTGPVLERDFATDAGLGWNGKSTVQIHRKFGTWLFLAELLTTLPLVADSPFGDHCGKCTRCITACPTQAIIAPHRVDARRCVSYLTIEHKGAIPLEFRRAIGDRIYGCDDCLSACPWNRFAQLSQHAQFHARAEIFQHSLSDFLGFDDETFRRVFARSPIKRIKRNRFLRNVCIALGNVGTRADLPALEVARIDADPLIAEHAAWAVEEILARNI

SEQ ID NO: 81930 - protein, 339 aa, Verrucomicrobiae bacterium
  misc_feature (1)..(339): tr|A0A2A2QDI2|A0A2A2QDI2_9BACT tRNA epoxyqueuosine(34) reductase QueG OS=Verrucomicrobiae bacterium Tous-C5FEB OX=1982331 GN=B9S30_05800 PE=4 SV=1
MNRAEELKEAARSLGFDALGITSAHIPPHADHLKEWLSLSYQGEMKWMASRPEIRSDPQKYDSLAKTIIVAGITSRQTSSPLPRGRIAAYAQGEDYHEVLRDKLEQLAQKTLAPWGGHYRVCVDSSPLLEKPIAAMAGLGWQGKNTLLIHPQHGPWLMLGSLLTDLELSPDPSSHDHCGTCTRCLDACPTQAFPKPYVLDARRCLAYLTIEHPGSIPEEFRPLIGDRLFGCDECLEVCPWNRHAQESRELRFTPIPRTDLSKMLTWDDARFRQEFRHTPIFRLKRGRWLRNICIVLGNIGTIKDLPALQKATEDSDPLVQEHAHWGITRIRERNPTTND

SEQ ID NO: 81931 - protein, 364 aa, Verrucomicrobiales bacterium
  misc_feature (1)..(364): tr|A0A354TBK7|A0A354TBK7_9BACT Epoxyqueuosine reductase OS=Verrucomicrobiales bacterium OX=2026801 GN=queG PE= 3 SV=1
MTPAEIKSALLAKARALGFDDCRVAPALPAAHREVFEQWIAEGKHGDMAWMARNIERRTDPRVVLPGARSVIVLAMNYYQGAPHGRDGRNATDEKNDDNHSHSSHWSHPSYRIARYAWNDDYHDLIEKKLRELDAFLTTHGGTQKPYVDTGPVLERDFASEAGLGWGGKSTMQIHRHLGTWFFLADILTTLELPADAPAKDMCGKCTRCIDACPTQAITAPQRMDARRCISYLTIESKGSIPHEFRRAIGDRIYGCDACLDACPWNRHAQESREATFQARETVFSKSLRDFLALTDEEFRALFAKSPIKRIKRPAFLRNVCVALGNVGLPEDLPALEAAAADPHPLIAEHAAWAIAEIRQRHGG

SEQ ID NO: 81932 - protein, 337 aa, Verrucomicrobiales bacterium
  misc_feature (1)..(337): tr|A0A257M255|A0A257M255_9BACT tRNA epoxyqueuosine(34) reductase QueG OS=Verrucomicrobiales bacterium VVV1 OX= 2015575 GN=queG PE=4 SV=1
MIKAIARGLGFDDCRIAVAKEATHAEAFREWIGEGLHGDMAWMEKTPHRRCDPREVLEGCKSVICLALNYYPGRSSGADGYRIARYAWNEDYHDLILAKLKAFDVELAKLGGTQRYYVDTGPVLERDFATDAGLGWNGKSTLQIHRRLGTWFFLAELLTTLDLTADTPFGDHCGKCTRCITACPTGAITAPHRVDARRCISYLTIEHKEAIPEEFRIAMGDRIYGCDDCLDACPWNKFAEVSREARFHARESVFRHRLRDFLTLDDESFRALFAKSPIKRIKRPRFLRNVCVALGNTGTNEDLPALETAAIDPDPLIAEHATWAIQRLKTRLSHAVK

SEQ ID NO: 81933 - protein, 372 aa, Vibrio aerogenes
  misc_feature (1)..(372): tr|A0A1M6E806|A0A1M6E806_9VIBR Epoxyqueuosine reductase OS=Vibrio aerogenes CECT 7868 OX=1216006 GN=queG PE=3 SV=1
MNYQVLAEKIKGWALELGFEKAGICDVDLSRHETELQRWLDAGYHGEMEWMARHGMMRARPDELLPGTIRVISVRMTYLPPEAKFSLDLSTPTHAYISRYALGRDYHKLLRNQLKKLAEKIKQETTSLNYRPFVDSAPILERPLAEKAGLGWTGKHSLILDKEAGSWFFLGEILVDIPLPVDQPVENQCGSCKACITSCPTQAIVSDGVVDARRCISYLTIEYSGVIPEEFREAIGNRIYGCDDCQLVCPWNRFSPLTGQPDFHRRKVLETPDLTELFLWDEQTFLKNMEGSAIRRIGHLQWLRNLAVSMGNAPYSEELTLALEQRLGLSEMLDIHIHWAISQQNKKQNISHQNRKHDRLIRIIQKGLTRDA

SEQ ID NO: 81934 - protein, 375 aa, Vibrio agarivorans
  misc_feature (1)..(375): tr|A0A2K1DS99|A0A2K1DS99_9VIBR Epoxyqueuosine reductase OS=Vibrio agarivorans OX=153622 GN=queG PE=3 SV=1
MDYTQLAHQIKIWGKELGFQKVGICDVDLSEHETALQRWLDSNYHGSMDWMARHGMMRARPEELLPGTIRAISVRMDYLPPEAGFATNLANRNHGYISRYALGRDYHKLVRKQLNKLGQRIEKEVKQLGYRPFVDSAPILERPLAQKAGLGWTGKHSLILDKDCGSWFFLGELLIDLPLPVDPPSQDQCGKCSSCITSCPTQAIVSDKVVDARRCISYLTIEFDGVIPEEFRKPIGNRIYGCDDCQLVCPWNRFANIAEQKDFHRRNSLQNPDLITLFNWDEATFLKSMEGSAIRRIGHVQWLRNIAIALGNAEYSQKAIESLEARRGHSSLLDKHIEWALEQQIKQLSFNRTESSDTKQQRLIRIIEKGLPRDA

SEQ ID NO: 81935 - protein, 375 aa, Vibrio alfacsensis
  misc_feature (1)..(375): tr|A0A347UML3|A0A347UML3_9VIBR Epoxyqueuosine reductase OS=Vibrio alfacsensis OX=1074311 GN=queG PE=3 SV=1
MNYEQLAQQIKIWGKELGFQKVGICDVDLSEHEAALQKWLDAGYHGSMDWMARHGMMRARPNELLPGTVRVISVRMDYLPPEAKFASNLANKNHAYISRYALGRDYHKLVRKQLNKLGQLIEQEVDQLGYRPFVDSAPILERPLAQKAGLGWTGKHSLILDKDCGSWFFLGELLIDLPLPIDEASIDQCGKCRACITSCPTQAIVDDNVVDARRCISYLTIEFDGVIPEEFRKPMGNRIYGCDDCQLVCPWNRHAEITEQEDFHRRDSFIDPDLVTMFLWDESHFLKQMEGSAIRRIGHLQWLRNIAIALGNSEYSLRVIEALEARQGENPLLDEHIEWALAQQFNQTPLESMGSIETKQKRLIRIVEKGLSRDA

SEQ ID NO: 81936 - protein, 375 aa, Vibrio alginolyticus
  misc_feature (1)..(375): tr|A0A4U1XE36|A0A4U1XE36_VIBAL Epoxyqueuosine reductase OS=Vibrio alginolyticus OX=663 GN=queG PE=3 SV=1
MNYEQLAQQIKVWGKELGFQKVGICDVDLSEHEAALQKWLDAGYHGSMDWMARHGMMRARPHELLPGTVRVISVRMDYLPPEAQFASNLANKSHAYISRYALGRDYHKLVRKQLNKLGKLIEQEVGQYGYRPFVDSAPILERPLAQKAGLGWTGKHSLILDQDCGSWFFLGELLIDLPLPVDEPSVDQCGKCKACITSCPTQAIVEDKVVDARRCISYLTIEFGGVIPEEFRKPMGNRIYGCDDCQLVCPWNRYADITEQDDFHRRDSFKNPDLVDMFNWDEATFLKNMEGSAIRRIGHIQWLRNIAVALGNAEYSQRIIDALESRQGENKLLDEHIKWALTEQLNQLPTESNSSIETKKQRLIRIVEKGLPRDA

SEQ ID NO: 81937 - protein, 375 aa, Vibrio alginolyticus
  misc_feature (1)..(375): tr|D0X191|D0X191_VIBAL Epoxyqueuosine reductase OS=Vibr io alginolyticus 40B OX=674977 GN=queG PE=3 SV=1
MNYEQLAQQIKVWGKELGFQKVGICDVDLSEHEAALQKWLDAGYHGSMDWMARHGMMRARPHELLPGTVRVISVRMDYLPPEAQFASNLANKSHAYISRYSLGRDYHKLVRKQLNKLGKLIEQEVGQYGYRPFVDSAPILERPLAQKAGLGWTGKHSLILDQDCGSWFFLGELLIDLPLPVDEPSVDQCGKCKACITSCPTQAIVEDKVVDARRCISYLTIEFDGVIPEEFRKPMGNRIYGCDDCQLVCPWNRYADITEQDDFHRRDSFKNPDLVDMFNWDEATFLKNMEGSAIRRIGHIQWLRNIAVALGNAEYSQRIIDALESRQGENKLLDEHIKWALTEQLNQLPTESNSSIETKKQRLIRIVEKGLPRDA

SEQ ID NO: 81938 - protein, 376 aa, Vibrio algivorus
  misc_feature (1)..(376): tr|A0A557NWB9|A0A557NWB9_9VIBR Epoxyqueuosine reductase OS=Vibrio algivorus OX=1667024 GN=queG PE=3 SV=1
MNYQELANKIKLWGKELGFQQVGITDVDLSEHEAQLQRWLDAGFHGSMDWMARHGMMRARPQELHPGTIRVISVRMDYLPPKAQFASNLSDPTQAYISRYSLGRDYHKLIRNQLKKLGQRIEEEVGKLGYRPFVDSAPILERPLAQKAGLGWAGKHSLILDKQAGSWFFLGELLVDIPLPIDEPQTDQCGQCRACMTSCPTGAIVEEGVVDARLCISYLTIELNGVIPEELRSKIGNRIYGCDDCQLVCPWNRAAEVTNEVSFHRRDIFNDADLIHLFQWNELQFLKNMEGSAIRRIGHIQWLRNISVALGNAPYESAILEVLTARLGLDDNLDIHIQWAIEQQNKKKNAIEANTARNTKLERLVRIIGKGLPRDA

SEQ ID NO: 81939 - protein, 376 aa, Vibrio anguillarum
  misc_feature (1)..(376): tr|A0A241PMV2|A0A241PMV2_VIBAN Epoxyqueuosine reductase OS=Vibrio anguillarum OX=55601 GN=queG PE=3 SV=1
MDYQVLADKIKIWARELGFEKVGICDIDLSEHEEPLQKWLDAGFHGEMDWMARHGMMRARPHELLPGTVRVISARMNYLPPDARFASDLNNPNYAYISRYALGRDYHKLVRNQLKKLGEKIEQEVGALGYRPFVDSAPILERPLAQKAGLGWTGKHSLILDKESGSWFFLGELLIDLPLPVDTPSSNQCGKCTACITSCPTQAIVEDGVVDARRCISYLTIEYDGVIAEEFRKAMGNRIYGCDDCQLVCPWNRFSDLTQQSDFHRRQALDEPDLVELFAWDEATFLRYMEGSAIRRIGHQQWLRNLSIALGNAPYSQRIIVALNTRLGLSDLLDEHIHWALVEQKRKSSEPASACSSNKKQQRLIRIVEKGLPRDA

SEQ ID NO: 81940 - protein, 312 aa, Vibrio anguillarum
  misc_feature (1)..(312): tr|F7YIT5|F7YIT5_VIBA7 Epoxyqueuosine reductase OS=Vibr io anguillarum (strain ATCC 68554 / 775) OX=882102 GN=q ueG PE=3 SV=1
MDYQVLADKIKIWARELGFEKVGICDIDLSEHEEPLQKWLDAGFHGEMDWMARHGMMRARPHELLPGTVRVISARMNYLPPDARFASDLNNPNYAYISRYALGRDYHKLVRNQLKKLGEKIEQEVGALGYRPFVDSAPILERPLAQKAGLGWTGKHSLILDKESGSWFFLGELLIDLPLPVDTPSSNQCGKCTACITSCPTQAIVEDGVVDARRCISYLTIEYDGVIAEEFRKAMGNRIYGCDDCQLVCPWNRFSDLTQQSDFHRRQALDEPDLVEKCFLGWGPPFFPYIWKGSVIARIGPPAKGAVFFPSL

SEQ ID NO: 81941 - protein, 392 aa, Vibrio atlanticus
  misc_feature (1)..(392): tr|A0A1C3J4C0|A0A1C3J4C0_9VIBR Epoxyqueuosine reductase OS=Vibrio atlanticus OX=693153 GN=queG PE=3 SV=1
MNLDHLAEKIKIWGKELGFQKVGICDVDLSEHEAPLQAWLDAGNHGEMDWMARHGMMRARPNELHPGTIRVISARMNYLPPEAQFASNLSDTTQGYISRYSLGRDYHKLFRNQLKKLGQRIEKEVEGLDSRPFVDSAPILERPLAQKAGLGWTGKHSLILDKDAGSWFFLGELLVNIPLPTDEPSVDECGKCTACITSCPTGAIIADGVVDARKCISYLTIEYDGVIPEEYRDAIGNRIYGCDDCQLVCPWNRHAELTEQTDFHRREDFREADLVSLSSWDEATFLKKMEGSAIRRIGHTQWLRNIFVAMGNAPFQQRIVETLESHRGNNEMLDVHIEWALNKQLQQLPNASSMQEDSSTQKNSCVQKNSSKILTKKHRLIRIVEKGLPRDA

SEQ ID NO: 81942 - protein, 380 aa, Vibrio atlanticus
  misc_feature (1)..(380): tr|A0A558GMV7|A0A558GMV7_9VIBR Epoxyqueuosine reductase OS=Vibrio atlanticus OX=693153 GN=queG PE=3 SV=1
MNLDHLAEKIKIWGKELGFQKVGICDVDLSEHEAPLQAWLDAGNHGEMDWMARHGMMRARPSELHPGTIRVISARMNYLPPEAQFASNLSDTTQGYISRYSLGRDYHKLFRNQLKKLGQRIEKEVEGLDSRPFVDSAPILERPLAQKAGLGWTGKHSLILDKDAGSWFFLGELLVNIPLPVDTPSIDECGKCTACITSCPTGAIIADGVVDARKCISYLTIEYDGVIPEEYRDAIGNRIYGCDDCQLVCPWNRHAELTEQKDFHRREDFQEADLVSLSSWDEATFLKKMEGSAIRRIGHIQWLRNIFVAMGNAPFQQRIVETLESHQGKNDMLDVHIEWALEKQLQQLPNASSIQEGKNKVSTKKHRLIRIVEKGLPRDA

SEQ ID NO: 81943 - protein, 375 aa, Vibrio azureus
  misc_feature (1)..(375): tr|U3C707|U3C707_9VIBR Epoxyqueuosine reductase OS=Vibr io azureus NBRC 104587 OX=1219077 GN=queG PE=3 SV=1
MDYTQLAQQIKIWGKELGFQKVGICDVDLSEHETALQKWLDSNYHGSMDWMARHGMMRARPDELLPGTLRAISVRMDYLPPEAGFASNLANRNHAYISRYALGRDYHKLVRKQLNKLGQRIEKEVEQLGYRPFVDSAPILERPLAQKAGLGWAGKHSLILDKDCGSWFFLGELLIDLPLPVDQPSQDQCGKCHSCMTSCPTQAIVADKVVDARRCISYLTIEFDGVIPEEFRQPIGNRIYGCDDCQLVCPWNRFADITEQEDFHRRENFQEPDLVTLFSWDEATFLKHMEGSPIRRIGHTQWLRNIAVALGNAEYSHKAIAALEARQGQSPLLDEHIAWALEQQVNNLSFNRTEKAETKQKRLIRIIEKGLPRDA

SEQ ID NO: 81944 - protein, 375 aa, Vibrio barjaei
  misc_feature (1)..(375): tr|A0A1J4R1N2|A0A1J4R1N2_9VIBR Epoxyqueuosine reductase OS=Vibrio barjaei OX=1676683 GN=queG PE=3 SV=1
MDLNKLASDIKQWGQELGFQKVGISDIDLQDQETVLKNWLAAGYHGDMAWMETHQDLRIHPDKLHPNTCRIISVRMDYLPEDANFASNLEDKHSGYISRYALGRDYHKLIRNLLKKLGQKIEQEVSELGYRPFVDSAPVLERPLAEKAGLGWIGKHSLLLDKEAGSWFFLGELFIDLPLPTDNPVNNECGKCRACVTSCPTGAILENGVIDARRCISYLTIEYKGVIPLEFREAMGNRIYGCDDCQLVCPWNRHAELSQRQDFQRRNSFADTNLDILLSWDEATFLKNMEGSAIRRIGHEQWQRNIIIAMGNAPFSQTYVERLEQIEGQSDLLDPHIKWALQKQLGQLPVNLDTSLHTKNQRLIRIVKKGLPRDA

SEQ ID NO: 81945 - protein, 370 aa, Vibrio bivalvicida
  misc_feature (1)..(370): tr|A0A177XY99|A0A177XY99_9VIBR Epoxyqueuosine reductase OS=Vibrio bivalvicida OX=1276888 GN=queG PE=3 SV=1
MNYQELTDKIKIWGQELGFQKVGICDVDLSEHEAELQKWLDAGYHGEMDWMARHGMMRARPAELLPGTLRVISVRMNYLPPQAQFAANLSDPTQAYISRYSLGRDYHKLVRNQLKKLGQKIEQEIGNFGYRPFVDSAPILERPLAQKSGLGWTGKHSLILDKECGSWFFLGELLIDLPLPVDKPSVEECGKCKACITSCPTQAIVADGIVDARRCISYLTIEFEGVIPEDFRKAMGNRIYGCDDCQLVCPWNRFSDLTDQQDFHRREALTNANLVELFKWDEATFLKNMEGSAIRRIGHLQWLRNLSVAMGNAPYSIDIIEALESRVGLSDTLDVHIRWAQEQQQTQIPAQSTKLNRLIRIVEKGLPRDA

SEQ ID NO: 81946 - protein, 370 aa, Vibrio brasiliensis
  misc_feature (1)..(370): tr|E8LNH6|E8LNH6_9VIBR Epoxyqueuosine reductase OS=Vibr io brasiliensis LMG 20546 OX=945543 GN=queG PE=3 SV=1
MNYQALADKIKIWGQELGFQKVGICDVDLSEHEAELQKWLDAGYHGEMDWMARHGMMRARPSELLPGTVRVISVRMDYLPPEAQFAANLSDPTQAYVSRYALGRDYHKLIRNQLKKLGQKIEQEVGQFGHRPFVDSAPILERPLAQKAGLGWTGKHSLILDKECGSWFFLGELLIDLPLPVDEASVDQCGKCKACITSCPTQAIVDEGIVDARRCISYLTIEFDGVIPEEFRRAMGNRIYGCDDCQLVCPWNRFSELTKQEDFHRREALKNANLTELFLWDEATFLKNMEGSAIRRIGHLQWMRNLSIAMGNAPYSMEIIDALQQRTGLSEVLDTHIQWALSQQQAQLPLSSTKLDRLIRIVEKGLPRDA

SEQ ID NO: 81947 - protein, 370 aa, Vibrio breoganii
  misc_feature (1)..(370): tr|A0A2N7HMB4|A0A2N7HMB4_9VIBR Epoxyqueuosine reductase OS=Vibrio breoganii OX=553239 GN=queG PE=3 SV=1
MNLQHLADQIKLWGNELGFQKIGITDVDLSSHEEGLKKWIAHGYHGSMKWMERNEDKRLHPDKLHPGTLRVISVRLDYLPPEAHFASNLSDPTQAYISRYALGRDYHKLMRNKLKNLAKKIEDELGELNYRPFVDSAPVLERPLAEKAGLGWTGKHSLLLDEEAGSWFFLGELLIGLPLPVDAPVENQCGKCRSCITSCPTGAIIEDGVIDARKCISYLTIEYDGIIEPDLSDAMGNRIYGCDDCQLVCPFNRLAQLTQQADFHRRESIKDSNLITLFLWSEQEFLKNFEGSAIRRIGHLQWLRNLAIALGNGAYSDEAIITLESRLGLCDVLDHHIAYAIERLKSQTPFTSTKQQRLIRIVQKGLPRDA

SEQ ID NO: 81948 - protein, 370 aa, Vibrio breoganii
  misc_feature (1)..(370): tr|A0A4U2FJK8|A0A4U2FJK8_9VIBR Epoxyqueuosine reductase OS=Vibrio breoganii OX=553239 GN=queG PE=3 SV=1
MNLQHLADQIKLWGNELGFQKIGITDVDLSSHEEGLKKWIAHGYHGSMEWMERNEDKRLHPDKLHPGTLRVISVRLDYLPPEAHFASNLSDPSQAYISRYALGRDYHKLMRNKLKNLAKKIEDELGELNYRPFVDSAPVLERPLAEKAGLGWTGKHSLLLDEEAGSWFFLGELLIGLPLPVDAPVENQCGKCRSCITSCPTGAIIEDGVIDARKCISYLTIEYDGIIERELSDAMGNRIYGCDDCQLVCPFNRHAQLTQQADFHRRESIKDSNLITLFLWSEQEFLKNFEGSAIRRIGHLQWLRNLAIALGNGAYSDEAITTLENRLGLCDVLDHHIAYAIERLKSQTSFTSTKQQRLIRIVQKGLPRDA

SEQ ID NO: 81949 - protein, 375 aa, Vibrio campbellii
  misc_feature (1)..(375): tr|A0A1Q1PEM4|A0A1Q1PEM4_9VIBR Epoxyqueuosine reductase OS=Vibrio campbellii OX=680 GN=queG PE=3 SV=1
MNYEQLAQQIKIWGKELGFQKVGICDVDLSEHEAALQKWLDAGYHGSMDWMARHGMMRTRPNELLPGTVRVISVRMDYLPPEAKFASNLANKNHAYISRYALGRDYHKLVRKQLNKLGKLIEQEVGQYGYRPFVDSAPILERPLAQKAGLGWTGKHSLILDKDCGSWFFLGELLIDLPLPVDEPSVDQCDKCKACITSCPTQAIVDEKVVDARRCISYLTIEFDGVIPEEFRKPMGNRIYGCDDCQLVCPWNRYADITEQEDFHRRDSFEDPDLVTMFNWDEPTFLKQMEGSAIRRIGHLQWLRNISVALGNTEYSQRTIDALEARRGESELLDEHINWALGQQLSQIPTAESDSIETKKKRLIRIVEKGLPRDA

SEQ ID NO: 81950 - protein, 375 aa, Vibrio campbellii
  misc_feature (1)..(375): tr|A7MX80|A7MX80_VIBCB Epoxyqueuosine reductase OS=Vibr io campbellii (strain ATCC BAA-1116 / BB120) OX=338187 GN=queG PE=3 SV=1
MNYEQLAQQIKVWGKELGFQKVGICDVDLSEHEAALQKWLDAGYHGSMDWMARHGMMRARPNELLPGTVRVISVRMDYLPPEAKFASNLANKNYAYISRYALGRDYHKLVRKQLNKLGKLIEQEVGQYGYRPFVDSAPILERPLAQKAGLGWTGKHSLILDKDCGSWFFLGELLIDLPLPVDEPSVDQCDKCKACITSCPTQAIVDEKVVDARRCISYLTIEFDGVIPEEFRKPMGNRIYGCDDCQLVCPWNRYADITEQEDFHRRDSFEDPDLVTMFNWDEPTFLKQMEGSAIRRIGHLQWLRNISVALGNTEYSQRTIDALEARRGESELLDEHINWALGQQLSQIPTAESDSIETKKKRLIRIVEKGLPRDA

SEQ ID NO: 81951 - protein, 372 aa, Vibrio caribbeanicus
  misc_feature (1)..(372): tr|A0A0A6QJT3|A0A0A6QJT3_9VIBR Epoxyqueuosine reductase OS=Vibrio caribbeanicus OX=701175 GN=queG PE=3 SV=1
MNYQELADKIKIWAQELGFQKVGICDVDLSEHEAELQKWLDAGYHGEMDWMARHGMMRARPDELLPGTIRVISARMNYLPPEAQFASNLSDTTQAYISRYALGRDYHKLVRNQLKKLGQRIEEEVGQFGYRPFVDSAPILERPLAQKAGLGWTGKHSLILDKECGSWFFLGELLIDLPLPIDTPSEDACGKCKACITSCPTSAIISEGVVDARRCISYLTIEFDGVIPEEFRKPMGNRIYGCDDCQLVCPWNRFSDITDQSDFHRRSTLTNADLVQLFLWDEATFLKNMEGSAIRRIGHIQWMRNLSIAMGNAPFSPRIIDALRARAGINDVLDVHIDWAIEQQLGQESIAGTDTKQQRLIRIVEKGLPRDA

SEQ ID NO: 81952 - protein, 370 aa, Vibrio caribbeanicus
  misc_feature (1)..(370): tr|E3BIU6|E3BIU6_9VIBR Epoxyqueuosine reductase OS=Vibr io caribbeanicus ATCC BAA-2122 OX=796620 GN=queG PE=3 S V=1
MNYTELANKIKIWGKELGFQKVGICDVDLSEHEPLLQKWLDAGYHGEMDWMARHGMMRARPSELLPGTTRVISVRMNYLPPEAQFASNLSDPTQAYISRYALGRDYHKLMRNQLKKLGQKIEQEMENFSHRPFVDSAPILERPLAQKAGLGWTGKHSLILDKDCGSWFFLGELLIDIPLPVDQPSIDECGKCKACITSCPTQAIVADGVVDARRCISYLTIELDGVIPEEFRKSMGNRIYGCDDCQLVCPWNRFSPLTEQNDFHRRSSLNQADLVELFLWDEQTFLKYMEGSAIRRIGHTKWLRNLSVAMGNAPFSQRIVDALKTRLGINDVLDEHVKWALMQQDQKISVRSTKLDRLIRVVTKGLPRDA

SEQ ID NO: 81953 - protein, 372 aa, Vibrio casei
  misc_feature (1)..(372): tr|A0A368LFV3|A0A368LFV3_9VIBR Epoxyqueuosine reductase OS=Vibrio casei OX=673372 GN=queG PE=3 SV=1
MNYNELADNIKIWGQELGFQKVGITDIDLSDHEAQLQRWLDAGYHGEMDWMARHGMMRARPAELHPGTIRVISVRMDYLPPEAQFASNLSDPNQAYISRYSLGRDYHKLIRNQLKKLGQKIEQEVGQLGYRPFVDSAPILERPLAQKAGLGWAGKHSLILDKEAGSWFFLGELLVDIPLPIDLPQTNQCGKCTACMTSCPTNAIVEEGVIDARLCISYLTIEFNGIIPENLRSKMGNRIYGCDDCQLVCPWNREADVTTQEAFHRKDIFQDASLISLFQWNEPDFLKNMEGSAIRRIGHQQWLRNIAVALGNAPFSESIIKVLESRLGISNVLDIHIHWALSEQRNKHKNLERNTKLERLVRIIGKGLPRDA

SEQ ID NO: 81954 - protein, 380 aa, Vibrio celticus
  misc_feature (1)..(380): tr|A0A1C3JHS3|A0A1C3JHS3_9VIBR Epoxyqueuosine reductase OS=Vibrio celticus OX=446372 GN=queG PE=3 SV=1
MNLDHLAEKIKIWGKELGFQKVGICDVDLSEHEAPLQAWLDAGNHGEMDWMARHGMMRARPDELHPGTIRVISARMNYLPPEAQFASNLSDTTQGYISRYSLGRDYHKLFRNQLKKLGQRIEKEVEGLDSRPFVDSAPILERPLAQKAGLGWTGKHSLILDKDAGSWFFLGELLVNIPLPTDEPSVDECGKCTACLTSCPTGAIIADGVVDARKCISYLTIEYDGVIPEEYRDAIGNRIYGCDDCQLVCPWNRHAELTEQTDFHRREDFQEADLVSLSSWDEATFLKKMEGSAIRRIGHTQWLRNIFVAMGNAPFQQRIVETLESHQGKNDMLDVHIEWALQKQLQQLPNASCVQKSNSKISTKKHRLIRIVEKGLPRDA

SEQ ID NO: 81955 - protein, 380 aa, Vibrio chagasii
  misc_feature (1)..(380): tr|A0A2S7V9S6|A0A2S7V9S6_9VIBR Epoxyqueuosine reductase OS=Vibrio chagasii OX=170679 GN=queG PE=3 SV=1
MNLDHLAEKIKIWGKELGFQKVGICDIDLSEHEAPLQAWLDAGHHGEMDWMARHGMMRARPNELHPGTIRVISARMNYLPPEAQFASNLSDTTQGYISRYSLGRDYHKLFRNQLKKLGQRIEKEVEGLDSRPFVDSAPILERPLAQKAGLGWTGKHSLILDKDAGSWFFLGELLVNIPLPVDEPSVDECGKCTACITSCPTGAIIADGVVDARKCISYLTIEYDGVIPEEFREAIGNRIYGCDDCQLVCPWNRHADITEQKDFHRREDFKEADLVLLASWDEATFLKKMEGSAIRRIGHTQWLRNIYVAMGNAPFQQRIVETLESHRGNSDMLDVHIEWALEKQLQQLPSIIEVQKGNSKVATKKHRLIRIVEKGLPRDA

SEQ ID NO: 81956 - protein, 369 aa, Vibrio cholerae
  misc_feature (1)..(369): tr|A0A0E4CBV0|A0A0E4CBV0_VIBCL Epoxyqueuosine reductase OS=Vibrio cholerae OX=666 GN=queG PE=3 SV=1
MDYQQLANQIKQWAIELGFEKVGICDVDLSEHEPALQAWLDAGYHGEMDWMARHGMMRARPAELLPGTLRVISARINYLPPQAQFASNLSDPNQAYISRYALGRDYHKLVRNLLKKLGEKIEQEVGKLGYRPFVDSAPILERPLAQKAGLGWTGKHSLILDKENGSWFFLGELLVDIPLPVDEPSENQCGKCTACITSCPTNAIVAEGVVDARRCVSYLTIEYSGVIPLEFRRAMGNRIYGCDDCQLVCPWNRLAPLTQQSDFHRRQSLNNADLVVLFEWDEATFLKNMEGSAIRRIGHQQWRRNLIIAMGNAPYSPRIIDTLQRHLGQSELLDEHIHWALEEQTQKTATPRQHARLIRIIEKGLPRDA

SEQ ID NO: 81957 - protein, 369 aa, Vibrio cholerae
  misc_feature (1)..(369): tr|C3LR74|C3LR74_VIBCM Epoxyqueuosine reductase OS=Vibr io cholerae serotype O1 (strain M66-2) OX=579112 GN=que G PE=3 SV=1
MDYQQLANQIKQWAIELGFEKVGICDVDLSEHEPALQAWLDAGYHGEMDWMARHGMMRARPAELLPGTLRVISARINYLPPQAQFASNLSDPNQAYISRYALGRDYHKLVRNQLKKLGEKIEQEVGKLGYRPFVDSAPILERPLAQKAGLGWTGKHSLILDKENGSWFFLGELLVDIPLPVDEPSENQCGKCTACITSCPTNAIVAEGVVDARRCVSYLTIEYSGVIPLEFRRAMGNRIYGCDDCQLVCPWNRFAPLTQQSDFHRRQSLNNADLVVLFEWDEATFLKNMEGSAIRRIGHQQWRRNLIIAMGNAPYSPRIIDTLQRHLGQSELLDEHIHWALEEQTQKTATPRQHARLIRIIEKGLPRDA

SEQ ID NO: 81958 - protein, 373 aa, Vibrio cidicii
  misc_feature (1)..(373): tr|A0A151KVG2|A0A151KVG2_9VIBR Epoxyqueuosine reductase OS=Vibrio cidicii OX=1763883 GN=queG PE=3 SV=1
MDYQQLAQQIKIWGAELGFQKVGICDVDLREHEAELQKWLDAGYHGSMDWMARHGMMRARPNELLPGTIRVISVRINYLPPQAQFAANLADKTQAYISRYALGRDYHKLVRKQLSELGKRIENAVGAFGYRPFVDSAPILERPLAQKAGLGWTGKHSLILDKEAGSWFFLGELLVDLPLPVDEPSTDDCGKCKACITSCPTQAIVDDKIVDARRCISYLTIEFSGVIPEEFRKAIGNRIYGCDDCQLVCPWNREAELTEQSDFHRRDSLHQADLVNLFLWDEPTFLKKMEGSAIRRIGHLQWLRNLAIAMGNAPYSLKIVQALQERKGQNELLDVHIDWALAEQRNQSADSSTIDIKNQRLIRIVEKGLPRDA

SEQ ID NO: 81959 - protein, 370 aa, Vibrio cincinnatiensis
  misc_feature (1)..(370): tr|A0A1T4S9M7|A0A1T4S9M7_VIBCI Epoxyqueuosine reductase OS=Vibrio cincinnatiensis DSM 19608 OX=1123491 GN=queG PE=3 SV=1
MDYQALADQIKHWAYDLGFDKVGICDIDLSEHEPALQSWLDAGYHGEMDWMARHGMLRARPAELLPGTLRVISARINYLPPQAQFATNLSDPSQAYISRYALGRDYHKLVRNRLKKLAEKIEQEVGQLGYRPFVDSAPILERPLAQKAGLGWAGKHSLILDKEAGSWFFLGELLVDIPLPIDQPSENQCGQCRACITSCPTKAIIKDGVVDARRCISYLTIEYSGVIPEEFRHAIGNRIYGCDDCQLVCPWNRFADLTQEPDFHRRDQLKNADLIELFEWNEQTFLRNMEGSPIRRIGHQQWQRNLIIAMGNAPYSQRIIDTLEKKYGMNELLDIHIDWALKCQRQQISYITNKHQRLIRIVKKGLPRNA

SEQ ID NO: 81960 - protein, 370 aa, Vibrio comitans
  misc_feature (1)..(370): tr|A0A4Y3IU27|A0A4Y3IU27_9VIBR Epoxyqueuosine reductase OS=Vibrio comitans NBRC 102076 OX=1219078 GN=queG PE=3 SV=1
MNLQYLADQIKLWGNELGFQKVGITDVDLSSHEEGLKKWIAHGYHGSMEWMERNEDKRLHPEKLHPGTLRVISVRLDYLPPEAHFASNLSDPAQAYISRYALGRDYHKLMRNKLKHLAKKIEDELGELNYRPFVDSAPVLERPLAEKAGLGWTGKHSLLLDEDAGSWFFLGELLIGLPLPVDAPVENQCGKCRSCITSCPTGAIIEDGVIDARKCISYLTIEYDGIIESELSDAMGNRIYGCDDCQLVCPFNRHAQLTQQTDFHRRESIKDSNLITLFLWSEQEFLKNFEGSAIRRIGHLQWLRNLAIALGNSAYSDEAITALDSRLGLCDVLDHHITYAIERLNSQTPLTSTKQQRLIRIVQKGLPRDA

SEQ ID NO: 81961 - protein, 370 aa, Vibrio coralliilyticus
  misc_feature (1)..(370): tr|A0A2A2CI72|A0A2A2CI72_9VIBR Epoxyqueuosine reductase OS=Vibrio coralliilyticus OX=190893 GN=queG PE=3 SV=1
MNYQELANKIKVWAQELGFQKAGICDVDLSEHEAALQKWLDAGYHGEMDWMARHGMMRARPAELLPGTVRVISVRMDYLPPEALFAANLADPTQAYVSRYALGRDYHKLVRNQLKKLGQKIEQEVGQFGYRPFVDSAPILERPLAQKAGLGWTGKHSLILDKDCGSWFFLGELLIDLPLPIDEAHQGDCGKCTACITSCPTQAIIEEGVVDARRCISYLTIEFDGVIPEEFRKPMGNRIYGCDDCQLVCPWNRFSELTEREDFHRRQALTSPDLVTLFAWDEKTFLKNMEGSAIRRIGHIQWLRNLSIAMGNAPYSANIIEALEQRIGLSEVLDEHIRWAIEQQIAQIPHSSTKLNRLIRIVQKGLPRDA

SEQ ID NO: 81962 - protein, 370 aa, Vibrio coralliilyticus
  misc_feature (1)..(370): tr|A0A2A2MJB8|A0A2A2MJB8_9VIBR Epoxyqueuosine reductase OS=Vibrio coralliilyticus OX=190893 GN=queG PE=3 SV=1
MNYQELANKIKVWAQELGFQKAGICDVDLSEHEAALQKWLDAGYHGEMDWMARHSMMRARPAELLPGTVRVISVRMDYLPPEALFAANLADPTQAYISRYALGRDYHKLVRNQLKKLGQKIEQEVGQFGYRPFVDSAPILERPLAQKAGLGWTGKHSLILDKDCGSWFFLGELLIDLPLPIDEAHQGDCGKCTACITSCPTQAIIEEGVVDARRCISYLTIEFDGVIPEEFRKPMGNRIYGCDDCQLVCPWNRFSELTEREDFHRRQALTSPDLVTLFAWDEKTFLKNMEGSAIRRIGHIQWLRNLSIAMGNAPYSANIIEALEQRIGLSEVLDEHIRWAIEQQIAQIPHSSTKLNRLIRIVQKGLPRDA

SEQ ID NO: 81963 - protein, 386 aa, Vibrio crassostreae
  misc_feature (1)..(386): tr|A0A4R3P8G5|A0A4R3P8G5_9VIBR Epoxyqueuosine reductase OS=Vibrio crassostreae OX=246167 GN=queG PE=3 SV=1
MNLDHLAEKIKIWGKELGFQKVGICDIDLSEHEAPLQAWLDAGHHGEMDWMARHGMMRARPDELHPGTIRVISARMNYLPPEAQFASNLSDTTQGYISRYSLGRDYHKLFRNQLKKLGQRIEKEVEGLDSRPFVDSAPILERPLAQKAGLGWTGKHSLILDKDAGSWFFLGELLVNIPLPTDEPSVDECGKCTACITSCPTGAIIDDGVVDARKCISYLTIEYDGVIPEEFRDAIGNRIYGCDDCQLVCPWNRHAELTEQTDFHRREDFQEADLVALSSWDEATFLKKMEGSAIRRIGHTQWLRNIFVAMGNAPFQQRIVETLESHQGKNEMLDVHIEWALNKQLQQLPNASGVQQDNCVQKSNSKISTKKHRLIRIVEKGLPRDA

SEQ ID NO: 81964 - protein, 392 aa, Vibrio crassostreae
  misc_feature (1)..(392): tr|A0A1B1BRC5|A0A1B1BRC5_9VIBR Epoxyqueuosine reductase OS=Vibrio crassostreae 9CS106 OX=1191300 GN=queG PE=3 SV=1
MNLDHLAEKIKIWGKELGFQKVGICDVDLSEHEAPLQAWLDAGNHGEMDWMARHGMMRARPDELHPGTIRVISARMNYLPPEAQFASNLSDTTQGYISRYSLGRDYHKLFRNQLKKLGQRIEKEVEGLDSRPFVDSAPILERPLAQKAGLGWTGKHSLILDKDAGSWFFLGELLVNIPLPTDEPSVDECGKCTACITSCPTGAIIADGVVDARKCISYLTIEYDGVIPEEYRDAIGNRIYGCDDCQLVCPWNRHAELTEQTDFHRREDFQEADLVSLSSWDEATFLKKMEGSAIRRIGHTQWLRNIFVAMGNAPFQQRIIETLESHQGKNEMLDVHIEWALNKQLQQLPNASSVQEDSSTQKNSCVQKSNSKISTKKHRLIRIVEKGLPRDA

SEQ ID NO: 81965 - protein, 375 aa, Vibrio diabolicus
  misc_feature (1)..(375): tr|A0A2L2K6M3|A0A2L2K6M3_9VIBR Epoxyqueuosine reductase OS=Vibrio diabolicus OX=50719 GN=queG PE=3 SV=1
MNYEQLAQQIKIWGKELGFQKVGICDVDLSEHEAALQKWLDAGYHGSMDWMARHGMMRARPNELLPGTVRVISVRMDYLPPEALFASNLANKNHAYISRYALGRDYHKLVRKQLNKLGKLIEQEVGQYGYRPFVDSAPILERPLAQKAGLGWTGKHSLILDQDCGSWFFLGELLIDLPLPVDEPSVDQCGKCKACITSCPTQAIVEDKVVDARRCISYLTIEFDGVIPEEFRKPMGNRIYGCDDCQLVCPWNRYADITEQSDFHRRDSFKNPDLVDMFNWDEATFLKNMEGSAIRRIGHIQWLRNIAVALGNAEYSQRVIDALESRQGENKLLDEHIKWALAEQLNQLPIENKASTETKKQRLIRIVEKGLPRDA

SEQ ID NO: 81966 - protein, 370 aa, Vibrio diazotrophicus
  misc_feature (1)..(370): tr|A0A329E4N4|A0A329E4N4_VIBDI Epoxyqueuosine reductase OS=Vibrio diazotrophicus OX=685 GN=queG PE=3 SV=1
MNYQALADQIKQWATELGFEKVGICDIDLHEHEAALQKWLDAGYHGEMDWMARHGMMRARPAELFPGTIRVISARMNYLPPQAQFASNLSDPTQAYISRYALGRDYHKLVRNQLKKLGEKIENEVEKLSYRPFVDSAPILERPLAQKAGLGWTGKHSLILDKDAGSWFFLGELLVDIPLPVDTPSENECGKCKACITSCPTGAIIADGIVDARKCISYLTIEFDGIIPEEFRTAMGNRIYGCDDCQLVCPWNRFSELTQKKDFHRRESFESPDLLSLFEWDEKTFLQKMEGSAIRRIGHLQWQRNIAIALGNAPYSEKIVSALENAKGQSETLDVHLNWAIEKQLANLPSSIASHQRLIRIIEKGLPRDA

SEQ ID NO: 81967 - protein, 370 aa, Vibrio diazotrophicus
  misc_feature (1)..(370): tr|A0A2J8GDS2|A0A2J8GDS2_VIBDI Epoxyqueuosine reductase OS=Vibrio diazotrophicus OX=685 GN=queG PE=3 SV=1
MNYQALADQIKQWATELGFEKVGICDIDLHEHEMALQKWLDAGYHGEMDWMARHGMMRARPAELLPGTIRVISARMNYLPPKAQFASNLSDPTQAYISRYALGRDYHKLVRNQLKKLGEKIEKEVEKLSYRPFVDSAPILERPLAQKAGLGWTGKHSLILDKEAGSWFFLGELLVDIPLPVDTPSENECGKCKACITSCPTGAIVADGIVDARKCISYLTIEFDGIIPEEFRTAMGNRIYGCDDCQLVCPWNRFSDLTQQKDFHRRESFESPDLLSLFAWDEKTFLQKMEGSAIRRIGHLQWQRNIAIALGNAPYSEQIVSALEKAKGQSETLDVHLNWAIEKQLANLPSSVTSHQRLIRIVQKGLPRDA

SEQ ID NO: 81968 - protein, 370 aa, Vibrio europaeus
  misc_feature (1)..(370): tr|A0A178JC47|A0A178JC47_9VIBR Epoxyqueuosine reductase OS=Vibrio europaeus OX=300876 GN=queG PE=3 SV=1
MNYQELADKIKIWGQELGFQKVGICDVDLSEHEAELQKWLDAGYHGEMDWMARHGMMRARPAELLPGTVRVISVRMNYLPPEAQFAANLSDPTQAYISRYSLGRDYHKLIRNQLKKLGQKIEQEVGSFGYRPFVDSAPILERPLAQKAGLGWTGKHSLILDKECGSWFFLGELLIDLPLPVDEPSVDECGKCKACITSCPTQAIIGDGIVDARRCISYLTIELDGVIPEEFRKAMGNRIYGCDDCQLVCPWNRFSELTDQQDFHRREALTNANLVELFKWDEATFLKNMEGSAIRRIGHLQWLRNLSIAMGNAPYSIDIIEALENRLGISETLDIHIKWALEQQRTQIPAQSTTLNRLIRIVEKGLPRDA

SEQ ID NO: 81969 - protein, 370 aa, Vibrio ezurae
  misc_feature (1)..(370): tr|U3AN50|U3AN50_9VIBR Epoxyqueuosine reductase OS=Vibr io ezurae NBRC 102218 OX=1219080 GN=queG PE=3 SV=1
MNLHHLAEQIKIWGKELGFQKVGISDLDLSDSEEELHHWLGKGYNGNMEWLERNIDKRLYPDRLHPGTLRIISVRLDYLPPEARFASNLSDSTEAYISRYALGRDYHKLMRNKLKKLAQKIEQEVGELNYRPFVDSAPVLERPLAEKAGLGWTGKHSLILNDDTGSWFFLGELMIGLPLPIDEPVENQCGKCRSCMTSCPTDAIVEEGTVDARRCISYLTIEYDGIIDKELADAMGNRIYGCDDCQLVCPFNRFASITEQSDFHRRESIENSNLLSLFAWSEAEFLKNFEGSAIRRIGYLQWLRNLSIAIGNSHYSVDAISALENRLGMGEVLDHHIHYAIERLNSQSDCTSKKQQRLIRIVQKGLPRDA

SEQ ID NO: 81970 - protein, 373 aa, Vibrio fluvialis
  misc_feature (1)..(373): tr|A0A1L9KTR6|A0A1L9KTR6_VIBFL Epoxyqueuosine reductase OS=Vibrio fluvialis OX=676 GN=queG PE=3 SV=1
MDYQQLAQQIKQWGKELGFEKVGICDIDLTEHEAQLQKWLDAGYHGSMDWMARHGMMRARPAELLPGTVRVISVRMNYLPPQAQFAADLADPTQGYISRYALGRDYHKLVRKQLSALAKKIETEVGQFGYRPFVDSAPILERPLAQKAGLGWTGKHSLILDKDAGSWFFLGELLIDLPLPVDQASEEACGKCQACITSCPTQAIVDNKVVDARRCISYLTIEHDGIIAPEFRKAIGNRIYGCDDCQLVCPWNRYADLTQQGDFHRRSPLNNTSLIALFQWDEPTFLKNMEGSAIRRIGHLQWLRNIAVAMGNAPFSPQIVTALESRKGMSELLDEHINWALEEQAAQAGHFSLDVKKQRLIRIVDKGLPRDAR

SEQ ID NO: 81971 - protein, 370 aa, Vibrio fluvialis
  misc_feature (1)..(370): tr|S7HUF1|S7HUF1_VIBFL Epoxyqueuosine reductase OS=Vibr io fluvialis PG41 OX=1336752 GN=queG PE=3 SV=1
MDYHALADQIKSWAIELGFEKVGICDVDLSQHEAKLQQWLDAGYHGEMDWMARHGMMRARPAELLPGTVRVISARMNYLPPQAQFASNLNNPAHAYISRYALGRDYHKLVRNQLKKLGEKIEAAVGELGYRPFVDSAPILERPLAQKAGLGWTGKHSLILDKDAGSWFFLGELLVDIPLPVDTPSVDQCGKCRACVTSCPTGAIVADGVVDARRCISYLTIEYDGVIPLEFRKAMGNRIYGCDDCQLVCPWNRYADLTQQSDFHRRPAFNEPDLVTLFEWDEATFLRNMEGSAIRRIGHQQWQRNLIIAMGNAPYSSRIIDALTRKQGQSELLDEHIQWALEEQERQLPFSNTKHQRLVRIVEKGLPRDA

SEQ ID NO: 81972 - protein, 387 aa, Vibrio fortis
  misc_feature (1)..(387): tr|A0A066UVY7|A0A066UVY7_9VIBR Epoxyqueuosine reductase OS=Vibrio fortis OX=212667 GN=queG PE=3 SV=1
MNLDHLAEQIKTWGQELGFQKVGICDVDLSEHEAALQAWLDAGYHGDMDWMARHGMMRARPDELHPGTVRVISARMNYLPPEAQFATNLADSTQGYISRYALGRDYHKLFRNQLKKLGQKIEKEIEGLDYRPFVDSAPILERPLAQKAGLGWTGKHSLILDKEAGSWFFLGELLVNIPLPVDEPNTEECGKCTACMTSCPTGAIVEEGIVDARRCISYLTIEFDGVIPLEFREAIGNRIYGCDDCQLVCPWNRHADVSKQSDFHRREAFQDIDLVTLASWDEATFLKKMEGSAIRRIGHTQWLRNLFVAMGNAPFQQRIIDILESHLGNDEMLDEHIQWALEKQNQQLPNTVQTALSTISPQESVNKIESKKKRLIRIVEKGLPRDA

SEQ ID NO: 81973 - protein, 370 aa, Vibrio furnissii
  misc_feature (1)..(370): tr|A0A0Q2RIR3|A0A0Q2RIR3_VIBFU Epoxyqueuosine reductase OS=Vibrio furnissii OX=29494 GN=queG PE=3 SV=1
MDYHALADQIKHWAIELGFEKVGICDVDLSQHEAALQQWLDAGYHGEMDWMARHGMMRARPAELLPGTLRVISARMNYLPPQAQFASNLNNPTHAYISRYALGRDYHKLLRNQLKKLGVKIEAAVGELGYRPFVDSAPILERPLAQKAGLGWTGKHSLILDQDSGSWFFLGELLVDIPLPVDTPSEDQCGKCRACVTSCPTGAIVADGVVDARRCISYLTIEYDGVIPLEFRKAVGNRIYGCDDCQLVCPWNRFADLTQQSDFHRRPAFNEPDLVALFAWDEATFLRNMEGSAIRRIGHQQWQRNLIIAMGNAPYSSRIIDALTRHQGQSALLDEHIEWALAEQQAQLPFSNTKHQRLVRIIEKGLPRDA

SEQ ID NO: 81974 - protein, 370 aa, Vibrio furnissii
  misc_feature (1)..(370): tr|F0LNQ1|F0LNQ1_VIBFN Epoxyqueuosine reductase OS=Vibr io furnissii (strain DSM 14383 / NCTC 11218 / VL 6966) OX=903510 GN=queG PE=3 SV=1
MDYHALADQIKHWAIELGFEKVGICDVDLSQHEAALQQWLDAGYHGEMDWMARHGMMRARPAELLPGTLRVISARMNYLPPQAQFASNLNNPTHAYISRYALGRDYHKLLRNQLKKLGEKIEAAVGELGYRPFVDSAPILERPLAQKAGLGWTGKHSLILDQDSGSWFFLGELLVDIPLPVDTPSEDQCGKCRACVTSCPTGAIVADGVVDARRCISYLTIEYDGVIPLEFRKAMGNRIYGCDDCQLVCPWNRFADLTQQSDFHRRPAFNEPDLVALFAWDEATFLRNMEGSAIRRIGHQQWQRNLIIAMGNAPYSSRIIDALTRHQGQSALLDEHIEWALAEQQAQLPFSNTKHQRLVRIIEKGLPRDA

SEQ ID NO: 81975 - protein, 370 aa, Vibrio galatheae
  misc_feature (1)..(370): tr|A0A0F4NFH8|A0A0F4NFH8_9VIBR Epoxyqueuosine reductase OS=Vibrio galatheae OX=579748 GN=queG PE=3 SV=1
MNYQALADKIKIWGQELGFQKVGICDVDLSEHEAQLQKWLDAGYHGEMDWMARHGMMRARPAELLPGTVRVISARMDYLPPQAQFASNLSDPTQAYISRYALGRDYHKLIRNQLKKLGEKIALEVSNLGYRPFVDSAPILERPLAQKAGLGWTGKHSLILDKEAGSWFFLGELLVDLPLPVDDASVDQCGKCKACITSCPTQAIVADGIVDARRCISYLTIEFDGVIPEEFRPSIGNRIYGCDDCQLVCPWNRFAKLTEQSDFHRRESLNQADLVTLFMWDEETFLTNMQGSAIRRIGHLQWLRNLSIAMGNAPYSKNIVKALESRLGVTETLDIHIQWALAQQRGQIPLQSTQLKRLIRIVEKGLPRDA

SEQ ID NO: 81976 - protein, 371 aa, Vibrio gazogenes
  misc_feature (1)..(371): tr|A0A1Z2SEA2|A0A1Z2SEA2_VIBGA Epoxyqueuosine reductase OS=Vibrio gazogenes OX=687 GN=queG PE=3 SV=1
MDYQALADKIKIWAQALGFEKVGICDVDLTEHEAELQRWLDAGYHGDMDWMARHGMLRARPQELHPGTIRVISVRMNYLPPQAHFASNLDTPTHAYISRYALGRDYHKLVRKQLKKLGDKIRQEVGELNARPFVDSAPILERPLAQKAGLGWTGKHSLILDQDAGSWFFLGELLVDIPLPVDQPSQNQCGHCRACVTSCPTGAIVADGVVDARRCISYLTIEFSGIIPLEFRKAIGNRIYGCDDCQLVCPWNRAASLTEQSDFHRRNVFAHPDLVELFEWEEETFLQNTEGSAIRRIGHQQWLRNIAIAMGNAPYSEQIVLALEKRMGETELLDVHIRWSLEQHQQKQRQEQNRKHDRLIRIIQKGLPRDA

SEQ ID NO: 81977 - protein, 371 aa, Vibrio gazogenes
  misc_feature (1)..(371): tr|A0A1M5H5E1|A0A1M5H5E1_VIBGA Epoxyqueuosine reductase OS=Vibrio gazogenes DSM 21264 = NBRC 103151 OX=1123492 GN=queG PE=3 SV=1
MDYQALADKIKIWAQALGFEKVGICDVDLTEHEAELQRWLDAGYHGDMDWMARHGMLRARPQELHSGTIRVISVRMNYLPPQAHFASNLDTPTHAYISRYALGRDYHKLVRKQLKKLGDKIRQEVGELNDRPFVDSAPILERPLAQKAGLGWTGKHSLILDQDAGSWFFLGELLVDIPLPVDQPSQNQCGHCRACVTSCPTGAIVADGVVDARRCISYLTIEFSGVIPLEFRKAIGNRIYGCDDCQLVCPWNRSASLTEQSDFHRRDVFAHPDLVELFAWEEETFLQNTEGSAIRRIGHQQWLRNIAIAMGNAPYSERIVLALEKRLGETELLDVHIRWSLEQHQQKQQQEQNRKHERLIRIIQKGLPRDA

SEQ ID NO: 81978 - protein, 382 aa, Vibrio genomosp.
  misc_feature (1)..(382): tr|A0A1B9QZE2|A0A1B9QZE2_9VIBR Epoxyqueuosine reductase OS=Vibrio genomosp. F10 OX=723171 GN=queG PE=3 SV=1
MDYQHLADQIKIWAKELGFQKVGICDVDLSEHEPQLQKYLDAGFHGEMDWMARHGMMRARPAELLPGTIRVISARMDYLPPEAQFASNLADKTQAYISRYALGRDYHKIIRNQLKKLGKKIEQEVGTYGYRPFVDSAPILERPLAEKAGLGWAGKHSLLLDKETGSWFFLGELLVDLPLPIDQPSQNECGKCSACITSCPTQAIIADGVVDARRCISYLTIEYNGVIPEEFRKPMGNRIYGCDDCQLVCPWNRFSTITEQGDFHRRDTLADANLVSLFSWQEEEFLQKMEGSAIRRIGYIQWLRNLSIAMGNAPFSSSIVAVLEEKLGFNDMLDIHIKWALEEQHRQLPLSLGDLEQNTIDSVEQKKQRLIRVIEKGLPRDA

SEQ ID NO: 81979 - protein, 374 aa, Vibrio genomosp.
  misc_feature (1)..(374): tr|A0A1E5D3Q2|A0A1E5D3Q2_9VIBR Epoxyqueuosine reductase OS=Vibrio genomosp. F6 str. FF-238 OX=1191298 GN=queG PE=3 SV=1
MNYDQLAIQIKIWARELGFQKVGICDVDLREHEGPLQKWLDNGYHGDMDWMARHGMMRARPDELLPGTVRVISARMNYLPPEAMFASNLSDPNLGYISRYSLGRDYHKLVRNKLKKLGQLIEQEVGQFGHRPFVDSAPILERPLAQKAGLGWTGKHSLILDKEAGSWFFLGELLIDLPLPVDTPSEDECGKCKACITSCPTNAIVDEKVVDGRRCISYLTIEFDGVIPEEFRVAIGNRIYGCDDCQLVCPWNRFSDLTDQTDFHRRTSFEEPDLLSLFSWDEDMFLKRMEGSAIRRIGHLQWLRNISIALGNAPYKLAIVEALESRFGLSDVLDTHIQWAIQQQLQQLPVDSARHSTKKQRLIRIVQKGLPRDA

SEQ ID NO: 81980 - protein, 370 aa, Vibrio halioticoli
  misc_feature (1)..(370): tr|V5FMR0|V5FMR0_9VIBR Epoxyqueuosine reductase OS=Vibr io halioticoli NBRC 102217 OX=1219072 GN=queG PE=3 SV=1
MNLHHLAEQIKLWGNELGFQKVGITDLDLSKSEQALTQWLEKGYNGNMEWMERNVDKRLYPDRLHPGTLRVISVRLDYLPPEARFASNLSDPTEAYISRYALGRDYHKLMRNKLKNLAQKIEQELGELNYRPFVDSAPVMERPLAEKAGLGWTGKHSLLLNDDTGSWFFLGELLIGLPLPIDQPVENQCGKCRSCITSCPTGAIVEEGTVDARRCISYLTIEYDGIIDSELSDAMGNRIYGCDDCQLVCPFNRFASITEQSDFHRRESIEDSNLLSLFAWSEAEFLKNFEGSAIRRIGYLQWLRNLSIAMGNGNYSAEAISALESKLGMGEVLDHHINYAIERLNSQSEFTSKKQQRLIRIVQKGLPRDA

SEQ ID NO: 81981 - protein, 376 aa, Vibrio hangzhouensis
  misc_feature (1)..(376): tr|A0A1H6CIB9|A0A1H6CIB9_9VIBR Epoxyqueuosine reductase OS=Vibrio hangzhouensis OX=462991 GN=queG PE=3 SV=1
MMDFNKLASDIKVWARELGFQKVGISDINLEEQESALKNWLDAGYHGDMAWMATHQDLRIHPDKLHPNTCRIISVRMDYLPEDAAFASNLENKHSGYISRYALGRDYHKLIRNLLKKLGQKIEQEVTELGFRPFVDSAPVLERPIAQKAGLGWIGKHSLLLDQDAGSWFFLGELFIDLPLPVDEPVDNQCGKCSACVTSCPTNAILDNGVIDARRCISYLTIEYKGVIPEEYRDAIGNRIYGCDDCQLVCPWNRFAALSQQGDFQRRDAFDDTDLCRLLEWDETTFLKNMEGSAIRRIGHEQWQRNIIIAIGNAPFSQHYLEALEYVSGRTEFLDQHIEWAKQKLLKQLPESVTTNLHNKNQRLIRIVKKGLPRDA

SEQ ID NO: 81982 - protein, 375 aa, Vibrio harveyi
  misc_feature (1)..(375): tr|K5SYQ5|K5SYQ5_VIBHA Epoxyqueuosine reductase OS=Vibr io harveyi OX=669 GN=queG PE=3 SV=1
MNFEQLAQQIKIWGKELGFQKVGICDVDLSEHEAALQKWLDQGYHGSMDWMARHGMMRARPNELLPGTVRVISVRMDYLPPEAKFASNLANKNHAYISRYALGRDYHKLVRKQLNKLGKLIEQEVGQFGYRPFVDSAPILERPLAQKAGLGWTGKHSLILDKDCGSWFFLGELLIDLPLPVDEPSVDQCDKCKACITSCPTQAIVDEKVVDARRCISYLTIEFDGVIPEEFRKPMGNRIYGCDDCQLVCPWNRYAEITEQEDFHRRESFEDPDLVTMFNWDEATFLKQMEGSAIRRIGHLQWLRNISVALGNAEYSQRTIDALEARRGESELLDEHIEWALAQQFNQLPANESDSIETKKKRLIRIVEKGLPRDA

SEQ ID NO: 81983 - protein, 375 aa, Vibrio harveyi
  misc_feature (1)..(375): tr|D0XAV4|D0XAV4_VIBH1 Epoxyqueuosine reductase OS=Vibr io harveyi (strain 1DA3) OX=673519 GN=queG PE=3 SV=1
MNFEQLAQQIKIWGKELGFQKVGICDVDLSEHEAALQKWLDAGYHGSMDWMARHGMMRARPSELLPGTVRVISVRMDYLPPEAKFASNLANKNHAYISRYALGRDYHKLVRKQLNKLGKLIEQEVGQYGYRPFVDSAPILERPLAQKAGLGWTGKHSLILDKDCGSWFFLGELLIDLPLPVDEPSVDQCDKCKACITSCPTQAIVDDKIVDARRCISYLTIEFDGVIPEEFRKPMGNRIYGCDDCQLVCPWNRYAEVTTQEDFHRRDSFEDPDLVTMFNWDEATFLKQMEGSAIRRIGHLQWLRNISVALGNAEYSQEAIDALESRRGESELLDEHINWALEQQFSQFPTNESDSIETKKKRLIRIVEKGLPRDA

SEQ ID NO: 81984 - protein, 371 aa, Vibrio hepatarius
  misc_feature (1)..(371): tr|A0A0M0HVC4|A0A0M0HVC4_9VIBR Epoxyqueuosine reductase OS=Vibrio hepatarius OX=171383 GN=queG PE=3 SV=1
MNYQELADKIKVWAQELGFQKVGICDVDLSEHEAALQKWLDAGYHGEMDWMARHGMMRARPAELLPGTVRVISARMDYLPPQAQFAANLSDPTQAYISRYALGRDYHKLVRNQLKKLGQKIEQEVGQLGYRPFVDSAPLLERPLAQKAGLGWTGKHSLILDKECGSWFFLGELLVDIPLPVDEAKQNDCGKCTACITSCPTQAIVEEGIVDARRCISYLTIEFDGVIPEEFRKAMGNRIYGCDDCQLVCPWNRFAELTQQEDFHRRPSFNSPDLVSLFSWSETEFLKNMEGSPIRRIGHLQWLRNLSVAMGNAPYSKSIVSALESRRGLSDVLDQHIDWALAQQLAQLPYNETSKHGRLIRIIQKGLPRDA

SEQ ID NO: 81985 - protein, 373 aa, Vibrio ichthyoenteri
  misc_feature (1)..(373): tr|F9S879|F9S879_9VIBR Epoxyqueuosine reductase OS=Vibr io ichthyoenteri ATCC 700023 OX=870968 GN=queG PE=3 SV= 1
MNYQELADNIKIWAKELGFQKVGICDVNLQEHEATLQKWLDAGYHGSMDWMARHGMMRARPNELLPGTVRVISVRMDYLPPKAQFATNLNDPTQAYISRYALGRDYHKLIRNQLKKLGQIIEQEVGAFGYRPFVDSAPILERPLAQKAGLGWTGKHSLILDKECGSWFFLGELLIDLPLPVDTPSEDQCGKCKACITSCPTNAIVEDGVVDARRCISYLTIEFDGVIPEKFRKPMGNRIYGCDDCQLVCPWNRFSSLTDQNDFHRRQSLHNPNLIELFAWDEANFLKNMEGSAIRRIGHIQWLRNLSIAMGNAPYSQEIVEALQSRKGISPLLDEHIDWALAEQQQQVREKTGIDIAHQRLIRIINKGIPRDA

SEQ ID NO: 81986 - protein, 370 aa, Vibrio inusitatus
  misc_feature (1)..(370): tr|A0A4Y3I083|A0A4Y3I083_9VIBR Epoxyqueuosine reductase OS=Vibrio inusitatus NBRC 102082 OX=1219070 GN=queG PE =3 SV=1
MNLQYLAEQIKIWGNELGFQKIGITDVDLSSHEEGLKSWVAHGYHGSMEWMERNEDKRLHPEKLHPGTLRVISVRLDYLPPEAHFASNLSDPTQAYISRYALGRDYHKLMRNKLKHLAKKIEDELGELNYRPFVDSAPVLERPLAEKAGLGWTGKHSLLLDEDAGSWFFLGELLIGLPLPVDAPVENQCGKCRSCITSCPTGAIIEEGVIDARKCISYLTIEYDGIIDSKLSDAMGNRIYGCDDCQLVCPFNRHAKLTQQADFHRRESIKDSNLMTLFSWSEQEFLKNFEGSAIRRIGHLQWLRNLAIALGNSVYSDEAIMTLESKLGLCNVLDHHITYAIERLKSQPPLTSTKQQRLIRIVQKGLPRDA

SEQ ID NO: 81987 - protein, 376 aa, Vibrio ishigakensis
  misc_feature (1)..(376): tr|A0A0B8PFY5|A0A0B8PFY5_9VIBR Epoxyqueuosine reductase OS=Vibrio ishigakensis OX=1481914 GN=queG PE=3 SV=1
MDLCQLAEKIKVWGKELGFQQLGITDTDLSLHEQGLQRWIDEGYHGEMSWMERNHEKRIHPEELHPGAVRVISVRLDYLPPQAGFASNLEDTSTAYISRYALGRDYHKLMRNRLKQLGQKIEAEIASNPEFEALNYRPFVDSAPVLERPLAEKAGLGWRGKHSLLLNKEAGSWFFLGEILIGLPLPVDTPAEDNCGKCTACMTSCPTGAIVEEGVVDARKCISYLTIEYDGVIDAELSQAMGNRIYGCDDCQLVCPHNRAAGLTSIEDFHRREALTDSKLLNLFSWDEKTFLKNFEGSAIRRIGYLQWLRNLSIAIGNGPFSHDAIEALESKLGLGEVLDTHINEALERLHQQRPNRSTKKERLIRIVQKGLPRDA

SEQ ID NO: 81988 - protein, 376 aa, Vibrio ishigakensis
  misc_feature (1)..(376): tr|A0A0B8QJK3|A0A0B8QJK3_9VIBR Epoxyqueuosine reductase OS=Vibrio ishigakensis OX=1481914 GN=queG PE=3 SV=1
MDLCQLAEKIKVWGKELGFQQVGITDTDLSLHEQGLQRWIDEGYHGEMSWMERNHEKRIHPEELHPGAVRVISVRLDYLPPQAGFASNLEDTSTAYISRYALGRDYHKLMRNRLKQLGQQIEAEIASNPEFEALNYRPFVDSAPVLERPLAEKAGLGWRGKHSLLLNKEAGSWFFLGEILIGLPLPVDTPAEDNCGKCTACMTSCPTGAIVEEGVVDARKCISYLTIEYDGVIDAELSQAMGNRIYGCDDCQLVCPHNRAAGLTSIEDFHRREALTDSKLLNLFSWDEKTFLKNFEGSAIRRIGYLQWLRNLSIAIGNGPFSHDAIEALESKLGLGEVLDTHINEALERLHQQRPNRSTKKERLIRIVQKGLPRDA

SEQ ID NO: 81989 - protein, 375 aa, Vibrio jasicida
  misc_feature (1)..(375): tr|A0A2S7V8S0|A0A2S7V8S0_9VIBR Epoxyqueuosine reductase OS=Vibrio jasicida OX=766224 GN=queG PE=3 SV=1
MNFEQLAQQIKIWGKELGFQKVGICDVDLSEHEAALQKWLDAGYHGSMDWMARHGMMRARPDELLPGTVRVISVRMNYLPPEAHFASNLANKNHAYISRYALGRDYHKLVRKQLNKLGKLIEQEVGQYGYRPFVDSAPILERPLAQKAGLGWTGKHSLILDKDCGSWFFLGELLIDLPLPVDEPSVDQCDKCKACITSCPTQAIVEDKVVDARRCISYLTIEFDGVIPEEFRKPIGNRIYGCDDCQLVCPWNRYAELTEQEDFHRRDSFEEPDLLTMFHWDEATFLKQMEGSAIRRIGHVQWLRNISVALGNAEYSQQIIEALENRRGESELLDEHIEWALTQQINQLPTNESDSVETKKKRLIRIVEKGLPRDA

SEQ ID NO: 81990 - protein, 380 aa, Vibrio kanaloae
  misc_feature (1)..(380): tr|A0A4U1YFN1|A0A4U1YFN1_9VIBR Epoxyqueuosine reductase OS=Vibrio kanaloae OX=170673 GN=queG PE=3 SV=1
MNLDHLAEKIKIWGKELGFQKVGICDVDLSEHEAPLQAWLDAGNHGEMDWMARHGMMRARPDELHPGTIRVISARMNYLPPEAQFASNLSDTTQGYISRYSLGRDYHKLFRNQLKKLGQKIEKEVEGLDSRPFVDSAPILERPLAQKAGLGWTGKHSLILDKEAGSWFFLGELLVNIPLPVDEPSVDECGKCTACITSCPTGAIIDDGIVDARKCISYLTIEFDGIIPEEYREAIGNRIYGCDDCQLVCPWNRHADITDQKDFHRREDFEESDLVALSSWDEATFLKRMEGSAIRRIGHTQWLRNIFVAMGNAPFQQRIVESLESYRGQSELLDVHIEWALGKQLQQLPNANREQEGHNKVSTKKHRLIRIVEKGLPRDA

SEQ ID NO: 81991 - protein, 380 aa, Vibrio kanaloae; identical to SEQ ID NO: 81990
  misc_feature (1)..(380): tr|A0A1E5DYD1|A0A1E5DYD1_9VIBR Epoxyqueuosine reductase OS=Vibrio kanaloae 5S-149 OX=1191299 GN=queG PE=3 SV=1

SEQ ID NO: 81992 - protein, 386 aa, Vibrio lentus
  misc_feature (1)..(386): tr|A0A2N7IFF5|A0A2N7IFF5_9VIBR Epoxyqueuosine reductase OS=Vibrio lentus OX=136468 GN=queG PE=3 SV=1
MNLDHLAEKIKIWGKELGFQKVGICDVDLSEHEAPLQAWLDAGNHGEMDWMARHGMMRARPDELHPGTIRVISARMNYLPPEAQFASNLNDTTQGYISRYSLGRDYHKLFRNQLKKLGQRIEKEVEGFDSRPFVDSAPILERPLAQKAGLGWTGKHSLILDKDAGSWFFLGELLVNIPLPVDTPSVDECGKCTACITSCPTGAIIADGVVDARKCISYLTIEYDGVIPEEFRDAIGNRIYGCDDCQLVCPWNRHAELTEQTDFHRREDFQEADLVSLSSWDEATFLKKMEGSAIRRIGHTQWLRNIFVAMGNAPFQQRIIETLESHQGKNDMLDVHIEWALNKQLQQLPNASGVQEDNCVQKNSSKISTKKHRLIRIVEKGLPRDA

SEQ ID NO: 81993 - protein, 380 aa, Vibrio lentus
  misc_feature (1)..(380): tr|A0A4U2ARJ4|A0A4U2ARJ4_9VIBR Epoxyqueuosine reductase OS=Vibrio lentus OX=136468 GN=queG PE=3 SV=1
MNLDHLAEKIKIWGKELGFQKVGICDVDLSEHEAPLQAWLDAGNHGEMDWMARHGMMRARPDELHPGTIRVISARMNYLPPEAQFASNLSDTTQGYISRYSLGRDYHKLFRNQLKKLGQRIEKEVEGLDSRPFVDSAPILERPLAQKAGLGWTGKHSLILDKDAGSWFFLGELLVNIPLPVDTPSVDECGKCTACITSCPTGAIIADGVVDARKCISYLTIEYDGVIPEEFRDAIGNRIYGCDDCQLVCPWNRHAELTEQADFHRREDFQEADLVSLSSWDEATFLKKMEGSAIRRIGHTQWLRNIFVAMGNAPFQQRIIETLEFHQGKNDMLDVHIEWALNKQLQQLPNASGVQKNSSKISTKKHRLIRIVEKGLPRDA

SEQ ID NO: 81994 - protein, 370 aa, Vibrio mangrovi
  misc_feature (1)..(370): tr|A0A1Y6IZH2|A0A1Y6IZH2_9VIBR Epoxyqueuosine reductase OS=Vibrio mangrovi OX=474394 GN=queG PE=3 SV=1
MDYQALADKIKIWAQELGFEKVGICDVDLTEHEAELQRWLNAGYHGDMDWMARHGMLRARPHELHPGTVRVISVRMNYLPPLALFAGNLNTPTHAYISRYALGRDYHKLLRKQLKKLGDKIRQETGELNDRPFVDSAPILERPLAQKSGLGWTGKHSLILDKEAGSWFFLGELLIDIPLPVDQPSQNQCGSCSACITSCPTGAIIADGVVDARRCISYLTIEYSGVIPEEFRKAMGNRIYGCDDCQLVCPWNRFSSLTNQPDFHRRNVFSHPDLIELFSWKEETFLQNTEGSAIRRIGHQQWLRNIAIAMGNAPYSKNIVLALEKRLGETELLDVHIRWALEQQRNSPAEKDRKHDRLIRIIQKGLPRDS

SEQ ID NO: 81995 - protein, 355 aa, Vibrio maritimus
  misc_feature (1)..(355): tr|A0A090U5M8|A0A090U5M8_9VIBR Epoxyqueuosine reductase OS=Vibrio maritimus OX=990268 GN=queG PE=3 SV=1
MDLDKLASDIKVWAQELGFQKAGISDIDLLDQEAMLKQWLEAGYHGDMAWMETHQDLRIHPDKLHPNTCRIISVRMDYLPEEAGFASNLENQHAGYISRYALGRDYHKLIRNQLKKLGQRIEKEVSELGYRPFVDSAPVLERPIAEKAGLGWTGKHSLLLDKDAGSWFFLGELFVDLPLPVDAPIDNQCGKCSACITSCPTGAILEDGVIDARRCISYLTIEYKGVIPESLRVAMGNRIYGCDDCQLVCPWNRFAELGQQPDFQRRQAFNDTDLCTLLNWDETTFLKNMEGSAIRRIGHEQWQRNIIIAIGNAPYSQRYIDALEQVQGQSELLDEHIQWLYNNKPTNYPTHQVTL

SEQ ID NO: 81996 - protein, 375 aa, Vibrio maritimus
  misc_feature (1)..(375): tr|A0A090S772|A0A090S772_9VIBR Epoxyqueuosine reductase OS=Vibrio maritimus OX=990268 GN=queG PE=3 SV=1
MDLNKLASDIKVWAQELGFQKAGISDIDLRDQETVLKSWLEAGYHGDMAWMETHQDLRIHPDKLHPNTCRIISVRMDYLPENAGFATNLEDKHSGYISRYALGRDYHKLIRNKLKKLGQRIEQEVSELGYRPFVDSAPVLERPIAEKAGLGWTGKHSLLLDKDAGSWFFLGELFIDLPLPVDAPVENQCGKCSACVTSCPTNAILDNGVIDARRCISYLTIEYKGVIPESLRSAMGNRIYGCDDCQLVCPWNRFADLGQQPDFQRRPAFIDTDLATLLTWDEATFLKYMEGSAIRRIGHEQWQRNLIIAIGNAPYSERYIEALASIQGQSELLDEHIVWARKQLLDQLPGSVDSQLATKNQRLIRIVRKGLPRDA

SEQ ID NO: 81997 - protein, 375 aa, Vibrio mediterranei
  misc_feature (1)..(375): tr|A0A2C9PFB2|A0A2C9PFB2_9VIBR Epoxyqueuosine reductase OS=Vibrio mediterranei OX=689 GN=queG PE=3 SV=1
MDLNKLASDIKQWGQELGFQKVGISDIDLQDQEAVLKNWLAAGYHGDMAWMETHQDLRIHPDKLHPNTCRIISVRMDYLPEDANFASNLEDKHSGYISRYALGRDYHKLIRNLLKKLGQKIEQEVSELGYRPFVDSAPVLERPLAEKAGLGWIGKHSLLLDKEAGSWFFLGELFIDLPLPTDNPVNNECGKCRACVTSCPTGAILENGVIDARRCISYLTIEYKGVIPLEFREAMGNRIYGCDDCQLVCPWNRHAELSQRQDFQRRDSFADTNLDILLSWDEATFLKNMEGSAIRRIGHEQWQRNIIIAMGNAPFSQTYIEQLEQIEGQSDLLDPHIEWALQKQLGQLPVNLDTSLHTKNQRLIRIVKKGLPRDA

SEQ ID NO: 81998 - protein, 375 aa, Vibrio mediterranei
  misc_feature (1)..(375): tr|A0A3G4VHI3|A0A3G4VHI3_9VIBR Epoxyqueuosine reductase OS=Vibrio mediterranei OX=689 GN=queG PE=3 SV=1
MDLNKLASDIKQWGQELGFQKVGISDIDLQDQETVLKNWLAAGYHGDMAWMETHQDLRIHPDKLHPNTCRIISVRMDYLPEDANFASNLEDKHSGYISRYALGRDYHKLIRNLLKKLGQKIEQEVSELGYRPFVDSAPVLERPLAEKAGLGWIGKHSLLLDKEAGSWFFLGELFIDLPLPTDNPVNNECGKCRACVTSCPTGAILENGVIDARRCISYLTIEYKGVIPLEFREAMGNRIYGCDDCQLVCPWNRYAELSQRQDFQRRNSFADTNLDILLSWDEATFLKNMEGSAIRRIGHEQWQRNIIIAMGNAPFSQTYIEQLEQIEGQSDLLDPHIGWALQKQLGQLPVNLDTSLHTKNQRLIRIVKKGLPRDA

SEQ ID NO: 81999 - protein, 369 aa, Vibrio metoecus
  misc_feature (1)..(369): tr|A0A0Q0U3S7|A0A0Q0U3S7_9VIBR Epoxyqueuosine reductase OS=Vibrio metoecus OX=1481663 GN=queG PE=3 SV=1
MDYQQLADKIKQWAIELGFEKVGICDVDLSEHEHALQRWLDAGYHGEMDWMARHGMMRARPAELLPGTLRVISARINYLPPQAQFASNLNNPNQAYISRYALGRDYHKLVRSQLKKLGEKIEQEVGQLSYRPFVDSAPILERPLAQKAGLGWTGKHSLILDKETGSWFFLGELLVDIPLPVDEPSDNQCGKCTACITSCPTNAIVAEGVVDARRCISYLTIEFDGVIPLEFRSAMGNRIYGCDDCQLVCPWNRFAPLTQQNDFHRRQGLTNADLVTLFEWDETTFLKNMEGSAIRRIGHQQWRRNLIIAMGNAPYSPRIIETLQQHLGQSELLDEHIHWALAEQTNKSEPSRQHTRLIRIIEKGLPRDA

SEQ ID NO: 82000 - protein, 369 aa, Vibrio metoecus
  misc_feature (1)..(369): tr|A0A0Q0N9P4|A0A0Q0N9P4_9VIBR Epoxyqueuosine reductase OS=Vibrio metoecus OX=1481663 GN=queG PE=3 SV=1
MDYQQLADKIKQWAIELGFEKVGICDVDLSEHEHALQRWLDAGYHGEMDWMARHGMMRARPAELLPGTLRVISARINYLPPQAQFASNLNDPNQAYISRYALGRDYHKLVRSQLKKLGEKIEQEVGQLSYRPFVDSAPILERPLAQKAGLGWTGKHSLILDKETGSWFFLGELLVDIPLPVDEPSDNQCGKCTACITSCPTNAIVAEGVVDARRCISYLTIEFDGVIPLEFRSAIGNRIYGCDDCQLVCPWNRFAPLTQQNDFHRRQSLNNADLVTLFEWNEASFLKNMEGSAIRRIGHQQWRRNLIIAMGNAPYSPRIIETLQQHLGQSELLDEHIHWALAEQTNKSEPSRQHTRLIRIIEKGLPRDA

SEQ ID NO: 82001 - protein, 370 aa, Vibrio metschnikovii
  misc_feature (1)..(370): tr|A0A380NT75|A0A380NT75_VIBME Epoxyqueuosine reductase OS=Vibrio metschnikovii OX=28172 GN=queG PE=3 SV=1
MDLHLLAEQIKRWAKELGFDKAGICDVDLSQHEAALQAWLDAGYHGEMEWMARHGMLRARPAELLPGTLRVISVRINYLPPQAQFAANLSDPTQAYISRYALGRDYHKLVRNQLKKLADKIEQEVGQLGYRPFVDSAPILERPLAQKAGLGWTGKHSLILDKEAGSWFFLGELLVDIPLPVDTPSENQCGQCRACMTSCPTGAIVEEGVVDARRCISYLTIEYSGVIPEEFRTAIGNRIYGCDDCQLVCPWNRFADLTQEDDFHRRDVLNNADLVALFSWDEKTFLHHMQGSAIRRIGHQQWQRNLIIAMGNAPYSQRIIDALEQKTGESELLDEHIEWALTQQREQLASITNKQQRLIRIIEKGLPRDA

SEQ ID NO: 82002 - protein, 370 aa, Vibrio metschnikovii; identical to SEQ ID NO: 82001
  misc_feature (1)..(370): tr|C9P986|C9P986_VIBME Epoxyqueuosine reductase OS=Vibr io metschnikovii CIP 69.14 OX=675813 GN=queG PE=3 SV=1

SEQ ID NO: 82003 - protein, 369 aa, Vibrio mimicus
  misc_feature (1)..(369): tr|A0A2J9V0F5|A0A2J9V0F5_VIBMI Epoxyqueuosine reductase OS=Vibrio mimicus OX=674 GN=queG PE=3 SV=1
MDYQQLADKIKQWAIELGFEKVGICDVDLSEHEQALQSWLDAGYHGEMDWMARHGMMRARPAELLPGTLRVISARINYLPPQAQFASNLSDPSQAYISRYALGRDYHKLVRNQLKKLGEKIEQEVGQLGYRPFVDSAPILERPLAQKAGLGWTGKHSLILDKETGSWFFLGELLVDIPLPVDEPSENQCGKCTACITSCPTNAIVAEGVVDARRCISYLTIEYSGVIPVEFRSAMGNRIYGCDDCQLVCPWNRFAPLTQQSDFHRRQSLTNADLVTLFEWDETTFLKHMEGSAIRRIGHQQWRRNLIVAMGNAPYSPRIVDTLQQHLGLSELLDEHIHWALAEQTKSSPTPRQHERLIRIIEKGLPRDA

SEQ ID NO: 82004 - protein, 369 aa, Vibrio mimicus
  misc_feature (1)..(369): tr|D2YE76|D2YE76_VIBMI Epoxyqueuosine reductase OS=Vibr io mimicus VM603 OX=671074 GN=queG PE=3 SV=1
MDYQQLADKIKQWAIELGFEKVGICDVDLSEHEQTLQSWLDAGYHGEMDWMAKHGMMRARPAELLPGTLRVISARINYLPPQAQFASNLSDPSQAYISRYALGRDYHKLVRNQLKKLGEKIEQEVGQLGYRPFVDSAPILERPLAQKAGLGWTGKHSLILNKETGSWFFLGELLVDIPLPVDEPSENQCGKCTACITSCPTNAIVAEGVVDARRCISYLTIEYSGVIPVEFRSAMGNRIYGCDDCQLVCPWNRFAPLTQQSDFHRRQSLTNADLVTLFEWDEATFLKHMEGSAIRRIGHQQWRRNLIVAMGNAPYSPRIVDTLQQHLGLSELLDEHIHWALAEQTKSSPTPRQHERLIRIIEKGLPRDA

SEQ ID NO: 82005 - protein, 375 aa, Vibrio mytili
  misc_feature (1)..(375): tr|A0A0C3I8X4|A0A0C3I8X4_9VIBR Epoxyqueuosine reductase OS=Vibrio mytili OX=50718 GN=queG PE=3 SV=1
MNYEQLAKQIKIWGKELGFQKVGICDIDLSEHESALQNWLDAGYHGSMDWMARHGMMRARPAELLPGTIRVISVRMDYLPPDAQFASNLANKNHAYISRYALGRDYHKLVRKQLNKLGKLIEEEVGQFGYRPFVDSAPILERPLAQKAGLGWTGKHSLILDKDCGSWFFLGELLVDLPLPVDKPTQDQCGKCNACITSCPTQAIVADNVVDARRCISYLTIEFDGVIPEEFRKPIGNRIYGCDDCQLVCPWNRYAELTEQEDFHRRESFHTPDLVQMFEWDEATFLKNMEGSAIRRIGHLQWLRNLAIALGNADYSQRVIDALDRRRGSNTLLDEHIDWALTQQLNQIPTNDLQSVETKKNRLIRIIEKGLPRDA

SEQ ID NO: 82006 - protein, 375 aa, Vibrio natriegens
  misc_feature (1)..(375): tr|A0A1B1EFL7|A0A1B1EFL7_VIBNA Epoxyqueuosine reductase OS=Vibrio natriegens OX=691 GN=queG PE=3 SV=1
MNYEQLAQQIKIWGKELGFQKVGICDVDLSEHEAALQQWLDAGYHGSMDWMARHGMMRARPHELLPGTIRVISARMDYLPPEAQFASNLANKNHAYISRYALGRDYHKLVRKQLNKLGKLIEEEVGKFGYRPFVDSAPILERPLAQKAGLGWTGKHSLILDKDCGSWFFLGELLIDLPLPVDKPSVEQCGKCKACITSCPTQAIVDDKVVDARRCISYLTIEFDGIIPEEFRKPMGNRIYGCDDCQLVCPWNRYADITEQEDFHRRDSFQHPDLVDMFGWDEAAFLKNMEGSAIRRIGHLQWLRNIAVALGNAEYSQRVIDALVSRQGESDLLDEHIIWALNQQLNQTPVNETESVETKKNRLIRIVEKGLPRDA

SEQ ID NO: 82007 - protein, 373 aa, Vibrio navarrensis
  misc_feature (1)..(373): tr|A0A099MBI2|A0A099MBI2_9VIBR Epoxyqueuosine reductase OS=Vibrio navarrensis OX=29495 GN=queG PE=3 SV=1
MDYQQLAQQIKIWGAELGFQKVGICDVDLREHEAELQKWLDAGYHGSMDWMARHGMMRARPDELLPGTIRVISVRINYLPPQAQFAANLADKTQAYISRYALGRDYHKLVRKQLSELGKRIENAVGAFGYRPFVDSAPILERPLAQKAGLGWTGKHSLILDKEAGSWFFLGELLVDLPLPVDEPSTDDCGKCKACITSCPTQAIVDDKIVDARRCISYLTIEFSGVIPEEFRKAMGNRIYGCDDCQLVCPWNREAELTEQSDFHRRDSLRQADLVNLFLWDEPTFLKKMEGSAIRRIGHLQWLRNLAIAMGNAPYSLKIVQALQERKGQNELLDVHIDWALAEQLNQSAGSSTIDIKNQRLIRIVEKGLPRDA

SEQ ID NO: 82008 - protein, 375 aa, Vibrio neocaledonicus
  misc_feature (1)..(375): tr|A0A4P8G3L5|A0A4P8G3L5_9VIBR Epoxyqueuosine reductase OS=Vibrio neocaledonicus OX=1208308 GN=queG PE=3 SV=1
MNYEQLAQQIKVWGKELGFQKVGICDVDLSEHEAALQKWLDAGYHGSMDWMARHGMMRARPHELLPGTVRVISVRMDYLPPEAQFASNLANKSHAYISRYALGRDYHKLVRKQLNKLGKLIEQEVGQYGYRPFVDSAPILERPLAQKAGLGWTGKHSLILDQDCGSWFFLGELLIDLPLPVDEPSVDQCGKCKACITSCPTQAIVEDKVVDARRCISYLTIEFDGVIPEEFRKPMGNRIYGCDDCQLVCPWNRYADITEQDDFHRRDSFKNPDLVDMFNWDEATFLKNMEGSAIRRIGHIQWLRNIAVALGNAEYSQRIIDALESRQGENKLLDEHIKWALTEQLNQLPTESNSSIETKKQRLIRIVEKGLPRDA

SEQ ID NO: 82009 - protein, 370 aa, Vibrio neptunius
  misc_feature (1)..(370): tr|A0A0F4NRY2|A0A0F4NRY2_9VIBR Epoxyqueuosine reductase OS=Vibrio neptunius OX=170651 GN=queG PE=3 SV=1
MNYQELANKIKVWAQELGFQKAGICDIDLSEHESALQKWLDAGYHGEMDWMARHGMMRARPAELLPGTVRVISVRMDYLPPEALFAANLADPTQAYISRYALGRDYHKLVRNQLKKLGQKIEQEVGQFGYRPFVDSAPILERPLAQKAGLGWTGKHSLILDKDCGSWFFLGELLIDLPLPIDEAHQGDCGKCTACITSCPTQAIIEEGVVDARRCISYLTIEFDGVIPKEFRKPMGNRIYGCDDCQLVCPWNRFSELTEHEDFHRRQALTSPDLVTLFAWDEKTFLKNMEGSAIRRIGHIQWLRNLSIAMGNAPYSANIIEALEQRIGLSEVLDEHIRWAIEQQIAQIPHSSTKLNRLIRIVQKGLPRDA

SEQ ID NO: 82010 - protein, 372 aa, Vibrio nereis
  misc_feature (1)..(372): tr|A0A0M0HIR7|A0A0M0HIR7_VIBNE Epoxyqueuosine reductase OS=Vibrio nereis OX=693 GN=queG PE=3 SV=1
MNYQELANKIKLWAQELGFQKVGICDVDLSEHEGALQKWLDAGYHGEMDWMARHGMMRARPAELLPGTIRVISARMDYLPPEAQFASNLSAPTQAYISRYALGRDYHKLVRNQLKKLGQKIEQEVGKFGYRPFVDSAPILERPLAQKAGLGWTGKHSLILDKDCGSWFFLGELLIDLPLPIDEPHQGDCGKCKACITSCPTQAIVEDGVVDARRCISYLTIEYDGVIPEEFRKPMGNRIYGCDDCQLVCPWNRFSEITEQNDFHRRASFNNPDLVALFLWEEEAFLKNMEGSAIRRIGHLQWMRNLSIAMGNAPYSQSIVDALESRKGLSEVLDIHIQWAIEQQQSQIPHQTLSNKQERLIRIVQKGLPRDA

SEQ ID NO: 82011 - protein, 370 aa, Vibrio nigripulchritudo
  misc_feature (1)..(370): tr|U4K1W5|U4K1W5_9VIBR Epoxyqueuosine reductase OS=Vibr io nigripulchritudo OX=28173 GN=queG PE=3 SV=1
MDYSELAIKIKQWATELGFQKVGICDVDLSEHEKPLQDWLDAGYHGEMDWMARHGMMRARPAELLPGTVRAISARMNYLPPDAQFASNLEDSTQGYISRYALGRDYHKLVRNQLKKLGQRIEAEVGQFGYRPFVDSAPILERPIAQKAGLGWTGKHSLILDEGSGSWFFLGELLIDLPLPVDEPSTDQCGTCKACITSCPTGAIVSEGVIDSRLCISYLTIELSGKIPVELRSKMGNRIYGCDDCQLVCPWNREADITDQKDFHRRDAFGSADLLTLMSWTEEEFLKKMEGSAIRRIGHIQWMRNVAVAMGNAPFSQDIVYALEGRLGIDDNLDDHIEWAIETQLSKTPVKDRKKERLIRIIQKGLPRDA

SEQ ID NO: 82012 - protein, 391 aa, Vibrio nigripulchritudo
  misc_feature (1)..(391): tr|U4EA20|U4EA20_9VIBR Epoxyqueuosine reductase OS=Vibr io nigripulchritudo FTn2 OX=1238441 GN=queG PE=3 SV=1
MNQLESSPIFHAVGAKNHSKAMDYSELAIKIKQWATELGFQKVGICDVDLSEHEKPLQDWLDAGYHGEMDWMARHGMMRARPAELLPGTVRAISARMNYLPPDAQFASNLEDSTQGYISRYALGRDYHKLVRNQLKKLGQRIEAEVGQFGYRPFVDSAPILERPIAQKAGLGWTGKHSLILDEGSGSWFFLGELLIDLPLPVDEPSTDQCGTCKACITSCPTGAIVSEGVIDSRLCISYLTIELSGKIPVELRSKMGNRIYGCDDCQLVCPWNREADITDQKDFHRRDAFGSADLLTLMSWTEEEFLKKMEGSAIRRIGHIQWMRNVAVAMGNAPFSQDIVYALEGRLGIDDNLDDHIEWAIETQISKTPVKDRKKERLIRIIQKGLPRDA

SEQ ID NO: 82013 - protein, 370 aa, Vibrio orientalis
  misc_feature (1)..(370): tr|C9QNB5|C9QNB5_VIBOR Epoxyqueuosine reductase OS=Vibr io orientalis CIP 102891 = ATCC 33934 OX=675816 GN=queG PE=3 SV=1
MNYQELVEKIKIWGQELGFQKVGICDVDLSAHEQELQRWLDAGYHGDMDWMARHGMMRARPNELLPGTVRVISARMDYLPPEARFASNLADPSQAYVSRYSLGRDYHKLIRNQLKKLGQKIEQEVGQFGYRPFVDSAPILERPLAQKAGLGWTGKHSLVLDKDCGSWFFLGELLIDLPLPVDEPSVDECGKCKACITSCPTQAIVADGVVDARRCISYLTIEFDGVIPEEFRHAMGNRIYGCDDCQLVCPWNRFSDITEQSDFHRREAFEDSDLVTLFMWDEETFLKNMEGSAIRRIGHLQWLRNLSVAMGNAPFSQAIIDALQARIGLTEVLDEHIHWALAEQQSQLPISTTKLNRLIRIVEKGLPRDA

SEQ ID NO: 82014 - protein, 375 aa, Vibrio owensii
  misc_feature (1)..(375): tr|A0A3G2PS28|A0A3G2PS28_9VIBR Epoxyqueuosine reductase OS=Vibrio owensii OX=696485 GN=queG PE=3 SV=1
MNFEQLAQQIKIWGKELGFQKVGICDVDLSEHEAALQKWLDAGYHGSMDWMARHGMMRARPNELLPGTVRVISVRMDYLPPEAKFASNLANKNHAYISRYALGRDYHKLVRKQLNKLGKLIEQEVGQYGYRPFVDSAPILERPLAQKAGLGWTGKHSLILDKDCGSWFFLGELLIDLPLPVDEPSVDQCDKCKACITSCPTQAIVDDKIVDARRCISYLTIEFDGVIPEEFRKPMGNRIYGCDDCQLVCPWNRYAEVTVQEDFHRRDSFEDPDLITMFNWDEATFLKQMEGSAIRRIGHLQWLRNISVALGNAEYSQKAIDALESRRGESELLDEHINWALEQQFSQFPTNESDSIETKKKRLIRIVEKGLPRDA

SEQ ID NO: 82015 - protein, 375 aa, Vibrio owensii; identical to SEQ ID NO: 82014
  misc_feature (1)..(375): tr|A0A0C1YTB1|A0A0C1YTB1_9VIBR Epoxyqueuosine reductase OS=Vibrio owensii CAIM 1854 = LMG 25443 OX=1229493 GN= queG PE=3 SV=1

SEQ ID NO: 82016 - protein, 370 aa, Vibrio palustris
  misc_feature (1)..(370): tr|A0A1R4B8F4|A0A1R4B8F4_9VIBR Epoxyqueuosine reductase OS=Vibrio palustris OX=1918946 GN=queG PE=3 SV=1
MDYHALVANIKSWAYELGFAKVGICDVDLSAHEEALQQWLDAGYHGDMDWMERHGMMRARPAELLPGTVRVISARMNYLPQDAHFATNLSDTTQAYVSRYALGRDYHKLVRNQLKKLGEKIKEEVGALGYRPFVDSAPVLERPLAQKAGLGWTGKHSLILDENDGSWFFLGELLIDLPLPIDEPSENQCGKCRACVTSCPTNAIVADGVVDARRCISYLTIEYAGVIPEEFRKPMGNRIYGCDDCQLVCPFNRFADLTTQADFQRREMFQDPDLLRLFSWDEKTFLQKMEGSAIRRIGHQQWRRNLIIAMGNAPYSQRIIDTLSDTIGQSELLDIHIEWALQQQEAQLPFSDRKKERLIRIVQKGLQRDA

SEQ ID NO: 82017 - protein, 373 aa, Vibrio panuliri
  misc_feature (1)..(373): tr|A0A1Q9HDK7|A0A1Q9HDK7_9VIBR Epoxyqueuosine reductase OS=Vibrio panuliri OX=1381081 GN=queG PE=3 SV=1
MNYQELADKIKVWAKELGFQKVGICDVDLKEHEAELQKWLDSGYHGSMDWMARHGMMRARPDELLPGTIRVISARMDYLPPEAQFASNLSNPNHAYISRYALGRDYHKLVRNQLKKLGQRIEAEVEQLGYRPFVDSAPILERPLAQKAGLGWSGKHSLILDKECGSWFFLGELLVDIPLPVDKPSENQCGACKACMTSCPTAAIVDEGIVDARRCISYLTIEFDGVIPEEFRKAMGNRIYGCDDCQLVCPWNRFADVTQQEDFYRRSCFQTPELVELFHWDETTFLKNMEGSPIRRIGHQQWLRNLSIALGNAPFSQKIIESLKSRKGLSELLDEHIDWAIEQQLAQVHEKNGIKIKHERLIRIVQKGLPRDA

SEQ ID NO: 82018 - protein, 375 aa, Vibrio parahaemolyticus
  misc_feature (1)..(375): tr|A0A0D1VR49|A0A0D1VR49_VIBPH Epoxyqueuosine reductase OS=Vibrio parahaemolyticus OX=670 GN=queG PE=3 SV=1
MNYEQLAQQIKVWGKELGFQKVGICDVDLSEHEAALQKWLDAGYHGSMDWMARHGMMRARPNELLPGTVRVISVRMDYLPPEAQFASNLANKNHAYISRYALGRDYHKLVRKQLNKLGKLIEEEVGQFGYRPFVDSAPILERPLAQKAGLGWTGKHSLILDKECGSWFFLGELLIDLPLPVDTPSVDQCEKCRACITSCPTQAIVEDKVVDARRCISYLTIEFDGVIPEEFRKPMGNRIYGCDDCQLVCPWNRYADVTEQEDFHRRESFHNPDLVELFQWDEATFLKNMEGSAIRRIGHEQWLRNISVALGNAEYSQRVIDALNARLGESKLLDEHIEWALTQQLNHIPSVDAEPIETKKKRLIRIVEKGLPRDA

SEQ ID NO: 82019 - protein, 376 aa, Vibrio parahaemolyticus
  misc_feature (1)..(376): tr|A0A0D1ENL2|A0A0D1ENL2_VIBPH Epoxyqueuosine reductase OS=Vibrio parahaemolyticus VP766 OX=1288782 GN=queG PE =3 SV=1
MNYEQLAQQIKVWGKELGFQKVGICDVDLSEHEAALQKWLDAGYHGSMDWMTRHGMMRARPNELLPGTVRVISVRMDYLPPEAQFASNLANKNHAYISRYALGRDYHKLVRKQLNKLGKLIEEEVGQFGYRPFVDSAPILERPLAQKAGLGWTGKHSLILDKECGSWFFLGELLIDLPLPVDTPSVDQCEKCRACITSCPTQAIVEDKVVDARRCISYLTIEFDGVIPEEFRKPMGNRIYGCDDCQLVCPWNRYADVTKQEDFHRRESFHNPDLVELFQWDEATFLKNMEGSAIRRIGHEQWLRNISVALGNAEYSQRVIDALNARLGESKLLDEHIEWALLTQQLNHIPSVDAEPIETKKKRLIRIVEKGLPRDA

SEQ ID NO: 82020 - protein, 370 aa, Vibrio pectenicida
  misc_feature (1)..(370): tr|A0A427U8C8|A0A427U8C8_9VIBR Epoxyqueuosine reductase OS=Vibrio pectenicida OX=62763 GN=queG PE=3 SV=1
MNYQELANKIKVWANELGFQQAGICDIDLREHETALQNWLNAGYHGDMDWMARHGMMRARPEELVPGTLRVISVRMDYLPPEAQFATNLSEPNHAYISRYALGRDYHKLVRKQLKKLGQKIEQEVGQYGYRPFVDSAPILERPLAQKAGLGWTGKHSLILDKDCGSWFFLGELLVDLPLPIDPPHQGDCGKCSSCKTSCPTQAIISDGVVDARRCISYLTIEFDGVIPEEFRKAIGNRIYGCDDCQLVCPWNRFAELTQEEDFHRKTALLSPDLITLFSWNEEAFLKNMQGSAIRRIGHLQWLRNLSIAMGNAPYSANIIDALKQRYGINDILDEHLDWAIEQQITQIPTSSTKLDRLIRIVQKGLPRDA

SEQ ID NO: 82021 - protein, 370 aa, Vibrio penaeicida
  misc_feature (1)..(370): tr|A0A3S0PIP7|A0A3S0PIP7_9VIBR Epoxyqueuosine reductase OS=Vibrio penaeicida OX=104609 GN=queG PE=3 SV=1
MDYSELAVKIKQWAIELGFQKVGICDVDLKEHEKPLQDWLDAGYHGEMDWMARHGMMRARPDELLPGTVRVISARMNYLPPDAQFASNLNDTTQGYISRYALGRDYHKLVRNQLKKLGQRIEQEAGKFGYRPFVDSAPLLERPLAQKAGLGWTGKHSLILDEGSGSWFFLGELLIDLPLPIDEPSTDQCGSCKACITSCPTGAIISEGVIDSRLCISYLTIELSGKIPVELRAKMGNRIYGCDDCQLVCPWNREADITDQSDFYRRDAFGSSDLITLISWSEQEFLKKMEGSAIRRIGHIQWMRNIAVAMGNAPFSQGIVYALRERIGIDDNLDEHIQWAIDSQMAKTPIKDRKKERLIRIIQKGLPRDA

SEQ ID NO: 82022 - protein, 372 aa, Vibrio ponticus
  misc_feature (1)..(372): tr|A0A3N3E3K4|A0A3N3E3K4_9VIBR Epoxyqueuosine reductase OS=Vibrio ponticus OX=265668 GN=queG PE=3 SV=1
MDYQELADKIKIWAKQLGFQKVGICDVDLKEHEAELQKWLEAGYHGSMDWMARHGMMRARPDELLPGTVRVISARMDYLPPEAQFASNLDNPNHAYISRYALGRDYHKLLRNQLKKLGQMIEQEVASMNYRPFVDSAPILERPLAQKAGLGWSGKHSLILDKECGSWFFLGELLIDLPLPVDTPSDNQCGHCKACITSCPTGAIVEDGVVDARRCISYLTIEFDGVIPLEFRKAMGNRIYGCDDCQLVCPWNRFASITEEQDFHRRKALHSPELVDLFSWDEETFLKNMEGSAIRRIGHQQWLRNIAIAMGNAPFSQAIIESLESRKGLSELLDIHINWAIEEQLSQIAESSRTTKHQRLIRIVQKGLPRDA

SEQ ID NO: 82023 - protein, 373 aa, Vibrio ponticus
  misc_feature (1)..(373): tr|A0A090P7V1|A0A090P7V1_9VIBR Epoxyqueuosine reductase OS=Vibrio ponticus OX=265668 GN=queG PE=3 SV=1
MNYQELADKIKIWAKELGFQKVGICDVNLQEHEAELQKWLDAGYHGTMDWMARHGMMRARPDELLPGTVRVISARMDYLPPQAQFAANLNNPNHAYISRYALGRDYHKLIRNQLKKLGQLIEQEVEALNCRPFVDSAPILERPLAQKAGLGWSGKHSLILDKECGSWFFLGELLIDLPLPVDTPTDDQCGNCKACITSCPTGAIVADGVVDARRCISYLTIENSESIPVEFRKAMGNRIYGCDDCQLVCPWNRFASVTEEQDFHRRKALQSPDLVELFNWDEATFLKNMEGSAIRRIGHQQWLRNLSIAMGNAPYSQRILQTLEARLGLSALLDEHINWAMDEQLAQIGERSSIQIKHERLIRIVEKGLPRDA

SEQ ID NO: 82024 - protein, 374 aa, Vibrio proteolyticus
  misc_feature (1)..(374): tr|U3BSG3|U3BSG3_VIBPR Epoxyqueuosine reductase OS=Vibr io proteolyticus NBRC 13287 OX=1219065 GN=queG PE=3 SV= 1
MDFQHLADKIKIWGQELGFQKVGICDVDLKQHEATLQQWLDNGYHGEMDWMARHGMMRARPDELLPGTIRVISVRMNYLPPEAEFASNLSDPTQAYISRYSLGRDYHKLVRNQLKKLGQRIEQEVGQFGYRPFVDSAPILERPLAQKAGLGWTGKHSLILDKDAGSWFFLGELLIDLPLPTDQPSTDQCGKCTACITSCPTNAIVAEGVVDARRCISYLTIEYAGVIPLEFRKAMGNRIYGCDDCQLVCPWNRFSSLTEQSDFHRRPVFKNADLVNLFQWDEATFMKNMEGSPIRRIGHIQWLRNLAIALGNAPYSQRILEALEARRDEHVLLTPHIEWALNEQLAQLPASLSDVNRKTQRLIRIVQKGMPRDA

SEQ ID NO: 82025 - protein, 375 aa, Vibrio qinghaiensis
  misc_feature (1)..(375): tr|A0A223MUX6|A0A223MUX6_9VIBR Epoxyqueuosine reductase OS=Vibrio qinghaiensis OX=2025808 GN=queG PE=3 SV=1
MDYQVLADKIKIWARELGFEKVGICDIDLSEHEEPLQKWLDAGFHGEMDWMARHGMMRARPHELLPGTVRVISARMNYLPPDARFASDLNNPNYAYISRYALGRDYHKLVRNQLKKLGEKIEQEVGALGYRPFVDSAPILERPLAQKAGLGWAGKHSLILDKESGSWFFLGELLIDLPLPVDTPSSNQCGKCTACITSCPTQAIVEDGVVDARRCISYLTIEYDGVIAEEFRKAMGNRIYGCDDCQLVCPWNRFSNLTQQSDFHRRQALDEPDLVELFAWDEATFLRYMEGSAIRRIGHQQWLRNLSIALGNAPYSQRIVTALNMRLGLSDLLDEHIHWALVEQQRKSAEPENSHSSNKQQRLIRIVEKGLPRDA

SEQ ID NO: 82026 - protein, 373 aa, Vibrio quintilis
  misc_feature (1)..(373): tr|A0A1M7YR15|A0A1M7YR15_9VIBR Epoxyqueuosine reductase OS=Vibrio quintilis OX=1117707 GN=queG PE=3 SV=1
MMDYQILADKIKLWALELGFEKAGICDIDLSQHEAELQRWLDAGYHGDMEWMARHGMMRARPDELLPGTIRVISVRMTYLPPEAKFSLDLSTPTHAYISRYALGRDYHKLLRNQLKKLAEKIKQEAGELNYRPFVDSAPVLERPLAEKAGLGWTGKHSLILDKDTGSWFFLGEILVDIPLPVDQPVSNQCGQCKACITSCPTNAIVDDGVVDARRCISYLTIEYAGVIPEEFREAMGNRIYGCDDCQLVCPWNRFSPLTGQPDFHRREILATPDLVDLFLWDEQTFLKNMEGSAIRRIGHIQWLRNLAVAMGNAPYAKNIIQALTQRLGLSELLDTHIHWAISQQNKKRDIRKQNRKHDRLIRIIQKGLPRDA

SEQ ID NO: 82027 - protein, 373 aa, Vibrio renipiscarius
  misc_feature (1)..(373): tr|A0A0C2NGB6|A0A0C2NGB6_9VIBR Epoxyqueuosine reductase OS=Vibrio renipiscarius OX=1461322 GN=queG PE=3 SV=1
MNYQELADNIKIWAKELGFQKVGICDVNLQEHEAALQQWLDAGYHGSMDWMARHGMMRARPNELLPGTVRVISARMDYLPPQAQFASNLDDPTQAYISRYALGRDYHKLLRNQLKKLGQRIELEVGAFGYRPFVDSAPILERPLAQKAGLGWTGKHSLILDKECGSWFFLGELLIDLPLPVDTPSEEQCGKCKACITSCPTNAIVDDGIVDARRCLSYLTIEYDGVIPEEFRKPMGNRIYGCDDCQLVCPWNRFSPLTDHDDFHRRQSLKNPDLIELFSWDEARFLKNMEGSAIRRIGHGQWLRNISVAMGNAPYSQHIVEALKMRKGLSLVLDEHIEWALEQQLKQVREECGINITHQRLIRIINKGLPRDA

SEQ ID NO: 82028 - protein, 375 aa, Vibrio rotiferianus
  misc_feature (1)..(375): tr|A0A2K7SSB2|A0A2K7SSB2_9VIBR Epoxyqueuosine reductase OS=Vibrio rotiferianus OX=190895 GN=queG PE=3 SV=1
MNYEQLAQQIKIWGKELGFQKVGICDVDLSEHEAALQKWLDAGYHGSMDWMARHGMMRARPDELLPGTVRVISVRMDYLPPEARFASNLANTNHAYISRYALGRDYHKLVRKQLNKLGKLIEQEVGQFGYRPFVDSAPILERPLAQKAGLGWTGKHSLILDKDCGSWFFLGELLIDLPLPVDEPSVDQCDKCKACITSCPTQAIVDEKIVDARRCISYLTIEFDGVIPEEFRKPMGNRIYGCDDCQLVCPWNRYAEITEQEDFHRRESFEEPDLVTMFNWDESTFLKQMEGSAIRRIGHLQWLRNISVALGNAEYSQLIIEALEARQGENKLLDEHIEWALEQQFNQIPANQSDSIDTKKKRLIRVVEKGLPRDA

SEQ ID NO: 82029 - protein, 371 aa, Vibrio ruber
  misc_feature (1)..(371): tr|A0A1R4LPG6|A0A1R4LPG6_9VIBR Epoxyqueuosine reductase OS=Vibrio ruber DSM 16370 OX=1123498 GN=queG PE=3 SV=1
MDYQALADKIKIWAQELGFEKVGICDVDLTEHEAELQRWLDAGYHGEMDWMARHGMLRARPQELHPGTIRVISVRMNYLPPQAHFASNLDTPTHAYISRYALGRDYHKLVRKQLKKLGDKIRHEVGELNDRPFVDSAPILERPLAQKAGLGWTGKHSLILDQDAGSWFFLGELLVDIPLPVDQPSQNQCGQCRACITSCPTGAIVADGVVDARRCISYLTIEFSGIIPLEFRKAIGNRIYGCDDCQLVCPWNRSASLTSQSDFHRRDVFSHPDLVELFEWEEETFLQNTEGSAIRRIGHQQWLRNIAVAMGNAPYSERIVLALEKRLGETELLDVHIRWSLEQHQQKQQQAENRKHQRLIRIIQKGLPRDA

SEQ ID NO: 82030 - protein, 372 aa, Vibrio rumoiensis
  misc_feature (1)..(372): tr|A0A1E5DZJ8|A0A1E5DZJ8_9VIBR Epoxyqueuosine reductase OS=Vibrio rumoiensis 1S-45 OX=1188252 GN=queG PE=3 SV= 1
MNYDQLASNIKTWGQELGFQKVGITDIDLSDHEVQLQRWLDAGYHGTMDWMARHGMMRARPEELHPGTTRVISVRMDYLPPEAQFASNLADTTQAYISRYALGRDYHKLMRNQLKKLGERIEEEVGKLGYRPFVDSAPILERPLAQKAGLGWAGKHSLILDKEAGSWFFLGELFVDIPLPIDKPQTDQCGKCTACITSCPTGAIVENGVIDARLCISYLTIEFDGIIPEHLRSKMGNRIYGCDDCQLVCPWNREADVTKQNAFHRKDIFQDSSLLTLFQWNEPLFLKNMEGSAIRRIGHQQWLRNLAIALGNAPFSPDITEALKTRLGLSELLDEHIHWALAQQHDKNQHLARNTKLDRLVRIIGKGLPRDA

SEQ ID NO: 82031 - protein, 375 aa, Vibrio sagamiensis; identical to SEQ ID NO: 81934
  misc_feature (1)..(375): tr|A0A511QHN0|A0A511QHN0_9VIBR Epoxyqueuosine reductase OS=Vibrio sagamiensis NBRC 104589 OX=1219064 GN=queG P E=3 SV=1

SEQ ID NO: 82032 - protein, 373 aa, Vibrio scophthalmi
  misc_feature (1)..(373): tr|A0A1B1NSD8|A0A1B1NSD8_9VIBR Epoxyqueuosine reductase OS=Vibrio scophthalmi OX=45658 GN=queG PE=3 SV=1
MNYQELADNIKIWANDLGFQKVGICDVNLQEHEAALQKWLDAGYHGCMDWMARHGMMRARPDELLPGTVRVISVRMDYLPPKAQFATNLADPTQAYISRYALGRDYHKLIRNQLKKLGQRIEQEVGSFGYRPFVDSAPILERPLAQKAGLGWTGKHSLILDKECGSWFFLGELLIDLPLPVDTPSEDQCGKCKACMTSCPTNAIIEEGIVDARRCISYLTIEYDGVIPEEFRKPMGNRIYGCDDCQLVCPWNRFSSLTDQDDFHRRQSLQNPDLIALFAWDEASFLKNMEGSAIRRIGHVQWLRNLSIAMGNAPYSQDIVEALQMRIGISPVLDEHIDWALAQQRQQIKEKNGIDITHQRLIRVINKGIPRDA

SEQ ID NO: 82033 - protein, 373 aa, Vibrio scophthalmi
  misc_feature (1)..(373): tr|F9RN86|F9RN86_9VIBR Epoxyqueuosine reductase OS=Vibr io scophthalmi LMG 19158 OX=870967 GN=queG PE=3 SV=1
MNYQELADNIKIWANDLGFQKVGICDVNLQEHEATLQKWLDAGYHGSMDWMARHGMMRARPDELLPGTVRVISVRMDYLPPKAQFATNLADPTQAYISRYALGRDYHKLIRNQLKKLGQRIEQEVGSFGYRPFVDSAPILERPLAQKAGLGWTGKHSLILDKECGSWFFLGELLIDLPLPVDTPSEDQCGKCKACMTSCPTNAIIEEGIVDARRCISYLTIEYDGIIPEEFRKPMGNRIYGCDDCQLVCPWNRFSSLTEQDDFHRRQSLQNPDLIALFAWDEASFLKNMEGSAIRRIGHVQWLRNLSIAMGNAPYSQDIVEALQMRIGISPVLDEHIEWAIAQQRQQIKEKSGIDITHQRLIRVINKGIPRDA

SEQ ID NO: 82034 - protein, 375 aa, Vibrio shilonii
  misc_feature (1)..(375): tr|A6D8D8|A6D8D8_9VIBR Epoxyqueuosine reductase OS=Vibr io shilonii AK1 OX=391591 GN=queG PE=3 SV=1
MDLNKLASDIKQWGQELGFQKVGISDIDLQDQETVLKNWLAAGYHGDMAWMETHQDLRIHPDKLHPNTCRIISVRMDYLPEDANFASNLEDKHSGYISRYALGRDYHKLIRNLLKKLGQKIEQEVSELGYRPFVDSAPVLERPLAEKAGLGWIGKHSLLLDKEAGSWFFLGELFIDLPLPTDNPVNNECGKCRACVTSCPTGAILENGVIDARRCISYLTIEYKGVIPLEFREAMGNRIYGCDDCQLVCPWNRYAELSQRQDFQRRNSFADTNLDILLSWDEATFLKNMEGSAIRRIGHEQWQRNIIIAMGNAPFSQTYIEQLEQIEGQSDLLDPHIEWALQKQLGQLPVNLDTSLHTKNQRLIRIVKKGLPRDA

SEQ ID NO: 82035 - protein, 372 aa, Vibrio sinaloensis
  misc_feature (1)..(372): tr|A0A0A5HUH0|A0A0A5HUH0_9VIBR Epoxyqueuosine reductase OS=Vibrio sinaloensis OX=379097 GN=queG PE=3 SV=1
MNYQELADKIKIWAQELGFQKVGICDVDLSEHEAELQKWLDAGYHGEMDWMARHGMMRARPDELLPGTIRVISTRMNYLPPEAQFASNLSDTTQAYISRYALGRDYHKLVRNQLKKLGQRIEEEVGQFGYRPFVDSAPILERPLAQKAGLGWTGKHSLILDKECGSWFFLGELLIDLPLPIDTPSEEACGKCKACITSCPTSAIISEGVVDARRCISYLTIEFDGVIPEEFRKPMGNRIYGCDDCQLVCPWNRFSDITKQSDFHRRSTLTNADLVQLFLWDEATFLKNMEGSAIRRIGHIQWMRNLSIAMGNAPFSPRIIDALRARAGINDVLDVHIDWAIEQQLGQESIAGTNTKQQRLIRIVEKGLPRDA

SEQ ID NO: 82036 - protein, 372 aa, Vibrio sinaloensis
  misc_feature (1)..(372): tr|E8M4K7|E8M4K7_9VIBR Epoxyqueuosine reductase OS=Vibr io sinaloensis DSM 21326 OX=945550 GN=queG PE=3 SV=1
MNYQELADKIKLWGQELGFQKVGICDVDLSEHEAELQKWLDAGYHGSMDWMARHGMMRARPSELLPGTVRVISARMNYLPPEAQFASNLSDTTQAYISRYALGRDYHKLVRNQLKKLGQKIEQEVGQFGYRPFVDSAPILERPLAQKSGLGWTGKHSLILDKECGSWFFLGELLIDLPLPVDTASINECGKCSACITSCPTSAIVADGIVDARRCISYLTIEYDGVIPEEFRKSMGNRIYGCDDCQLVCPWNRFSDLTQQKDFHRREALESADLITLFMWDENTFLKNMEGSAIRRIGHLQWLRNLSVAMGNAPFSQEIVEVLSSRKGLSDVLDVHIEWALSQQLAQTPLKNATNRQQRLIRIIQKGLPRDA

SEQ ID NO: 82037 - protein, 376 aa, Vibrio sp.
  misc_feature (1)..(376): tr|A0A3D1Z6N4|A0A3D1Z6N4_VIBSX Epoxyqueuosine reductase OS=Vibrio sp. OX=678 GN=queG PE=3 SV=1
MNYQELANKIKQWGKELGFQQVGITDVDLSEHEAQLQRWLDAGYHGSMDWMARHGMMRARPQELHPGTVRVISVRMDYLPPEAQFASNLSDPTQAYISRYSLGRDYHKLIRNQLKKLGQRIEEEVGELGYRPFVDSAPILERPLAQKAGLGWAGKHSLILDKQAGSWFFLGELLVDIPLPIDEPQTDQCGQCRACMTSCPTGAIVEEGVIDARLCISYLTIELDGVIPEELRSKIGNRIYGCDDCQLVCPWNRAADVTNETSFHRRDIFNDADLIKLFQWNELQFLKNMEGSAIRRIGHIQWLRNISIALGNAPYESAILEALTTRLGLDDNLDIHIQWAIEQQNKKKNDIDANTARNTKLERLVRIIGKGLPRDA

SEQ ID NO: 82038 - protein, 369 aa, Vibrio sp.
  misc_feature (1)..(369): tr|A0A0H2MXA1|A0A0H2MXA1_9VIBR Epoxyqueuosine reductase OS=Vibrio sp. VPAP30 OX=1647102 GN=queG PE=3 SV=1
MNYQELTDKIKIWGQELGFQKVGICDVDLSEHEAELQKWLDAGYHGEMDWMARHGMMRARPAELLPGTLRVISVRMNYLPPQAQFAANLSDPTQAYISRYSLGRDYHKLVRNQLKKLGQKIEQEIGNFGYRPFVDSAPILERPLAQKSGLGWTGKHSLILDKECGSWFFLGELLIDLPLPVDKPSVEECGKCKACITSCPTQAIVADGIVDARRCISYLTIEFEGVIPEEFRKAMGNRIYGCDDCQLVCPWNRFSDLTDQQDFHRREALTNANLVELFKWDEATFLKNMEGSAIRRIGHLQWLRNLSVAMGNAPYSIDIIEALESRVGLSDTLDVHIRWAQQQQTQIPAQSTKLNRLIRIVEKGLPRDA

SEQ ID NO: 82039 - protein, 371 aa, Vibrio spartinae
  misc_feature (1)..(371): tr|A0A1N6M4M6|A0A1N6M4M6_9VIBR Epoxyqueuosine reductase OS=Vibrio spartinae OX=1918945 GN=queG PE=3 SV=1
MDYQALADKIKIWAQALGFEKIGICDVDLTEHEAELQRWLDAGYHGDMDWMARHGMLRARPQELHPGTIRVISVRMNYLPPQAHFASNLDSPTHAYISRYALGRDYHKLVRKQLKKLGDKIRQEVGELNARPFVDSAPILERPLAQKAGLGWTGKHSLILDQDAGSWFFLGELLVDIPLPVDQPSQNQCGHCRACVTSCPTGAIVADGVVDARRCISYLTIEFSGIIPLEFRKAIGNRIYGCDDCQLVCPWNRSASLTEQSDFHRRDVFAHPDLVELFAWEEETFLQNTEGSAIRRIGHQQWLRNIAIAMGNAPYSERIVLALENRLGETELLDVHIRWSLEQHQQKQRQEQNRQHERLIRIIQKGLPRDA

SEQ ID NO: 82040 - protein, 380 aa, Vibrio splendidus
  misc_feature (1)..(380): tr|A0A2N7ETP1|A0A2N7ETP1_VIBSP Epoxyqueuosine reductase OS=Vibrio splendidus OX=29497 GN=queG PE=3 SV=1
MNLDHLAEKIKIWGKELGFQKVGICDVDLSEHEAPLQAWLDAGNHGEMDWMARHGMMRARPDELHPGTIRVISARMNYLPPEAQFASNLSDTTQGYISRYSLGRDYHKLFRNQLKKLGQRIEKEVEGLDSRPFVDSAPILERPLAQKAGLGWTGKHSLILDKDAGSWFFLGELLVNIPLPVDEPSVDECGKCTACITSCPTGAIIADGVVDARKCISYLTIEYDGVIPEEFRDAIGNRIYGCDDCQLVCPWNRHAELTEQTDFHRREDFQEADLVSLSSWDEATFLKKMEGSAIRRIGHTQWLRNIFVAMGNAPFQQRIVETLESHQGKNEMLDVHIEWALNKQLQQLPNASGVQRSSSKISTKKHRLIRIVEKGLPRDA

SEQ ID NO: 82041 - protein, 380 aa, Vibrio splendidus
  misc_feature (1)..(380): tr|A0A1E5B451|A0A1E5B451_VIBSP Epoxyqueuosine reductase OS=Vibrio splendidus ZS-139 OX=617140 GN=queG PE=3 SV= 1
MNLDHLAEKIKIWGKELGFQKVGICDVDLSEHEAPLQAWLDAGNHGEMDWMARHGMMRARPNELHPGTIRVISARMNYLPPEAQFASNLSDTTQGYISRYSLGRDYHKLFRNQLKKLGQRIEKEVEGLDSRPFVDSAPILERPLAQKAGLGWTGKHSLILDKDAGSWFFLGELLVNIPLPVDTPSIDECGKCTACITSCPTGAIIADGVVDARKCISYLTIEYDGVIPEEYRDAIGNRIYGCDDCQLVCPWNRHAELTEQKDFHRREDFQEADLVSLSSWDEATFLKKMEGSAIRRIGHTQWLRNIFVAMGNAPFQQRIVETLESHQGKNDMLDVHIEWALEKQLQQLPNASSIQEGKNKVSTKKHRLIRIVEKGLPRDA

SEQ ID NO: 82042 - protein, 370 aa, Vibrio superstes
  misc_feature (1)..(370): tr|A0A511QXF3|A0A511QXF3_9VIBR Epoxyqueuosine reductase OS=Vibrio superstes NBRC 103154 OX=1219062 GN=queG PE= 3 SV=1
MNLQHLADQIKLWGNELGFQKIGITDVDLSSHEEGLKKWIAHGYHGSMEWMERNEDKRLHPNKLHPGTLRVISVRLDYLPPEAHFASNLSDPTQAYISRYALGRDYHKLMRNKLKNLAKKIEDELGELNYRPFVDSAPVLERPLAEKAGLGWTGKHSLLLDEEAGSWFFLGELLIGLPLPVDAPVEKQCGKCRSCITSCPTGAIIEDGVIDARKCISYLTIEYDGIIERELSDAMGNRIYGCDDCQLVCPFNRHAQLTQQADFHRRESIKDSNLITLFLWSEQEFLKNFEGSAIRRIGHLQWLRNLAIALGNGAYSDEAITTLEGRLGLCNVLDHHINYAIERLKSQTPFTSTKQQRLIRIVQKGLPRDA

SEQ ID NO: 82043 - protein, 370 aa, Vibrio tapetis
  misc_feature (1)..(370): tr|A0A2N8ZFU6|A0A2N8ZFU6_9VIBR Epoxyqueuosine reductase OS=Vibrio tapetis subsp. tapetis OX=1671868 GN=yjeS PE =3 SV=1
MNYSELADKIKQWGIELGFQDIGICDIDLSEHEASLQRWLDAGYHGQMDWMARHGMMRARPAELLPGTLRAISVRMDYLPPEAQFASNLKNHNQGYISRYALGRDYHKLVRNQLKKLGQKIEQEVGELGYRPFVDSAPILERPLAQKAGLGWSGKHSLIINPSAGSWFFLGELLVDIPLPVDTPLEDQCGKCTACMTSCPTGAIVSEGVVDARKCISYLTIELDGVIPEELRSLIGNRIYGCDDCQLVCPWNKHGQITEKNDFHRRSILNSPELTQLFSWTEEEFMKRMEGSAIRRIGHTQWLRNIAVALGNAPYSQNNIDALNTRLSISDNLDIHIQWAIEQQLAQVPIKDRKKERLIRIVEKGLPRDA

SEQ ID NO: 82044 - protein, 386 aa, Vibrio tasmaniensis
  misc_feature (1)..(386): tr|A0A1A6IWG5|A0A1A6IWG5_9VIBR Epoxyqueuosine reductase OS=Vibrio tasmaniensis OX=212663 GN=queG PE=3 SV=1
MNLDHLAEQIKIWGKELGFQKVGICDVDLSEHEAPLQAWLDAGNHGEMDWMARHGMMRARPDELHPGTIRVISARMNYLPPEAQFASNLNDTTQGYISRYSLGRDYHKLFRNQLKKLGQRIEKEVEGFDSRPFVDSAPILERPLAQKAGLGWTGKHSLILDKDAGSWFFLGELLVNIPLPVDTPSVDECGKCTACITSCPTGAIIADGVVDARKCISYLTIEYDGVIPEEFRDAIGNRIYGCDDCQLVCPWNRHAELTEQTDFHRREDFQEADLVSLSSWDEATFLKKMEGSAIRRIGHTQWLRNIFVAMGNAPFQQRIIETLESHQGKNDMLDVHIEWALQKQLQQLPNASGVQEDNYVQNNSSKISTKKHRLIRIVEKGLPRDA

SEQ ID NO: 82045 - protein, 392 aa, Vibrio tasmaniensis
  misc_feature (1)..(392): tr|A0A1E5ER83|A0A1E5ER83_9VIBR Epoxyqueuosine reductase OS=Vibrio tasmaniensis 1F-187 OX=1191322 GN=queG PE=3 SV=1
MNLDHLAEKIKIWGKELGFQKVGICDVDLSEHEAPLQAWLDAGNHGEMDWMARHGMMRARPNELHPGTIRVISARMNYLPPEAQFASNLSDTTQGYISRYSLGRDYHKLFRNQLKKLGQRIEKEVEGLDSRPFVDSAPILERPLAQKAGLGWTGKHSLILDKDAGSWFFLGELLVNIPLPTDEPSVDECGKCTACITSCPTGAIIADGVVDARKCISYLTIEYDGVIPEEFRDAIGNRIYGCDDCQLVCPWNRHAELTEQTDFHRREDFREADLVSLSSWDEATFLKKMEGSAIRRIGHTQWLRNIFVAMGNAPFQQRIVETLESHRGNNEMLDVHIEWALNKQLQQLPNASSMQEDSSTQKNSCVQKDSSKILTKKHRLIRIVEKGLPRDA

SEQ ID NO: 82046 - protein, 376 aa, Vibrio thalassae
  misc_feature (1)..(376): tr|A0A240EFQ5|A0A240EFQ5_9VIBR Epoxyqueuosine reductase OS=Vibrio thalassae OX=1243014 GN=queG PE=3 SV=1
MMDLNKLASDIKQWGQELGFQKVGISDIDLQDQAAILKNWLAAGYHGDMAWMATHQDLRIHPDKLHPNTCRIISVRMDYLPEDAHFAANLEDKHSGYISRYALGRDYHKLIRNLLKKLGQKIEQEVSELGYRPFVDSAPVLERPIAEKAGLGWIGKHSLLLDKEAGSWFFLGELFIDLPLPTDSPVDNECGKCRACITSCPTGAILENGVIDARRCISYLTIEYKGVIPPEFREAMGNRIYGCDDCQLVCPWNRHAEISRQQDFQRRASFADTNLAVLLSWDESTFLKNMEGSAIRRIGHEQWQRNIIIAMGNAPFSQNYIEKLQQIQGKSELLDSHIEWALQRQMGQVPMKLDTSIHTKNQRLIRIVKKGLPRDA

SEQ ID NO: 82047 - protein, 380 aa, Vibrio toranzoniae; identical to SEQ ID NO: 81990
  misc_feature (1)..(380): tr|A0A109DBB7|A0A109DBB7_9VIBR Epoxyqueuosine reductase OS=Vibrio toranzoniae OX=1194427 GN=queG PE=3 SV=1

SEQ ID NO: 82048 - protein, 370 aa, Vibrio tubiashii
  misc_feature (1)..(370): tr|A0A0A5I5Q8|A0A0A5I5Q8_9VIBR Epoxyqueuosine reductase OS=Vibrio tubiashii OX=29498 GN=queG PE=3 SV=1
MNYQALADKIKIWGQELGFQKVGICDVDLSEHETELQKWLDAGYHGDMDWMARHGMMRARPAELLPGTVRVISVRMDYLPPEAQFAANLSDPTQAYISRYSLGRDYHKLVRNQLKKLGQKIEHEVGNYIYRPFVDSAPVLERPLAQKAGLGWTGKHSLILDKEGGSWFFLGELLVDLPLAVDEPSTNECGKCRACITSCPTQAIVDDGIVDARRCISYLTIEFDGVIPEEFRKAMGNRIYGCDDCQLVCPWNRFSELTEREDFHRRETLKTPNLIDLFMWDEATFLKNMEGSAIRRIGHQQWLRNLSIAMGNAPYSQSIIEALKSRLGLSETLDTHIQWAIEQQVEQLPSQSTKLNRLIRIVEKGLPRDA

SEQ ID NO: 82049 - protein, 370 aa, Vibrio tubiashii
  misc_feature (1)..(370): tr|F9T155|F9T155_9VIBR Epoxyqueuosine reductase OS=Vibr io tubiashii ATCC 19109 OX=1051646 GN=queG PE=3 SV=1
MNYQELADKIKIWGQELGFQKVGICDVDLSEHEAELQKWLDAGYHGEMDWMARHGMMRARPAELLPGTVRVISVRMNYLPPEAQFAANLSDPTQAYISRYSLGRDYHKLIRNQLKKLGQKIEQEVGSFGHRPFVDSAPILERPLAQKAGLGWTGKHSLILDKECGSWFFLGELLIDLPLPVDEPSVDECGKCKACITSCPTQAIVDNGIVDARRCISYLTIEFDGVIPEEFRKAMGNRIYGCDDCQLVCPWNRFSDLTAQPDFHRREALTNANLVELFKWDEATFLKNMEGSAIRRIGHLQWLRNLSVAMGNAPYSINIIEALENRLGLSETLDVHIQWALEQQQAQTPTQSTKLNRLIRIVEKGLPRDA

SEQ ID NO: 82050 - protein, 144 aa, Vibrio variabilis
  misc_feature (1)..(144): tr|A0A090SSL0|A0A090SSL0_9VIBR Iron-sulfur cluster-bind ing protein OS=Vibrio variabilis OX=990271 GN=JCM19239_ 835 PE=4 SV=1
MDLNKLASDIKVWAQELGFQKAGISDIDLRDQETVLKSWLEAGYHGDMAWMETHQDLRIHPDKLHPNTCRIISVRMDYLPEDAGFATNLEDKHSGYISRYALGRDYHKLIRNKLKKLGQRIEQEVSELGYRLCRLGTCFRATDC

SEQ ID NO: 82051 - protein, 232 aa, Vibrio variabilis
  misc_feature (1)..(232): tr|A0A090STQ5|A0A090STQ5_9VIBR Epoxyqueuosine (OQ) redu ctase QueG OS=Vibrio variabilis OX=990271 GN=JCM19239_8 36 PE=4 SV=1
MLKKAGLGWTGKHSLLLDKDAGSWFFLGELFIDLPLPVDAPVENQCGKCSACVTSCPTNAILDNGVIDARRCISYLTIEYKGVIPESLRPAMGNRIYGCDDCQLVCPWNRFADLGQQPDFQRRPAFNDTDLATLLTWDEATFLKYMEGSAIRRIGHEQWQRNLIIAIGNAPYSERYIEALASIQGQSELLDEHIVWARKQLLDQLPGSVDSQLATKNQRLIRIVRKGLPRDA

SEQ ID NO: 82052 - protein, 373 aa, Vibrio vulnificus
  misc_feature (1)..(373): tr|A0A2S3S625|A0A2S3S625_VIBVL Epoxyqueuosine reductase OS=Vibrio vulnificus OX=672 GN=queG PE=3 SV=1
MDYQQLAQQIKQWGKELGFEKVGICDIDLTEHEAQLQKWLDAGYHGSMDWMARHGMMRARPAELLPGTVRVISVRMNYLPPQAQFATDLADPTQGYISRYALGRDYHKLVRKQLSALAKKIEAEVGQFGYRPFVDSAPILERPLAQKAGLGWTGKHSLILDKDAGSWFFLGELLVDLPLPVDQASEEACGKCQACITSCPTQAIVDNKVVDARRCISYLTIEHDGIIAPEFRKAIGNRIYGCDDCQLVCPWNRYADLTQHDDFHRRASFNNASLITLFQWDEPTFLKNMEGSAIRRIGHLQWLRNIAIAMGNAPFSPQIVTTLESRKGMSELLDEHINWALEEQAAQAGHLSLDAKKQRLIRIVDKGLPRDAR

SEQ ID NO: 82053 - protein, 373 aa, Vibrio vulnificus
  misc_feature (1)..(373): tr|Q7MGZ8|Q7MGZ8_VIBVY Epoxyqueuosine reductase OS=Vibr io vulnificus (strain YJ016) OX=196600 GN=queG PE=3 SV= 1
MDYQQLAQQIKQWGKELGFEKVGICDIDLTEHEAQLQKWLDAGYHGSMDWMARHGMMRARPAELLPGTVRVISVRMNYLPPQAQFAADLADPTQGYISRYALGRDYHKLVRKQLSALAKKIEAEVGQFGYRPFVDSAPILERPLAQKAGLGWTGKHSLILDKDAGSWFFLGELLIDLPLPVDQASEEACGKCQACITSCPTQAIVDNKVVDARRCISYLTIEHDGIIAPEFRKAIGNRIYGCDDCQLVCPWNRYADLTQQGDFHRRSPLNNASLITLFQWDEPTFLKNMEGSAIRRIGHLQWLRNIAVAMGNAPFSPQIVTALESRKGMSELLDEHINWALEEQATQAGHFSLDVKKQRLIRIVDKGLPRDAR

SEQ ID NO: 82054 - protein, 373 aa, Vibrio xiamenensis
  misc_feature (1)..(373): tr|A0A1G8GQ24|A0A1G8GQ24_9VIBR Epoxyqueuosine reductase OS=Vibrio xiamenensis OX=861298 GN=queG PE=3 SV=1
MDYQQLAQQIKLWATELGFQKVGICDVDLSEHEAELQKWLDAGFHGEMDWMARHGMLRARPNELLPGTIRVISVRMDYLPQQAAFSANLSRRDHAYISRYALGRDYHKLVRNQLKKLGQKIEQQVDALGYRPFVDSAPILERPLAQKAGLGWTGKHSLILDKDAGSWFFLGELLVDIPLPVDEPQVNQCGKCQACITSCPTNAIIEDGVVDARRCISYLTIEFDGVIDEEFRHAIGNRIYGCDDCQLVCPWNRFAPLSEQDDFQRREVLKNPDLVSLFLWSEETFLDHMQGSAIRRIGHIQWLRNISIAMGNADYSPEIVDALERRKGINDMLDIHIQWALEQQLNQIPTPGTIDTKQQRLIRIVQKGLPRDA

SEQ ID NO: 82055 - protein, 380 aa, Vibrionales bacterium
  misc_feature (1)..(380): tr|A5L7H8|A5L7H8_VIBBS Epoxyqueuosine reductase OS=Vibr ionales bacterium (strain SWAT-3) OX=391574 GN=queG PE= 3 SV=1
MNLDRLAEKIKIWGKELGFQKVGICDVDLSEHEAPLQAWLDAGHHGEMDWMARHGMMRARPNELHPGTIRVISARMNYLPPEAQFASNLSDTTQGYISRYSLGRDYHKLFRNQLKKLGQKIEKEVEGLDSRPFVDSAPILERPLAQKAGLGWTGKHSLILDKDAGSWFFLGELLVNIPLPVDEPSVDECGKCTACITSCPTGAIIADGVVDARKCISYLTIEYDGVIPEEFREAIGNRIYGCDDCQLVCPWNRHADITEQKDFHRREDFKEADLVLLASWDEATFLKKMEGSAIRRIGHTQWLRNIYVAMGNAPFQQRIVETLESHRGNSDMLDVHIEWALEKQLQQLPSIIEVQKGNSKVATKKHRLIRIVEKGLPRDA

SEQ ID NO: 82056 - protein, 374 aa, Vibrionales bacterium
  misc_feature (1)..(374): tr|A0A366XJX1|A0A366XJX1_9GAMM Epoxyqueuosine reductase OS=Vibrionales bacterium C3R12 OX=2267228 GN=queG PE=3 SV=1
MNYDQLAIQIKIWARELGFQKVGICDVDLREHEGPLQKWLDNGYHGDMDWMARHGMMRARPDELLPGTVRVISARMNYLPPEAMFASNLSDPNLGYISRYSLGRDYHKLVRNKLKKLGQLIEQEVGQFGHRPFVDSAPILERPLAQKAGLGWTGKHSLILDKEAGSWFFLGELLIDLPLPVDTPSEDECGKCKACITSCPTNAIVDEKVVDGRRCISYLTIEFDGVIPEEFRVAIGNRIYGCDDCQLVCPWNRFSDLTDQTDFHRRTSFEEPDLLSLFSWDEDMFLKKMEGSAIRRIGHLQWLRNISIALGNAPYKLAIVEALESRFGLSDVLDTHIQWAIQQQLQQLPVDSARHSTKKQRLIRIVQKGLPRDA

SEQ ID NO: 82057 - protein, 310 aa, Vibrionimonas magnilacihabitans
  misc_feature (1)..(310): tr|A0A2S8SBD7|A0A2S8SBD7_9BACT Epoxyqueuosine reductase OS=Vibrionimonas magnilacihabitans OX=669455 GN=queG P E=3 SV=1
MSRIEAYSHTVKSVARQLGFDYCGIAKAEKLNDDAKRLEQWLHQGMHGSMQYMENHFDMRTDPSLLVPGARSVITLLKNYYPSQQQSAHTPHISKYAFGKDYHEVIRAQLKELLQALNEKIGEIHGRGFVDSAPVLERSWATKSGAGWIGKNGNLITKHSGSFYFIATLIVDITLDYDDPFAKDYCGSCSRCIDACPTGAIEDNKVINGSKCISYYTIELKDALLPEQMKDQFKDWMFGCDICQDVCPWNRFSKPHHEINFTPIPEILNLSTKQWEEMTEESFKNIFRHSPLKRTKFSGIQRNLRFITRA

SEQ ID NO: 82058 - protein, 309 aa, Vicingus serpentipes
  misc_feature (1)..(309): tr|A0A5C6S002|A0A5C6S002_9FLAO Epoxyqueuosine reductase OS=Vicingus serpentipes OX=1926625 GN=queG PE=3 SV=1
MIKSTEYTQQIKTEATRLGFSFCGIAKAEYLEEESPRLEKWLSQNMHGKMQYMENYFEKRLDPTKLVEGSKSVVTLMYNYFPEKEQRDDSFNISKYAYGQDYHAIIKKKLKEFVSFIHEEVGEVNAQIYVDSAPVLERAWAKKSGLGWIGKNAMLIHPKNGSFFFLAEVILDLELEYDNPIKDYCGTCTACIDACPTEAILPGKVVDGSKCISYFTIELKDEIIPNEVKGKFNDWMFGCDICQDVCPWNRFSKPHNEKLFNPHPKLLEYSKNEWMDLTEEIYQEIFKKSAVKRTKFKGIKRNIDFLNKN

SEQ ID NO: 82059 - protein, 380 aa, Virgibacillus chiguensis
  misc_feature (1)..(380): tr|A0A1M5PPU1|A0A1M5PPU1_9BACI Epoxyqueuosine reductase OS=Virgibacillus chiguensis OX=411959 GN=queG PE=3 SV= 1
MDTDQLKQEIIAYSKQIGIDKIGFASADVFTELKERLRRQQELDYQSGFEKGSIDERTEPMRLLPEAKSIISIALAYPSRMKGAPRSTKEERRGLFARASWGVDYHIVMRERLEKLASFIQERVPDGKNKVMVDTGELSDRAVAERAGIGFSGKNTSIITPEFGSFVYLGELITNVPFTPDEPVDDSCGSCTKCIDACPTGAIVQGGQLNAKRCIAFLTQTKDFLPDEFRSKIGNRVYGCDTCQMVCPKNLKIDFHHHREFEPEHEVAKPKLIPMLKLSNREFKQTFGHISGSWRGKKPIQRNSLIALGHYKDKTAVADMITVMKNDPRPVIRGTAAWSLGKIGTKEAFQAIREAMQEEKDEQVLVEMEKGLAFEDVYHS

SEQ ID NO: 82060 - protein, 380 aa, Virgibacillus dokdonensis
  misc_feature (1)..(380): tr|A0A2K9J156|A0A2K9J156_9BACI Epoxyqueuosine reductase OS=Virgibacillus dokdonensis OX=302167 GN=queG PE=3 SV =1
MDTDKLKQEIIEYSKQIGIDKIGFASADVFTELKERLRRQQELDYQSGFEKGSIEERTEPTRLLPEAKSIISIALAYPSRMKGAPRSTKEERRGLFARASWGVDYHIVMRERLEKLTSFIQERVPNGKNKVMVDTGELSDRAVAERAGIGFSGKNTSIITPEFGSFVYLGELITNVPFTPDEPVDDSCGPCTKCIDACPTGAIVQGGQLNAKRCIAFLTQTKDFLPDEFRSKIGNRVYGCDTCQMVCPKNLKVDFHHHPEFEPEHEVAKPKLIPMLKLSNREFKQTFGHISGSWRGKKPIQRNSLIALGHYKDTTAVADMITVMKNDPRPVIRGTAAWSLGKISTKEAFQAIREAMLEEKDEQVLVEMEKGLAFENVYHS

SEQ ID NO: 82061 - protein, 380 aa, Virgibacillus dokdonensis; identical to SEQ ID NO: 82059
  misc_feature (1)..(380): tr|A0A3E0WMM0|A0A3E0WMM0_9BACI Epoxyqueuosine reductase OS=Virgibacillus dokdonensis OX=302167 GN=queG PE=3 SV =1

SEQ ID NO: 82062 - protein, 381 aa, Virgibacillus halodenitrificans
  misc_feature (1)..(381): tr|A0A1J0GYR5|A0A1J0GYR5_VIRHA Epoxyqueuosine reductase OS=Virgibacillus halodenitrificans OX=1482 GN=queG PE= 3 SV=1
MDINKLKQEVIEYSKEIGIDKIGFASADVFSELKERLKRQQTLGYQSGFEKGSVDERTEPTRLLPEAQSIISIALAYPSRMKDAPKSTKEERRGIFARASWGIDYHVVMREKLDKLADFLKEKVPDVSNRVMVDTGELSDRAVAERAGIGFSGKNTAIITPEFGSFVYLGELITNIPFLPDSPVEDSCGDCTKCLDACPTGALVQGGQLNAQRCIAFLTQTKDFLPDEFRTKIGNRVYGCDTCQVVCPKNKKVDFHHHPEFEPDHEIAKPKLKPMLRISNREFKNTFGSIAGSWRGKKPLQRNALIALGHYKDITAVEEVIEVMQTDPRPVIRGTAAWSLGKIGTERAYNAIHEAMKKEKDEQVIYEMEKGLAFEKEASRS

SEQ ID NO: 82063 - protein, 381 aa, Virgibacillus indicus
  misc_feature (1)..(381): tr|A0A265N790|A0A265N790_9BACI Epoxyqueuosine reductase OS=Virgibacillus indicus OX=2024554 GN=queG PE=3 SV=1
MDTRQLKQEIIEYSKEIGIDKIGFASADVFGELKERLKRQQSLKYQSGFEKGSNEERTEPERLLPGAQSILSIAIAYPSRMKDAPISTKEDRRGIFARASWGIDYHVVLRDRLEKLSAFINEKLPDSVNKVMVDTGELSDRAVAERAGIGFSGKNTSIITPEFGSFVYLGELITNIPFIPDDPVEDSCGDCRKCLDACPTGALVQGGQLNAQRCIAFLTQTKDFLPDEFRTKIGTRIYGCDTCQVVCPRNKKVDFHIHPEFEPENEIAKPKLKPMLRISNREFKDTFGHVSGSWRGKKPLQRNALIALGHYKDKTAVEEMIGVMNNDPRPVIRGTAAWALGKIGTEEAYEAIKTAMEKEQDEQVLYEMEKGLDFLKEPSAK

SEQ ID NO: 82064 - protein, 376 aa, Virgibacillus massiliensis
  misc_feature (1)..(376): tr|A0A024QDZ8|A0A024QDZ8_9BACI Epoxyqueuosine reductase OS=Virgibacillus massiliensis OX=1462526 GN=queG PE=3 SV=1
MQTDLLKQEIIDYSKQIGIDKIGFASADVFGELKERLKRQQALNYQSGFEKGTIEERTEPTRLLPEAKSIISIALAYPSRMKDAPRSTKEERRGLFARASWGVDYHIVMRERLNKLAAFIQDKVPDGKNKVMVDTGELSDRAVAERAGIGFSGKNTSIITPEFGSFVYLGELITNVPFVPDEPVDDSCGSCTKCIDACPTGAIVQGGQLNAQRCIAFLTQTKDFLPDEFRSKIGNRVYGCDTCQVVCPKNHKVDFHIHPEFEPEHEVSKPKLIPMLKLSNREFKATFGHISGSWRGKKPIQRNTLIALGHYKDKTAVKEIIDVMTKDPRPVIRGTAAWSLGKIGTEEAFHAIKIAMEQETDEQVLFEMEKGLAFQN

SEQ ID NO: 82065 - protein, 381 aa, Virgibacillus necropolis
  misc_feature (1)..(381): tr|A0A221MG61|A0A221MG61_9BACI Epoxyqueuosine reductase OS=Virgibacillus necropolis OX=163877 GN=queG PE=3 SV= 1
MNREKLKQEIIDYSKKIGIDKIGFASADVFSELKERLKRQQNLAYYSGFEKGSVEERTEPERLLPEAQSIISIAIAYPSRMENPPKSTKEERRGIFCRASWGTDYHVILRDRLEKLSAFIKEKVPEVKDKLMVDTGELSDRAVAERAGIGFSGKNTSIITPEFGSYVYLGELVTNIPFIPDEPVDDSCGECTKCLDACPTGALIQGGQLNAQRCIAFLTQTKDYLPDEFRTKIGNRVYGCDTCQVVCPKNKKIDFHIHPETEPDPEIAKPKLQPMLRISNREFKETFGHISGSWRGKKPLQRNALIGLAHYKDVSAVTEIIQVMQHDPRPVIRGTAAWSLGKIGTAEAFAAIEHALAIEKDEQVRYEMQKGLDFRHEVSAR

SEQ ID NO: 82066 - protein, 381 aa, Virgibacillus pantothenticus
  misc_feature (1)..(381): tr|A0A0L0QTJ4|A0A0L0QTJ4_VIRPA Epoxyqueuosine reductase OS=Virgibacillus pantothenticus OX=1473 GN=queG PE=3 S V=1
MHTDPLKQEIIAYSKQIGIDKIGFASADVFTELKERLRRQQELDYQSGFEKGSIEERTEPTRLLPEAKSIISIALAYPTRMKGAPRSTKEERRGLFARASWGVDYHVVMRERLEKLAAFIQERVPDGKNKVMVDTGELSDRAVAERAGIGFSGKNTSIITPEFGSFVYLGELITNVPFTPDEPVDDSCGSCTKCIDACPTGAIVQGGQLNAKRCIAFLTQTKDFLPDEFRSKIGNRVYGCDTCQMVCPKNLKVDFHIHPEFEPEHEVAKPKLIPMLKLSNREFKQTFGHISGSWRGKKPIQRNSLIALGHYKDTTAVADIIEVMKSDPRPVIRGTAAWSLGKIGTKEAFQAIKEAMLEEEDEQVLVEMEKGLAFEPLKDTD

SEQ ID NO: 82067 - protein, 381 aa, Virgibacillus phasianinus
  misc_feature (1)..(381): tr|A0A220TZ44|A0A220TZ44_9BACI tRNA epoxyqueuosine(34) reductase QueG OS=Virgibacillus phasianinus OX=2017483 GN=queG PE=4 SV=1
MNHEAVKQEIIEYSKKIGIDKIGFASADVFSELKERLKRQQDLAYYSGFEKGSIEERTEPERLLPEAKSIISIAIAYPSRMKNAPKSTKEARRGIFCRASWGTDYHVILRDRLAKLSSFIKEKFPESEDKLMVDTGELSDRAVAERAGIGFSGKNTSIITPEFGSFVYLGELITNIPFIPDSPVDDSCGDCTKCLDACPTGALIQGGQLNAQRCIAFLTQTKDYLPDEFRTKIGNRVYGCDTCQVVCPKNQKIDFHIHPETEPEPEIAKPRLQPMLRISNREFKETFGHIAGAWRGKKPLQRNALIGLAHYKDESAVGEIIQVMENDPRPVIRGTAAWSLGKIGTSEAYAAIEHALKTEQDEGVRYEMEKGLDFQHDISAK

SEQ ID NO: 82068 - protein, 381 aa, Virgibacillus profundi
  misc_feature (1)..(381): tr|A0A2A2IEK3|A0A2A2IEK3_9BACI Epoxyqueuosine reductase OS=Virgibacillus profundi OX=2024555 GN=queG PE=3 SV=1
MNTEQLKQEIIDYSKEIGIDKIGFASADVFGELKERLKRQQSLKYQSGFEKGSVEERTEPQRLLPEAQSILSIAIAYPTRMENAPKGTKEDRRGIFARASWGIDYHVVLRDRLEKLSAFIQEKVPDVQNKVMVDTGELSDRAVAERAGIGFSGKNTAIITPEFGSFVYLGELITNIPFVPDEPVEDSCGDCTKCLDACPTGALVQGGQLNAQRCIAFLTQTKDFLPDEFRTKIGNRVYGCDTCQVVCPRNKKIDFHIHPEFEPENEIAKPKLKPMLRISNREFKETYGHIAGSWRGKKPLQRNALIALAHFRDETAVEEIIAVLTNDPRPVIRGTAAWALGKIGTEKAYEAIKSAMEKEQDEQVLYEMEKGLDFEKELSLK

SEQ ID NO: 82069 - protein, 381 aa, Virgibacillus salinus
  misc_feature (1)..(381): tr|A0A1H1E6T0|A0A1H1E6T0_9BACI Epoxyqueuosine reductase OS=Virgibacillus salinus OX=553311 GN=SAMN05216231_275 1 PE=4 SV=1
MNTDHLKQEIIDYSKDIGIDKIGFASADVFGELKERLRRQQSLGYQSGFEKGSVDERTEPERLLPESKSILSIAIAYPSRIKDSPKSTKDERRGIFCRASWGVDYHVVLREKLEKLSAFIEEKFPDAVNKVMVDTGELSDRAVAERAGIGFSGKNTSIITPEFGSYVYLGELITNIPFVPDKPLADGCGSCTKCLDACPTGALVQGGQLNAQRCLAFLTQTKDFMPDEFRSQIGNFIYGFDTCQVVCPYNQKVDFHNHPELEPESDVAKPKLKPMLRISNREFKETFGHIAGSWRGKKPLQRNALIALGHYKDVTAVEEMIAVMKNDVRPVIRGTAAWSLGKIGTNEAFEAITEAIEKETDEQVLFEMKKGLNFQQEFSTT

SEQ ID NO: 82070 - protein, 381 aa, Virgibacillus soli
  misc_feature (1)..(381): tr|A0A0Q9Y6R1|A0A0Q9Y6R1_9BACI Epoxyqueuosine reductase OS=Virgibacillus soli OX=480284 GN=queG PE=3 SV=1
MDYSQLKQDIIDYSKEIGIDKIGFASSDPFIEMKNRLIRQQELEYHSGFEHKNIEERTDPSLIFDQPRSIIAIALAYPSRMKDPPRGKKGERRGLFCRASWGIDYHQLVREKLSQLAIYIKERVPETAIKSMVDTGELVDRAVAERAGIGWSGKNCSIITPEFGSYVYLGEMITNLPFEPDEPLQDQCGDCTMCLDACPTGALVQPGQLNAKRCIAFLTQTKDFLPDEFRTKIGNRLYGCDTCQSVCPKNKGMDFHHHDAMEPEPEIVKPLLDPLLELSNRQFKEIFGEMSGSWRGKKPIQRNAIIALAHFKEKESVDKLIKVMEEDVRPVIRGTAAWALGKIGGEKAKLALHQAQSKEQDVSVLNEIEKGLQFFRLENEV

SEQ ID NO: 82071 - protein, 382 aa, Virgibacillus sp.
  misc_feature (1)..(382): tr|A0A268I1D4|A0A268I1D4_9BACI tRNA epoxyqueuosine(34) reductase QueG OS=Virgibacillus sp. 7505 OX=2022548 GN= queG PE=4 SV=1
MDTEQLKQELIAYSKKIGVDKIRFTTADVFQELKERLKQQQEKNYQSGFEKGTIEERTEPKKLMPSAQSIIAIALAYPSRLPNAPKSTKEEPRGLFCRASWGMDYHEVLRDRMNKLTAFLAERVEGFTYRSMVDTGELSDRAVAERAGIGFSAKNSFVITPEFGSYVYLGEVITNIPFLPDEAVEDSCGTCTKCIDSCPTGALVQGGQLNAQRCIAYLTQTKDFLPDEFRSKIGNRIYGCDTCQLVCPKNKGMDFHLHEEMEPDPEVVKPLLKPLLKMSNKEFKAKFGLISGSWRGKKPIQRNAILAIAHYKTTSAVPDLIELMEQDPRPVIRGTAAWAIGKIGLPEGFDAVRKAMDKEQDEQVLEEMRKGLQFEEEYAEAH

SEQ ID NO: 82072 - protein, 381 aa, Virgibacillus sp.
  misc_feature (1)..(381): tr|A0A075JKZ7|A0A075JKZ7_9BACI Epoxyqueuosine reductase OS=Virgibacillus sp. SK37 OX=403957 GN=queG PE=3 SV=1
MDINKLKQEVIEYSKEIGIDKIGFASTDVFSELKERLKRQQELGYQSGFEKGSVDERTEPTRLLPEAQSIISIALAYPSRMKDAPKSTKEERRGIFARASWGVDYHVVMRDRLDRLAAFLKEKVPDVSNKVMVDTGELSDRAVAERAGIGFSGKNTAIITPEFGSFVYLGELITNIPFLPDSPVEDSCGECTKCLDACPTGALVQGGQLNAQRCIAFLTQTKDFLPDEFRTKIGNRVYGCDTCQVVCPKNKKVDFHHHPEFEPDHEIAKPKLKPMLRISNREFKETFGSIAGSWRGKKPLQRNALIALGHYKDITAVEELIEVMKTDPRPVIRGTAAWSLGKIGTERAYTAINDAMNKETDERVIYEMKKGLAFEKEASRN

SEQ ID NO: 82073 - protein, 378 aa, Viridibacillus arenosi
  misc_feature (1)..(378): tr|W4EPF2|W4EPF2_9BACL 4Fe-4S ferredoxin-type domain-co ntaining protein OS=Viridibacillus arenosi FSL R5-213 O X=1227360 GN=C176_18121 PE=4 SV=1
MIVNVLQEELIEYAKTIGIDKIGFTSAAPFIELKNLLRRQQELNFQSGFEESDIEKRTEPTLLLEEAQSIIAIAIAYPSRMKNAPKGKRGERRGIFCRASWGMDYHTVLREKLALLEAFLQEKVPHAKMRSMVDTGELSDRAVAERAGIGWSAKNCSIITPEFGSYVYLGEMITNIPFAPDEPITDQCGDCTLCIDVCPTGAIVQAGQLNSNRCVAFLTQTKGFLPDEFRTKIGNRIYGCDTCQTVCPKNKGKLNWLHDSFKPDPEIAKPLLEPLLTISNKDFKAKFGYISGSWRGKKPIQRNAIIALAHFKEESALPKLIEVLQNDERPVIRGTAAWAIGKMGVVDAKEILQVALQKEQDPEVIIEIEKGLAFLAQK

SEQ ID NO: 82074 - protein, 378 aa, Viridibacillus arvi
  misc_feature (1)..(378): tr|A0A0M0LA28|A0A0M0LA28_9BACL Iron-sulfur cluster-bind ing protein OS=Viridibacillus arvi OX=263475 GN=AMD00_2 0010 PE=4 SV=1
MIVNDLQEELIEYAKTIGIDKIGFTSAAPFIELKNLLRRQQELNFQSGFEESDIEKRTEPTLLLEEAQSIIAIAIAYPSRMENAPKGKRGERRGIFCRASWGMDYHTVLREKLALLEAFLQEKVPQAKMRSMVDTGELSDRAVAERAGIGWSAKNCSIITPEFGSYVYLGEMITNIPFAPDEPMTDQCGDCTLCIDVCPTGAIVQAGQLNSSRCVAFLTQTKGFLPDEFRAKIGNRIYGCDTCQTVCPKNKGKLNWLHDAFKPDPEIAKPLLEPLLTISNKEFKAKFGYISGSWRGKKPIQRNAIIALAHFKEESAMPKLIEVLQNDERPVIRGTAAWAIGKMGVVEAKEILQVALQKEQDPEVIIEIEKGLAFLAQK

SEQ ID NO: 82075 - protein, 378 aa, Viridibacillus sp.
  misc_feature (1)..(378): tr|A0A2N0F2U0|A0A2N0F2U0_9BACL Epoxyqueuosine reductase OS=Viridibacillus sp. OK051 OX=1884360 GN=BD698_2204 P E=4 SV=1
MIVNDLQAELIEYAKTIGIDKIGFTSAAPFIELKSLLRRQQELNFQSGFEESDIEKRTEPNLLLEEAQSIVAIAIAYPSRMENAPKGKRGERRGIFCRASWGMDYHTVLREKLALLEAFLQEKVPYAKMRSMVDTGELSDRAVAERAGIGWSAKNCSIITPEFGSYVYLGEMITNLPFAPDEPMADQCGDCTLCIDVCPTGAIVQGGQLNSSRCVAFLTQTKGFLPDEFRAKIGNRIYGCDTCQTVCPKNKGKLNWLHDAFKPDPDIAKPLLEPFLTISNREFKEKFGHISGSWRGKKPIQRNAIIALAHFKEVSAMPKLLEILQQDTRPVIRGTAAWAIGKIGGAEAEEVLQAALQKEQDSEVIIEIEKGLAFLEEN

SEQ ID NO: 82076 - protein, 307 aa, Vitellibacter aquimaris
  misc_feature (1)..(307): tr|A0A137RJN3|A0A137RJN3_9FLAO Epoxyqueuosine reductase OS=Vitellibacter aquimaris OX=1548749 GN=queG PE=3 SV= 1
MNDKSKNTAKIKSKAKRLGFLSCGISKAEFLEEEAPRLENWLNKNMHGEMAYMENHFDKRLDPTILVPDSKSVISLLLNYFPSEAQVENTYKISKYAYGTDYHFIIKDKLKQLMDFISEEIGEVRGRAFVDSAPVLDKAWAAKSGLGWIGKHSNLLTKQLGSFYFIAELIIDLDLEYDTPVTDHCGSCTACIDACPTNAIVADRVVDGSKCISYYTIELKNEIPTSEKGKFEDWMFGCDICQDVCPWNRFSKPNNEPLFNPHPELLSMTKKDWEEITEDVFQKLFKKSAVKRTKFLGLKRNINFLKD

SEQ ID NO: 82077 - protein, 339 aa, Vitiosangium sp.
  misc_feature (1)..(339): tr|A0A2T4VPX2|A0A2T4VPX2_9DELT tRNA epoxyqueuosine(34) reductase QueG OS=Vitiosangium sp. GDMCC 1.1324 OX=2138 576 GN=queG PE=4 SV=1
MSPLPTAHLRQLSKQVGFDLVGFARAEPIPPRTLLDWLEAGCAADMDWMTTRAAERLDVSQLLPGARTVIAFATNYYRDEPRAADSPIARYARGRDYHSTLRDKLKAFRKRFSEAYPEVNHYGSVDSGPLMEKVWAARAGLGYVGKNGCFITEPYGSWVLLSALILDAEVDTYAEGPAGDRCGHCRKCIMSCPTGALLGNGRVDARACLSYQTIENRHAEVPESFRVEMDNIIFGCDICQDVCPLNRSPVFTPNERFAPRAVAELGVLELAALTPEQYEQLIPGTALARAKYDGLRRNAVYALGAAKQADARLLLEKLSQDPSEQVRHAAQWALRHLDV

SEQ ID NO: 82078 - protein, 372 aa, Vitreoscilla filiformis
  misc_feature (1)..(372): tr|A0A221KGF1|A0A221KGF1_VITFI Epoxyqueuosine reductase OS=Vitreoscilla filiformis OX=63 GN=queG PE=3 SV=1
MVQDQEATRAEQVIGQQVVSALLQRAKALGFSQIGIADVSLESAEPGLLAWLEAGFHGSMAYMAQHGLKRARPAELLPGTVRVITARMDYLPERPGTDWRVLEHTRLAQPAQAALSVYARGRDYHKVLRQRLQRLADGLADDLGALPHWQARVFTDSAPVLEVELASRSGLGWRGKHTLTVSREAGSLFFLGEIFVNVPLPVTPPVSAHCGACTACLTACPTGAIVAPYRLDARRCISYLTIEHAGPIDVHLRPLLGNRIYGCDDCQLVCPWNKFARTTPLPDFAPRPALDGPPLLTLWAWDEPQFLRQTEGSPIRRIGYGRWRRNLAIALGNALAAGDAASDTIRHALWAARSSADDLVGEHIDWALAQAV

SEQ ID NO: 82079 - protein, 351 aa, Vitreoscilla sp.
  misc_feature (1)..(351): tr|A0A2L0PMV2|A0A2L0PMV2_VITS1 Epoxyqueuosine reductase OS=Vitreoscilla sp. (strain C1) OX=96942 GN=queG PE=3 SV=1
MNSNELTLAIRQHAQQLGLLDCKITTPNLSPEHDEKLSLWLAQGFKGEMSFFHKHGISRNHAEYVLPEVKSVIMVALPYWTEDFDQTRAILADEKAAYISRYALGRDYHKVLRSRLKNLGQYIEQLVPDVIYRPVVDSAPLSEVSFATQAGLGWRGKHSLLLQKQTGSLYFLGALLTNLALEPNEEIPSHCGQCSRCMQACPTQAIVAPYTVDARRCISYLTIELNDIIPVEFRKAMGNRIYGCDDCQLVCPFNRFTKPSQEADFQVRHGLDQVSLVELLAWDETMFQSRMAGSPIYRIGYHKWLSNIIIALGNVSKSATIASLMVPLCTHPNHLIAEAAKWTLLQHDYPE

SEQ ID NO: 82080 - protein, 346 aa, Vogesella indigofera
  misc_feature (1)..(346): tr|A0A495BNP8|A0A495BNP8_VOGIN Epoxyqueuosine reductase OS=Vogesella indigofera OX=45465 GN=queG PE=3 SV=1
MASQIKGWAKELGFADARITRAALPAETEASLLAWLAAGNHGEMEYMARHGVLRVRPAELVPGTVRVISLRMHYWPAAARDAEAVLADGTRAYLSRYALGRDYHKVVRNRLQKLADRITQAVGEHGYRVFTDSAPLAEVALAAQAGQGWRGKHTLLLNKKQGSLFFLGEILTDLPLPEDDSEDGHCGSCTRCLDVCPTGAIMAPYQVDARRCISYLTIELKGAIPEPLRPLIGNRVYGCDDCQLTCPWNRFVVHSAEDDFAVRHGLDDVSLLELFGWDEATFASRMAGSPIYRIGYAKWLSNLAIGLGNAPYAAEIVVALQQRQDHAEEVVRESVVWALAQQQGRT

SEQ ID NO: 82081 - protein, 359 aa, Vogesella sp.
  misc_feature (1)..(359): tr|A0A0J5GGR4|A0A0J5GGR4_9NEIS Epoxyqueuosine reductase OS=Vogesella sp. EB OX=1526735 GN=queG PE=3 SV=1
MSEISCKSENYRQLASQIKGWAKELGFADARITRAVLPAETEASLLAWLAAGNHGEMAYMARHGVLRVRPAELVPGTVRVISLRMHYWPAAARAAEAVLADGTRAYLSRYALGRDYHKVVRNRLQKLAERITQAVGEHGYRVFTDSAPLAEVALAAQAGQGWRGKHTLLLNKKQGSLFFLGEILTDLPLPEDDSEDGHCGSCTRCLDVCPTGAIVAPYQVDARRCISYLTIELKGVIPEPLRPLIGNRVYGCDDCQLACPWNRFVVHSAEDDFAVRHGLDDVSLLELFGWDEATFASRMAGSPIYRIGYAKWLSNLAIGLGNAPHAAEIVVALQQRQDHAEEVVRESVAWALAQQQGRA

SEQ ID NO: 82082 - protein, 364 aa, Vogesella sp.
  misc_feature (1)..(364): tr|A0A1C6MDA1|A0A1C6MDA1_9NEIS Epoxyqueuosine reductase OS=Vogesella sp. LIG4 OX=1192162 GN=queG PE=3 SV=1
MNEMSVQNENYRHLASQIKLWASELGFADARITRAELPAEAETALAAWLAEGCHGEMDYMARHGMLRLRPAELVPGTLRVISLRMHYWPAGACDADTVLADGNSAYVSRYALGRDYHKVIRNRLQKLAERISAADPAHQFRVFTDSAPLAEVALAAQAGQGWRGKHTLLLNKQQGSLFFLGEILTNLPLPEDDSEPGHCGRCTRCIDICPTGAIVAPYKVDARRCISYLTIELQGVIPEPLRPLIGNRVYGCDDCQLACPWNRFAVPTAEADFAVRHGLDNVSLLELFGWDEATFLARMAGSPIYRIGYAKWLSNLAIGLGNAPYDAAIVVALQQREGSENDWVRESVAWALQRQLQAAAEEGK

SEQ ID NO: 82083 - protein, 386 aa, Vulcanibacillus modesticaldus
  misc_feature (1)..(386): tr|A0A1D2YSL5|A0A1D2YSL5_9BACI tRNA epoxyqueuosine(34) reductase QueG OS=Vulcanibacillus modesticaldus OX=3370 97 GN=BHF71_11015 PE=4 SV=1
MSIEVKEKLIDFANKIGIDKIGFTSADPFWELKDILIRHRELGYESGFEERDIDKRVDPKLTMKDAKSIIAIAIAYPTKISEPLKSSKGMYRGFVARSAWGIDYHLILREKMKVLGEYLKSLVPDAKYVYMTDTGVLSDHAVAQRAGIGWIGKNSLLITPEYGSYVYLGEIITNVELPSDTPLKEQCGECNRCLTTCPTKAIVSPKQVNSKKCLSYLTQTKVFLDERWMEKLGNRLFGCDTCQQVCPKNKGINYTHHEQTLPEPELAKPLLKPLLTIKNKEFKNTWGKSAASWRGKKPIQRNAIIGLAHFKDVTALPQLIQLLMEDNRSTIRQTAAWAIGRIGGNKAKEGLQMAKNKENDTKVLQEIVKSLKMLSNQEILDSQKSE

SEQ ID NO: 82084 - protein, 358 aa, Vulcaniibacterium tengchongense
  misc_feature (1)..(358): tr|A0A3N4W5J2|A0A3N4W5J2_9GAMM Epoxyqueuosine reductase OS=Vulcaniibacterium tengchongense OX=1273429 GN=queG PE=3 SV=1
MNPAAASAPTPDHAALARRIRALAAEFGFQRCGIAGVELGEDEAHLRDWLAQGLYGSMEWMARHGDLRARPQALHPGTIRVISVGLDYGRDADEAWATLEDGERAYVARYALGRDYHKLMRQRLQRLADRIAEEVGPFGHRVFVDSAPVLERALARNAGLGWIGKNTCLIDRDGGSFFFLGEIYVDLPLPVDAPATAHCGTCRRCIDVCPTRAIVAPYRLDARRCIAYLTIEHAGPIPEELRAPIGNRIFGCDDCQLVCPWNKFAQRTDEPDFRARNDLDRASLAQLFAWSEEEFLQRTEGSAIRRSGYERWLRNIAVALGNAPSTPEVVAALRSRAAHPSPLVREHVEWALRRHGAG

SEQ ID NO: 82085 - protein, 370 aa, Vulgatibacter incomptus
  misc_feature (1)..(370): tr|A0A0K1PAH2|A0A0K1PAH2_9DELT Epoxyqueuosine (OQ) redu ctase QueG OS=Vulgatibacter incomptus OX=1391653 GN=AKJ 08_0501 PE=4 SV=1
MMLSAEDRGALLRRLGREAGFDLVGLAPARALDPSPFEQYFAEGLHADMEWMRDERRVDPRLLLPGAKTVAVFALSYFDPAASPGRVARYARGTDYHSILRRKLRKLRKALAAADPGVRTYGSVDWGPIAEKPWAQAAGLGWIGKNGCLITRSHGSWVVLGALVLDQECLPYDEPHRDFCGDCAACLPSCPTRAFPRPYVVDASRCLSYQTIENRGAVPDELKEGTSGWIFGCDACQEVCPWNRRFAEPTREAGFLPRTQALWDVPLARLISMDHAEWSGRARGTAMARPKHFGTVRNALLAAGESGDLSLVDACATRLDDPHEGVRDAAEWAVRRLGSDPDELRRAAEALPPCGAGLDDTSSHGDDGAP

SEQ ID NO: 82086 - protein, 303 aa, Waddlia chondrophila
  misc_feature (1)..(303): tr|D6YVS8|D6YVS8_WADCW Uncharacterized protein OS=Waddl ia chondrophila (strain ATCC VR-1470 / WSU 86-1044) OX= 716544 GN=wcw_0873 PE=4 SV=1
MHYQKIKEKAFELGYDDVGITDAIIPEEDIQAYRKWLDKGFQAKLSYMENEIRCTPEKLLPGAKTAIIFISYYKQPPLPFRKDAGLIASYARGRKYHNVHHSRLKKFVNWFEQEQGQQGSCKAFSDSTPILEKALAVRAGLGWFGKNTLLIHRKFGTFTLLSGVLTTADIQDKTMNLRLPRCGSCTRCLDSCPTGALKEPYLMDASKCLSNHLIESKDPLPEEISKKNPGYLFGCDICQDVCPHNIRKPPSESKDFAPESGMGAYITLDELCSLELEPEKLYGTPLQRRGISGLKHTASRLFS

SEQ ID NO: 82087 - protein, 303 aa, Waddlia chondrophila; identical to SEQ ID NO: 82086
  misc_feature (1)..(303): tr|F8LA89|F8LA89_9BACT Putative electron transport prot ein yjeS OS=Waddlia chondrophila 2032/99 OX=765953 GN=y jeS PE=4 SV=1

SEQ ID NO: 82088 - protein, 322 aa, Waddliaceae bacterium
  misc_feature (1)..(322): tr|A0A2E3M0F3|A0A2E3M0F3_9BACT tRNA epoxyqueuosine(34) reductase QueG OS=Waddliaceae bacterium OX=2026802 GN=q ueG PE=4 SV=1
MKPITLDELKEKAFEFGWDDMGSCKAEIPASDISFYLSWIKHAFHGELHYMEKEMRCYPQEILPGAKTAIIFLSHYKQEHVPFFKNKGVVASYARHRDYHNVHRKRLKRYIRWLEERSGQEGIARGFSDSKPVLEKALAVQAGLGWMGKNSLLIHRKFGTFTLLSGIFTTLELPIYLGPDLRKPKCGTCTRCLDACPTKAIVAPYTVNASKCLSYHLIESKGPVAKEASEKNPGYIFGCDICQDVCPHNVRPPLASHPDFTENGVGAYLTESDIDQFIKEPERLYGTPLNRRGASGLKHSAQALFSRPLESPPSEDKAHEEF

SEQ ID NO: 82089 - protein, 314 aa, Weeksella virosa
  misc_feature (1)..(314): tr|F0NYU4|F0NYU4_WEEVC Epoxyqueuosine reductase OS=Week sella virosa (strain ATCC 43766 / DSM 16922 / JCM 21250 / NBRC 16016 / NCTC 11634 / CL345/78) OX=865938 GN=que G PE=3 SV=1
MILAEKLSTLEMRSQLIKNKAKELGFLSCGIAKAEFLEQEAPRLEAWLKNNYHGDMSYMENNFDMRLDPRLLVDGAKTVISLAYNYYQPIDRNPDSYKIAMYAQGEDYHFVVKEKVRDLLHYIQEEIGNVNGRAFTDSAPILEHAWAQKAGIGWIGKNSLLLSKQKGSFFFLAELIVDLEMSYDNAIETDHCGNCTRCIDACPTEAILPNKTVNGSQCISYFTIELKGEIPTEMKGKFDDWIFGCDICQEVCPWNRFSLPTQEKKFIGHEKINNFSKTDWEEITEEVFKEMFRKSPVKRTKFTGLKRNIDFLKK

SEQ ID NO: 82090 - protein, 348 aa, Wenxinia marina
  misc_feature (1)..(348): tr|A0A0D0QF54|A0A0D0QF54_9RHOB Epoxyqueuosine reductase OS=Wenxinia marina DSM 24838 OX=1123501 GN=queG PE=3 S V=1
MDRHALKQALDAEARAAGFAAMGVCRPDAVPQAAGRLATFLKEGRHGDMCWMAERTHWRGDPAALWPQARSVVMLAESYAPEHDPLNVLDRPDRAAISVYAHGRDYHDLVKKRLKRVGRWLLERCPGEEIKVFVDTAPVMEKPLAQAAGLGWQGKHTNLLGRDFGNWVFLGAIFTTVELPPDPPEAEHCGSCRKCLDVCPTDAFPAPFQLDARRCISYLTIEHAGPIHEEFRPALGNRIYGCDDCLAVCPWNKFAVRAADQRYLAEDGPPRLAELAALDDAAFRKRFSGSAVKRIGRDRFVRNVLYAIGNSGDPRLADSARALADDPDPAVADAARWALSRLRQRGDT

SEQ ID NO: 82091 - protein, 336 aa, Wenxinia saemankumensis
  misc_feature (1)..(336): tr|A0A1M6FR22|A0A1M6FR22_9RHOB Epoxyqueuosine reductase OS=Wenxinia saemankumensis OX=1447782 GN=SAMN05444417_ 2455 PE=4 SV=1
MVAEARAAGFVSAGICHPDAAPETAERLAAFVGAGLHGQMGWMAERMHWRGDAAALWPAARSVVMLAESYRPEHDPMAVLDRPEKGAISVYAQGRDYHDLVKKRLKRVGRWLLERCPGEEIKVFVDTAPVMEKPLAQAAGLGWQGKHTNLLSRDFGNWVFLGAIFTTIELPPDPPETEHCGSCTRCLDICPTNAFPAPFRLDPRRCISYLTIEHDGPVDEELRALMGNRIYGCDDCLAICPWNKFAAQARETRYLRAGGAPDLAELVALDDAAFRARFSGSAIKRIGVERFRRNVLYAIGNSGRAELVPAAAAHVGAADAAVDDAARWAVARLAKA

SEQ ID NO: 82092 - protein, 345 aa, Wenzhouxiangella marina
  misc_feature (1)..(345): tr|A0A0K0XX17|A0A0K0XX17_9GAMM Epoxyqueuosine reductase OS=Wenzhouxiangella marina OX=1579979 GN=queG PE=3 SV= 1
MERIRAWGAELGFDQVGISDLDLAAYEARLDAWLAEGLHGEMDWMAAHGRKRSRPELLQPGTRSVITVRMDYLPADATPVEELLESPERACISRYALGRDYHKVMRQRLKRLAQRIEQAIGPFGHRVFTDSAPVLEKPLAEKSGLGWIGKHTNLLNRHAGSWFFLGEIYTDLALPPDRPVRNHCGSCRRCIDVCPTQAIVAPYRVDARRCISYLTIELKGSIPEEFRKPMGNRIYGCDDCQMVCPWNRYAQHSRVDDFSPRADLDAGDLVTLFAWDEASFLQRTEGTAIRRIGHERWLRNLAVALGNAPTSAVVLNALEARRDHPSPLVREHVQWALEQHGKAAG

SEQ ID NO: 82093 - protein, 360 aa, Wenzhouxiangella sediminis
  misc_feature (1)..(360): tr|A0A3E1KCW7|A0A3E1KCW7_9GAMM Epoxyqueuosine reductase OS=Wenzhouxiangella sediminis OX=1792836 GN=queG PE=3 SV=1
MSHGRDYRQDEPDTGELVEKIRQWGRELGFAEVGVADTDLSGYEARLDEWLAEGRQGEMDWMAAHGRKRSRPALLHPDTRSVIVARMDYLPESARPVEELLEQPDRAVVSRYALGRDYHKLIRKRLKKLADRIEREIGPFGHRVFTDSAPVLEKPLAEKAGLGWIGKHTVLLNRHAGSWFFLGEIYTDLELPPDRPVSQHCGSCRRCIDVCPTQAITEPFQLDARRCISYLTIELKGSIPVELRPLMGNRVFGCDDCQMVCPWNRYAQHTGEADFAPRKDLDAGDLVELFGWDETTFLERTEGNPIRRTGYERWLRNLAVALGNATTSERVVGALRARRKHPSGLVREHVEWALARHDAD

SEQ ID NO: 82094 - protein, 363 aa, Wenzhouxiangella sp.
  misc_feature (1)..(363): tr|A0A372BSE7|A0A372BSE7_9GAMM Epoxyqueuosine reductase OS=Wenzhouxiangella sp. 15181 OX=2301224 GN=queG PE=3 SV=1
MSIMSHDCDYRQGELDSGELVEKIRQWGLELGFAEVGIADTDLSVYEQRLDAWLAEGRHGEMDWMAAHGRKRSRPALLHPDTRSVIVARMDYLPESARPVEELLDQPDRAVVSRYALGRDYHKLIRKRLKKLAQRIEREIGPFGHRVFTDSAPVLEKPLAEKAGLGWIGKHTLLLSRHAGSWFFLGEIYTDLELPADEPVTPHCGTCRRCIDVCPTQAITGPYQLDARRCISYLTIELKGSIPEELRPLMGNRVFGCDDCQMVCPWNRYAQHTGEADFAPRKDLDAGDLVELFGWDEATFLDRTEGNPIRRTGYECWLRNLAVALGNAPTSSEVVEALRARRDHSSELVREHVAWALDRHATE

SEQ ID NO: 82095 - protein, 318 aa, Westiellopsis prolifica
  misc_feature (1)..(318): tr|A0A4Q9J6S2|A0A4Q9J6S2_9CYAN Epoxyqueuosine reductase OS=Westiellopsis prolifica IICB1 OX=1970206 GN=queG PE =3 SV=1
MNQLPGTNSAEVKQQAVELGFHKVGIAAVDGTDEQQMERLQAWIELGYHADMEWMTSLKRQDIKLVMSEVRSLICVALNYYTPHQRPRGEEYAKISRYAWGRDYHKVMHKKLKALSGWLQGQGENIQARYYADTGPVQDKVWAQKAGIGWIAKNGNVITREYGSWVFLGEVLTNLELEPDKPHTQHCGNCTRCLEACPTDAITSPFVVDANRCIAYHTIENRQEKLPEAIASNLQGWIAGCDICQDVCPWNQRFASPTDVEEFQPYPGNIAPKLVELAQISDHEWDERFPASALRRIKPEMLRRNARANLNAFQQAQE

SEQ ID NO: 82096 - protein, 311 aa, Williamwhitmania taraxaci
  misc_feature (1)..(311): tr|A0A1G6KNF8|A0A1G6KNF8_9BACT Epoxyqueuosine reductase OS=Williamwhitmania taraxaci OX=1640674 GN=SAMN0521632 3_10264 PE=4 SV=1
MENSPPKSLKENICIKAAELGFEAVGFAKAEHLSSEKERLNNWLNQGFQAGMGYMEKHFEMRLNPTLLVEEAKTVISLLYSYNQGEEQATDAPRVARYAWFRDYHKELKQRMKVLMEFISLELGTPVNGRYFTDSAPVLERAWAVRSGLGWIGKNSLLIHPKLGSFTLLAELILDLELEPDQPFGPGLCGACTRCIDSCPTSAIVAAGVVNSNLCISYLTIEHKGEFTQEQHTMVDGHAFGCDICQEVCPWNKKPLRVLSGKADLNRGLLSLTPAQWQSIDPEQFEKIFFGSAVKRAGYSGIIRNLNQQKQ

SEQ ID NO: 82097 - protein, 309 aa, Winogradskyella arenosi
  misc_feature (1)..(309): tr|A0A368ZJA8|A0A368ZJA8_9FLAO Epoxyqueuosine reductase OS=Winogradskyella arenosi OX=533325 GN=queG PE=3 SV=1
MINNKTRYTELIKSEAKRLGFLSCGISQAGFLEVEAPRLERWLKDNNNGEMRYMENHFDKRLDPTLLVEGSKSMVSLLLNYYPEDTQTEDSYKISKYAYGNDYHHVIKHKLKSLLYFIQDEIGEVGGRAFVDSAPVLDKAWAAKSGLGWIGKHSNLLTQKVGSFYFIAELIIDLELDYDTPVTDHCGTCTACLDACPTEAITAPYVVDGSKCISYFTIELKENIPSEFKGQFEDWMFGCDICQDVCPWNRFSKPHNEPLFNPHPELLEMTKKDWEEITEDTFSKVFQKSAVKRTKFSGLERNIRFLKED

SEQ ID NO: 82098 - protein, 308 aa, Winogradskyella aurantia
  misc_feature (1)..(308): tr|A0A265V0N0|A0A265V0N0_9FLAO Epoxyqueuosine reductase OS=Winogradskyella aurantia OX=1915063 GN=queG PE=3 SV =1
MIENKSKYSQLIKAEAKRLGFLSCGISKAEFLEEEAPRLEAWLNKNRHGEMRYMENHFDKRLDPTLLVEGSKSVVSLLLNYYPSELQNENSYKISKYAYGTDYHFVIKDKLKSLLQVIKDEIGDVHGRAFVDSAPVLDKAWAAKSGLGWIGKHSNLLTQQVGSFYFIAELIIDLDLDYDTPVTDHCGTCTACIDACPTEAITEPYVVDGSKCISYFTIELKDNIPTEFKGQFDDWMFGCDVCQDVCPWNRFSKPHNEPLFNPHPELLEMTKKDWEEITEDTFRKVFKNSAVKRTKFSGLERNIRFLKS

SEQ ID NO: 82099 - protein, 306 aa, Winogradskyella epiphytica
  misc_feature (1)..(306): tr|A0A2V4X1S8|A0A2V4X1S8_9FLAO Epoxyqueuosine reductase OS=Winogradskyella epiphytica OX=262005 GN=queG PE=3 S V=1
MDNRNKYTQIIKAEAKRLGFLSCGISKAEFLEEEAPRLEAYLNNNMNGEMRYMENHFDKRLDPTLLVEGSKSVVSLLLNYYPSEFQNEDSYKLSKYAYGTDYHFVIKDKLKSLLQFIQEEIGEVEGRAFVDSAPVLDKAWAAKSGLGWVGKHTLLLTKNVGSFYFIAELIIDLELEYDHATTDHCGTCTKCIDACPTEAITEPYVVDGSKCISYFTIELKENLPTEFKGKFDDWMFGCDICQDVCPWNRFSKSHNEPLFNPHPDLLEMTKKDWEEITEDTFRKVFKKSAVKRTKYAGLTRNIEFLK

SEQ ID NO: 82100 - protein, 308 aa, Winogradskyella eximia
  misc_feature (1)..(308): tr|A0A3D9H4C0|A0A3D9H4C0_9FLAO Epoxyqueuosine reductase OS=Winogradskyella eximia OX=262006 GN=queG PE=3 SV=1
MINNTSKYSKIIKAEAKRLGFLSCGISKAEFLEAEAPRLETWLNKNMNGEMRYMENHFDKRLDPTLLVEGSKSVVSLLLNYFPSETQTDDSYKLSKYAYGNDYHHVIKNKLKSLLYFIQEEIGEVGGRAFVDSAPVLDKAWAAKSGLGWIGKHSNLLTQQVGSFYFIAELIIDLELEYDYATTDHCGTCTKCIDACPTEAITEPYVVDGSKCISYFTIELKENIPTEFKGQFNDWMFGCDICQDVCPWNRFSKPHKEPLFNPHPELLDMSKKDWEEITEDTFKKVFQKSAVKRTKFSGLERNIEFLKP

SEQ ID NO: 82101 - protein, 308 aa, Winogradskyella jejuensis
  misc_feature (1)..(308): tr|A0A1M5LVS8|A0A1M5LVS8_9FLAO Epoxyqueuosine reductase OS=Winogradskyella jejuensis OX=1089305 GN=queG PE=3 S V=1
MIENKTKYTEFIKTEAKRLGFLSCGISKAQFLEEEAPRLEAWLNKNMHGEMRYMENHFDKRLDPTLLVEDSKSLVSLLLNYFPSEIQNENAYKLSKYAYGTDYHFVIKDKLKELLSAIQDEIGEVNGRAFVDSAPVLDKAWAAKSGLGWIGKHSNLLSQKTGSFYFIAELIIDLELDYDTPTTDHCGTCTACIDACPTEAITEPYVVDGSKCISYFTIELKDNIPSEFKGKFDDWMFGCDVCQDVCPWNRFSKPHNEPLFNPHPELLSMTKNDWEEITEDTFRKVFKKSAVKRTKFSGLQRNIKFLKH

SEQ ID NO: 82102 - protein, 308 aa, Winogradskyella pacifica
  misc_feature (1)..(308): tr|A0A3D9ME23|A0A3D9ME23_9FLAO Epoxyqueuosine reductase OS=Winogradskyella pacifica OX=664642 GN=queG PE=3 SV= 1
MLNHKAKYSEIIKAEAKRLGFLSCGISKAEFLETEAPRLEAWLNKNMNGEMGYMENHFDKRLDPTLLVEGSKSVISLLLNYYPSETQTEDSYKLSKYAYGNDYHHVIKYKLKSLLYFIQDEIGEVGGRAFVDSAPVLDKAWAAKSGLGWIGKHSNLLTQQVGSFYFIAELIIDLELEYDHATTDHCGTCTKCIDACPTEAITEPYVVDGSKCISYFTIELKENLPSEFKDKFDDWMFGCDVCQDVCPWNKFSKPHNEPLFNPHPELLDMTKKDWEEITEDTFKKVFQKSAVKRTKFSGLERNIRFLRD

SEQ ID NO: 82103 - protein, 308 aa, Winogradskyella psychrotolerans
  misc_feature (1)..(308): tr|S7X1A1|S7X1A1_9FLAO Epoxyqueuosine reductase OS=Wino gradskyella psychrotolerans RS-3 OX=641526 GN=queG PE=3 SV=1
MLNHKAKYSEMIKAEAKRLGFLSCGISKAEFLETEAPRLEAWLKKNMNGEMHYMENHFDKRLDPTLLVEGSKSVISLLLNYYPSETQTDDSYKLSKYAYGNDYHHVIKHKLKSLLYFIQDEIGEVGGRAFVDSAPVLDKAWAAKSGLGWIGKHSNLLTQQVGSFYFIAELIIDLELEYDHATTDHCGTCTACIDACPTEAITEPYVVDGSKCISYFTIELKENLPSEFKGKFDDWMFGCDVCQDVCPWNKFSKPHNEPLFNPHPELLDMTKKDWEEITEDTFKKVFQKSAVKRTKFSGLERNIKFLKD

SEQ ID NO: 82104 - protein, 308 aa, Winogradskyella sp.
  misc_feature (1)..(308): tr|A0A520L1N0|A0A520L1N0_9FLAO Epoxyqueuosine reductase OS=Winogradskyella sp. OX=1883156 GN=queG PE=3 SV=1
MINNKIKHTELIKTEAKRLGFLSCGMSKAEFLEDEAPRLEAWLNKNMHGDMRYMENHFDKRLDPTLLVEGSKSVVSLLLNYYPLEFQNSDSYKLSKYAYGTDYHFVIKDKLKELLHIIQEQIGEVNGRAFVDSAPVLDKAWAAKSGLGWIGKHSNLLSQKTGSFYFIAELIIDLELEYDSPVTDHCGTCTACIDACPTEAITEPYVVDGSKCISYFTIELKENIPTEFKGKFDDWMFGCDVCQDVCPWNRFSKSHNEPLFNPNPELLSMTKKDWEEITEDTFRKVFKKSAVKRTKFSGLQRNIKFLKD

SEQ ID NO: 82105 - protein, 308 aa, Winogradskyella sp.
  misc_feature (1)..(308): tr|A0A1H1TKI8|A0A1H1TKI8_9FLAO Epoxyqueuosine reductase OS=Winogradskyella sp. RHA_55 OX=1249933 GN=queG PE=3 SV=1
MLNNKATYSAIIKAEAKRLGFLSCGISKAEFLEEEAPRLETWLNKNMNGDMHYMENHFDKRLDPTLLVEGSKSVVSLLLNYYPSQKQTADSYKLSKYAYGNDYHHVIKHKLKSLLYFIQDEIGDVNGRAFVDSAPVLDKAWAAKSGLGWIGKHSNLLTQQVGSFYFIAELIIDLELAYDHATTDHCGTCTKCIDACPTDAITEPYVVDGSKCISYFTIELKENLPKAYKGTFDDWMFGCDICQDVCPWNRFSKAHNEPLFNPHPELLDMTKKDWDEITEDTFKKVFQKSAVKRTKYSGLKRNIKFLKE

SEQ ID NO: 82106 - protein, 308 aa, Winogradskyella thalassocola
  misc_feature (1)..(308): tr|A0A1G7VK20|A0A1G7VK20_9FLAO Epoxyqueuosine reductase OS=Winogradskyella thalassocola OX=262004 GN=queG PE=3 SV=1
MLNHKAKYSEIIKAEAKRLGFLSCGISKAEFLETEAPRLEAWLNKNMNGEMQYMENHFDKRLDPTLLVEGSKSVISLLLNYYPSETQTDTSYKLSKYAYGNDYHHVIKHKLKSLLYFIQDEIGEVGGRAFVDSAPVLDKAWAAKSGLGWIGKHSNLLTQQIGSFYFIAELIIDLELEYDHATTDHCGTCTKCIDACPTEAITEPYVVDGSKCISYFTIELKENLPSEFKGKFDDWMFGCDVCQDVCPWNKFSKPHNEPLFNPHPQLLDMTKKDWEEITEDTFKKVFQKSAVKRTKFAGLERNIEFLKP

SEQ ID NO: 82107 - protein, 308 aa, Winogradskyella wandonensis
  misc_feature (1)..(308): tr|A0A4R1KTN3|A0A4R1KTN3_9FLAO Epoxyqueuosine reductase OS=Winogradskyella wandonensis OX=1442586 GN=queG PE=3 SV=1
MIDNKTKYTEFIKTEAKRLGFLSCGISKAQFLEEEAPRLEAWLNKNMHGEMRYMENHFDKRLDPTLLVEDSKSVVSLLLNYYPEETQTENSFKLSKYAYGTDYHFVIKDKLKELLSSIQDEIGEVHGRAFVDSAPVLDKAWAAKSGLGWIGKHSNLLSQKTGSFYFIAELIIDLELDYDTPTTDHCGTCTACIDACPTEAITEPYVVDGSKCISYFTIELKDNIPLEFKGKFEDWMFGCDVCQDVCPWNRFSKSHQEPLFNPHPELLYMTKKDWEEITEDTFRKVFKKSAVKRTKFSGLQRNIKFLKD

SEQ ID NO: 82108 - protein, 356 aa, Woeseia oceani
  misc_feature (1)..(356): tr|A0A193LKS3|A0A193LKS3_9GAMM Epoxyqueuosine reductase OS=Woeseia oceani OX=1548547 GN=queG PE=3 SV=1
MTSINTKNDLDALKKRIQAWSASLGFQQTGISNVDLGAAEDRLHAWLAKHYHGEMAYMERHGLKRSRPDMLVPGTLRVISVRMDYFPDEQQRAKDLLDHPRKAYVSRYALGRDYHKLMRKRLQKLARLIEDDIGDFGYRVFVDSAPVLEKPLAEKSGLGWIGKHTNVINRQAGSWFFLGELYTDLPLAEDVAESSHCGSCRACIDVCPTAAIVAPYELDARRCISYLTIEMKGSIPEDLRKPIGNRVYGCDDCQLFCPWNKFAKPTAEGDFAPRHSLDDADMAALFRWDEATWLSNTEGSAIRRIGFEQWLRNLAVGLGNAETSTAVIEALQSRRDHGSALVREHVNWALQQHNVL

SEQ ID NO: 82109 - protein, 370 aa, Woeseia sp.
  misc_feature (1)..(370): tr|A0A2E6E8N2|A0A2E6E8N2_9GAMM Epoxyqueuosine reductase OS=Woeseia sp. OX=1980636 GN=queG PE=3 SV=1
MTKPIKTPDNKKLAANIKRWGRELGFQQVGISDVDLSRAEKLLETWLEKGFHGEMSYMSEHGQKRSRPEQLIPGTLSVISVRINYLPDEEDDLVELLDHPDRAYISRYALGRDYHKVLRGRLKKLAKTIEKNIGPHGYRVFVDSAPVLEKPLAQKAGLGWIGKHTNLINRDAGSWFFLGELFVDIPLPPDIPEIEHCGSCRKCIDICPTNAIVAPYELDARRCISYLTIELKGDIPIEFRPLIGNRIYGCDDCQLYCPWNKFAEPTGEKDFSPRNDLNSISLIALFEWTETEWKKKTEGSAIRRISYEQWLRNIAVALGNAKSSEKVIAALRSRLETDSEMVRNHVQWALDQHNRHSNNIHPARKNTSAN

SEQ ID NO: 82110 - protein, 358 aa, Woeseia sp.
  misc_feature (1)..(358): tr|A0A2E6ZK02|A0A2E6ZK02_9GAMM Epoxyqueuosine reductase OS=Woeseia sp. OX=1980636 GN=queG PE=3 SV=1
MQVLDKEHETIDFLSLKKKIISWSDEVGFQKTGISDINLSLAEERLTNWLKLKFHGSMKYMEKHGSKRYRPQELVPGTIRIISVRMDYLPQEQDEAINQLNDNQNAYVSRYALGRDYHKVLRKKLKLLAKLIEENIGKFGYRIFVDSAPVLEKAIAEKSGLGWIGKHTNLIDKKSGSWFFLGELYTDLPLPVDADEVSHCGSCNVCIDVCPTKAIVGPYSLDARRCISYLTIENKGSIPVEFRKDIGNRIYGCDDCQLFCPWNKFAKPTGEKDFAPRHNLDNAQLTELFYWNEETWLAKTEGSAIRRIGFERWLRNIAVALGNADTTTQILKALKYRKNDKSPLIAEHVEWALDQHGK

SEQ ID NO: 82111 - protein, 353 aa, Woeseiaceae bacterium
  misc_feature (1)..(353): tr|A0A2D5N317|A0A2D5N317_9GAMM Epoxyqueuosine reductase OS=Woeseiaceae bacterium OX=2026806 GN=queG PE=3 SV=1
MNKINTINKPKLIRNINLWGAELGFQQIGFSDINLKNAEKKLKKWLDMKFHGEMHYMEKHGLKRSRPDLLLPNTLSVISARMNYLATDNESAKLLLDHKKKAYISRYTLGRDYHKVLRQRLKKLAHKIDIHVKEFGYRVFVDSAPVLEKPLASKAGLGWIGKHTNLINKDNGSWFFLGEIYTNIKLPNSNSSKDHCGTCFKCIDVCPTKAIIAPYILDARRCISYLTIELKGSIPIEYRRLIGNRIFGCDDCQIFCPWNKFASKTEIKDFDTRHALDTLDLIDAFLWTEEIWLKKTEGSAIRRIGFEQWIRNVAIAMGNAKTNKKIIEALNSRKNSESELIREHVNWALDQHS

SEQ ID NO: 82112 - protein, 363 aa, Woeseiaceae bacterium
  misc_feature (1)..(363): tr|A0A2E8TNH9|A0A2E8TNH9_9GAMM Epoxyqueuosine reductase OS=Woeseiaceae bacterium OX=2026806 GN=queG PE=3 SV=1
  misc_feature (23)..(23): Xaa can be any naturally occurring amino acid
  misc_feature (27)..(27): Xaa can be any naturally occurring amino acid
  misc_feature (270)..(270): Xaa can be any naturally occurring amino acid
  misc_feature (277)..(277): Xaa can be any naturally occurring amino acid
  misc_feature (286)..(286): Xaa can be any naturally occurring amino acid
  misc_feature (288)..(288): Xaa can be any naturally occurring amino acid
  misc_feature (290)..(290): Xaa can be any naturally occurring amino acid
  misc_feature (323)..(323): Xaa can be any naturally occurring amino acid
MKTEYPDNKSELIKKIKLWSDDXGFDXIGFSNTNLSDAESNLQKWLELKFHGEMSFMEKHGLKRSRPGMLIPDTISIISVRMNYLSLRNNENRKLLDHPKKAYISRYALGRDYHKVLRKKLNLLGKKISNELSSFGYRAFVDSAPVLEKPIAEKAGLGWIGKNTNLINKNSGSYFFLGEIYTDLILPSDKATGNHCGSCSACIDVCPTNAIVAPYILDARKCISYLTIELKGPIPIEYREAIGNRIFGCDDCQIFCPWNKFAQKTSIEDXNPRSNLXSIDLVEVFXWXEXLWKIKTEGSAIRRIGYELWLRNIAVALGNAKTXEDVLSALKSRKNDKSELVKEHVIWAINQHKKKLSDKNIVD

SEQ ID NO: 82113 - protein, 356 aa, Wohlfahrtiimonas chitiniclastica
  misc_feature (1)..(356): tr|A0A256BUN0|A0A256BUN0_9GAMM Epoxyqueuosine reductase OS=Wohlfahrtiimonas chitiniclastica OX=400946 GN=queG PE=3 SV=1
MTCDDPAFIQALKEKAEALGFTHISSQTPKPLTEVKAYYEAWLAKGYHGGMDYLSKHGDLRFNPMALMEHTKSILTIRLPYYHNNDEAMATLKEDQRAYIARYALGRDYHNVIRKRLTQLGQWIAEQFPDETVTFRAFTDSAPILERELAERSGLGFSGKNTLIIDREKGSYFFLGELFISLPIVIPSTVVDKHCGRCTKCIQKCPTGAIVSPYEVDARRCISYLTIEHFGAIDEELRPMMGNRIFGCDDCQLFCPWNRFANHEIVDDFKPRHSLNDIALLDLLRWSETTFLKKTEGMPIRRIGHARFIRNITVALGNANYDPRIVAALEALESDEAFVREHIDWALKQQHNKKGL

SEQ ID NO: 82114 - protein, 356 aa, Wohlfahrtiimonas chitiniclastica
  misc_feature (1)..(356): tr|L8Y005|L8Y005_9GAMM Epoxyqueuosine reductase OS=Wohl fahrtiimonas chitiniclastica SH04 OX=1261130 GN=queG PE =3 SV=1
MTCDDPAFIQALKEKAEALGFTHISSQTPKPLTEVKAYYEAWLAKGYHGGMDYLSKHGDLRFNPMALMEHTKSILTIRLPYYHNNDEAMATLKEDQRAYIARYALGRDYHNVIRKRLTQLGQWIAEQFPDEAVTFRAFTDSAPILERELAERSGLGFSGKNTLIIDREKGSYFFLGELFISLPIVIPSTVVDKHCGRCTKCIQKCPTGAIVSPYEVDARRCISYLTIEHFGAIDEELRPMMGNRIFGCDDCQLFCPWNRFANHEIVDDFKPRHSLNDIALLDLLRWSETTFLKKTEGMPIRRIGHARFIRNITVALGNANYDPRIVAALEALESDEAFVREHIDWALKQQHNKKGL

SEQ ID NO: 82115 - protein, 356 aa, Wohlfahrtiimonas sp.
  misc_feature (1)..(356): tr|A0A256C4P9|A0A256C4P9_9GAMM Epoxyqueuosine reductase OS=Wohlfahrtiimonas sp. G9077 OX=1980118 GN=queG PE=3 SV=1
MTCDDLAFIQALKEKAEALGFTHISSQTPKPLTEVKAYYEAWLAKGYHGGMDYLSKHGDLRFNPMALMEHTKSILTVRLPYYHNNDEAMATLKEDQRAYIARYALGRDYHNVIRKRLTQLGQWIAEQFPDETVTFRAFTDSAPILERELAERSGLGFSGKNTLIIDREKGSYFFLGELFISLPIVIPSTVVDKHCGRCTKCIQKCPTGAIVSPYEVDARRCISYLTIEHFGAIDEELRPMMGNRIFGCDDCQLFCPWNRFANHEIVDDFKPRHSLNDIALLDLLRWSENTFLKKTEGMPIRRIGHARFIRNITVALGNANYDPRIVAALEALESDEAFVREHIDWALKQQYNKKGH

SEQ ID NO: 82116 - protein, 385 aa, Xanthobacter autotrophicus
  misc_feature (1)..(385): tr|A7IGB1|A7IGB1_XANP2 Epoxyqueuosine reductase OS=Xant hobacter autotrophicus (strain ATCC BAA-1158 / Py2) OX= 78245 GN=queG PE=3 SV=1
MTETAGTPLEEIIAGLARTEGFDTVGITRADAIPQAGARLKDWVAGGAHGDMGWMAETLERRADPAVLWPAIRSVIMLGLNYGPADDPRAVLAQRSAGAISVYARAEDYHDIIKPKLKRVARALLAEAQRRGLDGDVKVFVDTAPLMEKPLAAAAGLGWQGRHTNLVSRDFGSWLFLGAIATTVELKPSAPEQDHCGSCRACLDACPTAAFPAPYVIDARRCVSYLTIEHKGPIPRELRPLMGNRIYGCDDCLAACPWNKFAELGREVKLAARAENDAPPLAELVALDDAAFRARFPKSPIKRVGRDRFVRNVLVAMGNSGDAALLPQVEARLGDASALVRGAAVWALGQLADPDTVFRRAREALPQEDDAVVRAEWAAASVEQP

SEQ ID NO: 82117 - protein, 470 aa, Xanthobacter tagetidis
  misc_feature (1)..(470): tr|A0A3L7A3B3|A0A3L7A3B3_9RHIZ Epoxyqueuosine reductase OS=Xanthobacter tagetidis OX=60216 GN=queG PE=3 SV=1
MHRAPGARAHLQALHEPRAGRRAAGRHRLAHGARQSALSSEIYRLAFQGAQLARRGALQPGRPCRRRASLGGRLSGRRAVGRGRERTGLVCAGEVPPHLPPAPGGEHPRHAALQDLRGPGLLNPAPLEEIARRLSAEEGFDAFGIAAPDALGEASAHLKAWVAEGAHGDMGWMADTLERRADPRTLWPQVRALIMLGLNYGPAEDPRAVLAQRTKGAISVYARAEDYHEVIKPRLKRIARALLAEASARGVSADVKVFVDTAPLMEKPLAAAAGLGWQGKHTNLVSRDLGSWLFLGAIATTLELAPTGVERDHCGSCRACVEACPTAAFPAPYVIDARRCISYLTIEHKGPIPLELRPLMGNRIYGCDDCLAACPWNKFAVAGREAKLAARAENDAPDLAALVTLDDAAFRARFPKSAIKRVGRDRFVRNVLIAIGNSGDGSLRGVVEARLEDEAEVVRDAAGWALGRLG

SEQ ID NO: 82118 - protein, 373 aa, Xanthobacteraceae bacterium
  misc_feature (1)..(373): tr|A0A521VRG3|A0A521VRG3_9RHIZ Epoxyqueuosine reductase OS=Xanthobacteraceae bacterium OX=2021379 GN=queG PE=3 SV=1
MSATDLRGDLEREARRLGFDAIGITGADSIPRAAERLAAFLADDGHGDMGWLASDPARRGNPRVLWPEARSVIMLGVNYGPDEDPLAALGRKSSGAISVYARGDDYHDLIKSRLKQLARWLLARGGGDVKVFVDTAAVMEKPLAQAAGLGWQGKHTNLVSRGFGSWLFLGAIYTTLELPHEAPERDHCGACRACLDRCPTQAFPAPYRLDARRCISYLTIEHKGPIPREFRKAIGNRIYGCDDCLAVCPWNKFAQQGREVKLAARGALVAPALADLAALDDAAFRALFSKSPVKRIGRDRFIRNVLIAIGNSGDARLSAPARARLDDESALVRAMAVWALAQLMDEAEFAVLRAHRLPAETDAGVRAEWRRES

SEQ ID NO: 82119 - protein, 307 aa, Xanthomarina gelatinilytica
  misc_feature (1)..(307): tr|M7MMK8|M7MMK8_9FLAO Epoxyqueuosine reductase OS=Xant homarina gelatinilytica OX=1137281 GN=queG PE=3 SV=1
MNLKQQHTDFIKTEAKRLGFLSCGVSKAQFLEEEAPRLENWLNKQMHGQMHYMENHFDKRLDPTKLVEGSKSVISLLLNYFPEKTQDHETYKLSKYAYGTDYHFVIKDKLKSLLHAIQGEIGEVEGRAFVDSAPVLDKAWAAKSGLGWIGKHSNLLTQQVGSFYFIAELIIDLELEYDGITTDHCGTCTKCIDACPTKAIAEPYVVDGSKCISYFTIELKENIPTEFKGQFEDWMFGCDICQDVCPWNRFSKSHNEPLFNPHPDLLDMTKKDWEEITEETFKKVFKKSAVKRTKFSGLKRNINFLKD

SEQ ID NO: 82120 - protein, 307 aa, Xanthomarina gelatinilytica
  misc_feature (1)..(307): tr|A0A3C0F5D9|A0A3C0F5D9_9FLAO Epoxyqueuosine reductase OS=Xanthomarina gelatinilytica OX=1137281 GN=queG PE=3 SV=1
MNLKQQHTDFIKTEAKRLGFLSCGVSKAQFLEEEAPRLENWLNKQMHGQMHYMENHFDKRLDPNKLVEGSKSVISLLLNYFPEKTQDHETYKLSKYAYGTDYHFVIKDKLKSLLHAIQVEIGEVEGRAFVDSAPVLDKAWAAKSGLGWIGKHSNLLTQQVGSFYFIAELIIDLELEYDGITTDHCGTCTKCIDACPTKAITEPYVVDGSKCISYFTIELKENIPTQFKGQFEDWMFGCDICQDVCPWNRFSKSHNEPLFNPHPDLLDMTKKDWEEITEETFKKVFKKSAVKRTKFSGLKRNINFLKD

SEQ ID NO: 82121 - protein, 307 aa, Xanthomarina sp.; identical to SEQ ID NO: 82120
  misc_feature (1)..(307): tr|A0A2D8CZS0|A0A2D8CZS0_9FLAO Epoxyqueuosine reductase OS=Xanthomarina sp. OX=1931211 GN=queG PE=3 SV=1

SEQ ID NO: 82122 - protein, 357 aa, Xanthomonadaceae bacterium
  misc_feature (1)..(357): tr|A0A4Q6GMI8|A0A4Q6GMI8_9GAMM Epoxyqueuosine reductase OS=Xanthomonadaceae bacterium OX=1926873 GN=queG PE=3 SV=1
MSSLPQDALDPARIAQRIRALAHGLGFQRCGIAGIELGQDEAHLRDWLANGLYGSMDWMARHGDKRSRPDELIPGTLRVISVGLDYGRNDGDEAWDTLHDGERAYVARYALGRDYHKLMRTRLQKLADRIQQEVGPIGHRVFVDSAPVLERALARNAGLGWIGKHTCLIDKDGGSWFFLGEIYVDLPLPVDLPASALCGTCTRCIDVCPTQAIVAPYRLDARRCIAYLTIEHEGSIPEALRPAIGNRIFGCDDCQLVCPWNKFAKRTDEPDFRARNDLDIATLPQLFAWSEADFLSRTEGSAIRRSGYERWLRNIAVGLGNAPTTPAVLESLASRRDDASEVVREHVGWAMNQHAQD

SEQ ID NO: 82123 - protein, 354 aa, Xanthomonadaceae bacterium
  misc_feature (1)..(354): tr|A0A1E4JY75|A0A1E4JY75_9GAMM Epoxyqueuosine reductase OS=Xanthomonadaceae bacterium SCN 69-320 OX=1660169 GN =queG PE=3 SV=1
MDYAELANAIRRWGAELGFQQIGIAGVELGADETHLLNWLAAGRHGEMDYMQRHGTRRSRPQELQPGTVRVVSARMDYAPPGISRGWDVLADASLGYVSRYALGRDYHKLMRQRLQQLADRIAAQTGPFGYRAFVDSAPVLERALAREAGLGWIGKHTCLINRHAGSWFFLGELYTDLPLPPDEAASAHCGSCTRCIDICPTQAIVAPYQVDARRCISYLTIELHGAIPLEFRAAMGNRIYGCDDCQLICPWNKFSQPSAEADFLPRHRLDGTALIELFGWSEEEFLRRTEGSAIRRIGHERWLRNIAVALGNARGVDGVVDALNARATHPSALVREHVCWALEQQTRHATAAG

SEQ ID NO: 82124 - protein, 364 aa, Xanthomonadales bacterium
  misc_feature (1)..(364): tr|A0A3N5JAW7|A0A3N5JAW7_9GAMM Epoxyqueuosine reductase OS=Xanthomonadales bacterium OX=2006849 GN=queG PE=3 S V=1
MSPQQLRELATQIKGWGRELGFQKLGICDLQLEEHERRLEQWLAQGFHGSMDYMERHGRRRSRPAELVPGTLRVISARMDYLPARARPAAALLREPGTGLVSRYALGRDYHKVLRKRLQRLAARIERQIGPFGYRVFVDSAPVLEKALAEKAGLGWIGKHSNLLDRQAGSWFFLGEIYTDLPLPVDPPAQNHCGDCVRCIEACPTGAIVGPYQVDARRCISYLTIELKGPIPVELRPLLGNRIYGCDDCQLVCPWNRFARPSGEEDFSPRHGLDSAELLQLFAWDENEFLRRTEGSAIRRTGYPGWLRNIAVALGNLPPATEAEWKAVIAALDARREHPSPLVREHVVWALESQLQKGSGFRDQ

SEQ ID NO: 82125 - protein, 338 aa, Xanthomonadales bacterium
  misc_feature (1)..(338): tr|A0A1G4A2D6|A0A1G4A2D6_9GAMM Epoxyqueuosine reductase OS=Xanthomonadales bacterium RIFOXYA1_FULL_69_10 OX=18 02656 GN=queG PE=3 SV=1
MAADMGFQRCGISDIALDEDAGHLRDWLARGLYGTMDWMARHGDLRARPEELTPGTVRVISVGLDYGQDDDAAWATLADGTRAYVARYALGRDYHKLMRRRLQQLADRIAEETGPFGYRVFVDSAPVLERALARNAGLGWIGKHTCLIDKDGGSWFFLGEIYVDIPLPADAPATAHCGTCTRCIDICPTRAITAPQRLDARRCISYLTIEHEGAIPIELREPIGNRIFGCDDCQLVCPWNKFARRTDEPDFRARNNLDRASLAELFAWSEDEFLQRTEGSAIRRSGHARWLRNIAVALGNAPTSPEVIGALQSRRGIADAVVREHVEWALARHGVAPL

SEQ ID NO: 82126 - protein, 355 aa, Xanthomonas alfalfae
  misc_feature (1)..(355): tr|A0A1S1XP13|A0A1S1XP13_9XANT Epoxyqueuosine reductase OS=Xanthomonas alfalfae OX=366650 GN=queG PE=3 SV=1
MSAALAHPDPADAAARIRVLAREAGFQRCGITGIELGEDEVHLRSWLEEGLYGTMHWMTQHGDKRSRPQELVPGTLRVLSVGMDYGRKDDTEAWNTLHDGNRAYVARYALGRDYHKLMRNRLQKLAERIQGEIGAFGYRVFVDSAPVLERALARNAGLGWIGKHTCLIDRNGGSWFFLGEIYLDLPLPIDTPATAHCGTCTRCIDICPTQAIIAPYRLDARRCIAYLTIEHDGPIPEQMRKPIGNRIFGCDDCQLICPWNKFAKRTDEADFRARNDLDVATLPQLFAWNEDEFLRRTEGSPIRRSGHERWLRNIAVGLGNAPGTPEVLAALQARRHDDSALVREHVGWALAQHDL

SEQ ID NO: 82127 - protein, 355 aa, Xanthomonas arboricola
  misc_feature (1)..(355): tr|A0A0E3YLY2|A0A0E3YLY2_9XANT Epoxyqueuosine reductase OS=Xanthomonas arboricola OX=56448 GN=queG PE=3 SV=1
MSAVLARPDPTDAAARIRALAREAGFQRCGITGIELGEDEAHLRSWLEEGLYGTMHWMAQHGDKRSRPQELVPGTLRVLSVGMDYGRKDDTEAWNTLHDGRRAYVARYALGRDYHKLMRNRLQKLAERIQGEVGAFGYRVFVDSAPVLERALARNAGLGWIGKHTCLIDRNGGSWFFLGEIYLDLPLPIDTPATAHCGTCTRCIDVCPTQAIIAPYRLDARRCIAYLTIEHDGAIPEQMRKPIGNRIFGCDDCQLVCPWNKFAQRTDEADFRARNELDVATLPQLFAWDEDEFLRRTEGSPIRRSGHQRWLRNIAVGLGNAPGTPEVLAALQARRHDASELVREHVGWALAQHGL

SEQ ID NO: 82128 - protein, 355 aa, Xanthomonas arboricola
  misc_feature (1)..(355): tr|W4SA94|W4SA94_9XANT Epoxyqueuosine reductase OS=Xant homonas arboricola pv. pruni str. MAFF 311562 OX=141483 6 GN=queG PE=3 SV=1
MSAVLARPDPTDAAARIRALAREAGFQRCGITGIELGEDEAHLRSWLEEGLYGTMHWMAQHGDKRSRPQELVPGTLRVLSVGMDYGRKDDTEAWNTLHDGRRAYVARYALGRDYHKLMRNRLQKLAERIQGEVGAFGYRVFVDSAPVLERALARNAGLGWIGKHTCLIDRNGGSWFFLGEIYLDLPLPIDTPATAHCGTCTRCIDVCPTQAIIAPYRLDARRCIAYLTIEHEGAIPEQMRKPIGNRIFGCDDCQLVCPWNKFAQRTDEADFRARNELDVATLPQLFAWDEDEFLRRTEGSPIRRSGHQRWLRNIAVGLGNAPGTPEVLAALEARRHDASELIREHVGWALAQHGL

SEQ ID NO: 82129 - protein, 355 aa, Xanthomonas axonopodis
  misc_feature (1)..(355): tr|A0A2S6Y124|A0A2S6Y124_9XANT Epoxyqueuosine reductase OS=Xanthomonas axonopodis pv. begoniae OX=473403 GN=qu eG PE=3 SV=1
MSAALARPDPADAAARIRVLAREAGFQRCGITGIELGEDEVHLRSWLAEGLYGTMHWMAQHGDKRSRPQELVPGTLRVLSVGMDYGRKDDTEAWNTLRDGNRAYVARYALGRDYHKLMRNRLQKLAERIQGEIGQFGFRVFVDSAPVLERALARNAGLGWIGKHTCLIDRNGGSWFFLGEIYLDLPLPIDTPATAHCGTCTRCIDICPTQAIIAPYRLDARRCIAYLTIEHDGAIPEDMRKPIGNRIFGCDDCQLICPWNKFAKRTDEADFRARNELDVATLPQLFAWNEGEFLRRTEGSPIRRSGHERWLRNLAVGLGNAPGTPEVLAALEARRHDDSALVREHVGWALAQHGL

SEQ ID NO: 82130 - protein, 355 aa, Xanthomonas axonopodis
  misc_feature (1)..(355): tr|M4TX30|M4TX30_9XANT Epoxyqueuosine reductase OS=Xant homonas axonopodis Xac29-1 OX=1304892 GN=queG PE=3 SV=1
MSAVLARPDPADAAARIRVLAREAGFQRCGITGIELGEDEVHLRSWLEEGLYGTMHWMAQHGDKRSRPQELVPGTLRVLSVGMDYGRKDDTEAWNTLHDGSRAYVARYALGRDYHKLMRNRLQKLAERIQGEIGAFGFRVFVDSAPVLERALARNAGLGWIGKHTCLIDRNGGSWFFLGEIYLDLPLPIDTPATAHCGTCTRCIDICPTQAIIAPYRLDARRCIAYLTIEHDGAIPEDMRKPIGNRIFGCDDCQLICPWNKFAKRTDEADFRARNDLDVATLPQLFAWNEDEFLGRTEGSPIRRSGYERWLRNIAVGLGNAPGTPEVLAALEARRYDDSALVREHVGWALAQHGL

SEQ ID NO: 82131 - protein, 355 aa, Xanthomonas bromi
  misc_feature (1)..(355): tr|A0A1C3NMJ3|A0A1C3NMJ3_9XANT Epoxyqueuosine reductase OS=Xanthomonas bromi OX=56449 GN=queG PE=3 SV=1
MSAALARPDPHDAAARIRVLAREAGFQRCGITGIELGEDEAHLRSWLEEGLYGTMHWMAQHGDKRSRPQELVPGTLRVLSVGMDYGRKDDTEAWNTLHDGNRAYVARYALGRDYHKLMRNRLQKLAERIQGEIGAFGFRVFVDSAPVLERALARNAGLGWIGKHTCLIDRNGGSWFFLGEIYVDLPLPIDTPAIAHCGTCTRCIDICPTQAIIAPYRLDARRCIAYLTIEHDGAIPEDMRKPIGNRIFGCDDCQLICPWNKFAKRTDEADFRARNDLDVATLPQLFAWDQDEFLHRTEGSPIRRSGHERWLRNIAIGLGNAPGTPQVLAALEARRHDDSELVREHVGWALAQHGL

SEQ ID NO: 82132 - protein, 355 aa, Xanthomonas campestris
  misc_feature (1)..(355): tr|A0A2S4JLY3|A0A2S4JLY3_XANCA Epoxyqueuosine reductase OS=Xanthomonas campestris OX=339 GN=queG PE=3 SV=1
MSAVLARPDPTDAAARIRTLAREAGFQRCGITGIELGEDEAHLRSWLAEGLYGTMHWMAQHGDKRSRPQELVPGTLRVLSVGMDYGRKDDTEAWDTLHDGRRAYVARYALGRDYHKLMRNRLQKLAERIQAEVGPFGYRVFVDSAPVLERALARNAGLGWIGKHTCLIDRRGGSWFFLGEIYLDLPLPIDTPATAHCGTCTRCIDICPTQAIIAPHRLDARRCIAYLTIEHDGAIPEDMRKPIGNRIFGCDDCQLICPWNKFAQRTDEPDFRARNDLDVATLPQLFAWDEAEFLRRTEGSPIRRSGHERWLRNIAVGLGNAPGSEDVLAALESRRHDDSALVREHVGWALAQHGL

SEQ ID NO: 82133 - protein, 355 aa, Xanthomonas campestris
  misc_feature (1)..(355): tr|A0A1T1QWU4|A0A1T1QWU4_XANCA Epoxyqueuosine reductase OS=Xanthomonas campestris pv. vitiscarnosae OX=487900 GN=queG PE=3 SV=1
MSAVLARPDPADAAARIRVLAREAGFQRCGITGIELGEDEVHLRSWLEEGLYGTMHWMAQHGDKRSRPQELVPGTLRVLSVGMDYGRKDDTEAWSTLRDGSRAYVARYALGRDYHKLMRNRLQKLAERIQGEIGAFGFRVFVDSAPVLERALARNAGLGWIGKHTCLIDRNGGSWFFLGEIYLDLPLPIDTPATAHCGTCTRCIDICPTQAIIAPYRLDARRCIAYLTIEHDGAIPEDMRKPIGNRIFGCDDCQLICPWNKFAKRTDEADFRARNDLDVATLPQLFAWNEDEFLGRTEGSPIRRSGYERWLRNIAVGLGNAPGTPEVLAALEARRYDDSALVREHVGWALAQHGL

SEQ ID NO: 82134 - protein, 355 aa, Xanthomonas cannabis
  misc_feature (1)..(355): tr|A0A0B2CR60|A0A0B2CR60_9XANT Epoxyqueuosine reductase OS=Xanthomonas cannabis pv. cannabis OX=1885894 GN=que G PE=3 SV=1
MSAVLARPDPTDAAARIRALARESGFQRCGIAGIELGEDEVHLRSWLEEGLYGTMHWMAQHGDKRSRPQELVPGTLRVLSVGMDYGRKDDTEAWNTLHDGNRAYVARYALGRDYHKLMRNRLQKLAERIQGEIGAFGYRVFVDSAPVLERALARNAGLGWIGKHTCLIDRNGGSWFFLGEIYLDLPLPIDTPATAHCGTCTRCIDICPTQAIIAPYRLDARRCIAYLTIEHDGPIPEQMRKPIGNRIFGCDDCQLICPWNKFAKRTDEPDFRARNALDVATLPQLFAWDEDEFLRRTEGSPIRRSGHERWLRNIAVGLGNAPGTPEVLAALETRRHHDSELVREHAGWALAQHGI

SEQ ID NO: 82135 - protein, 355 aa, Xanthomonas citri; identical to SEQ ID NO: 82133
  misc_feature (1)..(355): tr|A0A2K2RB10|A0A2K2RB10_XANCI Epoxyqueuosine reductase OS=Xanthomonas citri OX=346 GN=queG PE=3 SV=1

SEQ ID NO: 82136 - protein, 355 aa, Xanthomonas citri
  misc_feature (1)..(355): tr|A0A220WGS7|A0A220WGS7_XANCI Epoxyqueuosine reductase OS=Xanthomonas citri pv. vignicola OX=473426 GN=queG P E=3 SV=1
MSAVLARPDPADAAARIRVLAREAGFQRCGITGIELGEDEVHLRSWLEEGLYGTMHWMAQHGDKRSRPQELVPGTLRVLSVGMDYGRKDDAEAWNTLHDGNRAYVARYALGRDYHKLMRNRLQKLAERIQGEIGAFGFRVFVDSAPVLERALARNAGLGWIGKHTCLIDRNGGSWFFLGEIYLDLPLPIDTPATAHCGTCTRCIDICPTQAIIAPYRLDARRCIAYLTIENDGAIPEDMRKPIGNRIFGCDDCQLICPWNKFARRTDEADFRARNDLDVATLPQLFAWNEDEFLGRTEGSPIRRSGHERWLRNIAVGLGNASGTPEVLAALEARRDDDSALVREHVGWALAQHGL

SEQ ID NO: 82137 - protein, 355 aa, Xanthomonas codiaei
  misc_feature (1)..(355): tr|A0A2S7CTN4|A0A2S7CTN4_9XANT Epoxyqueuosine reductase OS=Xanthomonas codiaei OX=56463 GN=queG PE=3 SV=1
MSAVLARPDPTDAAARIRVLAREAGFQRCGIAGIELGEDEAHLRSWLAEGLYGTMHWMAQHGDKRSRPQELVPGTLRVLSVGMDYGRKDDTDAWNTLHDGTRAYVARYALGRDYHKLMRNRLQKLAERIQGEIGTFGYRVFVDSAPVLERALARNAGLGWIGKHTCLIDRNGGSWFFLGEIYLDLPLPIDTPATAHCGTCTRCIDICPTQAIIAPYRLDARRCIAYLTIEHDGAIPEDMRKPIGNRIFGCDDCQLICPWNKFAKRTDEADFRARNELDVATLPQLFAWDEAEFLQRTEGSPIRRSGHERWLRNIAVGLGNAPGTPEVLASLQARRHDESALVREHVGWALAQHGL

SEQ ID NO: 82138 - protein, 355 aa, Xanthomonas cucurbitae
  misc_feature (1)..(355): tr|A0A2S7DSB8|A0A2S7DSB8_9XANT Epoxyqueuosine reductase OS=Xanthomonas cucurbitae OX=56453 GN=queG PE=3 SV=1
MSAVLARPDPTDAAARIRVLAREAGFQRCGITGIELGEDEAHLRSWLAEGLYGTMHWMAQHGDKRSRPQELVPGTLRVLSVGMDYGRKDDTEAWNTLHDGTRAYVARYALGRDYHKLMRNRLQKLAERIQGEIGTFGYRVFVDSAPVLERALARNAGLGWIGKHTCLIDRNGGSWFFLGEIYLDLPLPIDTPATAHCGTCTRCIDICPTQAIIAPYRLDARRCIAYLTIEHDGAIPEDMRKPIGNRIFGCDDCQLICPWNKFAKRTDEADFRARNDLDVATLPQLFAWDQDEFLQRTEGSPIRRSGHERWLRNIAVGLGNAPGTLEVLAALEARRHDESELVREHVGWALAQHGL

SEQ ID NO: 82139 - protein, 355 aa, Xanthomonas cynarae
  misc_feature (1)..(355): tr|A0A2S7BUP7|A0A2S7BUP7_9XANT Epoxyqueuosine reductase OS=Xanthomonas cynarae OX=109214 GN=queG PE=3 SV=1
MSAVLARPDPTDAAARIRALAREAGFQRCGITGIELGEDEVHLRSWLEEGLYGTMHWMAQHGDKRSRPQELVPGTLRVLSVGMDYGRKDDTEAWNTLHDGRRAYVARYALGRDYHKLMRNRLQKLAERIQGEVGAFGYRVFVDSAPVLERALARNAGLGWIGKHTCLIDRNGGSWFFLGEIYLDLPLPIDTPATAHCGTCTRCIDICPTQAIIAPHRLDARRCIAYLTIEHDGAIPEEMRKPIGNRIFGCDDCQLICPWNKFAQRTDEADFRARNDLDVATLPQLFAWDTDEFLRRTEGSPIRRSGHERWLRNIAVGLGNAPGTPEVLAALEARRNDDSELVREHVGWALAQHGL

SEQ ID NO: 82140 - protein, 355 aa, Xanthomonas dyei
  misc_feature (1)..(355): tr|A0A2S7C8P8|A0A2S7C8P8_9XANT Epoxyqueuosine reductase OS=Xanthomonas dyei OX=743699 GN=queG PE=3 SV=1
MSAALAHPDPNHAAARIRALAREAGFQRCGITGIELGEDEAHLRSWLGEGLYGTMHWMAQHGDKRSRPQELVPGTLRVLSVGMDYGRKDDTEAWTTLHDGSRAYVARYALGRDYHKLMRNRLQKLAERIQGEIGAFGYRVFVDSAPVLERALARNAGLGWIGKHTCLIDRNGGSWFFLGEIYLDLPLPVDTPATAHCGSCTRCIDICPTQAIIAPYRLDARRCIAYLTIEHDGAIPEEMRKPIGNRIFGCDDCQLVCPWNKFAQRTDEADFRARNALDVATLPQLFAWDEGEFLQRTEGSPIRRSGHQRWLRNIAVGLGNAPGTPEVLAALEARRHDASELVREHVGWALAQHGI

SEQ ID NO: 82141 - protein, 355 aa, Xanthomonas euvesicatoria
  misc_feature (1)..(355): tr|A0A2S7EBS6|A0A2S7EBS6_XANEU Epoxyqueuosine reductase OS=Xanthomonas euvesicatoria pv. citrumelonis OX=18939 6 GN=queG PE=3 SV=1
MSAALAHPDPADAAARIRVLAREAGFQRCGITGIELGEDEVHLRSWLEEGLYGTMHWMAQHGDKRSRPQELVPGTLRVLSVGMDYGRKDDTEAWNTLHDGNRAYVARYALGRDYHKLMRNRLQKLAERIQGEIGPFGFRVFVDSAPVLERALARNAGLGWIGKHTCLIDRHGGSWFFLGEIYLDLPLPIDTPATAHCGTCTRCIDICPTQAIIAPYRLDARRCIAYLTIEHDGAIPEDMRKPIGNRIFGCDDCQLICPWNKFAKRTDEADFRARNDLDVATLPQLFAWNEDEFLRRAEGSPIRRSGHERWLRNIAVGLGNAPGTPEVLAALQARRHDDSALVREHVGWALAQHDL

SEQ ID NO: 82142 - protein, 355 aa, Xanthomonas euvesicatoria
  misc_feature (1)..(355): tr|A0A4U0TFC0|A0A4U0TFC0_XANEU Epoxyqueuosine reductase OS=Xanthomonas euvesicatoria pv. citrumelonis OX=18939 6 GN=queG PE=3 SV=1
MSAALAHPDPADAAARIRVLAREAGFQRCGITGIELGEDEVHLRSWLEEGLYGTMHWMAQHGDKRSRPQELVPGTLRVLSVGMDYGRKDDTEAWNTLHDGNRAYVARYALGRDYHKLMRNRLQKLAGRIQGEIGPFGFRVFVDSAPVLERALARNAGLGWIGKHTCLIDRHGGSWFFLGEIYLDLPLPIDTPATAHCGTCTRCIDICPTQAIIAPYRLDARRCIAYLTIEHDGAIPEDMRKPIGNRIFGCDDCQLICPWNKFAKRTDEADFRARNDLDVATLPQLFAWNEDEFLRRTEGSPIRRSGHERWLRNIAVGLGNAPGTPEVLAALQARRHDDSALVREHVGWALAQHDL

SEQ ID NO: 82143 - protein, 355 aa, Xanthomonas floridensis
  misc_feature (1)..(355): tr|A0A1A9M6L5|A0A1A9M6L5_9XANT Epoxyqueuosine reductase OS=Xanthomonas floridensis OX=1843580 GN=queG PE=3 SV= 1
MSAVLARPDPTDAAARIRVLAREAGFQRCGITGIELGEDEAHLRSWLAEGLYGTMHWMAQHGDKRSRPQELVPGTLRVLSVGMDYGRKDDTEAWNTLHDGTRAYVARYALGRDYHKLMRNRLQKLAERIQGEIGTFGYRVFVDSAPVLERALARNAGLGWIGKHTCLIDRNGGSWFFLGEIYLDLPLPIDTPATAHCGTCTRCIDICPTQAIIAPYRLDARRCIAYLTIEHDGAIPEDMRKPIGNRIFGCDDCQLICPWNKFAKRTDEADFRARNDLDVATLPQLFAWNEAEFLQRTEGSPLRRSGHERWLRNIAVGLGNAPGTPEVLASLEARRHDASELVREHVGWALAQHGL

SEQ ID NO: 82144 - protein, 355 aa, Xanthomonas fragariae
  misc_feature (1)..(355): tr|A0A1Y6HJW4|A0A1Y6HJW4_9XANT Epoxyqueuosine reductase OS=Xanthomonas fragariae OX=48664 GN=queG PE=3 SV=1
MCAVLARPNPDDAAARIRALAREAGFQRCGITGIELGEDEAHLRSWLEEGLYGTMHWMAQHGDKRSRPQELVPGTLRVLSVGMDYGRKDDTEAWNTLYDGCRAYVARYALGRDYHKLMRNRLQKLAERIQGEIGAFGYRVFVDSAPVLERALARNAGLGWIGKHTCLIDRNGGSWFFLGEIYLDLPLPIDTPATAHCGTCTRCIDICPTQAIIAPYRLDARRCIAYLTIEHDGAIPEDMRKQIGNRIFGCDDCQLICPWNKFAQRTDEADFRARNELDVATLPQLFAWDQDEFLRRTEGSPIRRSGHQRWLRNIAVGLGNAPRTSAVLTALEARRSDDSALVREHVGWALAQHGL

SEQ ID NO: 82145 - protein, 355 aa, Xanthomonas gardneri
  misc_feature (1)..(355): tr|A0A1L5Y240|A0A1L5Y240_9XANT Epoxyqueuosine reductase OS=Xanthomonas gardneri OX=90270 GN=queG PE=3 SV=1
MSAVLARPDPTDAAARIRALAREAGFQRCGITGIELGEDEVHLRSWLEEGLYGTMHWMAQHGDKRSRPQELVPGTLRVLSVGMDYGRKDDTEAWNTLHDGRRAYVARYALGRDYHKLMRNRLQKLAERIQGEVGAFCYRVFVDSAPVLERALARNAGLGWIGKHTCLIDRNGGSWFFLGEIYLDLPLPIDTPATAHCGTCTRCIDICPTQAIIAPHRLDARRCIAYLTIEHDGAIPEEMRKPIGNRIFGCDDCQLICPWNKFAQRTDEADFRARNDLDVATLPQLFAWDTDEFLRRTEGSPIRRSGHERWLRNIAVGLGNAPGTPEVLAALEARRNDDSELVREHVGWALAQHGL

SEQ ID NO: 82146 - protein, 355 aa, Xanthomonas gardneri; identical to SEQ ID NO: 82139
  misc_feature (1)..(355): tr|F0CAC6|F0CAC6_9XANT Epoxyqueuosine reductase OS=Xant homonas gardneri ATCC 19865 OX=925777 GN=queG PE=3 SV=1

SEQ ID NO: 82147 - protein, 355 aa, Xanthomonas hortorum; identical to SEQ ID NO: 82145
  misc_feature (1)..(355): tr|A0A248Y7W4|A0A248Y7W4_9XANT Epoxyqueuosine reductase OS=Xanthomonas hortorum OX=56454 GN=queG PE=3 SV=1

SEQ ID NO: 82148 - protein, 355 aa, Xanthomonas hortorum
  misc_feature (1)..(355): tr|A0A2S7E4I7|A0A2S7E4I7_9XANT Epoxyqueuosine reductase OS=Xanthomonas hortorum pv. hederae OX=453603 GN=queG PE=3 SV=1
MSAVLARPDPTDAAARIRALAREAGFQRCGITGIELGEDEAHLRSWLEEGLYGTMHWMAQHGDKRSRPQELVPGTLRVLSVGMDYGRKDDTEAWNTLHDGRRAYVARYALGRDYHKLMRNRLQKLAERIQGEVGAFGYRVFVDSAPVLERALARNAGLGWIGKHTCLIDRNGGSWFFLGEIYLDLPLPIDTPATAHCGTCTRCIDICPTQAIIAPYRLDARRCIAYLTIEHDGAIPEEMRKPIGNRIFGCDDCQLICPWNKFAQRTDESDFRARNDLDVATLPQLFAWGTDEFLRRTEGSPIRRSGHERWLRNIAVGLGNAPGTPEVLAALEARRNDDSELVREHVGWALAQHGL

SEQ ID NO: 82149 - protein, 375 aa, Xanthomonas hyacinthi
  misc_feature (1)..(375): tr|A0A2S7F163|A0A2S7F163_9XANT Epoxyqueuosine reductase OS=Xanthomonas hyacinthi OX=56455 GN=queG PE=3 SV=1
MSSSAAPIDPHAAAARIRALAREFGFQRCGIAGIELQQDEAHLRDWLAQGLYGTMQWMAQHGDKRARPAELIPGTLRVISVGLDYGRNDDDSAWDTLRDGECAYVARYALGRDYHKLMRNRLQKLAERIQGEIGRFGHRVFVDSAPVLERALARDAGLGWIGKHTCLIDRNGGSWFFLGEIYVDLPLPIDPPASAHCGTCTRCIDVCPTQAIIAPYRLDARRCIAYLTIEHDGAIPEELRPAIGNRIFGCDDCQLVCPWNKFAKRSDEPDFRARNDLDRATLAQLFAWDEDEFLRRTEGSAIRRSGHERWLRNLAVALGNAPSTPQVLAALGTRAQHASPLVREHVQWALARHAQQARVGDVAAPQPSAHNDVRG

SEQ ID NO: 82150 - protein, 355 aa, Xanthomonas manihotis
  misc_feature (1)..(355): tr|A0A0W7XEW4|A0A0W7XEW4_XANMN Epoxyqueuosine reductase OS=Xanthomonas manihotis OX=43353 GN=queG PE=3 SV=1
MSAALARPDPADAAARIRMLAREAGFQRCGITGIELGEDEVHLRSWLAEGLYGTMHWMAQHGDKRSRPQELVPGTLRVLSIGMDYGRKDDTEAWNTLHDGNRAYVARYALGRDYHKLMRNRLQKLAERIQGEIGQFGFRVFVDSAPVLERALARNAGLGWIGKHTCLIDRNGGSWFFLGEIYLDLPLPIDTPATAHCGTCTRCIDICPTQAIIAPYRLDARRCIAYLTIEHDGAIPEDMRKPIGNRIFGCDDCQLICPWNKFAKRTDEADFRARNELNVATLPQLFAWNEDDFLRRTEGSPIRRSGHERWLRNIAVGLGNAPGTPEVLAALEARRHDDSALVREHVGWALAQHGL

SEQ ID NO: 82151 - protein, 355 aa, Xanthomonas melonis
  misc_feature (1)..(355): tr|A0A2S7DGD4|A0A2S7DGD4_9XANT Epoxyqueuosine reductase OS=Xanthomonas melonis OX=56456 GN=queG PE=3 SV=1
MSAVLARPDPADAAARIRVLAREAGFQRCGIAGIELGEDEAHLRSWLAEGLYGTMHWMAQHGDKRARPQELVPGTLRVLSVGMDYGRKDDTEAWNTLHDGKRAYVARYALGRDYHKLMRNRLQKLAERIQGEIGAFGYRVFVDSAPVLERALARNAGLGWIGKHTCLIDRNGGSWFFLGEIYLDLPLPIDTPATAHCGSCTRCIDICPTQAIIAPYRLDARRCIAYLTIEHEGAIPEQMRKPIGNRIFGCDDCQLVCPWNKFAKRSDEADFRARNDLDVATLPQLFAWDQAEFLQRTEGSPIRRSGHERWLRNIAVSLGNAPGTPEVVSALEARRHHDSALVREHVGWALAQHGL

SEQ ID NO: 82152 - protein, 355 aa, Xanthomonas nasturtii
  misc_feature (1)..(355): tr|A0A3E1KRT7|A0A3E1KRT7_9XANT Epoxyqueuosine reductase OS=Xanthomonas nasturtii OX=1843581 GN=queG PE=3 SV=1
MSAVLARPDPTDAAARIRALAREAGFQRCGITGIELGEDEAHLRSWLAEGLYGTMHWMAQHGDKRSRPQELVPGTLRVLSVGMDYGRKDDTEAWNTLHDGNRAYVARYALGRDYHKLMRNRLQKLAERIQGEIGAFGFRVFVDSAPVLERALARNAGLGWIGKHTCLIDRNGGSWFFLGEIYLDLPLPIDTPATAHCGTCTRCIDICPTQAIIAPYRLDARRCIAYLTIEHDGAIPEQMRKPIGNRIFGCDDCQLICPWNKFAKRTDEADFRARNDLDVATLPQLFAWDEAEFLRRTEGSPIRRSGHERWLRNIAVGLGNAPGTPEVLAALQARRHDDSELVREHVGWALAQHGL

SEQ ID NO: 82153 - protein, 355 aa, Xanthomonas oryzae
  misc_feature (1)..(355): tr|A0A0M1K503|A0A0M1K503_9XANT Epoxyqueuosine reductase OS=Xanthomonas oryzae OX=347 GN=queG PE=3 SV=1
MSAVFARPDPADAAARIRVLAREAGFQRCGITGIELGEDEVHLRSWLEEGLYGTMHWMAQHGDKRSRPQELVPGTLRVLSVGMDYGRKDDTEAWNTLHDGTRAYVARYALGRDYHKLMRNRLQKLAERIQGEIGAFGFRVFVDSAPVLERALARNAGLGWIGKHTCLIDRNGGSWFFLGEIYIDVPLPIDTPATAHCGTCTRCIDICPTQAIIAPYRLDARRCIAYLTIEHDGAIPEDMRKPIGNRIFGCDDCQLICPWNKFAKRTDEADFRARNELDVATLPQLSAWDEDEFLRRTEGSPIRRSGHERWLRNIAVGLGNAPGTPEVLAALEARRHDDSALVREHVGWALSQHGL

SEQ ID NO: 82154 - protein, 355 aa, Xanthomonas oryzae
  misc_feature (1)..(355): tr|G7TCQ9|G7TCQ9_XANOB Epoxyqueuosine reductase OS=Xant homonas oryzae pv. oryzicola (strain BLS256) OX=383407 GN=queG PE=3 SV=1
MSAVLARPDPADAAARMRVLAREAGFQRCGITGIELGEDEVHLRSWLEEGLYGTMHWMAQHGDKRSRPQELVPGTLRVLSVGMDYGRKDDTEAWNTLHDGKRAYVARYALGRDYHKLMRNRLQKLAERIQGEIGAFGFRVFVDSAPVLERALARNAGLGWIGKHTCLIDRNGGSWFFLGEIYLDVPLPIDTPATAHCGTCTRCIDICPTQAIIAPYRLDARRCIAYLTIEHDGAIPEDMRKPIGNRIFGCDDCQLICPWNKFAKRTDEADFRARNELDVATLPQLFAWDEDEFLRRTEGSPIRRSGHERWLRNIAVGLGNAPGTPEVLAALEARRHDDSALVREHVGWALSQHGL

SEQ ID NO: 82155 - protein, 355 aa, Xanthomonas perforans
  misc_feature (1)..(355): tr|A0A0G8Y8F2|A0A0G8Y8F2_9XANT Epoxyqueuosine reductase OS=Xanthomonas perforans OX=442694 GN=queG PE=3 SV=1
MSAALAHPDPADTAARIRVLAREAGFQRCGITGIELGEDEVHLRSWLEEGLYGTMHWMAQHGDKRSRPQELVPGTLRVLSVGMDYGRKDDTEAWNTLHDGNRAYVARYALGRDYHKLMRNRLQKLAERIQGEIGPFGFRVFVDSAPVLERALARNAGLGWIGKHTCLIDRHGGSWFFLGEIYLDLPLPIDTPATAHCGTCTRCIDICPTQAIIAPYRLDARRCIAYLTIEHDGAIPEDMRKPIGNRIFGCDDCQLICPWNKFAKRTDEADFRARNDLDVATLPQLFAWNEDEFLRRTEGSPIRRSGHERWLRNIAVGLGNAPGTPEVLAALQARRHDDSALVREHVGWALAQHDL

SEQ ID NO: 82156 - protein, 355 aa, Xanthomonas phaseoli
  misc_feature (1)..(355): tr|A0A1V9HGG0|A0A1V9HGG0_9XANT Epoxyqueuosine reductase OS=Xanthomonas phaseoli pv. dieffenbachiae OX=92828 GN =queG PE=3 SV=1
MSAALARPDPADAAARIRVLAREAGFQRCGITGIELGEDEVHLRSWLAEGLYGTMHWMAQHGDKRSRPQELVPGTLRVLSVGMDYGRKDDTEAWNTLHDGNRAYVARYALGRDYHKLMRNRLQKLAERIQGEIGQFGFRVFVDSAPVLERALARNAGLGWIGKHTCLIDRNGGSWFFLGEIYLDLPLPIDTPATAHCGTCTRCIDICPTQAIIAPYRLDARRCIAYLTIEHDGAIPEDMRKPIGNRIFGCDDCQLICPWNKFAKRTDEADFRARNELDVATLPQLFAWNEGDFLRRTEGSPIRRSGHERWLRNIAVGLGNAPGTPEVLAALEARRHDDSALVREHVGWALAQHGL

SEQ ID NO: 82157 - protein, 355 aa, Xanthomonas phaseoli
  misc_feature (1)..(355): tr|A0A1V9HBA4|A0A1V9HBA4_9XANT Epoxyqueuosine reductase OS=Xanthomonas phaseoli pv. syngonii LMG 9055 OX=14378 78 GN=queG PE=3 SV=1
MSAALARPDPADAAARIRVLAREAGFQRCGITGIELGEDEVHLRSWLAEGLYGTMHWMAQHGDKRSRPQELVPGTLRVLSVGMDYGRKDDTEAWNTLYDGNRAYVARYALGRDYHKLMRNRLQKLAERIQGEIGQFGFRVFVDSAPVLERALARNAGLGWIGKHTCLIDRNGGSWFFLGEIYLDLPLPIDTPATAHCGTCTRCIDICPTQAIIAPYRLDARRCIAYLTIEHDGANPEDMRKPIGNRIFGCDDCQLICPWNKFAKRTDEADFRARNELDVATLPQLFAWNEGDFLRRTEGSPIRRSGHERWLRNIAVGLGNAPGTPEVLAALEARRHDDSALVREHVGWALAQHGL

SEQ ID NO: 82158 - protein, 355 aa, Xanthomonas pisi
  misc_feature (1)..(355): tr|A0A2S7D1L8|A0A2S7D1L8_9XANT Epoxyqueuosine reductase OS=Xanthomonas pisi OX=56457 GN=queG PE=3 SV=1
MSAAVTRPDPTDAAARIRALAREAGFQRCGITGIELGEDEAHLRSWLEEGLYGTMHWMAQHGDKRSRPQELVPGTLRVLSVGMDYGRKDDTEAWTTLHDGTRAYVARYALGRDYHKLMRNRLQKLAERIQGEIGAFGYRVFVDSAPVLERALARNAGLGWIGKHTCLIDRNGGSWFFLGEIYLDLPLPIDTPATAHCGTCTRCIDICPTQAIIAPYRLDARRCIAYLTIEHEGAIPEQMRKPIGNRIFGCDDCQLVCPWNKFAQRTDEADFRARNALDVATLPQLFAWDEAEFLRRTEGSPIRRSGHARWLRNIAVGLGNAPGTPEVLAALEARRHDACELVREHVGWALAQHGL

SEQ ID NO: 82159 - protein, 355 aa, Xanthomonas prunicola
  misc_feature (1)..(355): tr|A0A2N3RHT8|A0A2N3RHT8_9XANT Epoxyqueuosine reductase OS=Xanthomonas prunicola OX=2053930 GN=queG PE=3 SV=1
MSAVLARPTPADAAARIRVLAREAGFQRCGITGIELGADEVHLRSWLEEGLYGTMHWMAQHGDKRSRPQELVPGTLRVLSVGMDYGRKDDTEAWNTLHDGTRAYVARYALGRDYHKLMRNRLQKLAERIQGEIGAFGFRVFVDSAPVLERALARNAGLGWIGKHTCLIDRNGGSWFFLGEIYLDLPLPIDTPATAHCGTCTRCIDICPTQAIIAPYRLDARRCIAYLTIEHDGAIPEDMRKPIGNRIFGCDDCQLICPWNKFAKRTDEADFRARNALDVATLPQLFAWDEDEFLRRTEGSPIRRSGHERWLRNIAVGLGNAPGTPEVFTALEARRHDDAALVREHVGWALAQHGL

SEQ ID NO: 82160 - protein, 368 aa, Xanthomonas sacchari
  misc_feature (1)..(368): tr|A0A2P5Z9Q8|A0A2P5Z9Q8_9XANT Epoxyqueuosine reductase OS=Xanthomonas sacchari OX=56458 GN=queG PE=3 SV=1
MSARLDIADPHAAAARIRALARTFGFQRCGIAGIELQQDEAHLRDWLQQGLYGTMHWMAQHGDKRSRPAELIPGTLRVISVGLDYGRNDDDSAWDTLHDGERAYVARYALGRDYHKLMRNRLQKLAERIQDEIGPFGHRVFVDSAPVLERALARDAGLGWIGKHTCLIDRNGGSWFFLGEIYVDLPLPIDPPASAHCGTCTRCIDVCPTQAIVAPYRLDARRCIAYLTIEHDGAIPEELRPAIGNRIFGCDDCQLICPWNKFAKRSDEPDFRARNDLDKATLAQLFAWEEDEFLRRTEGSAIRRSGHERWLRNIAVALGNAPTTPQVMAALGARAQHPSPLVREHVQWALARHAATSTQPDAAADVRG

SEQ ID NO: 82161 - protein, 374 aa, Xanthomonas sacchari
  misc_feature (1)..(374): tr|A0A5D1A6F4|A0A5D1A6F4_9XANT Epoxyqueuosine reductase OS=Xanthomonas sacchari OX=56458 GN=queG PE=3 SV=1
MSARLDIADPHAAAARIRALARTFGFQRCGIAGIELQQDEAHLRDWLEQGLYGTMHWMVQHGDKRSRPAELIPGTLRVISVGLDYGRNDDDSAWDTLRDGARAYVARYALGRDYHKLMRNRLQKLAERIQDEIGPFGHRVFVDSAPVLERALARDAGLGWIGKHTCLIDRNGGSWFFLGEIYVDLPLPIDPPASAHCGTCTRCIDVCPTQAIVAPYRLDARRCIAYLTIEHDGAIPEELRAAIGNRIFGCDDCQLICPWNKFAKRSDEPDFRARNDLDKATLAQLFAWEEDEFLRRTEGSAIRRSGHERWLRNLAVALGNAPTTPQVLAALGARAQHPSPLVREHVQWALARHTQAPADVAAPASPAPKADVRG

SEQ ID NO: 82162 - protein, 355 aa, Xanthomonas sp.
  misc_feature (1)..(355): tr|A0A3A5EMF6|A0A3A5EMF6_9XANT Epoxyqueuosine reductase OS=Xanthomonas sp. CFBP 7698 OX=2082399 GN=queG PE=3 S V=1
MSAVLARPDPTDAAARIRALAREAGFQRCGIAGIELGEDEVHLRSWLEEGLYGTMHWMAQHGDKRSRPQELVPGTLRVLSVGMDYGRKDDTEAWNTLHDGNRAYVARYALGRDYHKLMRNRLQKLAERIQGEIGAFGFRVFVDSAPVLERALARNAGLGWIGKHTCLIDRNGGSWFFLGEIYLDLPLPIDTPATAHCGTCTRCIDICPTQAIIAPYRLDARRCIAYLTIEHDGPIPEEMRKPIGNRIFGCDDCQLICPWNKFAKRTDEPDFRARNALDVATLPQLFAWDEDEFLRRTEGSPIRRSGHERWLRNIAVGLGNAPGTPEVLAALEARRHDDSELVREHVGWALAQHGL

SEQ ID NO: 82163 - protein, 374 aa, Xanthomonas sp.
  misc_feature (1)..(374): tr|A0A0J6G1Y8|A0A0J6G1Y8_9XANT Epoxyqueuosine reductase OS=Xanthomonas sp. NCPPB 1128 OX=1775876 GN=queG PE=3 SV=1
MSARLDIADPHAAAARIRALARTFGFQRCGIAGIELQQDEAHLRDWLEQGLYGTMHWMAQHGDKRSRPAELIPGTLRVISVGLDYGRNDDDSAWDTLRDGERAYVARYALGRDYHKLMRNRLQKLAERIQDEIGPFGHRVFVDSAPVLERALARDAGLGWIGKHTCLIDRNGGSWFFLGEIYVDLPLPIDPPASAHCGTCTRCIDVCPTQAIVAPYRLDARRCIAYLTIEHDGAIPEELRPAIGNRIFGCDDCQLICPWNKFAKRSDEPDFRARNDLDKATLAQLFAWEEDEFLRRTEGSALRRSGHERWLRNLAVALGNAPTTPQVLDALGARAEHPSPLVREHVRWALAQHADKSAATATPASPMPKANVRG

SEQ ID NO: 82164 - protein, 378 aa, Xanthomonas theicola
  misc_feature (1)..(378): tr|A0A2S6ZIM7|A0A2S6ZIM7_9XANT Epoxyqueuosine reductase OS=Xanthomonas theicola OX=56464 GN=queG PE=3 SV=1
MSATVTATPADPRAAAARIRALAREFGFQRCGIAGIELQEDEAHLRDWLAQGLYGTMQWMAQHGDKRTRPAELIPGTLRVISVGLDYGRNDDDSAWDTLRNGARAYVARYALGRDYHKLMRNRLQKLAERIQAEIGRFGHRVFVDSAPVLERALARDAGLGWIGKHTCLIDRSGGSWFFLGEIYVDLPLPIDPPASAHCGTCTRCIDVCPTQAIVAPYRLDARRCIAYLTIEHDGAIPEALRPAIGNRIFGCDDCQLVCPWNKFAKRSDEPDFRARNDLDRATLAQLFAWDEDEFLRRTEGSAIRRSGHERWLRNLAVALGNAPTTPQVLAALGTRAQHASPLVREHVQWALARHAGTAAAADHGGSPPAADRAGVRG

SEQ ID NO: 82165 - protein, 371 aa, Xanthomonas translucens
  misc_feature (1)..(371): tr|A0A0K2ZE30|A0A0K2ZE30_XANCT Epoxyqueuosine reductase OS=Xanthomonas translucens pv. arrhenatheri LMG 727 OX =1195923 GN=queG PE=3 SV=1
MSSSAPHAAAARIRALAREFGFQRCGIAGIDLQQDEAHLRDWLAQGLYGTMQWMAQHGDKRARPAELIPGTLRVISVGLDYGRNDDDSAWDTLRDGERAYVARYALGRDYHKLMRNRLQKLAERIQAEVGRFGHRVFVDSAPVLERALARDAGLGWIGKHTCLIDRNGGSWFFLGEIYVDLPLPIDPPASAHCGTCTRCIEVCPTQAIVAPYRLDARRCIAYLTIEHEGAIPEELRPAIGNRIFGCDDCQLVCPWNKFAKRSDEPDFRARNALDRATLAQLFAWDEDEFLRRTEGSAIRRSGHERWLRNLAVALGNAPTTPQVLAALGARAQHGSPLVREHVQWALAQHAGQTGADNAAAPPPPAHGGMRG

SEQ ID NO: 82166 - protein, 375 aa, Xanthomonas translucens
  misc_feature (1)..(375): tr|A0A5C1WW08|A0A5C1WW08_XANCT Epoxyqueuosine reductase OS=Xanthomonas translucens pv. undulosa OX=487909 GN=q ueG PE=3 SV=1
MSSNVAPADPRTAAARIRALAREFGFQRCGIAGIELQQDEAHLRDWLAQGMYGTMQWMAQHGDKRARPAELIPGTLRVISVGLDYGRNDDDSAWETLRDGERAYVARYALGRDYHKLMRNRLQKLAERIQAEIGPFGHRVFVDSAPVLERALARDAGLGWIGKHTCLIDRNGGSWFFLGEIYVDLPLPIDPPASAHCGTCTRCIEVCPTQAIVAPYRLDARRCIAYLTIEHEGAIPEELRPAIGNRIFGCDDCQLVCPWNKFAKRSDEPDFRARNALDRATLAQLFAWDEDEFLRRTEGSAIRRSGHERWLRNLAVALGNAPTTPQVLAALDARAQHGSPLVREHVQWALAQHADQASVSEAALPRPAAHGDVRG

SEQ ID NO: 82167 - protein, 356 aa, Xanthomonas vasicola
  misc_feature (1)..(356): tr|A0A2P5ZRD4|A0A2P5ZRD4_XANVA Epoxyqueuosine reductase OS=Xanthomonas vasicola OX=56459 GN=queG PE=3 SV=1
MSAVLARPDPADAAARIRVLAREAGFQRCGITGIELGEDEVHLRSWLEEGLYGTMHWMAQHGDKRSRPQELVPGTLRVLSVGMDYGRKDDTEAWNTLHDGNRAYVARYALGRDYHKLMRNRLQKLAERIQGEIGAFGFRVFVDSAPVLERALARNAGLGWIGKHTCLIDRNGGSWFFLGEIYLDLPLPIDTPATAHCGTCTRCIDICPTQAIIAPYRLDARRCIAYLTIEHDGAIPEDMRKPIGNRIFGCDDCQLICPWNKFAKRTDEADFRARNDLDVATLPQLVAWDADEFLRRTEGSPIRRSGHERWLRNIAVGLGNAPGTPEVLAALEARRHDDSALVREHVGWALAQHGLS

SEQ ID NO: 82168 - protein, 355 aa, Xanthomonas vesicatoria
  misc_feature (1)..(355): tr|A0A1L5QP62|A0A1L5QP62_9XANT Epoxyqueuosine reductase OS=Xanthomonas vesicatoria OX=56460 GN=queG PE=3 SV=1
MSAVLARPDPTDAAARIRVLAREAGFQRCGITGIELGEDEAHLRSWLAEGLYGTMHWMAQHGDKRSRPQELVPGTLRVLSVGMDYGRKDDTEAWTTLHDGTRAYVARYALGRDYHKLMRNRLQKLAERIQGEIGAFGYRVFVDSAPVLERALARNAGLGWIGKHTCLIDRNGGSWFFLGEIYLDLPLPIDTPATAHCGTCTRCIDICPTQAIIAPYRLDARRCIAYLTIEHDGAIPEEMRKPIGNRIFGCDDCQLICPWNKFAQRTDEADFRARNALDVATLPQLFAWDEAEFLQRTEGSPIRRSGHARWLRNIAVGLGNAPGTPEVLAALEARRHDDSELVREHVGWALAQHGL

SEQ ID NO: 82169 - protein, 301 aa, Xanthomonas vesicatoria
  misc_feature (1)..(301): tr|F0BG13|F0BG13_9XANT Iron-sulfur cluster binding prot ein, putative OS=Xanthomonas vesicatoria ATCC 35937 OX= 925775 GN=XVE_3177 PE=4 SV=1
MHWMAQHGDKRSRPQELVPGTLRVLSVGMDYGRKDDTEAWTTLHDGTRAYVARYALGRDYHKLMRNRLQKLAERIQGEIGAFGYRVFVDSAPVLERALARNAGLGWIGKHTCLIDRNGGSWFFLGEIYLDLPLPIDTPATAHCGTCTRCIDICPTQAIIAPYRLDARRCIAYLTIEHDGAIPEEMRKPIGNRIFGCDDCQLICPWNKFAQRTDEADFRARNALDVATLPQLFAWDEAEFLQRTEGSPIRRSGHARWLRNIAVGLGNAPGTPEVLAALEARRHDDSELVREHVGWALAQHGL

SEQ ID NO: 82170 - protein, 312 aa, Xenococcus sp.
  misc_feature (1)..(312): tr|L8LRT2|L8LRT2_9CYAN Epoxyqueuosine reductase OS=Xeno coccus sp. PCC 7305 OX=102125 GN=queG PE=3 SV=1
MINSDRIKEAAKNIGFHKVGIVSVDDIPDDAAVEHLNNWLAFGYHADMAWMANPKRADIRLCLPDARSLIVVAVNYYSPHQHADAPEIAKISRYGWGRDYHKVMQKKLKALSSWLQEQGDNITTRYYSDTGPVQDKVWAQRAGLGWIGKNGNLITRDYGSWVFLGEILTNLAITADQPHSSHCGTCTRCLEACPTNAIAKPFVVDANRCIAYHTIENREPELPAEIAQKLSGWVAGCDICQDVCPWNQRFAQETDIEDFQPYPENLHPQLTELASIESGEWDRRFRASALRRIKPQMWQRNAQANLKYIKEQ

SEQ ID NO: 82171 - protein, 358 aa, Xenophilus sp.
  misc_feature (1)..(358): tr|A0A254VK03|A0A254VK03_9BURK Epoxyqueuosine reductase OS=Xenophilus sp. AP218F OX=2014876 GN=queG PE=3 SV=1
MTENPKQKPDYPELSRQIKVWAREAGFADARVGPANLPPEAERKLEAWLAAGYHGEMDYMARHGALRVKPAELVPGTLSVISVRMNYWPGGRDPEAVLADGSRAYLSRYALGRDYHKVLRNRLQKLAERIEAAIGAFGYRVFTDSAPVAEVALASQAGLGWRGKHTLLLTKKQGSLFFLGEILTDLPLPADEPEDGHCGRCTRCIDICPTQAIVEPYTVDARRCISYLTIELKSAIPEAMRPLIGNRVYGCDDCQLTCPWNRFAVDSAEADFAVRHGLDDAALTELFAWSEAEFKERMAGSPIYRIGYAKWLSNLAVGLGNAPTTDETVAALRARLDHPDELVAEPVRWALARHGFAE

SEQ ID NO: 82172 - protein, 385 aa, Xenorhabdus beddingii
  misc_feature (1)..(385): tr|A0A1Y2SRD6|A0A1Y2SRD6_9GAMM Epoxyqueuosine reductase OS=Xenorhabdus beddingii OX=40578 GN=queG PE=3 SV=1
MATPLDLNLLAANIKQWGISLGFQQVGICDTDLSAEEPKLQAWLDKQYHGEMDWMARHGMMRARPHELLPGTLRVISVRMNYLPAKAAFASTLNNPQMGYVSRYSLGRDYHKLLRQRLKKLGDQIQDYCTVHDYQGTLNFRPFVDSAPIMERPLAAKAGLGWVGKHSLILNRDSGSWFFLGELLIDLPLPIDTPQEEQCGRCVACMTTCPTGAIVEPYTIDARRCISYLTIELEGAIPEEFRPLMGNRIYGCDDCQLICPWNRFSQLTDEADFSPRAALHTPDLLDLFHWSEEKFLRITEGSAIRRIGYLRWLRNISVALGNAPYQDDIVLALEKRMGLSDVLDEHIRWAIAQQITRRNANAIEVQTSQQKRLIRAITKGLPRDA

SEQ ID NO: 82173 - protein, 385 aa, Xenorhabdus bovienii
  misc_feature (1)..(385): tr|A0A0B6XE66|A0A0B6XE66_XENBV Epoxyqueuosine reductase OS=Xenorhabdus bovienii OX=40576 GN=yjeS PE=3 SV=1
MATPLDLNLLAANIKQWGLSLGFQQVGICDTDLSTEEPKLQEWLDKQYHGEMDWMARHGMMRARPHELLPDTLRVISVRMNYLPTKAAFASTLNNPELGYVSRYSLGRDYHKLLRQRLKKLGGQIQDYCSAHEYQGTLNFRPFVDSAPIMERPLAAKAGLGWVGKHSLILNRESGSWFFLGELLINLPLPIDAPQEEQCGRCVACMTTCPTGAIVEPYTIDARRCISYLTIELDGVIPEELRPLMGNRIYGCDDCQLICPWNRFSQLTDEVDFSPRAALHTPKLLDLFSWSEEKFLRITEGSAIRRIGYLRWLRNISVALGNALYQDNIVLALEKRIGLSEVLDEHIHWAIDQQITRRNANTIEVQTSQQKRLIRAITKGLPRDA

SEQ ID NO: 82174 - protein, 385 aa, Xenorhabdus bovienii; identical to SEQ ID NO: 82173
  misc_feature (1)..(385): tr|A0A077NHX5|A0A077NHX5_XENBV Epoxyqueuosine reductase OS=Xenorhabdus bovienii str. puntauvense OX=1398201 GN =queG PE=3 SV=1

SEQ ID NO: 82175 - protein, 385 aa, Xenorhabdus budapestensis
  misc_feature (1)..(385): tr|A0A2D0J501|A0A2D0J501_XENBU Epoxyqueuosine reductase OS=Xenorhabdus budapestensis OX=290110 GN=queG PE=3 SV =1
MVTPLDLNLLATNIKQWGLSLGFQQVGICDTDLSTEEPRLQEWLDKQYHGEMDWMARHGMMRTRPRELLPGTLRIISVRMNYLPTKAAFASTLNNPELGYVSRYSLGRDYHKLLRQRLKKLGEQIQDYCSTHEYQGTLNFRPFVDSAPIMERPLATKAGLGWVGKHSLILNRESGSWFFLGELLINLPLPIDISQEEQCGRCVACMTTCPTGAIVEPYTIDARRCISYLTIELDGTIPEEFRSLMGNRIYGCDDCQLICPWNRFSQLTDEADFSPRAALHTPELLDLFSWSEEKFLRITEGSAIRRIGYLRWLRNISVALGNAPYRDEIVLTLKKRIGLSDVLDEHIHWAVAQQISRRSANAIEVQTSQQKRLIRAITKGLPRDA

SEQ ID NO: 82176 - protein, 385 aa, Xenorhabdus cabanillasii
  misc_feature (1)..(385): tr|A0A3D9UGK3|A0A3D9UGK3_9GAMM Epoxyqueuosine reductase OS=Xenorhabdus cabanillasii OX=351673 GN=queG PE=3 SV= 1
MTTPLDLNLLATNIKQWGLSLGFQQVGICDTDLSTEEPRLQEWLDKQYHGEMDWMARHGMMRARPHELLSGTLRVISVRMNYLPTKAAFASTLNNPELGYVSRYSLGRDYHKLLRQRLKKLGEQIQDYCSTHEYQGTLNFRPFVDSVPIMERPLAAKAGLGWVGKHSLILNRESGSWFFLGELLINLPLPIDTPQEEQCGRCVACMTTCPTGAIIEPYTIDARRCISYLTIELDGAIPEEFRPLMGNRIYGCDDCQLICPWNRFSQLTDEDDFSPRAALHTPELLDLFSWSEEKFLRITEGSAIRRIGYLRWLRNISVALGNAPYRDEIVLTLEKRIGLSDVLDEHIHWAIAQQISRRSANAIEIQTSQQKRLIRAITKGLARDA

SEQ ID NO: 82177 - protein, 385 aa, Xenorhabdus cabanillasii
  misc_feature (1)..(385): tr|W1IRH3|W1IRH3_9GAMM Epoxyqueuosine reductase OS=Xeno rhabdus cabanillasii JM26 OX=1427517 GN=yjeS PE=3 SV=1
MTTPLDLNLLATNIKQWGLSLGFQQVGICDTDLSTEEPRLQEWLDKQYHGEMDWMARHGMMRARPHELLSGTLRVISVRMNYLPTKAAFASTLNNPELGYVSRYSLGRDYHKLLRQRLKKLGEQIQDYCSTHEYQGTLNFRPFVDSAPIMERPLAAKAGLGWVGKHSLILNRESGSWFFLGELLINLPLPIDTPQEEQCGRCVACMTICPTGAIIEPYTIDARRCISYLTIELDGAIPEEFRPLMGNRIYGCDDCQLICPWNRFSQLTDEDDFSPRAALHTPELLDLFSWSEEKFLRITEGSAIRRIGYLRWLRNISVALGNAPYRDEIVLTLEKRIGLSDVLDEHIHWAIAQQISRRSANAIEIQTSQQKRLIRAITKGLARDA

SEQ ID NO: 82178 - protein, 385 aa, Xenorhabdus eapokensis
  misc_feature (1)..(385): tr|A0A1Q5TWJ0|A0A1Q5TWJ0_9GAMM Epoxyqueuosine reductase OS=Xenorhabdus eapokensis OX=1873482 GN=queG PE=3 SV=1
MAIPLDLNLLATNIKQWGLSLGFQQVGICDTDLSAEEPRLQEWLDKQYHGEMDWMVRHGMMRARPHELLPGTLRVISVRMNYLPAKAAFASTLNNPQMGYISRYSLGRDYHKLLRQRLKKLGDKIQEYCHAHEYQGALNFRPFVDSAPIMERPLAEKAGLGWVGKHSLILNRESGSWFFLGELLINLPLPIDAPQKEQCGRCVACMTTCPTGAIVEPYTIDARRCISYLTIELEGVIPEEFRPLMGNRIYGCDDCQLICPWNRFSQLTDEADFSPRAALHTPDLLALFNWSEEKFLRITEGSPIRRIGYLRWLRNISVALGNAPYQDDIVLALEKRFGLSEVLDEHIYWAITQQMARRNANAIEVQTSQQKRLIRAITKGLPRDA

SEQ ID NO: 82179 - protein, 385 aa, Xenorhabdus ehlersii
  misc_feature (1)..(385): tr|A0A2D0IQ05|A0A2D0IQ05_9GAMM Epoxyqueuosine reductase OS=Xenorhabdus ehlersii OX=290111 GN=queG PE=3 SV=1
MATPLDLHLLATNIKQWGLSLGFQQIGICDTDLSAEESRLQEWLDKQYHGEMDWMARHSMMRARPHELLPGTLRVISVRMNYLPAKAAFASTLNNPQMGYISRYSLGRDYHKLLRQRLKKLGDKIQEYCSAHEYQGTLNFRPFVDSAPIMERPLAEKAGLGWVGKHSLILNRESGSWFFLGELLINLPLPIDAPQEEQCGRCVACMTTCPTGAIVEPYTIDARRCISYLTIELEGVIPEEFRTLMGNRIYGCDDCQLICPWNRFSQLTDEADFSPRAALHTPDLLALFNWSEEKFLRITEGSPIRRIGYLRWLRNISVALGNAPYQEDVVLALEKRFGLSEVLDEHIHWAITQQMARRNANAIEVQTSQQKRLIRAITKGLPRDA

SEQ ID NO: 82180 - protein, 385 aa, Xenorhabdus hominickii
  misc_feature (1)..(385): tr|A0A2G0QE50|A0A2G0QE50_9GAMM Epoxyqueuosine reductase OS=Xenorhabdus hominickii OX=351679 GN=queG PE=3 SV=1
MAIPLDLNLLAANIKQWGISLGFQQVGICDTDLSAEEPKLQEWLDKQYHGEMDWMARHGMMRARPHELLPGTLRVISVRMNYLPAKAAFASTLNNPQMGYVSRYSLGRDYHKLLRQRLKKLGDQIQDYCSDHEYQGTLNFRPFVDSAPIMERPLAAKAGLGWVGKHSLILNRESGSWFFLGELLINLPLPIDTPQEEQCGRCVACMTTCPTGAIVEPYTIDARRCISYLTIELEGVIPEEFRPLMGNRIYGCDDCQLICPWNRFSQLTDETDFSPRATLHTPQLLDLFSWSEEKFLRITEGSAIRRIGYLRWLRNISVALGNAPYQVEIVLALEKRMDLSDILNEHIRWAIEQQITRRNANSIEVQTSQQKRLIRAITKGLPRDA

SEQ ID NO: 82181 - protein, 385 aa, Xenorhabdus innexi
  misc_feature (1)..(385): tr|A0A1N6MSF7|A0A1N6MSF7_9GAMM Epoxyqueuosine reductase OS=Xenorhabdus innexi OX=290109 GN=yjeS PE=3 SV=1
MAIPLDLNLLATNIKQWGLSLGFQQVGICDTDLSTEEPRLQEWLDKQYHGEMDWMARHGMMRARPHELLPGTLRVISVRMNYLPAKAAFASTLNNPEQGYVSRYSLGRDYHKLLRQRLKKLGDQIQEYCCAHEYQGVLNFRPFVDSAPIMERPLAAKAGLGWVGKHSLILNRESGSWFFLGELLINLPLPVDSPQEEQCGRCVACMTTCPTGAIVAPYTIDARRCISYLTIELDGVIPEEFRPLMGNRIYGCDDCQLICPWNRFSQLTDETDFSPRAALHTPELIDLFNWSEEKFLRITEGSAIRRIGYLRWLRNISVALGNAPYRDEIVLVLEKRMGLSEMLDEHIHWAIAQQISRRNVDVIDVQTSQQKRLIRAITKGLPRDA

SEQ ID NO: 82182 - protein, 385 aa, Xenorhabdus ishibashii
  misc_feature (1)..(385): tr|A0A2D0KFW1|A0A2D0KFW1_9GAMM Epoxyqueuosine reductase OS=Xenorhabdus ishibashii OX=1034471 GN=queG PE=3 SV=1
MTTHLDLNLLATNIKQWGLALGFQQVGICDTDLSAEEPRLQEWLDKQYHGEMDWMVRHGMMRARPHELLPGTLRVISVRMNYLPAKAAFASTLNNPQMGYISRYSLGRDYHKLLRQRLKKLGDKIQEYCRAHEYQGILNFRPFVDSAPIMERPLAEKAGLGWVGKHSLILNRESGSWFFLGELLINLPLPIDAPQEEQCGRCVACMTTCPTGAIVEPYTIDARRCISYLTIELEGVIPEEFRPLMGNRIYGCDDCQLICPWNRFSQLTDEADFNPRAALHTPDLLALFNWSEEKFLRITEGSPIRRIGYLRWLRNISVALGNAPYQDDIVLALEKRFGLSEILDEHIHWAITQQMARRNADAIEVQTSQQKRLIRAITKGLPRDA

SEQ ID NO: 82183 - protein, 385 aa, Xenorhabdus japonica
  misc_feature (1)..(385): tr|A0A1I4Y8G0|A0A1I4Y8G0_9GAMM Epoxyqueuosine reductase OS=Xenorhabdus japonica OX=53341 GN=queG PE=3 SV=1
MTTPLDLNLLATNIKQWGLSLGFQQVGICDTDLSAEEPKLQEWLDKKYHGEMDWMDRHGMMRARPHELLPGTLRVISIRMNYLPAKAAFASTLNNPQMGYVSRYSLGRDYHKLLRQRLKKLGDKIQEYCDTHEYQGTLNFRPFVDSAPIMERPLAEKAGLGWVGKHSLILNRESGSWFFLGELLVNLPLPIDAPQDEQCGRCVACMTTCPTGAIVEPYTIDARRCISYLTIELEGAIPEEFRPLVGNRIYGCDDCQLICPWNRFSQLTDEADFSPRAALHTPELLDLFNWSEEKFLRITEGSAIRRIGYLRWLRNISVALGNAPYQADIVLALEKRIGLSEVLDEHIHWAIAQQMVRRNANTIEVQTSQQKRLIRAITKGLPRDA

SEQ ID NO: 82184 - protein, 385 aa, Xenorhabdus khoisanae
  misc_feature (1)..(385): tr|A0A0J5FV15|A0A0J5FV15_9GAMM Epoxyqueuosine reductase OS=Xenorhabdus khoisanae OX=880157 GN=queG PE=3 SV=1
MTAPLDLNLLAANIKQWGISLGFQQVGICDTDLSAEEPKLQEWLDKQYHGEMDWMARHGMMRARPHELLPGTLRVISVRMNYLPAKAAFASTLNNPQMGYVSRYSLGRDYHKLLRQRLKKLGDTIQDYCTTHEYQGTLNFRPFVDSAPIMERPLAAKAGLGWVGKHSLILNRDSGSWFFLGELLIDLPLPVDVPQEEQCGRCVACMTTCPTGAIVEPYTIDARRCISYLTIELEGVIPEEFRPLMGNRIYGCDDCQLICPWNRFSQLTDEADFSPRAALHTPELLDLFSWSEEKFLRITEGSAIRRIGYLRWLRNISVALGNAPYQDDIVLALEKRTGLSEVLDEHIHWAIDQQITRRNANSIEVQTSQQKRLIRAITKGLPRDA

SEQ ID NO: 82185 - protein, 385 aa, Xenorhabdus koppenhoeferi
  misc_feature (1)..(385): tr|A0A1I7GRA5|A0A1I7GRA5_9GAMM Epoxyqueuosine reductase OS=Xenorhabdus koppenhoeferi OX=351659 GN=queG PE=3 SV =1
MAVPLDLNLLAVNIKQWGLSLGFQQVGICDTDLSTEEPKLQEWLDKQYHGEMDWMARHGMMRARPHELLPGTLRVISVRMNYLPAKAAFASTLNNPQMGYVSRYSLGRDYHKLLRQRLKKLGDQIQSYCSAHEYQGTLNFRPFVDSAPIMERPLAAKAGLGWVGKHSLILNRESGSWFFLGELLIDLPLPVDVPQEEQCGRCVACMTTCPTGAIVEPYTIDARRCISYLTIELEGVIPEEFRPLMGNRIYGCDDCQLICPWNRFSQLTDEADFSPRAALHAPELLDLFNWSEEKFLRITEGSAIRRIGYLRWLRNISVALGNSPYQDDIVLALGKRTGLSDVLDEHIHWAIDQQMARRNANVIEVQTSQQKRLIRAITKGLPRDA

SEQ ID NO: 82186 - protein, 385 aa, Xenorhabdus kozodoii
  misc_feature (1)..(385): tr|A0A2D0LGQ0|A0A2D0LGQ0_9GAMM Epoxyqueuosine reductase OS=Xenorhabdus kozodoii OX=351676 GN=queG PE=3 SV=1
MVTPLDLDLLTTNIKQWGLSLGFQQVGICDTDLSAEEPRLQAWLDKQYHGEMDWMARHGMMRARPHELLPGTLRVISVRMNYLPAKAAFASTLNNPQMGYISRYSLGRDYHKLLRQRLKKLGDKIQEYCSAHEYQGTLNFRPFVDSAPIMERPLAAKAGLGWVGKHSLILNRESGSWFFLGELLINLPLPIDAPQEEQCGRCVACMTTCPTGAIVEPYTIDARRCISYLTIELEGAIPEEFRPLMGNRIYGCDDCQLICPWNRFSQLTDEADFSPRAALHAPDLLALFHWSEEKFLRITEGSAIRRIGYLRWLRNISVALGNAPYQDDIVLALEKRLGLSDVLDEHIHWAIAQQMTRRNANAIEVQTSQQKRLIRAITKGLPRDA

SEQ ID NO: 82187 - protein, 385 aa, Xenorhabdus mauleonii
  misc_feature (1)..(385): tr|A0A1I3L2L4|A0A1I3L2L4_9GAMM Epoxyqueuosine reductase OS=Xenorhabdus mauleonii OX=351675 GN=queG PE=3 SV=1
MATPLDLNLLAANIKQWGISLGFQQVGICDTDLSTEEPRLQQWLDKQYHGEMDWMARHGMMRARPHELLPGTLRVISVRMNYLPAKAAFASTLNNPQMGYVSRYSLGRDYHKLLRQRLKKLGDQIQNYCTSHDYQGTLNFRPFVDSAPIMERPLAAKAGLGWVGKHSLILNRESGSWFFLGELLIDLPLPVDAPQEEQCGRCVACMTTCPTGAIVEPYTIDARRCISYLTIELEGVIPEEFRPLMGNRIYGCDDCQLICPWNRFSQLTDETDFSPRAALHTPELLDLFNWSEEKFLRITEGSAIRRIGYLRWLRNISVALGNAPYQDNIVLALEKRIGLSDVLDEHIHWAIEQQITRRNSQAIEVQTSQQKRLIRAITKGLPRDA

SEQ ID NO: 82188 - protein, 385 aa, Xenorhabdus miraniensis
  misc_feature (1)..(385): tr|A0A2D0JX24|A0A2D0JX24_9GAMM Epoxyqueuosine reductase OS=Xenorhabdus miraniensis OX=351674 GN=queG PE=3 SV=1
MAAPLDLNLLAANIKQWGISLGFQQVGICDTDLSAEEPKLQEWLDKQYHGEMDWMARHGMMRARPHELLPGTLRVISVRMNYLPAKAAFASTLNNPQMGYVSRYSLGRDYHKLLRQRLKKLGDTIQDYCTTHEYQGTLNFRPFVDSAPIMERPLAAKAGLGWVGKHSLILNRDSGSWFFLGELLIDLPLPVDAPQEEQCGRCVACMTTCPTGAIVEPYTIDARRCISYLTIELEGVIPEEFRPLMGNRIYGCDDCQLICPWNRFSQLTDEADFSPRAALHTPELLDLFSWSEEKFLRITEGSAIRRIGYLRWLRNISVALGNAPYQDDIVLALEKRTGLSDVLDEHIHWAIDQQTIRRNANSIEVQTSQQKRLIRAITKGLPRDA

SEQ ID NO: 82189 - protein, 385 aa, Xenorhabdus nematophila
  misc_feature (1)..(385): tr|D3VI35|D3VI35_XENNA Epoxyqueuosine reductase OS=Xeno rhabdus nematophila (strain ATCC 19061 / DSM 3370 / LMG 1036 / NCIB 9965 / AN6) OX=406817 GN=queG PE=3 SV=1
MAIPLDLNLLAANIKQWGISLGFQQIGICDTDLSTEEPKLQEWLDKQYHGEMDWMARHGMMRARPHELLPGTLRVISVRMNYLPAKAAFASTLNNPQMGYVSRYSLGRDYHKLLRQRLKKLGDQIQNYCSEHEYQGTLNFRPFVDSAPIMERPLAAKAGLGWVGKHSLILNRESGSWFFLGELLIDLPLPVDTPQEEQCGRCVACMTTCPTGAIVAPYTIDAQRCISYLTIELEGVIPEEFRPLMGNRIYGCDDCQLICPWNRFSQLTDEADFSPRAALHTPELLDLFNWSEEKFLRITEGSAIRRIGYLRWLRNISVTLGNAPYQDNIVLALEKRIGLSDILDEHIHWAIGQQTTRRNAHAVNVQTSQQKRLIRAITKGLPRDA

SEQ ID NO: 82190 - protein, 385 aa, Xenorhabdus nematophila; identical to SEQ ID NO: 82189
  misc_feature (1)..(385): tr|A0A0A8NSX4|A0A0A8NSX4_XENNE Epoxyqueuosine reductase OS=Xenorhabdus nematophila str. Websteri OX=1437826 GN =queG PE=3 SV=1

SEQ ID NO: 82191 - protein, 385 aa, Xenorhabdus poinarii
  misc_feature (1)..(385): tr|A0A068R815|A0A068R815_9GAMM Epoxyqueuosine reductase OS=Xenorhabdus poinarii G6 OX=1354304 GN=yjeS PE=3 SV= 1
MTTPLDLNILATNIKQWGSALGFQQVGICDTDLSTEEPRLQEWLDKQYHGEMDWMARHGMMRARPHELLPGTLRVISVRMNYLPAKAAFASTLNNPQMGYVSRYSLGRDYHKLLRQRLKKLGDQIQEYCHAHEYQGTLNFRPFVDSAPIMERPLAEKAGLGWVGKHSLILNRESGSWFFLGELLINLPLPVDTPQEAQCGRCVACMTTCPTGAIVEPYTIDARRCISYLTIELEGVIPEEFRPLMGNRIYGCDDCQLICPWNRFSQLTDEADFSPRAALHTPDLLDLFNWSEEKFLRITEGSAIRRIGYMRWLRNISVALGNAPYQDDIVLALENKVGLSAVLDEHLHWAIAQQMTRRNANTIEVQTSKQKRLIRAITKGLPRDA

SEQ ID NO: 82192 - protein, 385 aa, Xenorhabdus sp.
  misc_feature (1)..(385): tr|A0A0M0T7V3|A0A0M0T7V3_9GAMM Epoxyqueuosine reductase OS=Xenorhabdus sp. GDc328 OX=742178 GN=queG PE=3 SV=1
MATPLDLNLLATNIKQWGLSLGFQQVGICDTDLSAEEPRLQEWLDKQYHGEMDWMARHGMMRARPHELLPGTLRVISVRMNYLPAKAAFASTLNNPQMGYISRYSLGRDYHKLLRQRLKKLGDKIQEYCSTHEYQGTLNFRPFVDSAPIMERPLAAKAGLGWVGKHSLILNRESGSWFFLGELLINLPLPIDVPQEEQCGRCVACMTTCPTGAIVAPDTIDARRCISYLTIELEGVIPEELRPLMGNRIYGCDDCQLICPWNRFSQLTDEADFSPRAVLHTPELLDLFNWSEEKFLRITEGSAIRRIGYLRWLRNISVALGNAPYQDDIVLALEKKFGLSEVLDEHIHWAIARQMTRRNANAIEVQTSQQKRLIRAITKGLPRDA

SEQ ID NO: 82193 - protein, 385 aa, Xenorhabdus sp.
  misc_feature (1)..(385): tr|A0A2D0K8I1|A0A2D0K8I1_9GAMM Epoxyqueuosine reductase OS=Xenorhabdus sp. KK7.4 OX=1851572 GN=queG PE=3 SV=1
MAIPLDLNLLAANIKQWGLSLGFQQVGICDTDLSTEEPRLQEWLDKQYQGEMDWMARHGMMRARPHELLPGTLRVISVRMNYLPAKAAFASTLNNPEQGYVSRYALGRDYHKLLRQRLKKLGEQIQEYCSAHEYQGILNFRPFVDSAPIMERPLAAKAGIGWVGKHSLILNRESGSWFFLGELLVNLPLPVDSPQEEQCGRCVACMTTCPTGAIVEPYTIDARRCISYLTIELDGVIPEEFRPLMGNRIYGCDDCQLICPWNRFSQLTDEADFSPRAALHTPELLDLFNWSEEKFLRITEGSAIRRIGYLRWLRNISVALGNAPYRDEIVLVLEKRIGLSEVLDEHIHWAIDQQLSRRSIDAINVQTSQQKRLIRAITKGLPRDA

SEQ ID NO: 82194 - protein, 385 aa, Xenorhabdus stockiae
  misc_feature (1)..(385): tr|A0A2D0KTU1|A0A2D0KTU1_9GAMM Epoxyqueuosine reductase OS=Xenorhabdus stockiae OX=351614 GN=queG PE=3 SV=1
MAIPLDLNLLAANIKQWGLSLGFQQVGICDTDLSTEEPRLQEWLDKQYQGEMDWMARHGMMRARPHELLPGTLRVISVRMNYLPAKAAFASTLNNPEQGYVSRYALGRDYHKLLRQRLKKLGEQIQEYCSAHEYQGILNFRPFVDSAPIMERPLAAKAGIGWVGKHSLILNRESGSWFFLGELLINLPLPVDSPQEEQCGRCVACMTTCPTGAIVEPYTIDARRCISYLTIELDGVIPEEFRPLMGNRIYGCDDCQLICPWNRFSQLTDEADFSPRAALHTPELLDLFNWSEEKFLRITEGSAIRRIGYLRWLRNISVALGNAPYRDEIVLVLEKRIGLSEVLDEHIHWAIAQQLSRRSIDAINVQTSQQKRLIRAITKGLPRDA

SEQ ID NO: 82195 - protein, 385 aa, Xenorhabdus szentirmaii
  misc_feature (1)..(385): tr|W1J6Q5|W1J6Q5_9GAMM Epoxyqueuosine reductase OS=Xeno rhabdus szentirmaii DSM 16338 OX=1427518 GN=yjeS PE=3 S V=1
MTTPLDLSLLAENIKQWGIALGFQQVGICNTDLSAEEPRLQAWLDNQYHGEMDWMARHGMMRARPHELLPGTLRVISVRMNYLPAKAAFASTLNNPQMGYVSRYSLGRDYHKLLRQRLKKLGDKIQDYCSDHAYEGTLNFRPFVDSAPIMERPLAEKAGLGWVGKHSLILNRESGSWFFLGELLINLPLPVDTPQEEQCGRCVACMTTCPTGAIVEPHTIDARRCISYLTIELEGAIPEEFRPLMGNRIYGCDDCQLICPWNRFSQLTDEKDFSPRAALHAPELLDLFNWSEEKFLRITEGSAIRRIGYLRWLRNISVALGNAPYQDDIVLALKKRIGLGEVLDEHIHWAIDQQLTRRNANTIEVQTSQQKRLIRAITKGLPRDA

SEQ ID NO: 82196 - protein, 385 aa, Xenorhabdus thuongxuanensis
  misc_feature (1)..(385): tr|A0A1Q5TSY1|A0A1Q5TSY1_9GAMM Epoxyqueuosine reductase OS=Xenorhabdus thuongxuanensis OX=1873484 GN=queG PE=3 SV=1
MATPLDLNLLATNIKQWSLSLGFQQVGICDTDLSAEEPRLQEWLDKQYHGEMDWMVRHGMMRARPYELLPETLRVISVRMNYLPAKAAFASTLNNPQMGYISRYSLGRDYHKLLRQRLKKLGDKIQEYCSAHEYQGTLNFRPFVDSAPIMERPLAEKAGLGWVGKHSLILNRESGSWFFLGELLINLPLPIDAPQEEQCGRCVACMTTCPTGAIVEPYTIDARRCISYLTIELEGVIPEEFRPLMGNRIYGCDDCQLICPWNRFSQLTGEADFSPRATLHTPDLQELFNWSEEKFLRITEGSPIRRIGYLRWLRNISVALGNAPYQDDIVLALEKRFGLSEVLDEHIHWAITQQIVRRNANAIEVQTSQQKRLIRAITKGLPRDA

SEQ ID NO: 82197 - protein, 385 aa, Xenorhabdus vietnamensis
  misc_feature (1)..(385): tr|A0A1Y2SGU5|A0A1Y2SGU5_9GAMM Epoxyqueuosine reductase OS=Xenorhabdus vietnamensis OX=351656 GN=queG PE=3 SV= 1
MTTRLDLNLLATNIKQWGLSLGFQQVGICDTDLSAEEPRLQEWLDKQYHGEMDWMARHGMMRARPHELLSGTLRVISVRMNYLPAKAAFASTLNNPQMGYVSRYSLGRDYHKILRQRLKKLGDKIQEYCTAHEYQETLNFRPFVDSAPIMERPLAEKAGLGWVGKHSLILNRESGSWFFLGELLINLPLPIDAPQEEQCGRCVACMTTCPTNAIVEPYTIDARRCISYLTIELEGVIPEEFRPLMGNRIYGCDDCQLICPWNRFSQLTDEADFSPRATLHTPDLLDLFNWSEEKFLRITEGSAIRRIGYLRWLRNISVALGNAPYQDDIVLALEKRFGLSEVLDEHIRWAIAQQMARRNANIIEVHTSQQKRLIRAITKGLPRDA

SEQ ID NO: 82198 - protein, 358 aa, Xinfangfangia sp.
  misc_feature (1)..(358): tr|A0A3P5WW72|A0A3P5WW72_9RHOB Epoxyqueuosine reductase OS=Xinfangfangia sp. CIP 111625 OX=2483812 GN=queG PE= 3 SV=1
MDGPEGICIRVKATDPSDLKARLSARALEEGFSRVGICAPDAVPGTAERLREFLAAGHHGSMGWMEERAHWRGDPSALWPEAKSVIMLAEVYTPESDPRAVLSQPDRAAVSVYAQGKDYHDLVKRRLKRLGRWLLDQARDEEIKVFVDTAPVMEKPLAQAAGLGWQGKHTNLLSRDLGNWFFLGSIFTTLDLPKDPPEVSHCGSCRACLTACPTDAFPAPYRLDARRCISYLTIEHKGPVAPDLRARMGNRIYGCDDCLAACPWNKFAVAAREVGYQPRVGAPELAELAALDDAGFRARFAGSPVKRIGRDRFVRNVLYAIGNSGMPALAPSARALLDDPDPVVAEAAEWALARLVSA

SEQ ID NO: 82199 - protein, 373 aa, Xylophilus ampelinus
  misc_feature (1)..(373): tr|A0A318SR35|A0A318SR35_9BURK Epoxyqueuosine reductase OS=Xylophilus ampelinus OX=54067 GN=queG PE=3 SV=1
MVGSSQQLVSRIRQWARELGFSQIGVAGVDLSAAEAGLVAWLAEGFHGSMHYMEAHGLRRARPAELVPGTVSVLTVRMDYLPRDTPAGWQAVEFSRLERPVEGIVSLYARGRDYHKVLRGRLQKLAERIDAEVGPIGHRAFTDSAPVLEAELAARSGQGWRGKHTLVLHREGGSMFFLGEIYLDLALPESAPVSSHCGQCRACIDVCPTQAIVAPQRLDARRCISYLTIEHAGPIPVELRRAIGNRIYGCDDCQLACPWNKFAQPATLADFDARPGLAGQPLAALIGWSEEEFLRRTEGGPIRRIGHERWLRNLAVGLGNALASGAGGDAERRALADRQLHENPLVREHVAWALAQSPCAPAGAADAPLPENG

SEQ ID NO: 82200 - protein, 377 aa, Xylophilus sp.
  misc_feature (1)..(377): tr|A0A0Q4GPR5|A0A0Q4GPR5_9BURK Epoxyqueuosine reductase OS=Xylophilus sp. Leaf220 OX=1735686 GN=queG PE=3 SV=1
MVGSSQQLVSRIREWARELGFSQIGVAGVDLSAAEAGLVAWLAEGFHGSMHYMEAHGLRRARPAELVPGTVSVLTVRMDYLPQGTPAGWQAVEFSRLERPAEGIVSLYARGRDYHKVLRGRLQKLAERIAAEVGPIGHRAFTDSAPVLEAELAARSGQGWRGKHTLVLHREGGSMFFLGEIYLDLALPESTPVSGHCGQCRACIDVCPTQAIVAPQRLDARRCISYLTIEHAGPIPVELRRAIGNRIYGCDDCQLACPWNKFAQPATLVDFDARPGLAGQPLAALIGWSEDEFLRRTEGGPIRRIGHERWLRNLAVGLGNALASGAGGAAERRALAGRQAHDSPLVREHVAWALAQAPEPEPGVPAEAGCAPLQDAG

SEQ ID NO: 82201 - protein, 356 aa, Yangia pacifica
  misc_feature (1)..(356): tr|A0A2U8HG81|A0A2U8HG81_9RHOB Epoxyqueuosine reductase OS=Yangia pacifica OX=311180 GN=queG PE=3 SV=1
MDDLKARLLGEAAEVGFAACRICRPGDVPQLAERLAAFLEAGYHGQMGWMAERTHWRGNPAALWPEARSVIMLAENYGPEHDPRTVLTQQDRAAISVYAQNRDYHDVVKKKLKRLGRWLIDAAGREAGIEAPQIKVFVDTAPVMEKPLGQAAGLGWQGKHTNLVSRELGSWFFLGAIFTTLELPVDAAERDHCGTCRACLDACPTAAFPAPYRLDARRCISYLTIEHAGPVDEELRGLLGNRIYGCDDCLAACPWNKFAEVASEMKYHARDDLLSPPLAELAALDDAGFRARFSGSPIKRIGRDRFVRNVLYAIGNSGRADLREAAQGLCEDADETVRDAARWAVARLAEAEGAAG

SEQ ID NO: 82202 - protein, 359 aa, Yangia pacifica
  misc_feature (1)..(359): tr|A0A1I6RHJ1|A0A1I6RHJ1_9RHOB Epoxyqueuosine reductase OS=Yangia pacifica OX=311180 GN=queG PE=3 SV=1
MWKGESLDDLKARLLAEAAEVGFSACRVCRPWDVPQVAERLAAFLEAGHHGQMGWMAERSHWRGNPAALWPEARSVIMLAENYGPAHDPRDVLAERERAAISVYAQNRDYHDVVKKRLKRLGRWLIDAGARAGGGNGEAPQIKVFVDTAPVMEKPLGEAAGLGWQGKHTNLVSRELGSWFFLGSIFTTLELPIDGAERDHCGSCRACLDACPTAAFPAPYRLDARRCISYLTIEHHGPVDEDLRGLMGNRIYGCDDCLAACPWNKFAEVASEVKYHARDDLLSPPLAELAALDDAEFRARFSGSPIKRIGRDRFVRNVLYAIGNSGRAELRGVAQGLCEDADATVRDAARWAVARLQLS

SEQ ID NO: 82203 - protein, 349 aa, Yangia sp.
  misc_feature (1)..(349): tr|A0A2E1DEI2|A0A2E1DEI2_9RHOB tRNA epoxyqueuosine(34) reductase QueG OS=Yangia sp. OX=2024862 GN=queG PE=4 SV =1
MSLKERLVAEAGATGFAASRVCRPGDVPQAAGRLAAFLDAGRHGQMGWMAERTAWRGNPAALWPEARSVIMLAENYGPEGDPLAVLEQRDRAAISVYAQNRDYHDVVKKKLKRLGRWLLAAAEKELGLAAEIKGFVDTAPVMEKPLGQAAGLGWQGKHTNLVSREIGSWFFLGAIFTTLELAPDGAERDHCGSCRACLDICPTGAFPAPYQLDARRCISYLTIEHGGPVDEELRPLLGNRIYGCDDCLAVCPWNKFAHRAGEAKYHARPELLAPELSELAGLDDAAFRAFFSGSPIKRIGRDRFVRNVCYAIGNSGDAALRPAAQALCDDPDPALRDAARWAVARLDGV

SEQ ID NO: 82204 - protein, 356 aa, Yangia sp.
  misc_feature (1)..(356): tr|A0A2A3JVP9|A0A2A3JVP9_9RHOB Epoxyqueuosine reductase OS=Yangia sp. SAOS 153D OX=1779329 GN=queG PE=3 SV=1
MNDLKARLVDEAAEVGFAACRICRPGDVPQVAERLAAFLEAGYHGQMGWMAERTHWRGNPAALWPEARSVIMLAENYGPEQDPRTVLAQRERAAISVYAQNRDYHDVVKKKLKRLGRWLIDAASREAGSEAPQIKVFVDTAPVMEKPLGQAAGLGWQGKHTNLVSRELGSWFFLGAIFTTLELPVDGGERDHCGSCRACLDACPTAAFPAPYRLDARRCISYLTIEHDGPVDTDLRGLLGNRIYGCDDCLAACPWNKFAEVASEVKYHAREDLLSPPLAELAGLDDAGFRARFSGSPIKRIGRNRFVRNVLYAIGNSGRVELRGVAQGLCGDADETVCDAARWAVAQLADAGGAGG

SEQ ID NO: 82205 - protein, 359 aa, Yersinia aldovae
  misc_feature (1)..(359): tr|A0A0T9UKG9|A0A0T9UKG9_YERAL Epoxyqueuosine reductase OS=Yersinia aldovae OX=29483 GN=queG PE=3 SV=1
MGICDTDLSAEEPRLQAWLDKQYHGEMDWMARHGMLRARPHELLPGTLRVISVRMNYLPAKAAFASTLNNPALGYVSRYALGRDYHKLLRQRLKKLGDMIQNYCLEQAGGDVNFRPFVDSAPIMERSLAAKAGIGWVGKHSLILNRDAGSWFFLGELLIDLPLPVDKVQEEQCGRCVACITTCPTGAIVAPYTVDARRCISYLTIELEGAIPEEFRPLMGNRIYGCDDCQLICPWNRFSQLTDEADFSPRTVLHTPQLLDLFAWNEEKFLRVTEGSAIRRIGHLRWLRNISVALGNAPYLDSIVLALEARLGLNPMLDEHILWSISQQLERRSTLIGDVQSPQKKRLIRAIEKGLPRDA

SEQ ID NO: 82206 - protein, 382 aa, Yersinia bercovieri
  misc_feature (1)..(382): tr|A0A2G4TYN6|A0A2G4TYN6_YERBE Epoxyqueuosine reductase OS=Yersinia bercovieri OX=634 GN=queG PE=3 SV=1
MAHPLDLNQLAQHIKQWGQSLGFQQVGICDTDLSAEEPRLQAWLDKQYHGEMAWMARHGMLRARPHELLPGTLRVISVRMNYLPAKAAFASTLKDSSLGYVSRYALGRDYHKLLRQRLKKLGDQIQSYCLEQQAINFRPFVDSAPIMERSLAAKAGIGWVGKHSLILNRDAGSWFFLGELLIDLPLPVDKPQEEQCGRCVACMTTCPTGAIVAPYTVDARRCISYLTIELEGAIPEEFRPLMGNRIYGCDDCQLICPWNRFSQLTDEEDFSPRAVLHTPKLLDLFAWNEEKFLRVTEGSAIRRIGHLRWLRNIAVALGNAPYLDTIVLALEARRGIHPMLDEHIDWAISQQLKKRSTLIVDLQSPQKKRLVRAIEKGLPRDA

SEQ ID NO: 82207 - protein, 376 aa, Yersinia enterocolitica
  misc_feature (1)..(376): tr|A0A0T7NXP8|A0A0T7NXP8_YEREN Epoxyqueuosine reductase OS=Yersinia enterocolitica OX=630 GN=queG PE=3 SV=1
MNQLAQHIKQWGQSLGFQQVGICDTDLSAEEPRLQAWLDKQYHGEMAWMARHGMLRARPHELLPGTLRVISVRMNYLPAKAAFASTLKDSSLGYVSRYALGRDYHKLLRQRLKKLGDQIQSYCLEQQAINFRPFVDSAPIMERSLAAKAGIGWVGKHSLILNRDAGSWFFLGELLIDLPLPVDKPQEEQCGRCVACMTTCPTGAIVAPYTVDARRCISYLTIELEGAIPEEFRPLMGNRIYGCDDCQLICPWNRFSQLTDEEDFSPRAVLHTPKLLDLFAWNEEKFLRVTEGSAIRRIGHLRWLRNIAVALGNAPYLDTIVLALEARRGIHPMLDEHIDWAISQQLKKRSTLIVDLQSPQKKRLVRAIEKGLPRDA

SEQ ID NO: 82208 - protein, 339 aa, Yersinia enterocolitica
  misc_feature (1)..(339): tr|F4N117|F4N117_YEREN Putative electron transport prot ein yjeS (Fragment) OS=Yersinia enterocolitica W22703 O X=913028 GN=yjeS PE=4 SV=1
KQYHGEMAWMARHGMLRARAHELLPGTLRVISVRMNYLPAKAAFASTLKHSELGYVSRYALGRDYHKLLRQRLKKLGDMIQNYCLEQAAGDVNFRPFVDSAPIMERSLAAKAGIGWIGKHSLILNRDAGSWFFLGELLIDLPLPVDKPQEEQCGRCVACITTCPTGAIVAPYTVDARRCISYLTIELEGAIPEEFRPLMGNRIYGCDDCQLICPWNRFSQLTDEEDFSPRVVLHTPQLLDLFAWNEEKFLRVTEGSAIRRIGHLRWLRNISVALGNAPYLDNIVLALEARRGIDPMLDEHIEWAISQQLKRRSTLIGDVQSPQKKRLVRAIEKGLPRDA

SEQ ID NO: 82209 - protein, 385 aa, Yersinia entomophaga
  misc_feature (1)..(385): tr|A0A3S6F218|A0A3S6F218_YERET Epoxyqueuosine reductase OS=Yersinia entomophaga OX=935293 GN=queG PE=3 SV=1
MTHPLDLNQLAQHIKQWGQSLGFQQVGICDTDLSAEEPRLQAWLDKQYHGEMAWMARHGMLRARPHELLPGTLRVISVRMNYLPAKAAFASTLSNPELGYVSRYALGRDYHKLLRQRLKKLGDQIQEYCAQQSSENGVNFRPFVDSAPIMERSLAAKAGIGWVGKHSLILNRESGSWFFLGELLIDLPLPIDQPQEEQCGRCVACMTTCPTGAIVAPYTVDARRCISYLTIELEGAIPEEFRPLMGNRIYGCDDCQLICPWNRFSQLTEEEDFSPRAVLHTPKLLDLFAWNEEKFLRVTEGSAIRRIGHLRWLRNISVALGNAAYQDEIVLALESRKGIDPMLDEHIVWAIERQLARRAEQSVEVQSSQKKRLVRAIEKGLPRDA

SEQ ID NO: 82210 - protein, 333 aa, Yersinia frederiksenii
  misc_feature (1)..(333): tr|A0A0T9QZ50|A0A0T9QZ50_YERFR Putative iron-sulfur clu ster-binding protein OS=Yersinia frederiksenii OX=29484 GN=queG PE=4 SV=1
MAWMARHGMLRARPHELLPGTLRVISVRMNYLPAKAAFASTLNNAELGYVSRYALGRDYHKLLRQRLKRLGDMIQSYCLEQAHGDINFRPFVDSAPIMERSLAAKAGIGWVGKHSLILNRDAGSWFFLGELLIDLPLPIDKPQEEQCGRCVACITTCPTGAIVAPYTVDARRCISYLTIELEGAIPEEFRPLMGNRIYGCDDCQLICPWNRFSQLTDEEDFSPRAVLHTPQLLDLFAWNEEKFLRVTEGSAIRRIGHLRWLRNISVALGNAPYLDSIVLALEARRGIHPMLDEHIEWSISQQLKRRSTLIVDVQSPQKKRLVRAIEKGLPRDA

SEQ ID NO: 82211 - protein, 333 aa, Yersinia frederiksenii
  misc_feature (1)..(333): tr|A0A0B6FC21|A0A0B6FC21_YERFR Epoxyqueuosine reductase OS=Yersinia frederiksenii Y225 OX=1454377 GN=queG PE=4 SV=1
MAWMARHGMLRARAHELLPGTLRVISVRMNYLPAKAAFASTLKNSELGYISRYALGRDYHKLLRQRLKKLGDMIQNYCLEQAAGDVNFRPFVDSAPIMERSLAAKAGIGWVGKHSLILNREAGSWFFLGELLIDLPLPVDKPQEEQCGRCVACMTTCPTGAIVAPYTVDARRCISYLTIELEGAIPEEFRPLMGNRIYGCDDCQLICPWNRFSQLTDEEDFSPRAVLHTPQLLDLFSWNEEKFLRITEGSAIRRIGHLRWLRNISVALGNAPYLDNVVLALKARRGINPMLDEHIEWAISQQLKRRSTLIGDVQSPQKKRLVRAIEKGLPRDA

SEQ ID NO: 82212 - protein, 384 aa, Yersinia hibernica
  misc_feature (1)..(384): tr|A0A481QA57|A0A481QA57_9GAMM Epoxyqueuosine reductase OS=Yersinia hibernica OX=2339259 GN=queG PE=3 SV=1
MAHPLFLNQLAQHIKQWGQSLGFQQVGICDTDLSAEEPRLQAWLDKQYHGEMAWMARHGMLRARPHELLPGTLRVISVRMNYLPAKAAFASTLKNAEWGYVSRYALGRDYHKLLRQRLKKLGDMIQNYCLEQSGDHINFRPFVDSAPVMERSLAAKAGIGWVGKHSLILNREAGSWFFLGELLIDLPLPVDKPQEEQCGRCVACITTCPTGAIVAPYTVDARRCISYLTIELEGAIPEEFRPLMGNRIYGCDDCQLICPWNRFSQLTDEEDFSPRAVLHTPQLLDLFAWNEEKFLRVTEGSAIRRIGHLRWLRNISVALGNAPYLDNIVLALEARRGIDAMLDEHIEWAISQQLKRRSTLIGDVQSPQKKRLVRAIEKGLPRDA

SEQ ID NO: 82213 - protein, 384 aa, Yersinia intermedia
  misc_feature (1)..(384): tr|A0A208ZTW5|A0A208ZTW5_YERIN Epoxyqueuosine reductase OS=Yersinia intermedia OX=631 GN=queG PE=3 SV=1
MAHPLDLNQLAQHIKQWGQSLGFQQVGICDTDLSAEEPRLQTWLDKQYHGEMAWMARHGMLRARPHELLPGTLRVISVRMNYLPAKAAFASTLNNAELGYVSRYALGRDYHKLLRQRLKRLGDMIQSYCLEQAHGDINFRPFVDSAPIMERSLAAKAGIGWVGKHSLILNRDAGSWFFLGELLIDLPLPIDKPQEEQCGRCVACITTCPTGAIVAPYTVDARRCISYLTIELEGAIPEEFRPLMGNRIYGCDDCQLICPWNRFSQLTDEEDFSPRAVLHTPQLLDLFAWNEEKFLRVTEGSAIRRIGHLRWLRNISVALGNAPYLDSIVLALEARRGIHPMLDEHIEWSISQQLKRRSTLIVDVQSPQKKRLVRAIEKGLPRDA

SEQ ID NO: 82214 - protein, 360 aa, Yersinia intermedia
  misc_feature (1)..(360): tr|A0A0U1EWH0|A0A0U1EWH0_YERIN Iron-sulfur cluster-bind ing protein OS=Yersinia intermedia OX=631 GN=queG PE=4 SV=1
MAWMARHGMLRARPHELLPGTLRVISVRMNYLPAKAAFASTLNNPELGYVSRYALGRDYHKLLRQRLKKLGDQIQHYCLEQNNLDRHDLELHDLEQHDSERQGQPEQHTASEINFRPFVDSAPIMERSLAAKAGIGWVGKHSLILNRDAGSWFFLGELLIDLPLPVDKPQEEQCGRCVACMTTCPTGAIVAPYTVDARRCISYLTIELEGAIPEEFRPLMGNRIYGCDDCQLICPWNRFSQLTDEDDFSPRAVLHTPQLLDLFAWNEEKFLRVTEGSAIRRIGHLRWLRNISVALGNAPYLDSIVLALETRRGLHPMLDEHIEWAISQQLARRATQAVEVQLPQKKRLIRAIEKGLPRDA

SEQ ID NO: 82215 - protein, 333 aa, Yersinia kristensenii
  misc_feature (1)..(333): tr|A0A0T9LTJ3|A0A0T9LTJ3_YERKR Putative iron-sulfur clu ster-binding protein OS=Yersinia kristensenii OX=28152 GN=queG PE=4 SV=1
MAWMARHGMLRARPHELLPGTLRVISVRMNYLPAKAAFASTLKNAELGYVSRYALGRDYHKLLRQRLKKLGDMIQNYCLEQTGDDINFRPFVDSAPIMERSLAAKAGIGWVGKHSLILNREAGSWFFLGELLIDLPLPIDKPQEEQCGRCVACITTCPTGAIVAPYTVDARRCISYLTIELEGAIPEEFRPLMGNRIYGCDDCQLICPWNRFSQLTDEEDFSPRAVLHTPQLLDLFSWNEEKFLRITEGSAIRRIGHLRWLRNISVALGNAPYLDNIVLALEARRGIDPMLDEHIEWAISQQLKRRSTLIGDVQSPQKKRLVRAIEKGLPRDA

SEQ ID NO: 82216 - protein, 376 aa, Yersinia kristensenii
  misc_feature (1)..(376): tr|A0A0T9T3J4|A0A0T9T3J4_YERKR Epoxyqueuosine reductase OS=Yersinia kristensenii OX=28152 GN=queG PE=3 SV=1
MNQLAQHIKQWGQSLGFQQVGICDTDLSAEEPRLQAWLDKQYHGEMAWMARHGMLRARPHELLPGTLRVISVRMNYLPAKAAFASTLKDSSLGYVSRYALGRDYHKLLRQRLKKLGDQIQSYCLEQQAINFRPFVDSAPIMERSLAAKAGIGWVGKHSLILNRDAGSWFFLGELLIDLPLPVDKPQEEQCGRCVACITTCPTGAIVAPYTVDARRCISYLTIELEGAIPEEFRPLMGNRIYGCDDCQLICPWNRFSQLTDEEDFSPRAVLHTPELLDLFAWNEEKFLRVTEGSAIRRIGHLRWLRNISVALGNAPYLDTIVLALEARRGMHPMLDEHIDWAISQQLKRRSTLIVDVQSPQKKRLVRAIEKGLPRDA

SEQ ID NO: 82217 - protein, 376 aa, Yersinia massiliensis
  misc_feature (1)..(376): tr|A0A0T9NY82|A0A0T9NY82_9GAMM Epoxyqueuosine reductase OS=Yersinia massiliensis OX=419257 GN=queG PE=3 SV=1
MNQLAQHIKQWGQSLGFQQVGICDTDLSAEEPRLQAWLDKQYHGEMAWMARHGMLRARPHELLPGTLRVISVRMNYLPAKAAFASTLKDSSLGYVSRYALGRDYHKLLRQRLKKLGDQIQNYCLEQQAINFRPFVDSAPIMERSLAAKAGIGWVGKHSLILNRDAGSWFFLGELLIDLPLPVDKPQEEQCGRCVACITTCPTGAIVAPYTVDARRCISYLTIELEGAIPEEFRPLMGNRIYGCDDCQLICPWNRFSQLTDEEDFSPRKVLHTPDLLDLFAWNEEKFLRVTEGSAIRRIGHLRWLRNISVALGNAPYLDSIVLALEARRGIHPMLDEHINWAISQQLERRSTLIVDVQSPQKKRLVRAIEKGLPRDA

SEQ ID NO: 82218 - protein, 382 aa, Yersinia massiliensis
  misc_feature (1)..(382): tr|A0A2R4NUK6|A0A2R4NUK6_9GAMM Epoxyqueuosine reductase OS=Yersinia massiliensis OX=419257 GN=queG PE=3 SV=1
MAHPLDLNQLAQHIKQWGQSLGFQQVGICDTDLSAEEPRLQAWLDKQYHGEMAWMARHGMLRARPHELLPGTLRVISVRMNYLPAKAAFASTLKDSSLAYVSRYALGRDYHKLLRQRLKKLGDQIQNYCLEQQAINFRPFVDSAPIMERSLAAKAGIGWVGKHSLILNRDAGSWFFLGELLIDLPLPVDKPQEEQCGRCVACITTCPTGAIVAPYTVDARRCISYLTIELEGAIPEEFRPLMGNRIYGCDDCQLICPWNRFSQLTDEEDFSPRKVLHTPDLLDLFAWNEEKFLRVTEGSAIRRIGHLRWLRNISVALGNAPYLDSIVLALEARRGIHPMLDEHINWAISQQLKRRSTLIVDVQSPQKKRLVRAIEKGLPRDA

SEQ ID NO: 82219 - protein, 376 aa, Yersinia mollaretii
  misc_feature (1)..(376): tr|A0A0U1I0Z9|A0A0U1I0Z9_YERMO Epoxyqueuosine reductase OS=Yersinia mollaretii OX=33060 GN=queG PE=3 SV=1
MNQLAQHIKQWGQSLGFQQVGICDTNLSAEEPRLQAWLDKQYHGEMAWMARHGMLRARPHELLPGTLRVISVRMNYLPAKAAFASTLKDSSLGYVSRYALGRDYHKLLRQRLKKLGDQIQSYCLEQQAINFRPFVDSAPIMERSLAAKAGIGWVGKHSLILNRDAGSWFFLGELLIDLPLPVDKPQEEQCGRCVACITTCPTGAIVAPYTVDARRCISYLTIELEGAIPEEFRPLMGNRIYGCDDCQLICPWNRFSQLTDEEDFSPRAVLHTPELLDLFAWNEEKFLRVTEGSAIRRIGHLRWLRNISVALGNAPYLDTIVLALEARRGIDPMLDEHIDWAISQQLKRRSTLIVDVQSPQKKRLVRAIEKGLPRDA

SEQ ID NO: 82220 - protein, 382 aa, Yersinia mollaretii
  misc_feature (1)..(382): tr|C4SDL6|C4SDL6_YERMW Epoxyqueuosine reductase OS=Yers inia mollaretii (strain ATCC 43969 / DSM 18520 / CIP 10 3324 / CNY 7263 / WAIP 204) OX=349967 GN=queG PE=3 SV=1
MAHPLDLNQLAQHIKQWGQSLGFQQVGICDTDLSAEEPRLQAWLDKQYHGEMAWMARHGMLRARPHELLPGTLRVISVRMNYLPAKAAFASTLKDSSLGYVSRYALGRDYHKLLRQRLKKLGDQIQSYCLEQQAINFRPFVDSAPIMERSLAAKAGIGWVGKHSLILNRDAGSWFFLGELLIDLPLPVDKPQEEQCGRCVACITTCPTGAIVAPYTVDARRCISYLTIELEGAIPEEFRPLMGNRIYGCDDCQLICPWNRFSQLTDEEDFSPRAVLHTPELLDLFAWNEEKFLRVTEGSAIRRIGHLRWLRNISVALGNAPYLDTIVLALEARRGIDPMLDEHIDWAISQQLKRRSTLIVDVQSPQKKRLVRAIEKGLPRDA

SEQ ID NO: 82221 - protein, 326 aa, Yersinia nurmii
  misc_feature (1)..(326): tr|A0A0T9LBZ1|A0A0T9LBZ1_9GAMM Iron-sulfur cluster-bind ing protein OS=Yersinia nurmii OX=685706 GN=queG PE=4 S V=1
MLRARPHELLPGTLRVISVRMNYLPAKAAFASTLSNPELGYVSRYALGRDYHKLLRQRLKKLGDQIQEYCAQQSSENGVNFRPFVDSAPIMERSLAAKAGIGWVGKHSLILNRESGSWFFLGELLIDLPLPIDQPQEEQCGRCVACMTTCPTGAIVAPYTVDARRCISYLTIELEGAIPEEFRPLMGNRIYGCDDCQLICPWNRFSQLTDEEDFSPRAILHTPKLLDLFAWNEEKFLRVTEGSAIRRIGHLRWLRNISVALGNAAYQDEIVLALESRKGIDPMLDEHIAWAIDRQLARRAEQSVEVQLSQKKRLIRAIEKGLPRDA

SEQ ID NO: 82222 - protein, 395 aa, Yersinia pekkanenii
  misc_feature (1)..(395): tr|A0A0T9Q143|A0A0T9Q143_9GAMM Epoxyqueuosine reductase OS=Yersinia pekkanenii OX=1288385 GN=queG PE=3 SV=1
MANPLDLNQLAQHIKQWGQSLGFQQVGICDTDLSAEEPRLQAWLDKQYHGEMAWMARHGMLRARPHELLPGTLRVISVRMNYLPAKAAFASTLKNSALGYVSRYALGRDYHKLLRQRLKRLGEQIQSYCLEQQQNQQGQTEQPTSQAINFRPFVDSAPIMERSLAAKAGIGWVGKHSLILNREAGSWFFLGELLIDLPLPVDKPQAEQCGRCVACITTCPTGAIVAPYTVDARRCISYLTIELEGAIPEEFRSLMGNRIYGCDDCQLICPWNRFSQLTDETDFSPRAVLHTPQLLDLFSWNEEKFLRITEGSAIRRIGHLRWLRNISVALGNAPYLDTIVLALEARRGIHPMLDEHIAWAISQQLERRSTLTVDVQSPQKKRLVRAIEKGLPRDA

SEQ ID NO: 82223 - protein, 411 aa, Yersinia pestis
  misc_feature (1)..(411): sp|Q7CKM4|QUEG_YERPE Epoxyqueuosine reductase OS=Yersin ia pestis OX=632 GN=queG PE=3 SV=1
MAHPLDLNQLAQHIKQWGQSLGFQQVGICDTDLTAEEPRLQAWLDKQYHGEMAWMARHGMLRARPHELLPGTLRVISVRMNYLPAKAAFASTLNNPELGYVSRYALGRDYHKLLRQRLKKLGDQIQHYCLEQNNLDRHDLELHDLEQHDSERQGQPEQHTASEINFRPFVDSAPIMERSLAAKAGIGWVGKHSLILNRDAGSWFFLGELLIDLPLPVDKPQEEQCGRCVACMTTCPTGAIVAPYTVDARRCISYLTIELEGAIPEEFRPLMGNRIYGCDDCQLICPWNRFSQLTDEDDFSPRAVLHTPQLLDLFAWNEEKFLRVTEGSAIRRIGHLRWLRNISVALGNAPYLDSIVLALETRRGLHPMLDEHIEWAISQQLARRATQAVEVQLPQKKRLIRAIEKGLPRDA

SEQ ID NO: 82224 - protein, 411 aa, Yersinia pestis; identical to SEQ ID NO: 82223
  misc_feature (1)..(411): tr|A0A0H2YM74|A0A0H2YM74_YERPN Epoxyqueuosine reductase OS=Yersinia pestis bv. Antiqua (strain Nepal516) OX=37 7628 GN=queG PE=3 SV=1

SEQ ID NO: 82225 - protein, 359 aa, Yersinia pseudotuberculosis
  misc_feature (1)..(359): tr|A0A0T9MB36|A0A0T9MB36_YERPU Iron-sulfur cluster-bind ing protein OS=Yersinia pseudotuberculosis OX=633 GN=qu eG PE=4 SV=1
MLRARPHELLPGTLRVISVRMNYLPAKAAFASTLNNPELGYVSRYALGRDYHKLLRQRLKKLGDQIQHYCLEQYRLEQHGLEQHGLEQHDLAQQDDCPEQQGQSEQHTTGEINFRPFVDSAPIMERSLAAKAGLGWVGKHSLILNRDAGSWFFLGELLIDLPLPVDKPQEEQCGRCVACMTTCPTGAIVAPYTVDARRCISYLTIELEGAIPEEFRPLMGNRIYGCDDCQLICPWNRFSQLTDEEDFSPRAVLHTPQLLDLFAWNEEKFLRVTEGSAIRRIGHLRWLRNISVALGNAPYLDSIVLALETRRGQHPMLDEHIEWAISQQLARRAAQAVEVQLPQKKRLIRAIEKGLPRDA

SEQ ID NO: 82226 - protein, 379 aa, Yersinia pseudotuberculosis
  misc_feature (1)..(379): tr|A0A0H3B8J8|A0A0H3B8J8_YERPY Epoxyqueuosine reductase OS=Yersinia pseudotuberculosis serotype O:3 (strain YP III) OX=502800 GN=queG PE=3 SV=1
MTAEEPRLQAWLDKQYHGEMAWMARHGMLRARPHELLPGTLRVISVRMNYLPAKAAFASTLNNPELGYVSRYALGRDYHKLLRQRLKKLGDQIQHYCLEQNNLDRHDLELHDLEQHDSERQGQPEQHTASEINFRPFVDSAPIMERSLAAKAGIGWVGKHSLILNRDAGSWFFLGELLIDLPLPVDKPQEEQCGRCVACMTTCPTGAIVAPYTVDARRCISYLTIELEGAIPEEFRPLMGNRIYGCDDCQLICPWNRFSQLTDEDDFSPRAVLHTPQLLDLFAWNEEKFLRVTEGSAIRRIGHLRWLRNISVALGNAPYLDSIVLALETRRGLHPMLDEHIEWAISQQLARRATQAVEVQLPQKKRLIRAIEKGLPRDA

SEQ ID NO: 82227 - protein, 415 aa, Yersinia rohdei
  misc_feature (1)..(415): tr|A0A0U1HRK3|A0A0U1HRK3_YERRO Epoxyqueuosine reductase OS=Yersinia rohdei OX=29485 GN=queG PE=3 SV=1
MASFWRTQSAEKTECGKLTPICFLLWSVMAHPLDLNQLAQHIKQWGQSLGFQQVGICDTDLTAEEPRLQAWLDKQYHGEMAWMARHGMLRARAHELLPGTLRVISVRMNYLPAKAAFASTLKDSELGYVSRYALGRDYHKLLRQRLKKLGDQIQSYCLEQEPSAANEINFRPFVDSAPIMERSLAAKAGIGWVGKHSLILNRDAGSWFFLGELLIDLPLPVDKPQAEQCGRCVACITTCPTGAIVAPYTVDARRCISYLTIELEGAIPEELRPLMGNRIYGCDDCQLICPWNRFSQLTDEEDFSPRAVLHTPQLLDLFAWNEEKFLRITEGSAIRRIGHLRWLRNISVALGNAPYLDRIVLALEARRGIHPMLDEHIEWAISQQLSRRATLIGDIQTPQKKRLVRAIEKGLPRDA

SEQ ID NO: 82228 - protein, 342 aa, Yersinia ruckeri
  misc_feature (1)..(342): tr|A0A380QQW8|A0A380QQW8_YERRU Epoxyqueuosine reductase OS=Yersinia ruckeri OX=29486 GN=queG PE=3 SV=1
MDKQYHGEMAWMARHGMLRARPHELLPGTLRVISVRMNYLPAKAAFASTLSNPDLGYVSRYALGRDYHKLLRQRLKKLGDKIQGYCAEISSETGVNFRPFVDSAPIMERSLAAKAGIGWVGKHSLILNRDSGSWFFLGELLIDLPLPVDPPQEEQCGRCVACMTTCPTAAIVAPYTVDARRCISYLTIELEGAIPEEFRPLMGNRIYGCDDCQLICPWNRFSQLTDEEDFSPRAILHTPKLLDLFAWNEEKFLRVTEGSAIRRIGHLRWLRNISVALGNAAYQDEIVLALESRKGIDPMLDEHISWAVSQQLARRAEQGVEVQSSQKKRLVRAIEKGLPRDA

SEQ ID NO: 82229 - protein, 385 aa, Yersinia ruckeri
  misc_feature (1)..(385): tr|A0A0A8V8W6|A0A0A8V8W6_YERRU Epoxyqueuosine reductase OS=Yersinia ruckeri OX=29486 GN=queG PE=3 SV=1
MTHPLDLNQLAQHIKQWGQSLGFQQVGICDTDLSQEEPRLQAWLDKQYHGEMAWMARHGMLRARPHELLPGTLRVISVRMNYLPAKAAFASTLSNPDLGYVSRYALGRDYHKLLRQRLKKLGDKIQGYCAEISSETGVNFRPFVDSAPIMERSLAAKAGIGWVGKHSLILNRDSGSWFFLGELLIDLPLPVDPPQEEQCGRCVACMTTCPTAAIVAPYTVDARRCISYLTIELEGAIPEEFRPLMGNRIYGCDDCQLICPWNRFSQLTDEEDFSPRAILHTPKLLDLFAWNEEKFLRVTEGSAIRRIGHLRWLRNISVALGNAAYQDEIVLALESRKGIDPMLDEHISWAVSQQLARRAEQGVEVQSSQKKRLVRAIEKGLPRDA

SEQ ID NO: 82230 - protein, 354 aa, Yersinia similis
  misc_feature (1)..(354): tr|A0A0T9P6D7|A0A0T9P6D7_9GAMM Iron-sulfur cluster-bind ing protein OS=Yersinia similis OX=367190 GN=queG PE=4 SV=1
MLRARPHELLPGTLRVISVRMNYLPAKAAFASTLNNPELGYVSRYALGRDYHKLLRQRLKKLGDQIQHYCLEQYRLEQHGLEQHDLAQQDDCPEQQGQSEQHTTGEINFRPFVDSAPIMERSLAAKAGLGWVGKHSLILNRDAGSWFFLGELLIDLPLPVDKPQEEQCGRCVACMTTCPTGAIVAPYTVDARRCISYLTIELEGAIPEEFRPLMGNRIYGCDDCQLICPWNRFSQLTDEEDFSPRAVLHTPQLLDLFAWNEEKFLRVTEGSAIRRIGHLRWLRNISVALGNAPYLDSIVLALETRRGQHPMLDEHIEWAISQQLARRAAQAVEVQLPQKKRLIRAIEKGLPRDA

SEQ ID NO: 82231 - protein, 379 aa, Yersinia wautersii
  misc_feature (1)..(379): tr|A0A0E8XJD3|A0A0E8XJD3_9GAMM Epoxyqueuosine reductase OS=Yersinia wautersii OX=1341643 GN=queG PE=3 SV=1
MTAEEPRLQAWLDKQYHGEMAWMARHGMLRARPHELLPGTLRVISVRMNYLPAKAAFASTLNNPELGYVSRYALGRDYHKLLRQRLKKLGDQIQHYCLEQNKLDRHDLELHDLEQHDSERQGQPEQHTASEINFRPFVDSAPIMERSLAAKAGIGWVGKHSLILNRDAGSWFFLGELLIDLPLPVDKPQEEQCGRCVACMTTCPTGAIVAPYTVDARRCISYLTIELEGAIPEEFRPLMGNRIYGCDDCQLICPWNRFSQLTDEDDFSPRAVLHTPQLLDLFAWNEEKFLRVTEGSAIRRIGHLRWLRNISVALGNAPYLDSIVLALETRRGLHPMLDEHIEWAISQQLARRATQAVEVQLPQKKRLIRAIEKGLPRDA

SEQ ID NO: 82232 - protein, 384 aa, Yersiniaceae bacterium
  misc_feature (1)..(384): tr|A0A2N5E5B6|A0A2N5E5B6_9GAMM Epoxyqueuosine reductase OS=Yersiniaceae bacterium 2015Iso6 OX=2060067 GN=queG PE=3 SV=1
MTFPLDLHQLSQHIKQWGQSLGFQQVGICDTDLSLEEPKLQAWLDKQYHGEMAWMARHGMLRARPHELLPGTLRVISVRMNYLPAKAAFASTLKNPSLGYVSRYALGRDYHKLLRQRLKKLGDQIQAWCTEQGGGEVGFRPFVDSAPIMERPLAAKAGIGWVGKHSLILNREAGSWFFLGELLIDLPLPVDSPQEEQCGKCVACMTTCPTGAIVAPYTVDARRCISYLTIELEGTIPEEFRPLMGNRIYGCDDCQLICPWNRFSQLTDEEDFSPRAALHAPELLALFAWDEEKFLRVTEGSAIRRIGHVRWLRNVSVALGNAAYQAEIVLALQQRLGQDAMLDEHIHWAIDQQLMKREAMKIDVQLPQQKRLVRAVEKGLPRDA

SEQ ID NO: 82233 - protein, 384 aa, Yersiniaceae bacterium
  misc_feature (1)..(384): tr|A0A2N5E017|A0A2N5E017_9GAMM Epoxyqueuosine reductase OS=Yersiniaceae bacterium 2016Iso4 OX=2060068 GN=queG PE=3 SV=1
MTFPLDLHQLSQHIKQWGQSLGFQQVGICDTDLSLEEPKLQAWLDKQYHGEMAWMARHGMLRARPHELLPGTLRVISVRMNYLPAKAAFASTLKNPSLGYVSRYALGRDYHKLLRQRLKKLGDQIQAWCTEQGGGEVGFRPFVDSAPIMERPLAAKAGIGWVGKHSLILNREAGSWFFLGELLIDLPLPVDSPQEEQCGKCVACMTTCPTGAIVAPYTVDARRCISYLTIELEGAIPEEFRPLMGNRIYGCDDCQLICPWNRFSQLTDEEDFSPRAALHAPELLALFAWDEEKFLRVTEGSAIRRIGHLRWLRNVSVALGNAAYQAEIVLALQQRLGQDAMLDEHIHWAIAQQLMKREAMKVDVQLPQQKRLVRAVEKGLPRDA

SEQ ID NO: 82234 - protein, 379 aa, Yokenella regensburgei
  misc_feature (1)..(379): tr|A0A2X2SZW1|A0A2X2SZW1_9ENTR Epoxyqueuosine reductase OS=Yokenella regensburgei OX=158877 GN=queG PE=3 SV=1
MSQPLDLNQLAQQIKQWGTELGFQQVGITDTDLSASEPEFQAWLDKQYHGEMEWMVRHGMMRARPHELLPGTLRVISVRMNYLPANAAFASTLKNPALGYVSRYALGRDYHKLLRNRLKKLGEMIQEQCASLNFRPFVDSAPVLERPLAEKAGLGWTGKHSLILSRDAGSFFSLGELLVNIPLPVDNPVEEGCGRCVACMTICPTGAIVEPYTVDARRCISYLTIELEGAIPEEFRPLMGNRIYGCDDCQLICPWNRYSQLTDEDDFSPRKALHAPELITLFAWDEAWFLKVTEGSAIRRIGHLRWLRNIAVALGNAPWDEANIRALESRRGEHPLLDEHIEWAIAQQIDKRNACVVEVQLPQKQRLVRVVEKGLPRDA

SEQ ID NO: 82235 - protein, 379 aa, Yokenella regensburgei
  misc_feature (1)..(379): tr|G9YYG8|G9YYG8_9ENTR Epoxyqueuosine reductase OS=Yoke nella regensburgei ATCC 43003 OX=1002368 GN=queG PE=3 S V=1
MSQPLDLNQLAQQIKQWGTELGFQQVGITDTDLSASEPEFQAWLDKQYHGEMEWMARHGMMRARPHELLPGTLRVISVRMNYLPANAAFASTLKNPALGYVSRYALGRDYHKLLRNRLKKLGEMIQEQCASLNFRPFVDSAPVLERPLAEKAGLGWTGKHSLILSRDAGSFFFLGELLVNIPLPVDNPVEEGCGRCVACMTICPTGAIVEPYTVDARRCISYLTIELEGAIPEEFRPLMGNRIYGCDDCQLICPWNRYSQLTDEDDFSPRKALHAPELITLFAWDEAWFLKVTEGSAIRRIGHLRWLRNIAVALGNAPWDEANIRALESRRGEHPLLDEHIEWAIAQQIDKRNACVVEVQLPQKQRLVRVVEKGLPRDA

SEQ ID NO: 82236 - protein, 354 aa, Yoonia litorea
  misc_feature (1)..(354): tr|A0A1I6MUY9|A0A1I6MUY9_9RHOB Epoxyqueuosine reductase OS=Yoonia litorea OX=1123755 GN=queG PE=3 SV=1
MDRLKDRLQEEALAAGFAAMGVCRPDAVPELPARLQAFVGAGMHGQMGWMAERMNWRANPAALWPEARSVIMLAEIYTPEHDPLAVLEETDRAAISVYAQNKDYHDVVKKRLKKVGRWLIDQVEGAEIKVFVDTAPVMEKPLAQAAGLGWQGKHTNLLSRDLGNWFFLGAIFTTVELDPDRGETSHCGSCTACLDICPTDAFPAPYKLDARRCISYLTIEHKGPVDESLRPLMGNRIYGCDDCLAVCPWNKFAVTGRDARLAARDDLVAPPLADLATLDDAAFRAKFSGSPIKRIGRDRFVRNVAYAIGNSGDPALLTAVSPLLEDQDATVADAARWAISRIKEIANVETDDRT

SEQ ID NO: 82237 - protein, 342 aa, Yoonia maricola
  misc_feature (1)..(342): tr|A0A2M8W0Q8|A0A2M8W0Q8_9RHOB Epoxyqueuosine reductase OS=Yoonia maricola OX=420999 GN=queG PE=3 SV=1
MKDRLIAFAKEAGFASVGVCRPDAVPELPERLQAFVDAGMHGQMGWMAERMNWRSDPAALWPAARSVVMLAEPYTPEHDPLAVLEEHDVGAISVYAQNRDYHDVVKKRLKRVGRWLIEQEPGAEIKVFVDTAPVMEKPLAQAAGLGWQGKHTNLLSRDLGNWFFLGAIFTTVDLAPDEVEVSHCGSCTACLDICPTAAFPAPYQLDARRCISYLTIEHKGPVDEELRPLMGNRIYGCDDCLAICPWNKFAHEGRDAKLAARDDLVAPPLAKLAALDDAAFRTLFSGSPIKRIGRDRFVRNVAYAIGNSGDRALAAAVSPLVDDSDPAVADAARWAILRLKED

SEQ ID NO: 82238 - protein, 344 aa, Yoonia maritima
  misc_feature (1)..(344): tr|A0A2T0VZ82|A0A2T0VZ82_9RHOB Epoxyqueuosine reductase OS=Yoonia maritima OX=1435347 GN=queG PE=3 SV=1
MVTYVQEAGFAKVGICRPDSVPEIADRLATFVDAGMHGQMEWMAERMHWRGNPAALWPEAKSVIMLAEPYTPEHDPLEVLDHPDRAAISVYAQGRDYHDVVKKRLKRVGRWLIEQVPEAQIKVFVDTAPVMEKPLAQAAGLGWQGKHTNVLGRDLGSWFFIGAIFTTVEFEPDTPEVSHCGSCTACLDVCPTSAFPAPYQLDARRCISYLTIEHKGPVDLELRALMGNRIYGCDDCLGVCPWNKFANTGRDAKYAAREDLIAPPLSELAALDDAAFRARFSGSPIKRIGRDRFVRNVAYAIGNSGDRTLAGAVARLIGDSDPTVAEAARWALDRLGSSAARSSE

SEQ ID NO: 82239 - protein, 348 aa, Yoonia rosea
  misc_feature (1)..(348): tr|A0A1R3XBK7|A0A1R3XBK7_9RHOB Epoxyqueuosine reductase OS=Yoonia rosea OX=287098 GN=queG PE=3 SV=1
MQETGDLKQRLIGFAQEAGFAAVGVCRPDAVPELPERLQAFVAAGMHGQMGWMAERMAWRADPTALWPAARSVIMLAEPYTPAHDPLAVLEERDRAAISVYAQNRDYHDVVKKRLKRVGRWLIEAVPEAEIKVFVDTAPVMEKPLAQAAGLGWQGKHTNLLSRDLGNWFFLGAIFTTVDLASDVAETSHCGSCTACLDICPTGAFPAPYRLDARRCISYLTIEHKGPVDAALRPLMGNRIYGCDDCLAVCPWNKFAHEGRDAKLAARDELISPPLADLAGLDDAGFRALFSGSPIKRIGRDRFVRNVAYAIGNSGDQTLIATVSPLVDDLDAAVADAARWAISRLKED

SEQ ID NO: 82240 - protein, 342 aa, Yoonia sediminilitoris
  misc_feature (1)..(342): tr|A0A2T6KLC4|A0A2T6KLC4_9RHOB Epoxyqueuosine reductase OS=Yoonia sediminilitoris OX=1286148 GN=queG PE=3 SV=1
MKARLTEFALDAGFAKVGVCRPESVPELAERLAAFVDAGMHGQMAWMAERMHWRGSPATLWPEAKSVVMLAEPYTPDHDPLAVLECHDRAAVSVYAQGRDYHDVVKKRLKRVGRWLIEQVPDAQIKVFVDTAPVMEKPLAQAAGLGWQGKHTNLLGRDLGSWFFLGAIFTTVDLEPDRPEQSHCGSCTACLDICPTAAFPAPYRLDARRCISYLTIEHKGPVDLELRALMGNRIYGCDDCLAVCPWNKFAQQGRDARYDARPDLVAPPLAALAALDDAGFRARFSGSPIKRIGRNRFVRNVAYAIGNSGDPTLIAALSPLVDDPDPAVADAARWAILRLKEA

SEQ ID NO: 82241 - protein, 348 aa, Yoonia tamlensis
  misc_feature (1)..(348): tr|A0A1I6HDI5|A0A1I6HDI5_9RHOB Epoxyqueuosine reductase OS=Yoonia tamlensis OX=390270 GN=queG PE=3 SV=1
MKQRLITYAQEAGFAKVGICRPDAVPQIAERLAAFVDAGMHGQMGWMAERMHWRGNPAALWPEAKSVIMLAEPYTPEHDPLAVLEQPDRAAISVYAQGRDYHDIVKKRLKNVGRWLIAQVPDAQIKVFVDTAPVMEKPLAQAAGLGWQGKHTNVLGRDLGSWFFLGAIFTTAELEPDSAEVSHCGSCTACLDICPTAAFPAPYQLDPRRCISYLTIEHKGPVDAELRGLMGNRIYGCDDCLAVCPWNKFAREGRDARYAAREDLIAPPLAALAALDDTAFRAQFSGSPIKRIGRDRFVRNVAYAIGNSGDASLAAAVAPLVDDPDLAVADAARWALDRLGGVAAHGCE

SEQ ID NO: 82242 - protein, 344 aa, Yoonia vestfoldensis
  misc_feature (1)..(344): tr|A0A1Y0EH71|A0A1Y0EH71_9RHOB Epoxyqueuosine reductase OS=Yoonia vestfoldensis OX=245188 GN=queG PE=3 SV=1
MKERLTAFARDAGFGKVGVCRPDAVPEMAERLAAFVDDGRHGQMAWMAERMGWRGDPTALWPAARSVIMLAEVYTPDHDPLAVLEARDRAAISVYAQGRDYHDVVKKRLKVVGRWLIDQVPGAEIKVFVDTAPVMEKPLAQAAGLGWQGKHTNLLGRDLGNWVFLGAIFTTVDLEPDTPEISHCGSCTACLDICPTQAFPAPYQLDARRCISYLTIEHKGPVDLDLRALMGNRIYGCDDCLAVCPWNKFAASGRDARLAARDDLLAPPLAELAQLDDAAFRARFAGSPIKRIGRDRFVRNVAYALGNSGDPAMVAPLSHLVDDPDPAVADAARWAILRLNADAP

SEQ ID NO: 82243 - protein, 343 aa, Yoonia vestfoldensis
  misc_feature (1)..(343): tr|A3V1N7|A3V1N7_9RHOB Epoxyqueuosine reductase OS=Yoon ia vestfoldensis SKA53 OX=314232 GN=queG PE=3 SV=1
MKDRLKDFALEAGFAKIGICRPDAVPEMAERLATFVADGRHGQMAWMADRMQWRGDPTALWPAARSVIMLAEVYTPDHDPLAVLDERDRAAISVYAQGRDYHDVVKKRLKVVGRWLIDQVPEAEIKVFVDTAPVMEKPLAQAAGLGWQGKHTNLLGRDLGNWVFLGAIFTTVVLEPDTPEISHCGSCTACLDICPTQAFPAPYQLDARRCISYLTIEHKGPVDPDLRGLMGNRIYGCDDCLAVCPWNKFAASGRDARLAARDDLLAPPLAELAQLDDAAFRARFAGSPIKRIGRDRFVRNVAYALGNSGDPAMAAHLSHLVDDPDATVADAARWAVLRLQRAG

SEQ ID NO: 82244 - protein, 375 aa, Youhaiella tibetensis
  misc_feature (1)..(375): tr|A0A5B9DIE7|A0A5B9DIE7_9RHIZ Epoxyqueuosine reductase OS=Youhaiella tibetensis OX=1447062 GN=queG PE=3 SV=1
MADLVSELRQRASALGFDAFGIAAAEARPDLSEKLQAALAAGWHGDMDWMAETADRRASPVALWPEARSVIMIGVNYGPDSDPMAALARRSSGNISVYARNRDYHDIIKGRLKELAGLLSRRTGEAVKVFVDTAPVMEKPLAQAAGLGWQGKHTVLVSRQFGSWLFLGAIFTSAQLPASEPMAESCGSCRRCLDVCPTDAFPAPFQLDARRCLAYLNIEHKGPIPAEFRKAMGNRIYGCDDCLAVCPWNKFASETREAKLFAREDLREPPLSVLLALDDAGFRALFSGSPIKRIGHGRFLRNVLIAAGNSGDRALLEAVEARLEDEDALVRGAAVWAFAQLADGERVRRSAEAHAAGERDAEVRAEWAAVLPEVV

SEQ ID NO: 82245 - protein, 326 aa, Youngiibacter fragilis
  misc_feature (1)..(326): tr|V7I2W8|V7I2W8_9CLOT (Fe-S)-binding protein OS=Youngi ibacter fragilis 232.1 OX=994573 GN=T472_0215760 PE=4 S V=1
MKELHDRIRKLGIEHYGFVKARRLEGSREYFLEREKRKLSTTFEESDADLRTDLTLGMPWVRTVISLAIPYYYDSYISKGAYFSLYSQGKDYHAVVRGMLSEVSAVLSANGFRSEVFCDDNALPERLIAHMAGTGSIGRNHLLITRKYGSYVFLGEILTDWETEADERDPEDALKHTICGECDICQRACPTSILHGEYYDTSRCMSYITQDKKVKDEDIDLFRGRLFGCDTCQRVCPLNKFAERSHVSLFQPLPYMRDPDLNEIMAMDNKTFNKYRETSSGWRGKKLLKRNAMIALASKGMEIREEYADTEYLKDMRERLLKRYNL

SEQ ID NO: 82246 - protein, 341 aa, Youngimonas vesicularis
  misc_feature (1)..(341): tr|A0A4S3M9N9|A0A4S3M9N9_9RHOB tRNA epoxyqueuosine(34) reductase QueG OS=Youngimonas vesicularis OX=1294297 GN =queG PE=4 SV=1
MKARLIQQALAEGFDACRICAPDAIPQVPGRLAAFLEAGRHGQMRWMEERVAWRGDPQALWPEAKSVIVLGESYTPEHDPMAVIGQGDRGAISVYAQNRDYHDLVKKRLKRLARWLIAEAGGEVKVFVDTAPVAEKPLGQAAGLGWQGKHTNLVSRELGSWFFIGSIFTTLELPVDAPEVDHCGSCTACQDVCPTGAFPAPYQLDARRCISYLTIEHHGPVDEDLRAMLGNRIYGCDDCLAACPWNKFAVEAREVRYHARDELIAPRLAELAVLDDAAFRAMFSGSPIKRIGRDRFVRNVLYAIGNSGDVALAGVARGLCDDPDPTVADAARWAVARIEPC

SEQ ID NO: 82247 - protein, 384 aa, Zavarzinia compransoris
  misc_feature (1)..(384): tr|A0A317EAB8|A0A317EAB8_9PROT Epoxyqueuosine reductase OS=Zavarzinia compransoris OX=1264899 GN=queG PE=3 SV= 1
MASDLRASDPRPGLRAEARRLGFDQVGFARPEALAHLGRDRALAEWLDAGYQGEMGWMAETAARRGDPRVLWPGVRSIVMVGANYGPASDPLALLDEADRGVIAAYARMRDYHDVLKGRLKMLAQHLASRLGAEVKVFVDTAPVMEKPLAQAAGIGWQGKHTNLVSRAHGSWLFLGALFTAADLAPDEAEADHCGTCRRCLDACPTGAFPAPYRLDARRCIAYLSIEYGGVIPVEFRAAMGNRVYGCDDCLAVCPWNKWAGASRDAKLSERADLAAPALAELVTLDDAGFRRRFATTPVKRIGRDRFLRNVLIAIGNSGDPAYRPLVIARLDDASPLVRAMAVWALAQLGGVGAEVHRAGTETDEAVRAEWHAALDDAVVPEAE

SEQ ID NO: 82248 - protein, 354 aa, Zavarzinia sp.
  misc_feature (1)..(354): tr|A0A317E3C9|A0A317E3C9_9PROT Epoxyqueuosine reductase OS=Zavarzinia sp. HR-AS OX=2211142 GN=queG PE=3 SV=1
MAAPADPRAALEGEARRLGFDAVGFAAPDSIETLGRDALFRDWLAAGRHGTMAWMAETEERRADPRVLWPGVRSIVMLGANYGPESDSLALLGERDRGVVAAYARMRDYHDVMKGRLKMLAQWAVRHLGGEVKVFVDTAPVLEKPLAQAAGLGWQGKHTNLVSREHGSWLFLGALFLGIELPAGAAEVDHCGSCRRCLDICPTNAFPAPYQLDARRCIAYLTIEYDGEIPEEFRAAIGNRIYGCDDCLSVCPWNKWASASRDLKLSERAELAAIPLAALAQLDDAAFRSLFATTPVKRIGRDRFIRNVCIAIGNSGDPALLRVARHLMSDGSPQVRAMAEWALARLETISSSAP

SEQ ID NO: 82249 - protein, 307 aa, Zeaxanthinibacter enoshimensis
  misc_feature (1)..(307): tr|A0A4R6TPS6|A0A4R6TPS6_9FLAO Epoxyqueuosine reductase OS=Zeaxanthinibacter enoshimensis OX=392009 GN=queG PE =3 SV=1
MQQKYTYKEMIKTEAKRLGFLSCGVSRAGFLEEEAPRLEQWLRQGMHGEMSYMENHFDKRLDPTKLVDGAKSVISLLLNYYPEETQQEGTYKISKYAYGQDYHHVIKSKLRELQQFITENIGEVHGRAFVDSAPVLDKAWAARSGLGWVGKHSNLLTRQLGSFYFIAELITDLELEPDSPVTDHCGTCTACIDACPTQAIVAPYVVDGSKCISYFTIELKNEIPSEVKGQFDDWAFGCDTCQDVCPWNRFSKPHREPAFDPHPEMLQMSKKDWEEITEDVFREVFRKSAVKRTKFSGLKRNIKFLKS

SEQ ID NO: 82250 - protein, 361 aa, Zetaproteobacteria bacterium
  misc_feature (1)..(361): tr|A0A3M2EGC0|A0A3M2EGC0_9PROT Epoxyqueuosine reductase OS=Zetaproteobacteria bacterium OX=2026807 GN=queG PE= 3 SV=1
MIAATVPAALRDRVKALAAEAGFDFCGITRPRVAARDAAALRAWVDAGHHADMWWMAEEERLARRMRPASLLDGVRSVICVAMRYTPPQPATTDGQPRGIVAAYAWGSDYHKVMKRRLRRLARALDRLLGRHDQRIFVDTAPVLEHALAASAGIAWQGKHSLSLNRTGGSWLLLGELFTTAELPCDPPATHHCGSCRACIDACPTGAIVAPFVVDARRCIAWLTIEYDGPIPPPLRPLLGRRIFGCDDCQTVCPWNRAVAAPHPDLLAPKNENRAPLLTELLTLDEAGFRIRFRGTPLRRGGRIRLVRNACIAAGNSGDRRLIPPLRALLRDEAPLLREHAAWALERITRPEPESPAPADP

SEQ ID NO: 82251 - protein, 388 aa, Zetaproteobacteria bacterium
  misc_feature (1)..(388): tr|A0A1J5JGY6|A0A1J5JGY6_9PROT tRNA epoxyqueuosine(34) reductase QueG OS=Zetaproteobacteria bacterium CG2_30_5 9_37 OX=1805430 GN=AUK36_05135 PE=4 SV=1
MHNEALKQSIIKLAAGQGFELCCFTRPRIDGKHTRALECWVEQGMHGDMRWMADAERCERRKNPATMLDEVRTVVSVGMRYSPPAYALDEVNAAQGRGVISAYAHGDDYHDIMKARLEALARELDQLLGRHDQRVYVDTAPVLEHALAEDSGLGWQGKHSLTLNRQLGSWFLLGELFTTADIKEDDKASFHCGTCSACIDICPTRAIVAPFVVDARLCISYLSIEYKGSVPRRLRPLIGNRIYGCDDCQMVCPWNGGLPPPVSDFLSPRGENCLPELASLLLLDDAAFRSRFVKSPVKRIGRERFIRNCCIAAGNNGEQSLLTALWSLAMQDDSAIVREHAVWALGMLSRAENSHAAMQRLSVMQGSETDANVREEISLTIKEIKESI

SEQ ID NO: 82252 - protein, 382 aa, Zhengella mangrovi
  misc_feature (1)..(382): tr|A0A2G1QTK5|A0A2G1QTK5_9RHIZ Epoxyqueuosine reductase OS=Zhengella mangrovi OX=1982044 GN=queG PE=3 SV=1
MAGRGANAAARLRAFIRDEARAAGFDAVAITTPDAIPEASDRLQGFLDAGWHGTMAWMAETADRRAAPAALWPDVRSVIMLAMNYGPRHDPLTILERRDRAAISVYAQHRDYHDIIKGRLKTIAGKLAARTGADVKVFVDTAPVMEKPLAQAAGLGWQGKHTNLVSRTFGSWIFLGSIFTTAVLEPDAAETDHCGSCRACLDICPTDAFPAPYRLDARRCISYLTIEHKGMIDRGLREAMGNRIYGCDDCLAVCPWNKFAQSAREAKLVARDDLTAPRIADLLVLDDAAFRAMFSGSPVKRIGRDRFVRNVLIAAGNSGDGSLVPIVTGLLDDGSATVRATAIWALSRLGASDVLRARAPVLAADDDDGVQAEWAHAMEGEN

SEQ ID NO: 82253 - protein, 363 aa, Zhizhongheella caldifontis
  misc_feature (1)..(363): tr|A0A2S5SW76|A0A2S5SW76_9BURK Epoxyqueuosine reductase OS=Zhizhongheella caldifontis OX=1452508 GN=queG PE=3 SV=1
MHQDRVIDPTALLDQLRRWALGLGFSQIGVADVDLHTAEPGLLAWLKAGFHGEMHYMAAHGLKRARPAELVPGTVSVITARMDYLPSALPQGWQAIEWERLHHAPAQASVSLYARGRDYHKVLRSRLQALAERLAQAVGPFGHRVFTDSAPVLEAELAVRSGQGWRGKHTLVLSREAGSMFFLGEIYVDLALPPTQPAGAHCGSCTACIEVCPTQAIVAPYRLDARRCISYLTIEHAGTIPEEFRAAMGNRIYGCDDCQLVCPWNKYAQRSVLPDFDAREPWSAATLVDLFMWDEARFLKATEGSPIRRIGHERWLRNLAVALGNAWRETGDAALCAALQARRESASPLVREHIDWALAQRVA

SEQ ID NO: 82254 - protein, 355 aa, Zhongshania aliphaticivorans
  misc_feature (1)..(355): tr|A0A127MAI7|A0A127MAI7_9GAMM Epoxyqueuosine reductase OS=Zhongshania aliphaticivorans OX=1470434 GN=queG PE= 3 SV=1
MTQSSTDLDLLAQQIKDWGREFGFAHIGISPASNEAHAQRLREWLAKQYHGDMAYMAEREGLRGEAAELHSGTIRVISARMDYLPDAENMDAVLGNPDKAYISRYALGRDYHKLIRKRLSQLAGKISAVAGGHHRAFVDSAPVLERGFAEQAGLGWIGKNSMLINSKAGSWFFLGEIYTDLPLPVDPPQETGHCGSCRACLDDCPTGAIVAPYQVDARRCISYLTIELKTSIPEELRPLMGNRVFGCDDCQLVCPWNKFAQATAEADFSPRHQLDNSDLIELFLWNEETFLKNTEGSAIRRIGYQHWLRNLAVGLGNAPASSAAISALKQQRPSAESMAREHIDWAIGQLQGKLV

SEQ ID NO: 82255 - protein, 353 aa, Zhongshania sp.
  misc_feature (1)..(353): tr|A0A3N0CD28|A0A3N0CD28_9GAMM Epoxyqueuosine reductase OS=Zhongshania sp. DSW25-10 OX=2304603 GN=queG PE=3 SV =1
MAPTSTDLQALAQQIKDWGSELGFAHIGISPASNDAHAQRLSEWLQKDYHGEMAYMAEREQLRASPAELHSGTIRVISARMDYLPDAEDIESILGNPDKAYISRYALGRDYHKLIRKRLSQLAEKISAVAGGSHRAFADSAPVLERGFAEQAGLGWIGKNSMLINSKAGSWFFLGEIYTDIPLPTDPPQETGHCGSCRACLDDCPTGAIVAPYQVDARRCISYLTIELKDSIPEDLRPLMGNRVFGCDDCQLVCPWNKFAQTTTEPDFSPRHQLDNSELINLFLWTEEEFLDNTAGSAIRRIGYQRWLRNLAIGIGNAPPSSAAIHALKSQYPVADEMAREHIDWALARQQDQ

SEQ ID NO: 82256 - protein, 353 aa, Zhongshania sp.
  misc_feature (1)..(353): tr|A0A2S4HJN1|A0A2S4HJN1_9GAMM Epoxyqueuosine reductase OS=Zhongshania sp. ZX-21 OX=2067667 GN=queG PE=3 SV=1
MAPTSTDLQALAQQIKDWGSELGFAHIGISPASNDAHAQRLSEWLQKDYHGEMAYMAEREKLRASPTELHAGTIRVISARMDYLPNAEDIESILGNPDKAYISRYALGRDYHKLIRKRLSQLAEKISAVAGGSHRAFVDSAPVLERGFAEQAGLGWIGKNSMLINSKAGSWFFLGEIYTDIPLPTDPPQETGHCGSCRACLDDCPTGAIVAPYQVDARRCISYLTIELKDSIPEDLRSLMGNRVFGCDDCQLVCPWNKFAQTTTEPDFSPRHQLDNSELISLFLWTEDEFLDNTAGSAIRRIGYQRWLRNLAVGIGNAPPSSAAIHALKSQYPVADEMAREHIDWALARQQDQ

SEQ ID NO: 82257 - protein, 307 aa, Zhouia amylolytica
  misc_feature (1)..(307): tr|A0A1I6VD29|A0A1I6VD29_9FLAO Epoxyqueuosine reductase OS=Zhouia amylolytica OX=376730 GN=queG PE=3 SV=1
MTKQLKYAQMIKSEAKRLGFLSCGISKADFLEEEAPRLEKWLKNNMHGEMHYMENHFDKRLDPRKLVEGSKSVVSMLLNYYPENTQEDPEAPRISKYAYGTDYHFVIKDKLKQLLQFIQEEIGEVNGRAFVDSAPVLDKAWAAKSGLGWIGKNANLLSKQVGSFFFIAELVIDLDLACDTPVTDHCGSCTACIDACPTQAIVEPYVVDGSKCISYFTIELKNEIPQDVRGKFDNWMFGCDVCQDVCPWNRFSKPHNEPLFNPHPDLLSMTKKDWEEITEDVFRKVFKKSAVKRTKFSGLKRNIDFLK

SEQ ID NO: 82258 - protein, 307 aa, Zhouia amylolytica
  misc_feature (1)..(307): tr|W2UK74|W2UK74_9FLAO Epoxyqueuosine reductase OS=Zhou ia amylolytica AD3 OX=1286632 GN=queG PE=3 SV=1
MTKQLKYAQMIKSEAKRLGFLSCGISKADFLEEEAPRLEKWLKNNMHGEMHYMENHFDKRLDPRKLVEGSKSVVSMLLNYYPENTQEDPEAPRISKYAYGTDYHFVIKDKLKQLLQFIQEEIGEVNGRAFVDSAPVLDKAWAAKSGLGWIGKNANLLSKQVGSFFFIAELVIDLDLVCDTPVTDHCGSCTACIDACPTQAIVEPYVVDGSKCISYFTIELKNEIPQDVRGKFDNWMFGCDVCQDVCPWNRFSKPHNEPLFNPHPDLLSMTKKDWEEITEDVFRKVFKKSAVKRTKFSGLKRNIDFLK

SEQ ID NO: 82259 - protein, 375 aa, Zobellella denitrificans
  misc_feature (1)..(375): tr|A0A231MWX2|A0A231MWX2_9GAMM Epoxyqueuosine reductase OS=Zobellella denitrificans OX=347534 GN=queG PE=3 SV= 1
MTTPNFAALAHDIKLWAAELGFDQVGITDTDLAAHEPLLADWLDQGYHGEMDYMARHGMMRARPQELLPGTLRVISVRMNYLPEQAAIARVLSDPDKGYISRYALGRDYHKVLRNRLKKLADRIAERAQGLVARPFVDSAPILERPLAAKAGIGWVGKHSLLLNREQGSFFFLGELLVNLPLPVDGPVEEGCGKCVACITTCPTGAIVAPYVVDARRCISYLTIELDGPIPEEFRPLMGNRIYGCDDCQLICPWNRFAGASREPDFAARDDLHAPELLALFAWSEEHFLKMTEGSPIRRIGHRRWLRNIAVALGNAPASEQVIQGLGQKRDEVDELVREHIDWALARQRAGLARPERKTERLIRAVDKGMPKHAR

SEQ ID NO: 82260 - protein, 375 aa, Zobellella denitrificans
  misc_feature (1)..(375): tr|A0A291HUE7|A0A291HUE7_9GAMM Epoxyqueuosine reductase OS=Zobellella denitrificans OX=347534 GN=queG PE=3 SV= 1
MTTPDFAALAHDIKLWAAELGFDQVGITDTDLAAHEPLLADWLDQGYHGEMDYMARHGMMRARPQELLPGTLRVISVRMNYLPEQAAIARVLSDPDKGYISRYALGRDYHKVLRNRLKKLADRIAERAQGLVARPFVDSAPILERPLAAKAGIGWVGKHSLLLNREQGSFFFLGELLVNLPLPVDGPVEEGCGKCVACITTCPTGAIVAPYVVDARRCISYLTIELDGPIPEEFRPLMGNRIYGCDDCQLICPWNRFAGASREPDFAARDDLHAPELLALFAWSEEHFLKMTEGSPIRRIGHRRWLRNIAVALGNAPASEQVIQGLGQKRDEVDELVREHIDWALARQRAGLARPERKTERLIRAVDKGMPEHAR

SEQ ID NO: 82261 - protein, 375 aa, Zobellella endophytica
  misc_feature (1)..(375): tr|A0A2P7R1S5|A0A2P7R1S5_9GAMM Epoxyqueuosine reductase OS=Zobellella endophytica OX=2116700 GN=queG PE=3 SV=1
MTAPDLAALAHDIKLWAAELGFDQVGITDTDLAAHEPLLADWLEKGYHGEMEYMARHGMMRTRPQELLPGTLRVISVRMNYLPEQAAIARVLSDPDKGYISRYALGRDYHKVLRGRLKKLADRIAEQAQELVARPFVDSAPILERPLAAKAGIGWVGKHSLLLNRQQGSFFFLGELLVNLPLPVDAPVEEGCGKCVACITTCPTGAIVAPYVVDARRCISYLTIELDGPIPEPLRPLLGNRIYGCDDCQLICPWNRFADASREPDFAARDDLHAPELLALFAWSEAHFLKMTEGSPIRRIGHRRWLRNIAVALGNAPASEQIIQALEQKRETADELVREHIDWALAQQRQGLARADRKTERLIRVVDKGMPDHAR

SEQ ID NO: 82262 - protein, 375 aa, Zobellella taiwanensis
  misc_feature (1)..(375): tr|A0A2P7QL60|A0A2P7QL60_9GAMM Epoxyqueuosine reductase OS=Zobellella taiwanensis OX=347535 GN=queG PE=3 SV=1
MTTPDFDALAHDIKLWAAELGFDQAGIADPDLSEHEPLLADWLDQGYHGDMEYMARHGMMRARPAELLPGTLRVISVRMNYLPEQAAIARVLSDPDKGYISRYALGRDYHKVMRNRLKKLADQIAQRAQKLVARPFVDSAPILERPLAAKAGLGWVGKHSLLLNREPGSFFFLGELLVNLPLPVDRPVEEGCGKCVACITTCPTGAIVAPYVVDARRCISYLTIELDGPIPEPLRPLMGNRIYGCDDCQLICPWNRFARASREPDFAARDDLHAPELLALFAWSEAHFLKMTEGNPIRRIGHRRWLRNIAVALGNAPASEQVIQALEQKREVVDELVREHIDWALARQQAGLAQPERKTERLIRAVDKGMPEHAR

SEQ ID NO: 82263 - protein, 306 aa, Zobellia galactanivorans
  misc_feature (1)..(306): tr|G0L5U1|G0L5U1_ZOBGA Epoxyqueuosine reductase OS=Zobe llia galactanivorans (strain DSM 12802 / CCUG 47099 / C IP 106680 / NCIMB 13871 / Dsij) OX=63186 GN=queG PE=3 S V=1
MDSKAKYSELIKTEAKRLGFLSCGISKADFLEEEAPRLESWLNNNMHGEMSYMANHFDKRLDPRLLVDGAKSVISLLLNYYPKETQKEDTYKISKYAYGQDYHHVIKSKLRELQNFMTEHIGEVGGRAFVDSAPVLDKAWAAKSGLGWIGKHSNLLTQRVGSFYFIAELIVDVDLEYDHRVTDHCGTCTACIDACPTEAIVEPYVVDGSKCISYFTIELKNEIPTEVKGQFDDWAFGCDVCQDVCPWNRFSKPHQEPLFDPHPELLSMTKKDWEEITEDVFRKVFQKSAVKRTKFSGLQRNIKFLK

SEQ ID NO: 82264 - protein, 306 aa, Zobellia uliginosa
  misc_feature (1)..(306): tr|A0A1N7M8F1|A0A1N7M8F1_9FLAO Epoxyqueuosine reductase OS=Zobellia uliginosa OX=143224 GN=queG PE=3 SV=1
MDSKAKYSELIKTEAKRLGFLSCGISKADFLEEEAPRLESWLNKNMHGEMSYMANHFDKRLDPRLLVDGAKSVISLLLNYYPKETQKEDTYKISKYAYGQDYHHVIKSKLRELQNFMSEHIGEVGGRAFVDSAPVLDKAWAAKSGLGWIGKHSNLLTQRVGSFYFIAELIVDVDLEYDHRVTDHCGTCTACIDACPTEAIVEPYVVDGSKCISYFTIELKNEIPTEVKGQFDDWAFGCDVCQDVCPWNRFSKPHQEPLFDPHPELLSMTKKDWQEITEDVFRKVFQKSAVKRAKFSGLQRNINFLK

SEQ ID NO: 82265 - protein, 365 aa, Zoogloea ramigera
  misc_feature (1)..(365): tr|A0A4Y4CZD5|A0A4Y4CZD5_ZOORA Epoxyqueuosine reductase OS=Zoogloea ramigera OX=350 GN=queG PE=3 SV=1
MNFEHDNLSGGQENLTRLAADIKSWGRALGFDEVGITDTGLSAAEAGLAAWLEAGCHGQMDYMYKHGLKRSRPEALVPGTRRVISARMSYLPDAEDALAVLDDPARAYVSRYALGRDYHKVLRARLQRLADRVAQSVPHAARVFVDSAPVMEVALAEKAGLGWRGKHTLLLSRQAGSFFFLGEIYTDLLLPVDAATDAHCGSCSACISACPTGAIVAPYRVDARRCISYLTIELKESIPEAFRPMIGNRIYGCDDCQLACPWNRFARKAVEPDFAPRHGLDGARLAELFCWSETDFNERMAGSPIYRIGHERWLRNLAIALGNAPSAEDVLAALEKRREDASLMVREHVAWALRQHDGPHVQGAV

SEQ ID NO: 82266 - protein, 365 aa, Zoogloea sp.
  misc_feature (1)..(365): tr|A0A5C7KJ57|A0A5C7KJ57_9RHOO Epoxyqueuosine reductase OS=Zoogloea sp. OX=49181 GN=queG PE=3 SV=1
MSLGHDKLSGGQGDFATLAASIKAWGQALGFDEVGISDIDLGDAEPGLLAWLDAGCHGEMDYMYKHGLKRSRPAELVPGTCRVISVRMSYLAQGESPHAILQCPGKAYVSRYALGRDYHKVLRSRLQRLADRISAETPHGYRVFVDSAPVMEVALAEKAGLGWRGKHTLLLSRQAGSFFFLGEIYTDLPLPLDVPKSGHCGDCSACIPACPTGAIVAPYRVDARRCISYLTIELKDAIPEEFRRPIGNRIYGCDDCQLVCPWNRFARSSFVSDFTPRHGLDGAGLVELFLWSKVNFEERMTGSPIYRIGYERWSRNIAVALGNAIGVPKAVAALESRRNDPSAMVREHVLWALRQHDILNPEAAV

SEQ ID NO: 82267 - protein, 363 aa, Zoogloeaceae bacteirum
  misc_feature (1)..(363): tr|A0A2U3TLD6|A0A2U3TLD6_9RHOO Epoxyqueuosine reductase OS=Zoogloeaceae bacteirum Par-f-2 OX=2080469 GN=queG P E=3 SV=1
MQSVDHQNLTAEPSADTVQLKALKLRIQAWGRELGFDAVGVSGVDLSAAEPGLAAWLEAGFHGEMDYMARHGMKRARPSELLPGTLRVISARMNYWPKAADAMENLADGRRAYVSRYALGRDYHKVLRNRLQKLAERIDAELPHGYRVFVDSAPVLEVELASRAALGWRGKHSLLLDRTAGSWFFLGEIFTNLPLPEDQPTAAHCGRCTACLDACPTGAIVAPYRVDARRCISYLTIELQGPIPEALRPAIGNRIYGCDDCQLVCPWNRFARLGAQMDFAPRHGLDRASLVELFSWSAHDFDFRMAGSPIRRIGYERWLRNLAVALGNAPHSPAVVAALRARADDASALVREHVAWALARHGQ

SEQ ID NO: 82268 - protein, 361 aa, Zooshikella ganghwensis
  misc_feature (1)..(361): tr|A0A4P9VL02|A0A4P9VL02_9GAMM Epoxyqueuosine reductase OS=Zooshikella ganghwensis OX=202772 GN=queG PE=3 SV=1
MTNIAPSQTDFVLLAQQIKLWAKELGFQDAGITGIDLSEHEAYLKSWLAKGFHGEMGYLADHGNKRSRPDELVPGTISIISVRMDYLPGDTQAVKVLQSSSQAYISRYALGRDYHKVIRKRLAKLANKITEVAGHFGYRAFVDSAPVLEKALAEKAGLGWIGKNTLLLNSKAGSWFFLGELYTNLPLPIDAPQVTKHCGSCQACLDICPTDAFVGPFQLDARKCISYLTIELKGAIPEALRPKIGNRVFGCDDCQLVCPWNKFAKPTQETDFLPRHKLDSSDLTTLFLWTEEQFLTATEGSPIRRTGYKGWLRNLAVGLGNAATTPEVIAALNSRKDFPDDMVREHVLWALKQHHMKTTGC

SEQ ID NO: 82269 - protein, 311 aa, Zunongwangia atlantica
  misc_feature (1)..(311): tr|A0A1Y1T1R9|A0A1Y1T1R9_9FLAO Epoxyqueuosine reductase OS=Zunongwangia atlantica 22II14-10F7 OX=1185767 GN=qu eG PE=3 SV=1
MAIENKAKNTNLIKEEAKRLGFMSCGMSKAEFLEEEAPRLEEWLNKNRNGQMYYMENHFDRRLDPTKLVEGSKSVISLLLNYYPNEFQNPESYKISKYAYGKDYHFVIKDKLKSLLQFIQNEIGEVDGRAFVDSAPVLDKAWAAKSGLGWIGKNSNLLSKKAGSFFFIAELIVDLELEYDTPVTDHCGTCTACIDACPTNAIVEPYKVDGSKCISYFTIELKDQLPNSFKNTFDDWMFGCDVCQDVCPWNRFSKSHSEPLFDPHPDLLKFDKKDWEEITKETFNEIFRKSAVKRTKFEGLKRNIEFLDTQN

SEQ ID NO: 82270 - protein, 309 aa, Zunongwangia mangrovi
  misc_feature (1)..(309): tr|A0A1I1D9X9|A0A1I1D9X9_9FLAO Epoxyqueuosine reductase OS=Zunongwangia mangrovi OX=1334022 GN=queG PE=3 SV=1
MAIENKAKNTNLIKEEAKRLGFMSCGMSKAEFLEEEAPRLEEWLNKNRNGQMYYMENHFDKRLDPTKLVEGSKSVISLLLNYYPNEFQNPESYKISKYAYGKDYHFVIKDKLKSLLQFIQNEIGEVEGRAFVDSAPVLDKAWAAKSGLGWIGKNSNLLSKKAGSFFFIAELIVDLELEYDTPVTDHCGTCTACIDACPTNAIVEPYKVDGSKCISYFTIELKDELPNSFKNTFDDWMFGCDVCQDVCPWNRFSKSHSEPLFDPHPDLLKFDKKDWQEITKETFNEIFRKSAVKRTKFEGLKRNINFLDS

SEQ ID NO: 82271 - protein, 309 aa, Zunongwangia profunda
  misc_feature (1)..(309): tr|A0A3D5IXA1|A0A3D5IXA1_9FLAO Epoxyqueuosine reductase OS=Zunongwangia profunda OX=398743 GN=queG PE=3 SV=1
MIVGNKAKYTNLIKEEAIRLGFMSCGISKAGFLEEEAPRLEEWLNKNRNGKMSYMENHFDKRLDPTKLVDGSKSVISLLLNYYPDKVQNPESYKISKYAYGKDYHFVIKDKLKSLLQFIQSEIGEVAGRAFVDSAPVLDKAWAAKSGLGWIGKNSNLLSKKAGSFFFIAELIVDLELEEDTPVTDHCGTCTACIDACPTNAIVEPYKVDGSKCISYFTIELKDELPNSFKNTFEDWMFGCDICQDVCPWNRFSKPHNEPLFDPHPDLLKFDKKDWQEITRETFNEIFRKSAVKRTKFEGLKRNIKFLDS

SEQ ID NO: 82272 - protein, 309 aa, Zunongwangia profunda
  misc_feature (1)..(309): tr|D5BFK0|D5BFK0_ZUNPS Epoxyqueuosine reductase OS=Zuno ngwangia profunda (strain DSM 18752 / CCTCC AB 206139 / SM-A87) OX=655815 GN=queG PE=3 SV=1
MIVGNKSKYTNLIKKEAIRLGFMSCGISKAGFLEEEAPRLEEWLNKNRNGKMSYMENHFDKRLDPTKLVDGSKSVISLLLNYYPDKVQNPESYKISKYAYGKDYHFVIKDKLKSLLQFIQSEIGEVAGRAFVDSAPVLDKAWAAKSGLGWIGKNSNLLSKKAGSFFFIAELIVDLELEEDTPVTDHCGTCTACIDACPTNAIVEPYKVDGSKCISYFTIELKDELPNSFKNTFEDWMFGCDICQDVCPWNRFSKPHNEPLFDPHPDLLKFDKKDWQEITRETFNEIFRKSAVKRTKFEGLKRNIKFLDS

SEQ ID NO: 82273 - protein, 309 aa, Zunongwangia sp.; identical to SEQ ID NO: 82271
  misc_feature (1)..(309): tr|A0A2E0P3E7|A0A2E0P3E7_9FLAO Epoxyqueuosine reductase OS=Zunongwangia sp. OX=1965325 GN=queG PE=3 SV=1

SEQ ID NO: 82274 - protein, 369 aa, Zymobacter palmae
  misc_feature (1)..(369): tr|A0A348HG64|A0A348HG64_9GAMM Epoxyqueuosine reductase OS=Zymobacter palmae OX=33074 GN=queG PE=3 SV=1
MSTPPSPDTPDMAALAEQIKLWGRELGFQQVGITDVDLGEHAERHRRWLAAGYHGEMDYMARHGELRTRPELLVEGTQRIIVVRMNYLPPEVETTKVLSQPSKAYISRYALGRDYHKVIRKRLSTLAKQIEKAVGPFGHRAFVDSAPVLERGLAQKAGLGWTGKNSLILHPKAGSLFFLGELFTDLPLPIDKPYDKIHCGKCQRCRDMCPTQAIVDDQVVDARRCISYLTIELNGPIPEELRSMMGNRVYGCDDCQLVCPFTRFAKASQEDDFAPRHDLDRTDLLTLFNWSEDDFLDRTAGSPIRRIGYEKWLRNMAVGLGNAPYSAEVVAALEARLDYPSALVQEHVRWALDQQQHRQSALITVSPAD

SEQ ID NO: 82275 - protein, 378 aa, Zymomonas mobilis
  misc_feature (1)..(378): tr|A0A542VZR4|A0A542VZR4_ZYMMB Epoxyqueuosine reductase OS=Zymomonas mobilis OX=542 GN=queG PE=3 SV=1
MDVDQLKSLRIALEEQAYQLGFATFGISLAEIAEGARTRFHQWLADGMHGDMLWMADRAELRSDPKKLWPDVRSVIMLGMNYAPACNPLALAEKPEIGRISVYAQGRDYHDVVKKALKNLARWLVQNSGCGVKVFVDTAPVMEKNLAVSAGLGWQGKHSNVINRRYGNWLFLGAIYTTLPFEADQKAKGGCGSCQSCQDICPTGAISVAGSVDARKCISYLTIEYKGIIPTVFRRAIGNHIYGCDDCLGICPWNKFAKPDEAHPAFWPRAELAAPELKDLLMLDDTSFRQVFSASPVKRIGRDRFIRNCLIAAGNSGQSSLLKVVMPLLHDPALIVRAAAIWALRQLDPALFKVMAPQAVLQESEKEVQDEWRLEEEG

SEQ ID NO: 82276 - protein, 380 aa, Zymomonas mobilis
  misc_feature (1)..(380): tr|F8ESQ3|F8ESQ3_ZYMMT Epoxyqueuosine reductase OS=Zymo monas mobilis subsp. pomaceae (strain ATCC 29192 / JCM 10191 / NBRC 13757 / NCIMB 11200 / NRRL B-4491) OX=5791 38 GN=queG PE=3 SV=1
MFTMSNTSSSIEDFRLSLEKEAYALGFSTFGISRAEISASTQKRLCRWLEEGMHGDMLWMRDRLEHRLDPQNLWPDVRSVIMLGMNYAPTKNPLALADDAGIGRISVYAQGRDYHDTIKKALKHLARWLVQKADCNVKVFVDTAPVMEKSLAVSAGLGWQGKHSNVISRQYGNWLFLGAIYTTLDLEPNRPAKGGCGSCSRCQIACPTNAFPREGVVDARRCISYLTIEYKGIIPQEFRRALGNHIYGCDDCLASCPWNKFAHPETSHPAFWPRAELAAPELRDLLTLKDSDFRQFFSASPIKRIGRDRFIRNCLIAAGNSRQSSLLKQVMPLLEDPAAIVRAMAIWALRQLDIQIFRALAKTAAPQENDVTVQREWQEV

SEQ ID NO: 82277 - protein, 379 aa, Escherichia coli; identical to SEQ ID NO: 80927
  misc_feature (1)..(379): sp|P39288|QUEG_ECOLI Epoxyqueuosine reductase OS=Escher ichia coli (strain K12) OX=83333 GN=queG PE=3 SV=1

SEQ ID NO: 82278 - protein, 379 aa, Escherichia coli; identical to SEQ ID NO: 80927
  misc_feature (1)..(379): tr|W8TWV5|W8TWV5_ECOLX Epoxyqueuosine reductase OS=Esch erichia coli OX=562 GN=yjeS PE=3 SV=1

SEQ ID NO: 82279 - protein, 379 aa, Escherichia coli
  misc_feature (1)..(379): tr|D3QL83|D3QL83_ECOCB Epoxyqueuosine reductase OS=Esch erichia coli O55:H7 (strain CB9615 / EPEC) OX=701177 GN =yjeS PE=3 SV=1
MSEPLDLNQLAQKIKQWGLELGFQQVGITDTDLSESEPKLQAWLDKQYHGEMDWMARHGMLRARPHELLPGTLRVISVRMNYLPANAAFASTLKNPKLGYVSRYALGRDYHKLLRNRLKKLGEMIQQHCVSLNFRPFVDSAPILERPLAEKAGLGWTGKHSLILNREAGSFFFLGELLVDIPLPVDQPVEEGCGKCVACMTICPTGAIVEPYTVDARRCISYLTIELEGAIPEELRPLMGNRIYGCDDCQLICPWNRYSQLTTEDDFSPRKPLHAPELIELFAWSEEKFLKVTEGSAIRRIGHLRWLRNIAVALGNAPWDETILAALESRKGEHPLLDEHIAWAMAQQIERRNACIVEVQLPKKQRLVRVIEKGLPRDA

SEQ ID NO: 82280 - protein, 228 aa, Escherichia coli
  misc_feature (1)..(228): tr|A0A0E0Y1F8|A0A0E0Y1F8_ECO1C Epoxyqueuosine reductase QueH OS=Escherichia coli O104:H4 (strain 2011C-3493) O X=1133852 GN=queH PE=3 SV=1
MTPIKIFMTIADFKRPKLELPNGANKLLLHSCCAPCSGEVMEALQASGIDYTIFFYNPNIHPQKEYLIRKDENIRFAEQHGVPFIDADYDTDNWFERAKGMEWEPERGIRCTMCFDMRFERTALYAAENGFSVISSSLGISRWKNMQQVNECGRRAVAHYPGMVYWDYNWRKQGGSSRMIEISKREKFYQQEYCGCVYSLRDTNLHRKSQGRPLIKIGQLHYGKEEKE

SEQ ID NO: 82281 - protein, 221 aa, Escherichia coli
  misc_feature (1)..(221): tr|A0A0A2RBQ5|A0A0A2RBQ5_ECOLX Epoxyqueuosine reductase QueH OS=Escherichia coli OX=562 GN=queH PE=3 SV=1
MTIADFKRPKLELPNGANKLLLHSCCAPCSGEVMEALQASGIDYTIFFYNPNIHPQKEYLIRKDENIRFAEQHGVPFIDADYDTDNWFERAKGMEWEPERGIRCTMCFDMRFERTALYAAENGFSVISSSLGISRWKNMQQVNECGRRAVAHYPGMVYWDYNWRKQGGSSRMIEISKREKFYQQEYCGCVYSLRDTNLHRKSQGRPLIKIGQLHYGKEEKE

SEQ ID NO: 82282 - protein, 228 aa, Escherichia coli
  misc_feature (1)..(228): tr|U9Y0D1|U9Y0D1_ECOLX Epoxyqueuosine reductase QueH OS =Escherichia coli 110957 OX=1268975 GN=queH PE=3 SV=1
MTPIKIFMTIADFKRPKLELPNGANKLLLHSCCAPCSGEVMEALQASRIDYTIFFYNPNIHPQKEYLIRKDENIRFAEQHGVPFIDADYDTDNWFERAKGMEWEPERGIRCTMCFDMRFERTALYAAENGFSVISSSLGISRWKNMQQVNDCGRRAVAHYPGMVYWDYNWRKQGGSSRMIEISKREKFYQQEYCGCVYSLRDTNLHRKSQGRPLIKIGQLHYDKEEKE

SEQ ID NO: 82283 - protein, 259 aa, Escherichia coli
  misc_feature (1)..(259): tr|A0A1X3LJJ5|A0A1X3LJJ5_ECOLX Epoxyqueuosine reductase QueH OS=Escherichia coli TA054 OX=656433 GN=queH PE=3 SV=1
MVVCFASKADITRFRHLFPIARSDATLFAIFMNLINTFMTVADFKRPKLELPNGAKKLLLHSCCAPCSGEVMEALQASGIDYTIFFYNPNIHPQKEYLIRKDENIRFAKQHGVPFIDADYDTDNWFERAKGMEWEPERGIRCTMCFDMRFERTALYAAENGFSVISSSLGISRWKNMQQVNDCGRRAVAYYPGMVYWDYNWRKQGGSSRMIEISKREQFYQQEYCGCVYSLRDTNLHRKSQGRPLIKIGQLHYGKEGQE

SEQ ID NO: 82284 - protein, 538 aa, Pseudomonas fluorescens
  misc_feature (1)..(538): sp|P95480|PRNA_PSEFL Flavin-dependent tryptophan haloge nase PrnA OS=Pseudomonas fluorescens OX=294 GN=prnA PE= 1 SV=1
MNKPIKNIVIVGGGTAGWMAASYLVRALQQQANITLIESAAIPRIGVGEATIPSLQKVFFDFLGIPEREWMPQVNGAFKAAIKFVNWRKSPDPSRDDHFYHLFGNVPNCDGVPLTHYWLRKREQGFQQPMEYACYPQPGALDGKLAPCLSDGTRQMSHAWHFDAHLVADFLKRWAVERGVNRVVDEVVDVRLNNRGYISNLLTKEGRTLEADLFIDCSGMRGLLINQALKEPFIDMSDYLLCDSAVASAVPNDDARDGVEPYTSSIAMNSGWTWKIPMLGRFGSGYVFSSHFTSRDQATADFLKLWGLSDNQPLNQIKFRVGRNKRAWVNNCVSIGLSSCFLEPLESTGIYFIYAALYQLVKHFPDTSFDPRLSDAFNAEIVHMFDDCRDFVQAHYFTTSRDDTPFWLANRHDLRLSDAIKEKVQRYKAGLPLTTTSFDDSTYYETFDYEFKNFWLNGNYYCIFAGLGMLPDRSLPLLQHRPESIEKAEAMFASIRREAERLRTSLPTNYDYLRSLRDGDAGLSRGQRGPKLAAQESL

SEQ ID NO: 82285 - protein, 530 aa, Lentzea aerocolonigenes
  misc_feature (1)..(530): sp|Q8KHZ8|REBH_LENAE Flavin-dependent tryptophan haloge nase RebH OS=Lentzea aerocolonigenes OX=68170 GN=rebH P E=1 SV=1
MSGKIDKILIVGGGTAGWMAASYLGKALQGTADITLLQAPDIPTLGVGEATIPNLQTAFFDFLGIPEDEWMRECNASYKVAIKFINWRTAGEGTSEARELDGGPDHFYHSFGLLKYHEQIPLSHYWFDRSYRGKTVEPFDYACYKEPVILDANRSPRRLDGSKVTNYAWHFDAHLVADFLRRFATEKLGVRHVEDRVEHVQRDANGNIESVRTATGRVFDADLFVDCSGFRGLLINKAMEEPFLDMSDHLLNDSAVATQVPHDDDANGVEPFTSAIAMKSGWTWKIPMLGRFGTGYVYSSRFATEDEAVREFCEMWHLDPETQPLNRIRFRVGRNRRAWVGNCVSIGTSSCFVEPLESTGIYFVYAALYQLVKHFPDKSLNPVLTARFNREIETMFDDTRDFIQAHFYFSPRTDTPFWRANKELRLADGMQEKIDMYRAGMAINAPASDDAQLYYGNFEEEFRNFWNNSNYYCVLAGLGLVPDAPSPRLAHMPQATESVDEVFGAVKDRQRNLLETLPSLHEFLRQQHGR

SEQ ID NO: 82286 - protein, 667 aa, Malbranchea aurantiaca
  misc_feature (1)..(667): sp|L0E155|MALA_MALAU Flavin-dependent halogenase malA O S=Malbranchea aurantiaca OX=78605 GN=malA PE=1 SV=1
MAPTPKYTFTERAAAGNLSDAEILNSNNPTGSELPDESDVVVGGAGIHGLIYALHASKYKPNNLKISVIEKNTRPGYKIGESTLPIFYTWCKLHGISAAYLLRLFGLKDGLCFYFLDRENQGQYTDFCSVGAPGLVLASLQIERPMSELLFTILAQRNGVNVYHGREVDFKSTVVQGGGQGNKIAVSRGKYDSTPKTIDSALFVDATGRFRQFCSKKAPRHRFDGWNCNAFWGYFTAPKDESKIPFDLYEGDHTNHLCFPEGWVWVIRLPSWEGSLIANLMDMVTYILECADAGVPGDELPSSEELARMFGLKFQWVTSIGFAVRNDVKYPEDLSAYGTREAEQKFNYFVQKYELLQQFMSNFELIENLYGPGTTWFIRKTLAYQSPVVSGPGWLAIGDACGFTNPLYSPGINVGMSTSTWAAQLSHRIVEIGKSAPADAAESSIRKLLVPYDDYCKSLVPALEQMNRFNYVCYRDTRLGPQVACLWQFFAGIERYLSDVNIETFAHYAIKWVWGAMVPEYQQVAQKCIEHIETVPLDERLPDAMVDELLAFSNRIKSAAVAADDFSLRWDAILRSFDRSLNFVEGKTSRDIYTRQCSGCGAWLQLRPDWKKCHSCGLLGTEPQTAVTFDPPLTAEEEALLYAAWNTAPKYDPSKELKLPTPTRPAA

SEQ ID NO: 82287 - protein, 555 aa, Kitasatospora aureofaciens
  misc_feature (1)..(555): sp|A0A1E7MYN1|CTCP_KITAU Tetracycline 7-halogenase OS=K itasatospora aureofaciens OX=1894 GN=ctcP PE=1 SV=1
MTDTTADQTRHGDRPYDVVIIGSGLSGTMLGSILAKHGFRIMLLDGAHHPRFAVGESTIGQTLVVLRLISDRYGVPEIANLASFQDVLANVSSSHGQKSNFGFMFHRDGEEPDPNETSQFRIPSIVGNAAHFFRQDTDSYMFHAAVRYGCDARQYYRVENIEFDDGGVTVSGADGSTVRARYLVDASGFRSPLARQLGLREEPSRLKHHARSIFTHMVGVDAIDDHVDTPAELRPPVPWNDGTMHHIFERGWMWIIPFNNHPGATNPLCSVGIQLDERRYPARPDLTPEEEFWSHVDRFPAVQRQLKGARSVREWVRTDRMQYSSSRTVGERWCLMSHAAGFIDPLFSRGLSNTCEIINALSWRLMAALREDDFAVERFAYVEELEQGLLDWNDKLVNNSFISFSHYPLWNSVFRIWASASVIGGKRILNALTRTKETGDDSHCQALDDNPYPGLWCPLDFYKEAFDELTELCEAVDAGHTTAEEAARVLEQRVRESDWMLPALGFNDPDTHHINPTADKMIRIAEWATGHHRPEIRELLAASAEEVRAAMRVKP

SEQ ID NO: 82288 - protein, 522 aa, Chondromyces crocatus
  misc_feature (1)..(522): sp|Q0VZ69|THAL_CHOCO Tryptophan 2-halogenase OS=Chondro myces crocatus OX=52 GN=cmdE PE=4 SV=1
MQLPSSTKILVVGGGPAGSTAATLLAREGFEVTLVEKAIFPRYHIGESLLISVQPIIDLLGAREAVEAHGFQRKKGVLWEWGGERWLFDWKKLRYDYTFHVKREEFDEILLRNAQKNGVKVFEGIDISRLEFDGERPVAAKWSKSSTGESGTIQFEFLLDASGRAGLMATQYLRSRMFMKAFQNVATWGYWKGATIPEVEVEGPITVGSIPYGWIWGIPLRDQTMSVGLVIHQELFKEKRATQSVEEIYHEGLKASPLFQDVVLKGATLEPQIRTETDYSYISRTLAGPGFFLVGDSGAFIDPLLSSGVHLAMHSALLAAASVKSIIAGEVDMASATEFYQRCYQGHFLRWALIVASFYEVNARKETYFWTAQQLAHEELGVFNMSQADMKDVFATMVSGVVDLGDAQNAGRLQKGAERVHQYLDDDGREEDVTALLQKSKQRIFEYLDRVKNRDSRAAMQRYKAGGTETFSMGLDADGAVGGLYVTTEPRLGLLRKVVEERAEAATEAPAPAAPPPAVAEV

SEQ ID NO: 82289 - protein, 521 aa, Sphingomonas haloaromaticamans
  misc_feature (1)..(521): tr|A0A1S1HAC5|A0A1S1HAC5_9SPHN Flavin-dependent tryptop han halogenase RebH OS=Sphingomonas haloaromaticamans O X=653954 GN=rebH PE=4 SV=1
MQANEAVARSRLRIVIVGGGSAGWMCAAGLARLLPATDYDITLIESDEIGTVGVGEATLPHIKTFNDMLGIDEAEFLRETQGTFKLGIEFVGWDRPGDRYIHPFGAFGEPWVGVDFQHHWVRAAQAGFDPGPIQDYSFAVAAARADAFEFPDGDRNSIRSTYAYAYHFDAGLYAAFLRRWATARGVRRIEGQVIDVGHNAISGHVETLRLKSGATLAGDIFVDCSGFRSLLLGGVMGVAWQDWSEWLPCDRALAVPCRRTTALTPYTRATAQRAGWTWRIPLQHRVGNGYVFSSRYCDEDQARETLLAAIEGEPLAEPHLLRFAAGRRALAWERNCIGIGLAGGFLEPLESTSIFLIQAAVIDLASLMPTPGFGNRMDPRLIAEFNRLFEIQYDRVRDFLVLHYAANSREGEPLWDHVRAMRLPDSLTHKIELFEASAAAPDYTYGLFSRDSWLSVLFGQGLRPRAYNRLADHLPLEELERRMRDLRSRIAANAGLMTAQEDFIAGYCTASPPAPPMESAA

SEQ ID NO: 82290 - protein, 334 aa, Pseudoalteromonas sp.
  misc_feature (1)..(334): tr|A0A4Q6J9Y4|A0A4Q6J9Y4_9GAMM Tryptophan--tRNA ligase OS=Pseudoalteromonas sp. MEBiC 03485 OX=2571103 GN=trpS PE=3 SV=1
MSKPVVLSGIQPTGGMTIGNYVGAINQWLKLQEDHESFFMLVDLHAITVRQDPEQLRSRVLDGIALYAACGIDPEKAALFVQSQVPEHAQLSWVLNCYAQMGELNRMTQFKDKSSKHANNVNVGLFSYPVLQAADILLYQADQVPVGEDQKQHLELTRDIATRFNNLYGDVFKLPEPYIPEFGARVMSLQDPLKKMSKSDENPNGYIMLLDEPKKIEKKLKKAVTDSDEQARIYFDREEKPGVSNLLTLLSVATKRSIEDLVPEYEDKMYGHLKKDTAAAVVSMIEPIQTRFKEIREDQSLLDSIMKSGAEKASIRAEKTLKAVYDAVGFIPRP

SEQ ID NO: 82291 - protein, 506 aa, Phycosocius bacilliformis
  misc_feature (1)..(506): tr|A0A2P2EE35|A0A2P2EE35_9PROT Flavin-dependent tryptop han halogenase PrnA OS=Candidatus Phycosocius bacillifo rmis OX=1445552 GN=prnA_3 PE=4 SV=1
MTASTDKRIRSIVIVGGGSAGWMTAAALANTLKRDCRIVLVESDQIGTVGVGEATIPPIRTFNEMLGIDEREFVAKTKGSFKLGIEFVDWGGLGNRYFHPFGPHGRAFDIVGLHHYWLKARAAGDSTAFDDFSMAWALAQRGRFTRPNPDPRHVLSTFDYAYHFDAGLYARLLRDYSEARGVIRHEGKVVSVRQNGETGFVEGVTLENGTELTGDLFIDCSGFRGLLIGETLKVGYQDWTHWLPCDRAVAMPCAKVEGMLPYTRSTAREAGWQWRIPLQHRTGNGYVYCSKFISDDEAEATLRANLDGEVLAGPNRLRFTTGRREKFWEANVVAIGLSSGFLEPLESTSIHLIQAGISKLLALFPQRDFDPLIVNEYNHVAATEFERIRDFLVLHYKLTTRDDSPLWRYCAAMEIPETLQLKIDHFRRYGRHIARDMDLFGQPSWLAVHIGQGNIPEDVDPLFDFRGIDGRDYLAKLKAAMAAAAEQTTSHQAFVDTHCASERVPA

SEQ ID NO: 82292 - protein, 513 aa, Devosia sp.
  misc_feature (1)..(513): tr|A0A3S4GL99|A0A3S4GL99_9RHIZ Flavin-dependent tryptop han halogenase RebH OS=Devosia sp. M6-77 OX=2490941 GN= rebH PE=4 SV=1
MDKPAHFVIVGGGTAGWIAAFIIQDEARRRGLNFRISVVESSRIPTVGVGEATTAAFRVLLKHFGIDEFEFFRKTDASFKLGIRHEDWRRKGFTYYGPIDDPHQVVLAPPGAPSDYLNVYAVAAGRAVQDMHLFQPLLEQKKAPYAQKHDGSLIPLGPFHYAFHFDQALVGKFFASKSNGVDKVDAQVAGVERDGETGDITALVLDDNARLEGDFFIDATGFRKQIIVKALEAPWVSYAHELPVNRALPFWVDVKRGEELANYTRAWAQSSGWMWQIPTRTRYGCGYVYSDEFSTPEQAKDEVERVLGHEIEVRGDIRFQIGRLEKAWIGNCVAVGLSSSFLEPLESTSIHGTIVQMMLFAQRYMDHPNRISPAARDDYNARVGRQVDDFRTFVNTHYVTERDDTPFWREVRANRIHPETRERLARWSREMPRNDHFPNYLGGLPHIETQLHYPVLNGLGLLDQNLARREMEADPKLRRFAQQTFDGLVREYRAAANQALGHAEFLRIVQEMG

SEQ ID NO: 82293 - protein, 509 aa, Altererythrobacter sp.
  misc_feature (1)..(509): tr|A0A411Z9S9|A0A411Z9S9_9SPHN Tryptophan 7-halogenase OS=Altererythrobacter sp. BPTF-M16 OX=2169535 GN=prnA P E=4 SV=1
MSDPRAAPLGKILIVGGGSAGWMAATFLSRILGRIAKIELLESDAIGVVGVGEATIPPIRKFNNFCGVDEAAFLRDTQGTFKVGIQFENWGKVGDRYLHAFGRVGQELDALVRMHHWWRLGRQAAGPDYPAWEELFLGRAATDLDRFGFDPRNAGRLSELLPHAYHFDAIAYGQHLRKIAEAQGVKRIEGIAVDAERCSETGNVDAVKLNDGRRLDADLFIDCSGFRSILLGKVMEEPFEDWSHWLPADRAVAVQSQSRRSAIAPATRAIAHTVGWQWRIPLQHRVGNGHVYSSAFSSDDQAEARLRGQLGGEVIGEPRILRFATGRRQRSWVGNVVGLGLSAGFLEPLESTSIHLVQSGLERLAELLPGQEISPALRDRYNAQCSTEWGQIRDFIIAHYKLNQRDDSEFWRHCAEMDVPDTLAENLTLWEEHGELTINGGHLFQVGSWAAVLIGQNCLPAHVHTLTARVAASEIAPHINKLALSLRKQAETLPDHSAFLKRIGANSPS

SEQ ID NO: 82294 - protein, 537 aa, Pseudomonas fluorescens
  misc_feature (1)..(537): tr|Q4KAM7|Q4KAM7_PSEF5 Tryptophan halogenase PrnA OS=Ps eudomonas fluorescens (strain ATCC BAA-477 / NRRL B-239 32 / Pf-5) OX=220664 GN=prnA PE=4 SV=1
MNKPIKNIVIVGGGTAGWMAASYLVRALQQQVNITLIESAAIPRIGVGEATIPSLQKVFFDFLGIPEREWMPQVNGAFKAAIKFVNWRKSPDPSREDYFYHLFGSVPNCDGVPLTHYWLRKREQGFQQPMAYACYPQPGALDGKLAPCLADGTRQMSHAWHFDAHLVADFLKRWAVERGVNRVVDEVVEVQLNDRGYISTLLTKEGRTLEADLFIDCSGMRGLLINQALKEPFIDMSDYLLCDSAVASAVPNDDAREGVEPYTSAIAMNSGWTWKIPMLGRFGSGYVFSSKFTSRDQATADFLKLWGLSDNQQLNQIKFRVGRNKRAWVNNCVSIGLSSCFLEPLESTGIYFIYAALYQLVKHFPDTSFDPRLRDAFNAEIVYMFDDCRDFVQAHYFTTSREDTPFWLANRHELRLSDAIQEKVERYKAGLPLTTTSFDDSTYYETFDYEFKNFWLNGNYYCIFAGLGMLPDRSLPLLQHRPESIQKAEAMFASIRREAERLRTSLPTNYDYLRSLRDGAQLSRNQHGPTLAAQERQ

SEQ ID NO: 82295 - protein, 505 aa, Saliniradius amylolyticus
  misc_feature (1)..(505): tr|A0A2S2E2V2|A0A2S2E2V2_9ALTE Tryptophan 7-halogenase OS=Saliniradius amylolyticus OX=2183582 GN=HMF8227_0149 6 PE=4 SV=1
MTTSNTLPVITIVGGGSAGWMSAIYLNRYFNKDHKQYHIRLIESPDVGIIGVGEATVHSIRYFFAAMGLNEAELIRQSQGTLKSGILFRNWMKPKDGRTHEYFHPFESNFSGPGIDISSLWMQSSSPFQRYDEAVCTSAHHIRDGLCAKGKNSRPYTGLVPYGYHLDANLMARYLRQQATAAGVEHIEALVDDVIVENHRIRAVHTDQGTFSGDIFIDCSGFKGLLINQLEPDNWRSFKAELPCDRAVAVQTKYEEDTVPKPYTVATALSNGWAWEIDLVNRRGNGYVYDSNRLTPEQAEAELLRHIDVTSDDIIKTNHLAMQVGCRNKFWSGNCIAIGLSGGFIEPLESTGLHVINLGVRLLASHLSGSEAESVAQAYNQAMNGIYDDLKQFIVLHYCLTDRDDTPFWQHAQTTASACPGLERKLELWQHKVCEYFDLAGGYSSTFTDENYRYVLYGMERSPSLSLRIDPATAAATFEQCQSRIQTMAEQLLPHHDYLASIHQA

SEQ ID NO: 82296 - protein, 512 aa, Mycobacteroides salmoniphilum
  misc_feature (1)..(512): tr|A0A4R8SN92|A0A4R8SN92_9MYCO Flavin-dependent tryptop han halogenase RebH OS=Mycobacteroides salmoniphilum OX =404941 GN=rebH PE=4 SV=1
MLEEVVIVGGGTAGWMTASYLKVAFGDRITVTVVESERIGAIGVGEATFSTIRHFFEYLGLEEHEWMPSCCATYKLGIRFQDWRQPGHHFYHPFERQRVVDGFSLTDWWLNNPRSDSFDRDCFLTGTLCDNEKSPRRLDGSLYMGTGGEGAAYRTTLSEQEEQFPYAYHFDASLLADFLRDFAVRRGVRHVVDDVVDVLQDDRGWISQVCTRAHGGIGGDLFIDCTGFAGLLLGRAMGEPFESYQGSLLNDRAVALRVPTDQGRRHLPPYTTATAQDAGWIWSIPLFGRIGSGYVYAADYCSPEDAERTLRDFVGPAAEGLEADHIRMRIGRSRRSWVRNCVAIGLASGFVEPLESTGIFFIQHGIEQLVKHFPDENWEESLRYSYNRVINRCMDGVREFLVLHYYLAARTDTQYWRDTKSVELPAALSERIEHWRSKLPDAGSVYPHYHGFEPYSYVCMFLGLGGIPGRAATAMRHLDATRAQREFELLAQQASRLRDSLPTHHEYLAQMY

SEQ ID NO: 82297 - protein, 514 aa, Teredinibacter sp.
  misc_feature (1)..(514): tr|A0A509DZL0|A0A509DZL0_9GAMM Flavin-dependent tryptop han halogenase RebH OS=Teredinibacter sp. ISS155 OX=258 4524 GN=rebH_4 PE=4 SV=1
MGQLISRVIIVGGGAAGWLTAAILAASNGKQGEKQQLEVMLVESPDIATVGVGEGTWPSMRTTLQEIGVSENEFIHFCDVSFKQGSKFIGWRNGGKEYYYHPFSLPESYTAFNSAVIWNAQKEGQKSFAQSVCAQAIVCENNLAPKQVSTPEYAFNVNYGYHLNAGKFTDFLRQHCVEKLGVLHLQQNITSVNQDDKGFITSLDTQCGESLAGDLFIDCSGGAALLIGKCYGIPMVNQDHILFNNRAVATQVPYRNEEAEIQSCTLSTAQQSGWIWDIGLTSRRGVGYTYSSEFATREEAERELSAYVLENEGLAKVEELNLKHISFNPGFREKFWTKNCVAIGMSAGFIEPLEASALVMVERSAKLLSEQFPLNLQATEVLAKRFNKTMRYHWDKIIDFLKLHYVLTERDDSPYWLAHKDQCSIPDSLQDLIELWRYQPPWKYDSYRVDELFPSASYQFVLYGMGFKAQYLSGNSEISASDYFRAVQQKSNQYIQALPKNRALLGELKNKIRI

SEQ ID NO: 82298 - protein, 538 aa, Pseudomonas fluorescens
  misc_feature (1)..(538): tr|Q9RPG3|Q9RPG3_PSEFL PrnA OS=Pseudomonas fluorescens OX=294 GN=prnA PE=4 SV=1
MNKPIKNIVIVGGGTAGWMAASYLVRALQQQVNITLIESAAIPRIGVGEATIPSLQKVFFDFLGIPEREWMPQVNGAFKAAIKFVNWRKSPDPSREDYFYHLFGSVPNCDGVPLTHYWLRKREQGFQQPMAYACYPQPGALDGKLAPCLADGTRQMSHAWHFDAHLVADFLKRWAVERGVNRVVDEVVEVQLNDRGYISTLLTKEGRTLEADLFIDCSGMRGLLINQALKEPFIDMSDYLLCDSAVASAVPNDDAREGVEPYTSAIAMNSGWTWKIPMLGRFGSGYVFSTKFTSRDQATADFLKLWGLSDNQQLNQINFRVGRNKRAWVNNCVSIGLSSCFLEPLESTGIYFIYAALYQLVKHFPDTSFDPRLRDAFNAEIVYMFDDCRDFVQAHYFTTSREDTPFWLANRHELRLSDAIQEKVERYKAGLPLTTTSFDDSTYYETFDYEFKNFWLNGNYYCIFAGLGMLPDRSLPLLQHRPESIQKAEAMFASIRREAERLRTSLPTNYDYLRSRRDGDAQLSRNQHGPTLAAQERQ

SEQ ID NO: 82299 - protein, 512 aa, Nocardia seriolae
  misc_feature (1)..(512): tr|A0A0B8NDE4|A0A0B8NDE4_9NOCA Halogenase OS=Nocardia s eriolae OX=37332 GN=prnA PE=4 SV=1
MVKNIVIVGGGTAGWMTASYLSAAFGDRMSVTLVESDRVATIGVGEATFSTVRHFFEYLGLEEHEWMPSCNATYKLGIRFENWRAPGHYFYHPFERQRVVDGFGLTDWWLHNPRSDRFDQDCFLVGALCDDEKSPRTLDGSLFGCDVGEGDSVRTTLSEQSAQFPYAYHFDASLLANFLRDYAVRRGVRHVVDDVVAVQRDQRGWIDCVRTRDHGDLVGELFVDCTGFKSLLLHGALEEPFVSYQDTLPNDRAVALQVPAGTGRKGLRPYTTATAQDAGWIWTIPLQGRTGTGYVYAEDYCTPEEAERTLRAFIGPGAKDLSANHIRMRIGRSRRSWVHNCVAIGLSSGFVEPLESTGIFFIQHGIEQLVKHLPDRDDGERLRDSYNRLVNRCMDGVREFLVLHYRGAARADNSYWKDAKTRPIPQALADRIEQWQVKLPDAESIYPHYHGFEPYSYVCMLLGLGGIPLRPSAAIALLDPNSAQREFDSVAVRSEQLRRSLPTHRDYFARRR

SEQ ID NO: 82300 - protein, 517 aa, Saliniradius amylolyticus
  misc_feature (1)..(517): tr|A0A2S2E3Z6|A0A2S2E3Z6_9ALTE Tryptophan 7-halogenase OS=Saliniradius amylolyticus OX=2183582 GN=HMF8227_0149 5 PE=4 SV=1
MSPIHNIVVLGGGTAGWLAANHLAKALNCRDSDEISVTLVESPDVPTIGVGEGTVPHIRHTLKYLGISETDVLRHCQATLKQSIQFINWNDSPSHRGKHSYHHLFDYPDMSRGDLTPYWLLSETKTPYADYVSVQSHLIHQGLAPKSMMHPEYQGVTEYAYHMDALKFSELLASHATEKLGVKRVSGHVTQPLLHPNGDIKALQFKDGNTLEGDFFVDASGFNARLLSDAYQIPLIDKRHVLLADTALALQVPYSQPDAAIPCSTLATAQEHGWIWDIGLTQRRGVGYVYSSAHTSEQQAADTLSQYLVQSGNAADLDYRRIPMQVGYRQQFWHRNCCAIGLSQGFVEPLEATGLLMFDLTARMLADTLPARRDQLAHAAKRYNQHVCYAWERVIDFIKLHYCISRRDDSDFWRDNREPASIPEHLSDKLYRWRYQVPSAYDFAQTNSIFNLDNYLYVLYGMEYHTDISAGAFRYAHSQQARQQAQFLKQMADQQSKQLMSHRKFLELAGQHGLQRI

SEQ ID NO: 82301 - protein, 557 aa, Alteromonas macleodii
  misc_feature (1)..(557): tr|A0A1E7D919|A0A1E7D919_ALTMA Tryptophan halogenase OS =Alteromonas macleodii OX=28108 GN=BFV94_4204 PE=4 SV=1
MSDNESHSSMHRVVIVGGGTAGWLAAGILAAKLSANHTVTLIESPNIPSLGVGEGSWPSLRDTLLDIGISETEFLTVCHGAFKQGSSFVNWRKGGHCYYHPFTVPTGYNELDIYTCWKSIAPNTSYEDVFSLQAAMCAAGKAPKQIATPDYAHVLNYGYHFDATKLAELLKNHCVDKLNVAHVVGHVDSVHSHQNGDIESVSTKDGKKIVGDLFIDCSGHSGLLINKHFTIPWIPVKRTMLNDRAVALQVPYSNEDAEIKSTTVATAQTCGWTWDIALQHRRGVGLVYSSQFTDEDQAKQVLIDYVRERYPSAQDAELSFRTLSFEPGYRSQFWVKNCLSLGMSSGFVEPLEASAIAMVELGLRMLCEAFPQNKAHMEIVSKRYNSRFAYRWQRVIDFLKLHYALSDREEPYWLAQREKASIPDSLAELLELWKYQSPSRLDLIENEEIFPSASYQYVLYGMGFSSSTSPLRLNEEHKRKAVHIRETLQQTKNAYLQGLPSNRVLLNDIAKRYSNEKQHVPSHAQREKNEHASASSCNDIKNTSDKKDASYDRIGFR

SEQ ID NO: 82302 - protein, 498 aa, Alkalimonas amylolytica
  misc_feature (1)..(498): tr|A0A1H4D6V8|A0A1H4D6V8_ALKAM Tryptophan halogenase OS =Alkalimonas amylolytica OX=152573 GN=SAMN04488051_1051 07 PE=4 SV=1
MTSQRIQQLVIVGGGTAGWISASLLMKMLGKAIQITLVESEQIGIVGVGEATIPPIMTFNAALGIDEAEFLRETKGSIKLGIQFENWGQLGDSYMHAFGGIGKEFPSCSFHHFWLRSQQAGMGFDFWDFSLAYQAAHKNKFSKLNRIEGVNLPGLSYAYHFDAGLYAQYLRRFSEQLGVNRIEGKVSEVVLNPDSGDVERLLLENGQQVAGDLFLDCTGLHSLLIEKTLNTGFEDWSHWLPADSAMAVPCESVEPITPYTRSIAHAKGWQWRIPLQHRIGNGFVYSSKYCSDEEARTTLMGNLDGEPLAEPRIIRFKTGRRLKQWNRNVVSIGLASGFLEPLESTSIHLIQSGVLRLLKFFPNHGISQADRDEYNRQSKVEFEQIRDFIILHYKLNQRGDSQYWKDCQRMDIPASLQRKMELFAQSGKVCREQDELFTEVAWQQVMIGQGLVPKDYHPLVNALTEQQLQELMEQLKAILTMTSDKLGSHDAFLQSISR

SEQ ID NO: 82303 - protein, 557 aa, Alteromonas sp.
  misc_feature (1)..(557): tr|A0A1J0RYK5|A0A1J0RYK5_9ALTE Tryptophan halogenase OS =Alteromonas sp. Mex14 OX=1917157 GN=BM527_18875 PE=4 S V=1
MSDNESHSSMHRVVIVGGGTAGWLAAGILAAKLSANHTVTLIESPNIPSLGVGEGSWPSLRDTLLDIGISETEFLTLCQGAFKQGSSFVNWRKGGHCYYHPFTVPTGYNELDIYTCWKVIAPNTSYEDVFSLQAAMCAAGKAPKQIATPDYAHVLNYGYHFDATKLAELLKNHCVDKLNVAHVVGHVDSVHSHQNGDIESVSTKNGQKIVGDLFIDCSGHSGLLIKKHFTIPWIPVKRTMLNDRAVALQVPYSNEDAEIKSTTVATAQTCGWTWDIALQHRRGVGLVYSSQFTNEEQAKQVLIDYVRERYPSAHDAELSFRTLFFEPGYRSQFWVKNCLSLGMSSGFVEPLEASAIAMVELGLRMLCEAFPQNKAHMEIVSKRYNSRFTYRWQRVIDFLKLHYALSDREEPYWLAQRDKASIPDSLAELLELWKYQSPSRLDLIENEEIFPSASYQYVLYGMGFSSSTSPLRLNEEHKRKAVHIRETLQQTKNAYLQGLPSNRVLLNDIAKRYNNEKQHVPSLAQREKNEHASASSCNDIKNTSDKKDTSYDRIGFR

SEQ ID NO: 82304 - protein, 557 aa, Alteromonas sp.
  misc_feature (1)..(557): tr|A0A495UJJ8|A0A495UJJ8_9ALTE Tryptophan halogenase OS =Alteromonas sp. TK-46(2) OX=1276890 GN=CLW98_2651 PE=4 SV=1
MSDNESHSSMHRVVIVGGGTAGWLAAGILAAKLSANHTVTLIESPNIPSLGVGEGSWPSLRDTLLDIGISETEFLTLCHGAFKQGSSFVNWRKGGHCYYHPFTVPTGYNELDIHTCWKAIAPNISYEDAFSLQAAMCAAGKAPKQIATPDYAHVLNYGYHFDATKLAELLKNHCVDKLNVVHVVGHVDSVHTHLNGDIESVSTRDGQKVVGDLFIDCSGHSGLLIKEHFHIPWTPVKRTMLNDRAVALQVPYSNEDAEIKSTTVATAQTCGWTWDIALQHRRGVGLVYSSQFTNEEQAKQVLVDYVRERYPSVQDAELSFRTLSFEPGYRSQFWVKNCLSLGMSSGFVEPLEASAIAMVELGLRMLCEAFPQNKAHMDIVSKRYNSRFAYRWQRVIDFLKLHYALSDREEPYWLAQRDKASIPDSLAELLKLWKYQSPSRLDLIENEEIFPSASYQYVLYGMGFSSSTSPLRLNEEHKRKAVHIRETLQQTKNAYLQGLPSNRVLLNDIAKRYNNEKQHVPSLAQREKNEHASASSCNDIKNTSDKKDTSYDRIGFR

SEQ ID NO: 82305 - protein, 505 aa, Thalassotalea euphylliae
  misc_feature (1)..(505): tr|A0A3E0UCU2|A0A3E0UCU2_9GAMM Tryptophan 7-halogenase OS=Thalassotalea euphylliae OX=1655234 GN=DXX92_03005 P E=4 SV=1
MSHPVKNIVIVGGGIAGWLSAAVIASYHQGASDEQFRITLVESSDVPTIGVGEGTWPTMKNTLRQIGLNEREVFARCHAAFKQGGKFVNWVHGNGDFYYHPFTVPLGYGKLDLAPYVESVENFAVESNFQHHICEAGLAPRGHADLDYQGPCNYAYHLDAGELANMLKEHCTQKLGVKHLVDTLCDTLIADDGSIEAIVLEKTGQLAADLFVDCTGARSLLLGQALGIGYKSLSDVLFNDSALAMQVPYESADTPVASHTIATAQDAGWIWDIGLTHRRGVGHVYSSRFTSDEKAEANLRRYLGKAADGLAARKISYKPGHREKFWHKNCVAVGMAAGFVEPLEATAIMLIELSSRFIGENLPADKALMPVVAKRFNQQMDYRWQRIADFLKLHYMLTQRPEPYWQAHCDEATFPQSLKDDLAIWRYRGPATSDFDSAIELFPAASYQYVLYGMEFKPDFSSQAYLYNQRQQAEQLIKRNQQLTQQMLQNLPAHRDYIEQWLATG

SEQ ID NO: 82306 - protein, 557 aa, Alteromonas macleodii
  misc_feature (1)..(557): tr|A0A2K9IGF4|A0A2K9IGF4_ALTMA Tryptophan halogenase OS =Alteromonas macleodii OX=28108 GN=TE101_19890 PE=4 SV= 1
MSDNESHSSMHRVVIVGGGTAGWLAAGILAAKLSANHTVTLIESPNIPSLGVGEGSWPSLLDTLLDIGISETEFLTLCHGAFKQGSSFVNWRKGGHCYYHPFTVPTGYNELDIHTCWQELAPNTSYEDAFSLQAAMCAAGKAPKQIATPDYAHVLNYGYHFDATKLAELLKNHCVDKLNVAHVVGHVDSVHSHQNGDIESVSTKDGKKIVGDLFIDCSCHSGLLINKHFAIPWIPVKRTMLNDRAVALQVPYSNEDAEIKSTTVATAQTCGWTWDIALQHRRGVGLVYSSQFTDEDQAKQVLIDYVRERYPSAQDAELSFRTLSFEPGYRSQFWVKNCLSLGMSSGFVEPLEASAIAMVELGLRMLCEAFPQNKAHMEIVSKRYNSRFAYRWQRVIDFLKLHYALSDREEPYWLAQREKASIPDSLAELLELWKYQSPSRLDLIENEEIFPSASYQYVLYGMGFSSSTSPLRLNEEHKRKAVHIRETLQQTKNAYLQGLPSNRVLLNDIAKRYNNEKQHVPSLAQREKNEHASASSCNDIKNSSDKKDTSYDRIGFR

SEQ ID NO: 82307 - protein, 522 aa, Microbulbifer aggregans
  misc_feature (1)..(522): tr|A0A1C9W319|A0A1C9W319_9GAMM Flavin-dependent tryptop han halogenase RebH OS=Microbulbifer aggregans OX=17697 79 GN=rebH_2 PE=4 SV=1
MASAATSGHIQHVLVVGGGTAGWLTASHLAKKLRARSPGGVRVTLLESENIPTIGVGEGTVPAIRQTLQYLGISETDFIRECDATFKQSIKFVDWVDNPVPGQPSHYHHVFDYPDSSRGDLTPYWLKQAGPKPSFVDAVSVQGMVCERGLGPKNMTLPEFQGFTSYAYHLDAAKFARLLTRHAVEELGVHHLLGTVEQVKRSEDGDIAAVVTDRHGTLQADLFVDCTGFASLLLGQSLGVPFVDRRDTLFADYALAAQVPYGQYNEPIPSYTISTAQESGWIWDIGLPERRGTGYVYSSAHTDHERAETVFRHYLGATGENAEVRRISMKVGYRESFWERNCVAIGLSQGFVEPLEATGILVYDATAKMLADTFPANRQVMPAVAAQFNRHVHYAWERVIEFIKLHYCISRRSDSDFWLDNRAPESIPESLRDKLELWRYQPPSEYDFPSKLEIFNLPNYLYVLYGMGFFTSTEFIGNRFADGDAALSRFAEIEAGAGQLCAQLPAHRDLINKIKQFGLQKI

SEQ ID NO: 82308 - protein, 503 aa, Altererythrobacter namhicola
  misc_feature (1)..(503): tr|A0A1C7DBH2|A0A1C7DBH2_9SPHN Flavin-dependent tryptop han halogenase PrnA OS=Altererythrobacter namhicola OX= 645517 GN=prnA PE=4 SV=1
MAIEKIVIVGGGTAGWMAAAALSRLIEGSSLSVTLIESEQIGTVGVGEATIPPFVDFNRQLEIDERELLSMINGTFKLGIQFVNWGQVGDSYIHPFGDYGYQIDGVPFHHLWHRMQALGDKRPIQVFNAETMAAFFGKFAPTPENQLEDLPPVNFAYHIDAGAYARFLRRYAEKRGAVRLEGRIEDTALDAETGFVTSVTMDNGETVEGDFFVDCSGFRGLLIEQALETGYEDWSHWLPCDRAVALPCNRDDGSPPAPFTRATAHSAGWQWQVPLQHRNGNGHVYCSTHMGDDEAHAILTSNLAGKPTADPNFLRFTTGRRKKFWNKNVVALGLAGGFMEPLESTSIHLINTGVTKLMALLSLSGVTQAQEDAFNRLTGKEYDRIRDFLILHYHRTDRTDSDFWNYVRTMDVPDTLKEKMSLFQSMGQVFREDDELFTQTSWAAVMLGQGLKMQGHSATADALDLNALKPEIDGIEQSIRFLVQNMPAHGEFLARYCPASAAA

SEQ ID NO: 82309 - protein, 503 aa, Cellvibrio japonicus
  misc_feature (1)..(503): tr|B3PB77|B3PB77_CELJU Tryptophan halogenase OS=Cellvib rio japonicus (strain Ueda107) OX=498211 GN=rebH PE=4 S V=1
MSIDPVTSILIVGGGAAGWLSAGIIAARYGKSMAITLIESSDIATIGVGEGSWPSLRNTLRDMGIAETDFFRECDASFKQGVKFNHWKTGEQQDFYYHPFSLPVGFIERNMAEHWLREPQGSSFADAVCAQEKLCENNLAPRTRDTPEYKSHVNYGYHLDAGKFIRFLREHCKSKLGVQHVLGTINQVKQNANGIASIETTEGQQLSADLFIDCSGLKSLLLGETLGARFIDKSDELFIDSAVAVQVPYASEDTPILPYTLASAQTAGWIWEIGLYSRKGIGHVYSSRHMSEDEATHVLQDYVGKDFAGLSPRKLEIPCGYRECFWLKNCVAIGMSAGFIEPLEASALVMVELAANYIRDQLPQHKSVLPIVAKRFNELQTYRWQRIVEFLKLHYVLSQRNTRFWIDNREPHTIPESLRESLALWRYHVPYKKDFLHKEEVFPSASYQYILYGMGFAPELHHYGPADEPAMFARRLAENEKIKNHLSSILPDTRSLLKAMRGS

SEQ ID NO: 82310 - protein, 505 aa, Sphingomonas sp.
  misc_feature (1)..(505): tr|A0A1R1Z4A5|A0A1R1Z4A5_9SPHN Tryptophan halogenase OS =Sphingomonas sp. Sph1(2015) OX=1628084 GN=BSZ14_00665 PE=4 SV=1
MMNDRSAEAIRSVVIVGGGTAGWMTAAALAHAMPRGLSITLVESDAIGTVGVGEATIPPIRLFNQTLGIDEAEFLRETKGSFKLGIEFIGWGREGHRYFHPFGTHGKSFDLVAVHQHWLAAGGPASGVAFDDLSMAWGAGQRGRFAQPMADPRSVASTFDYAYHFDAGLYARFLRRYAEARGVVRVEGKISGHALEGARGHVASVTLDDGRVLAGDLFVDCSGFRGLLIEEALGTGYEDWTHWLPCDRAVAAPCETGGDGLTPYTRSTAREAGWQWRIPLQHRTGNGYVYCSRHISDDQAAATLMANLDGKALGDPRFLRFTTGRRKLMWNRNVVAIGLSSGFMEPLESTSIHLIQAGIAKLLAYFPTRAFAAAGIEEYNRVAITEYERIRDFLILHYKLTERTDAPLWRECAGMPIPDTLAMKIAHFRESGRLVARDMDLFGPASWAAVHIGQFNMPEGLDPLLAYADPAQSRGFVGKLASAIGQMAESMPSHADWLKKIGATA

SEQ ID NO: 82311 - protein, 413 aa, Jishengella sp.
  misc_feature (1)..(413): tr|A0A2W2F4J9|A0A2W2F4J9_9ACTN Tryptophan halogenase OS =Jishengella sp. NA12 OX=1655439 GN=C1I95_00190 PE=4 SV =1
MSHPVPEYDVVVVGGGPAGSCTAGLLALEGHRVLLLERDKFPRYHIGESLITGVVPTLTALGVLDRMADLRFQVKYGGSLLWGADQSAPWSFRFREVRGGRFEYAWQVRRAEFDAMLLDRARELGVQVVEGATVREPLTDGDRIAGVRYQLRGESSPVDARAVMVVDASGQQRWLGRRFGLVDWYDDLRNVAVWSYWQGALRYPGEHEGDLLTESCRQGWLWYAPLSPTLTGIGYVTTSDRLVASGLPPEQLLEKQIAGSSEVAWLTSGAKRVDIYRAARDWSYTCTQFSGPGWVLVGDAAAFIDPLLSSGVTLAMRGASSVARAVHETLTAPDKERHVMQAYEDRYRDFLGSLLELVRFFYDGAHGKEELHLRAQAIVDPDHSLPPKISFVTLLSGLVRGDESLELGSLSDH

SEQ ID NO: 82312 - protein, 510 aa, Stenotrophomonas maltophilia
  misc_feature (1)..(510): tr|A0A0K2IWH3|A0A0K2IWH3_STEMA Tryptophan halogenase OS =Stenotrophomonas maltophilia OX=40324 GN=YH67_10580 PE =4 SV=1
MLDTESTPAGRIRKVVIAGGGTAGWLAGCALAHQFRDQLQITLVESEQIGTVGVGESTVPPIRTFHRFLQIDEQEFLRAVAGTFKLSISFENWRLPGDRFFHPFGTIGHGTWAAPFHHFWLDSLRRGMPSDLGDFCLESIASRGDRFSLHTQPQASYAYHFDASLYARFLRHRAEAHGLRRIEGRIALVRQHAHDGSVQALVLDDGQVIEGDLFIDCTGFRGLLIEQALGTGYEDWHEWLPCDRAVAVQTEAVAPPVPYTRAIAHEAGWRWHIALQHRVGCGLVYDSRHLSDDEAAAKLLRDAGAPPLRDPWKVPFRSGRRLKAWNGNVVSLGLASGFIEPLESTSIHLTISAVVRLIQLFPFDGIRASLVKLYNDVSRQEMEHVRDFIILHYHATQRTEPMWKACREMRVPESLQQRLQAWRERAHAWQDPGELFRVESWTSVLLGQGIAPGPAHPLARAVSDADLRTLLKGIQQPVQQAAAQMPTQAEFIAQYCRSGVDVWRSTAANA

SEQ ID NO: 82313 - protein, 488 aa, Sphingorhabdus sp.
  misc_feature (1)..(488): tr|A0A2D5DLZ5|A0A2D5DLZ5_9SPHN Tryptophan halogenase OS =Sphingorhabdus sp. OX=1902408 GN=CMN74_12150 PE=4 SV=1
MTACLMAARWLGDDAARPVSITLVESPAIGIIGVGEGSTPQLKAFFDRLGIAEAEWMPACDATYKLGIRFTGWSERAGYDSYFHPFPSAIDLHTEGAFAHACRLKRGGIEAPVHPDHWFLPTKLADAKLGPHPDERFPFEPSYGYHFDAHKLGAFLSAHARGRGVNHVAARIADVERAANGDIAALLCEDGRRIEGDLFVDSSGFAALLAERTLGARFLPFAQNLFNDRAVVMPTPAAEAPPIATQATALSAGWAWSIPLTARTGNGYVYSSRHLSDDAAETELRRYLGLLDDPTEARFLKMKVGRLEDSWTANCLAVGLAQGFIEPLEATALHIVIATVEEFISAYEAGGFAAQHRAQFNARIARRYEGIRDYIVAHYRLNRRSGDYWREAASMDFLSDDLKAMMTAWFTGQDVDETIARLDIAGFYASTSWHCLFAGYGTFPDDAKLRAPTPAERIDEANAAEFLARSAMNFQGHAEQLADLRPSG

SEQ ID NO: 82314 - protein, 504 aa, Sphingomonas sp.
  misc_feature (1)..(504): tr|A0A2U1G204|A0A2U1G204_9SPHN Tryptophan halogenase OS =Sphingomonas sp. URHD0007 OX=1298856 GN=H952_1975 PE=4 SV=1
MGDQPKLSVVVVGGGTAGWMAAAALTKLLPTRCNVTLVESEAIGIVGVGEATLPHIRGFNDRLGINEAEFMAATRATFKLGIEFRDWGRPGDSYIHPFGTFGSGQGDVGFHQYWSRLRESGAPVSPLGDYSMAVTMAYMNRFARPDPDPDKIESTFNYAYQFDATLFAPYLRSISETLGASRIEGRIVDVELDSESGNVAALRLESGQRIEGDLFIDCSGFVSLVIGKALGEPFEDWSHWLPCDRAVAMPCRTETALAPYTSAIAMPAGWRWRIPLQHRTGNGYVYASSFTSDDEARSAIVGAVEGDAIAEPRVLKFKAGRRSRSWVRNCVAVGLASGFLEPLESTSIYLIQAAISALVELLPEPAISPLDRDEFNRLIDLEYDRIRDFLILHYHATERSDTPFWDYVRTMTVPASLEEKIELFRRRGRIVKYREGVFLDASWVAVYTGQRIIPEGHDMRADLPPIDALARSAEALRAEIRTKAERMADHRAHIEAYCPMAVAA

SEQ ID NO: 82315 - protein, 506 aa, Stenotrophomonas maltophilia
  misc_feature (1)..(506): tr|A0A0D0I2A6|A0A0D0I2A6_STEMA Tryptophan halogenase OS =Stenotrophomonas maltophilia OX=40324 GN=SN15_04660 PE =4 SV=1
MDTTEGRIRKVVIAGGGTAGWLAGCALAHQFRDQLDIVLVESEQIGTVGVGESTVPPIRMFHRFLQIDEQEFLRAVAGTFKLSISFENWRRPGDRFIHPFGTIGQGTWATPFHHFWLESLRRGMPSDLGEFCLESAASLGDRFSLQTQPQASYAYHFDASLYARFLRGKAEANGLRRVEGKIREVRQHAHDGAVASLVLEDGQVIDGDLFIDCTGFRGLLTEQTLHTGYEDWHEWLPSDRAVAVQTESVNPPVPYTRAIAHEAGWRWHIALQHRVGCGLVFSSRHMSDDEAQAKLLSDIEGRPLRDPWLVPFRSGRRLKAWNKNVVALGLASGFIEPLESTSIHLTISAVVRLIQLFPLEGISPSLMALYNDVSRQEMEHVRDFIILHYHANQRDEPMWKACREMALPESLQVRLRAWRERAHAWQDPGELFRVDSWTSVLTGQGIQPGPPHPLSRAISDADLRTLLDRIRRPVQQEVAKMPSQAAFIERYCNASAQAWQRGMAVT

SEQ ID NO: 82316 - protein, 538 aa, Burkholderia ubonensis
  misc_feature (1)..(538): tr|A0A105FT77|A0A105FT77_9BURK Tryptophan halogenase OS =Burkholderia ubonensis OX=101571 GN=WJ75_15340 PE=4 SV =1
MSNPIKNIVIVGGGTAGWMAASYLVRALQQQTNITLIESAAIPRIGVGEATIPSLQKVFFDFLGIPEREWMPQVNGAFKAAIKFVNWRKPPERSRDDHFYHLFGSVPNCDGVPLTHYWLRKRELGFQQPMEYACYPQPGALDGKLAPCLPDGTRQMSHAWHFDAHLVADFLKRWAIERGVKQVVDEVVEVRLNDRGYISSLSTKEGRTLEADLFIDCSGMRGLLINQALKEPFIDMSDYLLCDSAVASAVPNADARVGIEPYTSAIAMNSGWTWKIPMLGRFGSGYVFSSKFTSRDQATADFLDLWGLPDNQPLNQIKFRVGRNGRAWVNNCVAIGLSSCFLEPLESTGIYFIYAALYQLVKHFPDTSFDPRLTNAFNAEIVHMFDDCRDFVQAHYFASSRDDTPFWLANRHDLRLSDAIKEKVERYKAGLPLTTTSFDDATYYETFDYEFKNFWLNGNYYCIFAGLGLLPDRSLPLLRHRPESIDKAEAMFARIRREAERLRTSLPTNYDYLRSLREGAAGLSRSQPGPTLAAPEIL

SEQ ID NO: 82317 - protein, 538 aa, Burkholderia ubonensis
  misc_feature (1)..(538): tr|A0A119UUP5|A0A119UUP5_9BURK Tryptophan halogenase OS =Burkholderia ubonensis OX=101571 GN=WM16_12870 PE=4 SV =1
MSNPIKNIVIVGGGTAGWMAASYLVRALQQQTNITLVESAAIPRIGVGEATIPSLQKVFFDFLGIPEREWMPQVNGAFKAAIKFVNWRKSPERSRDDHFYHLFGNVPNCDGVPLTHYWLRKREQGFRQPMEYACYPQTEALDGKLAPCLPDGTRQMSHAWHFDAHLVADFLKRWAIERGVKRVVDEVVQVHLNDRGYISSLSTKEGRTLEGDLFIDCSGMRGLLINQALKEPFIDMSDYLLCDSAVASAVPNADARVGVEPYTSAIAMNSGWTWKIPMLGRFGSGYVFSSKFTSRDQATADFLDLWGLPDNQPLNQIKFRVGRNGRAWVNNCVAIGLSSCFLEPLESTGIYFIYAALYQLVKHFPDTSFDPRLTDAFNAEIVHMFDDCRDFVQAHYFTTSRDDTPFWLANRHDLRLSDAIQEKVQRYKAGLPLTTTSFDDSTYYETFDYEFKNFWLNGNYYCIFAGLGMLPDRSLPLLRHRPESIDKAEAMFARIRREAERLRTSLPTNYDYLRSLREGDAGLSRSQPGPTLAAPEIL

SEQ ID NO: 82318 - protein, 509 aa, Stenotrophomonas maltophilia
  misc_feature (1)..(509): tr|A0A1I6JCS0|A0A1I6JCS0_STEMA Tryptophan halogenase OS =Stenotrophomonas maltophilia OX=40324 GN=SAMN04487782_ 0115 PE=4 SV=1
MDTANTAEGRIRKVVIAGGGTAGWLAGCALSHQFRDQLDITLVESEQIGTVGVGESTVPPIRTFHHFLQIDEQEFLRAVAGTFKLSISFENWRLPGERFFHPFGTIGHGTWATPFHHFWLDSLRRGMPSDLGDFCLESVASRDDRFSLQTQPQPSYAYHFDAGLYARFLRRRAEAQGLRRVEGRIAEVRQHAHDGSVQSLVLDDGQVIEGDLFIDCTGFRGLLIEQTLKTGYEDWHEWLPCDRAVAVQTESIAPPVPYTRAIAHEAGWRWHIALQHRVGCGLVYSSRHMSDDEARAKLLRDVGAPPLRDPWQVPFRSGRRLQAWNRNVVALGLASGFIEPLESTSIHLTISAVVRLIQLFPFDGIAASLVQLYNEVSRQEMEHVRDFIILHYHATQREEPLWKACREMALPESLQQRLRAWRERAHAWQDPGELFRVESWTSVLLGQGIQPGRPHPLARALSDADLRTLLKRIQQPVRQAATQMPSQAEFIDRYCRSGPEVWHANRVAS

SEQ ID NO: 82319 - protein, 509 aa, Stenotrophomonas maltophilia
  misc_feature (1)..(509): tr|A0A2W6KID0|A0A2W6KID0_STEMA Tryptophan halogenase OS =Stenotrophomonas maltophilia OX=40324 GN=A7X82_04795 P E=4 SV=1
MDTQSTPAGRIRKVVIAGGGTAGWLAGCALAHQFRDQLQITLVESEQIGTVGVGESTVPPIRTFHRFLQIDEQEFLRAVAGTFKLSISFENWRLPGDRFFHPFGTIGHGTWAAPFHHFWLDSLRRGMPSDLGDFCLESIASRGDRFSLHTQPQASYAYHFDAGLYARFLRRRAEAHGLRRIEGRIAQVRQHAHDGSVQALVLDDGQVIEGDLFIDCTGFRGLLIEQALGTGYEDWHEWLPCDRAVAVQTEAVAPPVPYTRAIAHEAGWRWHIALQHRVGCGLVYDSRHLSDDEAAAKLLRDAGAPPLRDPWKVPFRSGRRLKAWNRNVVSLGLASGFIEPLESTSIHLTISAVVRLIQLFPFDGISASLVQLYNDVSRQEMEHVRDFIILHYHATQRSEPMWKACREMRVPESLQQRLQAWRERAHAWQDPGELFRVESWTSVLLGQGIAPGPAHPLARAVSDVDLRTLLKGIQGPVQQAAAQMPAQAEFIAQYCRSGVDVWRSTTAST

SEQ ID NO: 82320 - protein, 245 aa, Sphingomonas sp.
  misc_feature (1)..(245): tr|A0A2U1FY81|A0A2U1FY81_9SPHN Tryptophan halogenase OS =Sphingomonas sp. URHD0007 OX=1298856 GN=H952_0583 PE=4 SV=1
MLWEGAVTFPSFLLGSRVKPELRRFGWSQSPVVVIDEFSGDGEAIGRIADALAPFPKVDTGYFPGVRRMITRADVDADAYVERTCRDAAQFVAGAFDADGFDLVEASFSIVSAKPESLAVRQRAPHFDSTDQKYIAILHYLRVPRNSGTAFYRQRTTGIERVSESNVDRFVSTARTDAAKLPDGSGYITGSDEFFEQIGSVEAVPDRLIIYQGSLLHSGIIPSGMSFSADPRQGRLTANIFVRGN

SEQ ID NO: 82321 - protein, 485 aa, Pseudoalteromonas sp.
  misc_feature (1)..(485): tr|A0A4Q6YC59|A0A4Q6YC59_9GAMM Tryptophan 7-halogenase OS=Pseudoalteromonas sp. CO325X OX=1777262 GN=EXT46_064 95 PE=4 SV=1
MNNINTITIVGGGTAGWMCAAYLSKHHRDKTVRMIESAHIGRIGVGEGSTPHLQQFMADLGVTESSWMRACDATYKAGIRFSHWNGDDSEYFHPFFSELDEKTAEVFFVNANARRRGAAVPAHPDGYFLAAQLAAQNRAPKALSALARPLHYGYHFDAQKLADWLRAYACARGVEHISGTVSQVQGRQRIEHVTLADGRTLQGDFYIDASGFQSLLVEKALQEPFISFNDELLNDRAVAFATEALPNPPVYTHAQAMPSGWRWHIPLQSRCGNGYVYSSQYLSAEQAELQLRQALGEYHSSAKHLHMRVGMMRRALVSNVMAVGLAQSFIEPLEATALMITGHSITLLSQFIEGLVSAQQLNDELHTLVLGVKDYILGHYATSRRVDTPYWLASAGIAAQSPRIAPLLQRWCSGGDIDQWLHQHRHQQAYNRASWYCLLAGMDYRDTHLTQPFECAPAQIDSAAKAYVKTLCETHFGVHEQVLRL

SEQ ID NO: 82322 - protein, 538 aa, Burkholderia ubonensis
  misc_feature (1)..(538): tr|A0A106K3L1|A0A106K3L1_9BURK Tryptophan halogenase OS =Burkholderia ubonensis OX=101571 GN=WL19_01745 PE=4 SV =1
MSNPIKNIVIVGGGTAGWMAASYLVRALQQQTNITLIESAAIPRIGVGEATIPSLQKVFFDFLGIPEREWMPQVNGAFKAAIKFVNWRKSPERSRDDHFYHLFGSVPNCDGVPLTHYWLRKRELGFQQPMEYACYPQPGALDGKLAPCLPDGTRQMSHAWHFDAHLVADFLKRWAIERGVKQVVDEVVQVHLNDRGYISSLSTKEGRTLEADLFIDCSGMRGLLINQALKEPFIDMSDYLLCDSAVASAVPNADARVGIEPYTSAIAMNSGWTWKIPMLGRFGSGYVFSSKFTSRDQATADFLDLWGLPDNQPLNQIKFRVGRNGRAWVNNCVAIGLSSCFLEPLESTGIYFIYAALYQLVKHFPDTSFDPRLTNAFNAEIVHMFDDCRDFVQAHYFASSRDDTPFWLANRHDLRLSDAIKEKVERYKAGLPLTTTSFDDATYYETFDYEFKNFWLNGNYYCIFAGLGLLPDRSLPLLRHRPESIDKAEAMFARIRREAERLRTSLPTNYDYLRSLREGAAGLSRSQPGPTLAAPEIL

SEQ ID NO: 82323 - protein, 505 aa, Xanthomonas translucens
  misc_feature (1)..(505): tr|A0A1M4IRR4|A0A1M4IRR4_XANCT Tryptophan halogenase OS =Xanthomonas translucens pv. graminis OX=134874 GN=XTGN CPPB3709_3097 PE=4 SV=1
MAQIRKVVIAGGGTAGWIAACALAHQFRDLLDITLIESEQIGTVGVGESTVPPIRSFHRFLQIDEQEFLRAVAGTFKLSISFENWRRPGERYLHPFGLTGQSTLACAFHHFWLEAQRRGMLSELGDYCLETVASRMDRFALQQSPPVNYAYHLDAGLYARLLRRHAERYGLKRVEGRIQQVRQHAESGGVEALLLEDGTLVEGELFIDCTGFRGLLIEQTLHTGYEDWQQWLPCDRAVAVQTEAVAAPVPYTRAIAHAAGWRWHIPLQHRVGCGLVFSSAHLSDDEARAKLLHDAAAPPIKEPWLVPFRTGRRRKAWNKNVVALGLASGFIEPLESTSIHLTIAAVMRLITLFPSESIAPSMVDLYNAVSRAEMEHVRDFIILHYHANQRDEPMWQACREMALPDSLQQRLRAWRERAHAWQGADELFRVDSWIHVLLGQGIVPAQHHPLARALPDQPLQQFLDAIRQPIDRAVAQMPSQQDFIARYCKAGPEVWAGRAPVAAPA

SEQ ID NO: 82324 - protein, 509 aa, Sapientia aquatica
  misc_feature (1)..(509): tr|A0A4R5VPZ1|A0A4R5VPZ1_9BURK Tryptophan 7-halogenase OS=Sapientia aquatica OX=1549640 GN=E2I14_18010 PE=4 SV =1
MKVNNIVIIGGGTAGWLAANHLAVELRAETDITITVIESPEIGIIGVGEGTVPHIKKSLMKFGISEAELLATCDATFKKGIKFSNWMNPSAANPSNSYYHPFTSPFPGGVDVTARYLSNPQHMNFAEVTEVAALADAMKAPKKVSSAPYEGVVNYAYHFNAVKFGKLLSKNARERLNVKHLSATIVDAKLNEQGEIAYLITKEGEHLHYDFYVDCSGFHSLLLGKLLNVPFVNKSNQLLTDSALAVQLPTDDKVDIAPYTLATAHSAGWIWDIPLTTRRGIGFVYSSAHMSEEAAVENMSRYLQLDVDQFSPRKIPMRMGYREKFWCKNVVALGLAQGFVEPLEATSIFVTDFTAELFARNFCVERESMSIAANYCNKVANYAWERVIDFVQMHYCISDRRDSEFWRINTEETPRSDVLAERFEMWRYHPPKQTDFFSRFDLFNVDNFLFVLYGMKYATKPKNMTDYEQQFFHREIAEVRLREEKLLKELLGHRDWLERFNAAYQLSLG

SEQ ID NO: 82325 - protein, 515 aa, Pseudoalteromonas sp.
  misc_feature (1)..(515): tr|A0A4Q6Y3K7|A0A4Q6Y3K7_9GAMM Tryptophan 7-halogenase OS=Pseudoalteromonas sp. CO325X OX=1777262 GN=EXT46_152 05 PE=4 SV=1
MKDLSRVIVVGGGTSGWLSAAYLASSFKRTGRDIKVSIIESDTIPTIGVGEGTFPTIVNTLYEIGLSEKEFITACDASFKQGALFKNWLYNPSDKPHAYYHPFDPPAKPKGLDLSAYWVSRKHQGTMQQDFAHATSVQSFLCDENLAPKTPETGEYAWLAKYAYHLDAAKLGQLLKKHAMNKLQVEHIVADIEQVELDEQGFIAHLVDKQQRQHDADFFVDCTGFSSLLLAKALNVPFVDKSHYLTVDTAVVLPVEYADAETPITTHTVSTAQDAGWIWDIALQNRRGTGYVYNSHYCSKEQAEKTLCDYHGIAHDSEKRYRHISFKTGYREKSWAKNCCAIGFSSGFVEPLEATAIAMVEAGVRSLAARFPATREAMLEREKQYNRIFTSRWDNIIDFIKLHYCLTKRDDTPFWREQKNPKTIPTSLQEKLKAWQHYGITDGDLPYKYDLFTLASWQYILYGLEFLPDYVEKAPINEEIIDKAFASIAAQKRSAASKLLSNRALLEAFGASCKS

SEQ ID NO: 82326 - protein, 535 aa, Saccharopolyspora jiangxiensis
  misc_feature (1)..(535): tr|A0A1I1YKQ8|A0A1I1YKQ8_9PSEU Tryptophan halogenase OS =Saccharopolyspora jiangxiensis OX=418522 GN=SAMN052165 06_109211 PE=4 SV=1
MTQTDAAAKNLGDPGKTRRVVVVGGGTAGWMTASYLTAAFGDKIDVTVVESAQIGTIGVGEATFSDIRHFFEFLRLAESDWMPACNATYKLAVRFENWREPGHHFYHPFEQMGSIDGFPLSDWWLRHPRTDRFDKDCFVMASLCDAQRSPRYLDGTPVDQGVFETGHGEETARATMAEYQGAQFPYAYHFEAHLLAKFLTKYATDRGARHVVDNVVDVALDEHGFISHVKTAEHGELAGDLFVDCTGFRGLLMNKALGEPFISYQDTLPNDSAVALQVPLDMDREPLRPCTTATAQEAGWIWTIPLISRIGTGYVYASDYCEPEEAERVLREFVGPEAADVEANHIRMRIGRSRRSWVNNCVAVGLSSGFVEPLESTGIFFIHHAIEQMVKYFPSGRDDDRLRNMYNRSTANVMDGVREFLCLHYRAAKRADTQYWKDTKTRPVPEALEERLENWKYKVPDAETVYPYYHGLPPYSYNCILLGAGGFDIRHSPALDLADETAALAEFERIRLKAEKLVQELPTQNEYFAKMRESA

SEQ ID NO: 82327 - protein, 509 aa, Stenotrophomonas maltophilia
  misc_feature (1)..(509): tr|A0A0R0BFS7|A0A0R0BFS7_STEMA Tryptophan halogenase OS =Stenotrophomonas maltophilia OX=40324 GN=ARC23_05665 P E=4 SV=1
MDTESTPAGRIRRVVIAGGGTAGWLAGCALAHQFRDQLEITLVESEQIGTVGVGESTVPPIRTFHRFLQIDEQEFLRAVAGTFKLSISFENWRLPGERFFHPFGTIGHGTWAAPFHHFWLDSLRRGMPSDLGDFCLESVASRGDRFSLQTQPQASYAYHFDAGLYARFLRRRAEAHGLRRIEGRIAQVRQHAHDGSVQALVLEDGQVVEGDLFIDCTGFRGLLIEQTLGTGYEDWHEWLPCDRAVAVQTEAVAPPVPYTRAIAHEAGWRWHIALQHRVGCGLVYSSRHLSDDEATAKLLRDVGAPPLRDPWQVPFRSGRRLKAWNRNVVALGLASGFIEPLESTSIHLTISAVVRLIQLFPFDGISASLVQLYNDVSRQEMEHVRDFIILHYHATQRSEPMWKACREMRVPESLQQRLQAWRERAHAWQDPGELFRVESWTSVLLGQGIPPGPPHPLARAVSDADLRTLLKGIQQPVQQAAAQMPTQAEFIAHYCRSGADVWRPIATTA

SEQ ID NO: 82328 - protein, 496 aa, Stenotrophomonas maltophilia
  misc_feature (1)..(496): tr|A0A2T1INM3|A0A2T1INM3_STEMA Tryptophan halogenase OS =Stenotrophomonas maltophilia OX=40324 GN=C7E18_17220 P E=4 SV=1
MSVSPLCRRSAPSTASCRSTSRSSCAQITLVESEQIGTVGVGESTVPPIRTFHRFLQIDEQEFLRAVAGTFKLSISFENWRLPGDRFFHPFGTIGHGTWAAPFHHFWLDSLRRGMPSDLGDFCLESIASRGDRFSLHTQPQASYAYHFDAGLYARFLRGRAEAHGLRRIEGRIAQVRQHAHDGSVQALVLDDGQVIEAICSSTAPASALLIEQALCTGYEDWHEWLPCDRAVAVQTEAVAPPAPYTRAIAHEAGWRWHIALQHRVGCGLVYDSRHLSDDEAAAKLLRDAGAPPLRDPWKVPFRSGRRLKAWNRNVVSLGLASGFIEPLESTSIHLTISAVVRLIQLFPFDGISASLVQLYNDVSRQEMEHVRDFIILHYHATQRSEPMWKACREMRVPESLQHRLQAWRERAHAWQDPGELFRVESWTSVLLGQGIAPGPAHPLARAVSDVDLRTLLKGIQRPVQQAAAQMPAQAEFIAQYCRSGVDVWRSTAASA

SEQ ID NO: 82329 - protein, 489 aa, Sphingomonas sp.
  misc_feature (1)..(489): tr|A0A1R1Z1X9|A0A1R1Z1X9_9SPHN Tryptophan halogenase OS =Sphingomonas sp. Sph1(2015) OX=1628084 GN=BSZ14_04995 PE=4 SV=1
MSAPIRHVLVAGSGLTAWSAAAALKRRAPFLDVTLLATPPAADALADRIACTLPSLPGFHADLGISEDDGVTRTGSGYRLGTRFSGWAEGLPDYVHAYGGYGHAIGPAAFHLHWLRAARDGSAAPFDAYCPAAQLARAGGFVPPSPGTPFAGHDYGLTLDLPRQVAMMRAFALHVGVREVTDSITEVQVDPTGHVTAIAVQHGAALTAHLYIDATGPAALLRGSIDDAWQDWNEWLPCDRVLLGTQVSGEGAPVLTPVTAHAAGWRWSSGEQVGIAYSSEHLSDTGAAAMLARDGAVVDTPIAIRPGTRPQAWRGNCIAIGDAATQVEPLEWCNLHLALSAIDRLVTMLPDTAMAEVEAADFNRQTLAEAERVRDFLAAHYRTARRPEPMWQAVAKAELPASLAHTLGQFGERGRLPFYEEETFTRDSWAAILLGQGYLPRRIDPLVHGIPAAQVDAAMARMTDAIAAALPHVPAHAQWRAAQMRRLAR

SEQ ID NO: 82330 - protein, 510 aa, Stenotrophomonas maltophilia
  misc_feature (1)..(510): tr|A0A246I554|A0A246I554_STEMA Tryptophan halogenase OS =Stenotrophomonas maltophilia OX=40324 GN=CEE63_11910 P E=4 SV=1
MLDTQSTPSGRIHKVVIAGGGTAGWLAGCALAHQFRDQLQITLVESEQIGTVGVGESTVPPIRTFHRFLQIDEQEFLRAVAGTFKLSISFENWRLPGDRFFHPFGTIGHGTWAAPFHHFWLDSLRRGMPSDLGDFCLESIASRGDRFSLHTQPQASYAYHFDAGLYARFLRGRAEAHGLRRIEGRIAQVRQHAHDGSVQALVLDDGQVIEGDLFIDCTGFRGLLIEQALGTGYEDWHEWLPCDRAVAVQTEAVAPPVPYTRAIAHEAGWRWHIALQHRVGCGLVYDSRHLSDDEAAAKLLRDAGAPPLRDPWKVPFRSGRRLKAWNRNVVSLGLASGFIEPLESTSIHLTISAVVRLIQLFPFDGISASLVQLYNDVSRQEMEHVRDFIILHYHATQRSEPMWKACRETRVPESLQHRLQAWRERAHAWQDPGELFRVESWTSVLLGQGIAPGPAHPLARAVSDVDLRTLLKGIQRPVQQAAAQMPAQAEFIAQYCRSGVDVWRSTAATA

SEQ ID NO: 82331 - protein, 510 aa, Stenotrophomonas maltophilia
  misc_feature (1)..(510): tr|A0A2W6LCV3|A0A2W6LCV3_STEMA Tryptophan halogenase OS =Stenotrophomonas maltophilia OX=40324 GN=B9Y88_11370 P E=4 SV=1
MLDTQSTPAGRIRKVVIAGGGTAGWLAGCALAHQFRDQLQITLVESEQIGTVGVGESTVPPIRTFHRFLQIDEQEFLRAVAGTFKLSISFENWRLPGDRFFHPFGTIGHGTWAAPFHHFWLDSLRRGMPSELGDFSLESIASHGDRFSLHTQPQASYAYHFDASLYARFLRRRAEAHGLRRIEGRIAQVRQHAHDGSVQALVLDDGQVIEGDLFIDCTGFRGLLIEQTLGTGYEDWHEWLPCDRAVAVQTEAVAPPVPYTRAIAHEAGWRWHIALQHRVGCGLVYDSRHLSDDEAAAKLLRDAGAPPLRDPWKVPFRSGRRLKAWNRNVVSLGLASGFIEPLESTSIHLTISAVVRLIQLFPFDGISASLVQLYNDVSRQEMEHVRDFIILHYHATQRSEPMWKACREMRVPESLQQRLQAWRERAHAWQDPGELFRVESWTSVLLGQGIAPGPAHPLARAVSDADLRTLLRGIQQPVQQAAAQMPAQAEFIAQYCRSGVDVWRSTAASA

SEQ ID NO: 82332 - protein, 509 aa, Erythrobacter litoralis
  misc_feature (1)..(509): tr|Q2NC66|Q2NC66_ERYLH Tryptophan halogenase, putative OS=Erythrobacter litoralis (strain HTCC2594) OX=314225 GN=ELI_03165 PE=4 SV=1
MNPTDLPPIVIAGGGTAGWMAAATLGRFAGRKVLLVESEAIGTVGVGEATIPQIRLFNAALGLDEAEFLRETQGTFKLAIEFAGWGGEGERYLHAFGTVGHGAGVLPFQHYWLRARQAGKAGPLSDYALNDVASRAGKMQMWQAEPGKPVPDMPWAYHFDAGLYAAYLRRYAEAHGVERVEGTIASVERDGESGDIAALVLDGERRIEGGVFVDCTGFRSLLLGGALGVEFMDWTQWLPCDRAVAVPCETKGEFTPYTRSTARKAGWQWRIPLQHRIGNGHVFCSDFMGEDEATKTLLANLDGAPTADPRVLKFTTGMRAQQWSHNCMALGLAGGFMEPLESTSIHLIQASIARLLQMLPGAEVAPAMRAEFNRQAEFEWTRIRDFLILHYWANGREGEPFWDRCRAMDVPDTLSTKVETFRASGFVHREHEELFTEPGWLQVLIGQGVVPENYNPIADAMPEVELTAMLARIAETNQRLVAAMPDHAPFLRAHIDPRKQAPTQQRIPA

SEQ ID NO: 82333 - protein, 505 aa, Phycosocius bacilliformis
  misc_feature (1)..(505): tr|A0A2P2ED60|A0A2P2ED60_9PROT Flavin-dependent tryptop han halogenase PrnA OS=Candidatus Phycosocius bacillifo rmis OX=1445552 GN=prnA_2 PE=4 SV=1
MQDRNLDNLVIVGGGSAGWMAAAAAANAAGRACEITLIESDEIGTVGVGEATIPPIKVFNRSLGIDEREFVVQTKGTFKLGIEFVNWGRQGHRYFHPFGTYGVDFDMVPLHQYFLRARQRGMSPGSLDDFTMAWQVAKRGRFAPPTQDPRLIQSTYDYAYHFDAGLYARYLRSYAEARGVKRLEGKIADVGLSQKDGRIDFVRLEDGRVVAGDFFVDCSGFRGILIEGALKTGYEDWSHWLPCNRAVAVPCAHGGEFTPYTRSTAREAGWQWRIPLQHRIGNGYVYSSDFISDQEAQRTLLANLDGKALADPRPLRFTTGRRKKAWNKNCVAIGLAAGFMEPLESTSLHLIQTGITRFLALFPDKEIDPVLEAEFNRLTTYEWERIRDFLILHYCATERTDTELWRYCANMSLPDTLAYKLAHFRKYGRMVSDGPELFLNPSWLAVYLGQFVEPSGYDPLVDARPQVEADRHLASLKKLMAETAETLPTHRMFIAQNCQAATVET

SEQ ID NO: 82334 - protein, 509 aa, Stenotrophomonas maltophilia
  misc_feature (1)..(509): tr|A0A4S2CTA9|A0A4S2CTA9_STEMA Tryptophan 7-halogenase OS=Stenotrophomonas maltophilia OX=40324 GN=E5352_18415 PE=4 SV=1
MNVANTPHARVRKVVIAGGGTAGWLAGCALSHQFRDQLDITLVESEQIGTVGVGESTVPPIRAFHRFLQIDEQEFLRAVAGTFKLSISFENWRRPGDRFIHPFGTIGQGTWAAPFHHFWLDSLRRGMPSELGDFCLESVASRGDRFSLDTRPQLNYAYHFDASLYAKFLRRRAEAQGLRRVEGKIRNVQQHADDGSVAALVLEDGQIIEGDLFIDCTGFRGLLTEQTLHTGYEDWHDWLPSDRAVAVQTGSVSPPVPYTRAIAHEAGWRWHIALQHRVGCGLVFSSRHMSDDEAHAKLLRDVEGPPLRDPWLVPFRSGRRLKAWNRNVVALGLASGFIEPLESTSIHLTISAVVRLIQLFPFDGISPALMTLYNDVSRQEMEHVRDFIILHYHANQRDEPMWKACREMPLPESLAIRLRAWRERAHAWQDPGELFRVDSWTSVLMGQGIQPGPPHPLARAIDDADLRTLLARIRQPVQQAVATMPSQAAFIERYCRAGEDVWPRAPALT

SEQ ID NO: 82335 - protein, 506 aa, Pseudoalteromonas sp.
  misc_feature (1)..(506): tr|A0A4Q6YA66|A0A4Q6YA66_9GAMM Tryptophan 7-halogenase OS=Pseudoalteromonas sp. CO325X OX=1777262 GN=EXT46_152 00 PE=4 SV=1
MKKLRKVVIVGGGTSGWLAANHIGKRLLGSDIEVCLIESPTIPTIGVGEGTVPMMVSTLQSFGISEQTFITQCDATFKQSIKFINWLDKHHHGEHNYYHHLFEYPFPNNQDVTQTWLSDTTAASFAETVSFQHMLCEQGVGPKAITHAQYTGHASYAYHLNALKFAQLLKDNATSRFNVKLLKTNVTAVKCNDEGHISELQTDDSGQVSGDFFVDCSGFSSILHRQALGVKSVDVSDQLPIDKAITAQVPTSADDAIPPYTLATAHQAGWIWDIALTTRRGTGFVYASDYLTKEQAYTKFERYLGQPLSGLKVREIDMKAGFAERAWHKNCVALGLAQGFVEPLEATSILLTDFSAKLLAENLPVQHHALALAAKKYNEIVDYAWRRVVDFIQLHYYLSDRQDSAFWRAMKSTDSMSVVLKERLALWQYQVPKKSDFNSKYEVFELENYLYILYGMHFKPCAHLVAKPEHKELIAMLTSYGEQLLKQLPKHRALLNNIAQHGLQKI

SEQ ID NO: 82336 - protein, 497 aa, Sphingomonas sp.
  misc_feature (1)..(497): tr|A0A2U1FX08|A0A2U1FX08_9SPHN Tryptophan halogenase OS =Sphingomonas sp. URHD0007 OX=1298856 GN=H952_0157 PE=4 SV=1
MRKILIVGGGTAGWMTAALFGKLFQGLYDIELVESEAIGTVGVGEATIPAIKKYNELVQLDEVEFMRRTQGTFKLGVQFVDWLKPGHSYIHGFGVIGQDWEWLRCHHYWLRANQRGRARDFADYSINTAAALANKFIHPRPDMADSPIGHIVHAFQFDAALYAKYLRGLAEQHGVRRTEGKIVDVGLHDNGDIASVTLEVGQKIEADFFIDCSGFRGLLIGQTLKTEYEDWTHWLPCDRAMAVPCTRVAPLTPYTRATARDAGWQWRIPLQHRTGNGLVYSSKHIDDDAAEKLLLANLDGEQLANPNKLRFTTGKRRKMWTRNCVAIGLAAGFLEPIESTSIHLVQSAAIRLVRLFPDAATDQATIDEFNRQSDFEWERVRDFIILHYWANQRDGDFWKYCREMELPETLQRKIDLWCSNGRIFREDDELFSEESWIEVFLGQGVVPRSYDPLVTIKSDAQIEQYLGNIAATIERCVEVMPTHAEYVAKYSAAEPVA

SEQ ID NO: 82337 - protein, 505 aa, Sphingomonas sp.
  misc_feature (1)..(505): tr|A0A1R1Z201|A0A1R1Z201_9SPHN Tryptophan halogenase OS =Sphingomonas sp. Sph1(2015) OX=1628084 GN=BSZ14_04990 PE=4 SV=1
MTKVTNDVVRVVIVGGGTAGWMAGAALTRLLSGQCSVRLIESEAIGVVGVGEATLPHIRSFNERLGIPEAEFMARTRATFKLGIEFRDWGRIGDSYIHPFGTFGRGTGAIDFHHYWSRLVREGRDLPPLDQLSYACTLAREARFEHPDQDRGGLSSTFGYAYQFDALLFAPYLRSLAEEAGAVRTEGLVVDVERDGQNGLIRAVVLDSGERVEGDLFVDCSGFRSLLLGQTLDEPFEDWSKWLPTDRAVAMPCRTETAVTPYTSAIAMPAGWRWRIPLQHRTGNGYVYASAFVSDADAAHALEKAVEGEKLAEPRLLRFKAGRRRRSWVGNCVAIGLASGFLEPLESTSIYLVQQAITALIELFPGRRMEASDRDEFNRVIDLEYDRIRDFLILHYHATSRDDSPFWNYVRTMPIPDSLGEKLELWRRRGRVVKYREGVFLDASWIAVYLGQGIVPEGWDPRADAAGTGDLVQAVAALRSEIAAEVAIRPDHRAFLERYCPMVAA

SEQ ID NO: 82338 - protein, 506 aa, Sphingomonas sp.
  misc_feature (1)..(506): tr|A0A2U1G2H7|A0A2U1G2H7_9SPHN Tryptophan halogenase OS =Sphingomonas sp. URHD0007 OX=1298856 GN=H952_2144 PE=4 SV=1
MDQELRRRIVIVGGGTAGWMTAAALARFCLPLFDVTLVESDEIGIVGVGEATIPSIREFNSALAIDEAEFLAATGATYKLGIAFEGWGRPDKGYVHAFGLVGAALGVVPFHHYWLRGRALGISKPLGHYILHTIAIAGNRFAHVERPPDSVLPPMPYAFQFDASLYAKYLRGDAERGGVTRQEGKIVAVERNAENGDVAAVVLANGTRLAGDLFVDCSGFRGLLIEQELEAGFEDWSEWLQCDRAIAVPCARVDPLMPLTRVTARQAGWQWRIPLQHRTGNGHVFSSRRISEDEATATLLDNLDGEPMADPRTIRFVPGRRRKTWIRNVVAIGLSAGFIEPLESTSIHLIQTGINRLLELLPSGEISDEMRANYNRRSAFEMEAVRDFIILHYHANQREGEPFWDELRTMEVPEPLRHKIDLFRASGRIHPGLDELFDGRAWIQVMIGQNIIPESYHPIADKLPEAKLREFLDGLERSHTAEVSRMPDHGAFVAKFGPMKREKVGA

SEQ ID NO: 82339 - protein, 509 aa, Stenotrophomonas maltophilia
  misc_feature (1)..(509): tr|A0A2T1IDE7|A0A2T1IDE7_STEMA Tryptophan halogenase OS =Stenotrophomonas maltophilia OX=40324 GN=C7E14_06235 P E=4 SV=1
MDTESTLAGRIRKVVIAGGGTAGWLAGCALAHQFRDQLQITLVESEQIGTVGVGESTVPPIRTFHRFLQIDEQEFLRAVAGTFKLSISFENWRLPGDRFFHPFGTIGHGTWAAPFHHFWLDSLRRGMPSDLGDFCLESIASRGDRFSLHTQPQASYAYHFDAGLYARFLRGRAEAHGLRRIEGRIAQVRQHAHDGSVQALVLDDGQVIEGDLFIDCTGFRGLLIEQALGTGYEDWHEWLPCDRAVAVQTEAVAPPVPYTRAIAHEAGWRWHIALQHRVGCGLVYDSRHLSDDEAAAKLLRDAGAPPLRDPWKVPFRSGRRLKAWNRNVVSLGLASGFIEPLESTSIHLTISAVVRLIQLFPFDGISASLVQLYNDVSRQEMEHVRDFIILHYHATQRSEPMWKACREMRVPESLQQRLQAWRERAHAWQDPGELFRVESWTSVLLGQGIAPGPAHPLARAVSDVDLRTLLKGIQRPVQQAAAQMPAQAEFIAQYCRSGVDVWRSTAASA

SEQ ID NO: 82340 - protein, 526 aa, Sphingomonas sp.
  misc_feature (1)..(526): tr|A0A2U1FY78|A0A2U1FY78_9SPHN Tryptophan halogenase OS =Sphingomonas sp. URHD0007 OX=1298856 GN=H952_0585 PE=4 SV=1
MAAVDQPVKTVTIVGGGTAGWMTAAVLSQWLSHVEVRLIESEEIGTIGVGEATIPHIRNYIALAGIDPLKMISESKATFKLGIQFVDWGGPGETYIHGFGKIGRDMLWLHPHQLWLAARERDAAKVRHFDHYSLNCVACLKDKFAFPDKRNPNSPVADLDYAHHFDASLFARFLRAESEARGVKRIEGRIVEVIQNPESGYVERVRLKDGREIDGELFVDCSGMRALLIGDALGIGYEPWKQWLLCDRAQAVPCASVSPLTPYTRSTARKAGWQWRIPLQHRIGNGYVYASDLIGDDEVAESLLANLDGEALADPRPVRFEPGRRLKAWEKNVIAIGLSSGFLEPLESTSIHLIQTAIHRLLAMFPSAGFSEADIHEFNRQSRFEYEDVRDFIVAHYKVTRRSGDPFWDYVREMEVPDSLTERFELFRSSGRFFKHGAAELFAEESWVQVLLGQGFEMRPDPVARFVPDEELFGFLDDISEVIEEVSNDLPDHGEFVSRLPPSTEAQPAAQQPAVNFTMRYERIIH

SEQ ID NO: 82341 - protein, 493 aa, Cellvibrio sp.
  misc_feature (1)..(493): tr|A0A1U9NAI0|A0A1U9NAI0_9GAMM Tryptophan halogenase OS =Cellvibrio sp. PSBB023 OX=1945512 GN=B0D95_10275 PE=4 SV=1
MSQTIKKVVIAGGGTSGWCTAVALSRQFGTLLDITLIESAEIGTVGVGEATFPTICSFHKIHGIDEQEFLSATKGSIKLAISFENWARKGDRYIHPFGSFGNASWIGDFYHYWLAAKARGYDGELDDICFELQAAKSHKFAITENPKLNYAYHFDAALYAKFLRKLSEEKGVHRIEGKIVQVKQHLDNGFIESVVLESGVAIEGDLFIDCTGFRGLLIEETLNAGYETWGQWLRNDSAVALQTEFSGDIPPYTRAIAHDSGWQWKIPLQHRQGTGHVYSSAYISDEDARNTLLQNLDGDIRAELRLLKFNTGRRKQAWVKNCVAIGLAGGFVEPLESTSIHLIQIGVHRLLKLFPFEGCNEYLIRRYNELSRIEYENIRDFIILHYKATERDDTPYWRDCRDMAIPDSLAERLELFRATGYVHHNSDEVFGVTSWLKVMTGQRIVPQGYHHFPHVISDEKIFSGLTSMKEKIANAVKKMPSHTDFLEAYCTVK

SEQ ID NO: 82342 - protein, 487 aa, Verrucomicrobia bacterium
  misc_feature (1)..(487): tr|A0A1Z8TP75|A0A1Z8TP75_9BACT Uncharacterized protein OS=Verrucomicrobia bacterium TMED56 OX=1986792 GN=CBC16 _10065 PE=4 SV=1
MNSITIVGGGTAGLITALILKKRLDVKIQAIVPSNIGIIGVGEGSTEHFDDFRQHLHLDVKDVLRETKGTLKSGIMFEDWTNKHSRYLHHIHSMWNIKLGLSARNYEYLMINNKGASCFAPMTLFHNEVGLEPSDRLVQYHFNTFKLNEYLIKLCKENNINIIDDEIVDVNLNDKGIKELKGKKKTYKSSFYIDCTGFKKLLISKLGAKWQSYSKYLKTNSAIAFPTGDQEDYNIWTLAKAMKYGWMWQIPTYGRTGNGYVYSDQYTNKEEAKKEIEKLLGKEIEIAKHIKYDPGALDKPWIKNCVAVGLCANFVEPLEATSIGTTIQQAFLLMQYLENYNQQSINIYNKQVSTVMENVRDFIQLHYINDKKTTNFWKDVNKVEPSDTLKQYMHVWKSGRLLKSTDMESIGHYNLFTLFKEDNFNLIAYFNGLIDTKLLRNSYNIVNKNLKRYWLENRIEGDMLWRNTDRTRKMSHKKYIQEIHDKN

SEQ ID NO: 82343 - protein, 491 aa, Amycolatopsis alba
  misc_feature (1)..(491): tr|A0A229RLL3|A0A229RLL3_9PSEU Tryptophan halogenase OS =Amycolatopsis alba DSM 44262 OX=1125972 GN=CFP75_24500 PE=4 SV=1
MSVEDFDVVVAGGGPGGSTVATLVAMQGHRVLLLEKEVFPRYQIGESLLPATVHGVCRMLGVADELANSGFPIKRGGTFRWGARPEPWTFHFGISAKMAGSTSHAYQVERAKFDQILLNNAKSKGVVVREGCSVDTVVEEGERVTGLRYTDADGNAREVSARFVIDASGNKSRLYSHVGGTRNYSEFFRSLALFGYFEGGKRLPAPVSGNILSVAFDSGWFWYIPLSDTLTSVGAVVRREDADKIQGDREKALADLIAECPMISEYLSDAKRVTTGKYGELRVRKDYSYQQTTFWRPGMILVGDAACFVDPVFSSGVHLATYSALLAARSINSVLAGELDEKTVLTEYEARYRREYGVFYEFLVSFYQMNVNEESYFWQAKKVTRNENTDIESFVELIGGVSSGETALTAADRIAERSAEFASAVDEMAAGDGDNMVPMFKSQVVKQAMQEAGQVQMKALLGEDAEPEMPLFPGGLVTSPDGMKWLPYHPA

SEQ ID NO: 82344 - protein, 515 aa, Cellvibrio sp.
  misc_feature (1)..(515): tr|A0A1U9NAN5|A0A1U9NAN5_9GAMM Tryptophan halogenase OS =Cellvibrio sp. PSBB023 OX=1945512 GN=B0D95_10705 PE=4 SV=1
MHTHEFAPDHSSEDNSITDILIVGGGTAGWMAAAALSHVYKNNPCRIRLVESDHIGTVGVGEATIPVIQKFNQMLGIDEHDFIKHTQGTFKLGIEFVNWGSLGNAYIHPFGSYGMSMGYLSFYHYWLRLADAGHTQNPGEFSIAIQAALRGRFMPPANIPNSPLSQIAYAYHFDASLYAKYLRHFAQERGVVRIEGEIAQVLLRSTDGFVDKLLLKNGESLSAQLFIDCTGFRGLLIEQAMNTGYDDWSHWLPCDTAVAVPSHNISEPRPYTRSTAHSAGWQWSIPLQHRTGNGHVFCSKYMDDEQAKKILLENIDGDALAEPRFIRFKTGMRRKFWNKNCVAMGLASGFLEPLESTSIHLIQSSISKLIALLPTTDFEQSTIDKYNELLTAEFMFVRDFIILHYKVSQRTDSDFWNYCRHMPVPESLQKKLDLYEASGRLFRDNNELFDEVSWFAVMQGQGLRPRHYHPLANQVEANEFHRIMQEIKAVVQRAADAMPTHAEYIAAHCAASKNH

SEQ ID NO: 82345 - protein, 553 aa, Amycolatopsis alba
  misc_feature (1)..(553): tr|A0A229RZG9|A0A229RZG9_9PSEU Tryptophan halogenase OS =Amycolatopsis alba DSM 44262 OX=1125972 GN=CFP75_11945 PE=4 SV=1
MSRTLPDRAIGTYARLRSLVGVSGPQRSISVARPIQKIVIVGGGTAGWLSAAYLNRAFGRKVDITLIESPRIPRIGVGEATVPTLRTTFSFLGMKEEDWMPKTNAVFKSAVRFNDWRKPHEGRDSHTYYHPFFDVPEPAVRNYEQPFHKRFGRGVSLAHFWLKQRLAGDTRVRETFGDAGMALQRLCELDKAPKPLPGTDAPDPGYRYAYHFDAALIAKYLRDLATGRGVKFVSADVKSVTVDPRGVIEKVVTDTAGEIEADLFLDCTGFRGLLINQTLNEPFVSANDVLLCDSAVALPAEHQEGGLRPYTSATAKPDGWIWEIPLADRDGTGFVYSSAFTTPEKAEQQLRQHLGGRGHDIAGNHIKMRVGHNRRSWVNNCIAVGLSSCFVEPLESTTIALIEYQLALLVLHFPDSDFDERRKARYNELMVSAFEDLRDFIVMHYTLTDRDDTEFWRAVREAPIPASLEEKLTEYAESVIIPDGSQLRLFETRSLWAILSGMDFDFKKAPPSVELMNDAAAWEMFEQIDKEREIYSAGLPSHREYIDALHRGL

SEQ ID NO: 82346 - protein, 502 aa, Phycosocius bacilliformis
  misc_feature (1)..(502): tr|A0A2P2ED58|A0A2P2ED58_9PROT Flavin-dependent tryptop han halogenase RebH OS=Candidatus Phycosocius bacillifo rmis OX=1445552 GN=rebH PE=4 SV=1
MDAQPIERIVIVGGGTAGWMTASALAKVLGPRILIDLIESDEIGTVGVGEATIPQINIFNSILGIDENEFVAKTNGTFKLGIEFVNWHRQGERYIHAFGGIGHNLGFVPFHHHWLRHQKTGKGRSLWDYSTAGQAAYCNRFDRLERLGTSPLPGPTWAFQFDAGLYARFLRQFAERLGVTRNEGKIGSVALDPLTGFIASVRLETGREIPGDLFIDCSGFRGLLIEEALKTGYEDWTEFLPCDRALAVPCESVSPLTPYTRATARQAGWQWRIPLQHRIGNGHVYCSAFMSDDEAAQALLANLDGRALADPKPLKFTTGRRKKFWNKNCVAVGLASGFMEPLESTSIHLIQSAVSRLISLFPNKACDTVLSDEYNQQAGEEYALIRDFLVLHYHANARTDSPFWLACQTMKIPDSLAHKIDLFRATGRIERRPNDLFAEPSWLQVLLGQGIEPRSYHALADNLSDQDLDEFMTNVATIIDKAVANMPSHDDFIARNCRAILG

SEQ ID NO: 82347 - protein, 533 aa, Streptomyces sp.
  misc_feature (1)..(533): tr|A0A3N4T579|A0A3N4T579_9ACTN Tryptophan halogenase OS =Streptomyces sp. SAI-083 OX=2485146 GN=EDC86_9064 PE=4 SV=1
MTSAENRLQKVVILGGGTAGWMTAAYLGKALQGTVDVTVLESPAIPRIGVGEATVPNLQRCFFDYLGIAEDEWMRECNASFKMAVRFVNWRTPGRSEASARTLLDGRPDQFYHPFGLLPDCDGTPLSHFWFKRRYEGLTTEPFDYACFREPPVMDAMKAPRWLDGRPATRYAWHFDAQLVADFLRRFATEKQHVHHVHDEMTRAERDERGFVTALHTKGGRVLPADLFVDCSGFRGLLINQAMAEPFIDMNDHLLCDSAVATSVPHDDEANGVEPYTSAIAMSSGWTWKIPMLGRFGTGYVYSSTFTDEEEAMREFAGLWGLDPERTAFHQIRFRVGRNRRAWVKNVVSIGLSSCFLEPLESTGIYFITAAIHQLAKHFPDRAFNEGLIDSFNREIELMFDESRDFVQAHFFHAPRNDTAFWRANKELKLAENIQQKVSAYKAGLPINPPITDESTYYGNVEAEILNFWTNGSYYCIFTGLGLEPDAPLPALAHNLDSVAAAEPLFEAVKRQQQNLLETLPSLYVYLKQLHNA

SEQ ID NO: 82348 - protein, 150 aa, Jishengella sp.
  misc_feature (1)..(150): tr|A0A2W2CVR9|A0A2W2CVR9_9ACTN Tryptophan halogenase (F ragment) OS=Jishengella sp. NA12 OX=1655439 GN=C1I95_34 445 PE=4 SV=1
DRAVAMPTALVETEDIPSETVSTALRHGWAWQIPLTSRHGNGYVYSSAFVSDDEAERELRAHLGAAAEGMEARRLRMRVGRVARHWSHNCVAIGLAQGFIEPLEATALMLIQLSVEQFIGALEAGNFGPRHREAYNRRVNEMFEGVRDYV

SEQ ID NO: 82349 - protein, 538 aa, Burkholderia ubonensis
  misc_feature (1)..(538): tr|A0A107F970|A0A107F970_9BURK Tryptophan halogenase OS =Burkholderia ubonensis OX=101571 GN=WL73_00620 PE=4 SV =1
MSNPIKNIVIVGGGTAGWMAASYLVRALQQQANITLIESAAIPRIGVGEATIPSLQKVFFDFLGIPEREWMPQVNGAFKAAIKFVNWRKSPDRSRDDYFYHLFGSVPNCDGVPLTHYWLRKRELGFQQPMEYACYPQPGALDGKLAPCLPDGTRQMPHAWHFDAHLVADFLKRWAVERGVNRVVDEVVEVHLNDRGYISSLSTKEGRTLEADLFIDCSGMRGLLINQALKEPFIDMSDYLLCDSAVASAVPNDDAHVGIEPYTSAIAMNSGWTWKIPMLGRFGSGYVFSSKFTSRDQATADFLNLWGLPDKQPLNQIKFRVGRNGRAWVNNCVAIGLSSCFLEPLESTGIYFIYAALYQLVKHFPDTSFDPRLTNAFNAEIVHMFDDCRDFVQAHYFATSRDDTPFWLANRHDLRLSDAIKEKVERYKAGLPLTTTSFDDATYYETFDYEFKNFWLNGNYYCIFAGLGLLPDRSLPLLRHRPESIDKAEAMFARIRREAERLRTSLPTNYDYLRSLREGDAGLSRSQPGPTLAAPEIL

SEQ ID NO: 82350 - protein, 497 aa, Mycobacteroides sp.
  misc_feature (1)..(497): tr|A0A0R3H4Z5|A0A0R3H4Z5_9MYCO Tryptophan halogenase OS =Mycobacteroides sp. H054 OX=1720567 GN=AOT85_07035 PE= 4 SV=1
MTASYLKVAFGDRITVTVVESARIGAIGVGEATFSTIRHFFDYLGLEEHEWMPSCCATYKLGIRFQDWRRPGHHFYHPFERQRVVDGFGLTDWWLDNPRSDSFDRDCFLIGTLCDNDKSPRRLDGSLFMGTDGEDTAYRTTLSEQDTQFPYAYHFDASLLADFLREFAVRRGVRHVVDDVVDVLQDDRGWISEVRTRAHGSIEGDLFIDCTGFSGLLLGRAMAEPFESYQGSLLNDRAVALRVPTDQNGGHLPPYTTATAQDAGWIWSIPLFDRIGTGYVYAEDYCSPEDAERALRNFVGPAAEGLEANHIRMRIGRSRRSWVGNCVAIGLASGFVEPLESTGIFFIQHGIEQLVKHFPDENWEESLRDSYNRVINRCMDGVREFLVLHYYLAARVDTQYWRDTKSVQLPAALAERIEHWRSKLPDAGSVYPHYHGFEPYSYVCMFVGLGGIPARPSTVVRYLDATRAQREFDLLAQQASRLRHSLPTHREYLAQMY

SEQ ID NO: 82351 - protein, 511 aa, Micromonospora sp.
  misc_feature (1)..(511): tr|A0A5D0T4R6|A0A5D0T4R6_9ACTN Tryptophan 7-halogenase OS=Micromonospora sp. WP24 OX=2604469 GN=FXF53_14070 PE =4 SV=1
MNDDGFDYDLVVVGGGPAGSTVATLVAMQGHRVLLLEKETFPRYQIGESLLPATIHGICRLTGVADEIARAGFPLKRGGTFRWGRNPEPWTFAFGISPKFASDGATAYQVERMKFDQILLDNARRKGVTVRERCAVVDVLEDGERVCGVRFDDEDGVRRELRSRYVVDASGHRSRIQNRVGGERHYPEFFRNLALFGYFEGGKRLPEPNSGNILAVAFPGGWFWYIPLSDSLTSVGAVLRPEALDRVRAGDRETVLRQLISECPMIAEYLAEATRVTSGPYGEVRIRKDYSYIRDTFTRPGMFLVGDAACFIDPVFSSGVHLATFSALLASRSINSRLAGELDEASVLAEFEARYRREYGLFHDFLVAFYDMQQDEDSYFWTAKRVSDDRVASDMQAFVQLVGGAGSDERAFVDADYYLRERKAAFQELADVVQGPVAEAGEDRNLLGASMLKEVLKEGVHVQTQAELGGNVDEQRPIRPGGLIPSDDGMRWRQSEPVAQAPGPAPQGPGA

SEQ ID NO: 82352 - protein, 516 aa, Sphingomonas sp.
  misc_feature (1)..(516): tr|A0A4R1U4Y9|A0A4R1U4Y9_9SPHN Tryptophan halogenase OS =Sphingomonas sp. PP-CC-3G-468 OX=2135656 GN=C8J41_1021 0 PE=4 SV=1
MTKRILIVGGGTAGWLTAGYLAKRLGADLPGGVAITLVESQDIGILGVGEGTFPTIRRTLATIGIDEADLIRRCGATFKQGAKFVHWRHAPGQGATDHYSHPFQVADSSDGLDLLPYWLLGHGGPENWDEVSNPQKKASDRHRAPKLPTNPDYVGPLNYAFHFDAIALAGLLREQGVKNGVRHLTDTVSEVLLDAEGAIGGVRTERNGVLDADLYIDCTGFRAELIGKAMKVPYRSCRDVLFCDRAIAAQLPYARPDDPIASYTISTAQKNGWIWDIGLDRRRGIGHVYSSDHGDDETAERVLRGYLGAAGEKADVRHFKFDAGYREVNWYKNCVAVGLSSGFFEPLEATGIAFAEVSAGMIANLFPWGGDYETSARQFNANMLRRYERALDFIKLHYCISERRDTAFWRDNVADASVPDSLLELLDRWRFRPPNELDIDGQVDIFTDASWQYVLYGMGWKTDLSAKAGALRYHEDARRAFAEVQRQARYAIANLPSNRDLVSYAQTRNFGTRAAA

SEQ ID NO: 82353 - protein, 497 aa, Pseudoalteromonas sp.
  misc_feature (1)..(497): tr|A0A4Q6Y3U9|A0A4Q6Y3U9_9GAMM Tryptophan 7-halogenase OS=Pseudoalteromonas sp. CO325X OX=1777262 GN=EXT46_126 15 PE=4 SV=1
MANINRVVILGGGTAGWLSAALLAKMLGKQLSITLVESSDIGTVGVGEATIPPIVAFNNALGIDEKTLIQRTGATIKLGIQFENWGRKGDSYMHAFGHLGKALPFCDFHHLFHHAKEQGLGHSLWDYSLNFQAAKAGRFAPLRHLPNTQLAGTEHAYHFDASLYAQLLRERAEHFGVQRIDAKVNKVEQSDNGDVQALVLQSGERVEGDLFIDCSGQRALLIAQTLGVGFEDWSHWLPCDRAIAVQSHHGDDKDPLPYTRSIAHDGGWQWQIPLQHRVGNGLVYCSRYLDDDQAKAQLLANLPGEALHEPRVIPFRTGARRQQWHKNVVAIGLSSGFLEPLESTSIHLIQTAVIRLLKHFPHQGIAPASVRAFNRLFSTEMAQIRDFIILHYAQNQRQDSRFWRYCADMELPPSLGERIAQFQQSGQVHRYQDELFAEVAWQQVFIGQNCWPQQHHPLAEQLSNEQLDELLQSLRTLINQAVQSMPSHQQFIKRNLS

SEQ ID NO: 82354 - protein, 515 aa, Sphingomonas sp.
  misc_feature (1)..(515): tr|A0A1R1YVP0|A0A1R1YVP0_9SPHN Tryptophan halogenase OS =Sphingomonas sp. Sph1(2015) OX=1628084 GN=BSZ14_16095 PE=4 SV=1
MVETEVRRVVVVGGGSAGWIAACRLAAQACRIGSGVQVTLVESRHVPTVGVGEGTWPTMRNTLARIGITETDFIRSCDAAFKQGARFVGWTDGTADDGYYHPLNPPAGATEIDLAPHWLHGAAETASFADWVDYQAMLCDAGLGPKTIVMPEYAGHANYAYHLDAGKFATLLREHGVGTLGIDHVLGDVVRPEMSDHGDIVHLELADGRIVPGDLFVDCTGFAARLIGGVYQVPFRRCGDVLFADRAMALQVPYEDEDAPITCHTVSTAQGSGWIWDIGLWTRRGVGHVYSSAHSSDDAAEAALRRYVGPAAEGLNVRRITIDAGHRTRFWQNNCVAVGLSAGFIEPLEASALMLIEASMDAIADRLPRTRAAMDVMARQFNATFTHHWMRIIEFLKLHYVLTRRTDTDFWRDNVAASSIPDGLAEQLELWRHHSPGPQDFTHAREVFSWPSYQYVLHGMGFASRQPRIDPAAPDTALAQRFVTRMARARDDLRTRAPRHRDLLRAIREHGLQRV

SEQ ID NO: 82355 - protein, 538 aa, Burkholderia ubonensis
  misc_feature (1)..(538): tr|A0A108BWL3|A0A108BWL3_9BURK Tryptophan halogenase OS =Burkholderia ubonensis OX=101571 GN=WM15_11670 PE=4 SV =1
MSNPIKNIVIVGGGTAGWMAASYLVRALQQQTNITLIESAAIPRIGVGEATIPSLQKVFFDFLGIPEREWMPQVNGAFKAAIKFVNWRKSPERSRDDHFYHLFGSVPNCDGVPLTHYWLRKRELGFQQPMEYACYPQPGALDGKLAPCLSDGTRQMSHAWHFDAHLVADFLKRWAIERGVKQVVDEVVEVRLNDRGYISSLSTKEGRTLEADLFIDCSGMRGLLINQALKEPFIDMSDYLLCDSAVASAVPNADARVGIEPYTSAIAMNSGWTWKIPMLGRFGSGYVFSSKFTSRDQATADFLDLWGLPDNQPLNQIKFRVGRNARAWVNNCVAIGLSSCFLEPLESTGIYFIYAALYQLVKHFPDTSFDPRLTNAFNAEIVHMFDDCRDFVQAHYFASSRDDTPFWLANRHDLRLSDAIKEKVERYKAGLPLTTTSFDDATYYETFDYEFKNFWLNGNYYCIFAGLGLLPDRSLPLLRHRPESIDKAEAMFARIRREAERLRTSLPANYDYLRSLREGDAGLSRSQPGPTLAAPEIL

SEQ ID NO: 82356 - protein, 530 aa, Xanthomonas translucens
  misc_feature (1)..(530): tr|A0A1M4JGA2|A0A1M4JGA2_XANCT Tryptophan halogenase OS =Xanthomonas translucens pv. graminis OX=134874 GN=XTGN CPPB3709_1201 PE=4 SV=1
MGRAAATAARERRDAHASTLGRAAPPVATYVNAGEPLRHIAIVGGGTAGWMAAAALVRVLGAGATRITLVESEAIGTVGVGEATIPPIALFNALLGIDENAFLRATQGSFKLGIEFVDWLQPGQRYFHPFGTYGADFGTVPFDGLWQRMHRAGRAAPLAAYSLNTLAAMRGRFMRPQQGDALLSRLGYAFHFDAALYARLLRESAEGRGVTRLEGKVEQVLRRSPDAAIASIVLACGTRIDADFFIDCSGFRGLLIEDAPGAGFVDWSHWLFNDRAVAVPSARASAFTPYTRSTAREAGWQWRIPLQHRTGNGYVYSSAHLSDDAAAATLLANLDEEALAEPRTLRFRAGRRGLFWSGNCLALGLAAGFLEPLESTSIHLIQAGIARFLEMLPDRAGNPADIRRYNRLMAQEFDSIRDFIILHFHATARPGAYWERARTMPIPDSLAERLQIFAHSGRVFREADELFSKTSWLAVMQGQGLSARGFDPLAAAMPDAEAAARLQRVAAAMAMAVERMPAHADFIRAHCAAT

SEQ ID NO: 82357 - protein, 500 aa, Erythrobacter litoralis
  misc_feature (1)..(500): tr|Q2NC62|Q2NC62_ERYLH Tryptophan halogenase, putative OS=Erythrobacter litoralis (strain HTCC2594) OX=314225 GN=ELI_03185 PE=4 SV=1
MSDSKAPNVVVLGGGSAGWITACLLHRQWSEKGGSVTVVESPEIGIIGVGEGSTPQLKAFFDQLGIAESEWMPACNATYKLGIRFNGWSERAGFESYYHPFPGPIDLHSEPGFIGNCMLARHQIDVAAHPDDWFLATHLSEAGKSPIAAENFPFAPSYGYHFDAYALGAFLRDWAVKRGVVHRPLKVTAVERADDGDIAALLCEGGERIEGDLFVDCSGFRAMLAEQELGATFLPFAENLFNDSAVVLPTGHGAPFKPQTEATAMRAGWRWSIPLTTRVGNGYVYSSKYISNEDAEAELRGALGLAGDGPEARFLKMKVGRLENSWTRNCLAVGLSQGFLEPLEATALHIVIVTALEFAQAYEQGGYGPQHRDAFNASIAARYEGIRDYIVAHYRVNQRSDTQYWRDNAANDRLSNGLKTMMTAWFRHQDIHAANDEAYGGKRYYANASWHCLFAGYGTFPPQERMEAVPEGIRPADPAEARAMLEACAQNFPSYDPIAS

SEQ ID NO: 82358 - protein, 499 aa, Streptomyces fungicidicus
  misc_feature (1)..(499): tr|A0A494V5P1|A0A494V5P1_9ACTN Tryptophan halogenase OS =Streptomyces fungicidicus OX=68203 GN=CNQ36_25600 PE=4 SV=1
MSTGQHEEFDVVVVGGGPSGSTLSTLVAMQGHSVLLLEKETFPRYQIGESLLPSTIHGICHLLGVTDELAAAGFPHKRGGTFRWGASPKPWNFSFSVSSKVSGPTSFAYQVERSKFDKILLDNAARKGVVVRQDRTVTDVVDDADGRARGLRYTDPDGTEHEVSARYVVDASGNTSRIHKRVGGSRTYSDFFKSLALFGYFENGKRMPAPYAGNILCVAFGSGWFWYIPLSSTLTSVGAVVRREDAAKVQGDPESALRGLIDECPMIKEYLADATRVTTGQYGQLRVRKDYSYHHTTFWRPGMVLVGDAACFVDPVFSSGVHLATYSALLAARSLNSVLAGRIDERRAFDEFEARYRREYGVFYEFLTSFYDMHVDEDSYFWTAKKVTRSSHAELESFVELVAGMSSTDFDLSDAESSVLRLKQQSAEFADAVDDMAGRQEENMAPLFRSSAVSRAMQEGSQVQTRAQLGEYAGEDVPLFDGGLVASSDSMFWEEPHPS

SEQ ID NO: 82359 - protein, 538 aa, Burkholderia ubonensis
  misc_feature (1)..(538): tr|A0A107K9T3|A0A107K9T3_9BURK Tryptophan halogenase OS =Burkholderia ubonensis OX=101571 GN=WL80_10130 PE=4 SV =1
MSNPIKNIVIVGGGTAGWMAASYLVRALQQQTNITLIESAAIPRIGVGEATIPSLQKVFFDFLGIPEREWMPQVNGAFKAAIKFVNWRKSPERSRDDHFYHLFGSVPNCDGVPLTHYWLRKRELGFQQPMEYACYPQPGALDGKLAPCLSDGTRQMSHAWHFDAHLVADFLKRWAIERGVKQVVDEVVEVRLNDRGYISSLSTKEGRTLEADLFIDCSGMRGLLINQALKEPFIDMSDYLLCDSAVASAVPNADARVGIEPYTSAIAMNSGWTWKIPMLGRFGSGYVFSSKFTSRDQATADFLGLWGLPDNQPLNQIKFRVGRNGRAWVNNCVAIGLSSCFLEPLESTGIYFIYAALYQLVKHFPDTSFDPRLTNAFNAEIVHMFDDCRDFVQAHYFASSRDDTPFWLANRHDLRLSDAIKEKVERYKAGLPLTTTSFDDATYYETFDYEFKNFWLNGNYYCIFAGLGLLPDQSLPLLRHRPESIDKAEAMFARIRREAERLRTSLPTNYDYLRSLREGAAGLSRSQPGPTLAAPEIL

SEQ ID NO: 82360 - protein, 538 aa, Burkholderia ubonensis
  misc_feature (1)..(538): tr|A0A106V5U2|A0A106V5U2_9BURK Tryptophan halogenase OS =Burkholderia ubonensis OX=101571 GN=WK55_25970 PE=4 SV =1
MSNPIKNIVIVGGGTAGWMAASYLVRALQQQTNITLIESAAIPRIGVGEATIPSLQKVFFDFLGIPEREWMPQVNGAFKAAIKFVNWRKSPERSRDDHFYHLFGSVPNCDGVPLTHYWLRKRELGFQQPMEYACYPQPGALDGKLAPCLSDGTRQMSHAWHFDAHLVADFLKRWAIERGVKQVVDEVVEVRLNDRGYISSLSTKEGRTLEADLFIDCSGMRGLLINQALKEPFIDMSDYLLCDSAVASAVPNADARVGIEPYTSAIAMNSGWTWKIPMLGRFGSGYVFSSKFTSRDQATADFLDLWGLPDNQPLNQIKFRVGRNGRAWVNNCVAIGLSSCFLEPLESTGIYFIYAALYQLVKHFPDTSFDPRLTNAFNAEIVHMFDDCRDFVQAHYFASSRDDTPFWLANRHDLRLSDAIKEKVERYKAGLPLTTTSFDDATYYETFDYEFKNFWLNGNYYCIFAGLGLLPDRSLPLLRHRPESIDKAEAMFARIRREAERLRTSLPTNYDYLRSLREGDAGLSRSQPGPTLAAPEIL

SEQ ID NO: 82361 - protein, 512 aa, Caulobacter radicis
  misc_feature (1)..(512): tr|A0A2T9K8I7|A0A2T9K8I7_9CAUL Tryptophan halogenase OS =Caulobacter radicis OX=2172650 GN=DDF62_03780 PE=4 SV= 1
MSEDVRNGRIRSIVIVGGGTAGWMAAASLRRHFGKAPIDITLVESSEIGTIGVGEATIPTIRNFYQSLGLDDLEVLRATQGTCKLGIRFKDWMAPGSAFIHPFSLYGQDLNGVPFQHYWLKARASADVGEMGEYSLGASLAAAGKFTVPTANPPSSLSVFDWALHFDAALFAQLMRRVAEANGVRRIDAKVVKVNLRPEDGFVASLDLHTGANIEGELFIDCSGFRGLLIEEVLGTGYEDWSRWLFCDRALAVQSQPPEGAQPPPYTDVTAHSAGWRWRIPLQHRYGNGYVYSSRHIDDEAAKAELVAAVPDRLLHEPRLIRFTPGRRKQVWNRNVVALGLASGFLEPLESTSIALIETGIEKLKALFPDRSFDPAVVDEFNDWSRREMERVRDFVVLHYKAAQRGDTPFWRTTRDADIPETLARKVELFRSRGHIARYRWEMFQPPSWLAIFAGFDILPGGWDPALDGIDGQALAASLNQMRAGVARAVAQAPTHGDFLRRYVGAAPAAAE

SEQ ID NO: 82362 - protein, 498 aa, Cellvibrio sp.
  misc_feature (1)..(498): tr|A0A1U9NEV0|A0A1U9NEV0_9GAMM Tryptophan halogenase OS =Cellvibrio sp. PSBB023 OX=1945512 GN=B0D95_20015 PE=4 SV=1
MDKPVRLVVLGGGTAGWMAANLFAKRWSRTQVHITLMESPEIPIIGVGEGSTPSLKRFFKQLDLTEQEWMPACHATYKTNIRFAGWSPASGVQEYSHPFYSQPDVFNERTFFTNCRTRRLGLDVITDPEKFFINGELARQGKMPIAPPNFPFQMEYGYHFDSQLLGRYLANVARARGVVHHQATLAEVLRNDRGEITALQTDAGDLLAGDFFIDCTGFASLLMQKALAVPFHSYQQQLFNDSAVVMPTPALAQPPVETRSTALSAGWCWQIPLTHRTGNGYVYSSQFISRDQAETEFRAHIGMSNSSESCRHLSMRVGQLAQHWSHNCVGLGLSQGFIEPLEATALHLVQLTVEALMDAWDDHQFTSNGRDHFNRTVTNHFDGVRDYIIAHYKLNTRGLNNTQGSDYWRANRDNTQLPESLLQILDVWYRCGDLTAELAQRTIKPAFNSASWHCLLAGYGAFPPLATNQPGQGKGDLYRECKVADFVEGCAMNFPLFL

SEQ ID NO: 82363 - protein, 505 aa, Nostoc sp.
  misc_feature (1)..(505): tr|A0A318AZ87|A0A318AZ87_9NOSO Tryptophan halogenase OS =Nostoc sp. 3335mG OX=2204170 GN=DMC47_31300 PE=4 SV=1
MRVVIVGGGTAGWMTAAGLSRLLSPRDYAITLIESDAIGTVGVGEATLPHIKTFNDMLGLDEAEFMRETQASFKLGIEFVGWTQDGDRYIHPFGAFGEPWAGVDFQHHWARAKLAGREVAPLQAYSFAVAACRANAFQAPDTDPQSIRSTFAYAYHFDASLYADYIRRWSIARGVERIEGLVLGVSQNAETGHVRALTLKSGAVIEGDLFVDCSGFRSLLVGQTMGVGWQDWSEWLPCDRALAVPCERAGPFTPYTRATAQAAGWIWRIPLQHRVGNGYVFSSRFCDEDRARETLIRNLESPPLAEPRLLHFQAGRRERMWEGNCIAIGLAGGFLEPLESTSIFLVQAAVTDLANLIPVPGRPIDPRLAAEFNRLSTLQYDRVRDFLVLHYIANAREGQPLWDHVRQMALPDTLAHKIALFEESAAPPSYQYGLFSRDSWLSVLIGQGIEPKGYSRLADRLSLDQLEAWLGDLRSRIDAGVEGMTSHEDFIAGHCGIRAAESVPA

SEQ ID NO: 82364 - protein, 510 aa, Gammaproteobacteria bacterium
  misc_feature (1)..(510): tr|A0A3R7S3T1|A0A3R7S3T1_9GAMM Tryptophan 7-halogenase OS=Gammaproteobacteria bacterium TMED243 OX=1986753 GN= CBE03_005375 PE=4 SV=1
  misc_feature (167)..(167): Xaa can be any naturally occurring amino acid
  misc_feature (173)..(173): Xaa can be any naturally occurring amino acid
  misc_feature (175)..(175): Xaa can be any naturally occurring amino acid
  misc_feature (191)..(191): Xaa can be any naturally occurring amino acid
  misc_feature (202)..(202): Xaa can be any naturally occurring amino acid
MARVIVVGGGSAGWITAGLLAAEHAEVSISLIESPNVPIIGVGEGTWPSMRRTLQRLGLSEAEFVRDCDASFKQGTWFRDWSCQGDSGYLHPFSLPTEFSSLNLANYWLTFEHSGAFADFVTPQADVVKAGLAPKQCGTPDFAFNVNYGYHFDAGKFAQVLKRHVTXNLGVEXVXAHINGVERAENGDIAXLILDDGELAGXLFVDCSGQQSLLLGQQMGVDLVPADGILFNDRALAVQVPYESPDASIASTTHSTAQDAGWIWDIGLQSRRGLGYVHSASHTTPDQAHEALCRYIEQTAPAIAVADLTFRELSFVPGYRKTFWDHNCVAVGLSAGFIEPLEASALALVEQSANILCDHFPSTRQIMDVVSKRFNEKMHYHWQGIIEFLKLHYVLSQRDDSDYWRANRDPSSCPESLTEKLLLWRQQAPWHDDAPRIDELFPSASYQYVLYGMKQRQMHGKQSSARLAKDLAKAQGAVKMTRERGTQMRAALPSNRDLIRSMTERAGTAA

SEQ ID NO: 82365 - protein, 536 aa, Sphingomonas sp.
  misc_feature (1)..(536): tr|A0A1R1Z208|A0A1R1Z208_9SPHN Tryptophan halogenase OS =Sphingomonas sp. Sph1(2015) OX=1628084 GN=BSZ14_05000 PE=4 SV=1
MTSSSDHQIRRVVIVGGGTAGWMAAAAFARLLNNGYTHVTLVESEEIGTVGVGEATIPPIITFNQMLGLDENDFLAKTAGTFKLGIEFVDWGAKGERYIHPFGRHAQDLQGVHFHQLYLRERSRRALPDIAEWSMSAVAAKAGKFGRAKPDARSPIRELFYAFHFDASLYARYLRGYAERGGVTRVEGRIEAVNPRPEDGYVEAVTLAHGRRIEGDLFIDCSGFRGLLIEEALGTGYESYAQWLPCDRAVAAPCALLNPTEPDPFTRATAREAGWQWRIPLQHRMGNGLVYCSEYLDAETAEAQLLGNLEGELLGDPRHLRFTAGRRRQSWNRNVVALGLSSGFLEPLESTSIHLVQAAIQRLVALFPDKRFDPAERDEFNRQMHDLYEDVRDFIILHYKATRRDDTPFWNRVRTMEVPDSLARKMALWAGKGRLFREGYDLFSNPSWVAVCLGQGLVPESWEPAADALDEDLVAQALEQMRAGYADTAARMPSHGDFLRMTAPSPLAPAMAARSGTEGFDFARAPGTVQSKAPLL

SEQ ID NO: 82366 - protein, 502 aa, Amycolatopsis alba
  misc_feature (1)..(502): tr|A0A229S2E1|A0A229S2E1_9PSEU Tryptophan halogenase OS =Amycolatopsis alba DSM 44262 OX=1125972 GN=CFP75_07825 PE=4 SV=1
METRTENVDVVVVGGGPGGSTAATLLARRGRSVVLLEKEQFPRYQIGESLLPSTVHGICRLLGVEKEMEAAGFMYKRGGSFRWGTNPVPWNFLFSISPEFSGPTSHAYQVERAKFDDILLKHAAASGVDVRERSEVIAAVRDEEAVRGVTYRDADGNEHEISARYVIDASGNRSSLWKATGGERQYSEHFKNVAVFGYFEGGGRLPGSNSGNILCEAFGEGWLWYIPLTDGLTSVGAVISREHVAQIQGDREAALMRFIGKSSYVKDMLTTATRVNDDSMYGEIRIRKDYSYANTKFHAPGIVLVGDAACFIDPVFSTGVHLATYAGVLAARSINSVFEGNVDESRAFAEFEGRYRREYSVFYEFLSSFYNMEQAEDSYFWQARKVTNLSESSFESFVSLVAGGFSHERVLTDPNEVAERFEQSTRQMAEAAERTGGMETDSGQRMNHLFGTPVVREVMEEMNAIQARGVAGEALVEPPLLPDGLVPTEDGLGWAEPAVVPA

SEQ ID NO: 82367 - protein, 531 aa, Bartonella tamiae
  misc_feature (1)..(531): tr|J1JW97|J1JW97_9RHIZ Uncharacterized protein OS=Barto nella tamiae Th239 OX=1094558 GN=ME5_01828 PE=4 SV=1
MIDLRQAKRLAIIGSDIGGWFAALTLRRIFSSAVEIVVFEDPKKTDIGIGEGGLNNLIQSLNRNKIDVEEFVRESGATFKLGTSFEGWRNGEKSDVFYHLSPMIGEQVQELEFIAFGIMPLLAARVSAGADLHSFFPGFSLIQDNASQIEARAVLATKRSGLAPSYHFHHQKAEQYLKSVALKRGIKHRLMKVDKLLLTSEGLTYALKVEGEEVAVDFVVDASGFKRIAMGETYKEKWQSFKDFQILDRVLPFSTAHPQKNPALLTNAVAMSSGWMSQIPLQDQVSASYIFSSKHISEDHARKEIEHYVGHDITPMGLIRFDPGNFETAWRKNVLALGAASGFIDLLEATSSGQMFEQLRNVEKVFIDGRGVIGNNIIDSFNRSNNEGWLGLIDFCRMHFEGGRDDTRFWKDVSKLPRSDRYQELRACFDHRLPRMLDIENYIGHGWAPIFHMVNWLLVGAPLNLITARAGASELLGLPTSLREQITPYMSRLQNMGLNGRNNMNDFQDSELIRLIMSGDMRETDYQQRLG

SEQ ID NO: 82368 - protein, 488 aa, Nostoc sp.
  misc_feature (1)..(488): tr|A0A318AY74|A0A318AY74_9NOSO Tryptophan halogenase OS =Nostoc sp. 3335mG OX=2204170 GN=DMC47_31305 PE=4 SV=1
MSGVETVLVAGRDAPLWLAAATIRQALAPAGVTVRAVELPSGLTPADGHATQPALEALHNRIGIEETVLLRLTGGAYSLGRNIVEATGEISPFMIPFGSFGTRIEGQDFFACWLKARGLGLDVALEHFSLTAAAARQGRILFPDDATDSYGRCDYGYHLPAIPYARSLKALAGHLGVEIHETSAIEAVRGADGIEALLVDGGRRIEADLFVDVGAGLTTGHLRESWRGAFPVDRVLAATGPRFGSIPAYAEIRASEGGWTALHPAASHTQVVHAWSSLHRSDEEAVREAGEVGGLTLGDIAIRAIEPGWLAEPWSQNCVAIGEAADAIDPIHDLGLHLVQLGLVHLLACFPAWASFAAQRAEYNRTMRSAIDRVRDFQSAFYVGNRFAGSFWDVARGVDHSPELEHLVATFAARGEIAPFEDEGFTADIWRALLTGQGIVPDSHVPTIDRIDPQAIKDGFRTMLGFVREQVMSRPTHDDLLRRIAHAP

SEQ ID NO: 82369 - protein, 514 aa, Deltaproteobacteria bacterium
  misc_feature (1)..(514): tr|A0A2D4RRA0|A0A2D4RRA0_9DELT Uncharacterized protein OS=Deltaproteobacteria bacterium OX=2026735 GN=CL915_01 490 PE=4 SV=1
  misc_feature (39)..(39): Xaa can be any naturally occurring amino acid
  misc_feature (152)..(152): Xaa can be any naturally occurring amino acid
MNDNSSSSEKKIVVLGGGTAGWLSAFLLQDFCRQHELSXKVTVIESSKIPVIGVGEGTTAIFKTFLDSFGLEEAEFLRETRGTIKYGIRHKDWRKLGHHYDGPIDDPHFLIPPAGEDGFEYLNSYCVAAGRSVSEAHLFQILLSKGLAPVKXQKDQLVPNHPFLHAYHIDNALVGIYLRKKSKGIRIVDGVVKEAIRDKDNGHIRSLKLDDGALIEGDLFIDCSGFRRILIDKTLGNEWVDYSAELPVNRAMPFFLDQDTSKEIPAYTLAWAQKSGWMWQIPTQDRLGCGYVYCDEYCSPEEAQEEIEFVLGHSIEPRQDLRFQVGRMKDSWRNNCVAVGLSAGFLEPLEATSIHSTLVQLILFTKEYLAATLNEDYSGREDFNQRIAHQFDDFKTFLNIHYRSERRDTPFWEFVHQECLGQESIDRLEQWQKSLPKRQHFQRFLSGLPHVETELYFPVLDGLGLLSQAAARQEMSNRNLKRQAQEELKQLHSKYLKMTQGSLGHREYLSKVSV

SEQ ID NO: 82370 - protein, 553 aa, Nostoc sp.
  misc_feature (1)..(553): tr|A0A318BLT5|A0A318BLT5_9NOSO Tryptophan 7-halogenase OS=Nostoc sp. 3335mG OX=2204170 GN=DMC47_04550 PE=4 SV= 1
MARPIRNITIVGGGTTGWLAAAVLNHRLQWGYAHPDGVSITLIESPDVPIIGVGEATIPGMRHTLNSIDVDEAEFIARTNGTFKLGVKFDDWHKPGGPKRQSYFHPFTGGLQVGGRNPAASLLAYGLPDGVNEDDQLGNLVGHGVAAALAGKSPKRTSDRAYDGALGYAYHVDARLFSDFLREVAVARGVTHVSDTVQSVEKDERGHISALNLEQGGRHEIELVIDCTGFRGLLINEAMGEPFESFADYLPNDRAAVVQIAHREGDLLEPFTTSTAMEHGWRFRIPLQSRIGTGYVHSSAHVDEQAAIDELVRSLNGAGRLTDPRIIRTRNGRSRRSWVGNCVAFGLSSGFLEPLESTAIQFVDFACRRFLQCLPSSEFEPAAIAKFNAQMAGLYDDVRDFLGLHFTLGDRDDTPYWRSIRHDVKRSDQLEECLALWRDALPDVYDPRPNDVFTFWSVSAVLFGKGFYDGPPRVGTDLLPREVWDNYVRRFLRLRPPLLDIMPDHAEALKAICATAETGASASRPPRAAVSPTMGFALGPPVPVMSPDANAAA

SEQ ID NO: 82371 - protein, 470 aa, Sphingomonas sp.
  misc_feature (1)..(470): tr|A0A2U1G268|A0A2U1G268_9SPHN Tryptophan halogenase OS =Sphingomonas sp. URHD0007 OX=1298856 GN=H952_1974 PE=4 SV=1
MSASGAIKSVAIAGGGITAWSAAAALKRRLPKLDVVVVSSPPPPDALADRMTCTLPSIGEFHSDIGLSDEDTIVRARSGIRLGTTFKGWAEGLPDYVHAYGSYGAPVGGIPFHQLWLKERPAAFDTYSLAAELARSARLPGAGAQCGSDDKVGYGLRLTTELYLELMSAYALHLGVVERPGEVADVEIRGGTGFVECLMLADGERIAADLFVDCTGPLALVRSRVDDGFDDWGRWLLCDRLAVETGEADPDQSVLDAVTATVTGWRWRSGTVFSSAHANDSQDSTAIRRGRLSDPWVRNCVAIGDSAVSVEPLEWTNLHLAHSQIDRLVSMMPGADCAAVELAEYNRQCNAEADRVRDFLCMHYIAARRSEPFWKDASAVEPPPSLAHTLSLFAERGRLPYYEEETFARDSWLAVLFGQGFLPRRTDPLADSIPPDEAERALSGYRQSLERVVEAQPVYSLAQLGQRAPS

SEQ ID NO: 82372 - protein, 493 aa, Acinetobacter sp.
  misc_feature (1)..(493): tr|N9LRS5|N9LRS5_9GAMM Uncharacterized protein OS=Acine tobacter sp. ANC 3862 OX=1217705 GN=F900_03016 PE=4 SV= 1
MLDLRGMTRVAILGGGTAGWLAALYLRKALQPHVEVLLISAPEIPIVGVGEGGILNFITALKQLDIPLFEFMSETNAVHKLGFVYEGWRKNNKDPNDYFYHMFPIIEDTSPIVTMMVNHDIPVSYITDSIQLREKNISQIELTHMLTQQKLKNNFNSSFHFDTYKVGQYLRKIALKRGVIHREGLYKDIQRHTENGLVTALLVNDECIPVDFVIDASGFSRQILGKKMMGEWQSFQESLSLNTAIPFHLKHTQKNPDLVTRSTAMNAGWVWQIPLQERIGAGYVYNSNFISAEQAVDEVEQWLGHAIEPIRTITFEAGFYKEIWKGNVLAIGLASGFVEPLEATSIGQTLQQLRLFMNIIFECQAVVSKSSVDYFNKQNANAWYEIRDFIAMHYDTGREDTPFWKFVSKDLVFSSQYLSLKKCWQHRMPKDIELMCYTMGFTSLFGRYSWITIAQALGIIKADATVADLMAVPVEEQKELISFMQRLKKKLGK

SEQ ID NO: 82373 - protein, 511 aa, Rhodanobacteraceae bacterium
  misc_feature (1)..(511): tr|A0A2Z6E389|A0A2Z6E389_9GAMM Tryptophan halogenase OS =Rhodanobacteraceae bacterium Dysh456 OX=2010829 GN=ALS L_0860 PE=4 SV=1
MSDGAEDLRLRRVVIVGGGTAGWISAALLARALGRQVRIVLVESPEIGTVGVGEATIPQIRLINTFLGIDEDELLRAVQGTFKLGIQFCDWHRIGHAYYHAFGEIGAPLGLLPFHAYWLRDRSRPDAADLWAYALNAQACEARRFDRRQRIGTSPLSGLRYAYHFDAGLYARHLRRHCDGRVVEAVEGTVIEVERRAADGFIAAVHLRDGRRIEGDLFIDCSGFRGLLIEGALEAGYEDWSHWLPCDRALAVPSARQGPMRPYTQALARSAGWQWRIPLQHREGNGHVYCSRYLSDDEACAMLLSNLEGEPLAEPRPLRFTAGVRKRFWSHNCIALGLASGFLEPLESTSIHLVQSGLGRLLALLPDRACAPALREEYNRQTRFEYERIRDFLILHYRATERRDTPFWRDCAALPMPASLAHKIALFRAGGRIVREGEELFTEGSWLQVMLGQGIVPHAYPALADTLPGPQFDGFLADLRTLIARAIADMPAHERFIADHCAAGTGAGMLN

SEQ ID NO: 82374 - protein, 500 aa, Novosphingobium taihuense
  misc_feature (1)..(500): tr|A0A562JZ92|A0A562JZ92_9SPHN Tryptophan halogenase OS =Novosphingobium taihuense OX=260085 GN=IQ25_00442 PE=4 SV=1
MTASPLPRRIVIAGGGTAGWMTAAALARTLGPVAQVTLVESEQIGTIGVGESTIPPLVTYNRLLGINEAEFMRATQATFKLGINFENWRVQGENYFHSFGGTGKDHWSAGFQHFWLNGLERGHTEPYGEYCLELKAAEAGKFAHLPDDRMNYAYQLDSALYARFLRAMAEADGTTRIEGKIAHVELDGESGDIAALVLEGDRRIEGDLFIDCTGFRALLIEGALRAGYDDWTHWLPCDSAIAIQTSSVRPPVPYTRAIAHEAGWQWRIPLQHRQGNGVVYCSDYLSHEAALEKLLSTVEGEKLVKPNHIRFRTGARRKQWHRNCVAVGLSGGFMEPLESTSIHLIQRAILRIVRMLPAGPISSRDIAEFNDQQFTDMEQIRDFLVLHYKATDRRDTPFWRHCASMAIPASLEQKIELFRETGRVFRKNEELFAENSWVQVMMGQGINPASHHPVAAKLRDEELAHLLGTLREQVSRTVAALPSHGDYVARYCCAEVPAAA

SEQ ID NO: 82375 - protein, 510 aa, Rhodanobacter sp.
  misc_feature (1)..(510): tr|A0A1V3P5Y3|A0A1V3P5Y3_9GAMM Tryptophan halogenase OS =Rhodanobacter sp. C05 OX=1945855 GN=B0E51_07445 PE=4 S V=1
MRRIVVVGGGTAGWMTALALANSAYGSRLEVTVIESPQVATIGVGEGSTPFLRRFFEDLGIEEAEWMPACNATYKNGITFDKWSTRPGFESYFHAFASMLDNLTMTQFINNVHSRLNHADVHAHPDRFFIASRLARDCRAPKPAHSFPFDIWHGYHFDATLLGAFLLRKALERGVRHVARHVNGVILKDNGDIGSLHLEGGETLDADFFIDCTGFASLLIGKALKTPFVPYAENLFNNAAIALATPIDGPIMSQTISTALTNGWAWKIPLTNRYGNGYVYSTDFCSPEQAETELRAHLGVLDADVPARHLKMRVGRVAESWNRNCLAVGLAQGFIEPLEATTLLFVQRTAYMFVAALEKGDLGAEARANFNQTINVQFEGTRDYIVTHYKTNTRTDTDYWRANAANTHLSNPLKHLLTTWLSSKPIIPGLKKGVFGQGYPTMSWYSLLAGVGLFPDSQSMRPPTPEEAQHDLAQIDNLLERSAMNYPDQRELLQRIPLKSREPSLQVYLW

SEQ ID NO: 82376 - protein, 538 aa, Burkholderia pseudomallei
  misc_feature (1)..(538): tr|A0A0E1SGR6|A0A0E1SGR6_BURPE Tryptophan halogenase Pr nA OS=Burkholderia pseudomallei 305 OX=425067 GN=BURPS3 05_6299 PE=4 SV=1
MSNPIQNIVIVGGGTAGWMAASYLVRALQQQANITLIESAAIPRIGVGEATIPSLQKVFFDFLGIPEREWMPQVNGAFKAAIKFVNWRKSPDRSRDDYFYHLFGSVPNCDGVPLTHYWLRKREQGFRQPMEYACYPQPEALDGKLAPCLPDGTRQMSHAWHFDAHLVADFLKRWAIERGVNRVVDEVVQVHLNERGYISSLSTQEGRTLEADLFIDCSGMRGLLINQALKEPFIDMSDYLLCDSAVASAVPNDDARVGVEPYTSAIAMNSGWTWKIPMLGRFGSGYVFSSKFTSRDEATADFLNLWGLSDKQPLNQIKFRVGRNRRAWVNNCVAIGLSSCFLEPLESTGIYFIYAALYQLVKHFPDTSFDPRLTDAFNAEIVYMFDDCRDFVQAHYFTTSREDTPFWLANRHDLRLSDAIKEKVQRYKAGLPLTTTSFDDSTYYETFDYEFKNFWLNGNYYCIFAGLGLLPDRSLPLLRHRSESIDKAETMFARIRREAERLRTSLPTNYDYLRSLREGDVGLSRSRPGPTLAAPEIL

SEQ ID NO: 82377 - protein, 480 aa, Burkholderia pseudomallei
  misc_feature (1)..(480): tr|A0A0E1SJS8|A0A0E1SJS8_BURPE Putative tryptophan halo genase OS=Burkholderia pseudomallei 305 OX=425067 GN=BU RPS305_6708 PE=4 SV=1
MHLPNRTQVLVIGGGPAGATGAAFLAREGVEVTLVDKEVFPRYHIGESLLPSCLEILTLMGARDTFDRHGFQRKPGAYFNWKGETWKLDFGELGGTYRYSYQVRREEFDHLLLQHARAVGAQVHEGVSVREILFDDGRPCAALCVAQGAEEATTVEFDYLVDASGRNGLMSTRYLDNRKFHEIFRNVAAWGYWEGLSWPDDCAPGSILVSSIPDGWWWAIPLADRPTSVGVVMHRDAFVAARRTGTLEQVYAQALALSPVMANLTEHARLVTPLKTEQDYSYTCDSFAGNGYFLSGDAACFLDPLLSTGVHLAMYSGMLAAASLASILRAEVTEREAAAYYRDSYRQAYLRFLVFVQTFYEAHGKLGYYSKADELSHYMIEAGDIRRAFLNLVSGLEDIADAEQATSHLMGEMSRRIDQNLALRKDKRALSSAIGSTQVEDNARFFDAIEGLPCLSANMALDGLYVSTRPRLGLQRVAAM

SEQ ID NO: 82378 - protein, 507 aa, Caulobacter segnis
  misc_feature (1)..(507): tr|A0A2W5V482|A0A2W5V482_9CAUL Tryptophan halogenase OS =Caulobacter segnis OX=88688 GN=DI526_19500 PE=4 SV=1
MTPVRKIVIVGGGTAGWMSAAGLAAILKGLPVSIQLIESAEIGTVGVGEATVPHIRDFNARVGLDEADFMRRTQATYKLGIEFRDWGEKGQSYIHPFGTFGHSIGGVHFHQHWLRARAQALATGRPFDALERYSLPVMAARAGKFAPPASDPRSLGSTYNYAFQFDAALYALYLRDHAQARGVTRTEGKIVAVDQRPEDGFVTAVVLEDGRRIEGDLFIDCSGFRGLLIEQTLQAGYDDWTRWLPCDRAVAVPCASVEPPVPYTRATADDSGWRWRIPLQHRVGNGYVYCSSYIDDDEAARVLLSKLDGQAQADPRVLRFVTGRRRKAWLKNVVAIGLSSGFLEPLESTSIHLIQVGISTLLELFPSQGFEAADQDEYNRVMALEFERVRDFLVLHYHATQRTDSAFWNDRRTGPIPDSLAYKMDLFRERGTVVGYKDGFFKEPSWVAVYLGQNIMPEHWDPLLDAVDAEQAAKIMAGLSGEISRVVEAMPRHEAFLRTAAGAGAAA

SEQ ID NO: 82379 - protein, 516 aa, Caulobacter segnis
  misc_feature (1)..(516): tr|A0A2W5X889|A0A2W5X889_9CAUL Tryptophan halogenase OS =Caulobacter segnis OX=88688 GN=DI526_14365 PE=4 SV=1
MKRGRSILIVGGGTAGWLTAAYLAKALRIAEQAHLSITVLESPEIGAIGVGEATFPTIRNTLQFLGIDEARFIRQTSATFKQGIRFVDWGHAPTEQGRHSFFHPFEAPFSTDGVSLAPYWLLQDEASRAPFAEAVTIQARVADAARAPKRPHESDFGGPLNYAYHFDAAKLAEVLAERARELGVRHLQGHVGETVLDATGAIARIVSPEQGPLAADLYIDCSGFRAELIGKALNAPFKSARPVLFADRAVACRAPYTRPDAPIQSFTVATAHEAGWLWDIGLSGARGVGCVYSSDHIDDDRAEAILRDYVGGAEVETRRLAFEAGYREKQWIGNCVAVGLSAGFLEPLESTGVVLIEAAVAMIAELFPHTGPVSAPARRFNELMAARYENIIVFLKLHYALSRRPERFWRENTAPETIPERLQDLLEQWRHRPPARFDFILDLETFAFFNYQYILYGMGFETDLADGAAEFPDAAGAAKLFAKIRGFADRATQDLPSHRDLIAQINRFGFEERALA

SEQ ID NO: 82380 - protein, 503 aa, Caulobacter segnis
  misc_feature (1)..(503): tr|A0A2W5X4A8|A0A2W5X4A8_9CAUL Tryptophan halogenase OS =Caulobacter segnis OX=88688 GN=DI526_19485 PE=4 SV=1
MTDHRLRRIVIVGGGTAGWMTAAALGRFLKDGYTTVTLVESEAIGTVGVGESTIPQINIFNRMLGLDENDFVRKTKATFKLGIDFVDWKRIGHAYHHPFGPYGVDMEGVSFHAYWLKLHALGLEDDLGAYSLQTVGARQGKFMRPNGQANSPLGQIAYAFQFDAGLYARFLRDYAEARGVTRREGRIQSVQQDGETGFVTSIALESGEVVEGDLFVDCSGFRGLLIEQALKAGYEDWSQWLLNDRAVAVPCALGGSLAPVTRATARPHGWQWRIPLQHRLGNGYAFCSQFVSEDEATALLLANLDGEPLAEPNLLRFTAGRRKKTWDKNVVAIGLSSGFMEPLESQSIHLIQVGIAQLLAHFPDRRFRQADTDRFNRVMTFEYETIRDFLILHFKATQRDDTPYWDYLREMPIPDYLADKIELFKGSGRVFRENEELFNDTSWFAVMIGQGVMPESYDPMADCMDEGLFKARMAEIKAVIARSAEVMPYHFAFIRANCDAMVG

SEQ ID NO: 82381 - protein, 517 aa, Novosphingobium pentaromativorans
  misc_feature (1)..(517): tr|A0A2W5R1U9|A0A2W5R1U9_9SPHN Tryptophan 7-halogenase OS=Novosphingobium pentaromativorans OX=205844 GN=DI555 _00435 PE=4 SV=1
MTTDYPSSGRVVILGGGTAGWLAAAYLSRTLKMRDISLVESSEIGIIGVGEGTFPTIRTTLAGLGISEAEFLVRADATFKQGVLFNGWATGSDSYFHPFNLPIGGEDEALLPHWIAEDSAARLPWADAVTVQEQVIRAGRAPKRVEDPDFSGPMNYAYHFDAARFADYLRDISVAAGVTRIEGLVAQVEQAEDGDIAALVLADGRRVEGDFFLDCSGFRALLIGQTLGADFTSCSESLFNDRALAMQVPYARPGAPVRPYTLATAHDAGWTWDIGLTERRGVGYVYSSSHCSDDEAEATLRRYLGDEGGSLTPRQLRFETGYRQTQWIGNCVAVGLSAGFFEPLESTGIMLIEAALKMIGEFLVPGERSARQAAARSFNRLMAARFERIVHFLKLHYCITRRTDTAYWRDNTDPASIPEALQDMLAQWRHRPPSRFDFVVDLETFLPPSYHYILYGMGFETRLAAGIQRYPGAQEARDVFARVRAAHAGARGALPDHRALLDHYHARFAPPLDKVSR

SEQ ID NO: 82382 - protein, 506 aa, Rhodanobacter sp.
  misc_feature (1)..(506): tr|A0A1V3P0T5|A0A1V3P0T5_9GAMM Tryptophan halogenase OS =Rhodanobacter sp. C05 OX=1945855 GN=B0E51_12920 PE=4 S V=1
MTDSRIKNIVIVGGGTAGWMAAAAFSKVLGAEYSIRLVESEEIGTVGVGEGTVPHLKLFNDLLGIHDIEFMQNTQGTFKLGVQFNDWSRLGDSYIHGFGTIGHNVSLLPFHQFWIKAMQKGVASDIGAYCINTLAAPRGKFMTSATDVPASSPLADIAYSYQFDATLYAKFLRGYAEKRGVRRTEGKVAQTVLRPDDGFVEAVVLESGERVEGELFIDCSGFRGLLIEQALHTGYIDFTHWLPCDRALAVACEKVEPPTPYTRASARPAGWQWRIPLQHRTGNGYVYSSAHVSDDEAAATLLKHLDGKPMGDPRLLRFTTGVRKKSWNRNVVALGLASGFLEPLESTSIYMIQSGIARLLNLFPQRDFSEIVIDRYNAQATFEYEHIRDFLILHYHATERDDTPFWNQCRTMSIPAQLQDNIRLFKDSGRFFRDAEEMFATTSWVQVMLGQRIMPQSYHPLVDQMPDKELVGFMASVGQVVASCVDAMPSHQAFIDRHCIAPSVVA

SEQ ID NO: 82383 - protein, 508 aa, Novosphingobium taihuense
  misc_feature (1)..(508): tr|A0A562JJD9|A0A562JJD9_9SPHN Tryptophan halogenase OS =Novosphingobium taihuense OX=260085 GN=IQ25_02949 PE=4 SV=1
MSGLDQRRIVIAGGGTAGWMTAAALARVAAPHWQITLVESEEIGTVGVGEATIPMIRLFNQTLGIDEAQFLRETHGTWKLGIAFEGWGAFTDRYIHGFGLTGRSLGVLPFHHYWLRGRAEGFAGPLGEYVLNAVACDASKFAHIDRPQGSALPPMPYAYHFDASLYAAFLRRFAEARGVVRIEGRIVGFDRDALNGDLSALRLDRGEVIEGDIFVDCSGFRSLLLGQEMGVDYVDWSHWLKCDRAVAVPCARVEPLVPYTRSIAQPAGWCWRIPLQHRTGNGHVFCSDTMSEDEATARLIGRLDGEGLAEPRTIRFKAGRRAKFWERNVVAIGLSSGFIEPLESTSIHLIQTAISRVIDFLPNGPVQDADRDAYNRLATFEIERIRDFVILHYVANGRHGEPFWDSLRQMKVNGQLPKALGERMAMFRATGRIVREHDELFDVPGWVQVMIGQGVLPERWHPLADQVAPGSLKAFLDTVRGAYEKDVARMPTHAEYVAHVCRQVPAHA

SEQ ID NO: 82384 - protein, 500 aa, Caulobacter segnis
  misc_feature (1)..(500): tr|A0A2W5V6L3|A0A2W5V6L3_9CAUL Tryptophan halogenase OS =Caulobacter segnis OX=88688 GN=DI526_06785 PE=4 SV=1
MSDQPSPIRSILIVGGGTAGWMAATWLAGRLARQNIAITVVESPDIRTVGVGEATVPAIRDYFRDIGVTEAQVMAATQGTVKLGIEFEGWNRPGGRFFHPFGLYGMPSRGTPFHQFWLRRRAEGDTTPLEAYSLCTQLALANQMMDPPASPPNDLGVFNWAVHFDAGLFAGFLRQKATSELNVTHIEGAVIEVERDGESGLLTGVTLADGKTLAADLFIDCSGFRSLLLGQALGVDYDDWSDLLPCDRAVAMPCERDGPLTPYTRSTALAAGWQWRIPLQHRVGNGYVYASAHISDDEAAATLASRLEGRALAEPNFLRFRTGHRRTFWRKNCVALGLAAGFLEPLESTSIVLIQSGVERLGQLFPDRGFDPALAEEYNRITRLEYARIRDFLLLHYIANGRVGEPMWDAVRSLNPPEALAHKMRMFERRGTFVRYEWESFQDPSWLSMFAGFERLPPAHDPMADYFTPTELDSAMRRMREAIDRAKALAVPHEAFLAAR

SEQ ID NO: 82385 - protein, 491 aa, Sphingomonas yabuuchiae
  misc_feature (1)..(491): tr|A0A147IQL1|A0A147IQL1_9SPHN Tryptophan halogenase OS =Sphingomonas yabuuchiae OX=172044 GN=NS355_11570 PE=4 SV=1
MTDKRIRRIVIMGGGTAGWMTAAALSRALAGQGVAITLVESDAIGTIGVGEATIPTIHWFNQIIGLDERQFMAETQATVKLGIEFVGWNGEGSRYFHPFGTFGPPGDGAMFLHRLIRARADGDMAPTEAYSLTVQAARAGRFTLPVNDRRSLLSTLGYAYHFDAGLYARYLRVLAERGGVRRIEGVVASVQQDGESASVRSLTLDDGQVVAGDLFIDCSGLRALLIGQTLGVAFDDWSHWLPCDRAWAAPSAAESDRTPYTRATAAEAGWRWRIPLQHRVGNGYVFSSRFQDEEAARASLLAGMDGAPLAEPRLIRFIPGMRREAWRANVVAIGLSSGFLEPLESTSIHLIQSGIAKLLSLFPARDCSPLLARQFNRVFGQEMLDVRDFLILHYHATTGRDEPMWRERQKMAIPDTLAEKLAHFRSSGRIVLSSDELFRDASWFAVLDGQGERPGDHNPLVEVVGRDNNLHQLAALRAEIAKTATAMPPLP

SEQ ID NO: 82386 - protein, 531 aa, Rhodanobacter sp.
  misc_feature (1)..(531): tr|A0A1V3NVT0|A0A1V3NVT0_9GAMM Tryptophan halogenase OS =Rhodanobacter sp. C05 OX=1945855 GN=B0E51_17950 PE=4 S V=1
MSRLKKVLVVGGGTAGWLAACYLAKAMNAVHPDSVQVHLVESDHIGLLGVGEATFPSIRGTLAAIGLDERRFLVGATATYKQGIHYRHWVRPPGTPGSDHFFHPFSQPSQRPGGPELLPYWLLGAAPAGVSFADAVTMQSTLVDHGRGPRRSTDPDYQGPMNHAFHFDAACFAKVLAEHGQETLGVKRHVATVERAVLDEQGAIACVVTKELGELTADLYVDCTGLRGTLIGGIMQSPFRSRRDVLFADRAVAMQVPYAKPDAPIPPYTISSAQEAGWIWDIGLQKRRGVGYVYSSRHTDDERAEAVFRRYLGSAGEGLAAMHIKFETGYRPEHWRKNCVAVGLAGGFVEPLESTGIALIELATYLLTHLLPGDTDNMESAARHFNEMMVARYDRIIDFIKMHYCLSQRRDSRFWIDNSDAASIPQTLQEKLAKWKHRPPHRLDFVGDLEMFMTASWQYVLYGMEFQTDFEPMRSAYPHMEAASREFAMIQQAASHALDDLPDHRALVEQLCREHMQRIRPRADMAAAAGS

SEQ ID NO: 82387 - protein, 485 aa, Streptomyces sp.
  misc_feature (1)..(485): tr|A0A2U2ZN18|A0A2U2ZN18_9ACTN Tryptophan halogenase OS =Streptomyces sp. Act143 OX=2200760 GN=DI272_05630 PE=4 SV=1
MTQEYDLIVIGGGPAGSTAATAVARRGHRVLLLERETFPRYQIGESLLPATVHGLCRILGVADEVQRAGFTLKRGGTLRWGRDPEPWQFSFAMTPRVPEPTATAFQVERSRFDEILLRGARRAGAEVREGSTVRRVVADDERVRGVEFTDADGNSRTVHARYVIDASGSTSRVHAEVGGGRVYSDFFRNLAVFGYVAGGARLPEPNTGNIFCAAFDAGWLWYIPLRDDLTSVGAVISPEHTAAVQRDARGTWRDMIDACPEVSRLVAGVPEATEAPYDQVRVRRDWSYWKQSFWRPGMALVGDAACFVDPVLSSGVHLATYGALLAARSVNAALDGSVPEARGFAAFEERYRREYRVFYEFLIAFYDMERNEDSYFWSAKKITEVDLGEAAAFAELAGGLVSRDSVMVRTDWHTAAAQLDGAVGRLAASDGRVNPLLAAPVVGETFRTGNDLQEQALYGGPLDGPGPAAPGGLTVTPDGLSWAKG

SEQ ID NO: 82388 - protein, 522 aa, Alteromonas sp.
  misc_feature (1)..(522): tr|A0A2V3UWA7|A0A2V3UWA7_9ALTE Tryptophan halogenase OS =Alteromonas sp. I10 OX=1938740 GN=BZA03_105198 PE=4 SV =1
MTTATPITHIVVVGGGSAGWLTAGRIAAQHQCATRKDIKVTLIESPNVPIIGVGEGTWPTMRSTLIALGISETTFIKECDATFKQGAKFAKWTTGEEHDFYYHPLMLPQGFSQTNLGPYWQTVAPELNESFSHAVCVQESICEAGCAPKSIRHAEFAGTANYAYHLDAGKFTAFLTKHCTEKLGVHHVLADVNRIESSNNGDIKALHTEQGVKVEGDLFVDCTGFKSMLLGEHYKVPFIPCDDVLFIDRALAVHVPYDTPQSPIASHTISTAQDAGWIWDIGLQSRRGVGHVYSSRHQSKDDAYARLDTYVRQTSTLNGIDGINVKDITIQSGHRQRFWQNNCVAVGLAAGFLEPLEASALVLVELSASMIAEQLPANRAVMDIVAKRFNDTFSYRWQRIIDFLKLHYMLSKREDSAFWRDNRDSHTIPDSLKELLALWQYHPPSDKDFTSNNEVFPAASYQYVLYGMGFTSDLGAHQQWVNADFAKQQLMQNRKARGMAVEKLPKHRELINKIHQFGLQAV

SEQ ID NO: 82389 - protein, 506 aa, Xanthomonas sp.
  misc_feature (1)..(506): tr|A0A3A5ED82|A0A3A5ED82_9XANT Tryptophan halogenase OS =Xanthomonas sp. CFBP 7698 OX=2082399 GN=XnspCFBP7698_2 0520 PE=4 SV=1
MIPAPLRNIVIVGGGTAGWMAAAAFARVLGPSFNVQLIESEQLGTVGVGEATVPHIKAFNNLLGIDEAEFVRQTQGSFKLGIEFVDWQRPGTSYMHGFGTQIGHPLGLLPFHQYWIKQHARGKAQPLGAYTLNTVAAVRGKFMTSPGDVPATSPLANIAYAYHFDAALYARFLRGFAEARGVTRIEGMVEQVQLHPESGNVVALHLASGQVIAGDLFIDCSGFRGLLIEDALHTGYQDFTHWLPCDRALAVPCENVGPPTPYTRCTARAAGWQWRIPLQHRTGNGYVYCSAHISDDEAAATLLANLDGKPLAAPRPLRFTTGRRKQCWNRNVVALGLASGFLEPLESTSIHLIQSGISKLLELFPREGISPVLLQRYNDRLAFEFDRIRDFLLLHYHATERDDSAFWQHCRQMPITPELQATLDLFRDSGRFYRNAEEMFAEISWVQVMVGQGIVPTGYHPLVDQVPDRDAEGFLASVAQTIAHCVDVMPTHQQFIDRFCKAPATR

SEQ ID NO: 82390 - protein, 500 aa, Alteromonas sp.
  misc_feature (1)..(500): tr|A0A2V3V3W2|A0A2V3V3W2_9ALTE Tryptophan halogenase OS =Alteromonas sp. I10 OX=1938740 GN=BZA03_102477 PE=4 SV =1
MTTPHRIVIAGGGTAGWMAANLLAHRWANQAVTITLIESEDIGTIGVGEGSTPTLKRFFQTLDIPEYDWMEECQATYKVNIKFTGWNGNNSHNYSHPFISQLDVFSERAFHVNALTRRLGLDVETRPDKFLMAGYLAKKNLAPLPSHNFPFDIEYGYHFDSLKLGRFLRERAKSKGVYHVVGNIESVHTSPSGDISHLVCQDGQKLDGDLFIDCTGFSGLLLQKTLGVPFRDFSDNLFNDSAVVLPTPACANLPVETESVAMSNGWRWQIPLRNRTGNGYVYSQQYQEKDAAECELRRALGMENTDVEAKHLSMRVGQCERHWEKNCLALGLSQGFIEPLEATALHLVQTSIELFADNYSFNETSAQQRQAFNREVSERFERVRDYIVCHYKLNGRNDSDYWRDNRANMKLSESLLSLLDVWYRKGDIVEEIKRQGIGRHFSTTSWHCLLSGYGVFPPLALNQPASLKESGDLFEEKKLAAFFNRCSLNFDKQSTLFNAG

SEQ ID NO: 82391 - protein, 501 aa, Sphingomonas yabuuchiae
  misc_feature (1)..(501): tr|A0A147IUE9|A0A147IUE9_9SPHN Tryptophan halogenase OS =Sphingomonas yabuuchiae OX=172044 GN=NS355_07685 PE=4 SV=1
MTPDAPLRSIAIIGGGTAGWMAAAALARVLGPQGPTITLVESEEIGTVGVGEATIPPIQAFNALLGIDEKDFVRATGGTFKLGIEFVDWWQRGQRYFHPFGVYGIDVGAVPFEALWRRLHQMGEAEPLAAYSICTAAAMAGRFGRPQPGNTPLAQIGYAFHFDATLYAAFLRRHAEGAGVARIEGRVVEVGLHPETGFIEGVTLADGARLSADLFIDCSGFRSLLLGQALGTGFEDWGHWLPNDRAVAVPSAVTGPPAPYTRSTAKPAGWQWRIPLQHRIGNGHVYASAHISDDEAVATLLEGLDGEALADPRLLRFRTGRRNAFWVRNCVALGLASGFMEPLESTSIHLAQAGIARLLEMLPTRAFEGADIRRYNRLMTAEFESIRDFLILHFHANSRGDTAYWRDLAAMPIPESLAERIAIYRRTGRVYREADELFSRTSWLAVMDGQGLNADSSDPIALGVSVEAARARLGRIAEMTRAAVQHLPAHEEFIARHCGVR

SEQ ID NO: 82392 - protein, 501 aa, Alphaproteobacteria bacterium
  misc_feature (1)..(501): tr|A0A257HLC6|A0A257HLC6_9PROT Tryptophan halogenase OS =Alphaproteobacteria bacterium PA1 OX=2015569 GN=CFE27_ 11620 PE=4 SV=1
MAIETIVIVGGGTAGWMAAAALSRLRAGKPVNVIVIESEQIGTVGVGEATIPPFLDFNRLLEIDEREMLSAVQGSFKLGIQFVNWGKIGDSYIHPFGNYGYQVDGISFHHIWHKFKEAGDKRPIQIFNIETMAAHYGRFARTEDYQRDDLPPINYAYHLDAGRYAKYLRAYAEKRGAIRIEGKVNDVALDGETGFVTSVTMDNGVVIEGDLFVDCSGFRGLLIEQALKTGYDDWSNFLPCNRAVALPCKRDDGSPPPPYTRATAHRAGWQWQVPLQHRNGNGHVYCSEFMSDDEALDILVNNIAGKPQAEPNFLRFVTGRRKKFWNKNVVALGLAAGFMEPLESTSIHLINTGINKLIALLSLDGITQAQEDAFNRLTGKEYARIRDFLILHYNATTRDDSPFWNYCRNMAVPESLTEKTDLFRLNGQIFREDDELFTETSWAAVMMGQGISMQGHNAMADALMNTKTTDELRGIEQSIQFVVQHMPSHRDYLERYCPAPM

SEQ ID NO: 82393 - protein, 527 aa, Croceicoccus ponticola
  misc_feature (1)..(527): tr|A0A437H1E5|A0A437H1E5_9SPHN Tryptophan 7-halogenase OS=Croceicoccus ponticola OX=2217664 GN=EKN06_03925 PE= 4 SV=1
MGGTVDHVVIAGGGTAGWLAACTIAARSAKEVARPIAVTLVEAPDIPTIGVGEGTWPTIRSTLAAIGIAEDEFILACDASFKQGSRFDGWRNGGAGDSYLHPFTAPAGAVHRAAVAAWQAKGANTGHGFADTVTAQTAVCARDLAPRQTGMPAYAGALNYAYHLDAGKLVDLLRRHAVGKLGVTHLSARIDGVERADNDDIAALMLDNGKRLTGDLFIDCTGMRGLLIAGEMGASWIDRSDVLFNDRALASQVATAPESAIASVTVGTAHDAGWIWDIALPTRRGIGCVYSSRFCTDDAALATLCDYVARAVPGAPPPEPRLLRFESGHRDRFWVGNCLAIGLSAGFVEPLEASAIVLIELSLRALMDGFPHDRAEMAIHARRFDSLFRYRWDRIVEFLKLHYVLSDRTGAYWQAHRDSVPADLADMLALWQRNVPGPADFPMVEEIFPAASWQYVLYGMGQAVPDFAGQGPANNDPAHNDPAHNDFADDVHRRARQLAAALPTNRSYLDTLRGDRARVAQVTGSLA

SEQ ID NO: 82394 - protein, 509 aa, Porphyrobacter sp.
  misc_feature (1)..(509): tr|A0A0N1AVW0|A0A0N1AVW0_9SPHN Tryptophan halogenase OS =Porphyrobacter sp. AAP60 OX=1523423 GN=IP79_14400 PE=4 SV=1
MGDGSVRKLVIVGGGTAGWIAAAAFSRLLGQRLTIELVESETIGTVGVGEATIPQIIRLNTILGIDEHDFLRRTSGTFKLGIEFVDWGSLGSRYLHTFGDTGMTIGNVAFHHHWRRSVTGQNAPDAKGLWDYSLHQHAADQARFGKLDRVGNTAMTGLAYAYHFDASRYALYLRDYAEARGVTRTEGMVESVTRDGTSGDITAITLAGGREVAGDFFIDCTGFRSLLLGGELGVQYDDWSRWLPCDRALAVPSERLPTLVPYTRATAKAAGWQWRIPLQHRTGNGHVYSSGFISDDAAADTLLAGLDTKALGDPRPIRFTTGRRQTFWAQNCAAIGLSSGFLEPLESTSIHLIQSHISRLIQLFPRSSHADAERAEYNRRCADEFDQIRDFLILHYHRTDRDDSEFWRYCKHMAVPDSLTHKLELFAASGRVGRDADDLFRDASWVQVMLGQGIMPADYDPMADQMAPAQLAEFLANLRTLVTRAVAGLPTHEDYLRQHCAADPASMAA

SEQ ID NO: 82395 - protein, 511 aa, Porphyrobacter sp.
  misc_feature (1)..(511): tr|A0A0N1L8F3|A0A0N1L8F3_9SPHN Tryptophan halogenase OS =Porphyrobacter sp. AAP60 OX=1523423 GN=IP79_09825 PE=4 SV=1
MSSEASQPAKSPVRVVVLGGGTAGWMTAAGIARLLPDLASVQLVESEEIGIVGVGEATLPHIRGFVEKLGIDEAAFMKATHATFKLGIDFRDFGRIGESYIHPFGSFGEEVGGVGFHHYWLELARHGMARDLGDYSLAVAAAKANRFRPPSQDDSLASTYGYAYQFDATLFGPFMREFGLGIGIERHEGRVVTVERDGASGDVTALVLADGRRIEGDLFIDCSGFRSILLGQELDVPWEDWTHWLPCDRAAAMPCTHATDDIRPYTTATAMPAGWRWQIPLQHRMGNGYVFSSAHISEEQACDAIRASAEGTPLADPRILKFRPGRRAQSWSHNVIGVGLASGFLEPLESTSIYLAQMAITYLIELFPERGAIDPRDRDEFNRLVDMEYDRVRDFLILHYNATTRDDSEFWNHVRTMRLPDSLEGKLELWRKAGRIEKYSDGLFYDASWIAVYVGQGLLPEAHDPRAAMIAPDALARATERLRMAVTGEVAAMPGHRDFLRAEAARLAEAA

SEQ ID NO: 82396 - protein, 493 aa, Sphingomonas yabuuchiae
  misc_feature (1)..(493): tr|A0A147IR97|A0A147IR97_9SPHN Tryptophan halogenase OS =Sphingomonas yabuuchiae OX=172044 GN=NS355_10755 PE=4 SV=1
MSTPRRIVIAGGGTAGWMAAAALARTLGRAVTVTLVESDAIGTIGVGESTIPPIITFNRLLGINEAEFMAATQATFKLGIQFDGWKGPEDRYFHSFGLTGKDHWAAGFQHFWLDGLSRGHDAPYEDYCLELIAAREGRFAHLPDERMNYAYQLDSTLYGRFLRGMAEGDNAVRIEGRIAEVDLDGDTGDIAALVLDGGRRVEGDLFLDCTGFRALLIERALHVGFDDWSHYLPCDAAVAVQTESVRPPVPYTRAIAHEAGWQWRIPLQHRAGNGIVYCSRYIDHDAARERLLSTVEGKVLTEPNMLRFQTGARRKQWHRNCIAVGLSGGFLEPLESTSIHLIQRAILRLIRLLPGGPISAHDVAEFNDQQMTDMLQIRDFLILHYKVHERRDSAFWRQCADMEVPDSLAHRIALFRETGRVFRRNDELFAENSWVQVMMGQGIMPEAHHPITARLTDEELERLLSTLRQNIATTVRGLPAHPDYVARHCGTAA

SEQ ID NO: 82397 - protein, 489 aa, Sphingomonas yabuuchiae
  misc_feature (1)..(489): tr|A0A147IWU6|A0A147IWU6_9SPHN Tryptophan halogenase OS =Sphingomonas yabuuchiae OX=172044 GN=NS355_05195 PE=4 SV=1
MSAPIRHVLVAGSGLTAWSAAAALKRRAPFLDVTLLATPPAADALADRIACTLPSLPGFLADLGIGEDDGVTRTGAGYRLGSRFSGWAEGLPDYVHAYDGYGHAIGPAAFHLHWVRAARDGHAAPFDAYCPAAQLARAGGFVPPSPGTPFAGQDYGLTLDLPRQVAMMRAFALHVGVHEVTDSIAQVQVDTTGHVTAIAVQHGPALTAHLYIDATGPAALLRGSIDDAWQDWRDWLPCDRVLLGTQVLGEGAPVLTPVIAHAAGWRWSSGEQVGMAYGSEHLSDPEAAAMLTRDGTVVDAPIVIRPGTRPQAWRGNCIAIGDAATQVEPLEWCNLHLALSAIDRLVTMLPDTAMAEVEAADFNRQTLAEAERVRDFLAAHYRTARRPEPMWQAVAQAEPPSSLAHTLGQFGERGRLPFYEEETFTRDSWAAILLGQGYLPRRIDPLVHGIPAPQVDAAMARMTDAIAAALPHVPAHAQWRAAQMRRLAR

SEQ ID NO: 82398 - protein, 515 aa, Sphingomonas sp.
  misc_feature (1)..(515): tr|A0A514WLG2|A0A514WLG2_9SPHN Tryptophan halogenase OS =Sphingomonas sp. IC081 OX=304378 GN=DM450_14440 PE=4 S V=1
MAPDTVSQPIRSILIVGGGTAGWMAANLLATRLRRLPIEITLVESPDIGTVGVGEATVPAIRDYFKAIGVTEAEVMQATQGTVKLGIEFRDWRAPGTSFFHPFGRYGVDAFSVPFHQYWLKRRMAGDETPLAEYCLPTQVAMRNLMLLPPEQPVNDLGVFDWAIHFDAGLFARFLAERARDTLGVRHVQGTISAASRDGESGRIASVVLSDGRSLEADLFVDCSGFRSLLLGQTLEVPYEDWTHLLPCDRAVAMPCAHGGELTPYTRSTAREAGWQWRIPLQHRVGNGYVYSSRHISDDEATATLIASLEGEALAEPNMLRFRTGHRTKVWEKNCVALGLAAGFLEPLESTSIVLIQSGIERLLAHFPDRDFDPSLADEFNRITALEYARIRDFLLLHYWGGQRGEALWQECRALDLPETLAQRIRAYKGAGKLPRFEWDSFQPPSWLSMFAGFEIWPARYDPLADQFTAEELGGTFAQMRAAIARAVSLAGSHEQFIAETCAAPAAQQSAHQPA

SEQ ID NO: 82399 - protein, 500 aa, Novosphingobium taihuense
  misc_feature (1)..(500): tr|A0A562JJF4|A0A562JJF4_9SPHN Tryptophan halogenase OS =Novosphingobium taihuense OX=260085 GN=IQ25_02942 PE=4 SV=1
MIDSGLMIRSVAVIGGGTAGWMTAAALAQALRHNCSITLVESDEIGTVGVGEATIPPIRTFNETLQIDEREFVRKTKGSFKLGIEFVDWGSLGNSYFHPFGPHGRAFDIVNLHHYWLRARESGETAPLDEHSMAWALAKENRFAPPMPDQRNVLSTYDYAYHFDAGLYARFLREYSEAKGVTRVEGKVASVEQDAESGFVTGVTLEDGRKVEAELFVDCSGFRGLLIEGALKAGYKDWTHWLPCDRAMAVPCKNVGPLTPYTRSTAREAGWQWRIPLQHRTGNGYVFCSHFLSEDQAAEKLLSRLDGKALADPRPLRFVTGRRKSFWEKNVIAIGLSSGFMEPLESTSIHLIQAGISKLLALFPDRTFDPLVIEEYNRIAINEYERIRDFLILHYKLTERDDSELWRYCAAMDIPDTLHTKIEHFRRYGRLVQRDADLFGAPSWLAVHIGQGNIPERTDPLADYRGIDGREWLAKLRGAMHHAALQQPTHEQFIGANCAA

SEQ ID NO: 82400 - protein, 446 aa, Halobacteriovorax sp.
  misc_feature (1)..(446): tr|A0A2D5YN24|A0A2D5YN24_9PROT Tryptophan halogenase (F ragment) OS=Halobacteriovorax sp. OX=2020862 GN=CME69_0 5535 PE=4 SV=1
MNKPIHIVIAGGGTAGWMAANYFAHKWSSGKVNITLVESSDIGIIGVGEGSTPTLKRFFDELNIPENDWMPKCNATYKVSIQFNNWSPGSGINQYRHPFISQTDTFTQRAFEVNCRTRRLGLDTHVKPEDFLINGMLAKQNKAPLTPDNFPFRMEYGYHFDSALLGNYLRELAIGKGVTHVNAIISDVVLHPSGDISHLVTDKGIIEGDFFLDCTGFSSTLLQQALGVKFNSYSENLFNDSAVVLPTQAQKNIKVETQSTALSSGWCWTIPLQNRTGNGYVYSTAHLSKDQAEEELRRHLGFESTDVEARHLKMKVGQVGQHWHKNCLALGLSQGFIEPLEATALHLVQICIEYFSDTFEKNGFSTKPCSNYNSFARERFDRVRDYIVAHYKLNTREDSDYWHDNRENMVMSDSLNSILSAWFSRQDLASEIKRQNIGMHWDSVSW

SEQ ID NO: 82401 - protein, 504 aa, Sphingomonas yabuuchiae
  misc_feature (1)..(504): tr|A0A147IS66|A0A147IS66_9SPHN Tryptophan halogenase OS =Sphingomonas yabuuchiae OX=172044 GN=NS355_10255 PE=4 SV=1
MTTPSPDAIRSVVIVGGGTAGWMTAAALAHAMPHGLSITLVESDAIGTVGVGEATIPPIRLFNQTLGIDEAEFLRETKGSFKLGIEFVGWGRAGHRYFHPFGTHGKSFDLVAVHQHWLAAGGPDSDIAFDDLSMAWGAGKRGRFAQPMADPRSVASTFDYAYHFDAGLYARFLRRYAEARGVVRVEGKIAGHALEDTLGHVASVTLDDGRVLAGDLFVDCSGFRGLLIEEALGTGYEEWAHWLPCDRAVAMPCATGGDGLTPYTRSTAREAGWQWRIPLQHRTGNGYVYCSRHISDDQATATLMANLDGQALGDPRFLRFTTGRRKLMWNRNVVAIGLSSGFMEPLESTSIHLIQAGIAKLLAYFPTKAFEPAGIAEYNRVAITEYERIRDFLILHYKLTERTDSALWRDCAGMDIPDTLAMKIDHFRAAGRLVARDMDLFGPASWAAVHIGQFNMPEGLDPLLAYGDPAQSRVFVAKLAGAIGQMAESMPTHAQWLTKIGATQ

SEQ ID NO: 82402 - protein, 499 aa, Phenylobacterium zucineum
  misc_feature (1)..(499): tr|B4R8W6|B4R8W6_PHEZH Tryptophan halogenase OS=Phenylo bacterium zucineum (strain HLK1) OX=450851 GN=PHZ_c2922 PE=4 SV=1
MEQVVKKVVVAGGGSAGWMAAAALSRQLGGLLDITLVESDAIGTVGVGESTIPTARTFVALLGLDEREFMRETGATFKLGILFENWGEVGDRYIHSFGQVGKSTLMAHFHHMWMEARAQGFGGDLGDYCLELRASEEGKFYAADDFPMNYAYHIDATRFGRFLRRRCENNGVRRVEGKIQRVEQHPETGFITALVLESGERVEGDLFVDATGFRGLLIEQTLKAGFEDWGQWLPNDRAVAVQTATSEPPLPLTRAIAHRAGWQWGIPLQHREGNGWVYCSEFMSDDEARDSFLGQLKGEKLTEPWFLRFRPGRRRKAWDKNCVAIGLAGGFIEPLEATSLHITMIAITRLLQLFPFAGVNAALQTRFNFLADQEIQRVRDFIILHYKATERTDSPYWDRCRTMQIPDSLAERIELFRETAQLYHVPGELFLIDSWLQVMLGQRIRPKTHHRMGALMPPERLRGALGDLKGNVDRAVGKLPSHQEFLDRYCPVSPAEAAA

SEQ ID NO: 82403 - protein, 515 aa, Porphyrobacter sp.
  misc_feature (1)..(515): tr|A0A0N1L9A9|A0A0N1L9A9_9SPHN Tryptophan halogenase OS =Porphyrobacter sp. AAP60 OX=1523423 GN=IP79_09840 PE=4 SV=1
MTGASAPKPVTKIVIVGGGTAGWMTAAALTRVLGGMPGLSITLVESDAIGTVGVGEATIPQIIGFNRLLGLDEAQFMRETRATYKLGIEFVDWLRPGHAYVHPFGSFGIDMLGIEFQHFWLRGQQVGDTSPIDDYSIAAVAGKSGRFAWPRADNPKSPLSKLSYAFQFDAGRYAKFLRAFAENGGANRIEGRITEVLQDGESGFVTALRLEDEREIAGELFIDCSGFRSLLLGQTLGVPFTDWSKWLPCDSAVAVPCELGGRNEPLTRSTARPAGWQWRIPLQHRIGNGHVFSSAHIDRGAATDLLLANLDGKPLADPNQLAFKAGHRARAWDKNVVALGLASGFLEPLESTSIHLVQSGIARLLALFPDTGFSAVERDRFNTDTSREYLNIRDFLVLHYRASERDDSEFWRYCRNLEAPDGLVEKIDMFRSSGRIFRENNELFTEASWLSVMLSQGITPQGYHPAAHMLDDAETRTRLAHIRDVIRNTVDQLPSQAEFLRQSGGAIAAEEYLTA

SEQ ID NO: 82404 - protein, 421 aa, Amycolatopsis keratiniphila
  misc_feature (1)..(421): tr|A0A1W2LKM3|A0A1W2LKM3_9PSEU Tryptophan halogenase OS =Amycolatopsis keratiniphila subsp. keratiniphila OX=22 7715 GN=AVR91_0234760 PE=4 SV=1
MSATLHGMPERFDVIVIGGGPAGATCAGLLAKEGRTVLVLERERFPRYHIGESLIPVGMRPLQELDLLDRMEARGFERKYGGSLVWGNRDVPWNFSFMKASEGTYAYHTRRADLDTLILDRARELGAYVVEETTVKDVIQSDTGRVTGVRFTLRGSAGDYEASASLVVDASGQSRVIGRKFSDITWHNELRNVAVWTYYDNCDRLPGDEWTNILIEGTADGWFWGIPIDKGTMSVGYVTKSDLANADDQSLEQLFLRERDKTTRLKGLLANARQHAGYRTARDWSYTNETFYGDGWVLVGDAAAFVDPLFSTGVALATLAGSSLSKVVNRILDHPAIEEKALDRYAGNYRAFFDEIRNFVERFYDRTKYKEYYYDLAQEIVDPEQLHAPSTDFVTLISGLSGKHPLLKINLDDLVANVTEP

SEQ ID NO: 82405 - protein, 526 aa, Novosphingobium pentaromativorans
  misc_feature (1)..(526): tr|A0A2W5NSI1|A0A2W5NSI1_9SPHN Tryptophan 7-halogenase OS=Novosphingobium pentaromativorans OX=205844 GN=DI555 _03955 PE=4 SV=1
MDAKVKRVLVVGGGTAGWLTAGYLAKMLGADLPGGVGITLVESPEIGIIGVGEGTFPTIRRTLERIGVREKDLLRRCEATFKQGVKFVDWLHPAGQGGSDNYLHGFQEADDRNGGPEYLPYWLLGEAGKMPWDEASTPQKRAVDALRGPKLATHPEYAGVLNYAFHFDAGALAELLRDQGVANGVTHIADTVQEVLCGGDGAIAGVRTQKNGMLEADLYIDCTGFRAELIGKAMGRKWKSCKDILFCDSAIAAQVPYDSPDAPIQSCTLSTARDAGWIWDIGLQTRRGTGYVYSSAHCDAEEAERTLRSYLGAQGQTATTRRLQFDAGYREVNWYKNCVAVGLSSGFFEPLEATGIVFSEIAAGAIANLFPWAGDYETSARQFNATMLERYERARDFLKMHYSLTRRTDTDFWRDNVRTETIPGSLLELLDRWRHRPPNEKDFNPNIDIFPATSWQCVLYGMGWKTDLSAKAGVMRLRPEAHQAFEQVQRQSDYAVANLPDNRALLQQMLAGDTVSTIKAFAATAG

SEQ ID NO: 82406 - protein, 509 aa, Croceicoccus ponticola
  misc_feature (1)..(509): tr|A0A437GWJ8|A0A437GWJ8_9SPHN Tryptophan 7-halogenase OS=Croceicoccus ponticola OX=2217664 GN=EKN06_10630 PE= 4 SV=1
MPAPITSITIVGGGTTGWLAAAFLATRFEPGITSGKMTITVVESPTIPIIGVGESLSPAAPETLKTLGVPERAFMVETDATFKLAGYFLNWDVGARGQPMSWVNPFIGYLTAGYEFERFELAGKPFGDAPDYAATISPCRDAIERTRGPRRIGQGDFEAVLRYAYHTDASRYAGLLKKVALHRGVVHVADDVVDVALREDGFVDSLLLAKGGRHPVELVIDATGFAGVILKKALGIGHVDYSQTLLNDRAAVIQLDWPAMGEIEPATRATALGHGWAFRVPLYHRTGNGYVYSSRFISDDDARVEFAAHLGDPKLAERMRIIPMRIGRASRNWVGNCIAMGLSSGFVEPLEASAIYTVETSLKWLMNYFPTSDFPQSLADRYNQRTAALYDEVVEYIALHYHLSNRADTAYWRAQRTEPKLPERLAENLAIWRHALPVQADVQPTNYFDHNTYLAALFGKGFYKGGELRPERTLDPGEWAQLRQTIDDTHRRAINALPGHRELLDSFRR

SEQ ID NO: 82407 - protein, 505 aa, Sphingomonas yabuuchiae
  misc_feature (1)..(505): tr|A0A147IWX4|A0A147IWX4_9SPHN Tryptophan halogenase OS =Sphingomonas yabuuchiae OX=172044 GN=NS355_05200 PE=4 SV=1
MTKVTNDVVRVVIVGGGTAGWMAGAALTRLLSGQCSVRLIESEAIGVVGVGEATLPHIRSFNERLGIPEAEFMARTRATFKLGIEFRDWGRIGDSYIHPFGTFGRGAGAIDFHHYWSRLAREGQDLPPLDELSYACTLAREARFEHPDQGRGGLSSTFGYAYQFDALLFAPYLRSLAEEAGAVRTEGMVVDVERDGESGLIRSVTLADGERVEGDLFIDCSGFRSLLLGQALDEPFEDWSQWLPTDRAVAMPCRTETAVTPYTSAIAMPAGWRWRIPLQHRTGNGYVYASDFISDGDAARALEQEVEGEKLAEPRLLRFKAGRRRRSWVGNCVAIGLASGFLEPLESTSIYLVQQAITALIELFPGREMDASDRDEFNRVIDLEYDRIRDFLILHYHATSRTDSPFWNYVRTMPIPDSLGEKLELWRRRGRVVKYREGVFLDASWIAVYLGQGIVPEGWDPRADVAGTGDLVQAVRSLRSEIAGEVAMRPDHRAFLERYCPMVAA

SEQ ID NO: 82408 - protein, 501 aa, Croceicoccus ponticola
  misc_feature (1)..(501): tr|A0A437H177|A0A437H177_9SPHN Tryptophan 7-halogenase OS=Croceicoccus ponticola OX=2217664 GN=EKN06_03910 PE= 4 SV=1
MKNDPAKPLRIVVAGGGTAGWMTAAALSRTLGRTASVTLVESDMIGTVGVGESTIPPLVNYLRLLKIAEADFMRATHATFKLGIQFDNWRVPGESYFHSFGAAGQDHWAAGFQHFWMEGKERGHDAPYDDYCIELIAAREGKFAHLPDNRMNYAFQLDATAFARFLRGIAEGEGTTRIEGKIADVNLDGESGDIAAITLENGTRIEGDLFVDCTGFRALLMGQALHIGYDDWTHYLPCDSAIAVQTSSVRPPVPYTRAMAHDAGWQWRIPLQHRVGNGIVYCSRYLDHDAAEERLLGNIEGEATTKPNRLRFTTGARRKQWHRNCVAVGLSSGFMEPLESTSIHLIQRAVLRIARMLPAGRVSQRDVDEFNHQQLLDMDQIRDFLILHYKATDRRDSPFWRHCAAMEIPDSLDHKIELFRETGRVFRSSEELFAENSWIQVMMGQGIMPQSHHPIAGKLSDAELDHLLRSLRDNIAKTVATLPSHGDYVTRYCGAQAVEAA

SEQ ID NO: 82409 - protein, 518 aa, Sphingomonas sp.
  misc_feature (1)..(518): tr|A0A514WNF8|A0A514WNF8_9SPHN Tryptophan halogenase OS =Sphingomonas sp. IC081 OX=304378 GN=DM450_20080 PE=4 S V=1
MTSDDPSSGRIVILGGGTAGWLAAAYLARTLGMRDVVLVESSRIGIIGVGEGTFPTIRTTLAGLGIGEAEFLTRADATFKQGVLFEGWATGADSYFHPFNMPVGGEDEALLPHWIAAAEDPARPSWADAVTVQERLIRAGRAPKRPGDPDFSGPMNYAYHFDAARFADYLRDISIAAGVTRIEGTVASAERAPDGDIAALMLTDGRRVAGGFFLDCSGFSALLIGKTLGAGFTSCADHLFNDRALALQLPYDCPDAPVRPYTLATAHDAGWTWDIGLSERRGIGYVYSSRHCSDEDAEATLRRYLGPQGAALAPRPLRFETGYRETQWIGNCVALGLSAGFFEPLESTGIMLIEAALKMIGDFLVPADQTARKAAARSFNRLMAARFEHIVTFLKLHYCITRRTDTAYWRDNTDPASIPESLQDMLLQWRRRPPSRFDFVVDLETFLPPSYHYILYGMGFETRLAAGERHYPGASEAREAFARVRTAQSGALGALPDHRSLLNHYHARTGTAPAKVSR

SEQ ID NO: 82410 - protein, 515 aa, Sphingomonas yabuuchiae
  misc_feature (1)..(515): tr|A0A147IYW0|A0A147IYW0_9SPHN Tryptophan halogenase OS =Sphingomonas yabuuchiae OX=172044 GN=NS355_01965 PE=4 SV=1
MVQPVQNIVIVGGGTAGWLTAGVIAARHQGRRPHGFTVTLVESPNVPIIGVGEGTWPTLRTTLRKMGVSETAFFRECDASFKQGARFNRWTTGAADDGYYHPLMLPQSFAQVNLAPHWLTAEGEDVSFCDAVTPQGRICEAGLAPKTIATPEYEAIANYAYHLDAGKFADFLRRHCCEQLGVRHVLADVEEVLLTESGDIRSVRTAQAGEVTGELFVDCTGFRSLLLGEAMGVPFKPLNDVLFCDTALAIQVPYDDPEAPIASHTISTAQSSGWIWDIGLPTRRGVGHVFSSSHIDRDAAERELRAYLGEAGHDLPVRELKIHAGHRTRFWERNCVGVGLAAGFLEPLEASAIVLIELSAKLIAEQMPACREVMDTVAKRFNETTLYRWGRIVDFLKLHYSLTKRTDSDFWRDNCRPETMPDRLQELMELWRYQAPWMHDEFDRVEEVFPSASYQYVLYGMGQRTDIAPGSLIAETVSAQRARRENDVQTGRLLAGLPKHRDLIRKIVERGLPTI

SEQ ID NO: 82411 - protein, 487 aa, Porphyrobacter dokdonensis
  misc_feature (1)..(487): tr|A0A1A7BHW3|A0A1A7BHW3_9SPHN Tryptophan halogenase OS =Porphyrobacter dokdonensis DSW-74 OX=1300349 GN=I603_0 274 PE=4 SV=1
MAAAALSRLKAGRPVEITLIESEAIGTVGVGEATIPPFVGFNQLIGVDEREMLSAVGGTFKLGIQFENWGRIGDSYIHPFGAYGYTMGGISFHHVWHRMAQGGDKRPIQVFNLETMAAYFGKFARTEDYKRDDLPPVNYAYHLDAGRYAAFLRQLAESRGVVRQEGRIADAAIDGESGFVTGVTLDDGRQFAGDLFIDCSGFRGLLIEQSLKTGYEDWTHYLPCDRAVALPCKRDDGSPPPPFTRATAHRAGWQWQVPLQHRNGNGHVYCSAHMEDQEALDILLGNIAGKPQAEPNWLRFTTGRRKKFWNKNVVALGLAAGFMEPLESTSIHLINTGIDKLLSLLSLDGITQAQEDAFNRLTGREYARIRDFLILHYNATSRTDSDFWNYLRTMPVPDTLTEKVELFKANGQIFREEDELFTETSWAAVMMGQGIAMGSHNAMADALDPAKTAEEVNEMEQSIRYLVQHMPGHGDYLARYCPAPAAA

SEQ ID NO: 82412 - protein, 515 aa, Sphingomonas yabuuchiae
  misc_feature (1)..(515): tr|A0A147IMI8|A0A147IMI8_9SPHN Tryptophan halogenase OS =Sphingomonas yabuuchiae OX=172044 GN=NS355_14215 PE=4 SV=1
MGETEVRRVVVVGGGSAGWIAACRLAAQARRIGSGVQVTLVESRNVPTVGVGEGTWPTMRNTLAKIGITETDFIRSCDAAFKQGARFVGWTDGTAQDGYYHPLNPPAGATEIDLAPHWLHRAAETGSFADWVDYQAMLCDAGLGPKTIVMPEYAGHANYAYHLDAGKFAVLLREHGVGTLGIDHVLGDVVRPQMSDHGDIVHLELADGRTVAGDLFVDCTGFAARLIGGVYQVPFRRCGDVLFADRAMALQVPYEDEDSPITCHTVSTAQEAGWIWDIGLWTRRGVGHVYSSAHTSDDAAEAALRAYVGPAAKGLSARRITIDAGHRTRFWQNNCVAVGLSAGFIEPLEASALMLIEASMDAIADRLPRTRAAMDVMARQFNATFTHHWMRIIEFLKLHYVLTRRTDSDFWRDNVASSSIPDGLAERLELWRHHSPGPQDFDHAREVFSWPSYQYVLHGMGFDSRQPRIDAAAPDTALAQRFVTRMARAKDDLRTRAPRHRDLLRAIREHGLQRV

SEQ ID NO: 82413 - protein, 178 aa, Unknown
  misc_feature (1)..(178): tr|T1AY27|T1AY27_9ZZZZ Tryptophan halogenase (Fragment) OS=mine drainage metagenome OX=410659 GN=B2A_01577 PE= 4 SV=1
MPFYTYWHRCALAGTAAPIEHYSLQALAARQSKFMRPIDRPHSPLATIVYALHLDAKRFATYLRAYAEARGTLRTEGKVRSVALRPEDGFIDAITLESGERITSDLYIDCTGFRGLLIEGALKTGYEDWTHWLPCDRAVAVACEHRGPLSSHTLATARPVGWQWRIPLQHRVGNGYVY

SEQ ID NO: 82414 - protein, 400 aa, Unknown
  misc_feature (1)..(400): tr|T1W5E6|T1W5E6_9ZZZZ Tryptophan halogenase (Fragment) OS=uncultured organism OX=155900 PE=4 SV=1
MIDGLGQHIVILGGGTAGWMTACLIAHRWRDRGVRVTLVESPEIGIVGVGEGSTPQLKHFFDTLGIAEAEWMPACNATYKLGIGFEGWSDREGYDQYFHPFPTELDGHTASQFFYNTRARRTGRDVDAHPDRFLLPARLASANCAPQPAANFPFEVSYGYHFDAYKVGAFLATHATETLGVVHLQRRIASVERASTGEITALIDTDGERIGGEFFIDASGFRSTIFGALEVPFVSYAGALFNDRAVVMPTAHTPGAPIPSQTRATALSAGWAWHIPLTSRNGNGYVYSSRHLTEAHAEAELRAHICVDTGEARHLKMRVGRVRDSWSHNALAVGLAQGFLEPLEATALHLVIATVEAFLDMVDQGGATDAVRTAFNARIAARYDGVRDYIVAHYRLNQRH

SEQ ID NO: 82415 - protein, 539 aa, Unknown
  misc_feature (1)..(539): tr|T1W939|T1W939_9ZZZZ Tryptophan halogenase OS=uncultu red organism OX=155900 PE=4 SV=1
MNEHSIRRVVIVGGGTAGWMAAAAFARFLNNGYTQVTLVESEEIGTVGVGEATIPPLINFNQMLGLNENAFLAATAGTFKLGIEFVNWGGLGERYFHPFGKFGHDLQGVHFHQLWLREKARRPTEDIAAWSMSAIAAAHGTFGRAADDARSPVRDLFYAFHFDASLYARFLRDYAEKAGIARIEGKIAKVDQRAEDGYLTAVTLEDGQRIEGDLFIDCSGFRGLLIEETLATGYESYAHWLPCDRAVAVPCALPNPAEPDPFTRSTAHQAGWQWRIPLQHRMGNGLVYCSQYLDDDAAEAQLLANLEAEPLAAPRRIRFAAGRRRQSWNRNVVALGLSSGFIEPLESTSIHLVQAAIQRLLALFPDKRFDPAERDEFNHQMQDLYEDIRDFIILHYKATRRDDSPFWNQVRTMEVPDSLQRKIDLFAGKGRLFREGYDLFTDPSWVAVFLGQGIVPQSWEPAADALDEQKVAIALEQMRRGYLDTAQRLPTHGDFLRRTALSPLAAPVPAPAPAATDDVPFFAFTAESPFDVNGGGSPL

SEQ ID NO: 82416 - protein, 495 aa, Unknown
  misc_feature (1)..(495): tr|T1W8J0|T1W8J0_9ZZZZ Tryptophan halogenase OS=uncultu red organism OX=155900 PE=4 SV=1
MTAQRIRRVVIVGGGTAGWIAAAALVKQLGPLLDITLVESDEIGTVGVGESTIPTSRRFHQLLGIDEPTFMRETQASFKLGIAFENWTREGDRYFHSFGQIGRQASWMADFHHFWLEAQAQGFGGSLAEYSLELQAAEAERVASGADAPVQYAYHLDATLYARFLRRLSEPAGVRRIEGKISKVEQDPESGFLTALILDSGERIEGDLFLDCTGFRALLIEQTLDTGFDDWGRWISTDSAFAVQTEAVAPPVPYTRAIAHQAGWRWKIPLQHRVGNGLVFCSEFLSTDAARQQLLDAVEGKPLIEPRLIRYRTGQRRKAWKKNCIALGLASGFIEPLESTSIHLIKTAVTRLIQTFPFSGIGEAQVDRFNAQARHEMEGVRDFIILHYHLNQRPEPFWERCRTMMIPDSLAARIALFQESAQAYQAADDLFRVDSWVQVLLGQGMTPRGHHQLARMMPPGELNRVLSGLRAGISGTVRGMPLHAETLARYCAASQ

SEQ ID NO: 82417 - protein, 514 aa, Unknown
  misc_feature (1)..(514): tr|T1W662|T1W662_9ZZZZ Tryptophan halogenase OS=uncultu red organism OX=155900 PE=4 SV=1
MSQTPSASPRPLRKICVVGGGTAGWVAAALMAEHFKGLYELELVESDDIGTIGVGESTVPPFLQLLAKLGVNEQEFIQETQASFKLGIQFKDWFRKGEDYFHPFGAIGSPVDLSEFYQLWLKARANGYPGALQDFAPATAMAKEGRFTLPFKAIRTPIGGAAYAVHVDARLVARFLRRFAEARGVVRTEGIVEDVALRPDGGVEKLILKSGKVIEADFFIDCSGFRALLIGKALKVGYQDWSEWLLCDRAIAVQTENVGPPPPYTLAHAQDFGWRWRIPLQHRTGNGYVFASKYLSDDEATATLMAQVEGAPVVKPMVVPFKTGVRDRIWDKNVLSLGLASGFIEPLESTAIHLIYRGMDFFFRYLPGMDGEQPLIDEYNRRMTADYEEIRDFIILHYCTTRREDTAFWRECKTMVLPESLQRKIDLFRVNGSLAEGLDELFRSVSWQSVMEGMGVHPRGYHPLVDRIPFDRATETLDQAAAVLKRMVQDLPTHEQFLRDHCPATPPEPAAKAS

SEQ ID NO: 82418 - protein, 505 aa, Unknown
  misc_feature (1)..(505): tr|T1W4T1|T1W4T1_9ZZZZ Tryptophan halogenase OS=uncultu red organism OX=155900 PE=4 SV=1
MTLGAPIRRVVIVGGGTAGWMAAAALARLIPTGMSITLVESDAIGTVGVGEATIPPIRTFNTMLGIDEAEFLAATAGTYKLGIEFTDWSQIGHRYLHPFGSFGFDIEGVRFHQHWRRRRAAGIVEDIEDYSLCAVAARAGRFLPPSPDPASVLSQMAHAYHFDAGLYASFLRARAERDGVVRIEGEVLDAALDSETGHVRHVSLAGEHRIEGDLFLDCSGFRGLLIEQALNAGYEDWTRWLPCDRAVAMPTTNENSSITPYTRSTARAAGWQWRIPLQHRTGNGYVYSSAHCSDDEAAATLRAGADGTPLAEPRMLHFTAGRRRKQWIGNVVALGLASGFTEPLESTSIHMVQTGISKLLALFPDQGFSPVEIDTYNRLAETQFDQVRDFLVLHYHATRRDDSPFWREARDRAIPDSLAEKIALWRRRGRLFRREDDLFAEESWVAVLLGQGVIPEGWDRLAEAIDLRQVDARFDRLRAMFVQTVERMPRHEEYIRRTCLTKVRV

SEQ ID NO: 82419 - protein, 500 aa, Unknown
  misc_feature (1)..(500): tr|T1WC67|T1WC67_9ZZZZ Tryptophan halogenase OS=uncultu red organism OX=155900 PE=4 SV=1
MMGGPLTRICIVGGGTAGWVAAAMLAHLHPDITIELVESDDIGTIGVGESTIPPFLELIAKLGIDEAEFVREVQASFKLGIDFRDWKRLGEGYFHPFGAIGMPVAGDFYQLWLRTALNGHPLPLQHLAPASVMAREQRFMPPRQAPRSPVGGASYALHVDAKRVAGYLRKFAEARGVVRTEGIVTDVATRPDGFVSHVVLKDGRTVGADFFVDCSGFRALLIGKTLASEFDDWSHWLLCDRAIAVQTQNAGPPAPYTVAQAQSAGWRWRIPLQHRTGNGHVFSSRHMSDDEATARLLEQVEGALVTNPMSVPFRTGVRREIWKNNVLAVGLSAGFIEPLESTAIHLIYRAMDFFARLMPERDCAPELQREYNRRMVADYEEIRDFIILHYCLTQRDDTPFWREYQAMEVPASLRDRIALFRVNGTMPEHVDELFRPVSWQSVMEGMGVRPRSCHPTLNRITSPDLPGELDRAANSLLAAVRQLPTHSEFIARSCAALPPA

SEQ ID NO: 82420 - protein, 581 aa, Unknown
  misc_feature (1)..(581): tr|A0A170PPQ2|A0A170PPQ2_9ZZZZ Tryptophan halogenase OS =hydrothermal vent metagenome OX=652676 GN=MGWOODY_Smn7 09 PE=4 SV=1
MGRIMATTPTGAPSRTPAYAWYVLGILFLVYILNFVDRQIISILAEDIKRDLGLKDEDLGFLYGTAFGVFYSLFGIPLGRLADNWNRVRLMTIGLALWSGMTALSGFARSGGMLAAARIGVGVGEATVPHIRFFNQRLGIDEADFMRRTNATFKLGIEFRDWARIGDSYIHPFGDFGRDIAGLPFHQHWLRLVRAGRIPPELEAFSLPILAARADRFAPPSPDPSAIESTFSYAYQFDAGLYAAYLRSYAEQRGVRRIEGKIGPVGQDGETGFVHSVTLESGEEVTGDLFVDCSGFRGLLIEGALKAGYESWSHWLPCDAALAVPSAHGGPLTPYTSATARDAGWQWRIPLQHRVGNGHVFSTAFTDIDSARDILMSNLEGEALAEPRLLRFATGKRRSQWLGNVVAIGLASGFLEPLESTSIHLIQLAITKLIDLLPLDGWDPLDAAEFSRSMAVEYERVRDFLILHYCATERTDTAFWNHCRTMSLPESLAYKMAAFRERGVVVRYREGMFLEPSWLAVYYGQRIEPGRINPLVEALPIDKVASRAEAMASAFRAAAQAMPDHADYLHDLCGSAGAVRA

SEQ ID NO: 82421 - protein, 504 aa, Unknown
  misc_feature (1)..(504): tr|T1W585|T1W585_9ZZZZ Tryptophan halogenase OS=uncultu red organism OX=155900 PE=4 SV=1
MANHPLRIVIAGGGTAGWMAAATFARFLEMGYEIDLIESDDIGTVGVGEATIPQIHLFNDALGLDENAFLRATGGTFKLGIEFVDWFKQGHRYMHAFGDVGRDVGLLPFHQYWLRARSLGLAGDLGAYSLNTHAALAERMQRGPARTARTLPSMPYAYHFDAALYARYLRRFSETRGVNRIEGKIVRVTRDGESGDVSGLVLENGTTVAADLYIDCTGFSGLLIEEALGTGYEDWTHWLPCDRAIAVPSARSEAFTPYTRSTAHAAGWQWRIPLQHRTGNGVVFSSAHISEDEATATLLAGLDTPAMADPRTIAFRTGRRKRMWNRNVVALGLAAGFMEPLESTSIHLIQSAIARLLKLLPGRVIAEADRNEFNRQSDFEYERIRDFIILHYKATARDDTPFWRQCRDMAVPDTLAAKIELWRGNGHIVREHEELFTEVGWLQVLAGQGIMPAGHHPLADAISTSDLGEFMDTIDKLNAREAGQMQGHAAFVAQHCASPAGLGA

SEQ ID NO: 82422 - protein, 460 aa, Unknown
  misc_feature (1)..(460): tr|T1W5H3|T1W5H3_9ZZZZ Tryptophan halogenase OS=uncultu red organism OX=155900 PE=4 SV=1
MTQTIAIVGANLCGWMTAAALARRLPYAAYQIMVIDDGAAGDGLGDFAPMITVPPALVAFHAEIGLDHAALVGAGGGHALGVAFDGWRGDGSAAFLSYGETGAPYEAIAFHHLVGRLRATGANVRLADHALAAVAAQTGRFAPDGSIAHAVHVRTDRYSALLRSLASNAGATASSTPLAAVHSDADGIVETLTLADGSEISPLLVLDCSGSTAVVAGRTSPAFEDWSALLPCDRTQVALLPAEGAPPPYTQVDAQNDGWIATWPVDGVDVRLICRVGGEGHPFRAGRRVEAWRGNCVALGAAAGVLEPLHPTALSLLLRSLARLIQLWPATPRAPVEAAAFNRAGAAAIEGARDFLVTQYAVAGRAGAFWDDRRSASLPEHVAAKRDLFAARGRLPMYDDEPFEEEDWAAMFDAMGVVPRRYDARADLVPVDAIERHLAENRARIIARVRALPSYAGVAA

SEQ ID NO: 82423 - protein, 506 aa, Unknown
  misc_feature (1)..(506): tr|T1W6B1|T1W6B1_9ZZZZ Tryptophan halogenase OS=uncultu red organism OX=155900 PE=4 SV=1
MPVAAESKLRVVIVGGGTAGWMTAAALTRLLPDHCSVRLVESEAIGVVGVGEATLPHIRAFNERLGIDEAEFMARTRATFKLGIEFRDWNRIGDSYIHPFGTFGRGSGAVDFHHYWARLLREGAALPSLDTVSYACALARSGKFDHPASDRTPLSGTFGYAYQFDALLFAPYLRELAEQGGARRTEGTIANVERDAESGDITAVVLESGERIAGDLFVDCSGFRSLLLGSALDEPFVDWSQWLPTDRAVAMPCRTRTAVTPYTSAIAMPAGWRWRIPLQHRTGNGYVYASAFVSDEEARRALETAVEGEPLAEPRMLRFKAGRRRRSWVGNCVAIGLASGFLEPLESTSIYLVQQAITTLIELFPERPVGASDRDEFNRIIDLEYDRIRDFLILHYHATTRDDSPFWDHVRTMTVPDSLSEKLELWRTRGRLVKYREGVFLDPSWVAVYLGQGIVPEGWDPRIDTVAPDVLLRGLETLRAEIDSDVARRPDHRSFIGRYCAMEQAA

SEQ ID NO: 82424 - protein, 218 aa, Unknown
  misc_feature (1)..(218): tr|T1CC55|T1CC55_9ZZZZ Tryptophan halogenase (Fragment) OS=mine drainage metagenome OX=410659 GN=B1B_00460 PE= 4 SV=1
VYCSRFIGDDAAAQVLLDHLEGTPLAEPRFLRFTAGRRRQFWNRNCIAIGLAAGFMEPLESTSIHLIQSAITRLLALFPDRDFDPITAQEFNRITHAEYERIRDFLILHYHATRRDDAPLWRYTRSMPIPETLQYKIDHFRRHGRLVAESLELFQNPNWLAVLTGQEVWPERYDPLVDLRSDVDAPRQLGSLRRVIAEAVQAMPTHRQYIERHCRARS

SEQ ID NO: 82425 - protein, 261 aa, Unknown
  misc_feature (1)..(261): tr|A0A1B6NQN0|A0A1B6NQN0_9ZZZZ Tryptophan halogenase OS =marine sediment metagenome OX=412755 GN=MGSAQ_002747 P E=4 SV=1
MVATVFIQEISMTTATPITHIVVVGGGSAGWLTAGRIAAQHQCATRKDIKVTLVESPNVPIIGVGEGTWPTMRSTLIALGISETTFIKECDATFKQGAKFAKWTTGEEHDFYYHPLMLPQGFSQTNLGPYWQTVAPELNESFSHAVCVQEAICEAGCAPKSIRHAEFAGTANYAYHLDAGKFTAFLTKHCTEKLGVHHVLADVNRVESSDNGDIKALHTEQGVTVEGDLFVDCTGFKSMLLANTTRCRLFPVTMYFLSTEH

SEQ ID NO: 82426 - protein, 88 aa, Unknown
  misc_feature (1)..(88): tr|A0A3B0RLJ4|A0A3B0RLJ4_9ZZZZ Tryptophan halogenase (F ragment) OS=hydrothermal vent metagenome OX=652676 GN=M NBD_ALPHA02-996 PE=4 SV=1
MNDRKIRHIAVVGGGTAGWMTAAALVNALRGNCRISLIESEDIGVVGVGEATIPPIKLFNQSLGLDENDFLRHTQGTFKLGIQFVDWA

SEQ ID NO: 82427 - protein, 178 aa, Unknown
  misc_feature (1)..(178): tr|K7WTA0|K7WTA0_9ZZZZ Tryptophan halogenase (Fragment) OS=uncultured microorganism OX=358574 PE=4 SV=1
GVGEATIPTLRQTLQKVGLPEADYFARCNASFKLGIKFVDWHYSPEPGREDVFWNPFGSLPTAWTVPAMNFWLDRHPGREPEHFTDLFTLHTHLAKAMLAPKAKDSKPFEGLVNYAYHMDTHLFGAWLREVATARGVTRVLDKVVTVEKDERGWIERLCLEKNPPLTGDLFIDCSGNR

SEQ ID NO: 82428 - protein, 229 aa, Unknown
  misc_feature (1)..(229): tr|T1AQT2|T1AQT2_9ZZZZ Tryptophan halogenase (Fragment) OS=mine drainage metagenome OX=410659 GN=B2A_02619 PE= 4 SV=1
MNDRSVRRLVIVGGGTAGWMTATALRRLLYPELSIEVIESEEIGIIGVGEATIPPFRRHNMLLGIEEREFVCATQATFKLGIEFRDWARHGDSYIHGFGPMGLDLEGQPFHQYWTRALRLGVAKDLGLYSFNVLAARQGRFMPTPTDAPKNTPLEDIVYAYHFDATLYARYLRRFAEAEGVRRVEGRIVDVRLRPDTGFVDSLVLQDGRTVSGDFFIDCSGFRGLLIEQ

SEQ ID NO: 82429 - protein, 168 aa, Unknown
  misc_feature (1)..(168): tr|K7X7I3|K7X7I3_9ZZZZ Tryptophan halogenase (Fragment) OS=uncultured microorganism OX=358574 PE=4 SV=1
LGVGEATIPTLVRFHQLLKVNEQEFMAATQATFKLGIGFESWRDLGEDYIHSFGDTGRDHWSAGFQHFWLKGRQRGLAGDFGDYCLELRAALESKFAHIPSPGINYAFHIDATLYAQYLRKFSEKLGVRRVEGKIVEVGTHPETGYIESLMLDSGQRLEGDLFVDCSG

SEQ ID NO: 82430 - protein, 512 aa, Unknown
  misc_feature (1)..(512): tr|A0A3B0SAG7|A0A3B0SAG7_9ZZZZ Tryptophan halogenase OS =hydrothermal vent metagenome OX=652676 GN=MNBD_ALPHA01 -1187 PE=4 SV=1
MTQENRIQKIVIVGGGTAGWMAASMLAKTLEGNSTGDKADRIDITLIESDEIPIIGVGEATIPPIQLFNDYLGLDEDEFLRQTQGSFKLGIQFNNWGRLGDKYMHAFGTTGRPLGGVDFHHYWLKAGMEGGTSDLWDYSFNDKVARANKFSRMAKIKDSPLEGLTYAFHFDATLYAKYLRSYSERLGVNRIEGKVITASLRGEDGFISHLTMENGTEITGDFFIDCTGFRSLLIEETLKTGYVDWSGFLPCNRAIAVPTASVGDIQPYTRSTALSAGWQWHIPLQHRTGNGHVFCSDYISEDEATAMLLDNLEGETLADPRVVHFNTGRRRKFWNKNCVVLGLASGFMEPLESTSIHLFQSGITRLIKMFPDKSCSRADADEYNRQAISEFESIRDFIIFHYHATERTDTPFWRDCAGMDIPDSLTERLELFRTNGRIFRKGDELFSENSWLQVMIGQGIRPAGYHPLADQVASPDVREYLENIDRIQNRALSELPLQKDFIARNCSAAIQL

SEQ ID NO: 82431 - protein, 511 aa, Unknown
  misc_feature (1)..(511): tr|T1W5G6|T1W5G6_9ZZZZ Tryptophan halogenase OS=uncultu red organism OX=155900 PE=4 SV=1
MVETRDTRIRKVVIVGGGTAGWMTAAALTRHFRSTPMSITVVESSEIGTIGVGEATIPTIRRFYAQLGMTDAEVMQATQATCKLGIRFTDWGRPGSDFIHPFGLYGQDLGGIGFHHYWMRLHEQGDATPLSAFSLGASLAEAGKFIHPSRNPPSALSVFDWALHLDASLFAQHLRRFAEAGGCERIDAKVRSVDLRPADGFVDSITLEDGRAIEGDLFIDCTGFRGLLIGEAMGSTYEDWGQWLPCDAAFAVQSENAPDEEPAPFTRVTARSAGWQWGIPLRHRAGNGLVFSSQHMTDQQALDELMPNLLGKPITEPRRIGFRPGRRREAWVKNCVSIGLSAGFLEPLESTSIALIENGIERLKSLFPDRNFAAPVIEEFNDQSAREMERTRDFIILHYKLNGRDEPMWKACREGAIPDTLRRKIDLWKARGQFVRYRWEMFHPASWLAIYAGFDALPDSYDPGVDAFAPADLSLALGEMSSAIARTVGDTPTHARFLAALDRSFAAQDPS

SEQ ID NO: 82432 - protein, 511 aa, Unknown
  misc_feature (1)..(511): tr|T1WBH1|T1WBH1_9ZZZZ Tryptophan halogenase OS=uncultu red organism OX=155900 PE=4 SV=1
MDAPQDSRIRSIVIVGGGTAGWMTAAALVQHFRNTPLKITVVESSEIGTIGVGEATIPTIRRFYAQLGMTDAEVMQATQATCKLGIRFVDWSGPGSDFIHPFGLYGQELKGIGFHHYWMRLKAQGDTTPLSDFSLGASLARAGKFTHPSPNPPSSLSVFDWALHLDASLFAQHLRAYAEAGGCARIDARVGRVDLRATDGFIETITLEDGRQIEADLFVDCTGFKGLLIGEALGSTYEDWGQWLPCDTAYAVQSENAPGQLLQPFTQVTARSAGWQWGIPLRHRAGNGIVFSSAHLDDQQALDTLMPNLMGQPVTEPRRIGFRPGRRHQAWVKNCVAIGLSAGFLEPLESTSIALIENGIERLKSLFPDRNFAQPVVDEYNEQSAREMERTRDFIILHYKLNGRDEPMWRDCREAAVPETLQRKIDLWKARGQFVRYRWEMFHPASWLAIYDGFDAMPETYDPGVDSFAVEDLSRGLSEMRAAVARTVAETPTHAQFLAQFPAGLDRPRAA

SEQ ID NO: 82433 - protein, 501 aa, Unknown
  misc_feature (1)..(501): tr|T1WA55|T1WA55_9ZZZZ Tryptophan halogenase OS=uncultu red organism OX=155900 PE=4 SV=1
MVEQARVQKVVIVGGGTAGWMTAAALAGMLEDQGLAITLVESEAIGTVGVGEATIPHIRNFNTKLGIDENEFMARTQATFKLGIEFRNWGRLGDSYIHPFGAYGQPLERVGFHHHWLRLRQLGLAGEIGDYSLPVVAARKGRFSRPGSDPRSLLSTFSYAFQFDAGLYAAFLRSHAERRGVVRREGKVVDVTVDQTGHIRAILLDTGEEISGDLFIDCSGFRGLLIGEALGTGYHDWKRWLPCDRAVAVPCDTVEPATPYTRATALEAGWAWRIPLQHRVGNGYVYASDFITDEAASERVLGQLEGPPRQDPRFLRFTTGKRHRQWVGNCVAIGLSSGFLEPLESTSIHLIQVAITTLIELFPQRKMDPVDASEFNRVMDLEYERIRDFLVLHYKATERDDTPFWDHCRTMAIPDSLAEKMALFEESGVVAKYRDGLFLEPSWLAVYLGQRIEPRTWDPLGAHIPTDALGAAMEDLRRSVEQSAQAMPSHDAFVQSCCAAS

SEQ ID NO: 82434 - protein, 510 aa, Unknown
  misc_feature (1)..(510): tr|T1W9Q4|T1W9Q4_9ZZZZ Tryptophan halogenase OS=uncultu red organism OX=155900 PE=4 SV=1
MSPPDISSERRIRRIVIVGGGTAGWMAAAALAKVLGPGYADITLIESEAIGTVGVGEATIPQLRTFNALLGLDEDDFVRRTQGTFKLGIEFCDWGRLGDRYFHPFGPFGVDMEGVSFHAYWLRLNQLGDARPITDYSLQAMAAARGKFMRPIDAGRSPLSKIAYAFHFDAGLYAAWLREFAEARGVTRLEGRIVDVSLREEDGFVRSVTTSDGRIVEGDLFLDCSGFQGLLIEGALQTGYDDWSHWLPADRAIAVPCARVADPVPYTRATARPGGWQWRIPLQHRTGNGYVYSSRFIDDEAATADLLGQLDGAPMADPRMLRFTTGRRRKAWNRNVVALGLASGFIEPLESTSIHMVQSGIANLLAMFPTLAFEPAEVARYNRVIAYEAERIRDFIVLHYNATQRDDSELWRYCRDMSLPDSLLEKYEIFASRGRVFRENEELFNDTSWFAVMTGQNIRPSGFDPVAVVLSVDETRLRLQQTADAIRNSADYMPSHGDFIRDHCQAASAV

SEQ ID NO: 82435 - protein, 522 aa, Unknown
  misc_feature (1)..(522): tr|A0A3B0Z5S3|A0A3B0Z5S3_9ZZZZ Tryptophan halogenase OS =hydrothermal vent metagenome OX=652676 GN=MNBD_GAMMA15 -90 PE=4 SV=1
MSERINTVTIVGGGSAGWITALVLTTMLNRVDKNRIKITLIESPRIPNIGVGEGTVTGFSRLLRQLNIDEAEFMMKSDATFKCAGRFKGWHVDSNGKPTTSYNPFMEGGFVDGFQTYYYHQKFGAGGRSLIQTTQPTIELVERGLSPKLIGSKPYDALVPYTYHLNAKAFSDQLASIAKQRGVEYIQDEMLDLEQDEGGHISALKLEERGRYPVQFVVDCTGFRGRILQQALGEPFLDYSKHLLCDRAIPLPVPHRNADHIQPCTTATTLSSGWVFNVPLQSRMGTGYIYSSAHKSDDEALHELKQHLGDIVPDDASPPVIRMNIGRVRNTWVKNCVACGLSAGFVEPLEATAIYTIEQTARNLSFYFPEFGINEKAVAKFNHLMDEQYREVLDFIVMIYYTSNREEPFWKSAREDIQVPDTLLDNLELWKHYLPNANDVTGRYLFNYWDYYFILAGRNYFDREHYPGENMLRKKSWDMVLNRAEPAIADILRQLPSHTDYLKSVRKPRTGKKMLYSVNYKQ

SEQ ID NO: 82436 - protein, 117 aa, Unknown
  misc_feature (1)..(117): tr|T1WB77|T1WB77_9ZZZZ Tryptophan halogenase (Fragment) OS=uncultured organism OX=155900 PE=4 SV=1
EEQDRARDMAVFRYAVATRTAPLWVRARNAPPSPALAYKQAQFESRGRVVIYDEETFVEGAWIGAFLGHGVMPRRHDRLADRLPADQADAILARLRGVVHQAAQAMPPHADALKDRP

SEQ ID NO: 82437 - protein, 487 aa, Unknown
  misc_feature (1)..(487): tr|T1W633|T1W633_9ZZZZ Tryptophan halogenase OS=uncultu red organism OX=155900 PE=4 SV=1
MGGGTAGWMTAAALAAVAGRSVAEVHLVESEEIGIVGVGEATLPHIRAFNTRLGIGEAEFMRATGATFKLGIEFCDWARIGDSYIHPFGAFGHDVDGVGFHHYLSRAGQIATLPDYSLPVVAARHSKFAPPLEDPRSLLSTFGYAYQFDATRYAPFLRARAERQGVTRTEGRVVDVERSATGDVVAVVLDDGQRITGDLFIDCSGFRSLLLGQAMGEPFEDWSHWLPCDRAVAVPCADAGMLKPYTTATAMPAGWRWRIPLQHRVGNGYVYSSAHIDDGPAQDALLRSIESTPLADPRMLRFKAGRRARSWVGNVIGVGLAGGFLEPLESTSIYLIQLAITQLLELFPATPISPIDRDAFNRVVDLEYDRIRDFLILHYHATTRDDSPFWDHVRTMDVPDTLAEKMTLFRQRGRVMTYREGVFLEPSWIAVYLGQGVVPKGYDQRADRPSDAALVQALARLRTETRDAVMTMPDHAAYIAQSGGAAA

SEQ ID NO: 82438 - protein, 506 aa, Unknown
  misc_feature (1)..(506): tr|T1WAH5|T1WAH5_9ZZZZ Tryptophan halogenase OS=uncultu red organism OX=155900 PE=4 SV=1
MPVAAESKLRVVIVGGGTAGWMTAAALTRLLPDHCSVRLVESEAIGVVGVGEATLPHIRAFNERLGIDEAEFMARTRATFKLGIEFRDWNRIGDSYIHPFGTFGRGSGAVDFHHYWTRLLREGAALPSLDTVSYACALARSGKFDHPASDRTPLSGTFGYAYQFDALLFAPYLRELAEQGGARRTEGTVANVERDAESGDITAVVLESGERIAGDLFVDCSGFRSLLLGSALDEPFVDWSQWLPTDRAVAMPCRTRTAVTPYTSAIAMPAGWRWRIPLQHRTGNGYVYASAFVSDEDARGALETAVEGEPLAEPRMLRFKAGRRRRSWVGNCVAIGLASGFLEPLESTSIYLVQQAITTLIELFPERPVGASDRDEFNRIIDLEYDRIRDFLILHYHATTRDDSPFWDHVRTMTVPDSLSEKLELWRTRGRLVKYREGVFLDPSWVAVYLGQGIVPKGWDPRIDTVAPDVLLRGLETLRAEIDSDVARRPDHRSFIERYCAMAQAA

SEQ ID NO: 82439 - protein, 500 aa, Unknown
  misc_feature (1)..(500): tr|T1WAM0|T1WAM0_9ZZZZ Tryptophan halogenase OS=uncultu red organism OX=155900 PE=4 SV=1
MGEDAPDRIRQVVIVGGGTAGWMAAAALVKHFVATDLRITLVESSDIGTIGVGEATIPTIRRFYAKLGLTDQAVMEATSATVKLGIQFKDWRRPGESFIHPFGLYGQNMGEVAFHHLWLRRRQQGDDTPLERYSLGASLAEQGRMALPPRDASAPLAVYDWAIHLDASQFAQYLRRYAEASGVTRIDAKVADVERGPGGVAAIRLADGRRIEGELFIDCTGFRSMLLEALGVGFEDWREWLPCDAAVAVQTENAEGEPPAYTRAHAKPHGWQWRIPLRHRAGNGLVYASEAISEDAATAALLADLPGKPLVEPRRIAFRSGRRTEAWRGNVVALGLAAGFLEPLESTSIALIETGIERLKELFPTRAFAPALPAEFNDATAREMERVRDFIILHYKLNRRDDSDFWRRCAAMPVPETLARKLALWDARGEFLRYRWEMFHPSSWLAIYTGFDRMPAALNPALSGLDMDQVGLALERMQRGVAQTVARTPTHAQFLQAMHA

SEQ ID NO: 82440 - protein, 489 aa, Unknown
  misc_feature (1)..(489): tr|T1W6X2|T1W6X2_9ZZZZ Tryptophan halogenase OS=uncultu red organism OX=155900 PE=4 SV=1
MLRERLGHVLVAGGGMTGWCAAAALKRRAPFLDVTILSCAPSRHALADRIACTLPSLIGFQEDLGIGAADGIVRAGSGYRLGTLFTGWANGMPDYVHAYGRYGAAFGATAFHHHWVRAAQDGSAMPFDRHSPAAAMARAGRFAAPKPGTPFADHEFGLTIDVARHASMMRAFALHVGVREIPGEIGGVTLDADGAIATVDLTDGTALGADLFIDATGPEARLRGAFGDDRDDWSAWLPCDRVLIAETNDEPMVLTTVTAHEAGWRWASGVQSGFAYASTAISDGKAARVLRNATGATPDEPIRVRAGTRPQPWRGNCIAIGDAATEIEPLEWCNLHLALSAIDRLIAMLPGRVPVPVEVVEFNRQTLAEAERVRDFLAMHYHTARRDDPLWRTTAAAEAPVSLAHTLAQFAERGRLPFFEEETFARDSWAAVLIGQGFLPRRVDPLVSAVPVAATRAAMARQVAAIAAALPHVPTHAAYRADQKRHLTR

SEQ ID NO: 82441 - protein, 489 aa, Unknown
  misc_feature (1)..(489): tr|T1W9P7|T1W9P7_9ZZZZ Tryptophan halogenase OS=uncultu red organism OX=155900 PE=4 SV=1
MLRERLGHVLVAGGGMTGWCAAAALKRRAPFLDVTILSCAPSPHALADRIACTLPSLIGFQEDLGIGAADGIVRAGSGYRLGTLFTGWANGVPDYVHAYGRYGAAFGATAFHHHWVRAAQDGSAVPFDRHSPAAAMARSGRFAAPKPGTPFADHEFGLTIDIARHASMMRAFALHVGVREIPGEIGGVTLDADGAIATIDLTDGTALGADLFIDATGPEARLRGAFGDDRDDWSAWLPCDRVLIAETNDEPMVLTTITAHEAGWRWASGVQSGFAYASTAISDGKAARVLRNTTGTTPDEPIRVRAGTRPQPWRGNCIAIGDAATEIEPLEWCNLHLALSAIDRLIAMLPGRVPVPVEVVEFNRQTLAEAERVRDFLAMHYHTARRDDPLWRATAATEAPASLAHTLAQFAERGRLPFFEEETFARDSWAAVLIGQGFLPRRVDPLVSAVPVAATRAAMARQVAAIAAALPHVPTHAAYRADQKRHLTR

SEQ ID NO: 82442 - protein, 510 aa, Unknown
  misc_feature (1)..(510): tr|A0A3B1AWT5|A0A3B1AWT5_9ZZZZ Tryptophan halogenase OS =hydrothermal vent metagenome OX=652676 GN=MNBD_ALPHA03 -1292 PE=4 SV=1
MKKNNGLRKIVIVGGGSAGWISASCLAYSLQNTQCEITLVESPDIGIIGVGEATIPSFVDFIQYLGLSKADFIRETKATFKLGIKFYDWLEEGHEYWHQFGDVGVNIDHKPFYQHWLKSKFNGAEGNYTDYSPSVAMAQENKFFIPSQKQKSILSGSTYALHFDAGLVAHFLAKHAKSLGVHHISDNVVNVRLGTDGHITELDLKEREEPLEGDFFIDCSGQRGVLISQALRVPYVNWGKYLPVDRAIAVPTENQAPLKPYTESFALEHGWRWRIPLQHRAGNGYIYSSDYCDDEMARDVLLRNISGKPLAEPRLIKFQTGKRDKFWSKNCLSIGLSSGFLEPLESTSIYLAMKGILNFVQMLPSTECKSETAAEYNRLMDMEYECIRDFIVLHYCASKRTDSEFWRMWQKAQIPDTLKAKLNLFKSQGRLMRNDQDLFSHDSWYAVLAGMDVRPEAYDWTTDASNYDKACGIMSKVRMTLQERVQELPSHEEFVEKICARVPQSERALG

SEQ ID NO: 82443 - protein, 172 aa, Unknown
  misc_feature (1)..(172): tr|T0YGF1|T0YGF1_9ZZZZ Tryptophan halogenase (Fragment) OS=mine drainage metagenome OX=410659 GN=B2A_13912 PE= 4 SV=1
MTETTPGHSDDRRLRHIVIVGGGTAGWMVAAALAQTTQGRCPITLVESEEIGSIGVGEATIPPIKRFNQMLGLDEYEFLAYTQGSYKLGIEFVDWTHKGQRYFHPFGQFGAEFDAVPLHHYWLRERARGDATPLQDYAMAWVAARNGRFERPLADRQRVQSTYDYAYHFDAA

SEQ ID NO: 82444 - protein, 512 aa, Unknown
  misc_feature (1)..(512): tr|T1D6D8|T1D6D8_9ZZZZ Tryptophan halogenase OS=mine dr ainage metagenome OX=410659 GN=B1A_02686 PE=4 SV=1
MACRAWSKGMSAQPIERTVIVGGGTAGWMTAALLAKALGGTARIELVESEEIGTIGVGEATIPQIRHINAFLGLDENEVMRAARATFKLGIQFNDWLRPGHSYIHAFSDIGLPQGGVPFQHYWLRERTQGGTHALWDYSLNAQAAAAGRFARMEHVGSSPLTGVRWAYHFDAGLYAAHLRRVAEHLGVTRREGRIVDVDLRGEDGFIAAVKLADGTRVAGELFIDCSGFRALLIEGALHAGYDDWRQWLPCDRALAVASARVPPMRPYTQASARPAGWQWRIPLQHRTGNGHVYCSAFISDDEAAATLLANLEGEALGAPRPFRFTAGMRKQVWVRNCVALGLAAGFMEPLESTTIHLVQSGVDRLLKLFPDARFEPAVRDEFNRQTRFEYERIRDFLILHYTASERRDTPFWRHCAAIARPESLQHKIDVFEASGQIFRAADELFTEVGWLQVLLGQGVEPQAYHRLADALQPAQFREFMGSLRALIQRAVDGMPGHADFVAEHCKAAVAA

SEQ ID NO: 82445 - protein, 549 aa, Unknown
  misc_feature (1)..(549): tr|A0A160TH59|A0A160TH59_9ZZZZ Tryptophan halogenase OS =hydrothermal vent metagenome OX=652676 GN=MGWOODY_Smn1 709 PE=4 SV=1
MAFSAAISGYRGWHRSRYWRSIASARSDEKCDSQETGFLTSSANKEHPLGPGRIRSIVILGGGTAGWMTATALARSFGRAVTITLLESEEIGTVGVGEATIPTIHWFNELIGLDEADFLRATKASFKLGIEFVDWKRPGHRYFHPFGEFGARLPGVAFHHRWLKARAAGVDLPLSSFSLAGQLAAENRFAKPVGDARSILSTLGYAYHFDASLYARHLRGIAEAAGVTRIEGRLQDVERDPSSGFVTALTTQRGERLEGDLFIDCSGFRALLIDQVMGGDFEDWSHWLPCDRAAAVPCARVAETTPYTRSTAREAGWQWRIPLQHRTGNGYVYASRFISDDEATATLLANLDGEALADPRVLRFTAGTRRRAWIGNVVAIGLSSGFLEPLESTSIHLIQSGIAKLLTLFPDRDCDPTLAERFNMLLNADMDTIKDFLILHYHATTDKPEPFWAERRAMPLPQSLVEREDQYRRSGRLMLRSDELFRDASWLAVLDGQGIEAGDYNPLADALDATTNVAQVRQIAAVIARAVPTLPRHDEALAQAMASTG

SEQ ID NO: 82446 - protein, 175 aa, Unknown
  misc_feature (1)..(175): tr|K7W8V8|K7W8V8_9ZZZZ Tryptophan halogenase (Fragment) OS=uncultured microorganism OX=358574 PE=4 SV=1
RFRRRRGDHPAIRNFNERLDLDEVEFMRESNATFKLGIQFENWRRMGDSYIHPFGSYGNPVNWIHFHHFWLQQRGEPEAGRFWDYNMHYMSAENGKFSIGRKKSRTPSPTPHYAFHFDATLYAQYLRGWSESRGVERTEGKVTDVSLDGETGDIRSITLESGEVIEGDLFIDCSG

SEQ ID NO: 82447 - protein, 516 aa, Unknown
  misc_feature (1)..(516): tr|T1WC10|T1WC10_9ZZZZ Tryptophan halogenase OS=uncultu red organism OX=155900 PE=4 SV=1
MTHAPIRPDPIRKVLVLGGGTAGWMTAAALSKVLNGQVEVVLIESEQISTVGVGEATIPPILTFNAMLGIDEREFMRATRATFKLGIEFRDWTRLGDRYIHPFGTFGLDIEAIKFHQVWRKVRDRVGSIEDFNLSAVAARQNRFALPDPDPAKVLSSLKYAFHFDAGLYARFLRGFAEARGATRIEGKVADVALDGEDGFIQSLTLEDGRTFEADLFIDCTGFRALLIGQTLGGRYLDWSHWLPNDRAVAVPCDTGGDGLTPYTRATADKAGWRWRIPLQHRTGNGYVYSSAHIGDDEALNSLTSGLDGPARADPNFLRFQAGRRERAWIKNCVAIGLSSGFLEPLESTSIHLIQAGITKLLALFPDKGFDPLEIDEYNRLTAQQVELVRDFIILHFKATERSDTPYWDYVRTMEIPDSLARKIDLFAGRGRLFQSDYDLFAEPSWIAVLLGQGVVPRQYDALVDTLPEAALVHRLKRMSALIGQTAQAMPDHQAFIARYCAADPAAAPIPALRPA

SEQ ID NO: 82448 - protein, 487 aa, Unknown
  misc_feature (1)..(487): tr|T1WAF4|T1WAF4_9ZZZZ Tryptophan halogenase OS=uncultu red organism OX=155900 PE=4 SV=1
MTAATLGLTTGTPSAARLADITLVESEEIGTVGVGEATVPHIRFFNQRLGIDEADFVRRTKATFKLGIEFCDWGRIGDSYIHPFGDFGHDIDGLPFHQHWLHATRGRPDETPALAACSLPIVAARAGRFTPPLDDPRSVGSTYSYAYQFDAGLYAAYLRDYAEARGVTRIEGRVEHVERGPSGIAALRLADGQRIEGDLFVDCSGFRALLIEGALKAGHQDWAHWLPCDAAWAVPTANTGPLVPYTRATARDAGWQWRIPLQHRTGNGLVFSTRFTDPERARAVLLDTLEGEVLAEPRMLRFRTGRRHRQWIDNCVAIGLSAGFLEPLESTSIHLIQLAIGKLIELFPNDAVLDPADAAEFNRAMALEYDRVRDFLVLHYCATERDDTPFWRHMRTMDLPPSLAVKIAAFRDRGIVEQYREGMFLPASWLAVYYGQRIMPERIHPLVAALPVADARARVAAVADACRRTAEGMPTHADYLARIGAAA

SEQ ID NO: 82449 - protein, 520 aa, Unknown
  misc_feature (1)..(520): tr|T1W4X1|T1W4X1_9ZZZZ Tryptophan halogenase OS=uncultu red organism OX=155900 PE=4 SV=1
MASEATIDSVVVVGGGTAGWLAACLIAARVGETAARPVTVTLVESPDVPTIGVGEGTWPTMRRTLERIGIDEATFLLACDAAFKQGSRFDGWRTGAPDDSYIHPFVPPAAGEPRAVVAGWQAHGGERAFADAVSAQPAVCALALAPRQRQMPDYAGALNYAYHLDAGKFAALLADHAVRRLGVRLVRDHVVEVVTASDGDIAAVRTRDHGAIAGDLFVDCTGHAALLIGQTLGVEVVDRSDVLPNDRALAVQVPVAADSPIAAQTIATAHAAGWIWDIGLPSRRGVGCVYASRYMDDADALATLTGYLGRTAAGIDPESLTVRRLAFRSGHRARFWVRNCLAVGLSAGFLEPLEASAIVLVELSLEALLADFPATRSAMDVRARRFDTLFRYRWDRIVDFLKLHYVLSERPEPYWRDHRAPDRMPPRLADLLAVWRDQPPSTFDLPQVDEVFPPASYQYVLYGMGWPAPPSPAMTDAGAIEALAQVRQRARTLAAALPTHRAYLDALRRDAGAARLKGSD

SEQ ID NO: 82450 - protein, 331 aa, Unknown
  misc_feature (1)..(331): tr|T1CH36|T1CH36_9ZZZZ Tryptophan halogenase (Fragment) OS=mine drainage metagenome OX=410659 GN=B1A_00066 PE= 4 SV=1
LSTFLYAYHFDASLYAGFLRRYAEARGVRRVEGEVVAVQQNAESGFVEAVRLANGAVLDAELFIDCSGMRALLIEGALKCGYENWSHWLPCDRALAVPCESGELTPYTRSTAHASGWQWRIPLQHRSGNGHVYASNFISDAAAAEVLLGHLDGRPLGEPRLIRFTPGRRRAHWVKNVIAIGLSSGFLEPLESTAIHLIQAGISKLIAYFPDKDFDPLVIREYNRVAAAEIDRIRDFIILHYHLNKRTDGPMWQYCASMSIPETLREKIEHFRRYGRILPSELDIFGPTSWLAVHIGQMNWPRRNDPLLDYRDVRGAQYLEQLRRDDGGGGG

SEQ ID NO: 82451 - protein, 163 aa, Unknown
  misc_feature (1)..(163): tr|K7X7I0|K7X7I0_9ZZZZ Tryptophan halogenase (Fragment) OS=uncultured microorganism OX=358574 PE=4 SV=1
IPPMRVFHKLLRIDEQEFMRATAATFKLGIAFEDWGKIGDRYIHSFGQTGRETWLGGFHHFWLRGLEKGFDAEYGQYCLEWLAGRAGKFATSPKSDINFAYHLDATLYAKYLRKLSEQFGTRRIEGKISQVNRHPESGFIESLTLESGQTIEGDLFVDCSGNR

SEQ ID NO: 82452 - protein, 167 aa, Unknown
  misc_feature (1)..(167): tr|K7X7I8|K7X7I8_9ZZZZ Tryptophan halogenase (Fragment) OS=uncultured microorganism OX=358574 PE=4 SV=1
GVGEATVPTLVRYHQLLDVNEQEFLAAVQGTFKLGIAFENWRDVNEDYIHSFGDTGRDHWSAGFQHFWMKGREKGIASEFGDYCLELKAAQESKFAHLPRPGINYAFHIDATLYARFLRQFSEKFGATRVEGKIVRINTNSETGFIESLTLDSGRNVEGDLFIDCSG

SEQ ID NO: 82453 - protein, 461 aa, Unknown
  misc_feature (1)..(461): tr|T0ZDW0|T0ZDW0_9ZZZZ Tryptophan halogenase (Fragment) OS=mine drainage metagenome OX=410659 GN=B1A_14659 PE= 4 SV=1
MRPIGVGEGSTPLLRGFFDLLGIEEAEWMPACHATYKCGISFEGWSTRPGFERYFHPFPSMVDIMTMTQFVHNVEARVRGADLCAHPDRFFLAARLVAERRAPKSRESFPFDVLHAYHFDATLLGQFLHKKALERGIRYKSCHVTHATVGTDGSIASVHTREGETITADLYVDCTGFSGLLLEKALGVPFISYADNLFNDAAVAIPSQIGESIPSQTASTALKHGWVWKIPLTNRFGNGYVYSTQFCTPDAAETELRQHLGLLDSDAEARHLKMRVGRVARPWHANCLAVGLAQGFVEPLEATSLMVVQYMAQTFTELLERGELTDDARESFNARVNRNFEGIRDYIVTHYKTNSRTDTDYWRANAANTTLSDNLRKIYSTWRAGKSIVPGIRTQEIGQGYPVMSWFAILSGMGIFPDAHRLRPPNAQEARYSMSEIDDLLSRCVGNYLDHREALAQPPPS

SEQ ID NO: 82454 - protein, 232 aa, Unknown
  misc_feature (1)..(232): tr|T1CUG3|T1CUG3_9ZZZZ Tryptophan halogenase (Fragment) OS=mine drainage metagenome OX=410659 GN=B1A_05399 PE= 4 SV=1
MKAGGFSVTLIESADIRAIGVGEGTWPTMRASLERIGVAETALFRECDAAFKQGGKFVGWTTGGEGDSYYHPLMVPQGFSRVNLVPHWLRGGQSASFCDFVTPQGRLCDEGLAPKTITHGEYRAVANYSYHLDAGKFGSFLARHCIENLGVRHVLADVVSVNQDESGDITSLNTRQAGGLAGDLFIDCSGFSALLIGKTLGVGFKECGDILFCDAALAVQVPYGAPEEPMAS

SEQ ID NO: 82455 - protein, 390 aa, Unknown
  misc_feature (1)..(390): tr|T0ZX93|T0ZX93_9ZZZZ Tryptophan halogenase OS=mine dr ainage metagenome OX=410659 GN=B1B_10543 PE=4 SV=1
MNLPVFKHLGVLEQVRALGVCKRGADFETDNERGYNVYAFARALGNSPPYAFQVLRQDFDAMLFTHARSEGVNTHEGAEVLNVEQRGDRDSRVEVRLDDGRTCCVRTRYVLDASGRDSFLATRMKLKRKNTEHQSAAIFGHFRGAERRSGLDAGNISIYNFDYGWMWMIPLLGEVMSVGAVCGPDYLKQRNGRSHEFLFETLRQNPALWSRLEHAVLIDNEVRVTGNYSYDSSTIGGPGWILVGDAFAFLDPVFSSGVYLAMSGAEQAAVVVDAALREPAREMKMQQHLEKRLRRGMRRFAFFIYRFNSPAMQHIFRYPHNVWKVEQGIISMLAGDLFDSRPVWWRLQFFRLIYAWTVLRLPLRWNQERRYRKAQARTTFSGGTTPLDSC

SEQ ID NO: 82456 - protein, 123 aa, Unknown
  misc_feature (1)..(123): tr|T0ZLF8|T0ZLF8_9ZZZZ Tryptophan halogenase (Fragment) OS=mine drainage metagenome OX=410659 GN=B1B_11772 PE= 4 SV=1
MVDIMTMTQFVHNVEARVRGVNLYAHPDRFFLAARLVAERRAPKSREAFPFDVLHAYHFDATLLGRFLHEKALQRGIHYKSCHVTHATVGADGSIASVSTREGETITADLYVDCTGFSGLLLE

SEQ ID NO: 82457 - protein, 300 aa, Unknown
  misc_feature (1)..(300): tr|T0XUP4|T0XUP4_9ZZZZ Tryptophan halogenase (Fragment) OS=mine drainage metagenome OX=410659 GN=B2A_15612 PE= 4 SV=1
MKLADGTRVTGELFIDCSGFRALLIEGALHAGYDDWRQWLPCDRALAVASARVPPMRPYTQASARPAGWQWRIPLQHRTGNGHVYCSAFISDDEAAATLLANLEGEALGAPRPFRFTAGMRKQVWVRNCVALGLAAGFMEPLESTTIHLVQSGVDRLLKLFPDARFEPAVRDEFNRQTRFEYERIRDFLILHYTTSERCDTPFWRHCAAIARPESLQHKIDVFEASGQIFRAADELFTEVGWLQVMTGQGIAPQRYHVLADALQPAQFQEFMGSLRALIQRAVAGMPEHADFVARHCKAA

SEQ ID NO: 82458 - protein, 168 aa, Unknown
  misc_feature (1)..(168): tr|K7WFU9|K7WFU9_9ZZZZ Tryptophan halogenase (Fragment) OS=uncultured microorganism OX=358574 PE=4 SV=1
RRGRGDRPPMRNLHRIMDIDEQAFMRATQATFKLGIVFDNWGEIGDSYIHSFGEIGQRSWMAEFHEFWLEARDQGFGGSLDEYCLELMAAKAGKFAKNVQDTRLNFAFHLDATRYAGFLRQLSEAAGVKRVEGKISEVRKHSETGELKALLLERGELIEGDLFIDCSG

SEQ ID NO: 82459 - protein, 170 aa, Unknown
  misc_feature (1)..(170): tr|K7WTA4|K7WTA4_9ZZZZ Tryptophan halogenase (Fragment) OS=uncultured microorganism OX=358574 PE=4 SV=1
GVGEATVPPIVDFMRRLGLEESEWMPACGATYKSAIAFRDFHGGDEPKTWFPFESIEIFKGRPLNRYWLHKHFTDAAFADRFSFYDYCHFVPALCDAGRTVAAFPEAKYAYHFDAGRFGDFLKRFAVDEGVTHVVDTIESVERAPDGSIESLKRRSGEPLAADLFVDCSG

SEQ ID NO: 82460 - protein, 101 aa, Unknown
  misc_feature (1)..(101): tr|T0Z9C0|T0Z9C0_9ZZZZ Tryptophan halogenase (Fragment) OS=mine drainage metagenome OX=410659 GN=B1A_15064 PE= 4 SV=1
PFWRHCAALPAPPGLARKLAIFQATGQIFREGEELFTEQSWLQVLLGQGILPKRYHPAADDLPQGQLQEFLDTIRNVIATAVERMPAHERFVAEHCAVERQ

SEQ ID NO: 82461 - protein, 214 aa, Unknown
  misc_feature (1)..(214): tr|T1CGJ9|T1CGJ9_9ZZZZ Tryptophan halogenase (Fragment) OS=mine drainage metagenome OX=410659 GN=B2A_01597 PE= 4 SV=1
ESPTVATIGVGEGSTPLLRGFFDLLGIEEAEWMPACHATYKCGISFEGWSTRPGFERYFHPFPSMVDIMTMTQFVHNVEARVRGADLCAHPDRFFLAARLVAERRAPKSRESFPFDVLHAYHFDATLLGQFLHKKALERGIRYKSCHVTHATVGTDGSIASVHTREGETITADLYVDCTGFSALLLEKALGVPFVSYADNLFNDAAVAIPSPIG

SEQ ID NO: 82462 - protein, 349 aa, Unknown
  misc_feature (1)..(349): tr|T1CF30|T1CF30_9ZZZZ Tryptophan halogenase OS=mine dr ainage metagenome OX=410659 GN=B2A_01599 PE=4 SV=1
MSQSVKNIVIVGGGTAGWMAAAACAKVLGPSYAVHLVESEEIGTIAVGEATVPHLKQFNNLLEIDEVEFVKNVKGTFKLGIQFNDWGRLGDSYIHGFGQLGPDVGPLPFHQFWIKARHKGWAAPLGDYSINTAAAPRGKFMPSASDAPANSPLSDIRYAYHFDASLYARYLRGYAEARGVRRTEGKVRHVQLRAEDGYVESVTLENGTVIGGDLFIDCSGFRGLLIEQALHIGYIDYSQWLRCDRAVAVGCEKVGPPTPYTRVTARTAGWQWRIPLQHRTGNGHVYSSALISDDEAAATLLANLDGKPLGEPRLLRFTPGMRKKFWSKNVVALGLASGFWSRWSRPASS

SEQ ID NO: 82463 - protein, 182 aa, Unknown
  misc_feature (1)..(182): tr|T1B4H1|T1B4H1_9ZZZZ Tryptophan halogenase (Fragment) OS=mine drainage metagenome OX=410659 GN=B1A_09110 PE= 4 SV=1
MTETTPGHSDDRRLRHIVIVGGGTAGWMVAAALAQTTQGRCPITLVESEEIGSIGVGEATIPPIKRFNQMLGLDEYEFLAYTQGSYKLGIEFVDWTHKGQRYFHPFGQFGAEFDAVPLHHYWLRERARGDATPLQDYAMAWVAARNGRFERPLADRQRVQSTYDYAYHFDAARYALYLRRFA

SEQ ID NO: 82464 - protein, 201 aa, Unknown
  misc_feature (1)..(201): tr|T1CZN4|T1CZN4_9ZZZZ Tryptophan halogenase (Fragment) OS=mine drainage metagenome OX=410659 GN=B1A_04306 PE= 4 SV=1
STTSKARRWPNPVPAFSAGRRKQFWNRNCIAIGLAAGFMEPLESTSIHLIQSAITRLLALFPDRDFDPITAQEFNRITHVEYERIRDFLILHYHATRRDDAPLWRYTRSMPIPETLQYKIDHFRRHGRIVAESLELFQNPNWLAVLTGQEIWPERYDPLVDLRSDVDAPRLLASLRRVIGEAVQAMPTHRQYIERHCRARS

SEQ ID NO: 82465 - protein, 119 aa, Unknown
  misc_feature (1)..(119): tr|T0YAP7|T0YAP7_9ZZZZ Tryptophan halogenase (Fragment) OS=mine drainage metagenome OX=410659 GN=B1A_20952 PE= 4 SV=1
AAAEALGTCLTTPEHGRGALRRFERQVRHGPERFAWFIYRMTRPAMQSLFMEPHNPLRMREALLSLLSGDIFEDTPLWRSLRAFQAIYYLTSLTMPRRSFAALRRRALNIRCEPASGAP

SEQ ID NO: 82466 - protein, 325 aa, Unknown
  misc_feature (1)..(325): tr|T1BTQ3|T1BTQ3_9ZZZZ Tryptophan halogenase (Fragment) OS=mine drainage metagenome OX=410659 GN=B2A_05188 PE= 4 SV=1
LYAKYLRAYAEQRGVLRSEGKVVDVSLRADDGFIRSVTLAGGAVLEGDLFIDCSGFRGLLIEGALQTGYEDWQHWLPCDRAVAVPCTHGCDPTPYTRATAHAAGWQWRIPLQHRMGNGHVYCSRFIGDDAAAQVLLDHLEGTPLAEPRFLRFTAGRRRQFWNRNCIAIGLAAGFMEPLESTSIHLIQSAITRLLALFPDRDFDPITAQEFNRITHAEYERIRDFLILHYHATRRDDAPLWRYTRSMPIPETLQYKIDHFRRHGRLVAESLELFQNPNWLAVLTGQEVWPERYDPLVDLRSDVDAPRQLGSLRRVIAEAVQAMPTH

SEQ ID NO: 82467 - protein, 33 aa, Unknown
  misc_feature (1)..(33): tr|T0ZVH1|T0ZVH1_9ZZZZ Tryptophan halogenase (Fragment) OS=mine drainage metagenome OX=410659 GN=B1A_12774 PE= 4 SV=1
MRIEGDLFIDCSGFRALLIEGALKSGFEDWREW

SEQ ID NO: 82468 - protein, 170 aa, Unknown
  misc_feature (1)..(170): tr|K7WDL8|K7WDL8_9ZZZZ Tryptophan halogenase (Fragment) OS=uncultured microorganism OX=358574 PE=4 SV=1
RFRCRRGDRPPMRNFHRIMDIDEQAFMRATQATFKLGIVFDNWGEIGDSYIHSFGEIGQRSWMAEFHEFWLEARDQGFGGSLDEYCLELMVAKAGKFAKNVQDTRLNFAFHLDATRYAKFLRQLSEAAGVKRVEGKISEVSKHSETGELKALLLESGELIEGDLFVDCSG

SEQ ID NO: 82469 - protein, 129 aa, Unknown
  misc_feature (1)..(129): tr|K7X7J2|K7X7J2_9ZZZZ Tryptophan halogenase (Fragment) OS=uncultured microorganism OX=358574 PE=4 SV=1
FGVGEATIPIMVKFLHAYLERDVHELYRKVQPTWKFGVKFEWGQPGDYYFNYAFHPGPVLDSVYYGGDFNEYSLGSMLISNERAPILTGEGGQLTSLIDRIPFAYHLDNGRFVAYLREEAVRDGVERLE

SEQ ID NO: 82470 - protein, 199 aa, Unknown
  misc_feature (1)..(199): tr|T1BAW8|T1BAW8_9ZZZZ Tryptophan halogenase (Fragment) OS=mine drainage metagenome OX=410659 GN=B2A_01542 PE= 4 SV=1
NLVPHWLRGGHSASFCDFVTPQGRLCDEGLAPKTITHGEYRGAANYAYHLDAGKFGPFLAKHCIENLGVRHVLADLESVNQGESGDITSVSTRQAGELAGDLFIDCSGFSALLIGKALGVGFKECGDVLLCDTALAVQVPYATPDAPMPSQTIATAQDAGWIWDICLPTRRGVGYVYSSRHTSEEGRAGDSAALHRLAA

SEQ ID NO: 82471 - protein, 175 aa, Unknown
  misc_feature (1)..(175): tr|K7WT93|K7WT93_9ZZZZ Tryptophan halogenase (Fragment) OS=uncultured microorganism OX=358574 PE=4 SV=1
GVGEATVPAIREFNHRLGVDEPEFMRQTNASIKSGIQFENWGEPGDSYIHTFGYYGQPINDVPFQHFWLKMRELGDDTSFNDYCMPHVASELGRFAFPTNDPASVLSRYFYAFHFDATLYAQYLRGWAEERGVDRTEGKVVDFTLDGESGFIESITLESGEIIEGDLFIDCSGNR

SEQ ID NO: 82472 - protein, 149 aa, Unknown
  misc_feature (1)..(149): tr|D9PGL7|D9PGL7_9ZZZZ Tryptophan halogenase (Fragment) OS=sediment metagenome OX=749907 GN=LDC_0664 PE=4 SV=1
AFLTDVDLWNRGQEGGAAFGERLAATIHIASLVDEVGQGIVSRSYPADTSRRALLAGRRWAAVGDSAITWDPLSSQGIVSGVLMGARVASAIVESLGSGSSDALLTWEDDYRLLLDEHTGLRAHYATAEQRWPESPFWRRRSVSDARLA

SEQ ID NO: 82473 - protein, 45 aa, Unknown
  misc_feature (1)..(45): tr|T1BML3|T1BML3_9ZZZZ Tryptophan halogenase (Fragment) OS=mine drainage metagenome OX=410659 GN=B1B_05332 PE= 4 SV=1
MSVPAGLAHKMRLFADSGRSFRESEELFAEPSWVEVMIGQNILPR

SEQ ID NO: 82474 - protein, 96 aa, Unknown
  misc_feature (1)..(96): tr|T0Z3M6|T0Z3M6_9ZZZZ Tryptophan halogenase (Fragment) OS=mine drainage metagenome OX=410659 GN=B2A_11301 PE= 4 SV=1
ERLATARLATEVEATGSYSYRCTRAHGERHLVIGDAYSFVDPVFSSGVLFATVGGIAAAEALDVCLREPPGGARRCGASSTRCASGRAASPGSSTA

SEQ ID NO: 82475 - protein, 57 aa, Unknown
  misc_feature (1)..(57): tr|T1BY73|T1BY73_9ZZZZ Tryptophan halogenase (Fragment) OS=mine drainage metagenome OX=410659 GN=B1A_10669 PE= 4 SV=1
MPTSQSVKNIVIVGGGTAGWMAAAACAKVLGPSYAVHLVESEEIGTIAVGEATVPHL

SEQ ID NO: 82476 - protein, 164 aa, Unknown
  misc_feature (1)..(164): tr|K7WFU3|K7WFU3_9ZZZZ Tryptophan halogenase (Fragment) OS=uncultured microorganism OX=358574 PE=4 SV=1
VPPMRNFHRIMDIDEQAFMRATQATFKLGIVFDNWGEIGDSYIHSFGEIGQRSWMAEFHEFWLEARDQGFGGSLDEYCLELMAAKAGKFAKNVQDTRLNFAFHLDATRYAGFLRQLSEAAGVKRVEGKISEVRKHSETGELKALLLERGELIEGDLFVDCSGNR

SEQ ID NO: 82477 - protein, 309 aa, Unknown
  misc_feature (1)..(309): tr|A0A1B6NYV2|A0A1B6NYV2_9ZZZZ Tryptophan halogenase (F ragment) OS=marine sediment metagenome OX=412755 GN=MGS AQ_000345 PE=4 SV=1
MTTPHRIVIAGGGTAGWMAANLLAHRWANQAVTITLIESEDIGTIGVGEGSTPTLKRFFQTLDIPEYDWMEECQATYKVNIKFTGWNGNNSHSYSHPFISQLDVFSERAFHVNALTRRLGLDVETRPDKFLMAGYLAKKNLAPLPSHNFPFDIEYGYHFDSLKLGRFLRERAKSKGVYHVVGNIESVHTSPSGDISHLVCQDGQKLDGDLFIDCTGFSGLLLQKTLGVPFRDFSDNLFNDSAVVLPTPACANLPVETESVAMSNGWRWQIPLRNRTGNGYVYSQQYQEKDAAECELRRALGMENTTLKQ

SEQ ID NO: 82478 - protein, 434 aa, Unknown
  misc_feature (1)..(434): tr|T0ZJE3|T0ZJE3_9ZZZZ Tryptophan halogenase OS=mine dr ainage metagenome OX=410659 GN=B1A_15065 PE=4 SV=1
MAATGGSFKLGIEFVGWTRPDHRYFHPFGRFAPDFDSVSLHQYWLRERLRGDRAPLEDYAIAWAAARIGRFDRPLPDQQLVLSRLDYAYHFDAALYARHLQAYARQRGVKRTEGKIVDVALRGEDGFIAAVVLESGGRVEGDLFVDCSGFRGLLIEGALNSRLDDWRHWLPCDRALAVGCAVGAEFPPYTRSTARPAGWQWRIPLQHRIGNGHVYCSEYMRDDEAASILLAGLDGEALGEPRLIKFTAGARRESWSRNCVAIGLAAGFLEPLESTAIHLVQSAITRLLALFPDRDFNPLLQREFNRLTYTEYERVRDFLILHYHAQQREEPLWRYTRTMAIPQALQYKIDHFRYCGRIVAEPFELFQNSSWLAILVGQEVWPERYDPLVDLHTGVDAPRYLTGIRDVLERTARALPTHREYIERNCGAAASRAK

SEQ ID NO: 82479 - protein, 124 aa, Unknown
  misc_feature (1)..(124): tr|T1BI08|T1BI08_9ZZZZ Tryptophan halogenase (Fragment) OS=mine drainage metagenome OX=410659 GN=B1A_07416 PE= 4 SV=1
QGFLEPLEASAIVLVELSAKLVAERMPACREVMDIVARHFNEVTAYRWGRIIDFLKLHYVLTQRTDTAFWRDNVDPATVPDRLKDMLALWKYQSPWFFDELDRLEEVFPAASYQYVLYGMGFRT

SEQ ID NO: 82480 - protein, 224 aa, Unknown
  misc_feature (1)..(224): tr|T1BJ82|T1BJ82_9ZZZZ Tryptophan halogenase OS=mine dr ainage metagenome OX=410659 GN=B1B_05331 PE=4 SV=1
MTLENGTVIGGDLFIDCSGFRGLLIEQALHIGYIDYSQWLRCDRAVAVGCEKVGPPTPYTRVTARTAGWQWRIPLQHRTGNGHVYSSALISDDEATATLLANLDGKPLGEPRLLRFTPGMRKKFWSKNVVALGLASGFLEPLESTSIFLIQSGIARLVSLLPWNDFSEVVIDEYNAQLTFEMERIRDFLILHYHATQRDDAPLWRECAYVGARGSGAQDAPVRR

SEQ ID NO: 82481 - protein, 366 aa, Unknown
  misc_feature (1)..(366): tr|T1C7I8|T1C7I8_9ZZZZ Tryptophan halogenase (Fragment) OS=mine drainage metagenome OX=410659 GN=B2A_03279 PE= 4 SV=1
SGFEDWREWLPCDRAVATTAASAAAVRPFTQATARPAGWQWRIPQQHRSGDGHVYCSEFMSDDEATAILLAGLEGPALSEPRIIRISTGVRRRLWVRNCVAIGLAAGFIEPLESTAIHLAQSGINRLLALFPDAGFDPAIAEEYNRKMREEYEQVRDFVVLHYRATERRDTPFWRHCAALPAPPGLARKLAIFQATGQIFREGEELFTEQSWLQVLLGQGILPKRYHPAADDLPQGQLQEFLDTIRNVIATAVERMPRPRALHRRALRHRAALERAFTWSARRSRRSASRCTRGGSAVRVRSFPVRADPRQVARRVDPGMQVDQRIIAFRPDFLADEYRQPGGVLEQLERLGHDPSAVAEMIDLVL

SEQ ID NO: 82482 - protein, 161 aa, Unknown
  misc_feature (1)..(161): tr|T1B201|T1B201_9ZZZZ Tryptophan halogenase (Fragment) OS=mine drainage metagenome OX=410659 GN=B1A_07918 PE= 4 SV=1
MERVGSSPLTGVRYAYHFDAGLYAQHLRGVAESLGVVRHEGKVAHVEQRPEDGFIDALVLESGARIAAELFIDCSGFRALLIEGALRAGYDDWRRWLPCDRALAVASARVTPLRPYTQANARTAGWQWRIPLQARSGNGHVYCSEFISDDEAASVLLANLE

SEQ ID NO: 82483 - protein, 97 aa, Unknown
  misc_feature (1)..(97): tr|T1CQK1|T1CQK1_9ZZZZ Tryptophan halogenase OS=mine dr ainage metagenome OX=410659 GN=B1A_06122 PE=4 SV=1
MSVPAGLAHKMRLFADSGRSFRESEELFAEPSWVEVMIGQNILPRAYHPLVEQMPDDQLKQFMQGVAQVIESCVGMMPPHQTFIDRRCAAPALHPGS

SEQ ID NO: 82484 - protein, 209 aa, Unknown
  misc_feature (1)..(209): tr|T0Z9Q3|T0Z9Q3_9ZZZZ Tryptophan halogenase OS=mine dr ainage metagenome OX=410659 GN=B2A_15611 PE=4 SV=1
MACRAWSKGMSAQPIERTVIVGGGTAGWMTAALLAKALGGTARIELVESEEIGTIGVGEATIPQIRHINAFLGLDENEVMRAARATFKLGIQFNDWLRPGHSYIHAFSDIGLPQGGVPFQHYWLRERTQGGTHALWDYSLNAQAAAAGRFARMEHVGSSPLTGVRWAYHFDAGLYAAHLRRVAEHLGVTRREGRIVDVDLRGETASSRR

SEQ ID NO: 82485 - protein, 96 aa, Unknown
  misc_feature (1)..(96): tr|T1AXX6|T1AXX6_9ZZZZ Tryptophan halogenase (Fragment) OS=mine drainage metagenome OX=410659 GN=B2A_01600 PE= 4 SV=1
MVIDEYNAQLTFEMERIRDFLILHYHATQRDDAPLWRECARMSVPAGLAHKMRLFADSGRSFRESEELFAEPSWVEVMIGQNILPRAYHPLVEQMP

SEQ ID NO: 82486 - protein, 175 aa, Unknown
  misc_feature (1)..(175): tr|K7WFV7|K7WFV7_9ZZZZ Tryptophan halogenase (Fragment) OS=uncultured microorganism OX=358574 PE=4 SV=1
GVGEATVPHIGNFNRLLGIDEDDFLRHTQGTFKLGIEFVDWGRLGDRYLHPFGVYGAPMDAIPFHHYWLKLNGLERTKPMAAYSLACVAAAQNRFMRPVNLPKSPLGQIVYAFHLDAGRYAKYLRQYAEARGVRRIEGKVVDVGLRPDDGYVDAVTLENGSTLSADLFVDCSGNR

SEQ ID NO: 82487 - protein, 146 aa, Unknown
  misc_feature (1)..(146): tr|T1ASW8|T1ASW8_9ZZZZ Tryptophan halogenase (Fragment) OS=mine drainage metagenome OX=410659 GN=B1A_15435 PE= 4 SV=1
GWMTATALRRLLYPELTIEVVESDEIGIIGVGEATIPPFRRHNELLGINEREFVCATQATFKLGIEFRDWTRPGDSYIHGFGPLGLDLDGQPFHQYWTRAMQLGVAKDLGVYSFNVQAAREGRFIAHPGRRTEEHAARGHCLRVSL

SEQ ID NO: 82488 - protein, 69 aa, Unknown
  misc_feature (1)..(69): tr|T1A4B0|T1A4B0_9ZZZZ Tryptophan halogenase (Fragment) OS=mine drainage metagenome OX=410659 GN=B1B_10906 PE= 4 SV=1
MRTIGVGEGTWPTLRGSLERIGVAETALFRECDAAFKQGGRFVGWTTGAEGDAYYHPLMLPQGFSRVNL

SEQ ID NO: 82489 - protein, 92 aa, Unknown
  misc_feature (1)..(92): tr|T1A9D5|T1A9D5_9ZZZZ Tryptophan halogenase OS=mine dr ainage metagenome OX=410659 GN=B1A_12387 PE=4 SV=1
  misc_feature (25)..(25): Xaa can be any naturally occurring amino acid
MSIPDGLAHKVRLFADSGRFFRECXEMFGDLSWVQVLIGQNILPRTYHPLVEQMPDDQLRQFVQGVAQVIESCTGMMPPHQTFIDRRCAAPA

SEQ ID NO: 82490 - protein, 170 aa, Unknown
  misc_feature (1)..(170): tr|K7W8W1|K7W8W1_9ZZZZ Tryptophan halogenase (Fragment) OS=uncultured microorganism OX=358574 PE=4 SV=1
RFRRRRGDRPPMRNFHRIMDIDEQAFMRATQATFKLGIVFDNWGEIGDSYIHSFGEIGQRSWMAEFHEFWLEARDQGFGGSLDEYCLELMAAKAGKFAKNVQDTRLNFAFHLDATRYAKFLRQLSEAAGVKRVEGKISEVRKHPETGELKALLLESGELIEGDLFVDCSG

SEQ ID NO: 82491 - protein, 83 aa, Unknown
  misc_feature (1)..(83): tr|T0ZWT2|T0ZWT2_9ZZZZ Tryptophan halogenase (Fragment) OS=mine drainage metagenome OX=410659 GN=B1B_17631 PE= 4 SV=1
MPLHHYWLRERARGDTTPLQDYAMAWVAARNGKFERPLADRQRVQSTYDYAYHFDAALYAKYLRAYAEQRGVLRSEGKVVDVS

SEQ ID NO: 82492 - protein, 514 aa, Unknown
  misc_feature (1)..(514): tr|A0A160TKM8|A0A160TKM8_9ZZZZ Tryptophan halogenase, p utative OS=hydrothermal vent metagenome OX=652676 GN=MG WOODY_Smn3856 PE=4 SV=1
MVSPVRNIVIVGGGTAGWLTAGVIAARHQGRMAGGFTVTLVESPNVKIIGVGEGTWPTLRTTLQKMGVSETDFFRECDAAFKQGAKFAKWTTGAEDDAYYHPLMLPHGFSELNMVPHWLHDEQGRSFCDAVSPQGAICDAGLAPKMITTPEYDAVANYAYHLDAGKFAPFLQKHCTTKLGVRHVLADVTRVNQAEDGDIVSVSTEQAGDIAGDLFVDCTGFASLLLGKALGVPFRDCKDVLFCDAALAVQVPFDTPEDALASHTISTAQSAGWIWDIGLPTRRGIGYVYSTSHTDDESAERELRAYIGPAADKLSIRKIPIRGGHRETFWKRNCVAVGLAAGFLEPLEASAIVLIELSAKLIAEQMPANRDVMDIVARRFNETTSYRWGRIIDFLKLHYVLTKRRDSAFWIDNVDPATIPERLQNLLHLWKYQPPWFFEEFDRLDEVFPAASYQYVLYGMGYRTEIDALDTATTERLAARLREENARITGRMTSQLPRNRDLLDKIRQFGFQAI

SEQ ID NO: 82493 - protein, 495 aa, Halobacteriovorax sp.
  misc_feature (1)..(495): tr|A0A2D5YN23|A0A2D5YN23_9PROT Tryptophan halogenase OS =Halobacteriovorax sp. OX=2020862 GN=CME69_05530 PE=4 S V=1
MNKTVKNVVIVGGGTAGWISAAVIKRLIGAGVDVTLVESEEIGTVGVGEATIPPIITLNNVLGIEEKEFLRETNATMKLAIKFENWRVQGESYFHTFGAPGKSYAFCHFHHYLKRAQELGLADSIWDYDLNYLACKAGKFAHIKSPDPIIEMPYAYHFDASLYARFLRKKCESMGVTRREGIITDVQQDADSGFITGVTLKDGTHIEGDLFIDCSGFKGLLTQQTLNTGYEDWSHWLPCDRAVAMPSERHEHTRPYTRSIAHSAGWQWRIPLQHRNGNGLVYSSNYYSDEQALDILSSNLDTKPLAEPNFIRFKTGRRRKQWNKNVVAVGLSSGFLEPLESTSIHLIQSAVVRLIHLFPHDGFKQHQIDEYNKQSQLEFEQIRDFIILHYHVNERTDSHFWKDLREMDVPDNLTHKIELFRASGNLFREQNDLFLESSWLQVLIGQGVIQKDYHPLANALSEQKLQELLQNIKRIKNEPIGKIATHDDFLKQFCS

SEQ ID NO: 82494 - protein, 502 aa, Alphaproteobacteria bacterium
  misc_feature (1)..(502): tr|A0A257HNP6|A0A257HNP6_9PROT Tryptophan halogenase OS =Alphaproteobacteria bacterium PA1 OX=2015569 GN=CFE27_ 08610 PE=4 SV=1
MEPQAVEKIVIVGGGTAGWMTASALSKVLGPRVNIRLIESEEIGTVGVGEATIPQINIFNSILGIDENDFVAKTNGTFKLGIEFVNWHRQGERYMHAFGGIGRNLGFVPFHQYWMRQNLAGKETSLWDYSAATKAAYANKFDRLERLGASPLPGPTWAFQFDAGLYARYLRGFSEYHGVKRTEGKVRSVELDSLSGFIQSVTLESGEVVSGDLFIDCSGFRGLLIEGALQTGYEDWSNFLPCDRALAVPCESVKPLTSYTRATARHAGWQWRIPLQHRIGNGHVYCSAFTSDEEAERVLMSNLDGKPLADPRPLKFFTGRRKKLWNKNCIAVGLASGFMEPLESTSIHLIQSAVSRLINLFPTKACDTVLSDEYNQQAIEEYALIRDFLILHYHANARTDSPFWLHCQNMAIPDSLSHKIELFRKTGRIERRANDLFAEPSWLQVLLGQGIRPESYHALARDLSDEDLDGFLVNVSTIITKAVEHMPSHEDFIARNCRAPAA

SEQ ID NO: 82495 - protein, 523 aa, Porphyrobacter sp.
  misc_feature (1)..(523): tr|A0A0N1B1H5|A0A0N1B1H5_9SPHN Tryptophan halogenase OS =Porphyrobacter sp. AAP60 OX=1523423 GN=IP79_09845 PE=4 SV=1
MTEANGIGNASRLERVVIVGGGTAGWMAAAALSRYFNDGRRTITLIESDAIGTVGVGEATIPAIRSFNAMLDIPEAEFLRETRGTCKLGIEFVNWGQQGDRYFHPFGSFGQDLHGIPFHQLFLRERARSGGAGEICDYSMSAAAARAGHFARPAAGAQSAVNQIAYAYHFDAGLYAAYLRRLAERQGVVRIEGRITIVSRDSESGDVSNVTLDNGTQVEGDLFIDCSGFRGLLIEEALETGYEDWSHWLPMDRAIAVPTVSPGPPSPFTRSTAHDAGWQWRIPLQHRTGNGHVFSSAFMNEDKAREILLANLEGAPLAEPRALRFLTGMRRKAWNHNVVAIGLSSGFIEPLESTSIHLIQNGIARLFALFPDNPISPVERDEYNRGMRGIFEDVRDFIILHYKATQREDSEFWRYVRHMSVPETLSRKMAMWQRHGRVLRDEAELFSTPSWIAVMLGQNIWPDSYDPIADTLDEAKVAAAMAQMRAGYSDVAAQLPPHESFLRQSGSWNLQPAAGLAPQALSA

SEQ ID NO: 82496 - protein, 508 aa, Sphingomonas yabuuchiae
  misc_feature (1)..(508): tr|A0A147ISG3|A0A147ISG3_9SPHN Tryptophan halogenase OS =Sphingomonas yabuuchiae OX=172044 GN=NS355_09125 PE=4 SV=1
MAGDPMADRPVRVVVVGGGTAGWMTAAGLVGLLSKACTVHLVESEEIGIVGVGEATLPHLRLYLERLGIDEAEFMAATDATFKLGIEFRDFGRIGDRYIHPFGTYGRPLGGVGFHHYWLRRRAEGADVPPIGAYSAGVVAAETCRFERPGTDPDDPTTSFGYAYQFDATRFAPFLRAWAEKRGARRTEGRVVSIERNGGDGTVGAVTLSDGARIEGDLFIDCSGFRSLLLGQELAEAWEDWSHWLPCDRAVAVPSVRPDAPTEPFTRASATKAGWRWRIPLRHRVGNGHVYASAFCGDDQATEALLAGLDGAPLADPRFLRFRAGRRRRSFVGNVVAIGLASGFLEPLESTSIYLVQAAITALVEHFPDARVEAVDRDGFNAAIDAEYDRIRDFLILHYHATTRADSPFWNHVRTMTVPDSLAEKMALWRATAQVAHYRHGLFLEPSWIAVYLGQGIVPHGWDPRADRPDAAGLDRALTGLSRAIADRVGQMPPHDRALGLSGAGAAA

SEQ ID NO: 82497 - protein, 501 aa, Sphingomonas yabuuchiae
  misc_feature (1)..(501): tr|A0A147ISV9|A0A147ISV9_9SPHN Tryptophan halogenase OS =Sphingomonas yabuuchiae OX=172044 GN=NS355_09140 PE=4 SV=1
MTHPPIDHVVIVGGGTAGWMMAAAAGRYLDNGTRRITLIESDAIGTVGVGEATIPSILNFNALLGIDEAEFLRATQGSFKLGIEFVGWHRPDSRYVHPFGHYGRDIQGLNFHQLWLKMREQAGVGPIGDYSASTVAMERAAFGMPQSDPRSPLSGLAYAYHFDAGLYAAFLRRQAETDGVTRVEGRIVAVDRAPNGDVAAVRLDDGQRIAGDLFVDCSGFRSLLLGETLGVGFEDWSHWLPCDRAIAVPTERTEPLLPYTRATAHQAGWQWRIPLQHRTGNGVVYASRFMDDDDAERLLLSRLDAEPTAAPRRLSFTAGCRTRLWERNVVALGLAGGFLEPLESTSIHLIQQGISKLFALFPDKRMVSVERDEYNRQMGDNYRSIRDFIILHYHATARDDSPFWDHVRTMPLPDTLARKIALFREKGRIFRYEDELFATPSWVAVLLGQGVMPEGYDPVIDALDEERVLTALRQMRQATATAVATLPPHSVALAQLIGRSP

SEQ ID NO: 82498 - protein, 530 aa, Streptoalloteichus hindustanus
  misc_feature (1)..(530): tr|A0A1M4Y7N5|A0A1M4Y7N5_STRHI Tryptophan halogenase OS =Streptoalloteichus hindustanus OX=2017 GN=SAMN05444320 _102269 PE=4 SV=1
MDHRIRKVVVLGGGTAGWMTAAYLGKALHGTVSVTVLEAPTIPKIGVGEATVPNLQKLLFDFLGLPEEEWMPECNASFKMAVKFVNWRTPGEGEPTARWVDGRPDHFYHSFGTLPSHDGIPLSHYWVHDRLRGRTDDPFDYACLRETPAMDAKRAPRWFDGNRAMPYAWHFDAHLVADFLRRFATARQGVEHVQDELVDVEFDERGFITALRTRQGRRLDGDLFVDCSGFRGLLINQAMGEPFVDMSDHLLCDSAVAAAVPQDSAREGVEPYTSAIAMKSGWTWRIPMLGRFGTGYVYSSRFAEPDEAVRDFCALWGLDPETARLNRIRFRVGRNRRAWVRNCVGIGLSSCFLEPLESTGIYFITAAIHRLVTHFPDRRFDQALIDRFNHEIETMFDDTRDFIQAHFYFSPRVDTPFWKANKELRLAEGIQEKVAMYRAGMVVNPPASDDESTVYGSVDLDFRKVWTNGNYYCVLAGLGVLPDRPLPLLLHRPRSLDSVESRFSTVRDRQRELVATLPSNYDYLRRLHAK

SEQ ID NO: 82499 - protein, 508 aa, Sphingomonas yabuuchiae
  misc_feature (1)..(508): tr|A0A147IUD5|A0A147IUD5_9SPHN Tryptophan halogenase OS =Sphingomonas yabuuchiae OX=172044 GN=NS355_07350 PE=4 SV=1
MDAAPSADHIAQRIVIVGGGTAGWMAAAALARFAPASTRITLIESDAIGTVGVGEATIPGIRLFNQMLGLDEAEFLRSTNGSFKLGIRFEGWSGEGSSYLHAFGSIGRGLGLVPFHHYWLRSGGAANPASLWGHSPSAQAAMAGRFAPDPGRPDLPSGLAWAYHFDASLYATLLRRHAETAGVVRVEGCIASVARDAGGRIDHVVLDGGEVHAGDLFIDCTGFRALLIGETLAEPFDDWSELLPCDRALAVAGERAAPLPPYTRAIAHGAGWRWRIPLQHRTGNGLVYDNRHLSDDEATDRLLSALNGEAMCEPRQLRFTTGRRGRAWVGNCVALGLAAGFLEPLESTSIHLIQSGIARLLDYWPGQTPQPIEVDAYNRETAAEWLAIRDFLILHYHANARPEPFWAERRAVPLPDSLAARIALFRANGRFRREDEELFAEPAWVQVMIGQGIVPAGHHALADTLSADELDDFLSLTRRHAAQVAARLPTHDAFLAAHCAAPAPKVFA

SEQ ID NO: 82500 - protein, 507 aa, Shewanella sp.
  misc_feature (1)..(507): tr|A0A1Z4AHE5|A0A1Z4AHE5_9GAMM Tryptophan 7-halogenase OS=Shewanella sp. FDAARGOS_354 OX=1930557 GN=CEQ32_2159 5 PE=4 SV=1
MTIRKIAIIGGGTSGWLAANHLGRALKGRSGLSIAVIESPDIPIIGVGEGTVPSIRKSLQSFGISESEFIRTCDVTFKQSIKFVNWLDQPRHGKHNFYHHLFDIINLHQGDAVSAWLAEQSGHFADFISPQHLACEAAKAPKLITTPEYAGVLGYAYHLNAAKFAKLLAKNAIEKFNVEHILTTVHDVCLGVDGAIESLQTERGNLSFDFYIDCSGFESILLAKALKVPFISKAQQLFIDTALVAQIPTQPADVIPPYTKATAHQAGWIWDIALTQRRGTGFVYSSAHMNQTEAEQKFDRYLGGKLADIPHRKIPMTVGYRQQFWVKNCVALGLAQGFLEPIEATSILLTDFSARFLAERFPANKDEVDYLSMRFNRTVNHAWERVVEFAKLHYCLSDRTDSAFWLDNQREETIPEPLKERLKMWKSFSPIAEDFPSKFEVFNLDNYLYVLYGMKYPTQPHDRGLVAKANLNAYMSNMSNMKRQMFEGLPEHRELIDKICTYGLQAI

SEQ ID NO: 82501 - protein, 491 aa, Amycolatopsis keratiniphila
  misc_feature (1)..(491): tr|A0A1W2LXX0|A0A1W2LXX0_9PSEU Tryptophan halogenase OS =Amycolatopsis keratiniphila subsp. keratiniphila OX=22 7715 GN=AVR91_0211015 PE=4 SV=1
MSVEDFDVVVAGGGPGGSTLATLVAMQGHRVLLLEKEVFPRYQIGESLLPATVHGVCRMLGVSDELANAGFPLKRGGTFRWGARPEPWTFHFGISSKMAGSTSHAYQVERAKFDQILLNNAKSKGVVVREGCAVNDVVEEGERVTGVRYTDPGGEEREVSARFVVDASGNKSRLYSHVGGTRNYSEFFRSLALFGYFEGGKRLPEPVSGNILSVAFDSGWFWYIPLSDTLTSVGAVVRREDADKIQGDREAALKALIAECPMISEYLSNATRVTTGKYGELRVRKDYSYQQTTFWRPGMILIGDAACFVDPVFSSGVHLATYSALLAARSINSVLAGELDEKTVLNEFEARYRREYGVFYEFLVSFYQMNVNEESYFWQAKKVTNNQHTEIESFVELIGGVSSGETALTAANRIAEHSAEFAAAVDEMAGGGGDNMVPMFKSQVVKQAMQEAGQVQMKALLGEDAEPEVPLFPGGLVTSPDGMKWLPHHPV

SEQ ID NO: 82502 - protein, 503 aa, Alphaproteobacteria bacterium
  misc_feature (1)..(503): tr|A0A257HKP8|A0A257HKP8_9PROT Tryptophan halogenase OS =Alphaproteobacteria bacterium PA1 OX=2015569 GN=CFE27_ 12800 PE=4 SV=1
MQGQSQKLERLVIVGGGSAGWMAASAIANAAGRGCAITLIESDEIGTVGVGEATIPPIKVFNRSLGLDEKDFVVRTQGTFKLGIEFVNWGRQGHRYFHPFGTYGADFDMVPLHQYYLRARQTGRDPGSLDEFTMAWQVAKRGRFAPPTQDPRLIQSTFDYAYHFDAGLYAQFLRSYSEARGVVRMEGKIADVGLGGEDGRITHVTLEDGRKVEGDFFIDCSGFRGLLIEGALKAGYEDWSHWLPCDRAMAVPCEHGGEFTPYTRSTAREAGWQWRIPLQHRIGNGYVYSSGFISDEEVERTLLANLDGKALADPRPLRFTTGKRKKIWHKNCVAIGLAAGFMEPLESTSLHLIQTGITRFLALFPDKTVDPVLETEFNRLSTYEWERIRDFLILHYCATERDDTELWRYCASMSLPDTLTYKMAHFRKYGRMVSDGPELFLNPSWLAVYLGQFVEPTGYDPLVDTRTHVEADRHLASLKMLMAQTAETFPTHRDFINQTCRAG

SEQ ID NO: 82503 - protein, 503 aa, Porphyrobacter sp.
  misc_feature (1)..(503): tr|A0A0N1AWF6|A0A0N1AWF6_9SPHN Tryptophan halogenase OS =Porphyrobacter sp. AAP60 OX=1523423 GN=IP79_12630 PE=4 SV=1
MAIQRIIIVGGGTAGWMAAAALSRIKAGRPVEIILIESEAIGTVGVGEATIPPFVGFNELLGISESEMLAEVGGTFKLGIQFENWGNLGESYIHPFGAYGYTMGGISFHHVWHRMNQGGDKRPIQVFNLETMAAYFGKFARTQDYSRDDLPPVNYAYHLDAGRYAAFLRRFAETRGVVRHEGKVADVALDGETGFVTGVTLDDGRQFDGDLFIDCSGFRGLLIEQALETGYDDWSRYLPCNRAVALPCLREDGSPPPPFTRATAHSAGWQWQVPLQHRNGNGHVYCSSYMEDQAALDILLGNIAGKPQAEPNFLRFVTGRRKKFWNKNVVALGLAAGFMEPLESTSIHLINTGIDKLISLLSLDGVTQVQEDTFNRLTGREYARIRDFLILHYNATQRSDSEFWNYVRTMEVPDTLREKIEIFKANGQIFREEDELFTETSWAAVMMGQGISMDGHNAMADALDPAKTAEEVNEMERSIRYLVQHMPGHGDYLARYCPAPIAA

SEQ ID NO: 82504 - protein, 510 aa, Porphyrobacter dokdonensis
  misc_feature (1)..(510): tr|A0A1A7BD02|A0A1A7BD02_9SPHN Tryptophan halogenase OS =Porphyrobacter dokdonensis DSW-74 OX=1300349 GN=I603_2 365 PE=4 SV=1
MTIEASSPPAPLKRIVIVGGGSAGWMTAAALAEAVGRDCSITLIESEAIGTVGVGEATIPPIRHFNRRLGIDEATFVRETQGSYKLGIEFVDWGRKGHRYFHPFGQYGAEFDSVPFYHHWMRESLAGRVDGPIDDFAMCWAMAKAGKFAHPSTNRRLIQSTFDYAYHFDAGLYAAFLRRFAEARGVVRKEGRVADVALRGQDGFIESVTLEGGERIDGQFFIDCSGFRGLLIEEALAAGYDNWQHWLPCDRAVAAPCESGEFTPYTRSTAKEAGWQWRIPLQHRTGNGYVHCSEFLSEDEASTELLSTLDGKPLADPRTLRFVTGKRREFWKKNCVAIGLSAGFMEPLESTSLHLIQYGILRLIALLPDSAMSPLLAREYNAQTSREYELIRDFLILHYKASTRDDSALWRYCAAMPIPDSLQYKIDHFRAHGTLVSDPGELFANPSWIAVYLGQGIVPRRAPALAAMRSGVPVAERLAQIRQAMDEAVAAMPTHREFIARHCAAPIPAA

SEQ ID NO: 82505 - protein, 505 aa, Sphingomonas yabuuchiae
  misc_feature (1)..(505): tr|A0A147IRD6|A0A147IRD6_9SPHN Tryptophan halogenase OS =Sphingomonas yabuuchiae OX=172044 GN=NS355_10740 PE=4 SV=1
MDKAITRIVIVGGGTAGWLAAARIAAATAGSVTVTLIESPDVPTLGVGEGTWPTIRRTLERIGITETELLLGCDGSFKQGTRFDGWATGASDDRYYHPFVPPIDADPADLPRDIPYALATCPQPLVCAEDLAPRQRGMPDYAGALNYAYHLDATKLAALLTRHATTRLGVRHVRDHVTGVERGEHGGITAVHVRGSEIVAGDLFLDCTGHAALLIGKTLGVETVDASSVLFNDRALAVQLPVPPNSPIASQTVATAHSAGWIWDIGLPMRRGIGCVYASAFLSDDEAEGVLAEYCRRISVDSPAPRRLTFRSAYRSRPWAANCLAIGQSAGFMEPLEASAIVMIELSLDALLDDFPAVSSLMPIQARRFNALATYRWERIVDFLKLHYILSHRDEPYWRAHRDPASQPDRLAEMLALWRYRSPSAFDLPMQDELFPAASYRYILRGMGFPAPLPSPVPRPLRPDLSSQLRQIDQRGRALAASLPTNRAYLDALRAEQAPISERRA

SEQ ID NO: 82506 - protein, 516 aa, Sphingomonas yabuuchiae
  misc_feature (1)..(516): tr|A0A147IQJ1|A0A147IQJ1_9SPHN Tryptophan halogenase OS =Sphingomonas yabuuchiae OX=172044 GN=NS355_11440 PE=4 SV=1
MVPQPVREDVSVVEGQARSILIVGGGTAGWLTAAYLARFLGPATRITVLEDPAIGAIGVGEGAFPTMRSTLRFLGIDEAQFIRAAGATFKQGIRFDDWRYAPDAGKRHRYVHPFEPPFRAEGVDLVAHWLAQDPATRAPFAEAVTIQHRVAAAGRGPKQAGEGAFDGPLSYAYHFDAHRLVALLADHAMGLGVRHLEGRMIGAQVGADGLIAHVATDRQGTLNADLYVDCTGQRAELISGALGEPLASVRDQLFTNRALACRLPYDAEHGHVLPTMTIATAHRAGWTWDIGLAEGRGIGTVYSDAHMNDEAAVATLAAYLGQDPDRLELRLLSFEPGYRQRPWIGNCVAIGLAGGFLEPLESTGIVLIEAAVAMLAELFLHRGPIAAPAARFNALMTARYRTIVDFLKLHYCLSSRAEPFWRDNGAAATITDRLRDLLEQWRYRPPGRFDFTLDVESFAHFNYQYILYGMGFADGETRPTGASGEAERLFRKLQMFGDRAVADLPSHGELVAAMLD

SEQ ID NO: 82507 - protein, 511 aa, Sphingomonas sp.
  misc_feature (1)..(511): tr|A0A514WG37|A0A514WG37_9SPHN Tryptophan halogenase OS =Sphingomonas sp. IC081 OX=304378 GN=DM450_05085 PE=4 S V=1
MKGGMDEGALRSLVIVGGGMAGWTAASMIARKFRPGPLRITVIESEDDGRADLPANLLDGSATPLMRKFNAALGIEENRFLAQSSGTFRLGTEFRDWREAGNVHFHGYGDYGEAIDGIAPHHFWLRLRAGGDTAPIDDWSLAYAAASRGRFAVPAGDGARFRHGYHFDAAQHVRFLRAYAERCGVERIDGGVVDAALEGAEGHIAAVTLADGRVVDGEFFIDCTGFEGLLIEQVLQTGYEDWSHWLPCDSAVLAPGKRSGALPPHAVSLAREAGWLGQAALQHRDDWGYFYSSRFSDDDRAREELLAAMTGEPLAPPRLLRFTSGHRRKFWNRNCLALGQAAGFMEPLAATALHLLQSMVLRFVEFFPDVDFAPAIAAEFNRLTLGEYERIRDFLTLHYFPSRRPEPLWHYCRNMDLPDTLVHRLEVWKAAARVTTEAQECFQEADWVAILLGNGIVPRRVDPIAARIDPGKVAMGMKARRDAVVRTAHAMPTHAHYVERNCTPETSVART

SEQ ID NO: 82508 - protein, 504 aa, Porphyrobacter sp.
  misc_feature (1)..(504): tr|A0A0N1AXF1|A0A0N1AXF1_9SPHN Tryptophan halogenase OS =Porphyrobacter sp. AAP60 OX=1523423 GN=IP79_14385 PE=4 SV=1
MAGPAPLKTIVIVGGGSAGWMTAAALADAVGRDCKITLIESEAIGTVGVGEATIPPIRNFNHRLGIDEATFVRATQGSFKLGIEFIDWGRRGHSYFHPFGQYGAEFDSVPFYHHWMHESIEGRTNGPIDDFSMCWAMAKAGKFTHPSPDRRMIQSTFDYAYHFDAGLYAAFLRRFAETRGVTRIEGRVVDVALRGEDGFIAGVTLENGEAVEGEFFIDCSGFRGLLIEEALGAGYDNWQHWLPCDRAVAVPCEKGEFTPYTRSTAKAAGWQWRIPLQHRTGNGYVHCSEHISEDEATAQLLSTLDGAPLADPRTLRFVTGKRREFWRRNCVAIGLSAGFMEPLESTSLHLIQYGILRLIALLPDSAMSPLLSREYNAQTASEYERIRDFLILHYKASERQDSELWRHTAAMPIPDSLQYKIDHFRNHGMLVSDERELFANPSWIAVYLGQGIIPQRAPAITAMRSHVPVAQRFAAIRSAMDEAVAAMPSHADFIARHCPAPPAT

SEQ ID NO: 82509 - protein, 537 aa, Sphingomonas yabuuchiae
  misc_feature (1)..(537): tr|A0A147IWP4|A0A147IWP4_9SPHN Tryptophan halogenase OS =Sphingomonas yabuuchiae OX=172044 GN=NS355_05190 PE=4 SV=1
MTPHSDHLIRRVVIVGGGTAGWMAAAAFARLLNNGYTQVTLVESEEIGTVGVGEATIPPIITFNQMLGLDENDFLAKTGGTFKLGIEFVDWGDKGERYIHPFGRHAQDLQGVHFHQLYLRERSRRALPDIAEWSMSAVAAKAGKFGRAKPDARSPIRELFYAFHFDASLYARYLRGYAERGGVTRVEGRIDAVKLRSEDGYVEGVTLADGRRIEGDLFIDCSGFRGLLIEEALGTGYESYARWLPCDRAVAAPCALPNPTEPDPFTRATAREAGWQWRIPLQHRMGNGLVYCSDYLDAETAEAQLLGSLEGELLGDPRHLRFTAGRRRQSWNRNVVALGLSSGFLEPLESTSIHLVQAAIQRLIALFPDTRFDPAERDEFNRQMHDLYEDVRDFIILHYKATRRDDTPFWNRVRTMDVPDSLARKMALWSGKGRLFREGYDLFSNPSWVAVCLGQGLVPESWEPAADALDEDLVAQALQQMHAGYADTAARMPSHGDFLRMTAPSPLAPAMTAARGGQDGFDFTRTSGTVQAKGPLL

SEQ ID NO: 82510 - protein, 503 aa, Alphaproteobacteria bacterium
  misc_feature (1)..(503): tr|A0A257HLL2|A0A257HLL2_9PROT Tryptophan halogenase OS =Alphaproteobacteria bacterium PA1 OX=2015569 GN=CFE27_ 12935 PE=4 SV=1
METNGLLPKSIVIVGGGTAGWMTAAALARFVGHKVKITLIESSDIGTVGVGEATIPPIRNFNAILGLDEAEFVRETKGTYKLGIEFCDWVKPGHRYFHPFGVYGPSLNQPNFFHQWLRARAGGQLPELSEFSLCSLAARAGRFAPQGRDPASIQATLTSAFHFDAGLYAAYLRKFAEARNVRRLDQKVQSVRQSPETGNVEAVLLESGEAIEGDFFVDCTGFRGLLIEQTLKTGYEDWRAYLPADRALAVPTAKVGPAAPFTRSTARSAGWQWRIPLQHRTGNGYVYSSQFVSDEAAHETLMGNLDAPALADAKPLRFVTGRRKKLWNKNVVAIGLASGFLEPLESTSIHLIQTGITKLLDFFPSRQNHAADAATYNRLGQEEYESIRDFLVLHYMANQRVGEPLWDYCRQMALPDSLQERLALFQHGGRVPPRAFDLFTETSWVAVFMGQGIEPQGYNPLVEVHEGAAGRQFLADAHRALAEVSRQLPEHEDFLRQAGMMPT

SEQ ID NO: 82511 - protein, 526 aa, Sphingomonas sp.
  misc_feature (1)..(526): tr|A0A514WP12|A0A514WP12_9SPHN Tryptophan halogenase OS =Sphingomonas sp. IC081 OX=304378 GN=DM450_21160 PE=4 S V=1
MDAKVKRILVVGGGTAGWLTAGYLAKMLGADLPGGISITLVESPDIGIIGVGEGTFPTIRRTLERIGVREKDLLRRCEATFKQGVKFVDWLHPAGHGGADNYLHGFQEADDRKGGPEYLPYWLLGEAGDMPWDEASTPQKRAVDALRAPKLANHPEYAGVLNYAFHFDAGALALLLRDQGIANGVLHIADTVQEVLCTEDGAIAGVRTQAHGVLEADLFIDCSGFRAELIGKALGQKWKSCTDVLFCDSAIAAQVPYDTPTTPIQSCTLSTARDAGWIWDIGLQTRRGTGYVFSSAHCDPETAERTLRSYLGTHGETASTRRLQFNAGYREVNWYKNCVAVGLSSGFFEPLEATGIVFAEIAAGAIANLFPWAGDYETSARQFNRGMLERYERARDFLKLHYSLTQRRDTDFWRDNVRAETVPDSLNELLDRWRHRPPNEKDFNPNVDIFPATSWQCILYGMGWKTDLSAKAGIMRLRPEAREAFEQVRRQSEYAVTNLPGNRELTRQMLAPQPGSTIQAFAGIRA

SEQ ID NO: 82512 - protein, 481 aa, Unknown
  misc_feature (1)..(481): tr|T1WBA0|T1WBA0_9ZZZZ Tryptophan halogenase OS=uncultu red organism OX=155900 PE=4 SV=1
MNPGFRIAIIGGGSAGWMTAAALARALPRDTRLVVVDDPQAPDSGCLAPFDSTLPSLPAFSRSLGLDEDRLMKATDATFKLGSRFSGWTRREASYIHPFSEFGAVIDGVAFHHLWMKLRQAGQVEPFEDFALAAIAARAGRFARPDHDPRSVTSTMAYGLHLDVGAWTAGLRVRAGQDGVARIEGVPASVEQSPDGKTVVAVRLEDGAKVEADLFIDCTGTRALVIEALSSDREDWSRWLPCDRVEWSRGGHGAASLLTEATALRTGWRQTVPLQSGVASVTFSSSRHTPDTPSPGGRSFVSGRRPPWVGNVIALGLSATVLEPLEGTALHQVQSGIAKLLGLFPRRGAGDSLAQEYNRLMQAESERIRDLLIAHYRLNRRRGQPLWDAAAAMDPPAELASKIRLFGSRGRVPLFDEETFEEASWIATFMGHHLQPERYHPLADRFSQAELRARLDRMRAVMRTAVEAMPPVSAFQSSVPS

SEQ ID NO: 82513 - protein, 240 aa, Unknown
  misc_feature (1)..(240): tr|T1W8M3|T1W8M3_9ZZZZ Tryptophan halogenase (Fragment) OS=uncultured organism OX=155900 PE=4 SV=1
MTGTLGSVVIVGGGTAGWMAAVAFGRLLGPAKTRVTLVESDDIATIGVGEATIPPIRTFHAMLGIDEDAFLRATGGSYKLGIRFEGWTRPGESYVHPFGQIGTDIAGVPFAAQWLRARQAGAADALGAYSLEARAAEAGRFSRPIANGDSPLSRIGYAYHFDAGRYAAFLRAQAEAHGVVRREGRVDRVERGPAGIAAVHLADGSRIEGDLFLDCTGFRALLIEGALQAGWTDWSQWLPC

SEQ ID NO: 82514 - protein, 505 aa, Unknown
  misc_feature (1)..(505): tr|T1W807|T1W807_9ZZZZ Tryptophan halogenase OS=uncultu red organism OX=155900 PE=4 SV=1
MTIGAPVRRIVIVGGGTAGWMAAAALARLIPTGASITLIESDAIGTVGVGEATIPPIRGFNAMLGIDEAEFLAATAGSFKLGIEFVDWGALGERYLHPFGGFGFDIEGVRFHQYWRRRRAAGIVEDIEAYSLCAVAARAGRFMPPSPDPASVLSQMAHAYHFDAGLYARFLRGRAERDGVVRVEGDVVNVALDGETGHVRHVTLAGDRVIEGDLFLDCSGFRGLLIEQTLGAGYEDWTHWLPCDRAVAMPTANAGAAITPYTRSNARAAGWQWCIPLQHRTGNGYVYSSAHCSDDEAAATLHAGGDGTPLAEPRLLRFTAGRRRKQWIGNVVALGLASGFTEPLESTSIHMVQTGISKLLALFPDQGFSPVEIDTYNRLAATQFDQVRDFLILHYHATRRDDSPFWRETRARAIPDSLSEKLALWRRRGRLFRWEDDLFAEASWVAVLLGQGIVPDGWDRLADAVDAREVDARFDRLRAMFADAASRMPRHEEYIARICPTRVRA

SEQ ID NO: 82515 - protein, 502 aa, Unknown
  misc_feature (1)..(502): tr|T1WBD1|T1WBD1_9ZZZZ Tryptophan halogenase OS=uncultu red organism OX=155900 PE=4 SV=1
MDVRYERIVVLGGGTAGWMAALAFATGLSRSSVTLVESEEVGIVGVGEATFPSIRAFHDIVKVDEADFLRATNGTYKLGIRFCDWRERGTDYFHTFGSFGPVDGPNTLWGQYRRLRRNPLPGGQDAPGVLGEQCLPTVMAMHGRFCMPAPKQGAHFNYAYHFDATLYSAYLRELAVKRGVQRVEGKVVDVARRPDGAVASLRLADGREIAGDLFIDCSGFVSLLLGRTLEEPFVDFSHWLPVDRAWACPAEPKDENPTPYTRATALEAGWSWRIPLRNRTGFGHVFSSRYIDENRAREQLLAQMDGTPLAEPRLLRFTTGHRQRFWVNNVVALGLSSGFLEPLESTSIYLVQSGLGRLMGLLQEGKPVGADAVRSYNTGLVRQFERIRDFIILHYCLTQRRDSAFWRDMGSMALPETLAFKLHAWRQAGVLHQYDEEGFDESSWLAIHAGMDDWPERCDPRHAEMPPDEAGRWLEGRRRQLVQVAESLPTHQEFLAHVLGKA

SEQ ID NO: 82516 - protein, 496 aa, Unknown
  misc_feature (1)..(496): tr|T1W536|T1W536_9ZZZZ Tryptophan halogenase OS=uncultu red organism OX=155900 PE=4 SV=1
MSGEAAARRIVIAGGGTAGWMAAAAIARTMGRTVDLTLVESDAIGTVGVGESTIPPLATFNRLLGINEADFMRATQATFKLGIMFDGWKTAGESYFHSFGLTGKDHWSAGFQHFWLYGRHMGHDQPYDDYCLELLAAAEGRFAHLPDERMNYAYQLDSALYGQFLRRMAEADGARRVEGRIARVELDGESGDIAALVLESGDRIAGDLFIDCTGFRALLIEQALHAGFDDWTHYLPCDAAIAVQTESAGPPPPFTRAMAHDAGWQWRIPLQHRTGNGIVYCSRYLDHDAALERLLGNLTGPVLTQPNKLRFVTGARRKQWHRNCIAIGLSGGFMEPLESTSIHLIQRAILRLIRMMPAGPVSPRDIAEFNDQQYQDMLQIRDFLILHYKVTERRDSPFWRQCAAMEIPDTLAQKIELFRETGRVFRRNEELFAENSWVQVMMGQGIMPQSWHPIATKLRDEELAKLLDGLRDATRRTVAGLPEHGAYVARYCGQSG

SEQ ID NO: 82517 - protein, 500 aa, Unknown
  misc_feature (1)..(500): tr|T1W6E7|T1W6E7_9ZZZZ Tryptophan halogenase OS=uncultu red organism OX=155900 PE=4 SV=1
MGARMQVVIVGGGTAGWMTAAALAMSFAGRLADVTLIESEEIGTVGVGEATVPHIKFFNKRLGIDESDFIRRTNTTFKLGIEFRDWSRLGDSYIHPFGDFGHDIDGLPFHQHWLHATRDDARDMPGLEACSLPIVAARDNRFAPPLDDPRSIGSTYSYAYQFDAALYAAYLRDYAEARGVVRIEGRVDAVEPHEDGIAAVRLADGRRIAGDLFVDCSGFRALLIDGALKVGHQDWSHWLPCDAAWAVPTANTGPLTPYTRATARDAGWQWRIPLQHRTGNGHVFSTRFTDPETARTLLLDNLEGEALAEPRMLRFRTGRRDRQWVGNCVAIGLSAGFLEPLESTSIHLIQLAIGKLIELFPAGGVFDPVDEAEYNRAMALEYDRVRDFLVLHYCATERDDTPFWRYMRTMALPSSLTEKIAEFRERGIVAQYREGMFLPASWLAVYHGQRIVPGRVNPLIADTPVAASQARVAAVAAACQRAVASMPTHEDYIARIRQAA

SEQ ID NO: 82518 - protein, 502 aa, Unknown
  misc_feature (1)..(502): tr|A0A160TLY6|A0A160TLY6_9ZZZZ Tryptophan halogenase OS =hydrothermal vent metagenome OX=652676 GN=MGWOODY_Smn1 555 PE=4 SV=1
MTDGIPHPRRIVIAGGGTAGWMAAAAIARTLGRTADLTLVESDAIGTIGVGESTIPPLVVYNRLLGINEAEFMRATQATFKLGILFDDWKQVGDRYFHSFGATGKDHWSAGFQHFWLYGRTRGHDQSYDDYCLELIAALQGKFAHLPDDGMNYAYQLDSTLYAKFLRTMAEGDGTKRIEGKIARVDLDGESGNIAALVLESGMRIEGDLFLDCTGFRAVLIEQALHAGFDDWTHYLPCDSAIALQTENVRPPVPYTRAMAHDAGWQWRIPLQHRSGNGLVYCSRYLSRDDALERLLGNVEGEVLTEPNFLRFTTGSRRRQWYRNCIAIGLSGGFMEPLESTSIHLIQRAVLRLIRMMPMGEISARDVAEFNDQQDEDTRQIRDFLILHYKATERRDSPFWRQCAAMPIPDTLAQKIELFRETGRVFRKNEELFAENSWVQVMMGQGITPRTYHPIAEKLRDDEVDKLLGTIRDNVSRTVASLPEHGAYVARYCGAATPTTRG

SEQ ID NO: 82519 - protein, 149 aa, Unknown
  misc_feature (1)..(149): tr|A0A1B6NSP7|A0A1B6NSP7_9ZZZZ Tryptophan halogenase OS =marine sediment metagenome OX=412755 GN=MGSAQ_002748 P E=4 SV=1
MQSRRGVGHVYSSRHQSKDDAYARLDTYVRQTSTLNGIDGINVKDITIQSGHRQRFWQNNCVAVGLAAGFLEPLEASALVLVELSASMIAEQLPANRAVMDIVAKRFNDTFSYRWQRIIDFLKLHYMLSKRKDSAFWRDNRDSHTIPIH

SEQ ID NO: 82520 - protein, 167 aa, Unknown
  misc_feature (1)..(167): tr|K7WDL2|K7WDL2_9ZZZZ Tryptophan halogenase (Fragment) OS=uncultured microorganism OX=358574 PE=4 SV=1
FDFGVGEATVPPMRNFHRIMDIDEQAFMRATQATFKLGIVFDNWGEIGDSYIHSFGEIGQRSWMAEFHEFWLEAREQGFGGSLDEYCLELMAAKAGKFAKNVKDTRLNFAFHLDATRYAGFLRQLSEAAGVKRVEGKISEVKKHSETGELKALLLESGKLIEGDLFV

SEQ ID NO: 82521 - protein, 531 aa, Unknown
  misc_feature (1)..(531): tr|A0A3B0SNI7|A0A3B0SNI7_9ZZZZ Tryptophan halogenase, p utative OS=hydrothermal vent metagenome OX=652676 GN=MN BD_ALPHA05-120 PE=4 SV=1
MTIRPNPYGRSSTIVKPIKSIVVVGGGSAGWITAGVIAARHKSHGNDGVKVTLIESPNIPTVGVGEGTWPTMRSTLIKLGISETEFIRECDASFKQGAKFARWMDGTEDDYYYHPLMLPQGFPSVDLAPYWHKFTANDPNPISFSQGVCFQEAACDAGLAPKLITTPEFGSVANYAYHLDTAKFAPLLQRHCTQKLGVTHILDNVVDVVSSECGDVSHLVTKSSGNLEGDLFIDCTGFASVLLGKHFSTPFVDRSDVLFIDNALAVQVPYEREDSPIASHTIATAQSAGWVWDIALPTRRGVGYVYSSRHTSEDEAHQELRAYVGPAIDKLSVRKIPIRSGHRATFWKRNCVGVGLSAGFVEPLEASALVLIELSAEMISQQLPACREVMDITAKRFNDVFSYRWDRIIDFLKLHYSLSKRTDSQFWIDNRDPATIPESLQNQVELWRYQSPGDHDFTSNNEVFPAASYQYVLYGMGFKTDFRYRAHMLADEEKAKEQFAQNAAMKQKVLKSLPTNRELINKIHQHGLQKV

SEQ ID NO: 82522 - protein, 104 aa, Unknown
  misc_feature (1)..(104): tr|D8VN64|D8VN64_9ZZZZ Tryptophan halogenase (Fragment) OS=uncultured organism OX=155900 PE=4 SV=1
MTNINPIKKIVIVGGGTSGWIAASMLSYHLKAELCEIELVESSDLGTIGIGESTIPPVVRLIQNLGIDEQQFIQSTQACFKLGIKFIDWRQKSGIDNYNGPKVA

SEQ ID NO: 82523 - protein, 510 aa, Unknown
  misc_feature (1)..(510): tr|T1WA39|T1WA39_9ZZZZ Tryptophan halogenase OS=uncultu red organism OX=155900 PE=4 SV=1
MSDRDAVEKRGADNPVRSILIVGGGTAGWMAAAALTRVMRSGPVKVMVVESDEIGTVGVGEATIPPIANFNGLLGIDEADFMRRTQATFKLGIEFVDWDRIGHRYMHPFGAFGVDMEGVKFHQHWLRARQGGDASSLWDYSLCSVAAAAGRFTRAAREDRSIVSAMTHAYHFDAGLYAAYLRAYAETRGVTRREGRITEVVLRSDDGFVDAVKTADGERLEADLFIDCSGFRGLIIEQALKAGYDDWTHWLPCDRALATPSQSSAPPTPYTRSTATAAGWRWRIPLQHRVGNGYVYSSAHTSDEAARTDLLAGLDGPALAEPRSLRFTTGRRRSQWVKNCVSLGLSSGFLEPLESTSIHLIQSGVSRLLAMFPDRTFDPRLVAEYNRLSQIQFEQVRDFIILHYKASRRDDTSFWRQVRDMPVPETLSRRMELFRSSGRFFRFEDELFSEASWIAVMLGQGVWPEVHDPLADALDPRLLTSRLAGLRQLMRETADQMPTHQTYLRAYCQA

SEQ ID NO: 82524 - protein, 518 aa, Unknown
  misc_feature (1)..(518): tr|T1WCK2|T1WCK2_9ZZZZ Tryptophan halogenase OS=uncultu red organism OX=155900 PE=4 SV=1
MNASFRDERARNPRALRKICVVGGGTAGWIAAALMAEHFKGLYEIELVESDDIGTIGVGESTVPPFLQLLAKLGVNEQDFIRETQASFKLGIRFENWLRKGEAYFHPFGAIGVPVDISEFYQLWLKAKAHGYPGELQDFAPAAAMADQQKFTLPFKALNTPVGGAAYAVHVDARRVARFLRTFAEARGVKRTEGIVEDVIQRNDGFIEQLVLKSGKTVEADFFIDCSGFRALLIEKTLKVGYQDWSQWLLCDRAIAVQTENVGPPPPYTLAQAQDHGWRWRIPLQHRTGNGYVFASKYLSDDEATATLMSQVEGEPVVKPMVVPFKTGMRDRIWDKNVLSLGLASGFIEPLESTAIHLVYRGMEFFFRYLPDRDCDPSLVAEYNRRMATDYEEIRDFVILHYCTTQRDDTPFWRECRDMVLPESLQAKLDLFRVNGSLREGLDELFRSVSWQSVLEGMGVRPAAYHPLVDRIPFDGMLQNLDRAVHTLGQAVAGVPSHQDFIRQHCAALPPERVTAPA

SEQ ID NO: 82525 - protein, 501 aa, Unknown
  misc_feature (1)..(501): tr|T1WDE3|T1WDE3_9ZZZZ Tryptophan halogenase OS=uncultu red organism OX=155900 PE=4 SV=1
MTDQRLRKVVIVGGGTAGWMTAAALGRFLKDGHTQVTLVESEEIGTVGVGESTIPQIKIFNRMLGLDEFEFVRRTKATFKLGIDFVDWKTIGHQYHHPFGPYGVDMEGVSFHAYWLRLKAMGEAADLGDYSLQCTASAQGKFMRANGQRNSPLGAIDHAYHIDAGLYAQFLRAYAEARGVRRQEGRIVEVHQRAADGFIEAVTLQNGERVEGDLFIDCSGFRGLLIEQTLKTGFEDWSHWLLNDRAVAVPCALGGSTHPVTRATARPAGWQWRIPLQHRLGNGYAYSSAHISEDEATAYLLANIDGAPLRDPFTLRFQAGRRKKSWNKNVVAIGLSAGFMEPLESQSIHLIQVGVSRLLAMFPDKRFETPDIDRYNRVMRFEYETIRDFLILHFHATRRNDTPYWDYLRTMPIPDYLADKMAVFQSYGRVFRENEELFTDTSWFAVMIGQGIEPRGHDPMADVMSDNDLRARMDNIRGVIAKSAEVMPDHMTFIAENCAAA

SEQ ID NO: 82526 - protein, 505 aa, Sphingomonas sp.
  misc_feature (1)..(505): tr|A0A0Q4IZW2|A0A0Q4IZW2_9SPHN Tryptophan halogenase OS =Sphingomonas sp. Leaf25 OX=1735692 GN=ASE78_03150 PE=4 SV=1
MSGRIRRVVVVGGGTAGWLAACRIAAAADPSAQQPLSVTLIESPDIATIGVGEGTWPTMRGTLARIGIDEATFLRATDASFKQGSRFDGWRTGAADDRYYHPFTAPADLPAADLLRDWRRGRFADHVCAQPDVCADDLAPRQPAMPPYAGALNYAYHLDATKFAALLRETAVGRLNVTHIRDHVTGVEPAANGDIAAVVARDTGRITGDLFLDCTGQAALLIGGHCRIGTIDRTATLFNDRAIAVQVPVAPDSPVASQTNATAHDAGWIWDIGLPARRGIGCVYASDFLDDDAAAATLTAYLARTAPHVDPAGLSFRQLRFRSAHRERFWVGNCLAIGLSAGFLEPLEASAIVLIELSLDALLDGFPADRAAMDLHARRFDALFRYRWDRIVDFLKLHYVPSRRDSPYWRAHRDPASIPPSLCDLLALWRTQPPSPADFTQAGEIFPAASYQYVLYGMGVTPPSIGPLRPRPDTASVLHQVRQRARTLTASLPTNRAYLNGIAHV

SEQ ID NO: 82527 - protein, 501 aa, Glycocaulis sp.
  misc_feature (1)..(501): tr|A0A550KMB6|A0A550KMB6_9RHOB Tryptophan 7-halogenase OS=Glycocaulis sp. ZYF765 OX=2518983 GN=FKB34_04005 PE= 4 SV=1
MSDARIRKIVIVGGGTAGWMTAACLSRLLGEDYADITLVESDAIGIVGVGEATIPQIRIFNELLGLDEDDFMRRTQGSFKLGIQFIDWGRRGHTYFHPFGPFGVDMLGVSFHAYWLRMMHAGRADPITDFSLQSVAAERGRFMRPIKAGQSPLSNIAYAFHFDAALYAKFLREFSEVRGVTRREGKVVQVHQRGEDGFIEAVELESGERIEGELFIDCSGFRGLLIEQTLKAGYEDWTHWLPCDRAMAVPCEHGTGEFTPYTRSTAREAGWQWRIPLQHRVGNGYVYSSQHISDDEAAATLLANLDGEALADPRPLRFVTGRRRSAWVKNCVALGLASGFLEPLESTSIHLIQSGIARLMAMFPDRSFDPATIARYNRVVKREFEQVRDFIVLHYNVTERDDTAFWDHVRTMDVPDSLQEKYDIFAHTGRVFRENEELFNDTSWFAVMIGQGMKPAAYDPMADVISLDETEKRLAHIRETISNSADYMPTHTNFIGQNCAA

SEQ ID NO: 82528 - protein, 505 aa, Sphingomonas sp.
  misc_feature (1)..(505): tr|A0A0Q4JCM3|A0A0Q4JCM3_9SPHN Tryptophan halogenase OS =Sphingomonas sp. Leaf25 OX=1735692 GN=ASE78_14550 PE=4 SV=1
MTIGQQAIATVAIVGGGSAGWMTAAALARFLPPGVEVTLIESDAIGTVGVGEATIPQLRLFNQNIGIDEDDFVARTGGSFKLGIEFAGWNGEGSRYLHAFGTIGRALGLVPFHHYWLAAGGAGDPASLWRHSACAAAAQAGRFGRDPGSAQAPSGLAWAYHFDAARYATYLRDLAERGGVTRVEGRVVDVALSGGDTIAAVTLADGRRIAADFFIDCSGFAALLIGRMPGSAWDDWSSLLPCDRALAVPCAATAPITPYTRATARAAGWQWRIPLQGRTGNGLVYASDYLSDDAALATLLGSLDGTASGDPRPLRFTTGRRRLPWIGNCVALGLAAGFLEPLESTSIHLVQSGIARLLALWPSAPPRAADIAAFNRQSEREWIAVRDFLIAHYVLNGRDEPFWRDRRATPLPDSLAERIELFRGSGRILRDEHELFAEVAWLQLLIGQGVVPEGHHPLVRSLPAARLPEFLSLSAAHVEAIVARMATHDEFLRAHCPAAQTKVAA

SEQ ID NO: 82529 - protein, 500 aa, Glycocaulis sp.
  misc_feature (1)..(500): tr|A0A550KMB8|A0A550KMB8_9RHOB Tryptophan 7-halogenase OS=Glycocaulis sp. ZYF765 OX=2518983 GN=FKB34_03995 PE= 4 SV=1
MSAPAILIAGGGMAGWTTALALARPFRGTGARIAVIDTPGPDVSLGPLAPAIATLPSAQDAHWALGLPEHRVVRAGRGAYRLGEFWRGWDGREAAAFLPFGEVGADIGGVRFHQQVARLQALGETASLADHALSSLAAAAGRFAIPPHDAADIRATLDHGLHLDAEALTGALLRPVALAMGVTRIEGGIGEVELCTDGLIAALRLDDGRRETADLFIDATGPDARLIGALEAAWEDEAAWEDWAALSPFDRAAAVIRPDTAEPAPFTRDAAHPWGWRRTMPLNGARGEIVMFASRHMKDERASQMMGGAEPAAVTSGRRLSPWTGNCVAVGAAAAIPDPLASAELALVHAAALRLARLVPWPGGWRAEAEEFNRLWRHETESARDFALLRHLLNRRPEKVWAAAREASAPEPMDRRLALFAARGRIIRTEHGLYDDALWARAFIALGARPRHHDPLADGLDAGMLKARSARIRELAARAAASMPRHGDFLARVNAQDGPR

SEQ ID NO: 82530 - protein, 508 aa, Pseudoalteromonas arctica
  misc_feature (1)..(508): tr|A0A290S010|A0A290S010_9GAMM Uncharacterized protein OS=Pseudoalteromonas arctica A 37-1-2 OX=1117313 GN=PAR C_a0212 PE=4 SV=1
MNKAIKTVAVVGGGTAGWLSAAIIASYHQGQNGDGLKVMLVESSDIPTIGVGEGTWPTMKNTLQQIGLREVDVFKACNATFKQGGKFVNWTHGNNDFYYHPFTVPLGYGRIDLAPYLDNVEDFAQRTNFQHDICEASLAPRGIAQGEYQGNCNYAYHLDAGAFAEMLKQHCKSKLGVEHIIGTVDQVKLDDDGAINELTLKDQTRTINADLFIDCTGFSSLLLGQALNVPFKKMDHVLFNDSALAMQVPYDENDNSLASHTIATAQNAGWIWDIGLTHRRGVGHVYSSKFLSDDEAEQNLRDYLGDAANGLTARKISFESGYREKFWHKNCVAIGMSAGFVEPLEATAIMLVEISARFVAEHMPADTQVMPIVAKRFNEQMDYRWQRIIDFLKLHYMLTKRPEPYWQAHVQPNTIPQTLQEDLLLWGSRGPLIQDFHGALELFPAASYQYVLYGMGFKPDFTKQAYLYSQHVQAKQIIERNSQLTQQMLQTLPPHRAFIEQWLAANPV

SEQ ID NO: 82531 - protein, 510 aa, Pelomonas puraquae
  misc_feature (1)..(510): tr|A0A254N521|A0A254N521_9BURK Tryptophan halogenase OS =Pelomonas puraquae OX=431059 GN=CDO81_16490 PE=4 SV=1
MTNKRRILIVGGGTAGWLTAAYLAKALKLSERSQLEVTLLESPDISTVGVGEGTFPTIRNTLQYLGIDEARFIRATAATLKQGIRFVDWAHAPEAGRRHAFFHPFEAPYFAEDLNLVPYWLLQDEAVRAPFAEAMTLQARVAAAHRAPKRAGEAGYAAPLNYAYHFDAHKLARLLADRARELGVRHEAGTVSAVQLDGQAAIAHIDTDRQQRFEADLFIDCSGFRAELIGRALGSPFKSARGQLFADRALACKVPLGDEAVMESCTIATAHEAGWLWEIGLNGARGVGCVYSSSHISDDRAAELLQAYCGARAEDLGLRSIPFAPGYREQQWVKNCVAIGLSAGFLEPLEATGLVLIEAAVGMVAEMLPHSGPMHAPARRFNELMTARFDNIINFLKLHYALSRRPEPFWRDNIAPATLPERLAGLLEEWRLRPPGRFDFVLDTETFAFFNYQYILYGMGYPTDLSAGRDDFPRVDEAAKVFAKIQRYAERAVADLPSHRALIQQINAAR

SEQ ID NO: 82532 - protein, 503 aa, Caulobacter sp.
  misc_feature (1)..(503): tr|A0A3Q9IJ43|A0A3Q9IJ43_9CAUL Tryptophan 7-halogenase OS=Caulobacter sp. FWC26 OX=69665 GN=CSW63_18140 PE=4 S V=1
MTQDHRLRRIVIVGGGTAGWMTAAALGRFLKDGYTKVTLVESEAIGTVGVGESTIPQINIFNRMLGLDENDFVRKTKATFKLGIDFVDWQRIGHSYHHPFGPYGVDMEGVSFHAYWLKLRAMGLDDDLGAYSLQTVGARQSKFMRPNGQANSPLGQIAYAFQFDAGLYARFLREYAEVRGVTRQEGKIASVQQDGQSGHVTSVTLESGQIIEGDLFIDCSGFRGLLIEQTLKTGYEDWSQWLLNDRAVAMPCTLGGSMAPVTRATARPHGWQWRIPLQHRLGNGYAYSSQHVSDDEALADLLSQLDGEPLADPNLIRFTPGRRKKSWNGNVVAIGLSAGFMEPLESQSIHLIQVGISRLLAHFPDRHFRQAEIDRYNRTMAFEYEKIRDFIILHFKATARSDTPYWDYLREMPIPDYLADKIDLFKGSGRVFRENEELFNDTSWFAVFIGQGIYPESYDPMADNMDEGLFKARMAEIKSVIAKSAEVMPGHMDFIRENCAAEG

SEQ ID NO: 82533 - protein, 505 aa, Xanthomonas axonopodis
  misc_feature (1)..(505): tr|A0A2S6YGK7|A0A2S6YGK7_9XANT Tryptophan halogenase OS =Xanthomonas axonopodis pv. begoniae OX=473403 GN=XabCF BP2524_00840 PE=4 SV=1
MTQAQIRKVVIAGGGTAGWIAACALSHQFRNLLDITLVESEQIGTVGVGESTVPPIRTFHRFLQIDEQEFLRAVAGTFKLSISFEHWRRQGERYIHPFGITGQSTLVCAFHHLWLESQRRGMPGSFGDYCLETVASRVDRFALHGEPAVNYAYHLDAALYAKFLRARSEACGVTRIEGRIQQVTVQPHSGDVASLVLEDGQVIEGDLFIDCSGFRGLLIEQALHTGYEDWSHWLPCDRAVAVQTQALGPPVPYTRAIAHEAGWRWHIPLQHRVGNGLVFSSKHLSDDEAHAKLLRDVAAPAVKDPWMVPFRAGRRLKAWNKNVVSLGLASGFIEPLESTSIHLTISAVVRLLALFPAEGIAPSQVQLFNDVSRAEMEHVRDFVTLHYHATQRDEPLWQQCRQMELPESLALRLRAWRERAHAWQGADELFRIDSWTHVLMGQGIAPEQHHPLTRAFSDHDLRRLLDGIAQPIQHAVRQMPSQQDFIERYCKAGEQVWGMRSPVPA

SEQ ID NO: 82534 - protein, 507 aa, Caulobacter sp.
  misc_feature (1)..(507): tr|A0A3S9VFH7|A0A3S9VFH7_9CAUL Tryptophan 7-halogenase OS=Caulobacter sp. FWC26 OX=69665 GN=CSW63_12155 PE=4 S V=1
MQPLKKILIAGGGSAGWMTAALCSRLFHGLYEIVLVESEEIGTVGVGEATIPAIKKFNELLGLDEDDFLRKTQGSFKLGIQFRNWWRQGESYLHGFGVIGQDLGWLRCHQYWLRMRELGRAGDFDNLSINNAMALSNKFMRARPDMAESPIGHIAHAFHFDAGLYAKHLSTFAQARGVKRREGKIVDVSLRAEDGFVQSVTMDDGEVIAADLFVDCSGFRGLIIEQALKTGYEDWTHWLPCDRAVAVPCDRSEQFTPYTRSTAHSAGWQWRIPLQHRTGNGHVYSSQYIDDDEAERVLLSNLDGAQRADPLRIRFKTGKRKKIWNKNCVAIGLASGFLEPLESTSLHLIQSAVIRMVRLLPDAGFDQATIDEFNRQTDFEYERIRDFIILHYKATERDDSPFWRYCRDMEIPATLQRKMDLFRANGRVFREDDELFTEESWIQVFLGQGVIPRAYDPLVHVQSDDEIARFLGNIETVIGKCLNVMPSHAEFVAHACQAPPLAPVPTS

SEQ ID NO: 82535 - protein, 508 aa, Sphingomonas sp.
  misc_feature (1)..(508): tr|A0A0Q4IJW3|A0A0Q4IJW3_9SPHN Tryptophan halogenase OS =Sphingomonas sp. Leaf25 OX=1735692 GN=ASE78_06690 PE=4 SV=1
MGAERRIAIVGGGTAGWLTAAYLARALGSSVRITLLESPGIGIIGVGEGTFPTIRETLRFLGIDEAQFVTAAGATFKQGVRFDGWRRGGPVPHRYYHPFEPPFPADRLVAHWLRADPATRPPFAQAVTIQHPVAAANRAPKQPGDEDFDGPLAYAYHFDAVRLAGVLADRARASGVAHVEGRIAQVVQNDDGTIERIDTDAGPLHADLFVDCTGFRAELIGQLPGAAFRSVADQLFTDRALTCKLPCADPDAPIESTTIATAHEAGWIWDIGLSGARGIGCVYASRYIDDDRAADLLRAYLGPAADGVTPRRLTFDAGWRPRQWVGNCVAVGLSAGFLEPLESTGVVLIEAAAAMIAELLPHAGPVDAPAGRFNAVMAARFAGIVDFLKLHYCLSDRTEPFWRDNADPASWSPRLTDLLDQWRHRPPSRFDFPVDTETFAFFNYQYILYGMGFATVPPPGGAAQHAEAQRLFARIRSYGDHAVRDLPPHRVLVDGLRGLPAIPARTGS

SEQ ID NO: 82536 - protein, 496 aa, Gammaproteobacteria bacterium
  misc_feature (1)..(496): tr|W2UCX1|W2UCX1_9GAMM Flavin-dependent tryptophan halo genase RebH OS=Gammaproteobacteria bacterium MOLA455 OX =1411685 GN=rebH_1 PE=4 SV=1
MTIKNVTKVVVVGGGTAGWMAAASLSKLIGPNIQVCVVESDEIGTVGVGEATIPTMMTLHQLLKIDEQEFMAAVQGTFKLGINFENWNKLGDSYMHAFGRTGQDCWAGGFQHFWSRGKQLGLSEDYGRYSASNVAAKAGKFAALPDQSLSYAFHMNATLYATFLRKMAEQHGCERIEGKITQVDTDNDNGFIRSVTLESGRTIEGDLFVDCSGFRGLLIDETLHTEYEDWSNWLPCDSAVAVQTESVGEPIPYTRAMARDAGWQWRIPLQSRVGNGMVFCSKFLSDDDAIETLLSNVEGEPLTKPRIIKFRTGQRKQHWNKNCIALGLASGFVEPLESTSIHLIQRGIIRLLQMFPHEGVRQPDVVEFNRQMSAEFVFVRDFIVMHYHLTERDDTPFWRHCQSMPIPEGLRHRLDLFKQTGRVFQEAGDVFAENNWVQVMLGQGLVPEQYHPIVDSMSDLELGRFLKGLSANVDHLVNQLPSHQSFISKYCPAESA

SEQ ID NO: 82537 - protein, 508 aa, Massilia namucuonensis
  misc_feature (1)..(508): tr|A0A1I7LHG5|A0A1I7LHG5_9BURK Tryptophan halogenase OS =Massilia namucuonensis OX=1035707 GN=SAMN05216552_1029 33 PE=4 SV=1
MTDSAIRKIVIVGGGTAGWMTAAPLALKLGKSREIVLVESPEIGTVGVGEATLPTIRYFNLALGLDGADFVRKTQATFKLGIEFKDWGHVGNRFFHGFGDFGPPIEHRSPYQYWLRLSREFKDMPSYEEWSMATAMARKHRFAPPHGDQPAASNAYSYAFHFDAGLYAAYLRDYAMRRGVARIEGMITGVEQHPDSGFITAVKLRDGRRVEGDLFIDCSGFRGLLIEGVYQAGYDDWSAMLPCNSALAVPCEKAGEPAPYTLSTARSAGWTWRIPLQHRTGNGHVYCDGFTTDEAASRVLLAGLDGRALDEPRKLRFTTGRRRKSWIKNCVAIGLSSGFLEPLESTSINIIENAVGWLLDYFPDRYCRPELADEFNRLVAQRFEFVRDFIILHYKVTRRDDSEFWRYCADMPIPDTLRHQIELFRETGRVVIHDPEGFSVASHVSILAGLGVVPKADDPLIDLMDQRKLHAHFHKVRESIARTVDAMPGHGQYLAHLTGAPPAEGLAA

SEQ ID NO: 82538 - protein, 498 aa, Massilia namucuonensis
  misc_feature (1)..(498): tr|A0A1I7M6Y6|A0A1I7M6Y6_9BURK Tryptophan halogenase (F ragment) OS=Massilia namucuonensis OX=1035707 GN=SAMN05 216552_10719 PE=4 SV=1
ALRRAMKPPFKRIVVVGGGAAGWMTATALATALAGGATIELVESEEIGIVGVGEATFPSIRNFHRLLGIDEAEFLRATNGTYKLGIQFCDWRARGESYFHTFGDFGELSGSRAVWGQHHRLGEAGLGSLGEQCLPSVMASQGRFALPGENDRYDYAYHFDAALYAAFLRKLGERRGVRRTEGRIVEVARRADGGVDRLTLDDGRVVAGDLYIDCSGFASLLLGRTLGEPFVDFSHWLPVDRAWACPTERIGTELTPYTRATALEAGWAWRIPLQNRTGNGHVFASRHIDEDRVRAQLLQQLDGPALAEPRLLRFQTGHRKRAWVHNVVALGLAGGFLEPLESTSIFLVQWGLGRLIDLLLSGAPFTEQVVADYNGEVGRQFERVRDFIILHYCLSARRDSALWRAMATMELPDTLAFKLHAWRQAGALHQYDLEGFDATSWLAIHAGMGHWPERADPTLGDVERAEALRGLQWRRECIASAVAAMPKHDACLRGMLGR

SEQ ID NO: 82539 - protein, 533 aa, Xanthomonas axonopodis
  misc_feature (1)..(533): tr|A0A2S6Y2K6|A0A2S6Y2K6_9XANT Tryptophan halogenase OS =Xanthomonas axonopodis pv. begoniae OX=473403 GN=XabCF BP2524_14985 PE=4 SV=1
MGMWPVERGQLAPFAYSSAVLAQECIGMIPAPLRNIVIVGGGTAGWMAAAAFARVLGPTFKVQLIESEQLGTVGVGEATVPHIKAFNNLLGIDEAEFVRQTQGSFKLGIEFVDWQRPGSTYMHGFGTQIGHPLGLLPFHQYWIKQHARGKAQPLGAYTLNTVAAARGKFMTSAGDVPTNSPLANIAYAYHFDATQYAHFLRRYSQQRGVARIEGLVEHVQLHPESGYVQSLQLASGQTVHGDLFIDCSGFGGLLIEQALHTGYHDVTHWLPCDRALAVPCEKVGPPTPYTRSTARAAGWQWRIPLQHRTGNGYVYCSAHISDDEAAATLLANLDGKPLADPRPLRFTTGRRKQCWNRNVVALGLASGFLEPLESTSIHLIQSGISKLLELFPREGISPVLVQRYNDRLAFEFDRIRDFLLLHYHATERDDSAFWRHCRQMPITPELQATLDLFRDSGRFYRNAEEMFAEISWVQVLVGQGILPQGYHPLVEQVPDRDAEGFLASVAQTISHCVDVMPSHQQFIDRYCKAAALP

SEQ ID NO: 82540 - protein, 505 aa, Pseudoxanthomonas sp.
  misc_feature (1)..(505): tr|A0A4Q8LDH9|A0A4Q8LDH9_9GAMM Tryptophan 7-halogenase OS=Pseudoxanthomonas sp. NML171200 OX=2480816 GN=EA660_ 07105 PE=4 SV=1
MSASSIRNIVIVGGGTAGWMAAAAFARVLGPTYNVTLVESEQIGTVGVGEATVPHIKAFNNLLGLDEAAFVRQTQGTFKLGIEFVDWHHVGDRYIHGFGSEIGHPLGLLPFHQYWIKARHAGWAKPLGHYTLNTVAAPLGRFMTSASDVPPGSPLANIAYAYHFDAALYARFLRSYAEQRGVRRIEGIVETVHRHPENGDVLSVTLQDDTRVAGDLFVDCSGFRGLLIEQALHTGYEDFTHWLPCDRALAVPCEKVGPPVPYTRSTARPAGWQWRIPLQHRTGNGYVYSSAHLSEDEATANLLANLDGKPLGEPRPLRFTTGRRRKCWNKNVVALGLASGFMEPLESTSIHLIQSGISKLLELFPREGLSPVLRQRYNDRLAFEFDRIRDFLVLHYKATARSDSGFWRQCRDMDIPDTLQATLDLFADSGRFYRNGEEMFAEISWVQVMVGQGILPASYHPLVDQVPEVDLKGFLASIEQTLAHCAQAMPPHEAFIARACAAPAS

SEQ ID NO: 82541 - protein, 538 aa, Pseudomonas chlororaphis
  misc_feature (1)..(538): tr|A0A3G7JG95|A0A3G7JG95_9PSED Thioredoxin reductase OS =Pseudomonas chlororaphis subsp. aurantiaca OX=86192 GN =C4K22_3311 PE=4 SV=1
MNKPIKNIVIVGGGTAGWMAASYLVRALQQQANITLIESAAIPRIGVGEATIPSLQKVFFDFLGIPEREWMPQVNGAFKAAIKFVNWRKSPDHSRDDHFYHLFGNVPNCDGVPLTHYWLRKREQGFRQPMEYACYPQPGALDGKLAPCLSDGTRQMSHAWHFDAHLVADFLKRWAVERGVNRVVDEVVEVRLNDRGYISSLFTKEGRTLEADLFIDCSGMRGLLINQALKEPFIDMSDYLLCDSAVASAVPNDDAREGVEPYTSAIAMNSGWTWKIPMLGRFGSGYVFSSKFTSRDQATADFLNLWGLSDNQPLNQIKFRVGRNKRAWVNNCVSIGLSSCFLEPLESTGIYFIYAALYQLVKHFPDTSFDPRLSDAFNAEIVHMFDDCRDFVQAHYFTASREDTPFWLANRHELRLSDAIKEKVQRYKAGLPLTTTSFDDSTYYETFDYEFKNFWLNGNYYCIFAGLGMLPDRSLPLLQHRPESIEKAEAMFASIQREAERLRTSLPTNYNYLRSLRDGDAGLSRSQPGPTLAAREIL

SEQ ID NO: 82542 - protein, 504 aa, Caulobacter sp.
  misc_feature (1)..(504): tr|A0A3Q9IL52|A0A3Q9IL52_9CAUL Tryptophan 7-halogenase OS=Caulobacter sp. FWC26 OX=69665 GN=CSW63_18135 PE=4 S V=1
MTPSPIRSVLIVGGGTAGWMTAAALAKALPKTTAVTLVESEQIGTVGVGEATIPPINTFNQILGLDEAAFMRATKASFKLAIEFVDWMGPGHRYLHPFGNFGLDIEALKFHQVWLRAHHAGWAPPIDAFNLSAQAAHLSRYAPPSKDPGQVLSSLRYAFHFDAGLYARFLRDYAEPRGVTRVEGKIASVEQHGETGFVTGVTLEDGRVLEADLFVDCSGFRGLLIEQTLKAGYDDWSHWLPNDRAVAMPCVTGGDGLTPYTRATADAAGWRWRIPLQHRTGNGYVYCSRDISDEDAVARLRATLDGEPMAEPNFLRFQAGRRKAAWVKNVVAIGLSSGFLEPLESTSIHLIQAGITKLLALFPDRGFDPVEIAEYNRLTALQVELIRDFIILHFKANARSEPYWVRAREMDIPESLQRKIDLFAASGRLFPTDLDLFAEPSWIAVLLGQGITPRRHDPLVDAFDEAFLKSQLSRLAGLIRQTAEALPTHEQFIARYCASPEFKA

SEQ ID NO: 82543 - protein, 496 aa, Massilia namucuonensis
  misc_feature (1)..(496): tr|A0A1I7M701|A0A1I7M701_9BURK Tryptophan halogenase OS =Massilia namucuonensis OX=1035707 GN=SAMN05216552_1071 2 PE=4 SV=1
MPIAYKRIVVVGGGTAGWMAAIGLATALPGSTVELVESEAIGIVGVGEATFPMLREFHNRHRIDEADFLRATNGTFKLGIEFRDWRTKGQRFFHTFGNFDDLTGPACLWGQYRRVNDPALGPLSEQCLPSVMASQGRFAPPPAEQPNLYSYAYHFDANLYAGFLRGIALKRGARRTEGRIVEVKRRADGGVDQLKLEDGRVVAGDLFIDCSGFVSLLLGRALEEPYVDFSRWLPVDRAWAVPSEPSGPGLTPHTVATALEAGWTWRIPLSNRIGNGHVFASRYIDEERARTQLLEQLDGPALAEPRLLRFTTGHRERFWVHNVVGLGLSSGFLEPLESTSILLIQRGLEKMIELLRPGARPAAAAVANYNKGMTRVFERIRDFIILHYCLTERRDSQLWRDMASMELPETLDFKLHAWRQTGSLNMNGEEGFEATSWLAIHAGMGNWPVRADPLLAEVPFEVALQALRQRRDHYAAVVAAMPTHDAFLRRIMRSNN

SEQ ID NO: 82544 - protein, 501 aa, Sphingomonas sp.
  misc_feature (1)..(501): tr|A0A0Q4J9V7|A0A0Q4J9V7_9SPHN Tryptophan halogenase OS =Sphingomonas sp. Leaf25 OX=1735692 GN=ASE78_14605 PE=4 SV=1
MNDQAIRSIVIVGGGTAGWMAASTFARLLGPDYCEIHLVESDAIGTVGVGEATIPQMATFNRMLGIDENEFLRETKGTFKLGIEFVDWTRIGHRYFHPFGSYGVNMNGISFHAYWLRLHALGEVPAIEPWSLQAMASADAKFMRAIDAGNSPLSDIPYAFHFDAGLYARYLRRYAEARGVVRHEGKIERVELRPENGFIDAVVLDDDRRIEGDLFIDCSGFRGLLIDQTLGAGFVDWSHWLPCDRAVAVPCAGGERLDPFTRSTARAAGWQWRIPLQHRIGNGHVFSSAHMSDDEATAILLANLDGEPLADPRFVPFRTGHRDRVWIKNCVAIGLSSGFLEPLESTSIWLIQSGLSRLMAMFPDRRCDPAEVARYNRILATEYAEIRDFLILHYHATERDDSAFWNHCRTMDIPERLAEKMRVFQSRGRTFRENEELFNDTSWFAVMQGQGLRTNGHDPIADTLTLDETRERLRHIREAIAASAAYMPTHREFIRANCQAG

SEQ ID NO: 82545 - protein, 538 aa, Burkholderia ambifaria
  misc_feature (1)..(538): tr|B1Z1A6|B1Z1A6_BURA4 Tryptophan halogenase OS=Burkhol deria ambifaria (strain MC40-6) OX=398577 GN=BamMC406_5 264 PE=4 SV=1
MSNPIKNIVIVGGGTAGWMTASYLVRALQQQANITLIESAAIPRIGVGEATIPSLQKVFFDFLGIPEREWMPQVNGAFKAAIKFVNWRKAPDSSRDDHFYHLFGNVPNCDGVPLTHYWLRKREQGFQQPMEYACYPQPGALDGKLAPCLADGTRQMSHAWHFDAHLVADFLKRWAVERGVKRVVDEVVDVHLDERGYISSLSTKEGRTLEADLFIDCSGMRGLLINQALKEPFIDMSDHLLCDSAVASAVPNDDTRDGIEPYTSAIAMNSGWTWKIPMLGRFGSGYVFSSKFTSRDQATADFLKLWGLSDNQPLNQIKFRVGRNRRAWVNNCVSIGLSSCFLEPLESTGIYFIYAALYQLVKHFPDTSFDPRLSDAFNAEIVYMFDDCRDFVQAHYFTTSRDDTPFWLANRHDLRLSDAIKEKVQRYKAGLPLTTTSFDDSMYYETFDYEFKNFWLNGNYYCIFAGLGLLPDRSLPLLQHRPESIEKAEAMFASIRREAERLRTSLPTNYDYLRSLRDGDAGLSRSQRGSTLATQEIL

SEQ ID NO: 82546 - protein, 505 aa, Glycocaulis sp.
  misc_feature (1)..(505): tr|A0A550KMC7|A0A550KMC7_9RHOB Tryptophan 7-halogenase OS=Glycocaulis sp. ZYF765 OX=2518983 GN=FKB34_04000 PE= 4 SV=1
MRDPDAITKVVIVGGGTAGWMAAAALSRMSGSGLMEVTLVESDAIGIVGVGEATIPPIRHFNEIIGIDERDFIRATQGAFKLGIEFRGWTRPGHRYIHPFGPYGADIGAVKFHQHWLRMRAVGRAADIEDYNLCAVASRQGRFGPVAPQARSPLAQLHWAYHFDASLYAKYLRAFSEAHGVVRREGRITRVHQRAEDGFIEAVELESGERVEGELFIDCSGFRGLLIEQTLKAGYEDWTGWLPCDRAMAVPCAHGAEGLTPYTRSTAREAGWQWRIPLQHRVGNGYVYSSAHISDDEATATLLASLEGEAQADPRPLRFTTGQRKSAWVKNCVALGLASGFLEPLESTSIHMIQTGITRLLHLFPDRGFDARGIAEYNRLTARHAAQIRDFIILHYHANQRAGEPLWDACRTMAVPDSLQRRLDLFRLKGRISRDEDELFAEPSWLAVYLGQEVVPEGWDPIADAAPADDIAAALEQVRNAVLAGTASMPLHSDFIARHCRAHAA

SEQ ID NO: 82547 - protein, 500 aa, Amycolatopsis japonica
  misc_feature (1)..(500): tr|A0A075UT37|A0A075UT37_9PSEU Tryptophan halogenase OS =Amycolatopsis japonica OX=208439 GN=AJAP_16200 PE=4 SV =1
MSAETAGFDVVVVGGGPCGSAVSTLVAMQGHRVLLLEKEKFPRYQIGESLLPATVHGVCRLLGVSEELDKAGFMLKRGGTFRWGRNPEPWTFSFGISSKFVSEASTAYQVERMRFDQILLDNARRRGVEVREESSVADVIEDADGRVCGVRYTDADGVTHEVSARFVVDSSGNGSRIHKKVGGQRRYSEFFRNLALFGYFEGGKRLPAPNEGNILAAAFDSGWFWYIPLTDTLTSVGAVLHPDALERAQGDKEQALLDLIAECPLIADYLADARRVTSGPYGEVRVRKDYSYIQEKFWRPGLILAGDAACFIDPVFSSGVHLATYSALLAARTINTVLAGTAGETESCEEFEARYRAEYARFHDFLVAFYDMHEDESSYFWRAKKVTGNAASDVESFVELVGGGSSGEGALIDAKAYLGKRAPAFQELSDAVERPVLVAGEDRDLLKTELARSVSREGTRIQVQASLGANADERTPVRDGGLVPSADGMHWIRPVQQQAS

SEQ ID NO: 82548 - protein, 497 aa, Altererythrobacter sp.
  misc_feature (1)..(497): tr|A0A420EE99|A0A420EE99_9SPHN Tryptophan 7-halogenase OS=Altererythrobacter sp. HN-Y73 OX=2320269 GN=D6851_14 360 PE=4 SV=1
MHYVIAGGGAAGWITAAVLSRYLSAPSTRITLIESEDIGIIGVGEATVPVIGELNRLLDIHEPDFVAATNGTFKLGIEFVDWGETGRRHFHGFGDYGEPIAALSPHHHWLRLHRQDNTIPPLDDWSMPWAAASQDRFAPHEAMQGEAAEFRHAYHFDATLYAAYLRKIAEKHGVKRVEGRILHAARHSETGFVTHLDLADGQRITGDIFIDCTGFASLLLERAMNVGFRDWSHWLPCDRAATISSARAGRLTPFTRSTARTAGWQWRIPLQNRTGNGHVYASSFLSDDEATARLFDGLEGEALGEPRMLRFTPGRRERFWEGNVIAIGLAAGFLEPLESTALQLIQTGAARIIELLPGRQPEPALADEYNRRTTLEYERIRDFIIAHYCRSCRSEPFWRHVAAMDLPDTLQHKLALWGASGHIALYDMESHREPSWVSVLIGQGVLPRAYDPRADMIPPDRLTNLMKQRRAYLAQAARKMPCHDYFIDKTCAADQRL

SEQ ID NO: 82549 - protein, 503 aa, Novosphingobium sp.
  misc_feature (1)..(503): tr|A0A2D5HC67|A0A2D5HC67_9SPHN Tryptophan halogenase OS =Novosphingobium sp. OX=1874826 GN=CMH85_09670 PE=4 SV= 1
MTETSFRIVILGGGTAGWMSAAALARFVPPGYSITLIESDAIGTVGVGEATIPPIRLFNEALGIDEADFLRETSASYKLGIEFAGWLRDGHSYMHAFGAVGRQHGLLPFRHYWARASAVGNARPLGHYSANEIAARTGRMATGVSGPGFPEVPWAYHFDAGLYAAFLRRHAEAMGVVRHEGKVARVVRGDNGDIAAVETDDGRSFEGDFFIDCTGFRGLLIEEALETGYEDWSHWLPCDRAVAAPCSAAGPFTPYTRSIARKAGWQWRIPLQHRIGNGLVYCSEYLSDDEATATLTDNLEAPATADPRILQFVTGRRCKTWNRNVLAVGLSGGFMEPLESTSIHLIQSTITRFLTVLPSGPANDAVRDGFNRRCAEEFERIRDFLILHYKTNQRVGEPFWDHFRTMPVPDSLEARIAEYREGCHIQPGADELFTEVAWFQVLAGQGVVPKRWNPIANRLSPDELGGFLGAVEKACIETVRPMPLHMDFLAARCAARAEPETVR

SEQ ID NO: 82550 - protein, 493 aa, Sphingomonas sp.
  misc_feature (1)..(493): tr|A0A0Q4J1L7|A0A0Q4J1L7_9SPHN Tryptophan halogenase OS =Sphingomonas sp. Leaf25 OX=1735692 GN=ASE78_03165 PE=4 SV=1
MSVTRVVIAGGGTAGWMAAAAIARTMGRMVEVTLVESEAIGTVGVGESTIPPLVTYNRLLGINEAEFMAATAATFKLGILFDGWKTADSRYFHSFGTTGRDHWAAGFQHYWLNGLTRGHAQPYDDYCTELVAALQGRFAHLPGDATNYAYQLDSGRYAQFLRAMAERDGTRRIEGRIAQVELDGETGDIAALQLDGDRRFPGDLFLDCTGFRALLIEGALHAGYDDWTHWLPCDAAIALQTDSVAPPVPYTRAMAHDAGWQWRIPLQHRVGNGIVYCSRYLDRDAALDRLVNNVEGKVRTDPNFLRFTTGARRRQWHRNCVAIGLSGGFMEPLESTSIHLIQRAVLRLLRLFPQARVSPADVAEFNDQQLQDMEQIRDFLILHYKATDRRDSPFWRQCSAMDVPNSLAQKIDLFRQTGRVFRRNEELFGENSWVQVMMGQGIVPERHHPIAARLTDDELDRLLSMVRRQVADTVATMPPHGDYLARYCPADRP

SEQ ID NO: 82551 - protein, 496 aa, Sphingomonas sp.
  misc_feature (1)..(496): tr|A0A0Q4J7M0|A0A0Q4J7M0_9SPHN Tryptophan halogenase OS =Sphingomonas sp. Leaf25 OX=1735692 GN=ASE78_14615 PE=4 SV=1
MQAPLIRRIVIVGGGTAGWMTAAALSAKLGSGVAITLIESEAIGTVGVGEATVPHIRHFNAALGIDEADFLSRTNATFKLGIEFRDWGRIGDSYIHPFGAYGAPIDGVDFHQHWVRLHKAGRAAPFEAFSLPIRAARADRFAHPDPDPHSLLSTYSYAYQFDAGLYGRYLRAFAEARGVMRQEGRVVDVALRDDGFVESVRLDDGRTVGGDLFVDCSGFRGLLIEQALHAGYDEWTRWLPCDRAIAMPCATTGPISPYTRATALSAGWAWRIPLQHRVGNGHVYSSGFIDDDAALTALLAGLDGPPIAEPNRLRFTTGRRRRQWIGNTVAIGLSAGFLEPLESTSIHLIQLAIGRLLDLLPQGDWDPRDAAEFDRLMAREYDRVRDFLILHYHATERDDSPFWNHCRTMDVPDSLATQLALFRERGVVAPYADGMFLEPSWLAVYLGQRVVPHRVDPRVLTTGEGEAAALLAAMASRYGAAADGLPGHAAALGLAA

SEQ ID NO: 82552 - protein, 533 aa, Bdellovibrio bacteriovorus
  misc_feature (1)..(533): tr|Q6MN71|Q6MN71_BDEBA Tryptophan halogenase OS=Bdellov ibrio bacteriovorus (strain ATCC 15356 / DSM 50701 / NC IB 9529 / HD100) OX=264462 GN=prnA PE=4 SV=1
MSTLSEHIDNAFDLSYLNFPKCPPTDIKTIGILGGGTAGYLAALALKKYHPEVEVTVIESSKIPVIGVGESTTTEIVPFLHRGLEIDPAEFFREVEPTLKFGIRFDWGCPGDYKFNFSFFAGHQYESYYYENDIKNSNWPSVLMNENKIPVIRNKNGTLTSFLASIPFSYHIDNKNLIRFLNKEVKSRGIDILDAEVHEVKLDERGYVASLESKEGHSLSYDLYIDCSGFRSKILGQALKTEFTPFTDTLVTDRALTFDMPNKDVVDCYTSVITMNNGWCWKIPMRTEDHYGYVFSSKFCDEETALAEARARFGHFEKYKMVEFRSGRHTQAWVKNVFSLGNSYGFIEPLESTAIQTAVHSINVLCRLMPKTLDDQISITGINNEIAVTWDTFRWFVGMHYKFNKKLDTPFWKHCREKTNIGHAQTIVNLFNQRPPLSAGNFGSNSQFTATEALVFNSYSYDTLIFGQKEVYKPLAAPEMSKEEYFGKLKSYQELTSRSLSLFELFKGDHLFEDEILEQLFNDTDTWIMEADV

SEQ ID NO: 82553 - protein, 510 aa, Caulobacter sp.
  misc_feature (1)..(510): tr|A0A3Q9IIQ4|A0A3Q9IIQ4_9CAUL Tryptophan 7-halogenase OS=Caulobacter sp. FWC26 OX=69665 GN=CSW63_18275 PE=4 S V=1
MQDHRIRKLVIVGGGTAGWMAAAALRRHFHGGPLEITLVESEAIGTVGVGEATIPTIRGFYQQLGLSDIEVMRATQATCKLGIRFNGWLREGASFIHPFGHFGQDLRGVPFHHYWRKLAQAGEPTDIADYSLGASLAAAGKFMAPPRNPTSTLSIFDWALHFDAGLFAQLMRRVAEDNGVRRIEGKITKVNLRPDDGFVASLDLENGETVEGDLFIDCSGFRGLLIEEALQTGYESWSDLLFCDRAWAVQSEGLDNPPPYTDVTAHSAGWRWRIPLQHRYGNGYVFSSRHIRDEDALAELKAAVPDPLLHEPRLIRFNPGRRKQVWNKNVIALGLASGFLEPLESTSIALIETGIEKIKALFPDRDCAPELADEFNDWSRREMERVRDFIILHYWANKRGDAAFWRDCNAVTLPDTLQRKIDLFLGRGHFVRYRWEMFAPPSWMAIYAGFEMLPQAVDPSLDGVDPKALSAPLSEMRKAVREVVASAPPHQAFLDQYCRPAPVSAPSAAE

SEQ ID NO: 82554 - protein, 390 aa, Myxococcus xanthus
  misc_feature (1)..(390): tr|A0A4Y6CNQ4|A0A4Y6CNQ4_MYXXA Tryptophan halogenase OS =Myxococcus xanthus OX=34 GN=BHS05_05150 PE=4 SV=1
MSEASYDVAIIGGGPAGAAMAVALRDLAPFLSVVMLERTDYDTHRSGETLSPDLRIPLSRLGVWSSFLRDGHLASRGTSSCWSRAEPRVQDTQMSPWGSAWHLDRARFDERLSLEAARQGVRVLRLTTLLDVESIAKEGYRLHLSQRKTGALTLRARFVVDATGWKATFAMTQGAQRRIRDRCFTVHGAFQLRPGESFPTDALVESCPEGWWHSARLPSDCVAVTLVGDGDSLHGLRWATPEPWAALLGQAPVTQARLAACDFAGEPLVAAPVLVGELDQMHGERWLAVGDAACTHDPLSAQGIFSALDSALLAAEALEQYLRGEVDALCAYEQTLHLRFNEHLHRRSSTYREEQRWPDAPFWKNRHTAFPALTPAAEQRSAPAPTGLAP

SEQ ID NO: 82555 - protein, 500 aa, Pelomonas puraquae
  misc_feature (1)..(500): tr|A0A254NEI0|A0A254NEI0_9BURK Tryptophan halogenase OS =Pelomonas puraquae OX=431059 GN=CDO81_13790 PE=4 SV=1
MSPHLGPPRRIVILGGGSAGWMSAAALATGLRGAEVTLVESEVIGTIGVGEATFPSIRNFNQLLGIDEAAFLAATGGSYKLGIQFCDWRRPGEHYFHTFGDFGPLSGPMALWGQYRRLDARCDGGLGDFCLPTVMARHGRFRLPDAGDGLGARYTYAYHFDATRYGHFLRQLAETRGARRVEGRVVDIARRPDGGVRALRLADGRDIDGDLFIDCSGFASVLMGQTLAQPFVDYSHWLPVDRAWAVPAERAPGPLLPYTRSTAMEAGWCWRIPLQDRTGHGHVFSSRHIDEDRARAQLLAQLDAPPLSEPRLLRFQTGHRERFWQHNVVAIGLAGGFVEPLESTAIFLVHNALGRLIPLLTQPDPQGGAPAHFNAQQTRQYQRIRDFIILHYCLSERRDSAFWQHMTGMPLPETLAYKLHAWRETGLLHNYDDEAFDETSWLAIHAGMQHWPQRRNPWLDDVPAPAAAHLLAERHAAIAQLAASMPPHAEFLRERIGARA

SEQ ID NO: 82556 - protein, 420 aa, Shewanella sediminis
  misc_feature (1)..(420): tr|A8FQ05|A8FQ05_SHESH Tryptophan halogenase OS=Shewane lla sediminis (strain HAW-EB3) OX=425104 GN=Ssed_0315 P E=4 SV=1
MPASSSTPETLTDIDVAIIGAGPSGCIAASLLHQQGKRVIVIEKLHFPRFSIGESLLPCCMQWLEEANMLDAVNQAGFQFKNGAAFRYKEQYTDFDFSDKFTPGPGATFQVERADFDKLLADTAAEQGVDIRYGETVTTVDLIGKPRLTVTDANGEAYLIEAEYLLDASGFGRVLPKLLELEKPSTLANRSAIFTHIQDNIGKKEVDDRPFDRNKILISVHPQNRDIWYWLIPLSPDRCSLGVVGEPHLMGNSDLDLEVILMDMVNQEPGLKTLLADAEILRECAELKGYSANVSTLATDKFALLGNAGEFLDPVFSSGVTIAMQSASMATKCVVRQLNGEKIDWQSEYAKPLMRGVDTFRTYVEAWYDGRFQDVIFYDAPDNKIKQMVCSILAGYAWDEANPLVAESEKRLNLIVELCR

SEQ ID NO: 82557 - protein, 496 aa, Pseudoalteromonas arctica
  misc_feature (1)..(496): tr|A0A290S718|A0A290S718_9GAMM FADH2 O2-dependent halog enase I OS=Pseudoalteromonas arctica A 37-1-2 OX=111731 3 GN=prnA PE=4 SV=1
MKPIKHVVIAGGGTAGWITAALLNKVLGKVINITLIESSAIGTVGVGEATIPPIIQLNNALGINEQDFINATNASIKLGIEFENWKTPGHSYMHAFGSLGKNFPFCDFYNFWLKGQITGCEDDLWDFSLNYQAAKQHKFAPLNTIPNTQLPGLSYAYHFDATLYAEYLKKLAISRGVKHIDAKISHVEQCDTGNVKSLALDNDSQISGDLFIDCTGLRALLIEQTLNTGFIDWSHYLPCDSAVAVQTKSTHELKPYTRSIAHSAGWQWQIPLQNRIGNGLVYCSRYLSDDDAKQLLLKSLPAEPITEPRIIKFKTGRRLKQWHKNVVSVGLSSGFLEPLESTSIHLIQTAVTRLIKLFPHNGISDALVTEFNKQSVIELEHIRDFIILHYKLTERQDSPFWRQCMQMDIPNSLTHKLNLFKHTGKVIREDDELFAEVAWQQVMIGQGLIPDDYNSIVDSLSDDQLSDLFSTLKTLISSTVTQLPTHQNFLASIKKV

SEQ ID NO: 82558 - protein, 525 aa, Gammaproteobacteria bacterium
  misc_feature (1)..(525): tr|W2UEQ0|W2UEQ0_9GAMM Flavin-dependent tryptophan halo genase RebH OS=Gammaproteobacteria bacterium MOLA455 OX =1411685 GN=rebH_2 PE=4 SV=1
MNHKINRVVIVGGGTAGWLSAGVIAAEHCIGSKNGCREGSFQLTLVESPDIATIGVGEGTWPSMRNTLQKMGISETEFFRECSASFKQGTLFRGWRTGEDDIYTHPFTAPQSYTEVNLAPHWQTAREQINFAQAVSPQSALFADKLAPKKISTPEYAFNVNYGYHLDAAKFAEFLRKHCVEKLGVTHVKANVIGINSAENGDIASIATDSHGNVEGELFIDCSGSRALLLGEHFGIPVCSKSDILFNNNALAAQIPYTNENDPIESCTLSTAQSAGWIWEIGLPTRRGIGHVYSSDHNTEERASEELLNYIASTVSQQAAAAATLRKVQFSPGHRAKFWHKNCVAIGMSAGFIEPLEASALVLVELSAAMIAEQLPANRGVMDLVAKRFNDKFLYRWDRIIEFLKLHYVLSQRRDTEYWRDNCEASSIPERLTDLLTLWRHQSPWHRDNNNVDDMFPSASFQYVLYGMDFETMPSQTQRRSEQAEGLRAGHLFQENMARTKQLQASLPSNRDLINKIYTFGFQKI

SEQ ID NO: 82559 - protein, 513 aa, Pelomonas puraquae
  misc_feature (1)..(513): tr|A0A254N597|A0A254N597_9BURK Tryptophan halogenase OS =Pelomonas puraquae OX=431059 GN=CDO81_18290 PE=4 SV=1
MNTSKPFNRVVIAGGGTAGWMMAALMSKLLGKQLDIKLVESEEIGTVGVGEATIPALLSFHNLLGINEAEFMAATNATFKLGINFEGWKNIGQDYFHSFGSTGNDHWSAGFQHFWLKGQRDGLARTYTDYNPETVAAFANRFAHVPRSGLNYAYHLDAGRYAKYLRAMSEAHGVQRIEGKIGAVLMDGPQGRDGPITALQMQDGSRIDGDLFIDCTGFRSMLLGEALGVGYEDWSYWLPCDRAVAVQTASVRDAWPYTRSIAHPFGWQWRIPLQHRVGNGLVYSSKEMSDADAPEVLKKNVEGELITQPRVIKFLPGQRDKVWHRNCIAVGLASGFVEPLESTSIHLIQRAAIRLMQTFPSGGIQQADVDEFNAQSKRELEHIRDFIVLHYHVNERTDSALWKHVREMDILPSLHHRIERFRESARVFRPSDELFAENSWVQVMMGQGITPERYHPVADLMGRDELTRFLGDIHLKVSRTVAALPGHQAYVEQLCAPYRQASVSQLAAMPARA

SEQ ID NO: 82560 - protein, 502 aa, Nostoc sp.
  misc_feature (1)..(502): tr|A0A2I8A3Z3|A0A2I8A3Z3_9NOSO Uncharacterized protein OS=Nostoc sp. CENA543 OX=1869241 GN=CLI64_06600 PE=4 SV =1
MRVEKIIQNVVVFGGGSAGFLSALALKVKMPFLNVVVVHSTNIPIIGVGEATTAWIPWFLHQYLGLNREQFYEETQPVWKLGIKFIWGDPSQSHFNYPFVTHLADKLAVLQKSTAYYCVDSTTDSSIYSLLMEQCKSPCFRRQDGEFVIDERFGYHIENSSFVAYLERRALELGIKIIDQPVVDITVAENGDIHQLRLQDGKSVTGDLFIDCSGFRSTLLGEILQEPFCSFATSLFCDSAVTGTWMRDDSIYPFTTAETMQAGWCWQIDLQDRVNRGYVYSSAFISDDAALQEMKQKNPLMSDDFSQIRFKSGRHQRFWVQNVVAVGNASGFVEPLESTGLHMIGETIKCVCDVLIDSDQRPTPALINLANRAIAQKWDDIRDFLSIHFKFNHYVESEFWQHCQQHTDIGEAAAIVDFFQNNGPSPIGQILLRPNSVFGYNGYLNLLMGQRVATEYQNKHDTLDLDYWRQVKNYFIKNCDNALSIHEAIQVVKERKCQWLSS

SEQ ID NO: 82561 - protein, 503 aa, Massilia namucuonensis
  misc_feature (1)..(503): tr|A0A1I7FJJ4|A0A1I7FJJ4_9BURK Tryptophan halogenase OS =Massilia namucuonensis OX=1035707 GN=SAMN05216552_1002 83 PE=4 SV=1
MQNQLIKNVVIVGGGTSGWMTAAALSTVLRGRYDIRVVESDEIGIVGVGEATIPMIQRFNKVVGIDENEFVRATQGTFKLGIEFVNWGKLGERYMHGFGRLGQDLWTVGFDQYWHKMNALGKAAGLENYSITRMASKANKFMPPNAEMQNSPLGDIAYAYHFDASLYARYLRKLSEERGVTRIEGKITHATQREGDGHVDAIVLESGVRIEGDLFIDCSGFRGLLIEQTLQTGFEDWSHWLPCDRAFAVPCESAPVLTPYTRATAHRAGWQWRIPLQHRTGNGHVFSSAHVSEDEAAATLLANLDGKPLADPRLLKFKAGMRKLSWNRNVVAIGLASGFMEPLESTSIHLVQDAIQRLIDFFPDRGFSQTDIDEYNRQNRFHYERIRDFIILHYKLNQRDDSQFWKDCAAMPIPDTLRAKMDLYRTHGRIVRVDNELFTEVGWLQVLEGQNMPTDGYHPLVDIQTEADIAEYMDSVREVIGKCVNVMPDHAAYIARFCAAPKM

SEQ ID NO: 82562 - protein, 521 aa, Xanthomonas axonopodis
  misc_feature (1)..(521): tr|A0A2S6Y3V8|A0A2S6Y3V8_9XANT Tryptophan halogenase OS =Xanthomonas axonopodis pv. begoniae OX=473403 GN=XabCF BP2524_13860 PE=4 SV=1
MPDTTPSDPQQRPVRRVVIAGGGTAGWMAAAALSKLLGRHLQITLVESDEIGTVGVGEATIPSLVTFHRLLEIDEAVFMAATQATIKLGIAFEHWRDVDQHYIHSFGHAGTDHWSAGFQHFWLKGRQRGVARDFGDYCLELRAAQEGRFAHLPNGGMNYAYHLDAGLYARFLRRFSEGFGVQRIEGRIGQVETDPESGFLTALTLHNGARVEGDLFLDCTGFAGLLIGKTLGVGSDDWSRWLFADSALAVQTESVGPPVTYTRSRADQAGWMWRIPLQHRVGNGIVYSSRYMDQDGARAVLERNLTGRALTEPRPLRFTPNQRHRVWEKNCVALGLASGFLEPLESTNIHLIQRGIIRLLQTFPQVINAVDIAEYNRQAAQEITHIRDFVILHYHVTDRRDTPFWRDCAAMDIPDSLRHRVELFRQSGRVFHQANELFAENSWVQVMLGQGIVPQQHHPVADLMGDAELGRFLETIRTRVEAALVRLPAHADFLQRYCPAPPLPEPAARVPAPQVMATPAG

SEQ ID NO: 82563 - protein, 504 aa, Sphingomonas sp.
  misc_feature (1)..(504): tr|A0A0Q4IHR8|A0A0Q4IHR8_9SPHN Tryptophan halogenase OS =Sphingomonas sp. Leaf25 OX=1735692 GN=ASE78_05180 PE=4 SV=1
MSEAAAPIESVVIVGGGTAGWMAAAAASRYLNDGRRSITLVESDAIGTVGVGEATIPPILQFNGLLGIDEKEFVAKTGATFKLGIEFVNWGGVGERYLHPFGTIGRDFEGVAFHQHWLKHRRAGGMADFERFSMSAQAAAAHRFAAPVSDPRSPASQLAYAYHFDAGLYAKFLRERAEGQGVRRVEGRIASVERDGESGHVTALVLDDGRRVAGQFFIDCSGFRSLLLGETLGVGYRDWSHWLPCDRAIAVPSQRTDPLLPYTRATAREAGWQWRIPLQHRTGNGHVYSSGFTTDDRAQEILLANLDGAPTADPRRLSFKAGVREKLWEKNVVALGLSGGFLEPLESTSIHLIQTGISKLFWLFPDTAHAEVERREYNRLMSEQFDYIRDFIILHYKATTRADTPFWQYVRDMPIPDTLAHKIELFREKGRILRYDHDLFEVPSWVSVMFGQGIWPTGHDAVADSLDEALVAGTMERMVAAYADLAQRMPPHADHVARTAPMRG

SEQ ID NO: 82564 - protein, 511 aa, Pelomonas puraquae
  misc_feature (1)..(511): tr|A0A254N9S6|A0A254N9S6_9BURK Tryptophan halogenase OS =Pelomonas puraquae OX=431059 GN=CDO81_13785 PE=4 SV=1
MQNSAKPLRKIVIVGGGAAGWMSAAALSAVLKPPYEIRLVESEEIGILGVGEATIPLISMFNGLARLDEAAFMKATQATFKLGIEFVNWGRQGERYFHGFGRVGKEPLWPVDFTQYWLRMRALGRAQPIEAYVMSAAAAQAGRFMLPRREMQNSPLADLAYAYHFDAGLYARHLRALSEQRGVRRTEGKVVRVLLDDQAGPTQGHVRAVQLESGEQVAGDLFLDCTGFAGLLIDKALGVGFEDWRHWLPCDRAWAVPSESTKPLLPYTRATAHRAGWQWRIPLQHRVGNGHVYSSQHMSDDEAASVLLRHLDAPPLADPRLIRFRTGMRHDAWARNVVAIGMSAGFVEPLESTALHLIQMGIAGLIEAFPHEGFDPTEIAEYNRRSRERYESVRDFIVLHYHLNQRQDGGFWDACAHMAVPDKLRWRMDLYAASGRLVYVDTDLFREPSWFEVMEGQNLRPRRWLPLTELQGVEETAAYLKGVSDTIANCVGVMPGHEEFVRHYCAAGAGR

SEQ ID NO: 82565 - protein, 494 aa, Massilia namucuonensis
  misc_feature (1)..(494): tr|A0A1I7KUM9|A0A1I7KUM9_9BURK Tryptophan halogenase OS =Massilia namucuonensis OX=1035707 GN=SAMN05216552_1019 115 PE=4 SV=1
MNSAYKRIVVVGGGTAGWMTAVGLATALPACKVELVESEEIGIVGVGEATFPMIRAFHKSTGIDEAEFLRATNGTFKLGIEFRDWRAKGQRFFHTFGNFDDLTGPACLWGQYRRVNAPTLGPLSEQCLPSVMASQGRFAPPPKEQANLYSYAYHFDANLYAGFLRGIALKRGARRTEGRIVEVKRRADGGVDQLKLEDGRVVAGDLFIDCSGFVSLLLGRALEEPFVDFSRWLPVDRAWAVPSEPSGPELTPHTVATALEAGWTWRIPLSNRIGNGHVFASRYIDEERARTQLLEQLDGPALAEPRLLRFTTGHRERFWVHNVVGLGLSSGFLEPLESTSILLIQRGLEKMIELLRPGARPAAAAVANYNRGMTRVFERIRDFLILHYCLTERRDSQLWRDMASMELPETLDFKLHAWRQTGSLNMNGEEGFEATSWLAIHAGMGNWPVRADPVLAEVPAAEALQALHQRRDHYAAVVATMPTHEAFLRRMLGR

SEQ ID NO: 82566 - protein, 496 aa, Massilia namucuonensis
  misc_feature (1)..(496): tr|A0A1I7LHH3|A0A1I7LHH3_9BURK Tryptophan halogenase OS =Massilia namucuonensis OX=1035707 GN=SAMN05216552_1029 31 PE=4 SV=1
MNTAYKRIVVVGGGTAGWMTAAALATALPGGSVELVESEEIGIVGVGEASFPSIRAFHKLLGVDEAEFLRATNGTYKLGIEFRDWRAQGERYFHTFGDFGDLTGPHALWGQHRRVNDAGLGALHEQCLPSVMAGQGRFQAPSEHGKLFDYAYHFDATLYAPFLRKLALRRGARRTEGRIVDVTRRADGGVDQLKLADGRVVEGDLYIDCSGFASLLLGRALGEPFVDFSHWLPADRAWACPAERVGTELAPYTRATALEAGWAWRIPLRNRTGHGHVFASRYIDEDCAREQLLRQLDGPALGEPRLLRFATGHRRRVWVRNVVSLGLSSGFLEPLESTSIFLVQSGLGRMIDLLLPGVAPGESQVAAYNAGMVRQFARVRDFIILHYCLTARRDGKLWRAMMTMELPETLAFKIHAWRQSGTLYQYDEEGFDATSWLAIHAGMGHWPERADPSLRDLAPDAALRALQRRRDSLAAVVAAMPTHDAYLRDMTQQGTR

SEQ ID NO: 82567 - protein, 501 aa, Massilia namucuonensis
  misc_feature (1)..(501): tr|A0A1I7J9S0|A0A1I7J9S0_9BURK Tryptophan halogenase OS =Massilia namucuonensis OX=1035707 GN=SAMN05216552_1010 185 PE=4 SV=1
MSDTRIRKVVIVGGGTAGWMTAAPLVLRLGASCEIVLVESPEIGTVGVGEATLPSIRYTNLALGLDEADFLSKTQATFKLGIEFRDWGQVGNRFFHGFGGFGPPIENRPAYMYWLHLSRSFKDMPSYEQWSMVTAMAQSNCFAPPHDALPSITDSYSYAYHFDAGLYAAYLRDYAMLRGVARIEGMIDGVEQHPETGFITALKLRDGRRVEGDLFVDCSGFRGLLIEGVFKAGYQDWSAMLPCNSAQAVPCAKAAQLTPYTTSTAKSSGWTWRIPLQHRTGNGHVYCDGFTTDEEAGRVLLEGLDGEAQGEPRQLRFTTGRRRKSWIKNCVAIGLSSGFLEPLESTSINIIEQAVGWLLQYFPHRDCRPELADEFNRLVAERFEYVRDFIVLHYKVTQRSDSAFWRYCADMPIPDTLRHQIELFRETGRIVVYDPHGFSVDSHVSLLMGLGVVPKVDDPIIDTLRFDQLVRHFASRREIITQTVKAMPEHAHYISRHCRAP

SEQ ID NO: 82568 - protein, 506 aa, Sphingomonas sp.
  misc_feature (1)..(506): tr|A0A0Q4IED9|A0A0Q4IED9_9SPHN Tryptophan halogenase OS =Sphingomonas sp. Leaf25 OX=1735692 GN=ASE78_05150 PE=4 SV=1
MSPAADHDAPHLRRIAIVGGGTAGWMAAAALSRVLKGSVAIALVESDAIGTVGVGEATIPPIRAFNALLGIDEDAFLRATGGTFKLGIEFAGWGDVGERYFHPFGVYGVDVGAVPFEALWHRLRAEPGARPLSAYSICAAAAATGRFQRPRTDPGNTPLHQIGHAFHFDAARYAAYLRRLAQAAGVVRHEGRIATVERGGDRIDAVLLDDGRRIEADFFIDCSGFASLLLGGAMGSAFLDWSHWLPNDRAVAVPSTAIPAPPPYTRATAHGAGWQWRIPLQHRTGNGVVFASAHLDENAATDLLLANLDGTPLGDPRVLRFKAGRRAESWVGNCVALGLSAGFLEPLESTSIHLIQAGIARLLEMLPARDPDPAMVRRYNRLMGEEFDRIRDFIILHFHATRRDDTPYWRHLRTMAIPDSLAGRIAEYRATGRVYRDGDELFTRTSWLAVLEGQGVRATGVDPLAMTLSLDEARARLDRIAQVTQAAADRMPTHADFIAAHCQAAS

SEQ ID NO: 82569 - protein, 533 aa, Streptomyces sp.
  misc_feature (1)..(533): tr|A0A1L7GAQ6|A0A1L7GAQ6_9ACTN Tryptophan halogenase OS =Streptomyces sp. TN58 OX=234612 GN=BSL84_04140 PE=4 SV =1
MTSTDTRLQKVVILGGGTAGWMTAAYLGKALQGTVDITVLEAPTIPRIGVGEATVPNLQRSFFDYLGIAEDEWMRECNASFKMAVRFVNWRTGGQGESTARELPGGGPDHFYHPFGLLPDYDQTPLSHYWFKRKYEGRTTEPFDYACFREPPVMDAMKAPRWLDGRPATRYAWHFDAQLVADFLRRFATEKQGVNHVQDEMVRVEQDSRGYVTTLHTKGGLALDADLFVDCSGFRGLLINQAVQEPFIDMSDHLLCDSAVATAVPHDDEANGVEPYTSAIAMSSGWAWKIPMLGRFGTGYVYSSKFTDQDTATREFADMWGLDVEETKFNHIRFRVGRNRRAWVKNVVSIGLSSCFLEPLESTGIYFITAAIYQLAKHFPDKTFNEGLIDSFNHEIEVMFDDTRDFIQAHFFYAPRNDTPFWQANKKLVLPDNIKQKISAYKAGLPINSPITDESTYYGNFEAEFRNFWTNGSYYCIFAGLGLEPDAPLPTLAHRPESVAGAEPLFDTVKRQQQNLLETLPSAYDYLRHLHGA

SEQ ID NO: 82570 - protein, 495 aa, Massilia namucuonensis
  misc_feature (1)..(495): tr|A0A1I7M7K3|A0A1I7M7K3_9BURK Tryptophan halogenase OS =Massilia namucuonensis OX=1035707 GN=SAMN05216552_1081 6 PE=4 SV=1
MKPPFKRIVVVGGGAAGWMTATALATALKGGTVELVESEEIGIVGVGEATFPSIRNFHRLLGIDEAEFLRATNGTYKLGIQFCDWRARGESYFHTFGDFGALSGSHAVWGQHHRLGEAGLGALGEQCLPSVMASQGRFALPGENDRYDYAYHFDAALYAAFLRELGERRGVRRTEGRIVDVARRADGGVDRLTLADGRVVAGDLYIDCSGFASLLLGRTLGEPFVDFSHWLPVDRAWACPTERIGTELTPYTRATALEAGWAWRIPLQNRTGNGHVFASRHIDEDRVRAQLLQQLDGPALAEPRLLRFQTGHRKRAWVHNVVALGLSGGFLEPLESTSIFLVQWGLGRLIDLLLSGAPFTEQVVADYNGEMGRRFARVRDFIILHYCLSARRDSALWRAMATMELPETLAFKLHAWRQAGALHQYDLEGFDATSWLAIHTGMGHWPERADPSLGDVERAVALRGLQWRRECIATAVAAMPKHEAYLRGMLGGRER

SEQ ID NO: 82571 - protein, 506 aa, Sphingomonas sp.
  misc_feature (1)..(506): tr|A0A0Q4IZW9|A0A0Q4IZW9_9SPHN Tryptophan halogenase OS =Sphingomonas sp. Leaf25 OX=1735692 GN=ASE78_03230 PE=4 SV=1
MEQAADTAIRSIAIVGGGTAGWMTAAALAHAIPRGCTITLIESDAIGTVGVGEATIPPIRVFNQTLGIDEAEFLRETKGSFKLGIEFVDWARTGQRYFHPFGTFGKPFDLLAVHQHWLAARAGGSRVPLDELSMAWGAARHGRFAPPVGDPRSVASTFDYAYHFDAGLYAAFLRRYAEARRVERIEGAVVDVALGGDNGHIASVTLADGRQVAADLFVDCSGFRGLLIEQALGTGYEDWTHWLPCDRAVAVPCATGGEGMTPYTRSTARAAGWQWRIPLQHRTGNGYVYCSRHLSDDEAAATLLANLDGPALGDPRFLRFTTGRRTKFWNRNVVAVGLASGFMEPLESTSIHLIQAAIAKLLAFFPTRDFDPAVVDEYNRVAITECERIRDFLILHYKLTQRADAPLWRDCAAMAIPDTLAMKIDHFHSTGRLIARDMDLFGPASWLAVHIGQGNDPRGGDPLLAYATGAQTSSGFVDRLAGAIDAMARSMPGHAAYLQRIGASQP

SEQ ID NO: 82572 - protein, 415 aa, Burkholderia ambifaria
  misc_feature (1)..(415): tr|B1Z2X6|B1Z2X6_BURA4 Tryptophan halogenase OS=Burkhol deria ambifaria (strain MC40-6) OX=398577 GN=BamMC406_4 091 PE=4 SV=1
MSEMKSNSVDVAIIGAGPSGAVAAALLRRASRSVVVLERQHFPRFSIGESLLPQSMQYLEEAGMLQAVVEAGFQFKNGAYFVYRDRMSSFDFREKFSDGWGTAYQVERAAFDDLLIRCAAEQGADVRFGHTVQAFHPGDMQRLEVVDEAGCQYSVHASFVLDASGFARVLPRLLDLEAPTGMPTRAAIFSHVEDGLPAGSTDRDKICIAVHPERRDVWFWMIPLTNGRSSVGCVADAGFLDVPQAQQESLLRELLQSEPTLSRLVGSKPFVMPVRRIAGYASNVEHLHGRGYALLGNAGEFLDPIFSSGVTIAMRSAQLAVAVLERQLRGETVDWTRDYDIALRKGIDTFRAFVERWYSGALQDIVFHEDKASDVKRMVCSILAGYAWDESNPFVREPARGLDVLAEFCRAGGLG

SEQ ID NO: 82573 - protein, 502 aa, Rhodoferax ferrireducens
  misc_feature (1)..(502): tr|Q21ZE8|Q21ZE8_RHOFT Tryptophan halogenase OS=Rhodofe rax ferrireducens (strain ATCC BAA-621 / DSM 15236 / T1 18) OX=338969 GN=Rfer_1114 PE=4 SV=1
MSANMLRSIVIVGGGTAGWMTAAALSNVLGDHYHIRLIESDEIATIGVGEATIPLIKDFNLALGIDENEFMRQTQGTYKLGIEFVNWGKIGDSYIHGFGKIGQDLGPIACYQYWLKMHQAGEASDLGNYSINTLAPRKSKYLRSEPEMAGSPLGDINNAFHFDAGLYAKFLRGYSQARGVVRTEGRIVQTMLRESDGFIESVVLASGEKISGDFFIDCSGTRALLIGDALKCEYEDWSHWLPCDRAIAVPCESVQPLVPYTRSTAHSAGWQWRIPLQHRIGNGHVYSSRFMSQDEATSILLNKLDGKQLAEPRYIPFVPGRRKQTWRNNCVAVGLSSGFFEPIESTNIHLIQSAIARVIRLFPNMGFQQADIDEYNAQTQFEYERIRDFIILHYKATQRDDSPFWNHCRNMEIPATLQHRISLFSSNGRVYREGQELFGDVSWVQVMHGQGIRPQGYNPLVDLRPKDEIRAYLGNIEAVIKKCVDVMPTHAEFIAKNCAAAG

SEQ ID NO: 82574 - protein, 497 aa, Pelomonas sp.
  misc_feature (1)..(497): tr|A0A0Q7BCF8|A0A0Q7BCF8_9BURK Uncharacterized protein OS=Pelomonas sp. Root405 OX=1736529 GN=ASC81_17960 PE=4 SV=1
MSQTFNRIVVVGGGSAGWMTAAALVTGLKGRVAVEVVESEDIGIVGVGEATFPSIRDYNQLLGIDEAEFLRATNGSYKLGIRFGDWLEVGQDYFHTFGHFGNLFGSQTLWAQHRRMGLTEPLGQQCVPTVMAMKGRFVLPSEQAQFKYAYHFDAVRYAAFLRELAVKRDARHTQGRIADVSRRADGGVAALHLDDGRRVEGDLFIDCSGFNALLLGKTLNEPFVDFGHWLPVDGAWACPCERTGEELAPYTQATALEGGWAWRIPLQNRTGHGHVFASRFIDPDRAREQLLARLDGKPLAEPRLLRFSTGHRERFWVHNVVAIGLSSGFLEPLESTSIYLIQDGISRLMAALTAVTAGRPLNESDLALFNDGAARRFARIRDFIILHYCLTRRRDSALWRHVSSMELPETLAFKLELWRRYGVLHQYDDEGFDATSWLAVHAGMDHWPERHDPVYGEIPRERALAALDQRRQAIEASVERMPPHHFTLLKMLAERRV

SEQ ID NO: 82575 - protein, 432 aa, Massilia namucuonensis
  misc_feature (1)..(432): tr|A0A1I7LW14|A0A1I7LW14_9BURK Tryptophan halogenase (F ragment) OS=Massilia namucuonensis OX=1035707 GN=SAMN05 216552_10401 PE=4 SV=1
MSDKAIRTIVIVGGGTAGWMTAAPLALKLPKTCEVVLVESAEIGTVGVGEATLPTIRHFNIALGIDEADFVRKTQASFKLGIEFKDWGHVGNRFFHGFGDFGPAIENRPAYMYWLRLSRVFKDMPSYEQWSMATMMARSNRFMPPQDELPSITDAYSSAYHFDAGLYAAYLRDYATRRGVKRIEGMIEHVEQHPETGFITALKLRDGRRVEGDLFVDCSGFRGLLIEGVYQAGYEDWSAMLPCNSALAVPCAKVDPLTPYTTSTAKAAGWTWRIPLQHRTGNGHVYCDGYTSDDEAARVLLEGLDGEAQGEPRQLRFTTGRRRKSWVKNCVAIGLSGGFLEPLESTSINFIENAVGWLLQYFPNRECRPELADEFNRLVAQRYEYVRDFIIMHYKLTDRTDTEFWRYCANMPIPDTLRHQIETFRETGRVVV

SEQ ID NO: 82576 - protein, 496 aa, Pelomonas sp.
  misc_feature (1)..(496): tr|A0A0Q7B699|A0A0Q7B699_9BURK Tryptophan halogenase OS =Pelomonas sp. Root405 OX=1736529 GN=ASC81_26170 PE=4 S V=1
MTALMLATTAYGPRLKVTVVESPQVATVGVGEGSTPWLRRFFEVLGIEEAEWMPACNATYKSGITFEGWSTRPGFERYFHPFVSMLDNLTMHPFVDNVHARLQGADVDAHPDRFFLTTRLARQAKGPRAHDNFPFDVWYGYHFDATLLGQFLARKAAERGVIHMQRHVAQVLLKENGDVDALRLNEGETLHADFFVDCTGFASLLTGKALGTAFVGFGDNLFNDAAVALPTPLNGPLESQTVSTALRHGWAWKIPLTHRQGNGYVYSSAHCSADAAETELRRHLGLLDADIPARHLKMRVGRMEKVWNRNCVAIGLSQGFIEPLEATALLYVQVTASMLVEVLEKRDLGPGAQAQFNEAMRQRFENTRDYIVAHYKTNSRTDTDYWRANAENMHLSESLQAVLMAWMSRKPLAAGLKAGRFGQGYPVVSWYALLAGMGIFPDAQDLTPPTAEQARHDLAVVDDFIARSAGNFPDHRELLANIPPGNSGKALQIYAW

SEQ ID NO: 82577 - protein, 509 aa, Pelomonas sp.
  misc_feature (1)..(509): tr|A0A0Q7AUN4|A0A0Q7AUN4_9BURK Tryptophan halogenase OS =Pelomonas sp. Root405 OX=1736529 GN=ASC81_17975 PE=4 S V=1
MRNRPLQRIVIVGGGSAGWITAAPLARMLCRPDQPDQHCEVVLVESADIGTVGVGEATLPTIRFYNQMLGIDEADFVRRTRATFKLGIEFQDWGRMGNRFFHGFGGFGPAIHNRPLWAYWLRLQALGDKLPSYEEWSTATVMARQMRFTPPTSGEPAASNAFDYAFHFDASLYGAYLRDYALRHGAERVEGTITRVETRPDDGFVAALHLDDGRRLEGDLFIDCSGFRALLIGGAMNSPYEDWSHWLPCDRALAVPSERVEPITPYTRSTARTAGWQWRIPLQHRTGNGLVYCSGYLNEDEAQRMLLDNLDAKPLDEPRPQRFVTGRRKQGWVKNVVAIGLSSGFLEPLESTSLHLIMDGVSRLTAMLPDLSFQPALADEFNRQMAYRYESVRDFIILHYKLGERRDSEFWRYCADMPIPDELAHQIELFRKTGRVAVIEPEGFAEPSWASILMGLGVYPERYDPYIDLVDPQLIRRQLHSVHGAISRTVAAMPAHADFLGRISTPPRR

SEQ ID NO: 82578 - protein, 489 aa, Sphingomonas sp.
  misc_feature (1)..(489): tr|A0A0Q4ILH9|A0A0Q4ILH9_9SPHN Tryptophan halogenase OS =Sphingomonas sp. Leaf25 OX=1735692 GN=ASE78_05170 PE=4 SV=1
MIVGGGTAGWMVAAALARHLGGAVRVRLIESAEIGIVGVGEATLPHIRQFVTRLGIDEGEFMAATDATYKLGIAFEDFGALGDRYVHPFGTFGRDLAGVGFHHFWLRTAADGHNTPIGAYSLGIAAAEACRFAVPRDDDLSLAASYGYAYQFDATKFGPFLRAFAEPLGVERTEAKVVSVDRDSASGDVTTLHLDSGEAVHGDLFIDCSGFRSLLLGQTMGEAWEDWSHWLPCDRAVAVPCASPPGEIEPYTRATAMAAGWRWRIPLTSRVGNGYVFSSAHLDEDAATAALLGAIEGPPLADPRVLRFRAGRRARSWVGNVVAVGLASGFLEPLESTSIYLVQMAIARLIELFPVDGGDDADRAEFNRLVDMEYDRIRDFLILHYHATRRTDSSFWNHVRTMDVPDTLAAKLDLWRATGRVERYGEGLFFEPSWIAVYLGQGVIPKGYDPRADIPPDAALARALQGLQGEIAASVAAMPGHARALGRRP

SEQ ID NO: 82579 - protein, 504 aa, Pelomonas sp.
  misc_feature (1)..(504): tr|A0A0Q7BA35|A0A0Q7BA35_9BURK Tryptophan halogenase OS =Pelomonas sp. Root405 OX=1736529 GN=ASC81_16565 PE=4 S V=1
MHQIDRIVIVGGGTAGWMTATALATVLRGRYQIRVVESDEIGTVGVGEATIPMIQRFNRLLGIDENEFLRETCGSFKLGIEFVNWGRLGDRYMHGFGRLGQDLWTVPFDQYWQRMHTLGRAQPLEQYCIARMAALANKFMPPRTDLGNSPLAEIAYAYHFDASLYARYLRRLSEQRGVQRIEGKITHATRRGEGAQAGHIDAVMLESGERVEGDLFIDCSGFRGLLIEQTLGTGFEDWTHWLPCDRALAVPCESVAPLTPYTRSTAHRAGWQWRIPLQHRIGNGHVYCSQHISDDEAAATLMANLDGKPLADPRPIRFKTGMRRLAWNENVIAIGLASGFLEPLESTSIHLIQSAIQQLIDFFPDRGFDATDIAEFNRHSRFHYERIRDFVILHYHLNQRDDSAFWQACAHMAIPDTLKEKIDLYRSHGRVIRRDNELFSEVGWVQVMEGQNLKPLRHHPLAELQTEQDTHDYLEGVREVIAKCVEVMPDHAAYIAQHCAAKPM

SEQ ID NO: 82580 - protein, 493 aa, Sphingomonas ginsenosidivorax
  misc_feature (1)..(493): tr|A0A5C6UFJ8|A0A5C6UFJ8_9SPHN Tryptophan 7-halogenase OS=Sphingomonas ginsenosidivorax OX=862135 GN=FSB78_097 40 PE=4 SV=1
MAETLVKRVVIAGGGTAGWLAAAVLSRQLGMILDITLVESEEIGTIGVGEATIPTMRAFQGLLGIDEREFMRATKASFKLGIAFEGWTRPGDRYVHSFGTVGKSTWMGDFQHFWLAAKARGDAGDIGDYCYELQAAEAGRFAIDERSQLNYAYHLDAGLYARFLRARAEADGLKRVEGRIAQVDQDPDNGHIRALVLESGERIEGDLFIDCTGFAALLIGKTLDVSYEDWGHWLPTDSAFAVQTAAVEPARPYTRAIAHGAGWRWQIPLQHRVGNGLIYASAHLSDDAARARLLDAVEGEVLIEPRKIRYRTGRRLRVWDKNCIALSLASGFVEPLESTTLHLIMTGLTRLMQQFPSEGISPAVVNRYNDQSRRELEAVRDFIVLHYHLNHRDEPFWRERRAMAIPDTLRARIALFEDAAQTYQGADDLFRTDSWLQVLLGQGVQPRAHHPMAWIMPRDQLATALRDIKRNIAAAVSQLPQHQAFLDRYCAPA

SEQ ID NO: 82581 - protein, 454 aa, Amycolatopsis japonica
  misc_feature (1)..(454): tr|A0A075UYC8|A0A075UYC8_9PSEU Tryptophan halogenase OS =Amycolatopsis japonica OX=208439 GN=AJAP_22795 PE=4 SV =1
MDDYDVIVVGGGPGGSTVAGLTAAEGHRVLLLDKDRFPRYQIGESLLPATVHGICAMLGVRDEIERAGFVRKRGGTFKWGTGAEPWTFSFAASDRMAGPTSYAYQVERARFDTLLLDGARRLGAEIRQGHRALGTLRAGERIGGVRYLDDAGYERHATARFVVDASGHGSRLHHDVGGVREYSPHFRNLALFGYFEGGHRMPAPDAGNILCVSFADGWFWYIPLSDTLTSVGAVVKQESADRVQGDPETAYSALIEDCPLIEEFLRDARRATEPPYDRLRVRKDYSYDRTVLWSPGMVLVGDAACFIDPVFSSGVHLATYSGLLAARSINSTLSGFADEKRCFAEFEARYRREFGLFRDFLISFYRLDSGEDDYFRQARRLTGHHGTAGEAFAELVGGVSSQDFSRAMFGDVLAEGVQLQLRGLLGEAAGDEPPMFPGGLVPTADGRRWRVPDA

SEQ ID NO: 82582 - protein, 513 aa, Aliikangiella sp.
  misc_feature (1)..(513): tr|A0A545UHI5|A0A545UHI5_9GAMM Tryptophan 7-halogenase OS=Aliikangiella sp. M105 OX=2592383 GN=FLL46_05160 PE= 4 SV=1
MIKSIVIVGGGTAGWITANHLAVALGGAGKSSVQITLLESPDIPTVGVGEGTVPAMRNTLAHFGIRETDFLRECDATFKQSIKFVDWVHNPGASVNNFYHHVFDYPAIYPLNTVPYWLLEPNNLKFADAVSLQGKVCDAGLAPKMITHPEFQGVTEYAYHLDAGKFSQLLANNAVNKLGVKHVKANLTDVDIDESGDIQFVKTDRAGDLKGDLFVDCSGFNALLIDKKYKVKFIDQSQHLFVDTALAMQVPYQNPDDPIASHTIATAKQSGWIWDIGLSSRRGVGYVYSSQYTDDTSAEETLRNYVGGAASELQCRKISMKIGYREKFWVNNCVSIGLSQGFVEPLEATGLLLFDAAAKMLAELLPGHKQDMAKTSRLFNQRSTYTWKRVIDFIKMHYYLSQRDDSEFWIDNRKASSAPQSLLEALDLWHNRPPSEYDFFSRFEAFNLDNYLYVLYGMEFQTNMSGIAGRYTQAEKSQEFYRRFSQQFDELKTQLEPNRKLLGRIKKYGLQTC

SEQ ID NO: 82583 - protein, 500 aa, Sphingomonas ginsenosidivorax
  misc_feature (1)..(500): tr|A0A5C6UH29|A0A5C6UH29_9SPHN Tryptophan 7-halogenase OS=Sphingomonas ginsenosidivorax OX=862135 GN=FSB78_107 55 PE=4 SV=1
MARPLRIVIAGGGTAGWMAAATFARFLETGFDIDLIESDAIGTVGVGEATIPQIRLFNDALGLDEDAFLRATGGTFKLGIEFVDWHRKGSRYMHAFGDVGRDVGLLPFHQYWLRARALGLAGDLSAYSLNTQAALAERMQRGPARTAQVLPGMPYAYHFDAALYARHLRRYAETRGVNRIEGKITRVTRDGESGDVSGLVLEDGTTVSADLYIDCTGFRGLLIEEALETGYEDWTQWLPCDRAVAVPSARSAAFTPYTRSTAHAAGWQWRIPLQHRTGNGVVFSSAHMSEDEATATLLAGLDGEAMAEPRTITFRTGKRRRMWNRNVVALGLAAGFMEPLESTSIHLIQSAVSRLLTLLPGQTISEVDRAEFNRQSDFEWSRIRDFIILHYKATERDDTAFWRQCRDMAVPDTLAAKIALWQANGHIVREREELFAEVGWLQVLAGQGLVPRGHHPLADAISPSDLGEFMDMIDKLNAREVAQMPSHAAFVAQHCAAPAA

SEQ ID NO: 82584 - protein, 503 aa, Sandarakinorhabdus cyanobacteriorum
  misc_feature (1)..(503): tr|A0A255YD76|A0A255YD76_9SPHN Tryptophan halogenase OS =Sandarakinorhabdus cyanobacteriorum OX=1981098 GN=CHU9 3_10625 PE=4 SV=1
MNKAASPLRVVVAGGGTAGWMTAAALAHTLGPVIELTLVESDAIGTIGVGESTIPPMQLFNRLLGINEAEFMRATQATFKLGIMFENWRDVGHKYFHSFGTTGKDHWSAGFQHFWMHGLTQGHEHPYDDYALELQAAMQSRFAHLPDDRLNYAYQLDSALYARFLRQRAEAGGATRIEGRIAQVELNGESGDIAALVLDGDRRIEGDLFIDCTGFRALLIEGALHAGFDDWSHWRPCDSAIAIQTSSVRPAVPYTRAIAHDAGWQWRIPLQHRQGNGIVYCSRYLSQEAAQERLFATIEGDKLVKPNIIKYQTGVRRRQWHRNCVAVGLSGGFMEPLESTSIHLIQRAVLRICRMLPAGRVSERDIAEFNEQQFTDMEQIRDFLILHYKVTDRRDSPFWRHVASMAIPDSLAHKIELFRETGRVFRKNEELFVENSWVQVMMGQGIMPQSWHPVAAKLRPGELTAFLSGLRDSVARTVAGLPDHHAYVSRYCAAAEPRDNKAA

SEQ ID NO: 82585 - protein, 507 aa, Pelomonas sp.
  misc_feature (1)..(507): tr|A0A0Q7BAZ6|A0A0Q7BAZ6_9BURK Tryptophan halogenase OS =Pelomonas sp. Root405 OX=1736529 GN=ASC81_24885 PE=4 S V=1
MSDPSIRKIVIVGGGTAGWMAAAPLAQRFAAAGPGRCEIALVESPDIGTIGVGEATLPPIRAYNRTLGLDGADFVKRTQGSFKLGIEFRDWGRVGHRFFHGFGDFGPAIEGRSPWQHWLRLQREVAQLPTYEDWSTSTVMARGNRFTPPENGAPSAANAYSFAYHFDAGLYAAYLREYALQRGVQRIEGLIVDVELRPEDGFVAAVKLADGRRIDGDLFIDCSGFRALLIGGAMQSPYEDWSALLPCNSAQAVPSERIEPLTPYTTSTAKAAGWQWRIPLQHRTGNGHVYCSHFISDDEAAATLLAGLDSKALDTPRQLRFTTGRRQQGWVKNVVAIGLASGFLEPLESTSIQLIMDGVGRLIQFFPDRHFKPHLAAEFNRLMGQQYESTRDFIVLHYKLTERRDSELWRYCAAMPIPDNLAHQIELFRTTGRVAILDRDSFAEPSWVSLFLGLGLTPEGYDPFVDHVDAQALLQHFVRLRQAIAQTVNGMPAHADYIASHVKAAPA

SEQ ID NO: 82586 - protein, 500 aa, Novosphingobium sp.
  misc_feature (1)..(500): tr|A0A3D1P3J4|A0A3D1P3J4_9SPHN Tryptophan halogenase OS =Novosphingobium sp. OX=1874826 GN=DER67_06245 PE=4 SV= 1
MTPQSKLRVVIAGGGTAGWMAAAALSNTLGSVIDLTLVESDAIGTIGVGESTIPPLLLFNRLLGIGEAEFMRATQATFKLGIKFENWKDVGESYFHSFGAAGKDHWSAGFQHFWLRGLQHGHAHSYDDYCLELKAALEGKFAHLPEDKMNYSYQLDSALYAAFLRKRAEGEGAKRIEGRISEVELNGETGEIAALRLDGDRRIEGDLFLDCTGFRALLIEGALHAGFDDWTHYLPCDSAIAIQTASVRPPVPYTRAIAHDAGWQWRIPLQHRQGNGIVYCSRYLGKDAALERLLSTVEGQTLTEPNFIRYVTGVRRKQWHRNCVAVGLSGGFMEPLESTSIHLIQRAVLRLIRMLPSGRVSQRDVTEFNEQQFADMEQIRDFLILHYKVTERRDSPFWRQCASMAVPESLEQKIELFRETGRVFRKNEELFAENSWIQVMLGQGIMPQAYHPIAGKLRPEELDHFLGSLRDMVSKTVAGLPSHQDYIASYCAAADDKVAA

SEQ ID NO: 82587 - protein, 504 aa, Pseudoalteromonas sp.
  misc_feature (1)..(504): tr|A0A2K9JW18|A0A2K9JW18_9GAMM Flavin-dependent tryptop han halogenase RebH OS=Pseudoalteromonas sp. NC201 OX=1 514074 GN=rebH1 PE=4 SV=1
MNITKIAIVGGGTAGWLAANHLGLALSSNSNVEITVIESLDIPSIGVGEGTVPYIVKSLKKFGISEAELLGSCDATFKQGIRFVSWLDEKVHGAHNFYYHPFEAPYPEGLDITNIWLNLGKKIPFDYVGIQSRVCESGLAPKLKTDGNYQGVLPYAYHFDAAKFAKLLKRNALDRFNVRVLNGTVDESKLDQTGHIESLCMTNGDILHFDFYVDCTGFSAKLISSVSNDSFQDKSEQLLVDTALVQQIERDDPSSLNPYTTATAHKAGWMWEIPLTSRTGTGFVYASKYMSHKEALETYARMLNVDSVNPRKIEMRVGYRNQSWSKNCVALGLAQGFVEPLEATSILLTDFSAEFLSKNFPLSRAEISVFSDHYNDAVNCAWESTIDFIQLHYILSDRVDSDFWVEYRSEVKLSDSLERKLAKFRLRSPQQMDFWSRFELFNEKNFLYVLYGMKFNTHPQTTSQAEFDIGLKLLDKNNEQLRRAKGALLDHGEWLKQLKQYMSS

SEQ ID NO: 82588 - protein, 506 aa, Paraglaciecola hydrolytica
  misc_feature (1)..(506): tr|A0A148KL90|A0A148KL90_9ALTE Tryptophan halogenase OS =Paraglaciecola hydrolytica OX=1799789 GN=AX660_01395 P E=4 SV=1
MSDKNLRNIVIVGGGTAGWMAAATLGRFLKDSFCKVRLIEAEDIPTVGVGEATIPQIQVFNRTLGIDENEFIKRTQGTFKLGIEFVNWGKVGDSYIHAFGDVGNDMDSLQFYHYWWKMRQQGHADDIGAYSLNAVAAPLGKFMRSVDAGNSPLSKIVYAYQFDAGLYAQFLREYAGARGVSRTLAKIVETRLRASDGFIESVVLDNGEIVQGDLFIDCSGFQGLLIEKALNTGFEDWSHWLPCDRAWAVPCERTEPLLPYTRSTAHSAGWQWRIPLQHRTGNGHVFSSKFMGEDEAREILMANLSGKALAEPRLLKFSTGKRLKAWNKNCVAFGLSGGFIEPLESTSIHLVQSGIARLMSLFPNRDFNQHDIDLFNQQTDFEYERIRDFIILHYKATERSDSEFWNYCRTMSIPDSLKQKIDQFMENGQIHRTNMELFNDTSWLEVFHGQGMHPKSYHPLVDLVADDELKRRMAFIKNVIDKSVEAMPSQQEFIQHYCLAPKPLNM

SEQ ID NO: 82589 - protein, 498 aa, Paraglaciecola hydrolytica
  misc_feature (1)..(498): tr|A0A136A5Y1|A0A136A5Y1_9ALTE Tryptophan halogenase OS =Paraglaciecola hydrolytica OX=1799789 GN=AX660_04265 P E=4 SV=1
MHKPIKKVVIVGGGTAGWISAALLKKVIGAPIDVELVESESIGTVGVGEATIPPIRLLNNVLGLNESEFLAKTKGTIKLGIQFENWRVEGESYFHSFGAAGKSMAFCHFHHFWQRAQSLGLNTSIWDYDLNYLAAKAGKFAQINSKDPIIELPYAYHFDAGLYAKYLREVSERMGVLRTEGLIEHVEQDKDSGFISTLVLQDGRKIAGDLFIDCSGFRGLLIQQQLGAGFDDWSHWLPCDRAIAVPSERHATTLPYTRSIAHAGGWQWRIPLQHRNGNGVVYSSQHYSQQQALDLLLNNLDSKAIGEPNFIKFQTGRRRQQWARNVVAVGLSSGFLEPLESTSIHLIQSAIVRLIHMFPHQGIKAIDVAEYNRQSKVEYEQIRDFIILHYHVNERNDSHFWRDLRNMEVPDSLRHKIELFRATGRLFREQNDLFLESSWLQVLVGQGIVPQDYHPIANNLSKDKLFEMLNTIQAIKNEPLAKLPSHDDFLQSFCTKPN

SEQ ID NO: 82590 - protein, 514 aa, Colwellia psychrerythraea
  misc_feature (1)..(514): tr|Q47XV3|Q47XV3_COLP3 Putative tryptophan halogenase O S=Colwellia psychrerythraea (strain 34H / ATCC BAA-681) OX=167879 GN=CPS_3699 PE=4 SV=1
MGKAIKKIVIVGGGSAGWITAGSLAAEHCVDAASSIEVILIESPEVNSIGVGEGTWPSMRNTLEKIGIDEKEFLQQCDASFKQGSKFIGWTTGDDTDSYYHPFMTPDGYGHIDLHAAWQANHSEQAFGDAVNIQSHVCQAGLAPKQLATPSYAAVTNYGYHLDAKKFASLLHKHCTQKLNVQHIVDHMDGIISADNGDINAISTKEHGHIAGDLFIDCTGSASLLLGKHFNIGFINKQHILFNDSALAVQVPYPDQVNPINSATLSTAQSAGWIWDIGLQTRRGVGYTYSSQYISDAEAEKSLRQYLINSVGEEQANLLKPKKLIFEPGHREKFWHKNCVAIGMSAGFLEPLEASALAMVELSSTMVSEELPVTRAHMDIIAKRFNERFNYRWQRIIDFLKLHYILSKRTDSHYWRDNQQPNSISEELQELIKLWQYQPPSRYDFVQNEEVFPSASYQYVLYGMGFETEQRANPRKFEANPLAEKTIAETQKKIDKYLTGLPTNRELLNKLKEK

SEQ ID NO: 82591 - protein, 505 aa, Shewanella sp.
  misc_feature (1)..(505): tr|A0A0Q0JJT8|A0A0Q0JJT8_9GAMM Flavin-dependent tryptop han halogenase RebH OS=Shewanella sp. P1-14-1 OX=172376 1 GN=rebH_2 PE=4 SV=1
MQKQASNTTSSNKPIKKVVIAGGGTAGWMAAAALTKLLGKHLEVVLVESDQIGTVGVGEATIPTLHIFHRLLGIKEQDVMAATNATFKLGIAFENWHDVGKDYIHSFGFLGKDCWACGFQHFWLKGQQRGIVSQIGDYCTEHLAAREGRFAVLPNQDYNHAYHMDATLYAKFLRGIAEQHGITRIEGKIKEVLQHDDTGNIRGLALESGDVIEGDLFLDCTGFRALLIEQTLNTGFDDWSHWLPCDSAIAVQTKTTEKPIPYTRSIARESGWQWRIPLQSRTGNGLVFCSKYMSDEEAKATLMDNIEGEPLTDPRVIKFRTGSRRKTWHKNCVAIGLSSGFLEPLESTSIHLIQRGIVRLLQMFPSQGLVEEDINEFNEQTRTETENIRDFIVLHYKVTDRTDSRFWRYCKNMSVPASLQHRIDMFDASGKVYKHGNELFGESSWIQVMMGQGLAPKQYHPIVDMMEDDELENFLASIKAKAKQKVANLPDHYDFVQHYCKSKML

SEQ ID NO: 82592 - protein, 110 aa, Sphingomonas sp.
  misc_feature (1)..(110): tr|A0A520EU19|A0A520EU19_SPHSX Tryptophan halogenase (F ragment) OS=Sphingomonas sp. OX=28214 GN=EOP66_12880 PE =4 SV=1
MGARMQVVIVGGGTAGWMTAATLAMSFAGRLADVTLIESEEIGTVGVGEATVPHIRFFNQRLGIDEADFIRRTNATFKLGIEFRDWGRIGDSYIHPFGDFGHDIDGLPFH

SEQ ID NO: 82593 - protein, 524 aa, Colwellia psychrerythraea
  misc_feature (1)..(524): tr|Q487J4|Q487J4_COLP3 Putative tryptophan halogenase O S=Colwellia psychrerythraea (strain 34H / ATCC BAA-681) OX=167879 GN=CPS_1022 PE=4 SV=1
MMALDNNHILIIGGGTAGWLSAAILAKTLNSKNTDGVKVTLVESPTIPILGVGEGTWPNLRATLHKIGISETDFIRECDATFKQGAEFINWSKTPEPKQSHSYYHPLSTVSHSSYDFNLAPYWLQQDKKTRLPYDRAVASQARVCDEGLAPKQIVMAEYSAAQEYAYHLNANKLAEFLKRHCVEKLGVKFVSANVTNVALDNEDFITHVDTDHESEKKIFADFFVDCSGAKGLIIKETYNTAWQSISDVIFNDTALAVQVPYADRNQKINTHTLATAQEAGWIWDIGLQDRRGVGHVFSSKYISDQKAEQQLIDYLGDDYSDDLTIRKIKLNHGYHKKFWHKNSVAIGMSAGFVEPLEASAIFLFDAAANMLAAQFPRDKAQMKYAEDKFNQQLTMRMQRTVEFIKLHYCISQRRDSQYWIDNCDPISIPDNLKQRLAFWQGQVPTKYDFENAWEPFNLDSYLYVLYGMGFETDVAKVAAKYTETTKAKHLFNNIDKASVLLIDKLPKQRELIEKVIKYGFTQV

SEQ ID NO: 82594 - protein, 496 aa, Shewanella sp.
  misc_feature (1)..(496): tr|A0A0Q0GA65|A0A0Q0GA65_9GAMM Flavin-dependent tryptop han halogenase PrnA OS=Shewanella sp. P1-14-1 OX=172376 1 GN=prnA_1 PE=4 SV=1
MSNKIKNVVIAGGGTAGWMAAAAFSKLLGKLISVTLIESDNIPTVGVGEATIPTLHLFHDLLKIKESDFMAATNATFKLGISFENWKQVNEDYMHSFGYIGQSCWAAGFQHFWLKGYQQGIASDIGDYCPEHLASRLGKFAALPNQDRNHAFHTDAGLYAKFLRAISEQHGAKRVEGTISKVNLNHSNGFIKSLTLADGQQINGDLFIDCTGFKGLLIEEALHTGYEDWRHWLPCDSAIAVQTRQTKPLVPYTRSIAHPSGWQWQIPLQYRMGNGLVFCSKYMTDQQAKDLLLENIEGDKLNEPRVLKFKTGTRRKHWNKNCVAIGLASGFIEPLESTSIHLIQQSVVRLMQSLPSTEMEPAVVDDFNRKMRLEIENVRDFIVLHYHVTQRDDSEFWRYCKSMEIPKSLQDRIDLFVQSAQVYKTDQELFGEASWLQVMIGQGLMPKEYHPIVDNMSDEELAGFLNTIKSTIQRRVNSLPNHVDFIQNYCRSAEMS

SEQ ID NO: 82595 - protein, 506 aa, Paraglaciecola hydrolytica
  misc_feature (1)..(506): tr|A0A136A3S9|A0A136A3S9_9ALTE Tryptophan halogenase OS =Paraglaciecola hydrolytica OX=1799789 GN=AX660_07515 P E=4 SV=1
MTKSNQQISSIVIVGGGTAGWMTAAALSQHFQHMPVNITLVESSQLGTVGVGEATIPTLRRFYAKLGFSDIDVIRATNATCKLGIEFQDWHSLGSSFIHPFGLFGVPVKDTPFHHYWLKTRQLGQNSELAAYSLGINLAQKNKFCFPSPSPESNLQIFDWALHFDAGLFAELMRNYALKNQVGLVDSKITEVICLPDNGNIASLQLENGQSIAGDLFIDCSGFAGLLIDKTLKCGYEDWSEWLYCDRAFAVQTESTANPIPRTIAKAHSAGWQWQIPLQHRTGNGHVYSSRYMSDEAALQTLIQHLPGEALHTPRQFSFTPGRRKKAWEKNCIAVGLAAGFLEPLESTSIALVETAIEKIILSFPTAQYSQNEVERFNTVTACEYERVRDFIILHYKANQRSDSAMWRDCRAMSVPDSLQEKMQIFKAVGSLERKPWEIFGPDSWLAIYAGFDYLPETYSAQVDNMPNDYLLNNLANMRASINKMVDAVPTHVEFLSRFCAYASKD

SEQ ID NO: 82596 - protein, 529 aa, Shewanella sp.
  misc_feature (1)..(529): tr|A0A0Q0KYL7|A0A0Q0KYL7_9GAMM Flavin-dependent tryptop han halogenase RebH OS=Shewanella sp. P1-14-1 OX=172376 1 GN=rebH_1 PE=4 SV=1
MEHAIRDIIIVGGGTAGWITAGILAAEHNADNGKLSPSPKLNITLIESPDVATIGVGEGTWPSMRTTLKKIGISETEFLISCDASFKQGSRFINWTHSPDADLTKQPRDHYLHPFSLPIGTNEIDLCPFWLPHRQQVSFADAVGQQNQLSMQGLAPKQITTGEYQFQNNYGYHLNAGKFSQLLQQHCTEKLGVTHIQDHVSDIQKAENGDIRSLVTQHSGELTADFFVDCTGVKSLLLGEQMHVPFVCQKSVLFNDSALAIQVPYPTDDTEIASCTHSTAQTNGWIWDIGLPTRRGVGHVYSSSHTDQAQAEQQLIDYLRPSVNVDLDNLDIRKLSIAPGHRKICWKNNCMAIGMASGFIEPLEASALALVEWSANTLAQQLPANRQVMDIVATRVNQRFSQHWQQIIEFLKLHYVLSQRSDSDYWHDHRESSTIPESLQQQIALWRTQTPNKHDIQHTDVLFPAASFQFVLYGMAFETHVPTHLKPTLQQRAQQLFTENIKRTQGLKQILPTNRELLNKIRQYGLPHI

SEQ ID NO: 82597 - protein, 506 aa, Burkholderia lata
  misc_feature (1)..(506): tr|Q39P88|Q39P88_BURL3 Tryptophan halogenase OS=Burkhol deria lata (strain ATCC 17760 / DSM 23089 / LMG 22485 / NCIMB 9086 / R18194 / 383) OX=482957 GN=Bcep18194_C667 8 PE=4 SV=1
MNRTFDMLVTGAGPAGLCAALRLNHLGHRVLLVERSPLWPRPQIGEALTPGVRNIIDYLDADEVLESVPIVAGKPTRVRWTSESIETVAHDGAVVERAAFDAALLRLAVARGVDVLRPASLAQVDGAPGAWRVQIATPDGLRSVEAHVLLDARGRQSRREPQRLHARRLSTVWAEAAMATPAAHADAATRVEALDDGWMWGAALPGGRYRVMFTFDPSARDDAREREPASVLRNACTRSALFKDMAGVRWCDSPRMCVSTPYVDALSWQDGRIKLGDAAFALDPISSSGVEKAMRFSLQAAIAINTWCRASDASERELAQRFYESRLIEGAARHLAWTAGYYRQAWCAEAPFWRLRSAPALTSDTVATPSLGDETAARVDLMTHALQDEWARVPSDQPQPGEPAPPPPLPLHSPIRFARNTGIVVVPCATDDRVTAHPALQHPSLDRPVAFWNGVALFPLLDMLTRATHPLELMAFLGRSMEAASAQQLLEWLWSRQMVEPAVFGA

SEQ ID NO: 82598 - protein, 498 aa, Xanthomonas campestris
  misc_feature (1)..(498): tr|A0A3E1L8R7|A0A3E1L8R7_XANCA Tryptophan 7-halogenase OS=Xanthomonas campestris OX=339 GN=D0A35_03345 PE=4 SV =1
MTQARIRKVVIAGGGTAGWVAAAALAHQFRGLLEIVLVESEQIGTIGVGESTVPPIRAFHRFLQIDEPEFLRAVAGTFKLAISFEDWQGQGDRYIHPFGSTGQGTLVCAFHHFWLEAQRRGMHSGFDEYCLEAQAARADRFAVLQQPAVNYAYHLDAGLYARFLRTHAQRYGATRIEGKIQQVRQHADSGFIEALVLEDGQVVEGDLFIDCTGFRGLLIEQTLHTGYEDWSHWLPCDRAVAVQTESVEPPVPYTRAIAHAAGWRWQIPLQHRVGNGLVYARAHLSDDEASAMLLAAVQGTPRRDPMLVPFVTGRRLQTWNKNVVALGLASGFVEPLESTSIHLAIVAVMRLITLFPADGIAQPQVDLFNRISRAEAEHVRDFVILHYHATQRQEALWRQCRAMELPESLQLRLRAWREGAHAWQDGDELFRVDSWTHVLMGQGIAPAQHHPLTRALPDQHLQQLLDGIRQPLQHVVTQLPTQQAFIDSYCKVDQSTWG

SEQ ID NO: 82599 - protein, 152 aa, Sphingomonas sp.
  misc_feature (1)..(152): tr|A0A520FR51|A0A520FR51_SPHSX Tryptophan halogenase (F ragment) OS=Sphingomonas sp. OX=28214 GN=EOP66_02810 PE =4 SV=1
MNAVIRLIQLFPFRGDDHVALAARFNAQSRHEWEHVRDFIILHYHVTQRDDSQFWRDCARMTIPDSLAERIALFTNTAGAWQGQDDLFKIDSWVSVMLGQGVVPRAHHRIASIIKGHELQTSFEDLSRGMASTVRTLPRHCDFLARYCPADG

SEQ ID NO: 82600 - protein, 513 aa, Sphingomonas sp.
  misc_feature (1)..(513): tr|A0A326GFM7|A0A326GFM7_SPHSX Tryptophan 7-halogenase OS=Sphingomonas sp. OX=28214 GN=DI625_16520 PE=4 SV=1
MRVTQRVRQIVVVGGGTAGWLAACRIAAAADPHAAEPLAVTLIESPDVATIGVGEGTWPTMRGTLARIGIDEATFLRSADASFKQGSRFDGWRTGALDDFYYHPFTAPADVPAADLLRAWDGGRFAEAVCAQPAVCADDLAPRQPGMAPYAGALNYGYHLDAGKFAALLRDAACNRLGVRHVRDHVTGVEAADDGDIAAVLTRGAGRIAGDLFLDCTGHAALLIGGHFGIGTIDHTPILFNDRALAVQVPVAPDSPIASQTNATAHDAGWIWDIGLPSRRGVGCVYASDFLSDDAAEATLREYLSRTAPGAEAAALAYRQLRFRSAHRERFWQGNCVAIGLSAGFLEPLEASAIVLIELSIDALLDGFPADRSAMPLLARRFNDLFRYRWNRIVDFLKLHYALSERYTPYWCAHRDPGSWTESLRDRMALWPMQPPSPADFAHADEIFPAASHQYVLYGMGVSPPPPSALRPHPCTASALHQVRQRARTLAASLPTNRAYLRALTPPTGMAHV

SEQ ID NO: 82601 - protein, 518 aa, Paraglaciecola hydrolytica
  misc_feature (1)..(518): tr|A0A148KN84|A0A148KN84_9ALTE Tryptophan halogenase OS =Paraglaciecola hydrolytica OX=1799789 GN=AX660_19595 P E=4 SV=1
MDKTTRIITIVGGGTAGWLTAGVIAAEHMANSEQGIEVRLIESPDVNIVGVGEGTWPTMRGTLKKMGISETDFIRECDASFKQGAKFAKWVTGAENDAYYHPLVLPQGYEEINLVPFWQPHGDKVSFADAVSFQGHLCERGLAPKQNTTPEYAHVANYAYHLDAGKFAVFLQKHCTQKLGVKHILDHVIQVNAAENGDIASLTTKNSGDISGDLFIDCSGFNALLIGQHYQVPFICKKHILFNDSALACHVPYANKNDAIVSHTVSTGQSAGWIWDIGLPSRRGVGHVYSSTHISDAKAEAELRDYIRTSRADIADELTIRKIDIKPGHREVFWHNNCVAVGLSAGFLEPLEASALVLVELSAQMISEQLPASRAVMDIVAKRFNDKFLYRWDRIIDFLKLHYVLTKRTDSQYWIDNCKAETIPQALQSLLTLWRYESPWHHDFTQVDEVFPSASYQYVLYGMGFETLSRATQRRSQNAQQAEQQFRKNTELSQKLVAGLPTNRDLINKIHQYGLQKI

SEQ ID NO: 82602 - protein, 514 aa, Janthinobacterium sp.
  misc_feature (1)..(514): tr|A0A0S4KF21|A0A0S4KF21_9BURK Tryptophan halogenase, p utative OS=Janthinobacterium sp. CG23_2 OX=1706231 GN=B N3177_9739 PE=4 SV=1
MKAFHNVLIVGGGTAGWLTACYLARTLGAGAGAGGVSITLVESPEIGIIGVGEGTFPSIRSTLAAIGIDEARFVRECQATFKQGVRFNHWVRPAGAPGADHYFHPFSQPSQRQGGPELLPHWLQGTAGAGIAFAAAATMQKRVADAAHGPKRLADADYAGPMNYAYHFDAGRFAALLAEHGRSLGVRHVQATVDRVELDADGAIACVHTREKGALNADLYVDCTGFRAALIGEALGSPFRKIDDVLFVDRALAMQVPYPALDAPIPSYTISTAHEAGWTWDIGLQQRRGIGYVYSSRHTSDERAEQVLRQYIGAAADGLAPRQLKLNIGYRDVQWIKNCVAVGLSGGFLEPLESSGIGLIETAAYLIGHLFPFNGDSAPVAAQFNRLMRERYERVVDFIKLHYCLSQRTDSAFWTDNTDPRSIPASLRDKLAMWRCRPPHRLDFVADVEMYPTSSWQYVLYGMEFATGLHPSACHPARREEAAAEFAMIAKLAGHALADLPPHRALVEHLCERR

SEQ ID NO: 82603 - protein, 494 aa, Colwellia psychrerythraea
  misc_feature (1)..(494): tr|Q47XV2|Q47XV2_COLP3 Putative tryptophan halogenase O S=Colwellia psychrerythraea (strain 34H / ATCC BAA-681) OX=167879 GN=CPS_3700 PE=4 SV=1
MKDKIENIVIAGGGTAGWMAAAAFSKLLGKNLNITLVESDDIASVGVGEATIPPIKTFHKLLGINEQEVMRATHATFKLGIGFENWGQQGDHYIHSFGVTGKECWAGEFHHFWLHGLRKGIKADFGDYCYELQAAKANKFALSKNTPINYAYHLDATRYAKYLQEFSKKLGVTRVEGKIQQVNKGNKTGEINSLTLASGQVIEGDFFIDCTGFQGLLIEQALHTGFDDWSHWLPCDRAVAVQTKAVAAPLPYTRSIARKSGWQWRIPLQNRVGNGLVFCSKYCSDEEAISTLTANIEGELLTEPRIIKFNTGRRRKGWNKNCVALGLSSGFIEPLESTSIHLIMSGIIRLLRLFPFDGIHQSAINEYNNKLDSELNAVRDFIILHYKATQREDSNFWLHCKNMEIPPSLVHKMQLFKDTGRVFLDDGDIFRVDSWTQVMLGQGIMPTQYHKIAEIMNDKELENFMSNLKASITNAVEQLPSHTEFIQSYCKSDY

SEQ ID NO: 82604 - protein, 496 aa, Microbulbifer aggregans
  misc_feature (1)..(496): tr|A0A1C9W7N0|A0A1C9W7N0_9GAMM Flavin-dependent tryptop han halogenase RebH OS=Microbulbifer aggregans OX=17697 79 GN=rebH_7 PE=4 SV=1
MESEKIRRVVIAGGGTAGWMTAAALGKLIGKNLEITLVESDAIGTVGVGEATIPTLHVFHQLLGLKESEVMAATNATFKLGINFENWRVPGEDYLHSFGFLGKDCWACGFQHFWLKGLQRGIDYQIGDYCREHLAAREQRFAVLPDQDRNHAYHLDATLYAKFLRKFAESHGVRRVEGKIGNVKLSPSNGFIEALQLDSGMTIEGDLFIDCTGFRSLLIEGALHTGYDDWTHWLPCDRAMAVQTESTGSPVPFTRAIAHESGWQWRIPLQTRVGNGLVYCSRYLDDEGARELLLENIEGELLNEPRIIPFRTGTRRKHWNKNCVAVGLSSGFIEPMESTSIHLIQRNIVRLMQLFPSSGIVQPDIDEYNSQAMEEMEHIRDFIILHYHVTERTDSKFWRYCRSMQIPDSLAHRIQMFKESGVIFKLPQELFGESSWMQVMFGQGLMPQRYHPIVDLMGDEELATFLGNIRRNVRHQVENMPDHRQFIDHYCKSKLA

SEQ ID NO: 82605 - protein, 514 aa, Sphingomonas sp.
  misc_feature (1)..(514): tr|A0A2W6SA86|A0A2W6SA86_SPHSX Tryptophan halogenase OS =Sphingomonas sp. OX=28214 GN=DI605_12720 PE=4 SV=1
MVKPVRRIVVVGGGTAGWLTAATVAARHQSRMPEHFSVTLVESPNVPIIGVGEGTWPTLRSTLRKIGVSETDFFRECDAAFKQGALFARWTTGAPDDAYYHPLVLPQAFSQVNLVPHWLNAGEDSSFCDTVCAQGLCCDDGLAPKMITTPEYEGVANYAYHLDAGKFAPFLQRHATTKLGVRHVLADVRSVELAENGDIRAIMTEQAGEIEGDLFVDCTGFSSLLLGQALGVGFKDCGDTLFCDTALAVQVPYPDEDSPIATHTISTAQSSGWIWDIGLPTRRGVGHVFSSRHISDDAAEGELRAYLGSAADHLPVRKIRIRSGHRETFWKRNCVAVGLAAGFLEPLEASAIVLVELSAKIIAEQMPANREVMDIVAARFNATTTYRWGRIIDFLKLHYVLSKRRDSAFWRDNMLPETISDRLKDLLHLWRYQGPWLHDEFDRVEEVFPAASYQYVLYGMGFRTEIEADSLVADARTAERAIRENKVMAERLRGTLPKHRDLIRKIVDRGMQAI

SEQ ID NO: 82606 - protein, 502 aa, Paraglaciecola hydrolytica
  misc_feature (1)..(502): tr|A0A136A3R9|A0A136A3R9_9ALTE Tryptophan halogenase OS =Paraglaciecola hydrolytica OX=1799789 GN=AX660_07525 P E=4 SV=1
MPQSIKNIVIVGGGTAGWMAAASLAKYAQGKNLSVCLIESSQIGTVGVGEATIPNIVEFNRQLGIDEQELIKATQATFKLGIQFENWQQQGTQFFHPFADFGLTIDNVEFHQYINRLVANGAQYKLEDYSFACVMAKKGKFAQPHPNPPSPLADYSYAYHFDASLYAKYLNKFSVNLGVVHIDAKIEQVNLQSCNGFIKSVSLQDGREISGDLFIDCSGFQGLLIEQALHTGYEDWSKWLFCDSAYALQTERTGEINPFTRSIAREAGWQWAIPLQHRMGNGYIYSSQFQDDADAKNTLLANVTGKPLNEPRKLSFTPGRRKQIWNKNCFAIGLASGFLEPLESTSISLVQTAIAKLLSFFPDTEFNPADIAEVNRLHNREMENIRDFLILHYKLSQRSDSEFWRQCQAMEIPDALAHKMALYESRGHIVLLDNESFQSASWLAMYNGFNFKARRYDPRADVVTLAVLEQKLAQMRNNLDGIASQSLSHQQFITMHCQAEPL

SEQ ID NO: 82607 - protein, 506 aa, Sphingomonas sp.
  misc_feature (1)..(506): tr|A0A326GPH0|A0A326GPH0_SPHSX Tryptophan 7-halogenase OS=Sphingomonas sp. OX=28214 GN=DI625_08590 PE=4 SV=1
MAIDQEPVRTVAIIGGGSAGWMAAAALARFLPAGTVITLVESDAIGTVGVGEATIPQLRLFNQHLGIDEDDFVARTGGSFKLGIEFAGWNGADSRYLHAFGTIGRAVGLVPFHHYWLAAGGGDRPQSLWSHSACAVAAAANRFDRDPGNPQAPSGIAWAYHFDAARYAAYLRERAERAGVVRVEGRVVDVSQDGETGLIAGVTLYDGRRVEADFFIDCSGFAALLIGRMAGDRWDDWSALLPCDRALAVPCASVEPITPYTRATARTVGWQWRIPLQERTGNGLVYSSAHLSDDEAATTLLDNLDRAALGDPRPLRFTTGRRQAPWIGNCVALGLAAGFMEPLESTSIHLVQSGIARLLSLWPSAKPRTADIAEFNRQSAREWLSIRDFLIAHYALNGRDEPFWQERRATPLPDSLIERIALFEQSGRIVRDEHELFAEVAWLQLLVGQGVVAKGYHPLADALPAARRDQFLDISAQHVAATVARMPTHDQFLRAHCPAPDAKVAA

SEQ ID NO: 82608 - protein, 508 aa, Novosphingobium sp.
  misc_feature (1)..(508): tr|A0A0N1BN95|A0A0N1BN95_9SPHN Tryptophan halogenase OS =Novosphingobium sp. AAP93 OX=1523427 GN=IP83_17100 PE= 4 SV=1
MSNPIQHIVIVGGGTAGWLSACLLAARLPDKRVTLVEAPDIPTIGVGEGTWPTMRETLATIGIPEAEFLTECDAAFKQGSRFDGWRDGSAQDSYLHPFSAPPAADMQGLAAGWQASGQQGPFAAAITPQHAVCAANLAPRQRTMPDYAGALNYGYHLDAGKFAALLMRHGTKRLRVKRIAAHVTGVTRAANGDIAALMLRDGEPLAGDLFLDCSGQAGILIAGECGADWIDRSDVSFNDRALAVQVPVEPGSPIAAQTIGTAHEAGWLWDIGLPTRRGIGCIYASRFLSDERAEEILRGYVAAKVPGADAASLTPRKLAFKTGHRDRFWIGNCLAVGLSAGFIEPLEASAIVLIELSLKALAENFPQSRASMDIHAARFNELFRYRWDRVVEFLKLHYVPSQRTEPYWQAQRAPETIPPRLAECLALWREQQPSAWDFPRVDEMFPAASQQYVLHGMGLPVPLSGASPSPARLADVAAKARALAAALPTTRDYLDRLAAQTAAARIPA

SEQ ID NO: 82609 - protein, 526 aa, Dyella japonica
  misc_feature (1)..(526): tr|A0A075K384|A0A075K384_9GAMM Tryptophan halogenase OS =Dyella japonica A8 OX=1217721 GN=HY57_04760 PE=4 SV=1
MARLKKVLIVGGGTAGWLAACYLAKAVNAVDPQAVQVHLVESPDIGLLGVGEATFPSIRGTLSAIGLDERRFLVGATATYKQGIHYRHWVRPPGAPGADHFFHPFNAPSQRPGGPELLPYWLLGAAPPGMPFADAVSMQATLVDHARGPRRFKDPDYQGPMNHAFHFDAACFARVLAEHGQETLGVTRHVATVERTELDEHGAIARVVTKELGELTADLYVDCTGLRGLLIGNVMQSPFRSRADVLFANRAVAMQVPYERQDAPIPSYTISTAQEAGWIWDIGLQQRRGVGYVYSARHTSDERAEEVFRHYLGPVAEGLKAMHIKFETGYRPEHWRKNCVAVGLAGGFVEPLESTGIALIELATYLLSHLLPGDTDDMERAARHYNAMMVARYDRIIDFIKMHYCLSHRRDSPFWIDNADPASIPQTLQDKLALWKHRPPHRLDFVSDLEMFLVSSWQYVLYGMEFRTDLSAMRSAYPRVDEARQEFHNIQRAAAQALQDLPDHRMLVEQMCRDHHERAGTSTAAA

SEQ ID NO: 82610 - protein, 508 aa, Novosphingobium sp.
  misc_feature (1)..(508): tr|A0A0N0K3R5|A0A0N0K3R5_9SPHN Tryptophan halogenase OS =Novosphingobium sp. AAP93 OX=1523427 GN=IP83_17430 PE= 4 SV=1
MAENGAIRSVCIVGGGSAGWLTAGLIAARHGADLKVTLVESVRRGTIGVGEGTWPTMRNTLRKIGLSETDFMRATHASFKQGAKFARWRTGAADDFYYHPLVLPEGFPDLDLAPYWNADPQQSFSDAVCFQEALCEASLAPKLMTSPDYVGVANYAYHLDAVRLGELLAEHCTGKLGVHHIDDDIIDVRLTENGDVTAVVGERHGAIQADLYVDCTGFASRLLGEALGVPFIDRSDVLFVDRALAVQLPVEEDSSIASHTISTAQRHGWIWDIGLPTRRGIGYVWSSRHAGNERVEEELAAYVGPDFAKLSPREITIRSGHRAQFWKNNVVAVGLSAGFLEPLEASALVLIELSADYIATSMPASRSAMDFVARRFNTMTRYRWDRIIEFLKLHYVLSEREDSAFWRDNRDPATIPQDLQDQLELWRDSPPGEHDFSSAHEMFPAASYQYVLYGMGFRTRPRPGRLSNADAAQDAFDRTAALKRKLTATMPSNRALLTRLAQYRFPPL

SEQ ID NO: 82611 - protein, 508 aa, Caulobacterales bacterium
  misc_feature (1)..(508): tr|A0A258CBN2|A0A258CBN2_9PROT Tryptophan halogenase OS =Caulobacterales bacterium 32-67-6 OX=1970502 GN=B7Z13_ 09620 PE=4 SV=1
MTTAIPSATAVRRVVIVGGGTAGWMTAAALARLVAPSGVQITLVESEAIGTVGVGESTLPHIRAFNERLGIDEAAFMKATRATFKLGIQFENWGQIGGSYIHPFGDYGAPGGEAPFHHYWLRGRELGDVGPIDDYSLPVVAAREGRFAPPSDDPRSLLSTYRYAYQFDATLYARFLRGMAETEGVRRIEGRIQNVAQDGESGAITKVTLDDGRQIEGDLFVDCSGFRALLIEQTLKAGFTDWSHWLPCDRAVALPCESDQPTVPYTRATALEAGWQFRIPLQHRVGNGYVYSSAFIDEAAALDRLVGRLEGKPLKAPNVLKFTAGQRTRNWAANCVSVGLSSGFIEPLESTSIYLIQIAITKLIELWPTAVIDPATEAEFNRQMDLEYIRIRDFIILHYCATARNDTPFWDYVRTMPLPDTLSEKIELFRARGIVQDYREGLFLHPSWVAVYLGQDILPRRHHPLVDAVSATQLMSSLERLRRMVREASYKLPSQDDYIARYCAHLPL

SEQ ID NO: 82612 - protein, 537 aa, Colwellia psychrerythraea
  misc_feature (1)..(537): tr|Q48AA7|Q48AA7_COLP3 Putative tryptophan halogenase O S=Colwellia psychrerythraea (strain 34H / ATCC BAA-681) OX=167879 GN=CPS_0239 PE=4 SV=1
MHIMNKLTKTVVIVGGGIAGWLTAGRLAAKHKSNTEQGLNVILIESANIPAVGVGEGTWPTMRSTLRALGISESDFIRECEASFKQGAKFAKWFDGTEDDFYYHPLVLPQGFGKTDLAAHWLAKQTQTKQKNSHVNSFSNEVCYQEAICEQGLAPKTIRHAEFSDVANYAYHLDSAKFAVFLQKHCQEKLGVTHIVDDVTGVNCDVNRADKDIIDETIDKGDILSVSTQNHGDIAGELFVDCTGFSSLLLGKHYQVPFKKCDDILFIDTALAVQVPYDSKDSPIASHTISTGQKAGWIWDIGLQHRRGVGYVYSSKHSTEAEARAVLAEYVGDKFSSLNVRKIPIVSGHREKFWQNNCVAVGLSAGFLEPLEASALVMVELAAQMISEQLPASREVMDVVAKRFNETALYRWDRIIDFLKLHYILSERTEPFWTDNRESATIPQSLQDLMTEWKYRSPADHDFTSNNEVFPAASYQYVLYGMGFKSDYCHTPYAFDDCDFADGQFKQNKVLIDKALSSLPSNRELLDKIKSYGFSRI

SEQ ID NO: 82613 - protein, 494 aa, Sphingomonas sp.
  misc_feature (1)..(494): tr|A0A2E1YZT4|A0A2E1YZT4_SPHSX Tryptophan halogenase OS =Sphingomonas sp. OX=28214 GN=CMN72_07270 PE=4 SV=1
  misc_feature (62)..(62): Xaa can be any naturally occurring amino acid
  misc_feature (66)..(66): Xaa can be any naturally occurring amino acid
MAGQRVKRVVIAGGGTAGWCAAAALSRQLGALIEVVLVESDAIGTVGVGEATIPTIRTFHQXLGIXEREFLRATSATFKLGIAFENWGQVGDRYVHSFGEVGHGTWMGGFQHFWLQAREAGFAEPIGAYSLEHEAAEAGRFATGDQSALSYAYHLDATGYARFLRAIAESSGAERKEGRIARVERDGQSGDLTALVLESGERVAGDLFVDCTGFRALLIEDALETGFDDWSHWLPTDRALAVQTEATGPAVPYTRAIAHDAGWRWRIPLQHRIGNGLVYSSAHLSDDAAHDALIAGIEGDRRTDPRLIRYRTGQRRKAWNANCIALGLSSGFVEPLESTSIHLIMIGVTRLMQLFPFEGVSHALRDRYNDLAEREIEGVRDFIILHYHLTQRGDSEFWKSRRTMAIPDSLAHRIALFRESAQAFQASDELFRVDSWLQVMLGQGLEPQGYHHMGKIMPPDRLKAALESMRSNIADAVGAMPTHQAFLDRYCNGR

SEQ ID NO: 82614 - protein, 497 aa, Sphingomonas sp.
  misc_feature (1)..(497): tr|A0A326GNC5|A0A326GNC5_SPHSX Tryptophan 7-halogenase OS=Sphingomonas sp. OX=28214 GN=DI625_09300 PE=4 SV=1
MEDRCNPVRVVVVGGGTAGWMTAAGLVGLLPAACTVTLIESEAIGIVGVGEATLPHLRLYLERLGVDEAAFMAATEATYKLGIEFRDFGAIGDRYIHPFGTYGRPLGGVAFHHYWLRRASAGAMPPIGAFSAGVTAAEQRRFERPGGDPNDPTTSFGYAYQFDATRFAPFMRDWSEARGATRVEGRIVAVERDGDTVRAVTLDDGRRVKGDLFVDCSGFRSLLLGEALGEPWEDWSHWLPCDRAVAVPCASPDGVIEPYTRATAMPAGWRWRIPLRHRVGNGYVYASGHVSDDEAAAALLAGLDGPALAEPRFLRFRAGRRRRSWVGNVVAVGLASGFLEPLESTSIYLVQAAITSLIEHFPGQQVAPVDRDGFNAAIDAEYDRIRDFLILHYHATTRDDSPFWSHVRTMAIPETLADKLALWRGSAQVSKYSHGLFLEPSWVAVYLGQGVVPDGWDPRADLPDAAGLDRALGSLARAIADRVAAMPTHDAALERLA

SEQ ID NO: 82615 - protein, 504 aa, Sphingomonas sp.
  misc_feature (1)..(504): tr|A0A326GWY5|A0A326GWY5_SPHSX Tryptophan 7-halogenase OS=Sphingomonas sp. OX=28214 GN=DI625_01815 PE=4 SV=1
MKDGNIRSITIVGGGTAGWMAAAAFSHILSGSGIAIRVVESEEIGTVGVGEATIPHIQYFNRLLGIDEDEFVRRTCATFKLGIEFVDWGRIGERYIHPFGSYGQEMEGLHFHQFWYRQAQMGGALPLDRYSIGVGAARAGKFQRPDHSRPGSPLAGISYAFQFDAALYARYLRERAEAAGVERIEGRIVDVALNGANGHVDHVLLEDGRKVAGDLFIDCSGFRGLLIEGALKAGYDDWSEWLPCDRAVARPCARIGDPTPYTRATATSVGWRWRIPLQSRTGNGHVYCSDYIDDDAALAMLDASLDGEPLAGPNFLRFTAGVRRKAWDRNVVALGLASGFLEPLESTSIHLIQSGIARLLTNFPDRSFNQPDIDYYNRRTRAEYEQIRDFLILHYKATARDDSPLWRRCRDMAIPASLEERIAIFRENARLYRHDNELFSETSWLAVLHGQNIAPKRYHPIADLLPDAELDDRMTRIAAAMDSGVRVMPDHMAFIDRHCRSPNQ

SEQ ID NO: 82616 - protein, 489 aa, Paraglaciecola hydrolytica
  misc_feature (1)..(489): tr|A0A136A0P3|A0A136A0P3_9ALTE Tryptophan halogenase OS =Paraglaciecola hydrolytica OX=1799789 GN=AX660_11490 P E=4 SV=1
MNEKVNNVVILGGGTAGWMTAALLSKALKNLNIKLVESEQIGTIGVGEATIPSLHFFNDMLGINSTNFVKKTSGSFKLGINFENWHKDGESYFHGFGSTGSGMWAAGFHEYWKRGLDLGFSKPFSHYNFEAMAGLNHKFAHQQGGLNFAYHLDASLYAKTLKQVSEENGVTRIEGMVKQVHTDSASGDITSLELADGNCVTGELFIDCSGFKGVLINETLNTPFIDWSHWLPMDSAIAVQTKLSQAPAPYTRSIAHHAGWQWRIPLQHRMGNGIVYSQQYMSDDEAKALLLSSIEGEMLTEPRKLQFKTGCRAKQWHKNCVAIGLAGGFIEPLESTAIHIIQQGIMQLIKYFPSNGINALEVDEYNHYMLNDYNDIKDFIVLHYCQTERQDSPFWHFCKNMTIPASLKSRMDLFKKTGRFVQRKNEIFGDSWLQVMIGQGLIAEQHHGLADELSETELQDFLQQIEQDIAAKVQHLPSHGEYLNSLSTR

SEQ ID NO: 82617 - protein, 500 aa, Paraglaciecola hydrolytica
  misc_feature (1)..(500): tr|A0A148KN70|A0A148KN70_9ALTE Tryptophan halogenase OS =Paraglaciecola hydrolytica OX=1799789 GN=AX660_19535 P E=4 SV=1
MKHNNIKSVVIVGGGTAGWMAAAALSKSLGTKDINIQLVESEEIGTVGVGEATIPHIKYFNRLAGIEESEFLLHTSATFKLGIEFVNWGKLGDSYIHPFGPYGVDMQGVHFHHTWLRQKHKGTAKPVDEFSLPGLAAKAGKFQHPRPDLTSSPLGTMDYAYQFDAALYAKLMRKVAEERGVIRTEGKIVKVKQNPANHHIDSLELDNGSIVSGDLFIDCSGFKGLLIEETLKTGYEDWTHYLPCDRAVARLTERLPELPPYTRATAKKSGWQWRIPLQSRTGNGYVYSSQFISDDEALASLNADLDTPVIAEPKFLRFKTGIRKQTWNKNVVAIGLAAGFLEPLESTSIHLIQTAIARLMTNWPDSSFNQPDIDYFNRKTYAEYEKVRDFLILHYYATARNDSPFWNYCRTMEIPKSLEERIAIYKENARLYRDDLELFTPVSWFAVFNGQNIEPKRYHPLADILDDNSLELRMAELHRATQRCVEVMPSHEQYLKDVCK

SEQ ID NO: 82618 - protein, 315 aa, Microbulbifer aggregans
  misc_feature (1)..(315): tr|A0A1C9W7J6|A0A1C9W7J6_9GAMM Flavin-dependent tryptop han halogenase RebH OS=Microbulbifer aggregans OX=17697 79 GN=rebH_5 PE=4 SV=1
MNTIKNIVIVGGGTAGWLVAASLARQLNIINDSETNITLVESPDAPTIGVGEGTWPTMRSTLKRIGIDETDFIRECDVSFKQGTQFVNWHRLHKDGSDATYFHSFELPHTQWRTSPGPYWHYLKSELNRSYADAISVQPEACRGYFAPKTMATPAYEGLLNYAYHLDAGKFAKMLAKVATEKLGVRHISAYIERARLDEDGYITSLATREKGDIKGDFFVDCSGFAGLLIDRTYEIPFRSVKDKLFVNSAIAIQMPYERPDAPISSPTLSTAQTAGWIWDIGLQARRGTGHVYSDDFISDDEAEAQLRRYPRSRL

SEQ ID NO: 82619 - protein, 493 aa, Sphingomonas sp.
  misc_feature (1)..(493): tr|A0A326GHY1|A0A326GHY1_SPHSX Tryptophan 7-halogenase OS=Sphingomonas sp. OX=28214 GN=DI625_16505 PE=4 SV=1
MSVTRVVIAGGGTAGWMAAAAIARTMGRMVEVTLVESEAIGTVGVGESTIPPLVTYNRLLGINEAEFMAATAATFKLGILFDGWHTPDSRYFHSFGTTGRDHWAAGFQHYWLNGRTRGHERPYDDYCTELVAALQGKFAHLPGDATNYAYQLDSGRYAQFLRNMAERDGTQRVEGRIARVELDGETGDIAALLLDGDRRIEGDLFLDCTGFRALLIEGTLHAGFDDWTHWLPCDAAIAVQTESVGPPLPYTRAMAHDAGWQWRIPLQHRVGNGIVYCSRYLDRDGALDRLMGNVEGAVRTEPNFLRFTTGARRKQWHRNCVAIGLSGGFMEPLESTSIHLIQRAVLRLLRLFPQGGIRPADVAEFNDQQLQDMEQIRDFLILHYKVTDRRDSPFWRQCAAMDVPTTLQQKIDLFRQSGRVFRRNEELFGENSWVQVMMGQGIVPEGYHPIADKLSDAELDRLLSMIRRQVADTVATMPPHGDYVARYCPADRP

SEQ ID NO: 82620 - protein, 507 aa, Paraglaciecola hydrolytica
  misc_feature (1)..(507): tr|A0A136A1H3|A0A136A1H3_9ALTE Uncharacterized protein OS=Paraglaciecola hydrolytica OX=1799789 GN=AX660_13125 PE=4 SV=1
MQSANIEHIVIVGGGTAGWMTAAALANRLPQKLCRITLVESDVIGTVGVGESTIPHIRQFNQTLGIDEATFIKKTHATVKLGIKFNDWGNIGDSYFHPFGEHGEITQGIDFHQYWLKARSLGETYGLEQYSIAAMAGFAGKFPLSTSNKPTVFADYTYSYHIDASAYAAFLSDYAQQRGVQRIEGKVVKVNQHLNDFVQSITLESGQTIEGDLFIDCSGFKALLIDGTLNTPYLDWSQWLPTDSAVAAPCEHAPGDHSSSKGKIALQPYTQATARVSGWQWQIPLQHRIGNGHVFTSAFLSDQHATDILMNSLPGKALANPKILRFKAGRRQYSWQKNVVAIGLSSGFLEPLESTSIYLIQLGVSKLLELFPDKAFRQAEMNEYNRSICQQYELIRNFIILHFHVTKRNDSPFWDYCRNMAIPDELQHLLTLFAESGRTDLAQFGVWPAVCIGQNIIPQHYDARLDNIDAEQIKQLMANHRHKIQSMLATFPQADDYIQELLTRGTR

SEQ ID NO: 82621 - protein, 508 aa, Paraglaciecola hydrolytica
  misc_feature (1)..(508): tr|A0A148KN51|A0A148KN51_9ALTE Tryptophan halogenase OS =Paraglaciecola hydrolytica OX=1799789 GN=AX660_19555 P E=4 SV=1
MRVCILGGGTAGWMTAAALSKKLKNIINSITLVESDTISTVGVGEATLPHIRLFNEGLGIDESAFMKQTEATYKLGIEFCDWGRLGDSYVHPFGDFGQTINGIAFYQHLLKLTKHGDYGVLNDYAFGIVAAKNNKFQLPKDGKSPLQQAFGYAYQFDAGLYAKFLSGFAQNNGVRRIEGIVVDTLIDKSSGDVTAITLDDGQQISADLFIDCSGFRGVLIEQTLQSGYQDWSQWLPCNRAVAVPCERHGPLSPYTRATARQAGWQWRIPLQHRTGNGHVYWDEFISEDEATSVLLKNLDGPALSEPKQLYFKTGRRNHFWKNNVVAIGLAGGFLEPLESTSIHLIQEGITNLLELFPHESPSPSANTLDKAEYNARMALQFERVRDFLLLHYVATKRDDSEMWRYFSNMTLPDSLQEKIDYWLHRGYVQRYEFGSFLPPSWIAVMLGQNLRPQHYDPRVDNYNFVELKQQAQAMRTDIANGVNQAKNHADFLVAIGAASNSQLIRAKS

SEQ ID NO: 82622 - protein, 502 aa, Sphingomonas sp.
  misc_feature (1)..(502): tr|A0A326GT09|A0A326GT09_SPHSX Tryptophan 7-halogenase OS=Sphingomonas sp. OX=28214 GN=DI625_01820 PE=4 SV=1
MNAPLLRRIVIVGGGSAGWMTAAALSSLLGPKDVAITLVESDAIGTVGVGEATIPDILAFHRMLGVNEAEFMAATRATFKLGIEFVDWGAKGDRYIHPFGQHGVDMQGIDFHQYWLRAREDGATDPIEAYSLCAVAAQAGRFVLPDPNPRSVLSQIRYAYHFDATLYARFLRRYAETRGVVRVEGTVGEVGQDARGDIARLTLSDGRVVEGDFFFDCTGFRALLIGQTLDAGFVDWSPWLPCDTALAVPSAHAGAPTPYTRSTARDAGWQWRIPTQRRVGNGHIFASAFQSEDAARDVMLATLEAAPLADPRRITFRAGCRERFWQGNCIAIGLAAGFLEPLESTSIYLIQEGISRFISLFPRGDIPEILRTEYNRHMRTEFEQVRDFIILHYAATTRDDTPFWNYCRTMTLPDTLLHKIELFRETGRVFRYNDELFARPSWVAVMLGQGIMPTTSDPIVATLPADDVARSLASMREAMAAAVQRMPTHGEFLLRYCPAVAA

SEQ ID NO: 82623 - protein, 491 aa, Sphingomonas sp.
  misc_feature (1)..(491): tr|A0A326GT24|A0A326GT24_SPHSX Tryptophan 7-halogenase OS=Sphingomonas sp. OX=28214 GN=DI625_01565 PE=4 SV=1
MTRKRIVIAGGGTAGWLAAALLTRQLAGLVDVTLVESEAIGTVGVGEATIPTIRSFHALLGLDERDFMAATGANFKLGIAFEGWARAGDRYIHSFGEVGRSTWMGDFQHFWLEAREQGGAADIGAYCLEHEAADAGRFLGGPDTPLNYAYHFDAGRYAAYLRERSEAQGLTRIEGRIARVERDSDSGDIAALVLDDGQHIAGDMFLDCTGFHALLIEQTLGVGFEDWGHWLPTDRALAVQTRATGPAVPYTRAIAHDAGWRWQIPLQHRIGNGLVYSSRHLGDDAARDRLMASVEGQALIEPRLIRFRTGRRLAMWERNCVALSLSSGFVEPLESTSLHLVMIALTRLVQLLPFGHLGAAARNRFNDQARREIEAVRDFVLLHYHLNERPEPFWRERKEIPPPDSLAERIALFAEGAHTYQSSDDLFRTGSWTQVMLGQRLTPAAWHPLARAMPPGELGTVLRGLQSNIAATVARLPTHQQFLDSYCLSRE

SEQ ID NO: 82624 - protein, 519 aa, Sphingomonas sp.
  misc_feature (1)..(519): tr|A0A2E1Z167|A0A2E1Z167_SPHSX Tryptophan halogenase OS =Sphingomonas sp. OX=28214 GN=CMN72_12940 PE=4 SV=1
MDDGKGKPDHINKVTVVGGGTAGWLAACRIAAEARRTGREIRLCLVESDRVPPIGVGEGTWPTMRNTLAKIGVSETDFVRECDATFKQGARFTGWADGSPGDSYYHPLNPPAGATRIDLARFWPGEGGGVSFAGWIDFQAALCDAGLAPKAITSAEYQGQANYAYHLDAGKFAAFLKEHATSRLGVEHIVGDVADAVLDDSGDIGHLTLSDGRSVTGDLFIDCTGFAALLIGKVYAVPFRSCRDILFADRAIAMQVPYAQDDAPIASQTISTATGAGWIWDIGLWARRGVGHVYSSAHCDDERAEKMLRDYIGPAAKGLTSRRIDIDAGYRTRFWQNNCVAVGLSAGFLEPLEASALMLVETSLDAIAERLPQNRQAMCIAARQFNTTFLHHWARIIEFLKLHYGITRRRDTDFWRDNADPASFPDELAERLEFWRHHSPNAQDFTHAREVFGWPSYQYVLNGMGFAADRSSLGDGSPNAAVARGLLEQLDRLRSEALARLPAHRDLIRAIREHGLQRI

SEQ ID NO: 82625 - protein, 400 aa, Sphingomonas sp.
  misc_feature (1)..(400): tr|A0A2E1Z0Y9|A0A2E1Z0Y9_SPHSX Tryptophan halogenase (F ragment) OS=Sphingomonas sp. OX=28214 GN=CMN72_12535 PE =4 SV=1
MKPVQRIVIAGGGTAGWMAAAAIAHNMRETVDLTLVESDAIGTVGVGESTIPPLATFNRVIGVKEADFMAATNATFKLGIWFEGWRTGAADDRYFHSFGITGRDHWTAGFQHFWLHGREKGHRQPYDDYCLELVAAREEKFAHLPDNRLNYAFQLDATAYGRFLRRLAEQNGARRVEGRIAEVELDGASGDIAALKLESGERIEGDLFIDCTGFRALLIEGALHAGFEDWTHWLPCDSAIAIQTESGRPAPPYTRAMAHDAGWQWRIPLQHRTGNGLVYCSRYLSRDDALARIEGNLEGEAITDPNFLRFTTGTRRRQWHRNCVAIGLSGGFMEPLESTSIHLIQRAILRLIRMMPAGGVISDRDIAEFNDQQLLDMEQIRDFLILHYKATERRDSAFWR

SEQ ID NO: 82626 - protein, 533 aa, Shewanella sp.
  misc_feature (1)..(533): tr|A0A0Q0KS50|A0A0Q0KS50_9GAMM Flavin-dependent tryptop han halogenase RebH OS=Shewanella sp. P1-14-1 OX=172376 1 GN=rebH_4 PE=4 SV=1
MPNPIDSVNTANAANEQSKNIQHIVVVGGGSAGWITAGTIAAKLNNTFAGQYSVTLVESANVAPIGVGEGTWPTMRTTLKKMGIRETDFIKQCHVSFKQGAKFAKWVTGKQDDYYYHPLMLPEGQNSETSIRQWFTTDYNHSLSTSLSPQESLCEAGLAPKYITTAEYDAEANYAYHLDAGKFSEFLKKHCVNKLDVSHLVTDVVAINNDDYGYIDSLTTEDEGDIHGDLFIDCTGFNSLLLAKHFDVPFKSCKDILFVDSAIAVQVPYESEQSSIASHTISTAQSCGWIWDIGLSNRRGVGHVYASQYISEQEALNELKTYLADSVDDVESLSFRKIPINPGHREKFWHKNCVAVGLSAGFLEPLEASALLLVEISAAMIAEQLPANRESMEIVAQRFNDTFLYRWERIIDFLKLHYMLNQRNDSAFWIDNRKAASIPNSLQTLLTLWQTQVPSDNDFIHATEVFPAASYQYVLYGMGFNTHNAPWALNEKQQDLARTQFNLTKQKTQQLMNTLPSNRALLNLIHQYGLQKI

SEQ ID NO: 82627 - protein, 500 aa, Microbulbifer aggregans
  misc_feature (1)..(500): tr|A0A1C9W7I8|A0A1C9W7I8_9GAMM Flavin-dependent tryptop han halogenase RebH OS=Microbulbifer aggregans OX=17697 79 GN=rebH_4 PE=4 SV=1
MIVGGGTAGWMAANLMAHRWRDRDVSIMLLESDAIGTIGVGEGSTPYLKGFFKSLGIDESEWMPACNATYKCGIRFPRWSTVPGYESYYHPFFSPLDREIGQVFFENVRRRRSGIDTPANPTDFFHAPFLSSNACAPHPEKPLPFELDYGYHFDAGLLGRFLREKAKAAGVEHLIDTVSTVERNGENIEAIVTEKSGRIAADFFIDCSGFRALLLGGAPDYRFRDFSRTLFNNAAVTVQIERDFSQPLLSETISEGLSSGWMWRIPLQNRTGCGYVYSNHYVSPDAAETELRKTLGLPESARVNHLKMRVGRAEEHWQGNCLGVGLSQGFIEPLEATALMLVQFTIEHFLEAFRFQDTEAPGPHKKTVFNERINQLFDGVLDYVAGHYKLNSREDTAYWRAAREEIVISDRLQALLDCWDNNGDVDRLLEQAGAELVYSRASWYSLLAGMGRFPRNLRPADAAVAREHQEVRRFCTGNLARFRQHQTQLDSLRQSVSEPA

SEQ ID NO: 82628 - protein, 504 aa, Caulobacter vibrioides
  misc_feature (1)..(504): tr|A0A0H3C9M7|A0A0H3C9M7_CAUVN Tryptophan halogenase su perfamily protein OS=Caulobacter vibrioides (strain NA1 000 / CB15N) OX=565050 GN=CCNA_02371 PE=4 SV=1
MAQQPIKALTIVGGGTAGWISAALLSRTLGPSVAITVVESDEIGIVGVGEATIPAIRLLNSLLGLDENDFLAATHGTIKLGIDFVDWHTVGQSYLHAFGPIGRPLGMAPFHHYWLRRRQAGHDESLWDYSLNARAAKAGRFDRIPQVGGGYLEGLAYAFHFDAALYAQYLRRYSEAQGVTRVEGRIVGVDQDAESGFVTSLTLQDGRKVGGEFFIDCSGFRGLLIEEALKSGYEDWRAWLPMDSAIAVPCASVTPLTPYTRATAREAGWQWRIPLQHRTGNGHVFCSDYIDAARATDVLMANLDGAPLAEPRQLRFTTGRRKQFWNRNVVAMGLASGFMEPLESTSIHLVQSALNRLLALFPDRGFNPIEIAEYNRQTALEYEYIRDFLVLHYKATTREDTPFWRAVRQMDMPDSLKARIALFSQSGRLFNQDDDLFKEASWIQVLIGQGVIPQAFHPLTGVVTDAQLDEYLANLRQIMSRAIDALPAHGDFIAKNCPSRPARA

SEQ ID NO: 82629 - protein, 503 aa, Caulobacter vibrioides
  misc_feature (1)..(503): tr|A0A0H3CAY9|A0A0H3CAY9_CAUVN Tryptophan halogenase OS =Caulobacter vibrioides (strain NA1000 / CB15N) OX=5650 50 GN=CCNA_02899 PE=4 SV=1
MSQDHRLRRIVIVGGGTSGWMTAAALGRFLKDGYTQVTLVESEAIGTVGVGESTIPQINIFNRMLGLDENDFVRKTKATFKLGIDFVDWQRIGHTYHHPFGPYGVDMEGVSFHAYWLKLRAMGLDDDLGAYSLQTVGARQSKFMRPNGQANSPLGQIAYAFQFDAGLYAKFLRDYSEARGVTRQEGKIASVQQDGQSGHVTSVTLESGQVIEGDLFIDCSGFRGLLIEQTLKTGYEDWSQWLLNDRAVAMPCTLGGSMAPVTRATARPHGWQWRIPLQHRLGNGYAYSSRHVSDDEALADLLSQLDGEPLADPNLIRFTPGRRKKSWNGNVVAIGLSAGFMEPLESQSIYLIQVGISRLLAHFPDRHFRQADIDRYNRTMTFEYEKIRDFIILHFKATARSDTPYWDYLREMPIPDYLADKIDLFKGSGRVFRENEELFNDTSWFAVFIGQGIYPESYDPMVDCMDETLFKARMAEIKSVIARSAEVMPGHMDFIRENCAAEG

SEQ ID NO: 82630 - protein, 513 aa, Sphingomonas sp.
  misc_feature (1)..(513): tr|A0A2W6SH92|A0A2W6SH92_SPHSX Tryptophan halogenase OS =Sphingomonas sp. OX=28214 GN=DI605_05015 PE=4 SV=1
MTKGAESAPSQPASGNRAIRSIVIVGGGTAGWMAATMLVRRLEKQPVRITVVESSEISTVGVGEATVPGIRDFFREIGVTEQEVLVASRGTVKLGIEFVDWKQPGERFFHPFGLYGMRSRGVAFHQYWLKMRQAGLAIDLEDYCLATAMARANRFMLPTDRPVHDLLFFDWAVHFDAGLFAKFLAARATAQGVGHVDARIVNVRRNGESGMIDGVDTACGKSIDGDLFIDCSGFRSLLLGAALGSPYEDWTNLLPCDRAVAMPCELAGPLTPFTRSTALAAGWQWRIPLQHRVGNGYVYSSRHLSDDEAVHVLRSRLEGEALAEPNMIRFRTGHRRDFWRGNCVALGLAAGFMEPLESTSITLIQTGIEKLLALFPDRDFDPALAAEYNRTTALEYERIRDFLLLHYWANRRRGEPMWDRCRDTALPETLARKIRLFKAHGHLVRYDWESFHDPSWLSMYAGFDIVAAGHDRAADYFSLPDLESALARMRDAIGQSLALAEPHDAFLKAYCAA

SEQ ID NO: 82631 - protein, 497 aa, Microbulbifer aggregans
  misc_feature (1)..(497): tr|A0A1C9W402|A0A1C9W402_9GAMM Flavin-dependent tryptop han halogenase RebH OS=Microbulbifer aggregans OX=17697 79 GN=rebH_3 PE=4 SV=1
MSDQNIKNLVILGGGTAGWMTASLMAKVLGKSINITLVESDKIGTVGVGEATIPPIINFNQALGLNEREFLKATKGTIKLGIQFENWLRQGESYMHAFGSIGKNFPFCDFHHFWRRSRASGQDSSLWDYSLNYQAAINNKFAHLAQIKGTNLPGISYAYHFDAGLYAQYLRSYSESKGIKRIEGTVKSVQVRPQDGFVETLILEDGQSIAGDLFVDCTGLAALLIEKTLGVDFEGWSHWLPCDRAMAVPSAGSKPIVPYTRSIAHAAGWQWRIPLQHRTGNGMVYSSKHWSDDEAREVLMGNLDGEALAEPRVIPFRTGRRTRQWDRNVVSIGLSSGFLEPLESTSIHLIQSAATRLIKSFPHQGIKAEEVAEFNRQSQVEIERIRDFIILHYKLNERRDSAFWRECESMSIPETLENKIELFRRTGKVFRDYDDLFTEVAWQQVMIGQGVFPEDHHTIADNLSEEQLSDLMNSLRTLVDGTVKSLPGHEQFLAGLS

SEQ ID NO: 82632 - protein, 492 aa, Paraglaciecola mesophila
  misc_feature (1)..(492): tr|K6ZCT9|K6ZCT9_9ALTE FADH2 O2-dependent halogenase I OS=Paraglaciecola mesophila KMM 241 OX=1128912 GN=prnA PE=4 SV=1
MQQDAIKKIVIAGGGTAGWMSAAALGKLFGKNIDVTLVESDAIPTVGVGEATIPTLHLFHDLLKIKESEFMAATNATFKLGIKFDDWYQKPQSYIHSFGRFNHGCWAAGFQHFWLRGRQLDIASEIGDYCPEHLACRMGKFAIAPKQERNHAFHLDAGLYAKFLRNIAQQCGVQRIEGKIDKVNLDHDNGFIQSLTLDNGRQIQGDLFIDCTGFRGLLIEQALNTGYEDWSHWLPCDSAVTVQTELNDETVPYTRSIAHHAGWQWQIPLQTRMGNGMVFCSKYISDDEAKTQLLANIQGKTLNPPRVLKFKTGVRRKLWNKNCVAIGLAGGFIEPLESTSIHLIQQSIIRLMQSLPTKKMEAALRDRFNASMREEIDNIRDFIILHYHATARKDSAFWRYCKDMPIPDSLQARMDQFAQSGHVYQGNGELFGEASWLQVMLGQGITPKAYHPIVDLMPEQELAKFLASVKQQTERRVNQLPNHLDFIRHYCQ

SEQ ID NO: 82633 - protein, 501 aa, Paraglaciecola hydrolytica
  misc_feature (1)..(501): tr|A0A136A4Z0|A0A136A4Z0_9ALTE Tryptophan halogenase OS =Paraglaciecola hydrolytica OX=1799789 GN=AX660_09920 P E=4 SV=1
MLESKGKPKKILIVGGGTAGWMAANLLATKWQDTEICLVESKDIGIIGVGEGSTPHLKLFFDAINVADSQWMPRCNATYKNGITFDGWSTVKGFESYFHPFAAQTDDVFTVPLFFKNIQARMQGYKVDAHPDKYFLESYLAANKLGPLPNDTFPFGLAYGYHFDSALLGQFLAEHAQSLGVKRVYGTVTKVSQNNHGELNAAILSDGTMMEADFFIDCSGFNSLLIQKTLKVGYRSFKECLFNDAAVVMPSVISQELPVETKATALSNGWAWQIPLRNRFGNGYVFSSDYIDANQAETELRQHLGLLHSDVEARHLKMQVGRVEKHWYKNCLAVGLAQGFIEPLEATAIALSFNTIAQFMQYFQQGQFSNQFEDAFNQDINSRFDGIKDYVVCHYKTNQRRDTAYWRDNAANNKISDTLNRIIQLWQHSPDFAGDMQRSKLMGSYQAKSWACMLAGYGVFPPTSSDPSIDYSMHQHEIDALNDFIRRCGLNFKSHNELLSN

SEQ ID NO: 82634 - protein, 520 aa, Novosphingobium sp.
  misc_feature (1)..(520): tr|A0A1W1Z0J0|A0A1W1Z0J0_9SPHN Tryptophan halogenase OS =Novosphingobium sp. B1 OX=1938756 GN=SAMN06272759_1023 18 PE=4 SV=1
MVRAVRDVVIVGGGTAGWLTAAIIAAKHKARIGHDFSVTLVESPNVPIIGVGEGTWPTLRSTLKNVGISETDFFRECDAAFKQGALFAKWTTGAEDDAYYHPLVLPQRFGQLNLAPHWLAGTLNEGGDNGETFCDAVCPQGRLCDENLAPKSMVNAEYEGQANYAYHLDAGKFAPFMQRHCTEKLGVRHVLADMRQVLPDDSGDIRAIETEQAGEISGDLFIDCTGMRSLLLGQTLGVGFKDCNDVLFCDTALAMQVPYPDPQAPVATHTISTAQSAGWIWDIGLPTRRGVGHVYSSRHISREDAEAELRAYVGPAAEGLSVRKIDIRSGHREIFWKNNCVAVGLAAGFLEPLEASAIVLIELSAKMIADQMPPVREVMDVVARRYNEKTLYRWGRIIDFLKLHYVLSKRRDTAFWRDNMDPASIPERLQELMALWQYQGPYMHEEFDRVDEVFPSASYQYVLYGMGFRTEVSARTLEPEVREARRARADNADITARMLSGLPKHRDLIDRIVKYGLQPV

SEQ ID NO: 82635 - protein, 340 aa, Sphingomonas sp.
  misc_feature (1)..(340): tr|A0A520EHI4|A0A520EHI4_SPHSX Tryptophan 7-halogenase (Fragment) OS=Sphingomonas sp. OX=28214 GN=EOP66_17830 PE=4 SV=1
ESDAIGTVGVGEATIPDMLVFNQMLGISEAEFMRATEATFKLGIEFVDWGHKGDRYIHPFGQHGVDMEGIDFHQYWLRLNRDGGTAPIEDYSLSAVAAGAGRFALPDPNPRSVFSHLRYAYHFDATLYARYLRRYAEKRGVKRIEGVVNEVHRTARGDGIAAVTMDSCSQVKGDFFFDCTGFRALLTGQTLDIDFVDWSAWLPCDSALAVPSAHVGPPPPYTRSTARPAGWQWRIPTQRRVGNGHIYSRSFMDDDEAERVLRKGVEGALLAEPRSIRFKAGHRRQFWRGNCIAIGLAAGFLEPLESTSLYLIQEGISRFISLFPNGDMPDILRVEYNRYM

SEQ ID NO: 82636 - protein, 514 aa, Shewanella sp.
  misc_feature (1)..(514): tr|A0A0Q0H7Y5|A0A0Q0H7Y5_9GAMM Flavin-dependent tryptop han halogenase RebH OS=Shewanella sp. P1-14-1 OX=172376 1 GN=rebH_5 PE=4 SV=1
MKVQRIVIVGGGTAGWLAANHIGKAAQHLADVSVTLIESPDIPTIGVGEGTVPAIKQSLQSFGISETEFIRECDVSFKQSIKFCNWLDKDIHGANNSYHHLFDVPSPLGENLTDYWLQQTKQQATNQQSFSATVSPQHFICDAFKAPKLITTPEYGGKVSYAYHLNAARFAQLLAKNATTKFNVTHLKANVLDANIDEKGNLTCLKTDSLGELAFDFYVDASGFESILLAKKLKVGFIDKSKQLFVNKAIVAQVPTTEEQVIPPYTIATAHQAGWVWDIALPQRRGTGFVYSDNHMTSAQAEETFDRYLGGKLASLASREIPMKVGYREKFWAKNCVSLGLAQGFLEPIEATSILLTDFAAAYLSKRLPHALSQMPALAERFNHTMGYAWERVVEFAKLHYCISDRQDSDFWRDNRCPDSIPNPLKQKMALWQNFSPLTDDLFSRYEVFNVDNYLYVLYGMKYATQVNQCDKQYLLAAQQQTEQIRRIGQGLAAELPEHRVLLNKIKQYGLKTI

SEQ ID NO: 82637 - protein, 499 aa, Pseudoalteromonas piratica
  misc_feature (1)..(499): tr|A0A0A7EFH4|A0A0A7EFH4_9GAMM Uncharacterized protein OS=Pseudoalteromonas piratica OX=1348114 GN=OM33_09555 PE=4 SV=1
MAIPKRIVVLGGGSAGWMAASLLHHSWANKGAEITLIESDIIGVVGVGEGSTPSLKYFFEKLQIAENEWMPFCNATYKCGISFPDWTSHLDENEYFHPFYSDHDWKTGQAFIHNCNVRRQGFDIETRPNHYWLQAKLAKNNLSPKLKQPQNKELDYGYHFDSQKLGEFLKNRAIKLGIKHIIGTVEVVNNDDEGVHSLTLNCGKTIAGDLFIDATGFASLLLQKTLKVPFISYKDYLLNDSAIAIPTETRTDDDISPQTVSRALSAGWAWTIPLRNRNGNGYVYSSKYISPEDAEAELRAYLGISDRHDIKARHIKMRLGRVAKHWHLNVLGVGLSQGFIEPLEATALSCIQYTVEHFIETIEKGGDVSALQEPFNQQINTVYDAIRDYISAHYRLNTRIDSDYWLANREADSPEKLIKILSAWDDPASQFESTLKRLNAEVMYFSPSWYCLLAGKGRFKHKAQTLSSSIKTANVADIDNYCEQQATHFKPHHQALSND

SEQ ID NO: 82638 - protein, 514 aa, Microbulbifer aggregans
  misc_feature (1)..(514): tr|A0A1C9W305|A0A1C9W305_9GAMM Flavin-dependent tryptop han halogenase RebH OS=Microbulbifer aggregans OX=17697 79 GN=rebH_1 PE=4 SV=1
MNRQRTKVINVVGGGSAGWMTAIYLNRYFNRSAKNFAIRVIESPDVGIIGVGEATVHSIRFFFAAMGLDEAELMAETNATVKSGILFRNWKKPVHGKVHEYFHPFDQQQPGGSVDISSAWFVAGRNKSERYDRAVSINSHLIDDGRCPKAISSAPYQAVTPYGYHLDAKLLARYLRKKAVEAGVEHIEATISDVTVDGEQITGVTTERGEFAGDFFVDCSGFRALLLEKLAADNWHSFADALPCNRAVAIQRPLAEGEAPKPYTVATALSNGWAWQIDLVNRQGCGYVYDADRLLPEDAERELREFLGPGSETLKCSHLEMNVGCRDRFWIGNCVAIGLSGGFIEPLESTGLHMIHLGVSLLATHLAAGEVPQALRDAYNQKMRGFYQDLKQFIVLHYCLSDRDDSEFWRAAKATAEHCPWLKQQLELWRYKICEYQDFAGTYASIFTDTNYRYVLYGMQHYPDLQFVLAEEEREALFRRFDGLVRRAKVAALDHQTFLRTLPVGERSEIVGVG

SEQ ID NO: 82639 - protein, 496 aa, Colwellia psychrerythraea
  misc_feature (1)..(496): tr|Q47XR9|Q47XR9_COLP3 Putative tryptophan halogenase O S=Colwellia psychrerythraea (strain 34H / ATCC BAA-681) OX=167879 GN=CPS_3734 PE=4 SV=1
MNNLSEVKNVVIAGGGTAGWMAATALAKLIGNNLNITLVESDEISTVGVGEATIPPLLTFHKMLKINEAEFMSSVNATFKLGINFENWKDNDSEYFHSFGTTGRDCWATTFLQFYNRSKKEGYQAKYEEYCLELQAGLNEKFAHLPNSGLKYAYHMDATLYAKFLRKLSEKNGVKRIEGKIEQVNIDEKSGFIKSLTLLSGVTIEGDLFIDCTGFRGVLIEQALHTGYDDWSHWLPCDRAVAVQTESTEEPKPYTRSIAHESGWQWKIPLQNRTGNGLVYCSKYLNDENAEKLLLENVEGKTLKKPLFIKFTPGQRRKHWNKNCVALGLSSGFIEPLESTSIHLIQRGIIRLMQMFPKMGITDSVINEYNYQSEEEIRYIRDFIILHYHVTNRNDSTFWRYCSKMDVPSSLSHRIELFKEHGYVFKAPWDLFAENSWVQVMLGQGLSPQNHHPIADMMSTNEQDMFLNGIKNSIEQTVKSLPTHKQYLDQYCNSKA

SEQ ID NO: 82640 - protein, 505 aa, Sphingomonas sp.
  misc_feature (1)..(505): tr|A0A326GSY0|A0A326GSY0_SPHSX Tryptophan 7-halogenase OS=Sphingomonas sp. OX=28214 GN=DI625_01830 PE=4 SV=1
MTDRRVTSACIVGGGTAGWMTAAALANRLAGLGVRVRLIESEEIGTVGVGEATLPHIRAFNATLGIAEPELMRATEATYKLGIEFCDWGRIGDRYIHPFGNYGPEEDGIPFYHQWLRLRAMGDAGRLDDYSYPVIAAEQNRFRHPASEPGRVESSFGYAYQFDASLYAAFLRRYAETRGVERIEGKVVDVALDGEGGFVRDVTLADGRTIGAELFIDCSGFRGLLIEGALQSGYDDWSRWLPCDRAVAVPTESRGPLGPYTRATARTAGWQWRIPLQHRVGNGHVYCSDFISDDEAERQLVDHLDAPMQANPRRLRFTTGRRRDFWKRNVVAIGLASGFLEPLESTSIHLIQDGITELLALFPDRDFAAEDIDEYNRRMALHFERVRDFLLLHYVATERDDSPMWRHFRALTLPDSLAHKIDTWRTRGYVVPYQFGLFLPPSWVAVMLGQRLMPGAYDPRVEMIAPDALAAQAAALRAEVAGAVQATPDHADYIRRSPAAAGLAA

SEQ ID NO: 82641 - protein, 496 aa, Paraglaciecola mesophila
  misc_feature (1)..(496): tr|K6Z1Z9|K6Z1Z9_9ALTE FADH2 O2-dependent halogenase I OS=Paraglaciecola mesophila KMM 241 OX=1128912 GN=prnA PE=4 SV=1
MKQVIKNVVIVGGGTAGWLTAALLQKVVGTSINITLVESEAIGTVGVGEATIPPIRLVNQVLGINEAEFLRETKATIKLAIKFENWRTPNESYFHTFGSPGKSMAFCHFHHFVNRAKNLGHESTIWDYDLNYLCATQGKFAHIKAQDPVLDLPYAYHFDASLYAQFLRRYCQKLGAKRIEGMIESVQQHPSGDIAGVTLQDGQQIHGDLFVDCSGFRGLLIQQTLGVGYDDWTHLLPCDRAVAVPSERFDKTVPYTRAIAHKAGWQWRIPLQHRNGNGLVYCSSHMSDDEATHSLLNNLDSTPIGDPKVIHFKTGRRRKQWHKNVVAVGLASGFLEPLESTSIHLIQSAIVRLIHLFPHQGIDSAAVDEFNHQSELEYTQIRDFLVLHYHLTERDDSQFWRNIQSMDIPASLAHKMALFKQTGKLFREQNDLFLESSWLQVMVGQGIEPNDYHPIANNLSEPQLLNMLNKMCEVKQEPLTSLPSHDEFLKHFCKVT

SEQ ID NO: 82642 - protein, 544 aa, Streptomyces malaysiense
  misc_feature (1)..(544): tr|A0A1J4Q384|A0A1J4Q384_9ACTN Tryptophan halogenase OS =Streptomyces malaysiense OX=1428626 GN=VT52_013640 PE= 4 SV=1
MGEPIRNIVILGGGTAGWMAASYLGKALSGQASITVVEAPAIPRIGVGEATVPNLQRVFFDYLGLPEEEWMGECNAGFKMAVKFVNWRTPGPGEPAARRDAGGSDHFYHPFGLLPAPDGVPLSHYWTRKRLAGTTGEPFDYACFVEPPLMDANRSPRFLDGTRCTNYAWHFDAARVAAFLRGFATGKQGVRHVEGTVSDVRADARGYIESVTLESGEVVGGDFFVDCSGLRGLLINKKLGEPFIDMSDHLLNNSAVATQVPHDDETHGIEPYTSSIAMPAGWTWRIPMPGRFGSGYVYCDAFADKDEAARDLCRLWGLDPEKAALNHIRFRVGRNRRAWVGNCVGIGLSSCFVEPLESTGIYFITASLYQLVKHFPERDVDPVLRDRFNREIVDMFDDTRDFLQAHFSLSPRTDTPFWRATKELTLADQIKEKIEMYRSGVPVNPPSTDESTYYGNFESEFRNFWTNGSYYSVFAGLGVRPRSSLPIISYRPGSVVTAERAFADVKARQRRLLSELPSAYEYLSHLYDADRPRHAPAKAPRRQA

SEQ ID NO: 82643 - protein, 511 aa, Pseudoalteromonas neustonica
  misc_feature (1)..(511): tr|A0A558IYE5|A0A558IYE5_9GAMM Tryptophan 7-halogenase OS=Pseudoalteromonas neustonica OX=1840331 GN=FQP85_002 50 PE=4 SV=1
MNNKIQHIVVLGGGAAGWLSAGLLAAEHPKKKITLIESANIAISGVGEGTWPSMRNTLKRIGIEEIDFIRHCDASFKQGSKFINWRNINIGENYYHPFMTPEGYLETDLHAYWQHHASTQKYADAVNMQSFVCQAALAPKQLHTPEYAAVTNYGYHLDAGKFATFLKHHCVKKLNVHHIIDDVIEVKNDHDDYIHSLTTIKHGDIDGDLFIDCTGARARLIGEHYGATLITQEHILFNNSAIAAHLPYNDNQQEIASATLSTAQPHGWIWDIGLPSRRGIGYTYSDKYCDEQTAVNTLKSYAALSVGEQVAEQIQTRKLSFIPGYRTQFWVKNCVAVGMSQGFIEPLEASALAMVELSISMLSEQMPQNRTHMDLLAKRFNERFSYRWQRVIDFLKLHYILSERDESQYWRDIKKPSSIPTRLNELLAIWQYQPPSRFDLIENEEVFPSASYQYVLYGMGFHTQNTTAENTFNNAKAGQYFYQQNREKIAKYLQGLPTNRALLNQLLNNKA

SEQ ID NO: 82644 - protein, 508 aa, Paraglaciecola mesophila
  misc_feature (1)..(508): tr|K6YFZ9|K6YFZ9_9ALTE Tryptophan halogenase, putative OS=Paraglaciecola mesophila KMM 241 OX=1128912 GN=GMES_ 0575 PE=4 SV=1
MSKAVKKIVIVGGGTAGWLTAAIVAAQHKTDDNNGLQIVLVESSDIPTIGVGEGTWPTMKNTLQQIGLKESEVFARCHAGFKQGGKFVDWVHGNGDFYYHPFTVPLGYGRIDLAPYVEKIENYAVESNFQHHICEAGLAPRSMAEAEYKGQCNYAYHLDAGEFAEVLKEHCKNNLNVTQIIGTVDKVNLSDDGAIASITLKSDEQIDGDLFVDCTGFASLLLGQALEVPFICADKVLFNDSAIALHMPYDDATSPIATHTIATGQNAGWIWDIGLTHRRGVGHVYSSQYLSDDEAEANLRRYLGSGSDDIPVRKIGFKSGHRAQVWKKNCVAVGMAAGFVEPLEATAIMLVEISARFIADNIPPDTSLTPIIEKRFNQQMAYRWSRIIDFLKLHYMLTKRPEPYWQAHTDPDSIPESLQEDLALWKFRGPITADFDAAIELFPAASYQYVLYGMGFKPDFSRQPHLYNEQANAQKIIHRNQQLTQQLLQTLPPHREYIERWLSTQSMR

SEQ ID NO: 82645 - protein, 526 aa, Microbulbifer aggregans
  misc_feature (1)..(526): tr|A0A1C9W7M8|A0A1C9W7M8_9GAMM Flavin-dependent tryptop han halogenase RebH OS=Microbulbifer aggregans OX=17697 79 GN=rebH_6 PE=4 SV=1
MHPVSFMRNTAVKKVVIVGGGSAGWLTAGVLAAEYAAGGDHPLQITLVESPDVPTIGVGEGTWPSMRGTLKRIGISETEFLLRCDASFKQGTRFIGWRQGGEATDGDEYCHPFTAPAGFHQQNPEPFWQPHRDEMPFGDAVCPQGHISRLHLAPKQLTTPEYAFNLNYGYHLDAGKFAELLQDHCTGCLGVEHLRERVTRIANDQNGYITALHLDSGGSIEGDLFVDCSGARSLLLGDHYGIGIFDQQGVLFNDSALAVQMPYAEEDAPIESCTLSTARENGWIWDIALPTRRGVGYTYSGSHTSDSEAELVLSQYLRMTPAANREKAPELRKISFRPGYREQFWHKNCVAIGMAAGFIEPLEASALVLVEQSAKMLAEQLPPNREVMQAVAVRFNRKLSHHWQRIIEFLKLHYVLSERRDSSYWKDHRDPNGIPGRLADSLSLWRCRSPWVEDSEVADELFPAASYQYVLYGMGFVTDPLPWAMRPEKEQIARKQFHDTIQSRERLQRSLPSNRELLQRMRLAVR

SEQ ID NO: 82646 - protein, 293 aa, Sphingomonas sp.
  misc_feature (1)..(293): tr|A0A520EUQ8|A0A520EUQ8_SPHSX Tryptophan 7-halogenase (Fragment) OS=Sphingomonas sp. OX=28214 GN=EOP66_12650 PE=4 SV=1
MTKRILIVGGGTAGWLTAGYLAKRLGADLPGGVAITLVESQDIGILGVGEGTFPTIRRTLATIGIDEADLIRRCGATFKQGAKFVHWRHAPGQGATDHYSHPFQVADSSDGLDLLPYWLLGHGGPENWDEVSNPQKKASDRHRAPKLPTNPDYVGPLNYAFHFDAVALAGLLREQGVKNGVRHLTDTVSEVLLDAEGAIGGVRTERNGVLGADLYIDCTGFRAELIGKAMKVPYRSCRDVLFCDRAIAAQLPYARPDDPIASYTISTAQKNGWIWDIGLDRRRGIGHVYSSDH

SEQ ID NO: 82647 - protein, 401 aa, Paraglaciecola hydrolytica
  misc_feature (1)..(401): tr|A0A136A606|A0A136A606_9ALTE Tryptophan halogenase (F ragment) OS=Paraglaciecola hydrolytica OX=1799789 GN=AX 660_04270 PE=4 SV=1
MKICIVGGGTAGWMAANLFAKKWADKNIEITLLESPEVGIVGVGEGSTPTLKRFFQMLDIAESEWMPQCNATYKVNIRFAGWSPQSGIASYSHPFISQLDTFTQRALFVNCRTRRLGLATHTNPEDFLINGVLAQHNAGPLTPKNFPFRMEYGYHFDSHLLGEFLATLAKKCGVVHKQSKVVTVTKQANGDIASLITSEQQELAADWFVDCSGFASVLMQQHLGVKFNSYKDNLFNDSAVVMPSKIDAVIPVETKATAIKNGWCWKIPLTNRYGNGYVYSSDFINTEQAELEFRQHLNALDDPQACRHLKMKVGSLETHWQNNCIALGLSQGFIEPLEATALHLVQICTELFMDKFAAGGFSRLHQADYNLAAKERFERVRDYIVAHYKLNTRDDSDYWRG

SEQ ID NO: 82648 - protein, 489 aa, Sphingomonas sp.
  misc_feature (1)..(489): tr|A0A520FM47|A0A520FM47_SPHSX Tryptophan 7-halogenase OS=Sphingomonas sp. OX=28214 GN=EOP66_04260 PE=4 SV=1
MAAAALAAKLAGLPISITLVESDEIGTVGVGEATLPHIRAFNLALGIDEAEMMRATEATYKLGIEFCDWGRRGDRYIHPFGDFGPTTNDVPFYQYWLKLRQSGDRSRIDEYSYPVIAAEQGRFRRPSGDLDAVESTFGYAYQFDAGLYAKFLRGFAEKRGVSRTEGKVVRVVQDGETGFVRDVVLTNGTTLSADLFIDCSGFRGLLIETALQSGYDDWSAWLPCNRAIAVPTESNGALRPFTRATARTAGWQWRIPLQHRVGNGHVYCSSFISDDEAHDQLVAGLDAPMQAEPRRLSFTTGRRREFWKKNVVAIGLAGGFLEPLESTSINLIQDGITELLAVFPDKGFAARDIAEYNRRIGLHYERIRDFLLLHYVATQRDDSEMWRHFRNLRLPDSLSERIDAWRSRGHLIQYEFGLFLSPSWVAVFLGQNLVPDRHDPRVENMSVDALTARASDVRAKVDAAVRRTPEHTAFIRESGGAARLAVAGA

SEQ ID NO: 82649 - protein, 518 aa, Sphingobium sp.
  misc_feature (1)..(518): tr|A0A2W6WBN9|A0A2W6WBN9_9SPHN Tryptophan halogenase OS =Sphingobium sp. OX=1912891 GN=DI547_06225 PE=4 SV=1
MTTGTFSPSRVVILGGGTAGWLAAAYFSRTLKMPNIALVESSEIGIIGVGEGTFPTIRSTLANLGISEREFLVRANATFKQGVLFNGWADGADSYFHPFNLPIGGEDEALLPHWIADESAQRPSWADAVTVQERVIRAGLAPKLLQDPDFSGPMNYAYHFDAARFADYLRDISVAAGVERIEGTVAQVETQADGDIASLILSDGRRVGGDFFIDCSGFRALLIGETLGAPFTSCGDTLFNDRALAMQVPYPAADTPVRPYTLATAHEAGWTWDIGLTERRGVGYVYSSRHCSDDEAEATLRRYVGTQGDALTPRQLRFATGYRDRQWIGNCAAIGLSAGFFEPLESTGIMLIESALRMIGDFLVPGDRDARDAAARAFNSHMAGRFARIVHFLKLHYCITRRIDTAYWRDNADPATIPPELRDMLAQWRHRPPSRFDFVVDLETFLPPSYHYILYGMGFDTRITAGANRYPGAAEARDAFAKVRAAAGSAIAHLPDHRALLAYYHADPAFAPRTTRVS

SEQ ID NO: 82650 - protein, 510 aa, Caulobacter vibrioides
  misc_feature (1)..(510): tr|A0A0H3C6Y9|A0A0H3C6Y9_CAUVN Tryptophan halogenase su perfamily protein OS=Caulobacter vibrioides (strain NA1 000 / CB15N) OX=565050 GN=CCNA_01022 PE=4 SV=1
MQDHRIRKLVIVGGGTAGWMAAAALRRHFHGGPLEITLVESEEIGTVGVGEATIPTIRGFYQQLGLSDIEVMRATQATCKLGIRFNGWLREGQSFIHPFGHFGQDLRGVPFHHYWRKLAQAGEPTDIADYCLGASLAAAGKFMAPPRNPTSTLSVFDWALHFDAGLFAQLMRRVAEDNGVRRIEGKITKVNLRPEDGFVAWLDLEGGARVEGDLFIDCSGFRGLLIEEALHTGYESWSDLLFCDRAWAVQSEGQGDPPPYTDVTAHSAGWRWRIPLQHRYGNGYVFSSRHISDEDALAELKAAVPDPLLHEPRLIRFNPGRREQVWNKNVIALGLASGFLEPLESTSIALIETGIEKIKALFPDRDFAPELADEFNDWSRREMERVRDFIILHYWANKRRDTAFWRDCNAVTLPDTLQRKIDLFLGRGHFVRYRWEMFAPPSWMAIYAGFELLPSAVDPSLDGVDPKALSAPLAEMRKAVREVVASAPPHQAFLDQYCRPAPASASSAAE

SEQ ID NO: 82651 - protein, 533 aa, Bdellovibrio sp.
  misc_feature (1)..(533): tr|A0A254QEB8|A0A254QEB8_9PROT Tryptophan halogenase OS =Bdellovibrio sp. SKB1291214 OX=1732569 GN=B9G69_05310 PE=4 SV=1
MASLNDFVETAFDLSYLNFPKYPATEIKSIGILGGGTAGYLAALALKKLHPKIQTSVIESSKIPVIGVGESTTTEIVPFLHRTLGIDPQEFFQAVEPTLKLGIRFDWGCPGDYHFNFNFFAGHQQESYYYEDHINNANWASVLMDHHKIPVIREKNGEMISLLQSIPFSYHIDNKNLIGFLNKIVKQRQIPIIDAVVEKVHLDDNDFVTSVETDDGKRHSFDLYIDCSGFRSRILGQALKTEFISFKSSLRNNRALTFDLPNNNDIRPYTQCTTMPNGWCWTIPMRAENHYGYVHSTDYCDEAQAVKEARERFGHFEKYKMVEFRTGRHKQAWNKNVFGLGNAYGFVEPLESTAIQTAVHSIMTLCKLMPNNHQDSSSIAAINQEIAATWDTFRWFLSIHYKYNKQLDTQYWKDCRANTEIGDAKMVVDLFNQRAPLSASNLGTNSPYTACEALVFNSYSYDTLLYGQKVLEKPPIRPKMSKEEYVQRTLSYQELTKKSLTLHELFAEDYLIEGGLLEQLFEDQDTWIVETEA

SEQ ID NO: 82652 - protein, 143 aa, Sphingomonas sp.
  misc_feature (1)..(143): tr|A0A520FB25|A0A520FB25_SPHSX Tryptophan halogenase (F ragment) OS=Sphingomonas sp. OX=28214 GN=EOP66_07385 PE =4 SV=1
MDRAITSIVIVGGGTAGWLAACLIAARADRDAEHPLQVTLIESPDVATIGVGEGTWPTMRRTLERIGISETEFLLACDAAFKQGSRFDGWRTGAPDDRYLHPFTTPAEAAPRDLASAWSDSGLAFAEALCAQHAVCSQDLAPR

SEQ ID NO: 82653 - protein, 515 aa, Paraglaciecola hydrolytica
  misc_feature (1)..(515): tr|A0A148KLG0|A0A148KLG0_9ALTE Tryptophan halogenase OS =Paraglaciecola hydrolytica OX=1799789 GN=AX660_01405 P E=4 SV=1
MQQKSIRQIVIVGGGTAGWMTAAALSNFIDPKHCQITLVESEQIGTVGVGEATIPHIRVFNQMLGIDEKDFLTQTQATFKLGIKFCGWGDQGQDYFHPFGAHGFEIDKLPFHQYWLHARNQGDTSALDDYSFSITAAKNNKFCFPDESSNSIYSSFSYAYHLDANLYAQYLRTYSEQRGVKRVTGLIAEVAKNATDGFVTSVILNDGQQIKGDLFIDCSGFRSLLINKALNVSFEDWSHWLPCNSAIAVPCETEGEPLAYTQSIAHDAGWQWQIPLQHRIGNGHVFCSEFMTKEQAQDILLNNLPAAPMAEPKQLHFKTGMHEKSWSKNCVAIGLSSGFLEPLESTSIYLIQLGIYKLMELLPDMHFSSVDEDEFNRVVKDEYLKVRDFLILHYKLSDPNKSPFWRYCHDMPIPDSLEQRMALFKETGYFSEYSAGLFLTPSWLSVFIGQGYFPDNIDPRVETLNFDAVSKQLQNMRHYLQQSVDAIPTHKNALNALLKGQAHSHSASLNLYGRR

SEQ ID NO: 82654 - protein, 471 aa, Sphingomonas sp.
  misc_feature (1)..(471): tr|A0A326GSE2|A0A326GSE2_SPHSX Tryptophan halogenase OS =Sphingomonas sp. OX=28214 GN=DI625_01825 PE=4 SV=1
MTVHRILLCGDGLSARMALAALARHLPPSIAILWARAGDQRGSDLFYGNVTGPSAYAFNLTAGLDERRLTLDSTTAFSWGTRYADWGAGRSWMQSFALPFPVIDGVQFHHYLASAGADSIDPFVAGLQAARRGVFVHPPRAGANGAPHPLSRAEYGYQFDAQDYARLFDVPDRVERIGGAVASVEAADGRIAGVTMDDGRVVIADLYVDASGPEAQLLAALAGDRPSGRAIAIATSDLPADDQAPLRTVRVTSSGWESDTPLKGRTRRTVVGAVGEVAGTKATLGRRSLAWAGNCVGVGQAAGVVEPLTPAPMLLLERDIERLLALIPVTGGMAVEAAEYNRRFAEDYDHAALFQQAMFQAGGLPDGPYWQAARAEAVPERLERKLTMFERRGVLVAYDLEPFHPEDWLILHMGMGRRPARYDPLADRAERAQVTPFLSKMARTIEQGVATLPPARVYRAQLEQYLRKAAS

SEQ ID NO: 82655 - protein, 500 aa, Sphingomonas sp.
  misc_feature (1)..(500): tr|A0A326GJZ0|A0A326GJZ0_SPHSX Tryptophan 7-halogenase OS=Sphingomonas sp. OX=28214 GN=DI625_12285 PE=4 SV=1
MQAPDRVRRVVILGGGTAGWMTAAALSRSFGDTVAITLLESDAIGTVGVGEATIPTIHWFNELIGIDEAEFLRATKATFKLGIEFVDWAAPGHRYFHPFGQFGATLPGVAFHHRWLKAQAEGMDVPLSALSLATQLAAEGRFAKPVGDPRSILSTLGYAYHFDAGLYAAFLRRRSEGAGVVRVEGQLRNVERDSDTGLLTALVTERGERIAGDLFIDCSGFRALLIAGEMGEGYEDWSHWLPCDRAVAVPCARVAATTPFTRSTARAAGWQWRIPLQHRTGNGYVYASRYVSDDEAAATLMANLDGEALAEPRFLRFTAGTRRRPWRGNVVAIGLSSGFLEPLESTSIHLIQSGIAKLLTLFPNRDHDPALADRFNTVFARDMDGVKDFLILHYHANTNPAPLWQHCRTMTLPETLIAREEQYRRSGRIILDADELFRDASWLAVLNGQGIVAQGYNPLADAIDSATNKAQVRQIADVVARAAPTLPLHDAALAAIIGTA

SEQ ID NO: 82656 - protein, 476 aa, Aestuariibacter sp.
  misc_feature (1)..(476): tr|A0A506RTY1|A0A506RTY1_9ALTE Tryptophan 7-halogenase OS=Aestuariibacter sp. GS-14 OX=2590670 GN=FJ444_00420 PE=4 SV=1
MSRLTQADLFDTPANTHTRALKSIWVVGDDVHGLSTAVAFATALKPFGIKVGVVSLTTATAKQASLHTCNGHLFEFHRRYQIPERAFMQSQGVAFFTAMSLATASRPNEPVWLANDTWLPLFNGIELHQIKRWLGESASVETSFATAAAKAGKTVFPSGQQGTLGNSFELGAVVDTEAYCAFLTQHAAERGVTFVTSNDIAFERCPRSGDITSLLLSNNQRIQCDWVVDATGSQARVIGQALKQPFESWHAHLPVCHVDETTEQSASHTTSLAVCVTDSGYYQTQHIGGVKRTVTFAVSHSVAGESESGFREPVSHNCLAVGPAAYHIDMPGMSTLHITHRIIERFLNVVPCLPAPATWGRAFNRSTKQDCKHVRDFSCLLLSAMANRQQETGKPWQVLPQLPEPLTQALALFNESARCSVPPDAMIHRQRWLEALALASSNEQAFEPLLNAVSQASGKQFLQRIATQIQSLVSQC

SEQ ID NO: 82657 - protein, 272 aa, Sphingomonas sp.
  misc_feature (1)..(272): tr|A0A2E1Z1H4|A0A2E1Z1H4_SPHSX Tryptophan halogenase (F ragment) OS=Sphingomonas sp. OX=28214 GN=CMN72_12955 PE =4 SV=1
MASPMNRHIVIAGGGTAGWMAAAALARFLPNTVRITLVESEAIGTVGVGEATIPQIRLFNQRLGIAEDQLLAATNGTIKLGIEFAGWNGPESRYIHAFGTIGRPLGNVPFHQHWLRHRCTGRAGALQEYSVAACAAHQNRFAPDLGRPELQTGLAWAYQFDAARYAALLRAHAEQAGVTRLEGRINHVAVDDRGHIASLHLDDGRAVSGDFFIDCTGFSARLIGDALGVGYEDWSRWLPCDRALAVQSAATAPLNPYTRATARTAGWQWRIP

SEQ ID NO: 82658 - protein, 500 aa, Novosphingobium sp.
  misc_feature (1)..(500): tr|A0A1W1Y5E8|A0A1W1Y5E8_9SPHN Tryptophan halogenase OS =Novosphingobium sp. B1 OX=1938756 GN=SAMN06272759_1013 86 PE=4 SV=1
MNDSGLMIRSVAVIGGGTAGWMTAAALAQALRHNCRITLVESDEIGTVGVGEATIPPIRTFNETLQIDERDFVRKTKGSFKLGIEFVDWGSLGNSYFHPFGPHGRAFDIVNLHHYWLRAREGGETAPLDEHSMAWALAKENRFAPPMPDQRNVLSTYDYAYHFDAGLYARFLREYSEAKGVTRMEGKVASVEQDAQTGFVTGVTLEDGRAVEAELFIDCSGFRGLLIEGALKAGYEDWTHWLPCDRAMAVPCENAGPLTPYTRSTAREAGWQWRIPLQHRTGNGYVFCSQFLSEDEAAEKLLSRLDGKALADPRPLRFVTGRRKTFWEKNVIAIGLSSGFMEPLESTSIHLIQAGISKLLALFPDRTFDPIVIDEYNRIAINEYERIRDFLILHYKLTTRDDAELWRYCAAMDIPDTLLMKIEHFRRYGRLVQRDADLFGAPSWLAVHVGQGNIPERTDPLADYRGIDGREWLSKLRAAMHHAALQQPAHEQFIRANCAA

SEQ ID NO: 82659 - protein, 496 aa, Sphingomonas sp.
  misc_feature (1)..(496): tr|A0A326GL25|A0A326GL25_SPHSX Tryptophan 7-halogenase OS=Sphingomonas sp. OX=28214 GN=DI625_09290 PE=4 SV=1
MTDPIAHVVIVGGGTAGWMTAAAAGRFLDDGQRRITLVESDAIGTVGVGEATIPSILNFNKLLGIDEAEFLRETKGSFKLGIEFAGWHRPDSGYFHPFGSFGRDIEGINFHQLWLKLRGQAGIGPIADYSPSTVAARAAAFGPPVGDPRSPLSGMAYAYHIDATLYAAFLRRRAEADGVARVEGRIVAVERADNGHVAAVVLDDGRRIAGDLFIDCSGFRSLLLGDTLGVGFEDWSHWLPCDRAIAVPSERTEPVLPYTRATAHVAGWQWRIPLQHRTGNGVVYCSRFIDDDAAERLLLSRLDSAPTAAPRRLSFTAGQRHRMWEGNVVAIGLSGGFLEPLESTSIHLIQQGISKLFALFPDRSFSTVERNEYNRQMADNYRSIRDFIILHYHATARDDSPFWDHVRTMDVPDSLTRKLDLFRHKGRVFRYEDELFAMPSWVAVLLGQGVDPVGHDPVADALDEERLAGALRQMRSATAAAVAALPSHGAVLMRLE

SEQ ID NO: 82660 - protein, 121 aa, Caulobacterales bacterium
  misc_feature (1)..(121): tr|A0A258CAR5|A0A258CAR5_9PROT Tryptophan halogenase (F ragment) OS=Caulobacterales bacterium 32-67-6 OX=197050 2 GN=B7Z13_09575 PE=4 SV=1
MDQPRRPLKKICIVGGGTAGWVAAALMAEHFKGRMAEIELVESDDIGTIGVGESTVPPFLEMLKRLGIDERDFIQKTQASFKLGIQFEDWTQKGESYFHPFGAIGVPVDISDFYPVWLKAR

SEQ ID NO: 82661 - protein, 523 aa, Sphingomonas sp.
  misc_feature (1)..(523): tr|A0A2E2ZQA7|A0A2E2ZQA7_SPHSX Tryptophan halogenase OS =Sphingomonas sp. OX=28214 GN=CMN73_02085 PE=4 SV=1
  misc_feature (29)..(31): Xaa can be any naturally occurring amino acid
  misc_feature (35)..(35): Xaa can be any naturally occurring amino acid
  misc_feature (63)..(63): Xaa can be any naturally occurring amino acid
  misc_feature (72)..(72): Xaa can be any naturally occurring amino acid
  misc_feature (78)..(78): Xaa can be any naturally occurring amino acid
  misc_feature (80)..(80): Xaa can be any naturally occurring amino acid
  misc_feature (83)..(83): Xaa can be any naturally occurring amino acid
  misc_feature (276)..(276): Xaa can be any naturally occurring amino acid
  misc_feature (364)..(364): Xaa can be any naturally occurring amino acid
  misc_feature (485)..(485): Xaa can be any naturally occurring amino acid
  misc_feature (489)..(489): Xaa can be any naturally occurring amino acid
MDRPIAQIVIVGGGTAGWLAACTIAARAXXXAPAXLQVTLIESPDIPTIGVGEGTWPTMRHTXQRIGISETXFLTACXAXFKXGSRFDGWRTGAPDDRYYHPFTPPVEGDPRDLIAAWRDTGPATDFAATACAQPAICDRMLAPRQRNMPEYGGALNYAYHLDAGKLAALLARHGTERLGVRHIRDHVDAVEATADGDIAAVTTQGSGRVAGDLFLDCTGHAALLLGGHYDVPIIDCSDTLFNDRALAVQVPVAPYSPIASQTTGTAHAAGWIWDXGLPTRRGIGCVYASRHMSDDDAEATLRDYIVRAVPGADPHALAPRRLSFRSGHRERFWERNCLAIGLSAGFVEPLEASAIVMIELSLXALLDNFPATRSAMDLHARRFNALFRTRWDRIVEFLKLHYVLSERDEPYWRAHRDPATIPSRLGELLEIWRHHPPSTADLDRVDEIFPAASYHYVLYGMGFSPPPDGAIRTGPREPLTRAFXQTHXRARALAAALPDNRAYLDAVRAAGLTPSQEHAIQS

SEQ ID NO: 82662 - protein, 506 aa, Janthinobacterium sp.
  misc_feature (1)..(506): tr|A0A0S4K1X2|A0A0S4K1X2_9BURK Tryptophan halogenase OS =Janthinobacterium sp. CG23_2 OX=1706231 GN=BN3177_2099 PE=4 SV=1
MTDQGIKQIVIVGGGTAGWMSAAALAQLLPVGHHYRLIESDQISTIGVGEATIPSIRNFNLHLGIDENDFIRATQGSFKLGIEFIDWGYKGSNYIHGFGSVGRDQPTANFFHYWLKMHQAGQADSLEPYSINTMAARLGKFSRGRPDLPNSPLADLSYAFHFDAGLYARYLRTYSEARGVQRTEGRIIDTELHPDGSIAALLMENGERIGGDFFIDCSGMAGLLIEQALHTGYDDWSDWLPCDRAIAVPCEAHGPMAALTRSSAHTAGWQWRIPLQHRTGNGHVFSSKFMSADEAQAILMGNLDGQPLAEPRLLKFTTGKRKRAWNKNCVAIGLSGGFMEPLESTSIHMVKTALMRLISFFPDKGFDQVDIDTYNRLCDKEYDQIRDFLILHYKASTRDDSPFWRYCRDMEVPAALRGKLDLYASHGRILRENEELFPEDSWLQVMHGQGLRARGYNPVVDQRAPDEIADFLQGTQAVIRKCVDAMSSHEAFIKANCQAPPMRRAA

SEQ ID NO: 82663 - protein, 500 aa, Aestuariibacter sp.
  misc_feature (1)..(500): tr|A0A506REF4|A0A506REF4_9ALTE Tryptophan 7-halogenase OS=Aestuariibacter sp. GS-14 OX=2590670 GN=FJ444_14690 PE=4 SV=1
MQSPLKKILILGGGSSGWMTAAALGKILKNHPCEIQVIESEDIGTVGVGEATIPQILLFNDLIGLDEDTFIKRTQGTFKLGIQFKDWRNVGHSYYHAFGEVGKNMEGVHFYQYWLKMRQQGKAAPLDEYTLSSLACNEKRFMRPIEAGNSPLSNIAYAFHFDAGLYAKYLRECAEGHGVIRTEGKVTQVNQHPNGDIRSLVLENGEEHQADFFIDCSGFRALLIEQTLKTGYEDWRHWLPCDRAIAAPSTLTEEPWPFTRAAAQQAGWQWRIPLQHRVGNGHVYSSEFMSDHDAERTLRENIDGELLADPRLIKFVTGKRKKFWHKNCLAVGLSGGFMEPLESTSLHLVQVAISKFFSFFPFQTPTQSDIDEYNAQMDFEFTRIRDFLILHYHVTEREDTPFWRYCKHMSIPDTLQEKIDQFKANGRINRFNNELFNDLSWFEVMYGQGLRPQGYHALADIFGDDELAKRLEGIQRVVRKSVDYMPSHAEFIAKTCPAKP

SEQ ID NO: 82664 - protein, 514 aa, Novosphingobium sp.
  misc_feature (1)..(514): tr|A0A0N0KD97|A0A0N0KD97_9SPHN Tryptophan halogenase OS =Novosphingobium sp. AAP93 OX=1523427 GN=IP83_00115 PE= 4 SV=1
MTPDPLRSILIVGGGTAGWSAAALLSAVLAPSGCKITLIESSDVPTVGVGEATIPPVFEFLSNCGVDEIDFIRHCQATFKLAIRFDDWLERGHSYWHPFGNLGVTINQRPFHHYWWKNKAAGHDETFADLCPAIALAQDGKFAFPPPDGSYPGGALNYALHFDAGLVAEYLRKHATARGVTHVDARIVGAELADDGAIAAVRLTDGRRIEADFFIDCSGFRGLLIEEALHAGYEDWTSWLPCDRAVAMPTATVGPPAPYTISAAHEAGWRWRIPLQSRVGNGYVYSSRHVSDEQAAETLREAAAGEPLAEPRFLRFTAGHRKAMWVKNCLAVGLSSGFLEPLESTSIHLIHTALNRLLDYFPDRHCDPALAAAYNREAADEYAHIRDFLLLHYVPNRRHGEPFWDEIRANPLPDSLAAKLELFRRTGRIVSRRRELFADISWFFVAAGMGIVPEALDPLADAADFGEVRRVIGQIREVMGRYRAAAPTHLAMLARLLDPALKGRPNFKQTWGGA

SEQ ID NO: 82665 - protein, 494 aa, Sphingomonas sp.
  misc_feature (1)..(494): tr|A0A520FNJ2|A0A520FNJ2_SPHSX Tryptophan 7-halogenase OS=Sphingomonas sp. OX=28214 GN=EOP66_03715 PE=4 SV=1
MDTAKVRRVVIAGGGTAGWIAAAALVKQLGPLLDITLVESEDIGTVGVGESTIPTSRTFHNFLGIDEQAFMRATQASFKLGISFENWGRAGERYIHSFGTIGRKTTWMGDFHHLWLHARDRGFAGSLGEYCFELKAADAGRFATASDAQINYAYHLDAGRYARFLRELSEPAGVRRVEGKIERVEQHGETGDVEGLVLESGVRIEGDLFLDCTGFRGLLIEQTLQSGYEDWTQWLPTDSAIAVQTASVGPAVPYTRAIAHEAGWRWRIPLQHRVGNGIVYAQDCLSDDEARAKLLAGIEGEVLTEPRVIRYRTGARRKVWNKNVVALGLSSGFVEPLESTSIHLMKIAVTRLIQLFPFDGINDALTARFNAMSHREAEGVRDFIILHYHLNQRDEPLWRRCREMQIPDTLAERIALFREDAQAYQASEDLFRVDSWVQVLLGQNLQPGGYHRMGQMISDANLKRALGDIRGDVENRVAKLPAHQDFLDRYCSAR

SEQ ID NO: 82666 - protein, 514 aa, Sphingomonas sp.
  misc_feature (1)..(514): tr|A0A2E1Z219|A0A2E1Z219_SPHSX Tryptophan halogenase OS =Sphingomonas sp. OX=28214 GN=CMN72_14550 PE=4 SV=1
MVARTRHIVIVGGGTAGWLTAGVIAAKHRARIPHDLTVTLVESPTTPILGVGEGTWPTLRSTLARIGVSETDFFRECDAAFKQGALFARWTTGAADDAYYHPLMLPQHFSKLNLVPHWLAQQEASSFCDAVCPQGRLCDDGLAPKTIATPEYDGVANYAYHLDAGKFAPFLQRHCCGKLGVRHVLADVREVRLHENGDIRAIDTEQAGEIAGDLFIDCTGFRSLLLGDAMGVGFRDCSDILFCDTALAVQMPYPDAQSPIATHTISTAQSAGWIWDIGLPTRRGIGHVYSSRHQSQDAAERELRAYLGPGGADLPIRKIAIRSGHRETFWKRNCVAVGVAAGFLEPLEASAIVLIELSAKMIAEQLPACREVMDVIASRFNETTHYRWGRIIDFLKLHYVLSKREDSEFWRDNRLPETVPDRLRDLMLLWRYQSPWFHDEFDRVEEVFPPASYQYVLYGMGFETEVDPTMLSGDRRLADQAMRENAVQTDRLRQGLPRHRDLIAKIHQHGLQPV

SEQ ID NO: 82667 - protein, 500 aa, Novosphingobium sp.
  misc_feature (1)..(500): tr|A0A1W2ATV5|A0A1W2ATV5_9SPHN Tryptophan halogenase OS =Novosphingobium sp. B1 OX=1938756 GN=SAMN06272759_1056 0 PE=4 SV=1
MTASHLPRRIVIAGGGTAGWMTAAAIARTLGAVAQVTLVESEQIGTIGVGESTIPPLVMYNRLLGINEAEFMRATQATFKLGINFENWRVQGENYFHSFGGTGKDHWSAGFQHFWLNGLERGHTEPYGEYCLELKAAEAGKFAHLPDDRMNYAYQLDSALYARFLRAMAERDGTTRIEGKIAHVELDGESGDIAALVLEGNRRIEGDLFIDCTGFRALLIEGALRAGYDDWTHWLPCDSAIAIQTSSVRPPVPYTRAIAHEAGWQWRIPLQHRQGNGVVYCSDYLSHEAALEKLLSTVEGEKLVKPNHIRFRTGARRKQWHRNCVAVGLSGGFMEPLESTSIHLIQRAILRIVRMLPAGAISTRDIDEFNDQQFTDMEQIRDFLVLHYKATDRRDTPFWRHCASMEIPASLEHKIELFRETGRVFRKNEELFAENSWVQVMMGQGINPQSHHPVAAKLRDEELAHLLGSLREQVSRTVAALPAHGDYVARYCGAEVPAAA

SEQ ID NO: 82668 - protein, 516 aa, Novosphingobium sp.
  misc_feature (1)..(516): tr|A0A0N1BZ33|A0A0N1BZ33_9SPHN Tryptophan halogenase OS =Novosphingobium sp. AAP93 OX=1523427 GN=IP83_00505 PE= 4 SV=1
MSSTETSGSASTPGPVRIVVAGGGTAGWMAASALGHFLDTGFTVTLVESEEIGTVGVGEATIPQIRMFNQALGIDEDAFIRATQATFKLAIEFVGWGAPGERYMHAFGDVGRDVGLCAFHHYWSRARRLGLAGPHGDYAINDVAAHAGRMHRGAPLTSRNVPEMPHAFHFDAGLYAAFLRQFAESRGVTRREGKIAEIRQDPLSGDITQLVLTSGEEIAGDLFIDCTGFRGLLIGGAMGSGYIDWTNWLPCDRALAVPSGRVEDFTPYTRATAHDAGWQWRIPLQHRTGNGRVYCSAFTSDEAAAESLLAHLDAPALADPRPIRFTTGRRAEAWRGNVIAVGLSSGFLEPLESTSIHLIQSAISRILKFLPGKDQTQAARDEYNRQFTFEMERIRDFIVLHYHVNQRPEPFWQAMRNMALPDSLAERIELFRANGHIFRHGDELFSEVGWFQVMAGQGIVPERSHALAETISEADLKGYLETLNGLYRREVERYPGHAEFIARHCAAPPLKMGAAA

SEQ ID NO: 82669 - protein, 516 aa, Novosphingobium sp.
  misc_feature (1)..(516): tr|A0A0N1BS89|A0A0N1BS89_9SPHN Tryptophan halogenase OS =Novosphingobium sp. AAP93 OX=1523427 GN=IP83_11245 PE= 4 SV=1
MNDRVRQVVIVGGGSAGWIAAARIAAAHRPGGENGVSVTLIESETIGTIGVGEGTWPTMRNTLRKIGISETEFFRSCDAAFKQGARFTGWVTGEPGDSYYHPLNPPQAATQINLSAHWLRRQDGAGTDFAHAVDFQSALCDAGLAPKSISTAEYVGLANYAYHLDAVKFAALLKKHCVEKLGVRHITDDVTGVKVDDAGFVTGVEAKQTGFLAGDFFVDCTGFAALLIGQTYGVPFIDCGDVLLADHAVALQVPYEHEDDPVASQTNSTAQGAGWIWDIGLPTRRGTGYVYSSRHTSHDEAEATLRAYLGPVAEGLDTRRIPIRSGHRQRFWEKNCVAVGLANGFLEPLEASALMLIETAVDFITERLPQSRAVMAPLARQFNAAFEHHWARIIDFLKLHYVLTKREDTAFWRDNRDPATVPDRLLEQLELWRHLPPGPQDFPHQPEVFSWPSYQYVLHGMGFECNLAEGSQVTAEAALAQRCFMATQRQQEQALAALPSHRALLDAVRVHGFQAV

SEQ ID NO: 82670 - protein, 517 aa, Sphingomonas sp.
  misc_feature (1)..(517): tr|A0A2E2ZPH4|A0A2E2ZPH4_SPHSX Tryptophan halogenase OS =Sphingomonas sp. OX=28214 GN=CMN73_00525 PE=4 SV=1
MARNILIVGGGTAGWITAGYLARLLGSDRPGGIAITLVESADIGILGVGEGTFPTIRKTLARIGISESDLVRECDASFKQGARFVDWLHAPGTASRDHYFHAFQSAEDLNGPELLPYWLIGLAGDGEWDDVASPQKRAADAHRAPKLPTHPDYVAPLNYAFHFDAVSLAKLLRRQAITNGVRHITDTVSDVLLGEDGAISGVRTAEHGILDAELFVDCTGFRAELIGKALDQPWKSCRDTLFCDSAVALQLPYATPDEPIASYTVSTAQKYGWVWDIALGSRRGLGHVYSSAHGGPDEAERILREYAGPASKDLTTRHFRFDAGYREVNWHKNCVAIGLSSGFFEPLEATGIVFSEIAASLLANLFPWGGDYESSARQFNANLKLRYERARDFIKLHYSLTQRRDSEFWIENADPATSPDSLLELLDRWRFRPPNELDFDPNTDIFGAPSWQYVLYGMGWKTDLSAKAPVFRLGQDAAQAFATIRRQGEYAAQQLPSNRDLLRFARTGRFGSSGPAA

SEQ ID NO: 82671 - protein, 459 aa, Sphingomonas sp.
  misc_feature (1)..(459): tr|A0A2E1YVS3|A0A2E1YVS3_SPHSX Tryptophan halogenase OS =Sphingomonas sp. OX=28214 GN=CMN72_03120 PE=4 SV=1
MTSRAIRTIAVVGNGIAGWNAAAALKKRVPGISVALVPVADLKPGLADLCASAAPSIGDFHRDIGLSESDIVLRTGAAFRLGSRYQDWHGPGSGFFHAYGPAGFAQGQLPFAALWLRAGSPRPYQDYAPGAVLAEQGRFLPGDYAHGLMLDLHVYPRFLAAYARHLDVLVSEGTLAGMDVSDGRVTGLRLSDGSTLRADMYVDASNVAASLMRALADPDWQDWRQWLPADTLERSRTAPDPGLPPFDRVRAISNGWEATISLPACTETLRVTAKPGDAGASAVRFASGRRAQAWSGNVVAIGDAYAVIEPLEGAPLHLLHSQIDRLVGSLPDRDFDAIELAQYNRETGEEADRVRDFLIAHYVLSGRCDAAPPLLAETLALFAHRGRLPMRDGESFDKHSWLALLFGHGTVPAHADPLAVALDTGEAQRALADHRLHLEQGAAKAPAHSAYLKSLEASA

SEQ ID NO: 82672 - protein, 499 aa, Sphingomonas sp.
  misc_feature (1)..(499): tr|A0A2E1YVU9|A0A2E1YVU9_SPHSX Tryptophan halogenase OS =Sphingomonas sp. OX=28214 GN=CMN72_03125 PE=4 SV=1
MEGSIVVPIRVVILGGGTAGWMSAAALSILLGRQMAQVTLVESEEVGIIGVGEATLPHIRAFNERLGIDEADFMRATGATFKLGIEFRDWARIGDSYIHPFGIFGHDVEGVGFHHYLNRAGRIATLFDYSVPIVAAREARFAPPAADPRSLASTYGYAYQFDATRYGPYLRNRAEAAGTRRIEGRVEAVERSEHGDIAALRLSDGRRVEGDLFVDCSGFRSLLLGQACDEPFEDWSRWLPCDRAVAVPCEGKGPLLPYTSAVAMSAGWRWRIPLQHRTGNGYVYSSAHIGEDAAREQLLSELEGPPLAEPRLLRFKAGRRRRNWVRNVIGIGLSGGFLEPLESTSIYLIQIAITRLIELFPQNPAAAIDRDAFNRAIDLEYDRIRDFLILHYHATQRDDSPFWNHVRTMEVPESLSEKMALFRKRGRVARYREGLFLEPSWLAVYFGQRIVPTGYDQRADGPDDGALARALDQLRQEVAAAAAALPDQSVYLERVGALA

SEQ ID NO: 82673 - protein, 515 aa, Aestuariibacter sp.
  misc_feature (1)..(515): tr|A0A506RLU3|A0A506RLU3_9ALTE Tryptophan 7-halogenase OS=Aestuariibacter sp. GS-14 OX=2590670 GN=FJ444_06470 PE=4 SV=1
MNTTTSKTRVVIVGGGTAGWLTAGIIAAHNPLLGEHSTTDVILLESPDVKNLGVGEGTWPTMRDTLKKIGLSEREFLTCCDASFKQASKFVGWRDSASHHYYHPFTAPAGYGVVSLADAWIAAGSPNDFESWVSAQGHACERYLSPKLSQLPEFAFTYNYGYHLNAGKFVAMLQAHCTEKLGVIYRQGHVAQIESHDNGAIQALVLEDGSRVNGDFFIDCSGFAAVLMGKHYQIPFVSQRAVLFNDTAIAAQVHHADEQSPIASATVATAQEYGWIWDIALQSRRGIGHVFASEFCTTEQAEHTLRNYIANDVNLCQEDIATRVIRFDPGHRKYFWHHNCVAIGVSAGFVEPLEATALVLIEKSAQWIAEQLPRTPAAMQVLAKRFNQLTNSRWQEIIDFIKLHYVLSDRTDSPYWRSHQHHESWTESLSDSLQLWLSQPPGLYETNNRQELFSSASKQFVLFGMGFRAEQWQSSGLLARHQPLLDRFRQEIQQQVNRVNTQLLTNREYLQKLRR

SEQ ID NO: 82674 - protein, 219 aa, Microbulbifer aggregans
  misc_feature (1)..(219): tr|A0A1C9W7J7|A0A1C9W7J7_9GAMM Flavin-dependent tryptop han halogenase PrnA OS=Microbulbifer aggregans OX=17697 79 GN=prnA PE=4 SV=1
MMKRRHSCGDTLGPGSEKLDAKHIKMRLGYREKVFHKNCVAVGLAAAFLEPLEASAIFLVEAACNMLGELFQRNSEMLERLEKKYNASFIGRWNSVVDFIKLHYYLSGRTDSDFWIENTRPETAPESLREYLDFWQYYPPSRFDLSSSLEPFVRESYEFILYGMGYGNYQYDNPARLPHLEYARENFARIDRMRREVPTQLVTNRRLLDQLKDFRFQSI

SEQ ID NO: 82675 - protein, 501 aa, Sphingomonas sp.
  misc_feature (1)..(501): tr|A0A2E2ZQB1|A0A2E2ZQB1_SPHSX Tryptophan halogenase OS =Sphingomonas sp. OX=28214 GN=CMN73_02070 PE=4 SV=1
MSAMDRRLRRVVIAGGGTAGWMAAAAIARVLGSAVDVTLVESDAIGTVGVGESTIPPLVTYNRLLGINEADFMRATNATFKLGINFEGWRDGTDSYFHSFGITGKDHWSAGFQHFWRYGREKGHDQPYADYCLELGAAMAGKFAHLPDNGLNYAYQLDATAYARFLRNMAEGDGAKRIEGRIAQVELNGETGDIAALILDSGQRIEGDLFLDCTGFRALLIEGSLHAGFDDWTHWLPCDAAIAVQTENVRPPIPYTRAMAHDAGWQWRIPLQHRTGNGLVYCSRYLSQDDALERLLGNLEGKPLTEPNKLRFTTGARRRQWHRNCVAIGLSGGFMEPLESTSIHLIQRAVLRLIRMMPLDRISPRDVAEFNDQQHVDMVQIRDFLILHYKVTERGDSAFWRQCRDMEIPDTLTQKIELFRETGRVFRRNEELFAENSWVQVMLGQGIVPQSHHPIAEKLTDEELASLLSNLRDLVTRTVSGLPDHAAYVARYCGARQPETV

SEQ ID NO: 82676 - protein, 500 aa, Paraglaciecola hydrolytica
  misc_feature (1)..(500): tr|A0A136A6F5|A0A136A6F5_9ALTE Tryptophan halogenase OS =Paraglaciecola hydrolytica OX=1799789 GN=AX660_05190 P E=4 SV=1
MNTRQNIVIVGGGTAGWMAANMLQQQLGSSGFNCILIESPDIPTIGVGEGSTPQLKSFFSALGITESQWMPQCHATYKNGISFKNWSVDKDHREYFHPFPSAVDQHTARGFLQHCIAKQQGRNVDTQTDRFFLAAQLAKQNRSPILKSGAVGISYGYHFDSVLLGKYLQKLTVKQGVQHIKSTVVGIKLHLNGDIKSLQLADGQVIEAELFVDCSGFKALLIQQTLGTEFISYRSQLFNDSAIALPSTQLTPLTSQTVATALNHGWAWEIPLSNRTGNGYVYSSDYCSAEQAETELRQKLNMINYPVAAKHLKMKVGRVALHWNNNCLAVGLSQGFIEPLEATALHLVQHTIESFISAFSAGNFSTQHQAQFNQRINARFDGIRDYIVCHYKVNQRHDSAYWRDNRANTNMSNSLQAILECWDKGGDLLAEINQQQIAGYYSAVSWYCLLAGYGRFVATQHKPTEALVNISEIERSLQQLSQQFLDQNQALDFLAATTEI

SEQ ID NO: 82677 - protein, 503 aa, Asticcacaulis sp.
  misc_feature (1)..(503): tr|V4NC58|V4NC58_9CAUL Uncharacterized protein OS=Astic cacaulis sp. YBE204 OX=1282363 GN=AEYBE204_06625 PE=4 S V=1
MSEIKTIVIAGGGTAGWMCAAILAHYLPKSMRIHLVESEQIGTIGVGESTVPPFLELIRRLGIDEQDFIQKTQGSFKLGIRFKNWRRKGEEYYHPFGSIGGIIEGQDFYQHWLRAQALGDDAPLQAFAPATEMAKHHKFMLPFKAPRTPIAAASFALHIDASLVAKYLRGHAEANGVTRHEGMIGQVHHHANGFISALELSDGRRLEGDLFLDCTGFRALLIEKALKVGYIDWSKELLCDRAIAVQTENVSDPHPYTYAEAQDAGWRWRIPLQHRAGNGYVFSSKHLSDDDAIKTLMAQVEGEPLMKPMVIPFRTGMREALWSKNCVSVGLASGFIEPLESTAIHLIYRSMDFLLRYFPGTDCDENLIRDYNLRMAGDYAEIKDFVVLHYCATERDDTPFWRDVQAAPVAQTLREKIALFRENGSLREGVDELFRAPSWQSVMEGMGVRPRRHSPLVDRLSEAELRATLDAARTQLPPFVAQLPGHGDFLRTHCPAERPKVSA

SEQ ID NO: 82678 - protein, 498 aa, Aestuariibacter sp.
  misc_feature (1)..(498): tr|A0A506RKA7|A0A506RKA7_9ALTE Tryptophan 7-halogenase OS=Aestuariibacter sp. GS-14 OX=2590670 GN=FJ444_09235 PE=4 SV=1
MNKPDISANKVNKVIIAGGGTAGWMAAAALSRLIGKSVNVTLVESKDIGIVGVGEATIPPIRTFHKLLGIDEKAFMRATNATFKLGIEFANWREPDHAYIHSFGVTGRECWAGEFHHFWMRAQQEGLGSAFGDYCFELKAAQQYKFGMSDRMPINFAYHFDAVAYGKFLRQFAEKLGVTHVEGDIDTVNMHVTSGDIESLTLKDGRTLAGDLFIDCTGFKGLLIEQALHTGYENWSHWLPCDRAVAMQTESVEAPAPFTRSVAHEAGWRWQIPLQNRVGNGLVYCSRYMSDDQAKQTLTDQVTGNPINEPRVIQFTPGKRRLGWNKNCVALGLASGFIEPLESTSIHLIMTGIIRLLRLFPFDGVTQSAIDEYNNKYNSEMAAILDFIVMHYKVTHRDDSLFWQHCQRMAIPDSLTHKINLFKETGRVFLDDGDIFRVDSWTQVMLGQGLVPAQYHRVADEMSIEELTRFMNGLHQHVSQQVQALPAHGDFLKQYLGV

SEQ ID NO: 82679 - protein, 538 aa, Burkholderia sp.
  misc_feature (1)..(538): tr|A0A2G1S4I3|A0A2G1S4I3_9BURK Tryptophan halogenase OS =Burkholderia sp. AU18528 OX=2015350 GN=CFB52_031000 PE =4 SV=1
MSNPIRNIVIVGGGTAGWMSASYLVRALQQQANITLVESAAIPRIGVGEATIPSLQKVFFDFLGIPEREWMPQVNGAFKAAIRFVNWRKSPDGSRSDHFYHLFGNVPNCDGVPLTHYWLRKREQGFQQPMEYACYPQTEALDGKLAPCLADGTRQMSHAWHFDAHLVADFLKRWATERGVKRVVDEVEQVHLDDRGYISRLSTKEGRTLEADLFIDCSGMRGLLINQALKEPFIDMSDYLLCDSAVASAVPADDARDGIEPYTSAIAMNSGWTWKIPMLGRFGSGYVFSSKFTSRDRATADFLDLWGLSDKQPLNQIKFRVGRNRRAWVNNCVSVGLSSCFLEPLESTGIYFIYAALYQLVKHFPDTSFDPRLIDAFNAEIVYMFDDCRDFVQAHYFTTSRDDTPFWRANRHDLRLSDAIKEKVERYKAGLPLTTTSFDDSTYYDTFDYEFKNFWLNGNYYCIFAGLGLLPDRSLPLLRHRPESIDKAEEMFARIRREAERLRTTLPTNHDYLRSLREGDAALSRSEPGPTLATPEIL

SEQ ID NO: 82680 - protein, 500 aa, Novosphingobium sp.
  misc_feature (1)..(500): tr|A0A0N1LJH2|A0A0N1LJH2_9SPHN Tryptophan halogenase OS =Novosphingobium sp. AAP93 OX=1523427 GN=IP83_17115 PE= 4 SV=1
MTGTYAKRRVVIAGGGTAGWMAAAALARTMGDAIDLVLVESEAIGTIGVGESTIPPLVAYNRLLGIGEADFMRSTQATFKLGINFENWRVEGENYFHSFGITGRDHWSAGFQHFWMHGLTKGHKASYDDYCIELQAAMKSKFAHLPDNRINYAYQLDSGLYAVFLRKLAEADGCRHVEGKIAEVQLHPETGDIAALRLESGQRIEGDLFLDCTGFRALLMEGALHVGYDDWTHWLPCDSAIAVQTASVRPPVPYTRAIAHDAGWQWRIPLQHRGGNGIVYCSRYLSQDAALERLLGTVEGEVLTKPNVIRFTTGARRKQWHRNCVAIGLSGGFMEPLESTSIHLIQRAILRVIRMMPMGEISPRDVAEFNDQQLTDMEQIRDFLILHYKATDRRDSPFWRQCAGMDIPESLTHKIELFRETGRVFRKNEELFVENSWVQVMMGQGIMPKSYHPVATKLSDAELAHLLAGLRDSVAKTVAGLPDHHAYVAQYCGAQEARAA

SEQ ID NO: 82681 - protein, 506 aa, Xanthomonas campestris
  misc_feature (1)..(506): tr|A0A3E1L1H9|A0A3E1L1H9_XANCA Tryptophan 7-halogenase OS=Xanthomonas campestris OX=339 GN=D0A35_14470 PE=4 SV =1
MIPAPLRNIVIVGGGTAGWMAAAAFARVLGPSFNVQLIESEQLGTIGVGEATVPHIKAFNNLLGIDEAEFVRQTQGSFKLGIEFVDWQRPGTSYIHGFGTQIGHPLGLLPFHQYWIKQQRRGKAQPLGAYTLNTVAATRGKFMTSAGDVPANSPLANIAYAYHFDASQYARFLRGYAEQRGVTRLEGLIEQVQLNAHTGHVQSVQLASGQVVSGDLFIDCSGFRGLLIEEALHTGYHDFTHWLPCDRALAVPCEKVGPPTPYTRSTARAAGWQWRIPLQHRTGNGYVYSSAHVSDDEAAATLLANLDGTPLADPRPLRFTTGRRKQFWNRNVVALGLASGFLEPLESTSIHLIQSGISKLLELFPRESISPVLVQRYNDRLAFEFDRIRDFLVLHYHATERDDSAFWRHCRTMPITPELQTTLDLFRDSGRFYRNAEEMFAEISWVQVMVGQGILPQGYHPLVDQVPDTDAEGFLASVAQTISHCVDVMPTHQQFIDRYCRADPVR

SEQ ID NO: 82682 - protein, 521 aa, Xanthomonadaceae bacterium
  misc_feature (1)..(521): tr|A0A2A3VR17|A0A2A3VR17_9GAMM Tryptophan halogenase OS =Xanthomonadaceae bacterium NML93-0792 OX=2032566 GN=CM Z82_01490 PE=4 SV=1
MDHADTPPGAIRRVVIAGGGTAGWLAACALAHQFRDRLDITLVESEQIGTVGVGESTVPPIRTFHRFLQIDEQDFLRAVAGTFKLSISFENWRRPGDRYIHPFGITGQGTWAAGFHHCWLDAQRRGMVSELGDFCLETLASRADRFALGTDPQVNYAYHLDAGLYARFLRRIAERHGLTRIEGKIREVTRHAHSGDVEALVLEDGQRLEGDLFIDCTGFRGLLIEQTLQTGYEDWSEWLPSDRAVAVQTESDGAPVPYTRAIAHEAGWRWYIPLQHRVGNGLVFSSRYMSDDEAHAKLLRDVGGRPLRDPWLVPFRTGRRRKAWNGNVVSLGLASGFIEPLESTSLHLTISAVVRLVQLFPFDGISPALVEVFNDVSRAEMEHVRDFIVLHYHATQRDEPMWVACREMALPPSLDIRLRAWRERAHAWQNADELFRVDSWTHVLLGQGIAPGPPHPLARALADDDLRRLLHGIRAPIERAVAQMPSQQAFIARYCRADTGVWRAPAPSGDIRPPASRTGGA

SEQ ID NO: 82683 - protein, 498 aa, Xanthomonas campestris
  misc_feature (1)..(498): tr|A0A2S4JP00|A0A2S4JP00_XANCA Tryptophan halogenase OS =Xanthomonas campestris OX=339 GN=TR80_10415 PE=4 SV=1
MTQARIRKVVIAGGGTAGWVAAAALAHQFRGLLEIVLVESEQIGTIGVGESTVPPIRAFHRFLQIDEQEFLRAVAGTFKLAISFEDWQGQGDRYIHPFGSTGQGTLVCAFHHFWLEAQRRGMHSGFDEYCLEAQAARADRFAVLQQPAVNYAYHLDAGLYARFLRTHAQRYGATRIEGKIQQVRQHADSGFIEALVLDDGQVVEGDLFIDCTGFRGLLIEQTLHTGYEDWSHWLPCDRAVAVQTESVEPPVPYTRAIAHAAGWRWQIPLQHRVGNGLVYARAHLSDDEATAMLLAAVQGTPRRDPMLVPFVTGRRLQTWNKNVVALGLASGFVEPLESTSIHLAIVAVMRLITLFPADGIAPPQVDLFNRISRAEAEHVRDFVILHYHATQRQEALWRQCRAMELPESLQLRLRAWREGAHAWQEGDELFRVDSWTHVLLGQGIAPAQHHPLTRALPDQHLQQLLDGIRQPLQHVVTQLPTQQAFIDSYCKVDQSTWG

SEQ ID NO: 82684 - protein, 512 aa, Asticcacaulis sp.
  misc_feature (1)..(512): tr|V4NUY1|V4NUY1_9CAUL Uncharacterized protein OS=Astic cacaulis sp. YBE204 OX=1282363 GN=AEYBE204_07790 PE=4 S V=1
MSGEHIKHIVIVGGGTAGWMSATTLWQAFQGKRVRITLIESDEIGTVGVGEATIPPIRRFNSLAGIDEVEFVKRTQATFKLGIEFVNWTRQGHSYIHPFGHFGKPIDLISFHHYWLRMKAAGEDVPLDAYSLPIMAARNNKFLVGPNDPESVFSTYSYAFHFDAGLYARFLRDHCEQRGVKRVEGKITRVNLNPEDGFIDSVTLDRGETIEGDLFIDCSGFRGLLIGEALGVGYDDWSAFLPCNRAVAVPCESAAPLTPYTRSTAHKAGWQWRIPLQHRTGNGHVFCADFISEDEAISTVMNNLDGKPMAEPRVIRFKTGKRKKFWEKNCIAVGLASGFMEPLESTSIHLVQKAMARAVGFLPTHRHDTVSLDEYNRLMLEEFVEIRDFLVLHYNATERDDSDFWRYCRNMTLPETLKRRIDLFRARGRVVSHADELFGEASYVAVFMGQGIVPQGYDPLANVLETEDVKERLFKMREVIRDTVQRMPTQAQFIERTCKAYSMEDLRRAMAM

SEQ ID NO: 82685 - protein, 510 aa, Aestuariibacter sp.
  misc_feature (1)..(510): tr|A0A506RKD5|A0A506RKD5_9ALTE Tryptophan 7-halogenase OS=Aestuariibacter sp. GS-14 OX=2590670 GN=FJ444_12720 PE=4 SV=1
MPNIIKHITIVGGGSAGWMTAAALSRMLPTGDVKITLVESEQIGTIGVGEATIPDMINFNKLLGISESEFIKATNGTFKLGIEFNDWGKLGDSYFHPFGGHGVDMNGVDFHQYWLHTLTAGNTCELEDYSICAVAAKQNKFVLPEQNPNSVLSHLRYAYHFDATAYAAYLRKYAEQRGVKRIEGKIASVQQHTDTGNIAGLTLEDGTTVGGELFFDCSGFRSLLLGDTLGVKFRDWSHWLPCNTAQTVATEQTSKVLPFTRSTAKAAGWQWRIPTQQRVGNGHIYCDRFIDHDQARQVLLDGLDSKPISEVRTIQFKTGCQEAFWEKNCIGIGLSAGFLEPLESTSLFLIQQGISRFISLYPDAGLHPVIRNEYNRLMSREFEQVRDFIILHYKATTRDDSPFWRYVRDMDIPDSLTHKMTLFQQGGRVFRDDHELFTRSSWVAVMVGQGIFPNTFDPILANIPVADIQRSLNSMKQAMEQAVARLPDHAMFIDKYTAMQPNPTFSMGRQ

SEQ ID NO: 82686 - protein, 500 aa, Aestuariibacter sp.
  misc_feature (1)..(500): tr|A0A506RFB2|A0A506RFB2_9ALTE Tryptophan 7-halogenase OS=Aestuariibacter sp. GS-14 OX=2590670 GN=FJ444_12730 PE=4 SV=1
MTAAALANKLQGLAIDIELIESDSIGTVGVGEATLPHIRFFNSALGIDEAAFMRETEATIKLGIEFCDWGNLGESYIHPFGDFGLPINNVEFYQHWLKHFQSGVITTSLHEYAAGVMSAKHNKFRIPEPSSSNIEQHYGYAYQFDSSLYAKFLRRYAQAKGVIRTEGKIVEVKQHNDTGEIVSLILDNQAVIEGDFFVDCSGFRGLLIEQTLHAGYDDWSEWLPCNRAVAIPCESTDPLMPYTRATAKAAGWQWRIPLQHRTGNGFVYWSEHISDDEACSQLLNALDGKPLAEPNQLYFKAGRRNVCWEKNVVAIGLSSGFLEPLESTSIHLIQEGITTLIELFPQQRIQQQDADEYNRRMALNFERVRDFLLLHYVATKRDDSDMWRYFRNLPLPDSLQTKIELWLSRGYIQRYEFGVFLPPSWIAVLLGQNLMPTGFDPRVNNTSDAEFIQTSERMRKAILSSVNNTPLHREFLTRYGAASNSKPLMSAMASTTSGGN

SEQ ID NO: 82687 - protein, 495 aa, Aestuariibacter sp.
  misc_feature (1)..(495): tr|A0A506RF92|A0A506RF92_9ALTE Tryptophan 7-halogenase OS=Aestuariibacter sp. GS-14 OX=2590670 GN=FJ444_13450 PE=4 SV=1
MMNQTHPASVIIVGGGTAGWMCAAYLAKQWGTSTHITLIESSQIGTVGVGEGSTPFLKQFFADLGWQEQDWMPDCDATYKTGIEFANWTNSARFSQYFHPFFTPLDQHTGELFFNSCQQLRSGLANADVKPEHYFSAAEMVRKRVTPQSSKLPGDIDYAYHFDASKLALRLHSFSMKQGVTHREGKVAEVYTEAGNIRGLRMEQGDVLHADLYVDCSGFIGLLMKKALNAPFKRYRDTLFNNAAVALPTMHGNDDPITPQTRSVGMDSGWMWQIPLTTRIGNGYVYSADFCSADEAEAALRKALNVDDGIPARHLNMEVGRLEQHWQGNCVAIGLAQGFIEPLEATALMLVQYALYQLVDGVGSDKPLARAQQEYNCEMNRMFDGIRDYIAAHYYLNTRTDSAYWTACRHDMVVPDNLQYLLEKWDSGACFETALDHLDSELVYLRPSWYCILAGMGRFNQLDTSQPAPVNRASIAHLEKLVGHYFSHQQRPLSV

SEQ ID NO: 82688 - protein, 522 aa, Xanthomonas campestris
  misc_feature (1)..(522): tr|A0A2S4JHA8|A0A2S4JHA8_XANCA Tryptophan halogenase OS =Xanthomonas campestris OX=339 GN=TR80_19735 PE=4 SV=1
MHAPAPSESQRLVRRVVIAGGGTAGWMAAAALSKLLGRQLQITLVESDEIGTVGVGEATIPSLVTFHRLLEIDEAQFMAATQATFKVGIAFEHWRDVDRHYIHSFGHTGTDHWSAGFQHFWLKARARGVARDFGDYCLELRAAQEGRFAHLPNGGMNYAYHLDAGLYARFLRRFSEGFGVQRIEGRIGSVQTDAHSGDIAALVLDDGTRIEGDLFLDCTGFRALLIGQTLGVGSEDWSRWLFADSALAVQTESVGAPVTFTRARADRAGWMWRIPLQHRVGNGIVYSSRYIDQDSAAQVLEHNLQGRALTTPRALRFTPNQRHRVWEKNCVALGLASGFLEPIESTNIHLIQRGIVRLLQTFPQVIDPVDIAEYNRQAAEEIAHIRDFVILHYHATDRRDTAFWRDCAGMEIPDSLRHRMELFRQSGRVFHQGNELFAENSWIQVMLGQGIVPRHHHPVADLMGDAELSQFLEGIRQRVEAALARLPPHAEFLRRYCPAPAPAPPAPMPQPAPGTPLAAPAA

SEQ ID NO: 82689 - protein, 587 aa, Microcystis aeruginosa
  misc_feature (1)..(587): tr|A0A552E2X2|A0A552E2X2_MICAE Tryptophan halogenase OS =Microcystis aeruginosa Ma_QC_B_20070730_S2 OX=2486256 GN=EWV80_05040 PE=4 SV=1
MMKTTNSVRQFVYDVVIMGAGFAGVCQARHLMLKVPNIKIALIDPRPENRSDKDLKIGESTVEIANLFICKELGLYEYMIENHPPKFGLNFHWPKDSHKTDTIEDYYHIWTNRQPPLASSQMNRAKFERDLLRMNKEMGVDFYNGRVVDVTIHPGNDPHQVKVKLHDEVIELTAKHLVDAAGRQFIIGKKTDNVIFDPEHLCGVNTGSAWVRVKNIDRTLFHSGYDPEATSCSHYYATNHWFGQGHWLWMIPTDTDTQEISIGVIHHHEIIPADYLNQEQKFYAFLKANHKLLYDLLSSGEKIDFHYWPRIAHTSKEVLSADNWYVIGDAAYIFDAFYSMGTSLTTFAIESVTEVIRSKLAGEADAEVKRVAYNQFNLAQAEGVNQLMRDHKTQLGHASIMSWRIYFEYIWWFGILVPLYVGKWHLNVSFIEGFVKIHRQTVNSLFVEIYEQLNQLVERKANLGLLDCYRGDQLLGDYQPPVHFDSFLENAQYEPFRSNIFTSIKYTHFYGAIWYLVFQWKGFGLGGVIAPKHLYHFLRLLLLSGVASFGEFYHRLKMKKIPHNHQIACTTEEFKHYQYQSSLNPWI

SEQ ID NO: 82690 - protein, 507 aa, Pelomonas puraquae
  misc_feature (1)..(507): tr|A0A254NBI7|A0A254NBI7_9BURK Tryptophan halogenase OS =Pelomonas puraquae OX=431059 GN=CDO81_18260 PE=4 SV=1
MSDPSIRKIVIVGGGTAGWMTAAPLAQRFQQAGPHGCEVVLVESPDIGTIGVGEATLPPIRAYNRTLGLDGADFVRRTQGSFKLGIEFRDWGRVGHRFFHGFGDFGPAIENRSPWQHWLRLSRIVDGLPGYEDWSTSTVMARGHRFTPPVEGPPSAANAYSFAYHFDAGLYAAYLREYALARGAQRVEGLIVDVELRPEDGFVSAIRLADGRRIDGDLFIDCSGFRALLIGGAMQSPFEDWSALLPCNSAQAVPSARVEPLTPYTTSTAKAAGWQWRIPLQHRTGNGHVYCSHFISDDEAAATLLAGLDSPALDTPRQLRFTTGRRKAGWVKNVVAIGLAGGFLEPLESTSIQLIMDGVGRLLQFFPDRSFKPHLAAEFNRRMSVQYESIRDFIVLHYKLTERRDSELWRYCAAMPIPDTLAHQIELFREAGRVAVLDPDGFAEPSWVSLFLGLGLVPERYDPFVDHIDPEALLQHFARLRQAIAQTAAGMPRHADYIRQHCLAPSA

SEQ ID NO: 82691 - protein, 501 aa, Pseudoxanthomonas sp.
  misc_feature (1)..(501): tr|A0A4Q8L545|A0A4Q8L545_9GAMM Tryptophan 7-halogenase OS=Pseudoxanthomonas sp. NML171200 OX=2480816 GN=EA660_ 17715 PE=4 SV=1
MTDSSQPRPVKRVVIAGGGTAGWMAAAALSRTLGKVLDITLVESEEIGTVGVGEATIPTLVTFHRLLDIDEQAFMAATGATIKLGIQFEGWREPGQDYIHSFGTTGKDHWSAGFQHFWMKGRQRGLARDYGDYCLELRAAQEQRFAHLARNGMNYAFHLDAGLYARFLRRFSEGFGARRIEGKIAAVQTSAQGDIAALVMEDGTRVEGDLFIDCTGFRSLLLGQTLGVAFEDWSHWLFADSALAVQTESVGPPVPYTRSMAGAAGWQWRIPLQHRVGNGIVYSSRFMDQEAARAALLGNLEAPPLFEPRLLRFTPGQRRVTWQRNCVALGLASGFLEPLESTNIHLVSRNLTRLLQCFPHVIRQVDIDEYNAQTEAEMIHIRDFVILHYHVTRRRDTPFWQACAHMDIPATLRHRIDLFAQTGRVFHVPNELFAENSWIQVMLGQGIAPAQYHPVADLMDDAELARFLDGIHQQVEQTVARLPTHADYLRSYCAQARPAVA

SEQ ID NO: 82692 - protein, 510 aa, Stenotrophomonas sp.
  misc_feature (1)..(510): tr|A0A126NE76|A0A126NE76_9GAMM Tryptophan halogenase OS =Stenotrophomonas sp. KCTC 12332 OX=1793721 GN=AXG53_00 515 PE=4 SV=1
MDAAKTHDGARVRKVVIAGGGTAGWLAGCALAHQFRDQLEITLVESEQIGTVGVGESTVPPIRTFHRFLQIDEQEFLRAVAGTFKLSISFENWRRPGERFFHPFGTIGKGTWATPFHHFWLDSLRRGMPSDLGDFCLESVASRGDQFSLQTQPEASYAYHFDAGLYAKFLRRKAEGHGLRRVEGKIREVRQHVHDGSVQALVLEDGQVIDGDLFIDCTGFRGLLTEQTLHTGYEDWNEWLPSDRAVAVQTEAVGPPVPYTRAIAHEAGWRWHIALQHRVGCGLVFSGKHMSDDEAHAKLLRDVGAPPLRDPWLVPFRSGRRLKAWNKNVVALGLASGFIEPLESTSIHLTISAVVRLIQLFPFDGMSASLVDLYNDVSRQEMEHVRDFIILHYHATQRDEPMWKACREMTLPESLQLRLRAWRERAHAWQDPGELFRVDSWTSVLMGQGIQPGSPHPLARALGDADMRTLLNTIRQPVQHAAAQMPSQAAFIEQYCKAAPDVWPQSVALA

SEQ ID NO: 82693 - protein, 495 aa, Actinobacteria bacterium
  misc_feature (1)..(495): tr|A0A0N1NEN0|A0A0N1NEN0_9ACTN Tryptophan halogenase OS =Actinobacteria bacterium OK006 OX=1592326 GN=OK006_068 2 PE=4 SV=1
MSTGEEFDVVVVGGGPSGSTVASFVAMQGHRVLLLEKESFPRYQIGESLLPATVHGICGLLGVSEEIERAGFMRKHGGTFRWGSSPEPWSFAFAISPRMAGPTSHAYQVERMKFDDILLKHSRKLGVEVREECSVVEVTEDEERVRGLVYTDSTGARHTVGARFVVDASGNKSRIHRDAGGDRIYSDFFRNIAIFGYFEGGKRLPAPRDGNIFCAAFDEGWFWYIPLSDRITSVGAVVSREFADSVQGDPADALSRLIAKCPRIDDMLADAERITEGVYGQVRVRKDYSYSNSRYWRPGMVLVGDAACFVDPVFSSGVHLATYSALLAARSINTVLAGDLGEDESFAEFEARYRHEYGLFYEFLVSFYDMNSDHESYFWQAKKVTAFAESELEAFVELVGGVASLDGTFVDAESARARFKHTAGELERSVSQVDRTRGDDSTPMYQSDIMGSVMEQGTQIQVQAVLGGDLDPEAALFPGGLVPSADGLRWAAPAE

SEQ ID NO: 82694 - protein, 502 aa, Caulobacter sp.
  misc_feature (1)..(502): tr|A0A3Q9IIN4|A0A3Q9IIN4_9CAUL Tryptophan 7-halogenase OS=Caulobacter sp. FWC26 OX=69665 GN=CSW63_18125 PE=4 S V=1
MEPIRKIVIVGGGTAGWMSAAGLAAVLKGLPVSIALVESAEIGTVGVGEATVPHIRHFNARLGLDEADFMRKTQATIKLGIQFCGWGRKGESYIHPFGAYGHAIDGLPFHQHWLAARARGEAGPIEAYSLPIIASLAGKFAPPSTDPRSLGSTFNYAYQFDAALYAQYLRAYAEARGVTRTEGKIASVQQRPEDGFVTGVTLEDGRIVEGDLFVDCSGFRGLLIEGALQAGYEDWTRWLPCDRAVAAPCESVEPPTPYTRATADQYGWRWRIPLQHRVGNGHVYCSSYIDDEDAARALVEKLDGKLQQDPRFLRFTTGRRKKQWLKNVVAVGLSSGFLEPLESTSIHLIQVAITTLLELFPHQGCAQADQDEYNRVMDLEFERIRDFLVLHYHANQRDDSPFWIERREGPIPDSLAYKMVLFRERGAVVGYKDGFFLEPSWLAVYFGQNILPSGHDPLVAASDPVRTTRIMADLAAAVTRTVDAMPTHQSFLRSVVDAGTSA

SEQ ID NO: 82695 - protein, 332 aa, Hirschia baltica
  misc_feature (1)..(332): tr|C6XNI8|C6XNI8_HIRBI Tryptophan halogenase OS=Hirschi a baltica (strain ATCC 49814 / DSM 5838 / IFAM 1418) OX =582402 GN=Hbal_2453 PE=4 SV=1
MKKKLIQSVLVKGEGYAPILVACTLARFVIPDPLKIEVLSTQLKSDVGSLFLKSDMDQLHRSLGIAQSHMQRISKNKTPIAAVQLSENLRLPFWDYGAPLKGVPFYHIWLREHLNGGVKDLRSFNPSFAPVHRDAGYWEIDPSKYEELLRSISAHAGIGKIYSDVEQVSCDEQDLIIETQGGPIRQQLTDCLRLGNGRFPTVSITNFDLMVMQRNLLALVQNFPQIGSKKIERQELEEELNSVLASVEDMQFLMSADFDTGKLSERVKYRIELWLDVGRVIPCEGDLFLPHEWLAVLHKRVGPPMAYSRLVDSISRQEASAHLQKYQIDEGI

SEQ ID NO: 82696 - protein, 512 aa, Erythrobacter xanthus
  misc_feature (1)..(512): tr|A0A3A1P4X0|A0A3A1P4X0_9SPHN Tryptophan 7-halogenase OS=Erythrobacter xanthus OX=1784712 GN=D2V17_17785 PE=4 SV=1
MGQVEHIVIVGGGTAGWLTAGVIAARHQARMSHGFTVTLVESPNVPIIGVGEGTWPTLRNTLRGIGVSETDFLRECDGAFKQGARFNRWTTGEPDEGYYHPLMLPQGFARLSLVPHWQTERATTFCDAVTPQGRICDAGLAPKTIATPEFESLANYAYHLDAGKFSQFMQRHCCEKLGVRHVLADVTEVVTDESGDVTMVRTQQAGDIVGDLFVDCTGFKALLIEGAMDVPFRSCNEVLFCDTALAVQVPYADPDDPIASHTISTAQSAGWIWDIGLPTRRGVGHVFSSSHISADEAERELRAYIGPAADGLTVRKIPIRSGHRETFWKRNVVAVGLAAGFLEPLEASAIVLIELSAKMIAEQMPPNRAVMDVIARRYDETTLYRWGRIIDFLKLHYALTKRTDTEFWRDNLRPETIPDRLLGLMELWKYQPPWLHDEFDRAEEVFPSASYQYVLYGMGWHTDLPPGEAQRERDQAIRAMRENRQQTERLMQGLPRHRDLLDRIREHAMMPV

SEQ ID NO: 82697 - protein, 531 aa, Rhodanobacter sp.
  misc_feature (1)..(531): tr|A0A1V3PES2|A0A1V3PES2_9GAMM Tryptophan halogenase OS =Rhodanobacter sp. C01 OX=1945856 GN=B0E50_15720 PE=4 S V=1
MPRLKKVLVVGGGTAGWLAACYLAKAMNAVHPDSVQVHLVESDHIGLLGVGEATFPSIRGTLSAIGLDERRFLAGATATYKQGIHYRHWVRPPGTPGSDHFFHPFSQPSQRPGGPELLPYWLLGAAPAGVPFAEAVTMQSTLVDHGRGPRRPTDPDYQGPMNHAFHFDAACFAKVLAEHGQEALGVKRHVATVERTVLDEHGAIACVVTKELGELTADLYVDCTGLRSTLIGGIMQSPFHSRRDVLFADRAVAMQVPYAKPDTPIPPYTISTAQEAGWIWDIGLQKRRGVGYVYSSRHTDDERAEEMFRRYLGAAGAGLTAMHIKFETGYRPEHWRKNCVAVGLAGGFVEPLESTGIALIELATYLLTHLLPGDTDDMESAAHHFNEMMVARYDRIIDFIKMHYCLSQRRDSQFWIDNADAASIPQTLQEKLAKWKHRPPHRLDFVGDLEMFMTASWQYVLYGMEFRTDLESMRSAYPQMEAARREFAMIRQAASHALDDLPDHRALVEQLCREHLQRIRPDADMVAAASG

SEQ ID NO: 82698 - protein, 505 aa, Pseudoxanthomonas sp.
  misc_feature (1)..(505): tr|A0A4Q8LDG2|A0A4Q8LDG2_9GAMM Tryptophan 7-halogenase OS=Pseudoxanthomonas sp. NML171200 OX=2480816 GN=EA660_ 06990 PE=4 SV=1
MGDNRIDSVVVVGGGSAGWMAAAALATYLGRQARVRLVESEQIGIVGVGEASVPHMRTFNAQVLGLDEREFAQRTQATAKLGIAFEDWGRIGERYVHGFGTIGQSKGPLPFHQFWLKQFLAGRAGPIGAYSLQTVMAPLERFIPGMPDAPSGSPLADIAYAYHFDAGLYAQYLRQVSEARGVERIEGRIVQVHQHPETGHVTSLVLDGGRQVEGELFVDCSGFVGLLIEQTLQAGYVDWSQWLRCDRALAVPCVRSGPIAPYTRATARGAGWQWRIPLQHRTGNGYVYSSAYVDDDQAAATLLAHLDGAPQGQPRQLRFTTGMRRRFWQGNVVALGLAAGFLEPLESTSLYLAQSGISRLLALFPTRDFDPLLARRYNRESAFEYERVRDFLILHYHATTREDTPFWRDCRAMEIPESLREAMDLFAADGRYFRNGEDFFALPSWVQVMLGQGIVPRGYHPIVDDMPQDALARYVEGTRERLAQAVAAMPTHQQFLDRYWKAEAP

SEQ ID NO: 82699 - protein, 506 aa, Rhodanobacter sp.
  misc_feature (1)..(506): tr|A0A1V3PMU9|A0A1V3PMU9_9GAMM Tryptophan halogenase OS =Rhodanobacter sp. C01 OX=1945856 GN=B0E50_04370 PE=4 S V=1
MTDPRIKNIVIVGGGTAGWMAAAAFAKVLGPTYSIRLVESEEIGTVGVGESTVPHLKLFNDLLGIHDTEFMKNTQGTFKLGIQFNDWGRVGDSYIHGFGTIGHDVSLLPFHQFWIKAMQKGMASDIGAYSIHTLAAPRGKFMTSATDVPSSSPLADIAYSYQFDATLYAKFLRGYAEKRGVRRTEGKIAQTVLRPDDGFVEAVVLESGERIEGELFIDCSGFRGLLIEQALHTGYIDFTHWLPCDRALAVACEKVEPPTPYTRSSARLAGWQWRIPLQHRTGNGYVYSSAHVSDDEAAATLLKHLDGKPMGDPRPLRFTTGVRKKSWNKNVVALGLASGFLEPLESTSIYMIQSGIARLLNLFPQRDFSEVVIDRYNAQAKFEYEHIRDFLILHYHATERNDTPFWNQCRTMSIPAQLQDNIRLFRDSGRFFRDAEEMFATTSWVQVMLGQHIVPRGYHPLVDQMPDQELARFMASVSQVVASCVDAMPSHQAFIDRHCVAPSMAV

SEQ ID NO: 82700 - protein, 501 aa, Xanthomonas hyacinthi
  misc_feature (1)..(501): tr|A0A2S7ER70|A0A2S7ER70_9XANT Tryptophan 7-halogenase OS=Xanthomonas hyacinthi OX=56455 GN=XhyaCFBP1156_18220 PE=4 SV=1
MIRNLVIVGGGTAGWMAAAALARVLGPDYRITLVESEQIGIVGVGEATVPHIKAFNNLLGIDEAEFVRQTQGSFKLGIEFVDWQRPGTSYIHGFGTQIGHPLGLLPFQQYWIKQALAGKAKPLGAYTLNTVAAKRGKFMTSASDAPPNSPLANIAYAYHFDASLYAAFLRGYSEQRGVTRREGIVEEVQLHPESGDVRSVRLASGEVIAGDLFIDCSGFRGLLIEQALHTGYHDFTHWLPCDRALAVPCAKVGPPTPYTRATARAAGWQWRIPLQHRTGNGYVYSSAHLSDDEAAATLLANLDGAALADPRPLRFVTGRRRQVWNRNVVALGLASGFMEPLESTSIHLIQSGISKLLELFPREGISPVLVQRYNDRIAFEFDRIRDFLVLHYTATERDDSDFWRQCRTMAITPELQATLDLFGDSGRFYRNGDEMFAEISWVQVMVGQGILPRAYHPLVDQVPAADIERFVASIEQTIGHCVDAMPPHQAFIDRYCAAAPL

SEQ ID NO: 82701 - protein, 499 aa, Pseudoalteromonas sp.
  misc_feature (1)..(499): tr|G7ER02|G7ER02_9GAMM FADH2 O2-dependent halogenase I OS=Pseudoalteromonas sp. BSi20311 OX=383911 GN=prnA PE= 4 SV=1
MQSKQIKDVVIAGGGTAGWITAALLNKVLGKVVNITLIESDQIGTVGVGEASIPPILHLNAALGIPESEFIKATQATIKLGIEFENWRAPQHSYMHAFGEIGKDLPFCEFYHYWLRAKQQGTNADFWDFSLNYQAAKQHKFAHLKHIPNTQLSGLNYAYHFDATLYGEFLKGLTISRGVKRIEGQIADVKQCPESGFVKALELLDGQIISGDLFIDCTGLSALLIEKTLNTGFDDWSHWLPCDSAIAVQTKTTAEPAPYTRSIAHDAGWQWQIPLQHRVGNGLVYSSRHITDEQAKQQLLDNIPGEPITEPRVIRFKTGRRRKQWHKNVVAIGLSSGFLEPLESTSIHLIQTAAIRLIKLFPHQGIKPVLIDTFNKQSKTEVERIRDFIILHYKLTERDDSGFWRQCKQMDIPISLQNKIDLFKQTGKLIREDDELFAEVAWQQVMIGQGLEAHDYHPLADALSDEQLAELFTNLKTLINGTVKQLPTHSEFLARMKNN

SEQ ID NO: 82702 - protein, 511 aa, Pseudoalteromonas sp.
  misc_feature (1)..(511): tr|G7EUJ2|G7EUJ2_9GAMM Tryptophan halogenase OS=Pseudoa lteromonas sp. BSi20311 OX=383911 GN=P20311_2361 PE=4 S V=1
MDIKKVAILGGGTAGWLAANHIGKELLKRKGVSVTLIESPDIPPIGVGEGTVPDIRNTLKSFGIREDEFIRQCDATFKQSIKFVNWMDKKKHGEGNFFHHLFDVPSPYDTKHLTQYWLNDKQTTKSHAQYLSSQHAICEAGLAPKNITNAQYEGELAYAYHFNAGKFAQLLACNAKDKFSVSHVHTNVTQVKLANDGTIAALMTDSEGELEFDFYIDCSGFESLLIDKALKVPFVDVSDSLLINSALVVQVPTKEDEDIPPYTLATAHQAGWIWDIALTNRRGVGFVYSNNHMTDEQAHEKLDRYLGASKQDLSYRKIPMRVGYRKKFWHKNCVALGLAQGFLEPLEATSILLTDFSAKFLTLRFPSSTKQLEQLETRFNHAMGYAWERAIDFIKLHYCISDRTDSAFWVANKNDDTTSESLKEKLSLWEEFIPVRDDFFSQFEVFYLENFLFVLYGMHFNTKAPPCTSAEHEHCLVRLQQRAEIDQYLLNKLPNHRALLDKIKQYGLQTI

SEQ ID NO: 82703 - protein, 508 aa, Shewanella sediminis
  misc_feature (1)..(508): tr|A8FSJ7|A8FSJ7_SHESH Tryptophan halogenase OS=Shewane lla sediminis (strain HAW-EB3) OX=425104 GN=Ssed_1209 P E=4 SV=1
MDIKRVVIVGGGTAGWLAANHLGKAALNNELLSVTLIESPDIPTIGVGEGTVPAIRQSLQSFGISETEFIKRCDVTFKQSIKFANWLDKEVHGQHNFYHHLFDMPSSLGKELTQAWLSKKGRTYAETISPQHAVCEAYKGPKTISDAEYKGHLGYAYHLNAAKFAKLLGENAQERFNVQHISANVQEVILGEDGEIKSLVTDSVGTLDFDFYIDCSGFASLLIDKALKVPFVDKAEQLFVDKAITVQVPTDPASAIPPFTIATAHQAGWIWDIALSNRRGVGFVYSSKYMDDETAVCKLDHYLGGKLSEHSYRTIPMKVGYRERFWEKNCVALGLAQGFLEPLEATSILLTDFSAGFLANRFPTSAAQLDGMRQQFNQVMGYAWERVVDFIKLHYCLSDRIDSQFWIDNGDPGTMSDELSKRLSLWSSFIPNREDFFSKFEVFDLENYLYVLYGMNLPTQVALSRASDESNARMHSDKIARIADQLVNELPNHRELLEKINRYGLQEV

SEQ ID NO: 82704 - protein, 602 aa, Microcystis aeruginosa
  misc_feature (1)..(602): tr|A0A552F085|A0A552F085_MICAE Tryptophan halogenase OS =Microcystis aeruginosa Ma_MB_S_20031200_S102 OX=248625 4 GN=EWV92_05555 PE=4 SV=1
MNSTITQSREYDVVIMGAGFAGLCQARHLMLNIPNIRVALIDPRPVERTDKDLKIGESLIEVAALFLCKELGLHDYLIENHPPKSGLNFHWPKDPAKTETLDDYYHVWANRQTPVGSFHLQRAKFEQDLLAMNCQMGADFYEGRVKDVALTSGDELKTVYAKVGDENITLQAKHVIDAAGKNFIIGRKTDNVLSGPENLLGLNNGSAWLRVKNIDRTIFHSGYHPEGASTSHYYATNHYFGQGHWLWMIPIDKHSMELSIGIIHHHEVIPAHSINNLDKFSNFLKSNHTILSQLIESGEVVDFHYWPKIAHKSKVLFSPDNWYIIGDAAHIFDAFYSYGTTMIAFEVESVTEIIRAKLAEEAAAEQKRSAYNDFNLAYARTVNCLYRDHAYQLGHASVMSWRIYFEYMWWFGVHVPTYIGKWHLDLNFIPRYVKIADGNVNGIFADLCQEFHQLVSQGANIGLMDAYRADQLLGGYGTLKHFDDFLENTKFEPRRCNVFASMKAAYFYIAIWYALFQWKAFGIAGWLNPKHWYYFGRMLKLSIQATIAEVIYKRKTRGIADNSQIEKMREEFKNYHYQPQKKSPSVVQNVISERVKIESFPA

SEQ ID NO: 82705 - protein, 499 aa, Gammaproteobacteria bacterium
  misc_feature (1)..(499): tr|A0A2N1XFW3|A0A2N1XFW3_9GAMM Tryptophan halogenase OS =Gammaproteobacteria bacterium HGW-Gammaproteobacteria- 4 OX=2013800 GN=CVV14_06565 PE=4 SV=1
MSESRIRDVVIVGGGTAGWMAAASLAKAMGQQLRIRLIESEEIGIVGVGEATIPQIRLVNSFLGLDENEVLRASQGTFKLGIQFNDWRRVGDSYLHAFGETGMPLGPLSFHHYWLRSQRSGGDSRLWDYSLNTIAAEGRRFGRMDKVGDTPVGGIRYAYHFDAGLYGRFLRRYAEQRGVRRSEGKVVDVQLRAADGFIESVQMDSGERIEGDLFLDCSGFRGLLIEGALKAGFDDWSRWLPCNRAVTVPSVRAEPMRPYTQSNARPAGWQWRIPLQHRTGNGHVYCSDFMSEDEASALLLANLDGEALAEPRALRFTSGIRNKVWHRNCVALGLASGFVEPLESTAIHLIQSCINRLLVMFPDRHCDVALSDEFNRQTRYEYESVRDFLVLHYKATERDDTPFWRHCAQLQLPERAARKVALFRASGQIVRENEELFTEGSWLQVMLGQDIVPERYHPSADAISTEQLDGFLRGIRGTVAQAAATLPGHSEYVAANCRA

SEQ ID NO: 82706 - protein, 412 aa, Salinisphaera hydrothermalis
  misc_feature (1)..(412): tr|A0A084IQ55|A0A084IQ55_SALHC Tryptophan halogenase OS =Salinisphaera hydrothermalis (strain C41B8) OX=1304275 GN=C41B8_01877 PE=4 SV=1
MNTEQTDIAVIGAGPAGATIAALLADRGWRVTVLERSHFPRFAVGESLLPRCMDALADAGMLHAVEHAGYQIKRGVTFTENDRDTSFTFDDQFTPGWSWTWQVLRADFDHRLALEAEHRGATLRFGQTVESVDFETPGAPRLSVVGDDDTRTALTARFVCDASGFARVLPRLLGLDRTGSAPPRAALFTHVADHIDAPDYQRDRIVIGIHPSQPEVWYWLIGLAGGRASVGVIGPPEWLHGLDGTPVERLQQAIGEEPRLARLLADAEFDSRVGQTENYAYDIAALHGRDYALLGNAAGFVDPIFSSGVTIALESALRAVGPIDAQLRGSDVDWDTEFEAPIRAGQRVFTSFISAWYRGTLKHVFFNPTPDTTIRTMLSSILAGYVWDTSNPYVAVPERRLETLCRLCAPAA

SEQ ID NO: 82707 - protein, 603 aa, Microcystis aeruginosa
  misc_feature (1)..(603): tr|A0A552E2T4|A0A552E2T4_MICAE Tryptophan halogenase OS =Microcystis aeruginosa Ma_QC_B_20070730_S2 OX=2486256 GN=EWV80_05055 PE=4 SV=1
MKNMSNRPYDVIIMGAGLAGLCQARHLMLKIPNIRIAMIDPRPENRTEKDLKLGESTVEVATLFFGKDLGLYEYLIENHPPKYGLNFHWPKRNDQTKTIDDYFHIWANRQPDLASTQLNRPKFERDLLKMNREMGADFYNGRVVDIDLTPNDQLHTVKVKLPNESIELQGKHLVDAAGRRFLIGKKTNNISFDSKDLYGVNTGSAWVRVQNVDRTIFHSGYDPTGASCSHYYATNHWFGKGHWLWMIPTDIDTMELSIGVIHHHDYISSESLNSKEKFYEFLKANHNILYQLVTSAENIDFHYWPRLAHTSKTLYSPDNWYVIGDSACIFDAFYSLGSTMIVSAIDSITEIIRAKLAGEVNAAEKCQAYNQFNLTLINSINLFMHNHSRHLGDASIMSWRIYFENMIWFGILIPIFVGKWHLDLEFIPQFVQTFQTTLRSLVYEIHDQFDQLVDQKKNIGLMDCYRSDQLIWNYHTPKRYTHALENAQYEPKQTSVFTSMKKTFFYLTIWYLKLQWKSGGLSQVCHPRSLGTMAKLLTTSIYIGLGDIIYSLTGNHGSESRLIAEMRQAFQEYQYGDTLQPWTVEGVDTKSPEMEAEKVPLQV

SEQ ID NO: 82708 - protein, 512 aa, Pseudoalteromonas sp.
  misc_feature (1)..(512): tr|A0A0P9FNR3|A0A0P9FNR3_9GAMM Flavin-dependent tryptop han halogenase RebH OS=Pseudoalteromonas sp. P1-9 OX=17 10354 GN=rebH_4 PE=4 SV=1
MTETTKTINSIVIVGGGTSGWMTAAALANHAPLKHCKITLIESSKLGTIGVGEATIPTLRRFYQNLGLSDIEVLKATKGSCKLGIEFQGWAGENSRFIHPFGIYGQSTPSTPFHHYWLRAEQAGTHSDLTDYSLGVQMAKHNKFVPPKITPQNQLEIFDWALHFDASLFAKLMFDYSTSKGVQHIDNTICSIDNHPDGSIRQLHFEDGSSIAADLFIDCSGFKALLIGENQAVDYENWSHWLLNDSAVAVQTSATAEPITRTLAIAKKGGWQWRIPLQHRVGNGYVYSSKYLSHEEAEQSLLASINGDILQPPRKFSFTPGRRKTAWHNNCVAIGLSSGFLEPLESTSIALVETAIEKLLLTFNSNQYSINDVAKFNDVNAQEYERVRDFIILHYKLNGRSDSPMWQYYRDMAIPASLEEKMLTFAKTGELKRLPWEMFGPDSWLAIYHGLNFLPENYQASADNMPLNYLNEHLAKMREMVANQVKNAPTHSEFLQQHCGYQPIKQQEAVCS

SEQ ID NO: 82709 - protein, 510 aa, Pelomonas puraquae
  misc_feature (1)..(510): tr|A0A254N8U9|A0A254N8U9_9BURK Tryptophan halogenase OS =Pelomonas puraquae OX=431059 GN=CDO81_18305 PE=4 SV=1
MNERVREVVVLGGGSAGWLVAGLLAAEHGDLRITLIESTDVPTIGVGEGTWPSMRDTLRRIGLDEAEFIRRCQVSFKQGSRFDGWSRGAPGAQGDRYYHPFMLPVGYGDVDLVQAWLATQPERPFADVVSPSVQVCEAGRAPKQVQTPGFAAVANYAYHFDAGLFAQTLREHATQRLNVRHVVDHVDAVLTSAEGDITALQTRAHGPLAGDLFIDCSGLSARLIGEHFGVGLKSERDVLFNDAAMPVQVPHAQPDAPLATCTIATAWAKGWIWDIGLPSRRGVGCVYSRRHASDDEAQAALQAYLDATGTPPDRPAPRQIRYDPGYRERFWVRNCVAIGLASGFIEPLEASALAMVELSVQRLCDELPMTRATMDAVARRFNDDFSYRWARVIDFLKLHYALSQRDDSTYWRDHRDPATWPERLRELLPMWRLRAPARHDFGRNDEVFPSASYQYVLYGMGFRPELQTQPADRLQAAQACFDEAVRQARRFVPGLPGHRALIDHLHQSNA

SEQ ID NO: 82710 - protein, 497 aa, Ferrimonas marina
  misc_feature (1)..(497): tr|A0A1M5YWB6|A0A1M5YWB6_9GAMM Tryptophan halogenase OS =Ferrimonas marina OX=299255 GN=SAMN02745129_4548 PE=4 SV=1
MNQPPMRVVVAGGGTAGWMTAAALAKLMGKRLDVVLVESDQIGTVGVGEATIPTLHIYHRLLGLKEQDVMAATNATFKLGIQFENWRVQNESYLHSFGFLGKECWACGFHHFWQKGKALGMVSEIGDYCTEHLAAREGRFAVLPNQDYNHAYHMDATLYAKFLRKLAEQHGARRIEGKIESVTQCAESGDIQALVLENGERIDGDLFIDCTGFRALLIEQTLNTGYDDWSHWLPCDRAIAVQTKSVSNPPAYTRSIAHASGWQWRIPLQSRVGNGMVYCSKYWSDEEAKATLLANLEGELLNEPRVIQFRTGTRRQHWNRNCIAIGLASGFLEPLESTSIHLIQRSIIRLMQLLPSGGSYEAERNEFNSQTLEEMANIRDFIVLHYKATERDDSPFWQHCKRMPVPESLAHRMNMFEEAGKVFKHGPDLFGETSWVQVMMGQGIEPKSYHPIVDMMSDHELEGFLGGIKGRVTKKVSSLPPHFDFVAHYCPAKPQES

SEQ ID NO: 82711 - protein, 392 aa, Burkholderia stabilis
  misc_feature (1)..(392): tr|A0A498RY69|A0A498RY69_9BURK Geranylgeranyl reductase family,Tryptophan halogenase OS=Burkholderia stabilis OX=95485 GN=BSTAB16_6692 PE=4 SV=1
MTPGHGIAIVGAGPAGCAAAIALMQAGAGPVLLIDAAGRDDSGGAREAGARRPRFGESLPPDIRLVFAALGVQHAFDAQGFDPCCGSASSWGADALGYNDFLFNPHGFGWHVERRRFDALLRDCAIRAGVAWKTGRVEHCSATGNGVRLQLALPGGDTEYVDAAFVVDASGHAACVARAMGAERLDGDRLVCVSACVPLNADSGLGQRSLLEAVEYGWWYAARFAPDEAIVVVATDAQMLRRHALQQPASWHACLRGTRHVAAALGDGVRDAPRTLTVRQARSARLSRCAGPRWLAIGDAAASFDPLSSQGVIKAMLDGMAAAREIAGDRDGRAIAARHEQRIGERFADYTRMRDDFYDQERRWANAPFWLHRRHRDTTTPAGVLHATETQP

SEQ ID NO: 82712 - protein, 541 aa, Streptomyces sp.
  misc_feature (1)..(541): tr|A0A1Q5GAT0|A0A1Q5GAT0_9ACTN Tryptophan halogenase OS =Streptomyces sp. CB01580 OX=1703933 GN=AMK22_26720 PE= 4 SV=1
MNARASIGGSSVDHRIRKVVILGGGTAGWMAAAYLGKALQRTVKITVLEAPTIPRIGVGEATVPNLHRAFFSYLGIAEDDWMRECNASFKTAVKFINWRSPGESAPRPKPLGDRTDQFFHPFGLLPSADHIPLSHYWAAKYLAGETDEPFDYACFKEPAMMDANRAPRWDDGRPATNYAWHFDARLVADFLRRFAVDKQGTEHVEDEMTEVLRDERGFITALRTAGGRLLEADLFVDCSGFRGLLINQTMDEPFLDMKDHLLCDSAVATAIPHDDAAHGVEPYTSAIAMSSGWTWRIPMLGRFGTGYVFSSDFISRDDATAEFSRLWGLDPEKTAFNQIRFRVGRNRRSWVKNCVSIGLASCFLEPLESTGIYFTYAAIHQLAKHFPDRRFDPVLIDAFNREIEEMFDDTRDFIQAHFYFSPRTDTPFWQANKELRLAEGIQAKVAAYRSGLPVNPPITDESNYYGNFEAEFRNFWTNGSYYCVFAGMGLVPDRPLPALSYKPDSIEAAGPLFEAVKRQQREMAEKLPSNYDYLRRLHGKP

SEQ ID NO: 82713 - protein, 79 aa, Porphyrobacter sp.
  misc_feature (1)..(79): tr|A0A0P8B1I0|A0A0P8B1I0_9SPHN Putative oxidoreductase (Fragment) OS=Porphyrobacter sp. HL-46 OX=1479239 GN=HL UCCX21_06385 PE=4 SV=1
MTIQRIIIVGGGTAGWMAAAALSRLKAGRSVEITLIESESIGTVGVGEATIPPFVGFNQLLGVDEREMLAAVGGTFKLG

SEQ ID NO: 82714 - protein, 533 aa, Bdellovibrio sp.
  misc_feature (1)..(533): tr|A0A514XJA6|A0A514XJA6_9PROT Tryptophan 7-halogenase OS=Bdellovibrio sp. ZAP7 OX=2231053 GN=DOM22_11990 PE=4 SV=1
MASLSDYIDTAFDLSYLNFSKYPQTEIKSIGILGGGTAGYLAALALKKLHPKIQTSVIESSKIPVIGVGESTTTEIVPFLHRTLGIDPQEFFQAVQPTIKLGIRFDWGCPGDYHFNFNFFAGHQQESYYYEDSINNANWASVLMDNHKIPVIREKNGEMISLLQSIPFSYHIDNKNLIRFLNNIVKQRQIPIIDAVVENVHLDDNDFVTSIETDDGKKHSFDLYIDCSGFRSRILGQGLKTEFISYKSTLRNNRALTFDTPNNNDIRPYTQCSTMPNGWAWTIPMRGENHHGYVHSTDYCDEEQALKEARARFGHFEKYKMVEFRTGRHKKAWNKNVFGLGNAYGFVEPLESTAIQTAVHSIMTLCKLMPNNHHDSSSIAAINQEIAATWDTFRWFLAVHYKYNKQMDTKYWQDCRANTEMGDAQMVVDLFNQRAPLSASNLGTNSPYTACEALVFNSYSYDTLLYGQKALERPPVRPKMSKEEYVQRTLSYQELTKKALSLHELFSEDYLIEGGLLEQLFEDQDTWIVETEA

SEQ ID NO: 82715 - protein, 524 aa, Actinobacteria bacterium
  misc_feature (1)..(524): tr|A0A0N1GDA3|A0A0N1GDA3_9ACTN Tryptophan halogenase OS =Actinobacteria bacterium OK006 OX=1592326 GN=OK006_020 6 PE=4 SV=1
MANNVVIVGGGTAGWMTATYLKAAFGDDVGITLVESKNVPTIGVGEATFSTVRHFFSYLGLAEHEWMPECHASYKLAIRFENWRAEGHHFYHPFERPRNVQGFSLADWWLHTRPGEQFDRDTSLLTALCEAKSSPRHLDGAMFTSGFGAADEPAKAAEDGRETQFPYAYHFDAALLARFLTRFGTERGVRHVLDDVLDVALDDHGDISHVVTREHGALTGDLFIDCTGFRGMLINKALGVPFESFRESLPNDSAVALRVPVNGEKAGMRPCTTATAQDAGWIWTIPLFGRIGTGYVYAGDYCTPEEAERTLREFVGPAADGLAANHIKMRIGRCAQSWVRNCVAIGLSSGFVEPLESTGIFFIHNAVEQLVKHFPGGRGDEHRRRTYNRQVAAVMDGVREFLVLHYYAAARDDNAYWRDAKKRPLPDGLAERIEAWSHQLPDAESVFPRFHGFEPYSYTAMLLGLGGLPVRPPAALSRMDDTAARREFALIRDQAQALAQGLPSQYAYLAHQQNASTGRPASAA

SEQ ID NO: 82716 - protein, 495 aa, Pseudoalteromonas arctica
  misc_feature (1)..(495): tr|A0A290S216|A0A290S216_9GAMM FADH2 O2-dependent halog enase I OS=Pseudoalteromonas arctica A 37-1-2 OX=111731 3 GN=prnA PE=4 SV=1
MTKTNAVKNVVIAGGGTAGWMAAAALAKLVGNNINITLVESDDIGTVGVGEATIPPIRTFHKLLGINEQAFMKATQASFKLGISFENWGDENTHYIHSFGATGKECWAGEFHHFWLQGKALGINNPFGDYCYELQAAKSGKFAFNQQNPINYAYHMDATRYAQFLREFSEPLGVKRIEGKIQKVVKNTKTGHIESLTLNNGEHINGDFFIDCTGFRGLLIEQALHTGYEDWSHLLPCNSAIAVQTKSTSETVLPLTRSIAHKSGWQWRIPLQNRVGNGLVYCSQYMDDEQAKALLLNNIEGEALTEPRIIKFKTGRRLKGWNKNCLALGLASGFVEPLESTSIHLIMSGIIRFMRLFPFNGITNHAIDEYNKQLKSEIENIRDFIVLHYKVTNRDDSEFWQHCSAMEVPKTLQHKIDLFKQTGRVFLDDGDIFRVDSWVQVMLGQGIEPNQHHLIASMMSDEELTRFLHGIKQQIEQRVSQLPPHHEFLKQYCPA

SEQ ID NO: 82717 - protein, 516 aa, Pseudoalteromonas arctica
  misc_feature (1)..(516): tr|A0A290S3F5|A0A290S3F5_9GAMM Uncharacterized protein OS=Pseudoalteromonas arctica A 37-1-2 OX=1117313 GN=PAR C_a1606 PE=4 SV=1
MTKPITKIVVLGGGTAGWLSAGLLAAEHPHLNVTLVESANVPILGVGEGTWPSMRNTLQRIGIKESDFITQCDASFKQGSKFINWRNLSEGENYYHPFMNPQGYEHTNLHASWQRIAPNQKFADVVNMQSFVCQAALAPKQLQTPEYAAVTNYGYHLDAGKFTEFLKNYCVKNLNVTHITDDVTHVINDEHGYIASLKTNNNGDITGDLFIDCSGSCARLIGEHFNSEFIAQDHILFNNSAVAAQIPNAHADQPIASATLSTAQSNGWIWDIALPTRRGTGYVFSSKYQSDESATSTLKSYIAKSTSEQQAEQLNYRVLKFSPGYRQKFWIKNCVAVGMSAGFLEPLEASALAMVELSISMISEQLPQNRTHMSQLETRFNDRFSTRWQRVIEFLKLHYVLSERDDTPYWQDISNLNTAPERLQNLLKLWQFQPPSRFDFIENEEVFSSSSYQYVLYGMGFNTQTVSAQNTFNDPRTGDYYYQQNREKIAQCLNGLPSNRALLNHLLSNNGQPHND

SEQ ID NO: 82718 - protein, 520 aa, Novosphingobium sp.
  misc_feature (1)..(520): tr|A0A2Z5EK47|A0A2Z5EK47_9SPHN Tryptophan 7-halogenase OS=Novosphingobium sp. P6W OX=1609758 GN=TQ38_023725 PE =4 SV=1
MTIDNPSSCRVVILGGGTAGWLAAAYLSRTLKMTGITLVESSEIGIIGVGEGTFPTIRSTLAGLGISEAEFLVRANATFKQGVLFEGWATGKDSYFHPFNMPIGGEDEALLPHWLADTSPQRPSWADAVTVQEQVIRAGRAPKRPKDPDFSGPMNYAYHFDAARFADYLREISVAAGVERIEGTVAAVKRKADGDIAALELADGRTVAGDFFLDCSGFRALLIGQTLGADFTSCAGSLFNDRALAMQVPYAQPGAPVRPYTLATAHEAGWTWDIGLTERRGIGYVYSSRHCSDDEAEATLRRYVGPRGDALSPRQLRFETGYRERQWIGNCVAVGLSAGFFEPLESTGIMLIEAALRIVGEFLGPNVLASGDRYARDAAARSFNRLMSARFERIVHFLKLHYCITRRTDTAYWRDNADPATIPEPLRDMLAQWRHRPPSRFDFVVDLETFLPPSYHYILYGMGFETTLGAARYPGAAQAREVFARVRAAHAGARGGLPDHRALLNHYHARTGIQPSKVSR

SEQ ID NO: 82719 - protein, 503 aa, Erythrobacter xanthus
  misc_feature (1)..(503): tr|A0A3A1P0M6|A0A3A1P0M6_9SPHN Tryptophan 7-halogenase OS=Erythrobacter xanthus OX=1784712 GN=D2V17_15470 PE=4 SV=1
MAIERIVIVGGGTAGWMTAAALSRMKAGHRKLEIVLVESEQIGTVGVGEATIPPFVDFNRLLEIDEAEMLAAVQGTFKVGIQFENWGRIGQSYLHPFGTYGYEIDGVSFHHVWHRLKQAGDPRPIQAFNLETMAAHFGKFLRTPDYESDHLPPMNYAYHIDATRYARFLRSYAEARGVVRREGRVADVALDGESGHVASITMDDGEVMPGDFFVDCSGFRGLLIEQALKTGYEDWSHYLPCNRAVALPCEREDGSPPALFTRATAHSAGWQWRVPLQHRNGNGHVYCSEFMGDDEAHAILVANLAGKPGADPNFLRFVTGRRKKFWNRNVVALGLAAGFMEPLESTSIHLVNTGINKLVSILSLDGVTQEQEDAFNRLTAKEYLRIRDFLVLHYSATARDDSPFWNHVRTMDVPDTLKEKIALFRSNGQIFREDDELFIETSWASVMMGQGIQPNGHNVMADALPLDQLRGEIDGIERSIRYLVEHMPSHADYLSKYCKAEAG

SEQ ID NO: 82720 - protein, 523 aa, Burkholderia sp.
  misc_feature (1)..(523): tr|A0A063B7P3|A0A063B7P3_9BURK Tryptophan halogenase OS =Burkholderia sp. lig30 OX=1192124 GN=LIG30_3081 PE=4 S V=1
MRNFVKSILIVGGGSSGWMTAAYLSKAYGHKVKISLIEEPSIPKIGVGEATIPNLQRVFFDFLGLKEQDWMPHCNASFKSAIKFVGWNAESDSTDYSYHMFGQLKEVNGIPLSHYWAHLKNTGQTSEQFAYACYNKAKLLDAKLSPKDRDGRSRMSHAWHFDAHLVADYLRGLSVSWGVEHIQGEVVETRLNESGGIKSVRTQSGAEIAADFFVDCSGFKGLLINQALDEPFIDMSRYLLCDSAVAASIAHDDEANGVEPYTSAIAMSSGWTWKIPLLGRFGSGYVYSSSFCSKETATEDFMKLWGVREDQVKLNHIKFRTGRNRRAWVKNCVSIGLSSCFLEPLESTGLYFIYAAIYQFAQHFPDATLDSRLADSFNKKIEMMFDDCRDFIQTHYFTTSRNDSDFWRANKHDLKISDSLHEKLNAYNAGLVVCPPVTTNESDYYGNFDLEFSNFWTNSNYYCMFAGLDWVPEKSNPKLVYHDEWMKQALAEFQSLKWEEEELSATLPTTYDYLLNIRGTRSA

SEQ ID NO: 82721 - protein, 508 aa, Glycocaulis sp.
  misc_feature (1)..(508): tr|A0A550KMC2|A0A550KMC2_9RHOB Tryptophan 7-halogenase OS=Glycocaulis sp. ZYF765 OX=2518983 GN=FKB34_03990 PE= 4 SV=1
MSDNSDSKVRRVLIVGGGTAGWMTAAALSHGLRGTGVRIELVESEAIGTVGVGESTVPHIRYFNQTLGIDEAGFIARTRATIKLGIEFRNWAREGDAYIHPFGAYGEPDGGPDFHHQWLRLGGPETMGPIDQWSLPIAMAKAERFAPPSDEPGALASTYSYAYQFDAALYARYLREFAEARGVARTEGRILDVALDPETGDASSVTLESGRRIEADLFVDCSGFRGLIIEQAMKTGYEDWSRWLPCDRAIAIPSASTDALPPYTRASATEAGWVWRIPLQHRVGNGHVYASAFMDDARAEGLLMTALEGEALAPPNRLRFLAGKRKLQWNRNCVAIGLASGFLEPLESTSIHLIQAAAGYLLDLFPTGDGDEAARDEFNRTMAMEYERVRDFLILHYHATERDDTPFWNHVRTMEIPDSLASKMALFRERGSVAGYEHGVFLEPSWVAVYLGQRIIPARHDLAALAVPEAHARERARALKDEIAALAMRLPLHRDRVGAPRATAGSAA

SEQ ID NO: 82722 - protein, 537 aa, Lysobacter silvestris
  misc_feature (1)..(537): tr|A0A2K1Q0Y6|A0A2K1Q0Y6_9GAMM Tryptophan halogenase OS =Lysobacter silvestris OX=1645665 GN=Lysil_0206 PE=4 SV =1
MNTKVDVVILGGGLAGLSLSIQLKRMDPALHVTVIERQRHPVREAAFKVGESTVEIAAHYFGHVLGLREHLEGEQIRKFGFRFFFSDGVEAIDRCTELGVSKLLPMVSWQLDRGRFENFLGERARELGVVFLDDATVKHVVPGGDGNLHVVDFEHEGDLVQLEARWLVDASGRASLLKRKFDLVADNPHDVNAAWWRVDGIVDPNQWSNDGDWLSRCTPPHRWRSTNHLCGRGYWAWMIPLASGAHSIGIVADGALHPLEQMKTHALATDWLREHQPALATLLDDPRHAVQDFRFLRHFSHGCRQVFSGDRWAITGEAGLFLDPFYSPGSDFIAIGNTYICDLIQRDRAGTPFAPYAAIYQQLIDSFFDNTMTLYRDQYALFGDARVMPLKVIWDYTYYWSVLAPLFTGSRMTDVAMLGRLRPVFERATRLNIAVQALLREWGERNGAASPPQDGRVLDQYLIPWFHELNRALTDPPQDDVSFHARIAANVVLMDRLAAQLLGEARRDHPQIEDFGLTAMLADVMPGEPLLQAPWVE

SEQ ID NO: 82723 - protein, 399 aa, Alteromonas macleodii
  misc_feature (1)..(399): tr|A0A351UFD0|A0A351UFD0_ALTMA Tryptophan halogenase (F ragment) OS=Alteromonas macleodii OX=28108 GN=DCZ37_124 65 PE=4 SV=1
AEQDFAHAVCSQAALCDHHLAPKQRQTPAYAGIANYGYHLDANKFAALLQKHATTVLGVQHIVDHVDDVVGSSSEPIAAIVGREHGNITGDLFIDCTGFAARLIGQHYGIPLTSCSNVLANDSAIAIQAPYVDSSVDIASTTHSTAQDSGWIWDIGLPSRKGVGYVYSSAHCSEDEARATLETYLKHDKKTADVDVSKARKITFSPGYRKTLWVENCVAIGTSAGFLEPLEASALVMIELSATHIAKQLPRTYKECQAAGRQFNQAFEKKWERIVDFLKLHYVLSEREASAYWRDMRNQESCSTQLQDWLTLWKSRSPISSDFELREELFPAASYLFVLYGMGFRSQYNDVYQANLHTPEQRQAYAKHVQSIQQQLSGLPTNRQFLNQVAQSQGLSMHY

SEQ ID NO: 82724 - protein, 506 aa, Rhodanobacter denitrificans
  misc_feature (1)..(506): tr|A0A368KLL2|A0A368KLL2_9GAMM Tryptophan 7-halogenase OS=Rhodanobacter denitrificans OX=666685 GN=DEO45_00235 PE=4 SV=1
MTDPRIRNIVIVGGGTAGWMAAAAFAKVLDAGCSIRLVESEEIGTVGVGEGTVPHLKLFNNLLGIDDVEFVRNTQGTFKLGVQFNDWGRLGDSYVHGFGTIGHDVGLLPFHQYWIKARQSGKADEIGAYSLNTVAAPRGRFMPSASDAPPGSPLANVAYAYHFDAGRYARFLRSYAEQRGVRRTEGKVAQTVLRAGDGFVEAIVLENGERIEGELFIDCSGFRGLLIEQALHTGYLDFSHWLPCDRALAVACEKVGPPTPYTRASARPAGWQWRIPLQHRTGNGYVYSSAHVSDDEAAATLLGHLDGAPMGEPRLLRFTTGVRRQAWNRNVVALGLAGGFLEPLESTSIYMIQSAIARLLNLFPRRDFSPVLTERYNAQSRFEYEHIRDFLILHYHATERDDTPFWNQCRTMSIPPQLADNIRLFRDSGRFFRDGEEMFATPSWVQVMLGQRIAPQGYHPLVDQMPDAELAGFMASVSHVVASCVEVMPAHQAFIDRCCTAPAMVA

SEQ ID NO: 82725 - protein, 509 aa, Xanthomonas axonopodis
  misc_feature (1)..(509): tr|M4UGE0|M4UGE0_9XANT Tryptophan halogenase OS=Xanthom onas axonopodis Xac29-1 OX=1304892 GN=XAC29_20405 PE=4 SV=1
MPDTTPSDPQQRPVRRVVIAGGGTAGWMAAAALSKLLGRHLQITLVESDEIGTVGVGEATIPSLVTFHRLLEIDEAAFMAATQATIKLGIAFEHWRDVDQHYIHSFGHAGTDHWSAGFQHFWLKGRQRGVARDFGDYCLELRAAQEGRFAHLPNGGMNYAYHLDAGLYARFLRRFSEGFGVSRVEGRIGQVETDAQSGFLAALTLQDGTRLEGDLFLDCTGFAGLLIGKTLGVGSDDWSRWLFADSALAVQTESVGPPVTYTRSRADQAGWMWRIPLQHRVGNGIVYSSRYMDQDGARAVLERNLTGRALTEPRPLRFTPNQRHRVWEKNCVALGLASGFLEPLESTNIHLIQRGIIRLLQTFPQVINAVDIAEYNRQAAQEITHIRDFVILHYHATDRRDTPFWRDCAAMDIPDSLRHRVELFRQSGRVFHQANELFAENSWVQVMLGQGVVPQQHHPVADLMGDAELSRFLETIRTRVEAALVRLPAHADFLQRYCPAPPVMATPAG

SEQ ID NO: 82726 - protein, 511 aa, Sphingopyxis sp.
  misc_feature (1)..(511): tr|A0A270BKH9|A0A270BKH9_9SPHN Tryptophan halogenase OS =Sphingopyxis sp. GW247-27LB OX=2012632 GN=CD928_01040 PE=4 SV=1
MNGMVGRVVIVGGGTAGWLSACSLAAARPDLSVTLIEAPDIPTIGVGEGTWPTMRATLASIGIGEAEFLAACDASFKQGSRFDGWVDGAPNDRYFHPFTSPPGMPAHALLAAWRDDASELPFAAAMTPQVHVCERDLAPRQRAMPDYQGAANYAYHLDAGKFAALLARHAVQRLGVNHLADHVVDVRADGQGGIAAVVTRENGEIAADLFLDCTGHAALLIGRHLDVEWIDRGDVLINDRALAAQVPVLRGSPIASQTVATAHAAGWIWDIGLPARRGIGCVYASRFMDDEAAETVLRSYIATALPDAPDVPIRKLSFPTGHRARFWQGNCVAVGLSAGFIEPLESSAIVLIELSLRALTENFPASRVAMPIHAGRFNALFRYRWDRVVEFLKLHYVLSRRDEPYWRAQRDPAHVPQGLADMLALWRDQPPSTWDFPQAEEIFSAESHQYILYGMGHPAPDGQAATERARAALAANGQRARTLAAALPTNRAYLDALLAEGGAGPAHMEGH

SEQ ID NO: 82727 - protein, 501 aa, Alteromonas macleodii
  misc_feature (1)..(501): tr|A0A2K9IH53|A0A2K9IH53_ALTMA Tryptophan halogenase OS =Alteromonas macleodii OX=28108 GN=TE101_19885 PE=4 SV= 1
MTVSGLDSSKNQTPVKNVVIAGGGTAGWMAATALSRLLGKSINVTLVESKDIGIVGVGEATIPPIRTFHKLLGIDEKAFMRATQATFKLGIEFENWREQGHSYIHSFGITGRECWAGEFHHFWLRAKEYGFGGEFGDYCPELIAAKQSKFATSEAMPLNFAYHFDAVAYGRFLKSLACDAGVTHKEGDIEKVVVCPQSGNIQSLRLASDEVIDGDFFIDCTGFKGLLIEQALHTGYDDWRHYLFCDSAVAMQTELTAPPVPYTKSVAHKAGWRWQIPLQERMGNGLVFCSRFMNDEDAINTLKSQVTGAPINEPRVIRFTPGKRRRGWNKNCVALGLSSGFIEPLESTSIHLIMTGLIRLMRLFPFDGITQSAIDEYNNKFDSEMSAILDFIVMHYKVTQREDSPFWQQCQRMEIPPSLEHKLALFAESGRVFLDDGDIFRVDSWTQVLMGQGMTPSQYHRVADEMSEQSLKQFMAGLKQQVDNHVAKLPSHEAFLTQYLK

SEQ ID NO: 82728 - protein, 374 aa, Alteromonas macleodii
  misc_feature (1)..(374): tr|A0A351UEE9|A0A351UEE9_ALTMA Tryptophan halogenase (F ragment) OS=Alteromonas macleodii OX=28108 GN=DCZ37_107 80 PE=4 SV=1
EYGFGGEFSDYCPELIAAKQSKFATSEAMPLNFAYHFDAFAYGRFLKSLACEAGVTHKEGDIEKVTVCPQAGNIQSLQLASGEVINGDFFIDCTGFKGLLIEQALHTGYDDWRHYLFCDSAVAMQTELTAPPVPYTKSVAHKAGWRWQIPLQERMGNGLVFCSRFMSDEDAIDTLKAQVTGAPINEPRVIRFTPGKRRRGWNKNCVALGLSSGFIEPLESTSIHLIMTGLIRLMRLFPFDGITQSAIDEYNNKFDSEMSAILDFIVMHYKVTQREDNPFWQQCQRMEIPPSLKHKLALFAETGRVFLDDGDIFRVDSWTQVLMGQGMTPSQYHRVADEMSEQSLKQFMAGLKQQVDNHVAKLPSHEAFLTQYLN

SEQ ID NO: 82729 - protein, 500 aa, Alteromonas macleodii
  misc_feature (1)..(500): tr|A0A1E7DCA6|A0A1E7DCA6_ALTMA Tryptophan halogenase fa mily protein OS=Alteromonas macleodii OX=28108 GN=BFV94 _2904 PE=4 SV=1
MTTPHRIVIAGGGTAGWMAANLLAHRWANQAVTITLIESEDIGTIGVGEGSTPTLKRFFQTLDIPEYDWMEECQATYKVNIKFTGWNGNNSHSYSHPFISQLDVFSERAFHVNALTRRLGLDVETRPDKFLMAGYLAKKNLAPLPSHNFPFDIEYGYHFDSLKLGRFLRERAKSKGVCHVVGNIESVHTSPSGDISHLVCQDGQKLDGDLFIDCTGFSGLLLQKTLGVPFRDFSDNLFNDSAVVLPTPSCANLPVETESVAMSNGWRWQIPLRNRTGNGYVYSQQYQEKDAAECELRRALGMENTDVEAKHLSMRVGQCERHWEKNCLALGLSQGFIEPLEATALHLVQTSIELFADNYSFNETSAQQRQAFNREVSERFERVRDYIVCHYKLNGRNDSDYWRDNRANMKLSESLLSLLDVWYRKGDIVEEIKRQGIGRHFSTTSWHCLLSGYGVYPPPALNQPASLKESGDLFEEKKLAAFFNRCSLNFDKQSTLFNAG

SEQ ID NO: 82730 - protein, 502 aa, Sphingopyxis sp.
  misc_feature (1)..(502): tr|A0A270BBL9|A0A270BBL9_9SPHN Tryptophan halogenase OS =Sphingopyxis sp. GW247-27LB OX=2012632 GN=CD928_09885 PE=4 SV=1
MGDSRITKVVIVGGGTAGWMAAAALSRTMGGLSIRLVESEEIGTVGVGEATIPSIRLFNALIGIDEDDFVCETRGSFKLGVQFHDWGRIGDVYMHAFGQIGRSLGMLPFQQYWLRGRAEGVAGRVGDYSLNETAAHQNRFGRLPHIPNTSLDGIAYAFHFDAALYAAYLRRIAEAAGVERSEGKIAEVRRNGETGHVEALVLENGTAIDGELFIDCSGFRALLIEEALGTGFEDWTHWLPCDRAIAVPSENAGPARPYTQAIAHQSGWQWRIPLQHRTGNGHVFCSDFISEDEAAAVLLANIEGRPLAEPRTLRFRTGMRQRAWSGNVVALGLASGFLEPIESTSIHLIQNGIARLLAHFPGRDFDAANIDAYNRRIRFDHERIRDFIILHYHANQRTDSPFWTRCREMAIPETLAQKIALFRSQGQLVREGDELFVEIGWFQVLTGQNIVPRGYHPMADQLSREELSGFFGDIETIVAGAASRLPTHDDFIAQHCAAGVPA

SEQ ID NO: 82731 - protein, 519 aa, Glaciecola sp.
  misc_feature (1)..(519): tr|A0A2Z6UN50|A0A2Z6UN50_GLASK Tryptophan halogenase OS =Glaciecola sp. (strain KUL10) OX=2161813 GN=KUL10_1625 0 PE=4 SV=1
MDKAIKNIVIVGGGTAGWLTCAVIAAEHCANAENGMRVTLVESPDVKTIGVGEGTWPTMRGTLRKAGISETEFVRECDAAFKQGAKFAKWVTGEDDDAYYHPLVLPQGYSEVNLAPFWQPHADKVSFADAVCFQSHICEQGLAPKQASTPEYGHIANYAYHLDAGKFANFLQRHCTQKLGAHHVLDHVVAINNDETGDIKSVSTKHSGDIEGDLFIDCTGFNSLLLGKHYNIDFKSCKDVLFNDTALATHVPYEHQQSPIVSHTVSTAQKAGWVWDIGLPTRRGVGHVFSSAHTNDEHAEKELRDYIALSRPDLAESLDVRKIDIKPGHREKFWHKNCVAVGLSAGFLEPLEASALVLVELSAAMISEQMPATRGTMNVVAKRFNDKFTYRWDRIIDFLKLHYVLTKRTDSDYWIDNCRAETIPNELSELLELWQYQSPWHQDFTHVDEVFPSASYQYVLYGMGFKTKNPPTLRRSMNQQLAEQHMQKNHALTQKLLNGLPSHRDLINMIKQQGLRMAS

SEQ ID NO: 82732 - protein, 498 aa, Flavimaricola marinus
  misc_feature (1)..(498): tr|A0A238LB93|A0A238LB93_9RHOB Flavin-dependent tryptop han halogenase RebH OS=Flavimaricola marinus OX=1819565 GN=rebH_1 PE=4 SV=1
MTALPGHIVITGGGTAGWLSALMLRDLARRRHHDLRLTVIESSKIGTIGVGEGTTAVFRQMLMALGLDEMDFLRETGATIKYGIRHRDWRRLGHYYDGPIDDTAAVAGKGLDTYAVAAGKPITDVHLFTHLMAKGRAPWAERSGRRVAAGPYHHAYHFDQAKAGAFLKRHAKGVEVIDDQVLGVESDAGAISALVLESGQRVEADFFVDCSGFSRRVIRSLGAEWISYGDVLPVNRAMPFWIDLRPGEEIAPLTHAWAQGAGWMWQIPTQGRIGCGYVYSDAHTSPDQAKAEIEAALGHEIEPRRDIKIDAGRLRDAWTGNCVALGLASSFLEPLEATSIHGTIVQLMLLCELLDKPGGAEPYNAAVGRQVDDFRDFIRLHYVSERRDTPFWRDVADSHPAEVTYRLAAWAGRIPERADFTPFPMGLPHVEEQLYTPVLDGLGLLSRDAAKAQMAANPKARATLRKTHEALTREYRKAALQCLPHRAFLSSLQEDVTA

SEQ ID NO: 82733 - protein, 481 aa, Novosphingobium sp.
  misc_feature (1)..(481): tr|A0A258V4H6|A0A258V4H6_9SPHN Tryptophan halogenase OS =Novosphingobium sp. 28-62-57 OX=1970409 GN=B7Y36_08455 PE=4 SV=1
MAAAALSRFAPAGTRIELVESETIGTVGVGEATIPQIHLFNAALGLDEAEFLSETNGSFKLGIEFAGWRHEGHSYMHAFGNIGRPVGLLPFQHYWLRAKQLGFAKPLQRYSLNELAARTMRMQRGRRTPQSPELAYAYHFDAGLYAAYLRRHAQARGVVRTEGLIQSVERDGESGDIAALVLDGDRRIAGDFFIDCTGFRGLLIEGALATGFDDWTQYLPCDRAVAVPCAGGGDFTPYTRSTARKAGWQWRIPLQHRIGNGHVYASAMMSDDEAAAILLANLDGQPLADPRPIRFTTGMRRKHWNRNCLAIGLAAGFMEPLESTSIHLVQSAISRFLAMLPTGKSDPAMVDHFNAQAQFEWTRIRDFIVLHYWANERVGEPFWDAMRAMDLPETLQRKLALWRASGFIHREHEELFTEVGWFQVLAGQGVETSGYNPMADTLSAADLRDLLGLTEAELVEEVRQMPRHIEALEQIMRGVAA

SEQ ID NO: 82734 - protein, 491 aa, Sphingopyxis sp.
  misc_feature (1)..(491): tr|A0A270BKQ2|A0A270BKQ2_9SPHN Tryptophan halogenase OS =Sphingopyxis sp. GW247-27LB OX=2012632 GN=CD928_01100 PE=4 SV=1
MSGVAILGRGAPLWLAAAALRRALAPAGVEIDAVALPDDAAPGDLYPTWPAIEALHDQIGIDEAALLRGARGAFTLGRNIVDRSGAEQPPLLLAHGGYGTRIEGEDFFPHWVKARHHRLGVGLDDFSLTASAAHQGRLFLPDEASARYGRADYGYHLPAAGYAKSLKAIARHLGVRIAETQTVDVERGEAGVAALRIDDGTRIAAALFVDATREGVVLREGLGEAFVPWAAPGDRMLTARAPRLASVPAYAEVRAGAEGWTALYPGLTHLHVAHVWSSAAASDEEALEAASAASGLALEAPAVRTVAPGFVHEPWTANVVGVGEAAAGFDPLHGFALHALQLGLVHLIACFPAGGAMEARRAEYNRQMAMHIARVRDFEAAHFVLQRHAGPFWDAARRVPLSPELDHLIALFRARGEIAPQEGESLPPDAWRALFTGLGVVPEGWRPAADRLPPDVAKAHFRKMLGFVREQVLRQPTHDAYLARIAQASRG

SEQ ID NO: 82735 - protein, 515 aa, Rhodanobacter denitrificans
  misc_feature (1)..(515): tr|M4NGZ5|M4NGZ5_9GAMM Tryptophan halogenase OS=Rhodano bacter denitrificans OX=666685 GN=R2APBS1_3097 PE=4 SV= 1
MNDPRIRRIVIVGGGTTGWLAAALLTQALGSQVQIRLVESAEIGTVGVGEATIPQIRHINRFLGIDEDEMLRFAHGTYKLGVQLNGFTRPGDSYLHAFGDLGLPLGLTPFHHYWLRAVQARGGAADAPDLWAYSLNAAAAAENRFAPLEKIPDSPLGGLRYAYHFDASRYAQYLRERIAPGAVQRIEGKVVEVRLREGDGFIESLQLEHGERVDGDFFIDCSGFRGLLIEGALHTGYENWQHWLPCDRALAVGSAPGGPMRPYTQASARTAGWQWRIPLRHRTGNGHVYCSRFISDDEAAAQLVANLETEPLGDPRPLRFVTGMRRLAWNRNCLALGLAAGFMEPLESTSIHLVQSGVSRLLAMFPDRRCDSALADEYNRQTRFEYEHVRDFLILHYKATERTDTPFWQQCGAMEIPPSLARRIELFRRTGMVFREGEELFAETGWVQVLLGQRIVPERHHPLADALTDTQLDGFLADIRTLIGRAKNTLPLHHEFVARAGGALDVAQRTAAAAP

SEQ ID NO: 82736 - protein, 491 aa, Kibdelosporangium aridum
  misc_feature (1)..(491): tr|A0A428ZJ79|A0A428ZJ79_KIBAR Tryptophan 7-halogenase OS=Kibdelosporangium aridum OX=2030 GN=DMH04_09870 PE=4 SV=1
MSVEDFDVVVAGGGPAGSTVATLVAMQGHRVLLLEKEVFPRYQIGESLLPATVHGVCRMLGITDELANAGFPVKRGGTFRWGARPEPWTFHFGISAKMAGSTSHAYQVERARFDEILLNNAKRKGVVVREGSPVTDVVEDGERVTGLRYTDADGNEREVSARFVIDASGNKSRLYSKVGGSRNYSEFFRSLALFGYFEGGKRLPAPVSGNILSVAFDSGWFWYIPLSDTLTSVGAVVRREDAEKIQGDREKALNALIAECPLISEYLANATRVTTGKYGELRVRKDYSYQQETYWRPGMILIGDAACFVDPVFSSGVHLATYSALLAARSINSVLAGDLDEKTALNEFEMRYRREYGVFYEFLVSFYQMNVNEESYFWQAKKVTQNQSTDIESFVELIGGVSSGETALTAADRIAARSAEFAAAVDQMASGDGDNMVPMFKSTVVKQAMQEAGQVQMKALLGEDAEPELPLFPGGLVTSPDGMKWLPHHPA

SEQ ID NO: 82737 - protein, 494 aa, Sphingopyxis sp.
  misc_feature (1)..(494): tr|A0A270BJN1|A0A270BJN1_9SPHN Tryptophan halogenase OS =Sphingopyxis sp. GW247-27LB OX=2012632 GN=CD928_01055 PE=4 SV=1
MRRIVIAGGGTAGWMAAAAIARTLGPVVELTLIESEAIGTIGVGESTIPPLVNYNRLLGINEADFMRATQATFKLGILFDDWKDLGTRYFHSFGLTGKDHWSAGFQHFWLHGRAKGHDAPYEDYCLELAAAVQGKFAHLPDDRLNYAYQLDSGLYARFLRQMAEGDGAKRIEGRIARVELDGESGDIAALVLDGDRRIEGDIFIDCTGFRALLIEGALHAGFEDWSHWLPCDSAIAIQTPNVGPPTPYTRVMAHDAGWQWRIPLQHRTGNGLVYCSRYLDREPALERLLGNIEGDPLTEPNFLRFTAGTRRRQWHRNCVAIGLSGGFMEPLESTAIHLIQRSVLRFVRMLPAGRVSERDIAEYNDQQMQDMVQIRDFLVCHYKVTNRRDSPFWRHCAAMPIPDTLEQKIELFRETGRVFRRNEELFAENSWVQVMMGQGVEPESYHPIAAKLRDDELDRLLRMIRGQVADTVASLPDHQSYVARYCGAEVPQAA

SEQ ID NO: 82738 - protein, 511 aa, Glaciecola sp.
  misc_feature (1)..(511): tr|A0A2Z6UHJ1|A0A2Z6UHJ1_GLASK Tryptophan halogenase OS =Glaciecola sp. (strain KUL10) OX=2161813 GN=KUL10_3260 0 PE=4 SV=1
MIEHVVIVGGGTAGWLSAGMIAANKHKYSNSTPKITLIESPNIKTLGVGEGTWPSMRNTLQQIGINEREFIKSCNVSLKQGSQFKGWRDGSIQDSYYHPFITPPGYYECDLHTHWQSLAPEMPFADFVSVQSCVCDHKKAPKQFATPDYAGVTNYGYHLDASKFAELLKDHCTDKLNVNYICDDVIGVNTDDNNNITSLVLAKHDELHLDLVIDCSGMHSLLIDKHYGVEFQRCDDVLFNDSALATHLPYSDDNEQIESATVATAQEAGWTWDIGLQTRRGVGYTYSSRHSTDEQAEQVLRDYIRKTSNDRLAQSVDVRKISFTPGYRKQFWVKNCLAVGMSAGFFEPLEASALAMVELSLTMLTEEFPVDHNHMTMLSERFNNRFTYRWQRVVDFLKLHYLFNTRDEPYWVDARDDQSTPNSLKQLLQIWQYQAPNRHDLTQNEEVFPSASYQYVLYGLGFIPKVSKTLSLAQQQQAQRLFQQNRENQSRFIQALPGNRELVTHIKSKVA

SEQ ID NO: 82739 - protein, 443 aa, Nostoc sp.
  misc_feature (1)..(443): tr|K9QMH7|K9QMH7_NOSS7 Tryptophan halogenase OS=Nostoc sp. (strain ATCC 29411 / PCC 7524) OX=28072 GN=Nos7524_ 0707 PE=4 SV=1
MKIAVIGGGTAGYIAASHISKHFPQFNLYHIYDSTIPTIGVGEGTIPYFLTWLDKITNLSYAELEKRCHITRKFGISFENWGVEHEQFFHHFYPVGETYAYHISAVEIVNLLQEYICATKIDCQVIDVKSNGISANIIFANNTNLEVDLAIDARGFPKSFDDDYIQMSWIPTNAALIRQTPGDNDHLIELKMGSHLLKYQSATRSIARPHGWIFTIPLTNRTSYGYIYNRNLNSLSEIEADFDEFFLHEKITYSGQPKNINFPNFTVRNCFDGAVFKIGNTSAFIEPLEATAIGYILQQVEAISCWVLRAFAKVDQREKLDETQLRVFNQYFLNYAYKISIFVGWHYTMGSRFNTKFWEFAKDNFYQEITKLENDQLLEEFYSLLELAAQLPHPIENFPEFSSTLAEITNIFTALLAGFTKTFGQWTKPSFTEVGYGIGYFSN

SEQ ID NO: 82740 - protein, 557 aa, Alteromonas macleodii
  misc_feature (1)..(557): tr|A0A126Q4T3|A0A126Q4T3_ALTMA Tryptophan halogenase OS =Alteromonas macleodii OX=28108 GN=AVL55_19920 PE=4 SV= 1
MSDNEGHCSMHRVVIVGGGTAGWLAAGILAAKLSANHTVTLIESPNIPSLGVGEGSWPSLRDTLLDIGISETEFLTVCHGAFKQGSSFVNWRKGGHCYYHPFTVPTGYNELDIYTCWKSIAPNTSYEDAFSLQAAMCAAGKAPKQIATPDYAHVLNYGYHFDATKLAELLKNHCIDKLNVAHVVGHVDNVHSHQNGDIESVSTKDGKKIVGDLFIDCSGHSGLLINKHFTIPWIPVKRTMLNDRAVALQVPYSNEDAEIKSTTVATAQTCGWTWDIALQHRRGVGLVYSSQFTDEDQAKQVLIDYVRERYPSAQDAELSFRTLSFEPGYRSQFWVKNCLSLGMSSGFVEPLEASAIAMVELGLRMLCEAFPQNKAHMEIASKRYNSRFAYRWQRVIDFLKLHYALSDREEPYWLAQRDKASIPVSLAELLELWKYQSPSRLDLIENEEIFPSASYQYVLYGMGFSSSTSPLRLNEERKRKAVHIRETLQQTKNAYLQGLPSNRVLLNDIAKRYSNEKQHVPSHAQREKNEHASASSCNDIKNTSDKKDASYDRIGFR

SEQ ID NO: 82741 - protein, 494 aa, Novosphingobium sp.
  misc_feature (1)..(494): tr|A0A258V4G1|A0A258V4G1_9SPHN Tryptophan halogenase OS =Novosphingobium sp. 28-62-57 OX=1970409 GN=B7Y36_08440 PE=4 SV=1
MKAGTAPPHVVVLGGGSAGWITACLMHKEWAARGGSVTVVESPDIGIIGVGEGSTPQLKALFDHLGIAEADWMPACDATYKLGIRFTGWSDRPGFESYFHPFPGPTDLHSQPDFFLNAMLARRGFDVPAHPDPWFLATHLADAGKAPQASPNFPFAPSYGYHFDAYKLGAFLRDWAVARGVVHLPCKVLDVEFADDGDIAALLCEDDKRIAGDVFVDCSGFRALLIQQKLGVPFKSYGENLFNDRAVVMPTPHTASFKPQTDAVAMRAGWRWSIPLTTRVGNGYVYSSSYLSDDAAEAELRAAIGMSGSDQPARFLQMNVGRVEHSWSRNCLAAGLSQGFIEPLEATALHIVIATALEFVRAYESGGFTPQHRDAFNHSAATRFEGIRDYIVAHYRVNQRQDGAYWQANAANQSLSDGLKAMLTAWFTHQDIAAANTAAYGDPHYSAMSWHCLFAGYGTFPPPAKVQPLPPAAAAGDMDAITAMLKACAMNFAP

SEQ ID NO: 82742 - protein, 501 aa, Sphingomonas sp.
  misc_feature (1)..(501): tr|A0A0Q4LD92|A0A0Q4LD92_9SPHN Tryptophan halogenase OS =Sphingomonas sp. Leaf42 OX=1736219 GN=ASE97_11230 PE=4 SV=1
MNDQAIRRIVIVGGGTAGWMAASTFARLLGPKYCEIHLVESDAIGTVGVGEATIPQMATFNRMLGIDENEFLRETKGTFKLGIEFVDWTRIGHRYFHPFGSYGVNMNGISFHAYWLRLHALGEAPAIEPWSLQAMASADAKFMRAIDAGNSPLSDIPYAFHFDAGLYARYLRRYAEARGVVRHEGKIERVELRPENGFIDGVVLDDDRRIEGDLFIDCSGFRGLLIDQTLGAGFVDWSHWLPCDRAVAVPCAGGERLDPFTRSTARAAGWQWRIPLQHRIGNGHVFSSAHMSDDEATAILLANLDGEPLADPRFVPFRTGHRDRVWIRNCVAIGLSSGFLEPLESTSIWLIQSGLSRLMAMFPDRRCDPAEVARYNRILATEYAEIRDFLILHYHATERNDSPFWDHCRTMDIPERLAEKMRVFQSRGRTFRENEELFNDTSWFAVLQGQGLRTNGHDPIADTLTLDETRERLAHIREAIAASAAYMPTHREFIRQHCAAE

SEQ ID NO: 82743 - protein, 506 aa, Sphingomonas sp.
  misc_feature (1)..(506): tr|A0A0Q4L7G1|A0A0Q4L7G1_9SPHN Tryptophan halogenase OS =Sphingomonas sp. Leaf42 OX=1736219 GN=ASE97_15390 PE=4 SV=1
MSPAADHDAPHLRRIAIVGGGTAGWMAAAALSRVLNGSVAIALVESDAIGTVGVGEATIPPIRAFNALLGIDEDAFIRATGGTFKLGIEFAGWGDVGERYFHPFGVYGVDVGAVPFEALWHRLRAEPGARPLAAYSICAAAAATGRFQRPRTDPGNTPLHQIGHAFHFDAARYAAYLRRLAQAAGVVRHEGRIATVERGGDRIDAVLLDDGRRIEADFFIDCSGFASLLLGGAMGSAFLDWSHWLPNDRAVAVPSTAIPAPPPYTRATAHGAGWQWRIPLQHRTGNGVVFASAHLDEDAATDLLLANLDGTPLGDPRVLRFKAGRRAESWVGNCVALGLSAGFLEPLESTSIHLIQAGIARLLEMLPARDPDPAMVRRYNRLMGEEFDRIRDFIILHFHATRRDDTPYWRHLRTMAIPDSLAGRIAEYRATGRVYRDGDELFTRTSWLAVLEGQGVRATGVDPLAMTLSLDEARARLDRIAQVTQAAADRMPTHADFIAAHCQAAS

SEQ ID NO: 82744 - protein, 505 aa, Rhodanobacter denitrificans
  misc_feature (1)..(505): tr|A0A368KEI6|A0A368KEI6_9GAMM Tryptophan 7-halogenase OS=Rhodanobacter denitrificans OX=666685 GN=DEO45_05725 PE=4 SV=1
MNDSRIRQVVIVGGGTAGWMAAALLAQALGTGVAIRLVESAEIGTVGVGEATIPQIRHINRFLGIDEDELLRFVHGTYKLGVQLNGFTRPGDSYLHAFGDLGLPLGLTPFHHYWLRAVQERGHADAQGLWAYSLNAAAAAENRFAPLETVPDNPLGGIRYAYHFDATRYAQYLRERIAPGAVQRIEGKVVDVRLRAGDGFIESLQLDNGEIVEGDFFVDCSGFRGLLIEGALNTGYENWQQWLPCDRALAVASAPGGPMRPYTQASARTAGWQWRIPLRHRVGNGHVYCSRFISDDEAAAQLLANLETEALGDPRPLRFVTGMRRLAWNRNCLALGLAAGFMEPLESTSIHLVQSGISRLLAMFPDRHCDSALVDEYNRQTRFEYEHVRDFLILHYKATERTDTPFWQQCGAMEIPPSLARRIELFRRTGMVFREGDELFAETGWVQVLLGQRIEPERHHPLADALTTPQLDGFLADIRTLVGRAKNTLPAHHAFVARAAGSPVT

SEQ ID NO: 82745 - protein, 508 aa, Glaciecola sp.
  misc_feature (1)..(508): tr|A0A2Z6UBZ8|A0A2Z6UBZ8_GLASK Tryptophan halogenase OS =Glaciecola sp. (strain KUL10) OX=2161813 GN=KUL10_1831 0 PE=4 SV=1
MSQAITKIAIVGGGTAGWLSAAIIAAHHKTNQTQGIQVCLVESSDIPTVGVGEGTWPTMKNTLKEIGIKEAEMFAHCKAVFKQGGKFVDWVHGNGDFYYHPFTVPLGYGRIDLAPYVEDIEQYAVESNFQHHVCEAGLAPRTISEAEYSGQCNYAYHIDAGAFGELLKNHCKQQLNVQHIVDTVEHVTLAADGSIASIELAKTTPIEADLYIDCTGFASMLLGGKLNVPFMKMDKYLFNDSALALQVPYEKADSPIASHTIATAQNAGWIWDIGLTHRRGTGHVYSSEFLSDDEAEQNLRKYLGKAADGLTPRKISFQSGHREKFWEKNCVAVGMAAGFVEPLEATAIMLVEISAKFVAENLPPTKAIMPTVAKRFNQQMRYRWTRIIDFLKLHYMLTKRPEPYWQAHTQEDSIPDSLKEDLAIWGYRGPTNSDFESAVELFPAASYQYVLYGMGFKPDFSQQAHLYQQQQQAQTIIQRNQKITQQMLQTLPSHREYIEKWLASAKTN

SEQ ID NO: 82746 - protein, 513 aa, Massilia lutea
  misc_feature (1)..(513): tr|A0A4P6L343|A0A4P6L343_9BURK Tryptophan 7-halogenase OS=Massilia lutea OX=321985 GN=EWM63_24895 PE=4 SV=1
MNQQIKHIVIVGGGAAGWITAGRIAARHARADSGITVTLVESPSIGPIGVGEGTWPTMRSTLMKMGISESDFMRECEATFKQGAKFARWVDGTSDDYYYHPLMLPQGFGQLDLVPYWQTACAGRSFSDTVCLQEQVCEHGLAPKMITTPEYASVANYAYHLDAGKFVTFLTRHCTATLGVEHVLGDVTAVRSASNGDIAAIVTTQQGEIAGDLFIDCTGFSSLLLGKHLEVPFVDRSDVLFIDKAIAAQVPYEREDAPIASHTISTGQAAGWIWDIGLVTRRGIGYVYSSRHTSDDEAEAALRAYIGPAGKSVGTRSIPIRSGHRQLFWKNNCVAVGLAAGFLEPLEASALVLVELSADMLAEQLPATRDTMDIVARRFNETFLYRWDRIIDFLKLHYILSKRTDNAFWTDNRDPETIPDSLKDLMRLWRYRPPGNCDFTSNNEVFPAASYQYVLYGMGFRTDPEFLRPSPSEGRAAQEQLSQNSVAVRRALKMLPAHRDLIARIHAYGLPTV

SEQ ID NO: 82747 - protein, 496 aa, Alteromonas macleodii
  misc_feature (1)..(496): tr|A0A126PZJ7|A0A126PZJ7_ALTMA Tryptophan halogenase OS =Alteromonas macleodii OX=28108 GN=AVL55_09625 PE=4 SV= 1
MNKAVRNVVIVGGGTAGWISAAVIKRLIGAGVNVTLVESEEIGTVGVGEATIPPIITLNNVMGIDEKEFLRETNATMKLAIKFENWRIEGESYFHTFGAPGKSYAFCQFHHYFKRAQELGLADSIWEYDLNYLACKAGKFAHIKSPDPIIEMPYAYHFDASLYARFLRKKCEAMGVSRKEGIITDVKQDVDSGFISGVTLKSGEYIGGDLFIDCSGFKGLLTQQTLNTGYEDWSHWLPCDRAVAMPSERHEHTHPYTRSIAHSAGWQWRIPLQHRNGNGLVYSSNYYTDDQALDILSRNLDTKPLADPKFIRFKTGRRRKQWNKNVVAVGLSSGFLEPLESTSIHLIQSAVVRLIHLFPHDGFKQHQINEYNKQSQLEYEQVRDFIILHYHVNERTDSHFWKDLREMDVPDSLTHKIELFRESGNLFREQNDLFLESSWLQVLMGQGVFQKDHHPLANALSEQKLQELMQNIKRIKNEPIGKIASHDEFLKQFCGS

SEQ ID NO: 82748 - protein, 506 aa, Alteromonas macleodii
  misc_feature (1)..(506): tr|A0A1E7DBL4|A0A1E7DBL4_ALTMA Tryptophan halogenase fa mily protein OS=Alteromonas macleodii OX=28108 GN=BFV94 _3018 PE=4 SV=1
MNKLPQEIVIVGGGTAGWMTACYLARTAELMANNSNVPIPAPKITLLESAVISTVGVGEGSTPYLRHFFEFLGINENEWMLRCSATYKMGISFERWTATVESKTTDPAFTESDSYFHPFFSSLDIPTADMYFSAVNEYRKGASHDINPSHYFTAAHMVEKGITPDAICSSANIDYAYHFDAGLLGDFLKEYALNKGVSHQIGTVANVECHEHTINSLKLDDGNTLSADFFIDCSGFRGLLGKQALSRRFTSYADTLFNDAAVAIASDATASPETALQTRSIALSHGWQWHIPLTSRTGNGYVYSSQFCTEAQAEEELRLALEPDQFHQQARHLKMTVGRLEEHWKGNCLCIGLSQGFIEPLEATALMLVQYALHHFIDCWQSNNPRREERYNSEINRMFDGIRDYIAAHYYLNTRDDSAYWVACREDLKVPDTLSYLLNAWDKGASFEQALNEVDNKLVYLRPSWYCIFAGMKRFSNNTTPLAHPNTLALRTMQQSVEGAHRVRQP

SEQ ID NO: 82749 - protein, 513 aa, Kaistia soli
  misc_feature (1)..(513): tr|A0A1M5NLF9|A0A1M5NLF9_9RHIZ Tryptophan halogenase OS =Kaistia soli DSM 19436 OX=1122133 GN=SAMN02745157_5028 PE=4 SV=1
MADQPHFVIVGGGTAGWLAAFILSDKARRLKLDARVTVVESSKIPTVGVGEGSTAALRVLMQYFNLNELEFFRETGATFKLGIRHKDWRRIGHSYDGPIDDPHQVVKAPAGAPSDYLNVFCVAAGRKLQDMHLFGPLLEKKKSPYALKDDGTLVPLGPFHHAFHFDQARVGKFLKARAGNVNTIDATLSGIERDPETGYIRAVVLDDGTRLAGDFFVDATGFRKRIIVQELAAPWISYANELPVNRALPFWLDIKPGEEIANYTLAWALEAGWMWQIPTQERYGCGYVYSDAFKTPDEAKLEVERVLGHPIEVRDDIRFQIGRLATPWLGNCLAVGLSSSFLEPLEATSIHGSVVQLLLFADNYLKHPSEMTEADRVDYNRRFGRQVDDFRTFINTHYVTERDDTPFWRNVREERLHEETRQRLALWRKEMPRREHFPSFLGGLPHVETQLHYPVLDGLGLLDPAVARAEMARDPKLRQFARETYESLVREYRAAATKALGHAEFLRYVNGIA

SEQ ID NO: 82750 - protein, 534 aa, Frankia canadensis
  misc_feature (1)..(534): tr|A0A2I2L273|A0A2I2L273_9ACTN Flavin-dependent tryptop han halogenase RebH OS=Frankia canadensis OX=1836972 GN =rebH PE=4 SV=1
MTANPDNRIQKVVILGGGTAGWMTAAYLGKALQGTVGITVLEAPTIPRIGVGEATVPNLQRSFFDFLGISEDDWMRECNASFKMAVRFVNWRTEGPAQATARELRNGGPDHFYHPFGLLPDYGQTPLSHFWFKRKYEGRTTEPFDYACFREPPVMDALKAPRWLDGRPATRYAWHFDAQLVADFLRRFATEKQGVHHVQDAMVRVEQDDHGYVTALRTKGGLTLEADLFVDCSGFRGLLINQALEEPFIDMGDHLLCDSAVATAVPHDDKRYGIEPYTSAIAMSSGWTWKIPMLGRFGTGYVYSSKFTDQESATQEFCNLWDLDPEQAKFNHIRFRVGRNRRAWVKNVVGIGLSSCFLEPLESTGIYFITAAIYQLAKHFPDRNFSQGLIDSFNHEIELMFDDTRDFIQAHFYYAPRNDTPFWQANKNLRLPENIQKKISAYRAGLPINSPITDESTYYGNFEAEFRNFWTNGSYYCIFSGLGLHPDAPLPALAHQPESVAGAEPLFETVKRQQQNLLETLPSAYDYLRQLHGA

SEQ ID NO: 82751 - protein, 500 aa, Novosphingobium sp.
  misc_feature (1)..(500): tr|A0A437NDE3|A0A437NDE3_9SPHN Tryptophan 7-halogenase OS=Novosphingobium sp. FSY-9 OX=1908524 GN=EOE18_02025 PE=4 SV=1
MEQRKIRKVVIVGGGSAGWMSAAMLAQALQRDCAITLVESEEIGTVGVGEATIPPIRLFNQTLGIDEREFMKRTQGSFKLGIEFVGWGREDSRYFHPFGPYGRDFDMVPLHQHWLKARSMGESAPLDDHSMAWALAKAGKFAHPAPDPRSVLSTFDYAYHFDAGLYARYLRELSEARGVQRVEGKIASVAQHGESGHVEAVVMEDGRRIEGELFIDCSGFRGLLIEGALQTGYEDWSHWLPCDRAVAMPCAKVGDPTPYTRSTAREAGWQWRIPLQHRTGNGYVYCSQFMEDGRAADLLSQRLDGKALGDPRPLRFTAGRRKLHWNKNVIAVGLSSGFLEPLESTSIHLIQANISKIIALFPDLDFDPATRDEFNRVAHGEMERIRDFIILHYKLTQRQDSELWRYVAAMDVPDTLKLKIEHFRRYGRLIARDLDLFAAPSWLAVHIGQGNIPEALDPLLEHRGMDAREWLCKLRGAMAAEAARMPGHGAFLAQHCPAGA

SEQ ID NO: 82752 - protein, 507 aa, Lysobacter silvestris
  misc_feature (1)..(507): tr|A0A2K1Q122|A0A2K1Q122_9GAMM Tryptophan halogenase OS =Lysobacter silvestris OX=1645665 GN=Lysil_0360 PE=4 SV =1
MTASDQRIRNVVVVGGGSAGWTAAAALVTYLDTSVSVHLVESEEIGIIGVGESTVPFMKTFNGLVLGIDEIDFIRETQATFKLGIQFNDWGRIGDSYVHGFGTIGRSLGPLPFHQYWLKLFLAGRAPDIGAYSLPTSAAPLDKFMISPPDAPSGSPLADIAYGYQFDAGLYARYLRNLAERRGVHRSEGKIVDVVQRGEDGFIEAIVMENGERVEGELFIDCSGFRGLLIEQTLKAGYEDWSEWLPCDRAMVAPSASAGPLTPYTRVSARPAGWQWRIPTQQRIGNGYVYSSNHISDDEAAATLLATLDGPALADPRPLRFTPGRRKEFWRRNVVAVGLAGGFMEPLESTAIYLAQSGVQRLLALFPDRDCDPLLSGRFNRESAFEHERVRDFLALHYNATERNDTPFWDHCRTMAIPDSLRETIAQFRIDGRYFRNGEDFFALPSWVQVMLGQRIIPGGYHPIVDKLPEERLEQFVDRARQEVARAVNAMPSHQAFINHYCKTIPA

SEQ ID NO: 82753 - protein, 557 aa, Alteromonas macleodii
  misc_feature (1)..(557): tr|A0A351UES6|A0A351UES6_ALTMA Tryptophan halogenase OS =Alteromonas macleodii OX=28108 GN=DCZ37_11420 PE=4 SV= 1
MNNSQNQCGLHRVVIVGGGTAGWLAAGVFGAKLSTKHSVTLVESPTVSSIGVGEGSWPSLRDTLLDIGISESEFLTLCQGAFKQGSSFVNWRKNAHSYYHPFTVPAAYNELDIHACWKALAPNTPYQDAFSLQAAMCVAGKAPKQIATPDYAHVLNYGYHFDATKLADLLKQHCVDKLNVDYVSGHIGSIKSSSDGYIEKLITECGKEIVGDLFIDCSGSSGLLIDKHFNVPWIPVKRTMLNDRAVALQVPYSDTDTEIKSTTVATAQTCGWTWDIALQHRRGVGLVYCSQFTNEEQAKQVLIDYVRERYPSAQDAELSFRTLSFEPGYRSQFWVKNCLSLGMSSGFVEPLEASAIAMVELGLRMLCEAFPHNKKHMEIVSKRYNSRFAYRWQRVIDFLKLHYVLSDREEPYWIAQRDKASIPDSLAELLELWKYQSPSRLDLIENEEIFPSASYQYVLYGMGYSTSAPLLRLSEANKLKALHIRETLQQTKNAYLQGLPSNRVLLNDIAKRYSNEKQHVPSLAQREKNEHASASSCNDVKNTSDKKDTSYDRIGFR

SEQ ID NO: 82754 - protein, 500 aa, Novosphingobium sp.
  misc_feature (1)..(500): tr|A0A437NC70|A0A437NC70_9SPHN Tryptophan 7-halogenase OS=Novosphingobium sp. FSY-9 OX=1908524 GN=EOE18_00145 PE=4 SV=1
MPRQRIVIVGGGTAGWMTANLLAQRWPHMAIALVEAPEIGIIGVGEGSTPTLKRFFEEMGIAEEAWMPRCKATYKTNIRFAGWSPATGIADYSHPFLTQIDLHTSEAFVLNCRNRRLGLDVPTAPEAFFLNGVLAAQGKAPLAPEHFPFAIEYGYHFDSGLLGEFLRDHATARGVVHRQAKVVDAQLAGDGSIAHVLTDQGEAIAGDLFIDCSGFSALLMRGKLGIGFKSFRDNLFNNAAVVLPTPAQDEPAPETVSTALSHGWCWSIPLTSRVGNGYVFSSDYLSPDAAEVELRAHLGMLDSAQEARHLRFNTGQLAQHWARNVLAVGLSQGFIEPLEATALHLVLGTVDMFMEEYQRGGFTNLYADAFNQKISERIERVRDYIVAHYKLNMREDSAYWQDNRENEHLSEALRHILDVWFKRGDLVAELERQNSLSHFGAESWHCLLAGYGAFPAVKQAGSLDVDFYAARGIGSFLDRCSLNFPPQSRVLAGWAGGGAV

SEQ ID NO: 82755 - protein, 508 aa, Asticcacaulis benevestitus
  misc_feature (1)..(508): tr|V4PHX1|V4PHX1_9CAUL Uncharacterized protein OS=Astic cacaulis benevestitus DSM 16100 = ATCC BAA-896 OX=11210 22 GN=ABENE_17060 PE=4 SV=1
MPLPQPKRPIKTIAVIGGGTAGWMSAAAISKSFGRNIQVQLVESDEIGLIGVGEATVPHISAFNRLLNIDEAEFVRETQGTFKLGIQFKDWGKIGDSYIHGFGTIGRDLGLMPFHQYWLKARAAGKAKDIGLYSLNTVAAPLGKFMAPPRDAPAHSPLAEIAYAYHFDATLYARFLRKQAEAQGVTRTEGKVVAVTQNSESGFVESVTLESGAAIAADLFIDCTGFRALLIEDTLQAGFEDWTHWLPCDRALAVPCEKVEAPTPYTRSTARKAGWQWRIPLQHRTGNGHVYSSQFMSDSEAADVLLQSLDGRPLADPKAIRFTTGKRRKLWDKNVVAVGLAGGFIEPLESTAIFLIQSGISRLMSLFPHADFEPVLQETYNAQMQFEYERIRDFIILHYHATERSDSEFWNYVRTMPVPSSLKAYMDLFTADGQFFREGTELFGLTSWVQVMLGQGLSPRSYHPAVDWVKDDDMLSLIDHVEKVVASNVALMPRHEDFIARHCAARSV

SEQ ID NO: 82756 - protein, 499 aa, Asticcacaulis biprosthecum
  misc_feature (1)..(499): tr|F4QI87|F4QI87_9CAUL Tryptophan halogenase PrnA OS=As ticcacaulis biprosthecum C19 OX=715226 GN=ABI_01550 PE= 4 SV=1
MVRKVVVVGGGTAGWMAAAALGKALGTRLDITLIESDDIGTVGVGEATIPSIQEFNQMLGIDENEFLRAVNGTFKLGIRFIDWKAPGSEYFHPFGVYGIDMGVNFTHHWMRYRKAGGNADFGLFNPQTMAARSHRFGRMAEINPKAPRVNYAFHFDATLYARFLRRFCEGLGVVRHEGKITHVNQDPNSGDITSVALEDGRVMAGDLFIDCSGFRGLLIEQTLKSGYEDWSKWLPCNRAAAVPCDKVGPATPYTTSTAREAGWQWRIPLQHRTGNGYVFSSDYISEDDASTLLLQRLDGKAQAEPRIIRFLTGHRKQMWNRNVIAMGLASGFLEPLESTSIFLVQEAIVTLIKYFPKDGILPSQRACFNRDLLAAYDNVKDFLIAHYKVTTRDDTPFWAYVKNMDIPESLKFRLEAFAQNNQCLVQGDELFKEASWFAVLVGQGMEPDSYNPLADVMAEDEFRWRIDRLREGTAGLASTMPSHESYIARTCPSLQRVAV

SEQ ID NO: 82757 - protein, 503 aa, Sphingomonas sp.
  misc_feature (1)..(503): tr|A0A4R2XMB3|A0A4R2XMB3_9SPHN Tryptophan halogenase OS =Sphingomonas sp. JUb134 OX=2485112 GN=EDF69_1285 PE=4 SV=1
MTAKPLDRVVIVGGGAAGWMTAAVLARLTAAGTSVTLVESEEIGTVGVGEATIPPLLDFNRFLGIDEDAFVRATGATFKLGIEFVDWARRGERYLHPFGTFGRDVQGIKFHQLWLRQARVDPPIADTGSLHDYCLASVAARMARFTRPSGDPAAVLSSLRYAFHFDAALYARFLRGIAERGGVVRVEGRVAQIDLAPEDGFIRAVQLADGRRIEGDLFVDCSGFRSLLLGEALGVPFTSWQRWLPCDRALAVPSASAGPLLPYTRATAERAGWRWRIPLQHRTGNGHVYASAFASDAEAADTLLQGLDGAPAAEPRPLRFVAGMRERLWERNCIAIGLAGGFLEPLESTSIHLIQSGITRLISLFPDNGHAPVEREAYNRLARAEYEQVRDFLILHYHATERDDSDFWRHCRTTPPPDSLAYKLELWRARGRVLPEAGSLFTEDSWIAVLMGQAGAPASVDPLVATLPVQETRRFLHHLRTVIGQTAAAMPAHDQFIARHCAA

SEQ ID NO: 82758 - protein, 517 aa, Pseudoalteromonas sp.
  misc_feature (1)..(517): tr|A0A1Y5K1H7|A0A1Y5K1H7_9GAMM Uncharacterized protein OS=Pseudoalteromonas sp. A601 OX=1967839 GN=B5G52_09525 PE=4 SV=1
MATSTINHIVIIGGGSAGWLSAGLIAAQPHLTHNAKVTLIESPNVPTLGVGEGTWPTMRQTLKTIGISETQFIRQCDASFKQGSRFDGWCHDAKNGESNEYYYHPFSLPVAYQSLNIAPYWFAQHNAVSFSHAVSSQTYFCDQNKAPKTHMHADYQTHANYGYHLDAGKFAQLLQQHCVDKLRVNHIISHVDEVISDEDDYISAVQTSDHGLITGDLFIDCSGHHGRLIDKYYKVPLQTQDHILFNDSAVAVQVPYADDEQEILSYTKATAQDTGWVWDIGLQSRRGVGMVYSSKFESTQGAKDKLINYLNTTQSDLDLSKLTIRELKFTPGYREQFWHKNCIAIGMSAGFIEPLEASALVMVELSLNTLLANFPTNRKAMPQLAKRFDQQTHYRWQRIIEFLKLHYVLSTRTSEYWQAHKAPRSIPSALIDNLALWRYQSPWLNDFDRAQEVFSAASYQYILYGMKQLPQFPQMKMPAAIIEHFTNSQQDAKQGLAKLPTNRQLLNHIKKFGLQPI

SEQ ID NO: 82759 - protein, 510 aa, Hyphomonas sp.
  misc_feature (1)..(510): tr|A0A1Z9XTE8|A0A1Z9XTE8_9RHOB Uncharacterized protein OS=Hyphomonas sp. TMED17 OX=1986605 GN=CBB77_10100 PE=4 SV=1
  misc_feature (374)..(374): Xaa can be any naturally occurring amino acid
  misc_feature (449)..(449): Xaa can be any naturally occurring amino acid
  misc_feature (454)..(454): Xaa can be any naturally occurring amino acid
MCGAIKHIVIVGGGTAGWITAGVLAASHSDRSPAGLRISLIESPDIPTIGVGEGTWPTIRNTLARIGISEAEFLHTCNASFKQGSRFNRWVNGEAGDSYVHPFELPISSDGADALNAWKALAPDKPFAEAVCVQSAPGQEGLAPRQRTMPDYNGAMNYAYHLDAGKLVELLRNHAVSKLGVERITDNVVEIVGAQDSDIEAVRCEARGLIAGDLFIDCTGRQSLLLGGHYDVGFVDKSNILFNNRAVVTHVPVAADSTIASETVSTAHEAGWIWDIGLPTRRGVGCVYASDYMDDERAEATLRAYLGDAEHTPPRRISFKSGHREIFWHQNCVAVGLSAGFLEPLEASAIVLLELSAAMIADNMPVSRAAMSVXARKFNQLFLYRWGRIIDFLKLHYVLSQRDEPYWQDNRRAESIPERLQDYLEVWKTRPPNTYDFEQAREVFPVASXLFVTXGMGMTPATHPTLDARAANALKDDMQKMLKKRRKFTEALPTNRALLTGSGASLKLAI

SEQ ID NO: 82760 - protein, 497 aa, Chromatiales bacterium
  misc_feature (1)..(497): tr|A0A520X1K8|A0A520X1K8_9GAMM Tryptophan 7-halogenase OS=Chromatiales bacterium OX=2026725 GN=EX272_11370 PE= 4 SV=1
MQDTIKKLVIVGGGTAGWMTAALLKRVLAHAVDIELVESSDIGIIGVGEATIPPIELFNKVLGLDEAEFLRETKASIKLAIRFENWRAQGERYYHTFGAPGRSQAFCHFHHFWTRAQQLGDTSSLWDYDLNYLCAEAGKFAKLEVNDPVWEMQYAYHFDASLYGQYLRKYAEKLGVRRTEGMIEDVALDAQSGFVETLTLKDGRQISGDFFVDCSGSRGLLIGQALKTGYEDWGHWLLCDRAIAVPSERFEKTLPFTRSIAHPGGWQWRIPLQHRNGNGLVYSSKQYSDDEAADVLLGNLESEALSDPKVIPFRTGRTKKQWHKNVVAVGLSSGFLEPLESTSIHLIQSAIVRLITFFPHAGVRDELVDEYNRQSRLEFEYIRDFIILHYKLTERDDSEFWRYTKSMDVPERITEKIELFRSTGALTKENFDIFLESSWLQVMLGQGIMPGDYHPLADTLSEKQLRDKLTNTRQTKMQPMDQIPAHDEFLEMFTRSR

SEQ ID NO: 82761 - protein, 507 aa, Asticcacaulis sp.
  misc_feature (1)..(507): tr|V4PZE2|V4PZE2_9CAUL Tryptophan halogenase OS=Asticca caulis sp. AC460 OX=1282360 GN=ABAC460_02875 PE=4 SV=1
MHANPMIKSITIVGGGTAGWMTAALLSKLLLGRFDITLVESEEIGTIGVGEATIPAIKVFNQFLDLNETEFIQATQGTFKLGIEFVNWRDKGHSYIHGFGKIGSDLMWLHTHQFWLKMHEKGEVKDFDHYALNTLACRMNRFRPRQPNEPPPMADFDYAYHFDASLYARFLRKQAEGRGVKRIEGRITRVELRPNDGYIDHVVLQSGQTVGGDLFIDCSGMRGLLIGDALGVGYEDWSHWLLNDRAWAVPCENAPVLTPYTRSTAHGSGWQWRIPLQHRTGNGHVFSSSQMGDDEAAAILLKNLDGKALADPRMVKFRPGKRHRAFEKNCVAIGLAGGFLEPLESTSIHLIQTGILRLLALFPGQSFDPRDIAEYNAQTDFEYRDVRDFIIAHYKVTDREDTPYWAYLKHMEIPESLADRLDLCRSSARFFKHSAAELFHEESWVQVLLGQGLRPRYDPMVDMIPEDDIRAHLKDIEEVIAEYAAKLPTHGEYIERYCKAPPLMEMA

SEQ ID NO: 82762 - protein, 505 aa, Maricaulis maris
  misc_feature (1)..(505): tr|A0A495CXT9|A0A495CXT9_9RHOB Tryptophan halogenase OS =Maricaulis maris OX=74318 GN=C7435_3089 PE=4 SV=1
MSSQSFEQESGLPRIAIIGGGSAGWMAAAAIIKATKGAASVTLVESEQIGVVGVGEATIPPIKLFNQMLGIDENEFVRETQGSFKLGIEFVDWSRRGQRYFHPFGTHGRDFDSLPLYQYWLRERRRGDETSLDAYSMAWVVARENRFSPPARDPRLVQSTFDYAYHFDTILYGQFLRRYSEARGVDREEGRVVETRLSETGDVAAVVMEDGRAIEADFFIDCTGFFGLLIEQALKTGYEDWTHWLPCDRAMAVPSETAGDFTPYTRSTAREAGWQWRIPLQQRTGNGHVYASQFITDDEASDTLLANLDGKPLADPRPLRFTTGRRRKFWNRNVVALGLSAGFMEPLESTSLHLIQTGINRLLALFPGTGDNRLEAAEFNRLTGEEYERIRDFLILHYHATTRDDAPLWRYTANMDIPDSLAWRMEHFRATGRLVSPGTELFLNPSWMAVYAGQEIEPAGLDPLVVGRQVDGVERLAGLRRVMAEAVAPVPDHRAYIERFCKADA

SEQ ID NO: 82763 - protein, 554 aa, Nostoc sp.
  misc_feature (1)..(554): tr|A0A235HXS6|A0A235HXS6_9NOSO Tryptophan halogenase OS =Nostoc sp. 'Peltigera membranacea cyanobiont' 210A OX= 2014529 GN=CDG76_32755 PE=4 SV=1
MSQHVQNVVIVGGGSAGWMTAAYLSKALKKNIQITLVESSNITKIGVGEATFSSIKSFFDFLGLQEYEWMPKCNATYKMGIKFVDWNSDRRHFYHPFERFDFIDGFSISEWWLKLKSANEPFDYSCFMAPTLCDHQRSPRYLNGKIFDDRVEHLFSEKHFSEKNLITLADAEGQYPYAYHFDANLIARFLKDYSRQRGVKQIVDDVVNVNLTEDGSIDSLNTKEHGILSGDLFIDCTGFRGLLINQALGEPFISYSESLLCDRAIAMQIPTDIQKNGINPYTTATALSSGWVWNIPLYGRNGTGYVYSSAFISADEAEQEFRQHLGNVADNCKASHIQMRIGRNRNSWVKNCVAIGLSSGFVEPLESTGIFFIQHGIEELVNHFPGKSFNEELIRNYNRAIANCLDGVRDFLVLHYRASDRADTKFWQATKQEIKVPAELQEKLKLWRSRLPNKKNINPYFHGFETYSYSVMLLGLNHKPEGSLPLLEHLDDEKALAKFKTIKEKANYLSTNLPSQYEYLTYVIKSQEQSEYLSDNHFPTSSVNDSAYQIPVPI

SEQ ID NO: 82764 - protein, 502 aa, Shewanella psychrophila
  misc_feature (1)..(502): tr|A0A1S6HPS9|A0A1S6HPS9_9GAMM Tryptophan halogenase OS =Shewanella psychrophila OX=225848 GN=Sps_02369 PE=4 SV =1
MAKEAIKNITIVGGGSSGWMTAMYLQRLYNQSGGTVKIRLVESKDVGTIGVGEATVHSIRFFFAAMGLDENELLRETNATLKNGIMFRNWMKPKDGQTHEYFHPFEQQRPAGPLDNATAWVQSPKHVSYAQATSISSELISNANSPKTATSPQYQGIVPYGYHLDAILMGKYLRKKACGAGVEHIEANVKHVKTDGETITSIITNKGEFTSDIFIDCTGFKGLLIESLRDNNWQSFEQELPCNKAVAIQRKPLLGQSPKPYTLATALTNGWAWEIDLSNRQGTGYVYDGNRLTRKEAEAELLEHLGDSQEILKTVHLDMKIGCRKEFWIGNCISIGLSGGFIEPLESTGLHIVNVGARLLATHLSSNAPTQPVRDSYNKTLNGIYQDLRQFIILHYCLSDRDDTEFWKQAAKTAAYAKGLPEMLELWRNKTCEFMDLAGGYGTIFNDENYRFILYGMDHTPDLSQPASEYEIQNILQRLAQQQEQADKSAMLHSEFLKLVSK

SEQ ID NO: 82765 - protein, 500 aa, Asticcacaulis sp.
  misc_feature (1)..(500): tr|V4PRV4|V4PRV4_9CAUL Tryptophan halogenase OS=Asticca caulis sp. AC460 OX=1282360 GN=ABAC460_07385 PE=4 SV=1
MSTIRRIVILGGGTAGWMAAACIARNLGTQHHTIEVIESPEIGTVGVGEATIPMINLFNKILGVSPTDMVRETEATFKLGIEFVDWGGLGQSYIHPFGTYGADMGGISFIHYFLRQSQLTGTWTPEIYNLETTAARAGKFGVLPNNDPSRPSLNHAYHFDAALYADFLRRYSLKRGVVRHEATVTQVHQDTESGFVTALDLKDGGRVEGDFFIDCSGFRGVLIEQTLKAGYEDWSHWLPCNRAWAVPCERVEDPIPYTRSTAREAGWQWRIPLQHRTGNGYVFCSEFIDEQDAADKLMTRLDGKPLADPRKLSFVTGHRRRMWSKNVVALGLASGFLEPLESTSIHLVQSALAKLMAFFPKTGFDPHVEDHFNTVMCGEYIAVRDFLIAHYKVTEREDTPFWAYCKHMAIPDSLTQRLEMFGRSGAYIEPPYELFREASWFAVLSGQGIRPRGWHPVADMMTDAELAHHTGQIRDLVASTAARLPPHETFIRHCQQRQAS

SEQ ID NO: 82766 - protein, 448 aa, Asticcacaulis sp.
  misc_feature (1)..(448): tr|V4RDD0|V4RDD0_9CAUL Tryptophan halogenase OS=Asticca caulis sp. AC460 OX=1282360 GN=ABAC460_12950 PE=4 SV=1
MSDADTDVFYGNLTSPAAYDFNLSLGVSEPDLILDSDTTFSYGTHFTNWGARRLDWVQAFHLPLPVLEGATFQHYLTQQGQAALEPFLVSAVAARRGVFAHPPEDPGHPLSRAEYGYQFDASAYGSLFERAATRSGVRKIAADISAIDAADGVINAIHLSDGQTLTADLWIDATGAQATLLSHIAGERHSARRLHAYLTRTETETPGQAVTTISGMPYGWQAKTALRSSNLMLTITSPDSDTEVQAAFATGPERSAIVDIGWRDMAWVGNCVGIGHAACVAEPVTIAPMLLLQRDIERLLPLLPVSDDLSVERREYNRQALADYVHADLFTRALFETQPVDGAPYWGAALTPADERLIRKIEQFESRGLHVAYDLEPFGPEDWLILHYGMGRRPLRYDRIVDGADNARIRQYLEALRNNIDSAIRSMPPHGAYLNGLTKYLRQQKGEA

SEQ ID NO: 82767 - protein, 456 aa, Zymomonas sp.
  misc_feature (1)..(456): tr|A0A519E5W9|A0A519E5W9_9SPHN Tryptophan 7-halogenase (Fragment) OS=Zymomonas sp. OX=2068624 GN=EOP94_03015 P E=4 SV=1
FPTIRSTLQFLGIDEAQFIREASATFKQGIRFADWLHTPTVGRHEHFFHPFEAPFYAEEANLVAYWLLQDPKTRPPFAQAVTIQSRVAEAQRAPKRPHEEEFSGPLSYAYHFDAARLAEVLKKRAAELGVAHLQGRVEHVEMTAEGAVDHVVTDAHGRLDADLYVDCSGFRAEIIGQAMKAPFKSAKRQLFTDRAVTCKISYDAPNRPIESYTIATAHEAGWIWDIGLSGARGVGCVYSSAYIDDAGAERILRDYVGATDADFSPRQIAFEAGYREKQWVKNCVAVGLSAGFLEPLEATGLVLIEAAVGMIAELFPRSGPIDAPAKRFNALMTARYDNIINFLKLHYCLSRRTEPFWRDNVEQASIPDALLDLLEQWKYRPPARFDFILDLESFAFFNYQYILYGMDFRTDLSAGRESLTNADGADKIFAKIQKFGERATQDLPTHRDLIRQINGN

SEQ ID NO: 82768 - protein, 501 aa, Asticcacaulis biprosthecum
  misc_feature (1)..(501): tr|F4QM55|F4QM55_9CAUL Tryptophan halogenase OS=Asticca caulis biprosthecum C19 OX=715226 GN=ABI_20680 PE=4 SV= 1
MTGRVEHIVIVGGGSAGWMAAAGLSRYMRNMPVRITVVESDEIGTIGVGEASVPLLAVFNSLVGLHERDFIQATQGTFKLGIEFAGWNRPGESYLHPFSPYGQSLGVCDFHQYWLKARAAGYAAPLEDFNLNAALARDSRFNLRSSDGQSPMSILSYAYHFDAGLYARNLRTLAQSYGVNRVEGRIVEVEQQPETGFITGVKLASGQRVEGDFFVDCSGFRALLIEGALEAGFNDWTGLLPCDSAVAVPSARTEPLLPFTRATAREAGWQWRIPLQHRTGNGYVYSSRHISDDAAAATLMANLDGRPLGDPRIIRFRTGRRSKAWVKNCVAVGLSAGFLEPLESTSIHLIQKGVMKLLTFMPSASWSHALADEFNRQTAFDYEEVRDFLVLHYKANGREGQPFWDALRNNPVSDTLQARIDLFRDSGRVFIDDRELFKLPSWVTVLTKQGIFPRDYDPMAEAVSTAEITGRLEQIRMILNRTAQAQPTHADFIARNCKTFS

SEQ ID NO: 82769 - protein, 535 aa, Asticcacaulis biprosthecum
  misc_feature (1)..(535): tr|F4QJM7|F4QJM7_9CAUL Tryptophan halogenase PrnA OS=As ticcacaulis biprosthecum C19 OX=715226 GN=ABI_04100 PE= 4 SV=1
METKASDASDRSVLIVGGGAAGWLTACYLATHLGQERQGGPRITLLESPDIGIIGVGEGTFPTTRNILRTLGIEEAEFMRESQAAFKQGIRFDDWEVTPRNDVHSHYFHPFEAPYLGKEELELLPYWLIQDPATRPPYAEAVTFQKRIADARLAPKRLYQGHYSGPLNYAYHFDAARFANVLARRAKALGVHHLQGLLGEVVLDDTGAISHAISPDHGRLSADLYVDCTGFRSELLGKALNVPFRPVSGTLFADRAVVCQVSYPNANAPLESYTIATAHEAGWTWDIGLANRRGIGYVHSSHHTSESRAEEVLAAYVARSGGKTAAVEMRHISFDAGYRTQHWVKNCVAVGLSAGFLEPLESTGMVLIEAAVNKIAEFFPHSGPIDASAGLFNDLMVKRYDAIINFIKLHYCLSKREEPFWRDNTAAESIPERLRMLLDIWQHRPPSRYDFVIDHETFAHFNYQYILYGMNFHTDYQAAGRALPMKDKAEQIFSRIHSFGEQAAKDLSAHRATIKAIYDNGFVERAPSPAPALAR

SEQ ID NO: 82770 - protein, 500 aa, Asticcacaulis benevestitus
  misc_feature (1)..(500): tr|V4PFF2|V4PFF2_9CAUL Uncharacterized protein OS=Astic cacaulis benevestitus DSM 16100 = ATCC BAA-896 OX=11210 22 GN=ABENE_07605 PE=4 SV=1
MHNPSTSTQASYAQQRIVIVGGGTAGWMSAALISKVTGGALGSLTLVESEQIGTIGVGEATIPYILDFNRLLGIDEADFMRETKATFKLGIEFRDWTRLDHSYIHPFGTIGAPIGRTAFQHHLTRRRLAGHNETFEDYSLTCMAARHNRFAHPKRDGSVLSTLGYAYHFDAGLYAAYLRRFAEARGVVRSEGKIKHIEQNPDTGFITRLELENGASIEGDLFIDCSGLSALLIEKTLKSGFIDWSAFLPCDSAAFVPSARSEPFTPYTRSTARSAGWQWRIPLAHRTGNGHVFASPFMSDDEAAGTLLANLDGEALAEPRFVRFKTGRRKTFWNKNVIAIGLSGGFLEPLESTSIHLIHSGLIKLLDLWPDTHFNPLTAEQYNRAVAAEYDAIRDFLILHYKATERDDSAFWRYCRTMEIPDSLTYKLDQFRATSRIVLTRGDLFQASSWLAVMLGQNIIPTDYDPMARLVSEAVADQHFNTMRDTIRGAVLEIPPYTPA

SEQ ID NO: 82771 - protein, 517 aa, Asticcacaulis benevestitus
  misc_feature (1)..(517): tr|V4PPS8|V4PPS8_9CAUL Uncharacterized protein OS=Astic cacaulis benevestitus DSM 16100 = ATCC BAA-896 OX=11210 22 GN=ABENE_12950 PE=4 SV=1
MTANTVIWKAMEMLMPAAPIKKIVILGGGTAGWLSAAMMARVLGRTVDITLVESDEIGIVGVGEATIPPLVNLLVFLGINEDDLLKHVQGTFKLGIEFHDWYEKGHSYGHMFGAPGNPLGVLPFHQYWLRQHQAGKAGSLWDYSLNALAAQQNRFGRLRTIPNTPNMEGMNYALHFDASLLARYVRGHCEKQGVIRREGKVSGVNLRGTDGFIESLTLQSGEVISGDFFLDCSGFQGLLIEGALKSGYEAWTEFLPCDRAWAVPCKAAGPLRPITRTRAHTAGWQWRIPLQHRTGNGHVFSSAFMEADAARDILMNNLDGEALAEPRLISFVTGRRKASWVKNCVSLGLASGFLEPLESTSIHLVQSALQRLAHMFPDTGFNQPEIDEYNRKTKREYELIRDFLVLHYKATKRDDSPFWNHCRTMAVPDSLATKIDYFRQHGRVMVEGDDLFKEANWVQVLIGQGVMPESFSPLALTVPDDSLADYMAHVRQIYDTLLPKIPSHADYIAQYCQAPKG

SEQ ID NO: 82772 - protein, 499 aa, Asticcacaulis sp.
  misc_feature (1)..(499): tr|V4PL28|V4PL28_9CAUL Uncharacterized protein OS=Astic cacaulis sp. AC460 OX=1282360 GN=ABAC460_14260 PE=4 SV= 1
MVVGGGTAGWMCAAALSAAVPRTCEIVLIESEDIGTIGVGEATVPAIRFFNDQIGLDEAEMIRACEATFKLGIDFRGWGHKDNRYFHGFGDFGDHHEGISGYQIWRRLRDLGDDTPLDAYSLPTQMAYAGRFFPPNPDPRSPMHNYRYAFHFDASLYAAHLRKHCEARGVKRINARIGEVRLRPEDGFIDGVVLDDGRLETADFFIDCSGFRGLLIEGALKTGYTDWSHWLPVDRAWAVPTERTGSILPYTISQAHESGWQWRIPLQHRTGNGYVYSSRFVDDDAARDILTRNLDAPTLKDPFQVRFTTGHRNRFWSKNCVCVGLASGFIEPLESTSINFIQNVIVRFLEFYPTLNHAPVVEDQFNSLILSEYERVRDFIILHYRLNSRTDGELWRYCADMAIPDDLAARIALFRYGGRTIEHERDSFKSPSWISIFHGQGVVPQTYDHLADRIDADALKALAAKRRREIADIVPRLPAHDQFIAAHCASPAFLKRQPA

SEQ ID NO: 82773 - protein, 494 aa, Asticcacaulis sp.
  misc_feature (1)..(494): tr|V4PMC1|V4PMC1_9CAUL Tryptophan halogenase OS=Asticca caulis sp. AC460 OX=1282360 GN=ABAC460_12940 PE=4 SV=1
MAAAGMSKLLPANQVAFRVVESEAIGTVGVGEATIPHILYFNRLLGIDENEFVRKTNATFKTGIEFVNWGRLGQSYIHPFGPYGGPMDGIHFHHFWLRYAALGKAPPLERYSLMIQAARAGKFQRPDPSKVNSALSLIAYAFHFDASLYARLMREQAEARGVIRTEGRITNVVQDPQSGHVQSVVLETGEVIEGDLFIDCSGFRGLLIEQTLKAGYDDWSRYLPCDRAVARACERVADPIPYTRATAKSSGWQWRIPLQSRTGNGHVYSSAHISDDAALDSLNADLDGAPLTEPNFLRFTAGIRKSPWKKNVVSLGLASGFLEPLESTSIHLIQTAIARLMTNFPDKTFNQPDIDYYNRRTRLEYEQVRDFIILHYNATARDDSPFWNYCRTMAIPQTLEDRLAIFKENARQYRHDNELFNEVSWLAVMHGQNIEPKRYHPIADMISEEELVRRMAHFEDDVTRSLATMPGHQAFIDRNCRSAGGLYLSASQKA

SEQ ID NO: 82774 - protein, 380 aa, Zymomonas sp.
  misc_feature (1)..(380): tr|A0A519DWX5|A0A519DWX5_9SPHN Tryptophan 7-halogenase (Fragment) OS=Zymomonas sp. OX=2068624 GN=EOP94_04655 P E=4 SV=1
TFKLGIEFENWKEQGHRYFHSFGTTGRDHWSAGFQHFWMHGLTQGHQAPYDDYCIEVLAAYEGKFAHLPDKRINYAYQLDAGRYAAFLRKLAEADGCVRVEGKIASVEQSGESGDIAALVLEDGQRIEGDLFLDCTGFRALLIEGALKVGFDDWTHWLPCDAAIAVQTTSVRPAIPYTRAIAHDSGWQWRIPLQHRQGNGIVYCSRFLDQEAALQRLLDTIEGERLIEPNKLRFTTGVRRKQWHKNCIAVGLSGGFLEPLESTSIHLIQRAVLRLIRMLPLGQVSERDVAEFNDQQMTDFDQVRDFLILHYKATERRDSEFWRYCADMTIPDTLTQKIELFRETGRVFRKNEELFAENSWIQVMMGQGIMPASYHPVATK

SEQ ID NO: 82775 - protein, 503 aa, Ahniella affigens
  misc_feature (1)..(503): tr|A0A2P1PTC3|A0A2P1PTC3_9GAMM Tryptophan halogenase OS =Ahniella affigens OX=2021234 GN=C7S18_13195 PE=4 SV=1
MSESAIQRVVIVGGGTAGWMTAATLSKLFPRGLELILIESDEIGTVGVGEATIPQIRLFNATLGLDENDFIRKTQGSFKLGIEFVDWTRLGHRYMHAFGPVGGRDLGLVQFYQYWLKLKQQGKAGELGDYTFNTVASRLNRFMRPINKPNSPLSQIYYAFHFDASLYARYLRGLSEARGVQRLEGKITDTVLRPDDGFIQSVRLNDGREVTGDLFIDCSGFRGLLIEQALKTGYDDWSDWLPCNRALAVPCSSVSPFTPYTRSTARTAGWQWRIPLQHRIGNGYVYCSDYISDDEATATLLANLDGKALAEPRPLRFVTGMRKRFWNKNCVAIGLSSGFLEPLESTSIHFIQSSIAKLVAFFPTRAFSEVDIAEYNRQVQFEFERARDFILLHYKANERDDSPFWIRCREHGVPDTLAHKIDLFKSHGRIFRDQEELFTEVSWIQVLLGQNVIPKGWHPMVDLLDQRELEQFVGGIQGVMQRAAEVMPDHAAFIQQHCRAPDL

SEQ ID NO: 82776 - protein, 484 aa, Asticcacaulis benevestitus
  misc_feature (1)..(484): tr|V4PK46|V4PK46_9CAUL Uncharacterized protein OS=Astic cacaulis benevestitus DSM 16100 = ATCC BAA-896 OX=11210 22 GN=ABENE_17205 PE=4 SV=1
MTAAALSSLLAPKDVTITLIESDEIGIVGVGEATIPDILNFNQMLGIDEADFIRATNATFKLGIEFIDWGRQGDRYIHPFSGHGVDMNGFDFHQFWLHSQTAGNSHPIDDYSLCAVAARHGKFVHPDPNPRSIRSHIRYAYHFDASLYARYLRTYAEKRGVRRIEGKIKAVVQAPETGHITELKLEDGQSVAGEFFFDCSGFRSLLLGQTLGIGYVDWSHWLPCNTAQAVPSSHTGPLIPYTRATAKTSGWQWRIPTQTRTGNGHIYCRDFMSDDEAASVLLSGLDGEALASPRVIRFTTGHRQAFWDKNCIAIGLSAGFLEPLESTSIYLIQEGVSRFISLFPNASLPNVFRDEYNRHMRTEFEQVRDFIILHYAATERADSPFWNYCRNMSIPDTLKHKIALFREGGRAFRHEDELFSRPSWVAVFLGQNINPRAYDPVVANLPPADVMASVESMREAMIDAVRQMPTHEAYLAKYRIPRAG

SEQ ID NO: 82777 - protein, 501 aa, Maricaulis maris
  misc_feature (1)..(501): tr|A0A495D551|A0A495D551_9RHOB Tryptophan halogenase OS =Maricaulis maris OX=74318 GN=C7435_1880 PE=4 SV=1
MAESRSKRVVIAGGGTAGWIAAAALVRQLGPLLDITLVESDAIGTVGVGEATIPTHRTFHHLLGIDERAFMRETQASFKLGIAFENWAREGDRYFHSFGQLGKSTWMADFHHLWLEARAAGLAGELGAYCLELQAAEAEKFATGPNARINYAYHLDASRYAGFLRKIAEDQGVKRVEGRIADVETEGVRTDGARGDITALRLDDGTRIAGDFFIDCTGFRALLIGDALGTGFEDWSHWLPMDRAIALQTGSTGPARPYTRSIAHGAGWQWQIPLQHRVGNGLVYCSAHLDDGAAQDLLLENVSGAPLTEPRVIRFRTGRREQVWTRNCLALGLSSGFLEPLESTSIHLIQAGVMRLIQMFPFGDQCDALRDRYNALSRDELERIRDFIILHYKATQRDETAFWRQCRDMSIPDSLAARIELFRQSGMAYQDGADLFRVDSWLQVLLGQRIEPQSHHAMGRLMTYDQMRQALDAVKSNIAASVSKLPQHQDFLDQYCAAETA

SEQ ID NO: 82778 - protein, 518 aa, Ahniella affigens
  misc_feature (1)..(518): tr|A0A2P1PZ93|A0A2P1PZ93_9GAMM Tryptophan halogenase OS =Ahniella affigens OX=2021234 GN=C7S18_17415 PE=4 SV=1
MLRKILISGGGTAGWLCACYLARTLNVKAAGTVAIELIESPDIGILGVGEGTFPSIRGTLAHIGISEARFIAATGATFKQGIRFDHWVRAPGTAGADHYFHPFNVPSQRRMELLPYWLLGHAGDVPFASAVTMQKRVADAGRGPKRLRDPDYQGPMNYAYHFDASRFAALLAEVGRELGVTHRLGDITGVTRREDGAIATIQTREFGDLKADLYIDCTGLKGALLGEALGEPLHPLSDTLFVDRAVAIQIPYPAADTPIASYTISTAHAAGWTWDIGLQTRRGVGYVYSSRHCSDDDAEQVLRRYLGPAADALTARRLPFKTGYRKAQWRHNCVAVGLSAGFLEPLESTGIGLIEIASYLIAHLLPHDGDFARAARHFNAMMQARYERIVDFIKLHYCLSQRQDSAFWRDNQDTVGIPQSLQDRLAEWRHRPPHRLDFVTDLEMFMPASWQFILYGMEFKTTLPHPAQYPDAVAAAQEFQGLRQASNQALADLPPHRALIDSYLAGETSARAAFPARA

SEQ ID NO: 82779 - protein, 498 aa, Hyphomonas sp.
  misc_feature (1)..(498): tr|A0A1Z9XT22|A0A1Z9XT22_9RHOB Tryptophan halogenase OS =Hyphomonas sp. TMED17 OX=1986605 GN=CBB77_10085 PE=4 S V=1
MMAPRKIRNYVIAGGGTAGWMAAAMLAKVMGEEISVTLVESEEIGTVGVGEATIPPLLRYNTLIGVDEAEFMRRTRATFKLGIMFENWKDVDQDYFHSFGHTGRDHWTSGFHHFWMCGKERGMSDSFDDYCLEVVAAFQNRFAQLPNNGLNYAYHLDSSQFARFLREIAEENGAKRQEGKIVDVNLCPETGNIADLKLDSGQVIEGDFFIDCTGFRSLLMGQALHVGYDDWSHYLPCDRAIAVQTKSVGPARPYTRAIAHDAGWRWQIPLQHRTGNGLVYCSRYLDDDQALDRIMSSIDGEAITEPRPIRFQTGARRKQWEKNCMVLGLAGGFMEPLESTSIHLIQKSILRFMTMLPQDELNSVDMKEFNDQTFEDMLSIRDFLILHYYVTERRDSEFWRYVAQMDIPDTLRQKVDMFHKSGRIFRKNNELFAENSWIQVMMGQGIMPQSYHPIADKMSDDELSYFLGQIKRDVENTAARLPAHEDFVKSFCGIGDQP

SEQ ID NO: 82780 - protein, 481 aa, Maricaulis maris
  misc_feature (1)..(481): tr|A0A495D5R3|A0A495D5R3_9RHOB Tryptophan halogenase OS =Maricaulis maris OX=74318 GN=C7435_1828 PE=4 SV=1
MTGSAANPLSILIIGGGPDGWLTALAAHQAVAGLPGASVRIVHEEGPVCAPALSAPPDLRMLHGRLGLNDGDILARTGGAARLGRLFSGWRGDGQPDFIQPHGAIGANWGPLHFHQQVAAHGPGTDDYANYALAAQAIKQARFAPPSPNPRDFLSTLDFGFHLDCAAYTALLRDTARQRGIEACPGRVTAIETDETGLAGVTLDKSRYLKADLYIDATGPEMKLAAAINAACEDWSDDTPFLFEATRLETPRSPLTPATRIIADPAGWHMAIALPDATVTRRFTATADDGDTARLTPGRLRTPWSGNCLAIGGAACRPDPLADADLPLLARTLLRLPGLLPTGPDMRAEADVHNRAFTRESDAARDFSALVLGSQTRSEPVWRACRDAAPSDRLAHATALFKARGRLATREHDIYRPGDWVTAWLGLGVKPRRHDPLADRLDPAVASARLTQIRTLAEQTAAAMPDHQAALSRLKAGVPPA

SEQ ID NO: 82781 - protein, 507 aa, Pelomonas sp.
  misc_feature (1)..(507): tr|A0A397QRU5|A0A397QRU5_9BURK Tryptophan halogenase OS =Pelomonas sp. BT06 OX=2135721 GN=C8K28_4841 PE=4 SV=1
MTDSRIRKIVIVGGGTAGWMAAAPLAQRFAQAGQGACEIVLVESPDIGTIGVGEATLPPIRAYNRTLGLDGADFVKRTQGSFKLGIEFRDWGRVGHRFFHGFGDFGPAIENRSAWQHWLRLSRIADGLPGYEDWSTSTVMARQNRFTPPEGGAPSAANAYSFAYHFDAGLYAAYLREYAMARGAQRIEGLIVDVELRPEDGFVAAVKLADGRRVDGDLFIDCSGFRALLIGGAMQSPFEDWSVLLPCNSAQAVPSERVEPLTPYTTSTAKAAGWQWRIPLQHRTGNGHVYCSHFISDDEAAATLLAGLDSKALDTPRQLRFTTGRRQQGWVKNVVAIGLASGFLEPLESTSIQLIMDGVGRLIQFFPDRRFKPHLAAEFNHLMARQYESIRDFIVLHYKLTERTDSELWRYCAAMPIPDTLAHQIELFRSAGRVAIYDPDGFAEPSWVALFFGLGLQPESHDPFVDHIDPQALLQHFARLRQAIHQTVDGMPGHADYIARHVKAPPL

SEQ ID NO: 82782 - protein, 529 aa, Asticcacaulis benevestitus
  misc_feature (1)..(529): tr|V4Q130|V4Q130_9CAUL Uncharacterized protein OS=Astic cacaulis benevestitus DSM 16100 = ATCC BAA-896 OX=11210 22 GN=ABENE_05720 PE=4 SV=1
MIHSTARDVLIIGGGAAGWMTAAYLAKHLGTDRNGGPKITVMESAEIGIIGVGEGTFPTIRNILRALGIDEAEFMRESHATFKQGIRFDDWEVTPSDGRHSHYFHPFESPYWSREELNLVPYWLLQDKATRLPFAEAVTFQKKVADAKMAPKRIHQGNYQGPLNYAYHFDAHRFAGVLAKYAKGLGVHHLTGTLSDVPLTADGAIDCVVSKEHGEMRADLYVDCTGFRAELIGKALKAPFKPIDDILFTDRAITTQVPYTQPDGPLESYTISTAHEAGWTWDIALSNRRGIGYVYASSYTSDERAEEVLRAYVAKSGSEAGETRRISFEAGYRTQQWVKNCVAVGLSAGFLEPLESTGMVLIESAVNKIVEFFPYHGPIDASAAIFNDLMVRRYDTIIGFIKLHYALSKRTEPFWVDNARPDSIPQHLRDLLDIWKHRPPSRFDFVLDHESFAFFSYQYILYGMNFDTRFDAARGSLQQQALADQLFARIAHFGEQAQKDLVTHRHLINAVYKNGFVERPPASPLAMAK

SEQ ID NO: 82783 - protein, 528 aa, Asticcacaulis benevestitus
  misc_feature (1)..(528): tr|V4PQ38|V4PQ38_9CAUL Uncharacterized protein OS=Astic cacaulis benevestitus DSM 16100 = ATCC BAA-896 OX=11210 22 GN=ABENE_17110 PE=4 SV=1
MSAIKKIVIVGGGTAGWMSAAMLAKLSKTSLAIELVESEEIGTIGVGEATIPAIKKFNHLLELDETDFIRNTQATFKLGIEFTDWGRVGSSYVHGFGKIGQNLGWLRLHQYWLKLRGTGKVSDVFADYSINTAAAYANRFLRARPDMKASPLNDIAYAYHFDAGLYAQYLRRYAEKLGVKRTEGRIVRVNQRATDGFIEGVVLESGAVVDGDLFIDCSGMRALLIEQTLGAGFEDWSHWLPCDRAVAVPCSFERSDAAQATSPRLGPALRTPEAGEPFTGKSALLTPYTRSIARQAGWQWRIPLQHRIGNGHVFASRFMSDDEATAILMDHLDGEALADPRIIRFRTGKRRKVWDKNVVAVGLSSGFMEPLESTSIQLVQSVVMRLIAFFPDAGFAPAQRDSFNALVDEEYRDIRDFLITHYKITQRDDTPMWRQCRDMDIPEPLRERLALWQAAGRFFKKGEELFADESWIQVLIGQGLIPESYDPFVNLRSEDEIIKYLNDISRVIDKCVAAMPSHADYIEAGCKA

SEQ ID NO: 82784 - protein, 498 aa, Maricaulis maris
  misc_feature (1)..(498): tr|A0A495D3L1|A0A495D3L1_9RHOB Tryptophan halogenase OS =Maricaulis maris OX=74318 GN=C7435_1827 PE=4 SV=1
MSDNKVDHILIIGGGTAGWMCAAALSHRLPTGRVRIELVESEAIGTVGVGESTIPHIRHFNASLGIDEADFMARTHATYKLAIEFRDWGRIGDSYMHPFGAFGVPGAAVDFHHDWLRSGGETALGPIDDYSLPIAMARGQRFARPASDPRDLASTYAYAFQFDAAAYARYLRDFAEARGVIRTEGRVTDVQVDGETGHVRNVSLESGQRIEADLFIDCSGFRGLITEQALATGYEDWSHWLPCDRAIALPSAATGELPPYTRATALEAGWAWRIPLQHRVGNGHVYASAFMDDERAETLLRDQLEGEALAEPNRLRFLAGKRKRQWNRNCVAIGLSSGFLEPLESTSIHLIQSAIGHLLDLFPTGEWDPAEADEFNRVMDQEYARIRDFLILHYKATQRDDTEFWRHCREMDIPDSLAGKIEHFRERGLIADYEHGVFLKPSWQAVFLGQHITPQRLDPRAVNAAAGIRPLAAELTRIATAMPGHAEVLSAHARAAAD

SEQ ID NO: 82785 - protein, 538 aa, Burkholderia sp.
  misc_feature (1)..(538): tr|A0A3N8BCC8|A0A3N8BCC8_9BURK Tryptophan 7-halogenase OS=Burkholderia sp. Bp9126 OX=2184570 GN=DIE19_29850 PE =4 SV=1
MSNPIKNIVIVGGGTAGWMAASYLVRALQQQANITLVESAAIPRIGVGEATIPSLQKVFFDFLGIPEREWMPQVNGAFKAAIKFVNWRKSPDRSRDDHFYHLFGSVPNCDGVPLTHYWLRKREQGFQQPMEYACYPQPEALDGKLAPCLPDGTRQMSHAWHFDAHLVADFLQRWAIERGVNRVVDEVLEVRLDERGYISSLSTKAGRTLEADLFIDCSGMRGLLINQALKEPFIDMSDYLLCDSAVASAVPNADARVGIEPYTSAIAMNSGWTWKIPMLGRFGSGYVFSSKFTSRDQATADFLDLWGLPDNQPLNQIKFRVGRNGRAWVNNCVAIGLSSCFLEPLESTGIYFIYAALYQLVKHFPDTSFDPRLTDAFNAEIVHMFDDCRDFVQAHYFASSRDDTPFWLANRHDLRLSDAIKEKVQRYKAGLPLTTTSFDDSTYYETFDYEFKNFWLNGNYYCIFAGLGMLPDRSLPLLRHRPESIDKAEAMFARIRREAERLRTSLPTNYDYLRSLREGDAGRSRSQPGPTLAAPEIL

SEQ ID NO: 82786 - protein, 499 aa, Thalassomonas viridans
  misc_feature (1)..(499): tr|A0A0D8D361|A0A0D8D361_9GAMM Tryptophan halogenase OS =Thalassomonas viridans OX=137584 GN=SG34_26655 PE=4 SV =1
MQTVSNNNKKIQRVVIAGGGSAGWMTAASLSKLLGKSLDVTLIESEAIGRIGVGEATIPPLRTFNELLGINEQHFMKTVRGTFKLGIEFKNWGRLNDSYIHSFGDTGRICWAGEFQHFWLAGLKKGIADEFGAYCPEHAAAKAGKFLGSRDSKLDYAYHIDAGLYADYLKQLALGKGVKRLEGKIEDVGIDPQSGYITTLSLDNGAVVEGDLFIDCTGFAARLIEGALNTGFESYGHLIPCDTAVAVQTEKAGEPRPYTQAIAHEWGWQWRIPLQHRVGNGLVFCSRYTSEEEAIAALMNNLESPAITEPKVFRYKTGRRLKGWNKNCIAIGLASGFVEPVESTAIHLVMASILRLMKLFPHHEICQANIDEYNNQTREEMERIRDFIILHYKATERDDSPFWRYCKNMEVPSTLAHRMELFKNTARVCITQSELFRLDSWTQVMMGQGIMPENYHQIVDQMSEAELAKFLGGIKGQVDARVASMPSHQEFINHYCRAL

SEQ ID NO: 82787 - protein, 495 aa, Sphingomonas sp.
  misc_feature (1)..(495): tr|A0A4R2XWL3|A0A4R2XWL3_9SPHN Tryptophan halogenase OS =Sphingomonas sp. JUb134 OX=2485112 GN=EDF69_12031 PE=4 SV=1
MLDEPVRSVAVVGGGIVGWSAAVALKRRVPGVSVTIVPVAPPANALADRMPQTLPSAIGFHDDVGLREEDAVLRTGSGWRLGTLFEGWAEGQPAYVHAYGSYGQSFGTASFHHHWTRAAHAGSAAPYDAHSPAAMLARAGRMLPPNPEPGSPFADIQAGLVLDIGRYRAMLEAFARHLGVVVRAGEVVEVRLRGGDGFIERVALADGGSVEADLFVDASGPDSVVRGAIDTAWEDWRPWLACDRLMQASSAAATPSTLDDVVALSGGWRWQSALPGATSHGLCYASGFLRDEDAHRLLAEVSGVEPRPAIGFRQGTRPEPWLRNCVAIGDAAVVIEPLEWTNLHLAHSAIDRIISAMPGRACHPLEIADYNRQAVAEVTRVRDFVLCHYATARRPEPFWQPRAALPESLARTLRLFAERGRLPFFEEETFTRDSWLAILLGQGLIPRRIDPLIGATPAHQSDAAMAGYRAAIARALPQFPTAAQHHAAQHARITR

SEQ ID NO: 82788 - protein, 507 aa, Asticcacaulis sp.
  misc_feature (1)..(507): tr|V4RC07|V4RC07_9CAUL Tryptophan halogenase OS=Asticca caulis sp. AC460 OX=1282360 GN=ABAC460_14375 PE=4 SV=1
MPNPIENIVIVGGGTAGWMAAAMLAKLIVAKAPKPPTVTLIESDDISTVGVGEATIPAIKKYMSLLGMNEADFLRFTQGTFKLGIEFVDWDRLGESYIHGFGKIGQDLGWIRPHQYWLKMRNSGRVSPRFDDYAINPTACRNNRFNKRKGDDRKTPLNDIGYAYHFDAGLMAQYLRRIAEPLGVKRIEGTIIDVRLKAQNGHVESVALKDGQVIRGDFFMDCSGFRSLLIGGALGVGYESWSQWLPCDRALAVPCASVTPTTPYTRSTARTAGWQWRIPLQHRIGNGHVYSSQFTSDDEAARVLMDNLDGKALADPRPIRFETGKRKKLWEKNVLAVGLSGGFIEPLESTSIHLIQTTVLRLLNLFPDKDFDPATAAEYNAQADFEIERIRDFVIAHYKLTSRDDSEMWRYCRNMTVPDTLARKLDGFAASGRVFKENDELFAEDSWIQVLMGQGLMPRGYDPIVDNYPEETIVAYLNNISGVVAKCVAAMPTHDEFVAAYCPAQTP

SEQ ID NO: 82789 - protein, 522 aa, Pseudoalteromonas sp.
  misc_feature (1)..(522): tr|A0A1Y5JS70|A0A1Y5JS70_9GAMM Tryptophan halogenase OS =Pseudoalteromonas sp. A601 OX=1967839 GN=B5G52_17485 P E=4 SV=1
MNDILKSIVIVGGGTAGWLSAGIIAAYLKNHHSLNYHITLVESSDIATVGVGEGTWPTMRRTLQNMGVDEAQFINQCNVSFKQGAKFANWHSTKENDFYYHPLMMPQGFADNDLTAAWLNQDTDSAIPNNHFANFVCSQHALCEYNLAPKALTTPQYSGVANYAYHLDAGLFARFLKNHCINHLNVTHVVASVLSVNNNTNGDIHSLSLDNNTTLCGDLFIDCSGFKSLLLGENLNVGFKSCKDILFADSALAVHMPYEDEAQAISSHTISTAQTAGWIWDIGLQTRRGVGHVYSSRHISEQEAKEQLFNYLNILPAKRADFNVKKISFEPGHREKFWHKNCVAIGLSAGFLEPLEASALLLVEISANFIAEQLPANRQVMDITAARFNRTFSYRWQRIIDFLKLHYMLSERTDSLFWQQHCAEKSITQSLQDNLALWRTHIPNDNHFDYSVEVFPAASYQYVLYGMGFKTATTHYGNHSSTIKKAQNLATKNTKDTAELVSKLPDNRTLLKQIKQYGLQKL

SEQ ID NO: 82790 - protein, 514 aa, Oleiagrimonas soli
  misc_feature (1)..(514): tr|A0A099CZS0|A0A099CZS0_9GAMM Tryptophan halogenase OS =Oleiagrimonas soli OX=1543381 GN=LF63_0100720 PE=4 SV= 1
MSEAITRIVVVGGGSAGWLTAAVLAAEHGATGAVAITVIESPDVPTVGVGEGTWPTMRDTLRRIGVTETDFIRACDATFKQGSRFIGWVDGGDDDAYLHPFVLPQGFLDANLVAGWLQSDAPYADLVSFQPHLCAAGKAPKQFATPEYAAVANYAYHLDAGKFGIFLRTHCTERLGVRHLADHVLAVNAADNGDIASLQTRDHGALEGDLFIDCSGGRALLLGQHYGIESIGVRDVLFNDRAIAVQVPYASADAPIACQTISTAQRHGWTWDIGLSARRGVGLVYASEHSDDDAAEAALFDYIEASGGPSAAQLPTPARIAFAPGYRRVSWHRNCVAVGMAAGFVEPLEASSLALVELAATALADQLPATRADMDLIARRFNDAFAYRWQRVIDFLKLHYALSQRDDSDYWRRHRNDDTLPDSLRDLLQLWRTQPPSRHDLVRVEEVFPSASYHYILYGMGFRPQLRAGRASDHVRRAATHFREAADLARRMLPALPTHRELIDHVHAHGLPKI

SEQ ID NO: 82791 - protein, 460 aa, Asticcacaulis sp.
  misc_feature (1)..(460): tr|V4P069|V4P069_9CAUL Uncharacterized protein OS=Astic cacaulis sp. AC460 OX=1282360 GN=ABAC460_18980 PE=4 SV= 1
MIRNIVIVGGGTAGWMAAAMLSKSLAKSLAKPYTITLVESDDIGTVGVGEATIPPIQLFNRILGLDEAEFMRETQATYKLGIEFVDWRARGHSYVHPFGSFGGQDVHHEWLRWSHLTRDEDFGRFNAETLAMRARRVTPGLNYAFQFDAGLYAAYLRRYAEARGVVRIEGLIQSADQHPDSGFITAVRLKSGDSVPGDLFIDCSGFRGLLIQEVLKCGFVEWTQFLPCDRAVAVPCESPSGPITPYTRSTARDAGWQWRIPLQHRVGNGHVFCSGFTSETSAIDTLMTNLDGKPLKDPKVLRFVTGHRRKVWEKNVVAIGLASGFLEPLESTSIHLAQLGITRLLTLLPGNGFVPAMIERYNLEMLEDYEATRDFLIAHYHVTDRDDTPFWRHCRNMTIPDSLLNRLDIFRHTGHVHIRGGDLFRDASWFSVLVGQGLRPDRWHPAADRLSEAELRRRMA

SEQ ID NO: 82792 - protein, 501 aa, Asticcacaulis biprosthecum
  misc_feature (1)..(501): tr|F4QTE4|F4QTE4_9CAUL Tryptophan halogenase PrnA OS=As ticcacaulis biprosthecum C19 OX=715226 GN=ABI_44410 PE= 4 SV=1
MTSYIKKIVILGGGSAGWMTAAALSSQLDPKFVSITLVESDQIGTIGVGEATIPEIINFNRHLGIREDEFMKATHATFKLGIEFVDWGRKGDAYIHPFGGHGVDMNGYEFHQYWLRSRADGNTHPIDAYSMSAVASRQNRFDLPGTTNSPRGHIRYAYHFDATLYARFLRTYAEARGVRRVEGKVEEVLQAPESGDITALRLDTGETINGELFFDCTGFSALLIGKTLGVGYNDWSHWLPCDTAQAVPCAHAGPLLPYTRSTARTAGWQWRIPTQTRTGNGHIYSSAFMEDDEATAILLANLDGEAMASPRQIRFKAGHRHAFWKKNCVAIGLSAGFLEPLESTSIYLIQEGISRFIALFPDASLPEVVRKEYNQHMQTEFEQVRDFIILHYSATERDDTPFWNYCRNMSIPDSLNHKIELFRTAGRTYAYREELFGRPSWIAVFLGQGIMPRSFDPVIAMLPSDAVRDSLDSMRQAMHAEAGRMPTHAAFLQSYCPAVRA

SEQ ID NO: 82793 - protein, 492 aa, Asticcacaulis biprosthecum
  misc_feature (1)..(492): tr|F4QLP2|F4QLP2_9CAUL Tryptophan halogenase PrnA OS=As ticcacaulis biprosthecum C19 OX=715226 GN=ABI_19800 PE= 4 SV=1
MDGQQVRRVVIAGGGTAGWCAAAALSRMLGPLLDITLVESDDIGIVGVGEATIPTVRTFHNFLNINERDFLRATNGTFKLGIAFENWGRPGDRYMHSFGTVGRSTWVAPFHHVWMQAKSEGYGGKLGDYCLELQAAEAGKFQTSDQGGLNYAYHFDAGLYGQFLRKISEQSGVRRIEGKISRVEQHPESGFIHALHLESGEVVEGDLFIDCTGFRGLLIEETLKTGYEDWTHWLPMNRAVAVQTQAQGPIQPYTRAITHDAGWRWRIPLQNRVGNGLVYSSEYLSDDAARDQLLGSLDAPRLTEPRLIRFVTGRRLKTWNKNCLTLGLSSGFIEPLESTSIHLFQIGVTRLIQLFPFNGISDALANHFNKLASDELDMVRDFVILHYKATQRDDSPFWRDRRAMSIPDSLAHRIQVFEENAVAWQASGELFRIDSWLQVMLGQGLQPRGWHHLGRMIKRAQAEKFLSDMSSGIDRAVAGMATHESFLRQYLG

SEQ ID NO: 82794 - protein, 513 aa, Devosia soli
  misc_feature (1)..(513): tr|A0A0F5L4T5|A0A0F5L4T5_9RHIZ Uncharacterized protein OS=Devosia soli OX=361041 GN=VW35_14820 PE=4 SV=1
MGKPAHFVIVGGGTAGWIAAFIIQDEARRRGFDFKISVVESSKVPTVGVGEATTAAFRVLLKHFGIDEFEFFRKTDASFKLGIRHEDWRRKGFTYYGPIDDPHQVIQAPPGAPSDYLNVYAVAAGRAVQEMHMFQPLLEQKKAPYARKADGSLIPLGPFHYAFHFDQALVGKFFASKSKGVDKVDALVAGVERDGETGHITALVLDDNSRLEGDFFIDATGFRKQIIVKALEAPWKSYAHELPVNRALPFWIELKDGEELANYTRAWAQSSGWMWQIPTRQRYGCGYVYSDEFLTPEQAKDEIERVLGHEIEVRSDIRFQIGRLEKAWIGNCVAVGLSSSFLEPLESTSIHGTIVQMMLFAQRYMDEPGKITDNARDDYNARIGRQVDDFRTFVNTHYMTERDDTPFWREVRANRIHPETKERLARWQKRMPRQEDFPNYLGGLPHIETQLHYPVLNGLGLLDQNLARKEMEADPKLRRFAQQTFDSLVKEYRAAASQALGHREFLDIVQGIA

SEQ ID NO: 82795 - protein, 501 aa, Asticcacaulis biprosthecum
  misc_feature (1)..(501): tr|F4QJ76|F4QJ76_9CAUL Tryptophan halogenase PrnA OS=As ticcacaulis biprosthecum C19 OX=715226 GN=ABI_03390 PE= 4 SV=1
MSEHLIKNVVVLGGGTAGWLSAAMLAKTWGRSINLTVVESDDIGTVGVGEATIPPLTKLLMYLGIDENQFLSRVQGTFKLGIEFIDWYEKGQSYMHAFGAPGQALGILPFYQYWLVQKLRGHDINLWDYSLNTLAARQNRFARLKQVPNTSMEGIDYAFQFDAGLMAQFLRMGCENSGVKRIEGKVSGVNLRSEDGFIESLTLESGQVVEGEMFIDCSGFRGVLIEDALKAGYVNWQHWLPCDRAVAMPTTSVGPLKPYTQARAHGCGWQWRIPLQHRVGNGHVFCSQYLSDDDATKTLLDHVTGDALAEPRVLKFVTGRRKQSWVKNCLSLGLASGFMEPLESTSIHLVQSGMTRFLRLFPDRRFNPLEIAEYNRQTAHEYELIRDFLVLHYKSTTRNDTPFWDYCRTMEIPDTLAHKIEYFRQHGRLLIEDEDLFKETNWAQVLIGQGVMPGASAPLTGAIGEDDLSEFMTNLRIILDRTVSGMPDHAAFVKQNCPAVV

SEQ ID NO: 82796 - protein, 518 aa, Sphingomonas sp.
  misc_feature (1)..(518): tr|A0A4R2XRN9|A0A4R2XRN9_9SPHN Tryptophan halogenase OS =Sphingomonas sp. JUb134 OX=2485112 GN=EDF69_1284 PE=4 SV=1
MRKRLLIVGGGTAGWLTAGYLAKRLSTDLPGGAAITLVESPEIGILGVGEGTFPTIRRTLKTIGISEVDLVRKCGASFKQGAKFAHWRFTPGAPGPDHYTHPFQLAQADNGLDLLPYWLLGHGGEANWDEVCSPQKKAADAHRAPKLPSHPDYVAPLNYAFHFDAVALAGLLRDKAVENGVTHLMDRVTQVHVGEDGAIAGVDTEANGRLDADLYIDCTGFRAELIGKALGQPYRSRRDVLFCDSALAIQVPYRDEREPIVSYTLATAQEAGWMWDIGLDRRRGIGHVFSSAHTDDTRAEELLRAYVGDVGGDQEVRKIRFEAGYRETNWHKNCVAIGLSSGFFEPLEATGIVFSEVAAGLVANLFPWGGDHETSARQFNANMLQRYERARDFIKLHYCISERRDSEFWRDNVAASSIPDSLHDLLDRWRFRPPTEIDIDTNVDIFTEASWQYVLYGMGWKTDLSARAGAYRYVEDARRAFAEVERQAAFAIANLPSNRQLIDYARTRSFGPPQGVAR

SEQ ID NO: 82797 - protein, 487 aa, Asticcacaulis sp.
  misc_feature (1)..(487): tr|V4PPJ1|V4PPJ1_9CAUL Uncharacterized protein OS=Astic cacaulis sp. AC460 OX=1282360 GN=ABAC460_18995 PE=4 SV= 1
MCAAAFARRLDRDRYDITLIESADIGTVGVGEATLPHIKTFNDMLGIDEARFMRNCKATFKLGIEFVDWGRKGNRYIHPFGTFGEAWRGLGFHHYWTRARRLNQHPAPLNEYSYAVMAAQQGRFEFPNEDQKSIRSTYAYAYHFDAGLYGEFLREWATARGVKRIEGRIDHVTQTATGDIATLTLASGAIISGDLFVDCSGFRALLLDGALNSPWENWTHWLPCDRALAMPVTRSGDLASATRSTAQAAGWTWRIPLQHRTGTGYVFSSSHITETEAHDTLNTNAQGLADPRLLRFRAGRRPKAWTGNCVGIGLASGFLEPLESTSIYLIQVGALSLAELIPTTPGPTDPRLAAEFNRRSDIEYERIRDFLILHYHANGRTGEAFWDDVRHMAIPDSLAHKIELFRRRGHIPAYKDGLFSPDSWLSVLAGQDILPGNYDRLADALDPDQTARLMADLRERIAGQVAAMPAHGDFVSYFAEAREEMPA

SEQ ID NO: 82798 - protein, 500 aa, Asticcacaulis biprosthecum
  misc_feature (1)..(500): tr|F4QTE2|F4QTE2_9CAUL Tryptophan halogenase PrnA OS=As ticcacaulis biprosthecum C19 OX=715226 GN=ABI_44390 PE= 4 SV=1
MGGGTAGWMAASALAHEFKRLPISITLVESDEIGTVGVGEATLPHIRNFNTALNIDEVTFMKATEATFKLGIEFCNWGRIGDRYIHPFGDYGEKIDGIPFYQHWLRLQKLGLASRLDDYAFPTSIAEANRFRHPSTDPTRIESTYGYAYQFDATRYAAFLRQFAEARGVVRRQGKVVDTRLDAETGHVAALTLDSGEVVAADLYVDCSGFRGLLIEQALKTGYDDWSQWLPCNRALAVPCESRGTLTPFTRATALEAGWQWRIPLQHRTGNGYVYCSSFISDEDASRRLLGNLDAPALADPRQLYFTTGRRKKLWNRNVVAIGLAAGFLEPLESTSIHLIQEGISELLHIFPDKRFLQSDIDEYNRRMGVNFERVRDFLLLHYAATQRDDTEMWRHFRNLKLPDSLEEKIQIWLTRGQLIRYEFGVFLPPSWVAVMLGQNLLPRHYDPRVDRMAHDTLVQNAEGLRQRVNAAVSATPDHKDYIRQMGAASDTGPLIAQAV

SEQ ID NO: 82799 - protein, 505 aa, Oleiagrimonas soli
  misc_feature (1)..(505): tr|A0A099CYY4|A0A099CYY4_9GAMM Tryptophan halogenase OS =Oleiagrimonas soli OX=1543381 GN=LF63_0100705 PE=4 SV= 1
MNHASDATAARKPVRRVVIAGGGTAGWMAAAALSRTLGKVLDITLVESDAIGTVGVGEATIPTLVTFHRLLNINEQAFMAATHATIKLGIAFENWRDVGKDYIHSFGLTGKDHWTAGFQHFWLKGRERGLARDYGDYCMELRAAQERKFAHLPDNGINYAFHLDATQYAQFLRRFSEEFGVQREEGRIAEVRMADNGDIAALAMEDGRLIEGDLFIDCTGFRALLIGQALGVPYEDWSHWLFADSALAVQTESVRDAIPYTRSIAGDAGWQWRIPLQHRCGNGIVFASRYTDEATAHDTLMGSIEGAPRTEPRLIRFKPGQRARAWERNCVALGLSSGFLEPLESTNIHLIQRGITRLLQSFPHVIEQVDIDEYNQQVANEITHIRDFVILHYKVTDRRDTPFWRDCAAMDIPDTLRHRIELFAETGRVFRVPNELFAENSWIQVMLGQGIVPRQRHPAPDMMGDEELQHFLEGIRRHVEHTVQRLPTHMDYIRSYCAMQRVASD

SEQ ID NO: 82800 - protein, 505 aa, Asticcacaulis biprosthecum
  misc_feature (1)..(505): tr|F4QGE7|F4QGE7_9CAUL Tryptophan halogenase OS=Asticca caulis biprosthecum C19 OX=715226 GN=ABI_20690 PE=4 SV= 1
MPEPIRKIVIAGGGTAGWMCAAALRTGVPAEVEITLVESEDIGIIGVGEATIPTIRDFNELIGLEEGDFVRRTEATFKLGIDFVGWGTKENRYFHGFGDFGAVHQGLEPHQMWRRLKAAGDPASLFDWSMPTQLAYAGKFFPPNPNPKSALRDYTYAFHFDASLYAAYLRELCEKRGVKRINARIANVGTNAETGFLTGLALDDGRFVDGDFFIDCTGFRGLLIEGALKAGYTDWSHWLPVDRAWAVPCARSGTLTPYTSAMAHEAGWQWRIPLQHRTGNGHVFSSRFMDEQAAADVLLQNLDGKALKDPMLVRFLTGHRNRFWAKNCICAGLASGFLEPLESTSINLIQTAVVRFLEHYPDKGPSPVLEAEYNRKMQLSYERVRDFIILHYVLQSRDDGELWRYTRNMAMPDTLAYKIELFRARGIPLLYDYDHFHQPSWISVFVGQGLIPESYDPLVDRLPLDQVQSLMRQRREQIAAVAAKLPAHEDFIRAHCPSPSFLKAS

SEQ ID NO: 82801 - protein, 584 aa, Salinispora arenicola
  misc_feature (1)..(584): tr|A8LUX4|A8LUX4_SALAI Tryptophan halogenase OS=Salinis pora arenicola (strain CNS-205) OX=391037 GN=Sare_3158 PE=4 SV=1
MGREIGSEYDVVVMGGGPAGSTLGALLARRTTLSVAIFEKEEMPREHIGESFAHQMIPAIEQSGALEKVLASKCWVKKYGGVFNWGEVPMVAFFDHRNYLNDGVPRFAMHVNRAEFDHILLQHAADSGVKVFEDTPVKQFESHADGCTITLGDGTVVRSKYFVDASGRRNSIAAKQRREWLSTYRNIAIWQHFLGGERVQDLPGDWNIFREGNQSPIGCFAFQDGWCWYIPVPKIIDGKRRLTYSVGIVTIPEILKQTGSDFTDQKTFIDTIRRVPYLKDLIADAEPIADKMLTATNYSMVNGRFSDYDERWLLVGDSAYFVDPLFSSGVAFATNQAVNAAMLLEHTLTGELNEQGCRDLWRDYDEGWHGMAETFALSIDQWYHALGGQDPESIYWRHRSSSPDLDIQERTFDVLLNTSVTPNLMQLITGAPMQGEGPLTRANERAEPAAIDVDATLTLAPGVVVRETVGLDVPGFKGHLPPPPFDDEVSEATKAGIATYWADPVTNRDVIESPSALPVPAHRIGFADGAIDVEIRGLAREGTAELLGYLAAGVTMRKLDGQLTMSQHQLLKRLVRAGLVVAAG

SEQ ID NO: 82802 - protein, 523 aa, Phenylobacterium hankyongense
  misc_feature (1)..(523): tr|A0A328B9B4|A0A328B9B4_9CAUL Tryptophan halogenase OS =Phenylobacterium hankyongense OX=1813876 GN=DJ021_0012 0 PE=4 SV=1
MERNPADSAALRVVIVGGGTAGWMCASGLSRLLDPSAYSLTLIESDEIGAVGVGEATLPHIKIFNDMLGIREAEFLSETKGTFKLGIEFRGWGAPGDSYVHPFGTFGEPWGGVHFQHHWLRARAAGVPVAPLEAYSYAVAACRAGAFEFPSEDSKSIRSTYAYAYHFDASLYASFLRRWATARGVQRIEGQVVEVACGGESGLIEAVTLKSGARVEGDLFIDCSGFRALLIGDALKVGWQDWTPWLPCDRALAVPCERTADFTPYTRSTAQEAGWTWRIPLQHRTGNGYVFSSRFTDEGRAREVLLRALDGPALAEPKLLRFSPGRRELAWSGNCVAVGLASGFLEPLESTSIFLIQGAVTDLANLMPKPGEGARMDPRLANEFNRLFAIQYDRVRDFLILHYRANARRGEALWDYVRTMPIPDSLVQKMSLFEARAWTPDYKYGLFARDSWLSVLMGQGVVPRGYDRLAEGLSLADAEAHLARLKTRIDANVAAMSSHSDFIANYCDPAGAGAGPQPLATVR

SEQ ID NO: 82803 - protein, 501 aa, Asticcacaulis sp.
  misc_feature (1)..(501): tr|V4RHE2|V4RHE2_9CAUL Tryptophan halogenase OS=Asticca caulis sp. AC460 OX=1282360 GN=ABAC460_07920 PE=4 SV=1
MSEHLIKKVVILGGGTAGWLSAAMLAKTWGRNIAITVVESDEIGTVGVGEATIPPLTKLLTFLGIDENQFLSRVHGTFKLGIEFIDWYAKDHSYIHAFGAPGQPLGILPFYQYWLAQRLRGHNVHLWDYSLTALAAKQNRFGRLKQVPNTSMDGMDYAFHFDAGLMAQFLRIGCENSGVTRIEGKVSGVNLRAEDGFIESLTLQSGQVVEGEMFIDCSGFRGVLIEDALKAGYNNWQHWLPCDRAVALPTTSVGPLKPYTQARAHSAGWQWRIPLQHRVGNGHVFCSQYMSDDEATQILLANVTGENLAEPRILKFVTGRRKESWVKNCLSLGLASGFMEPLESTSIHLVQSGMTRFLRLFPDKRFNPLEIAEYNRQTAHEYELIRDFLVLHYKATTRSDTPFWEYCRTMDIPDTLAHKIDYFRQHGRLLIEEDDLFRDTNWAQVLIGQGIMPGAAAPLAHAIGEDDLTDFMKNLRVILDRTVAGLPDHAAFVQQNCPAVA

SEQ ID NO: 82804 - protein, 501 aa, Asticcacaulis sp.
  misc_feature (1)..(501): tr|V4PF49|V4PF49_9CAUL Uncharacterized protein OS=Astic cacaulis sp. AC460 OX=1282360 GN=ABAC460_22105 PE=4 SV= 1
MGGGTAGWMLAASLVRTFGPHHATVRLIESGDIAIVGVGESTLPQVRDFNEFLGVDEVEFMRETNATFKLAIEFRDWARLGDRYFHPFGSHGHAIAGVPFFQCFLRAKAHGHDFNIDDFCYPSVASREQKFELPSEDLSSIRSTYSYAYHFDAYLYAAYLRRWSEKRGLRRTEGTVVDVTLRPDDGFIQSLTLASGEVVEGDIFIDCSGFRGVLINQALKMGWEDWSSWLPCDRAWAISSDLDDDGTATTRCTAREAGWQWRIPLQKRIGTGYVFSSRFTTEERAREVLLQNLDGAAQGDPRLIKFQSGRRKNSWYKNCIALGLASGFLEPLESTSIYMSQIAVNFLMRLFPGHPVDPALAEEYNRLVDIEYTRVRDFLVLHYHASAERKGDLWHHVQTMQLPDSLAEKMDIFKRRGHIHRYKDGLFSPASWIAVYTGQRIEPGGYDPQADNIDLDSMLGTMNDLRDRIASNVATMPGHYDFVRRHCRLSTKSAKSGKSHA

SEQ ID NO: 82805 - protein, 504 aa, Sphingomonas sp.
  misc_feature (1)..(504): tr|A0A4V2TIC3|A0A4V2TIC3_9SPHN Tryptophan halogenase OS =Sphingomonas sp. JUb134 OX=2485112 GN=EDF69_12032 PE=4 SV=1
MTGPDRQRVVVVGGGTSGWMTAAALVKLLPDRCQVHLVESEAIGIIGVGEATLPHIRAFNERLGIPEAEFMATTRATFKLGIEFRDWARIGDSYIHPFGTFGRGAGDVQFHHYYARLLHAGVQLPPIEAFSMACTLARANRFAPPSTDPRQIASTFGYAYQFDAVAFAPYLRRLAEGLGAERTEGRIVHVERDGESGDVTAVLLEGGRRIEGDLFVDCSGFASLLIGKTLGEPFQDWSRWLPADRAVALPCRTVTEVTPYTSAVAMPAGWRWRIPLQHRTGNGYVYSSAFLSDEHAADALTSAVEGMPMASPRVLRFTAGRRERSWAHNVVAIGLSGGFLEPLESTSIYLVQQAITALLELFPEPRISPVDRDEFNRVVDMEYDRVRDFLILHYHATQRADSEFWNYVRTMAIPDSLAEKMELFRRRGRIVKYREGAFLDASWVSVYLGQRVMPAGFDPRASGPTLESLVAGMKQMQGEIHAAAAAMPDHLSYLGRYCPMAAAA

SEQ ID NO: 82806 - protein, 496 aa, Asticcacaulis sp.
  misc_feature (1)..(496): tr|V4PPI8|V4PPI8_9CAUL Tryptophan halogenase OS=Asticca caulis sp. AC460 OX=1282360 GN=ABAC460_18970 PE=4 SV=1
MTRPVKKVVIAGGGTAGWCAAVALSRILGPLLDITLVESDDIGIVGVGEATIPTVRTFHQIVGIDEREFLRATNGTFKLAIAFENWAKQGDRYLHAFGSVGKSTWLAPFHHVWLQAKSEGYGGSLMDYCLEHQAAEAGKFQLSQGGGLNYAYHFDAGLYGQFLRKLSEKQGVKRIEGRITQVDQDAESGFVTALRLESGKVIEGDLFIDCTGFRGLLIEETLKTGYEDWTQWLPMDRAVAVQTQAHGPLNPYTRAIAHDAGWRWRIPLQNRVGNGLVYSSAYISDDAARAQLLGALDAPTLVEPRVIRFVTGRRRKTWNKNVITLGLSSGFVEPLESTSIHLFQIGVTRLTQMFPFNGITDTLVNHFNKLALDELEMVRDFVILHYKANRRDDSPFWRDRQAMTVPDSLTHRIKVFEENAIVWQASGELFRLDSWLQVMLGQRINPTGWHRLGKLMKRQQAEGVFQDMKVHIDRTVAGMLSHEAFLRQHLGLTNRT

SEQ ID NO: 82807 - protein, 506 aa, Pseudoalteromonas sp.
  misc_feature (1)..(506): tr|A0A1Y5K5R6|A0A1Y5K5R6_9GAMM Uncharacterized protein OS=Pseudoalteromonas sp. A601 OX=1967839 GN=B5G52_05005 PE=4 SV=1
MNNIAPITHYAIIGGGSAGWISAAILCRVTAHLPCKITLIESPTISSVGVGEATIPSIIDLLRFLNIPQTEFIQATQATFKLGIKFTNWLTKGHSYWHPFGNIGKTIDGLSFYQHWLAAKQRGNKYQYCDFSPNVVLAEQNKFAQAQQHQKNILSHSTYALHLDATLMADYLKKYCLVRGVIHRTAHINEVTVCEKQQITNVILDNKEQLDADFYIDCSGQSAILIDKTLKVGYQNWQHYLPVDSAVVVQSKNPSQRQPYTHAVAHQHGWQWQIPLNHRTGNGYVYCSKYCSDEEALATLTNNITEPLENTPRAIKFTTGKRDVFWYKNCLSIGLSAGFLEPLESTGLYLIMKGMLNFVAMLPDSQFQQARCDEYNRQMDIEFENIRDFIIIHYSLTQRSDSAFWRDWHNRALPKSLEHKLAVFKSNGILMKNPQDLFSNDSWYAVLEGMKMRPTNLNPLIYNSDHQQVDAILHKHTYLLAQMIKQAPSHEAFANALHNNMLKANS

SEQ ID NO: 82808 - protein, 503 aa, Asticcacaulis sp.
  misc_feature (1)..(503): tr|V4PSM0|V4PSM0_9CAUL Tryptophan halogenase OS=Asticca caulis sp. AC460 OX=1282360 GN=ABAC460_07095 PE=4 SV=1
MQSPDPIRSIVIVGGGTAGWMAAAAFARNLGRHLSITLVESEDIGTVGVGEATIPPIKLFNAMLGLDEAEFMRETRATYKLGIRFHDWLNLGHEYFHPFGVYGLKPELGHFLQFWLRVQAQGHDIGPVSDYSLCTLAALQGKMGRQTDDGVMATFGSAYHFDAGLYARYLRRYSERLGVIRIEGLIADVEQHPETGNVKSVRLKDGREIEGDLFIDCSGFRGLLIKQALKTGYDDWSHWLPCDRAMAMPCAHAGADINPYTSSTAREGGWQWHIPLQHRVGNGYVYSSRFTDDDSAETTLRANVEGEALAEPNRLRFVTGRRKKFWNRNVVALGLASGFIEPLESTSIHLIQSGINKLLLHFPDRSFAPANIEAYNRRQHLDYERIRDFIILHYHATARDDSALWRYTRTMEIPDTLAHKIEVFRERGAFANAAEEMFTPTSWMAVLMGQGVIPQSHDPLVAYEDIATLRTGFARMKDHLTRLAADLPSQRDYLRQNGMLAMS

SEQ ID NO: 82809 - protein, 508 aa, Asticcacaulis sp.
  misc_feature (1)..(508): tr|V4RIT5|V4RIT5_9CAUL Uncharacterized protein OS=Astic cacaulis sp. AC460 OX=1282360 GN=ABAC460_06600 PE=4 SV= 1
MQHNVKKIVIVGGGTAGWMAAAAFAKALGTLDYDITLVESEEIGTVGVGEATIPAILQYNSFLGLDENDFIRNTNATFKLGIEFVDWRRKDHSYFHPFGLFGHDIDGFSFQHFYMRHYHQRGGGMFDISKYNAETEAALQGRFGRVKSEPGKPNINYAFQFDAGMYARYLRRYSENLGVVRKEGKIIQVNQDPESGFVTSVAMDNGMTIEGDLFIDCSGFRGLLIEQTLKTGYVDWSHWLPMNRAWAVPCERTETLTPYTRATAREAGWQWRIPLQHRTGNGYVFCNDFISEDEAREKLLSRLDGKVLKDPMMLKFVTGRRRLAWNKNVVALGLASGFLEPLESTSIHLVQSGAFKLLALFPRHGINPHIVDEYNRQVEIDYEGVKDFIIAHYKVTERDDTPFWRHVQQMSIPDSLQARFDVFRATSQTLAREPELFREVSWVAVMTGQGIVPEDYHPAADTMDADDLRLQLGRWRTAVVERVKSLPMHEDFINRTCASDAPRMVANG

SEQ ID NO: 82810 - protein, 497 aa, Brevundimonas nasdae
  misc_feature (1)..(497): tr|A0A0B4CH38|A0A0B4CH38_9CAUL Tryptophan halogenase OS =Brevundimonas nasdae OX=172043 GN=RM53_15175 PE=4 SV=1
MIDRIVVVGGGTAGWMAAAALAQAFEGAGKTVTLVESEAIGIIGVGEATIPEILKFNARLGIDEADFLRETKATFKLGIEFDGWRREGERYFHPFGAFGLDMEGIAFHHFWLKGCAEGRSEPLETYSMAWQAARRGRFVHPQGGPQSPLSSLGYAYHFDAALYAAFLRRLAEGLGVVRYEGRVVEVQQAADGDIAGVRLDDGRIVEGDFFIDCTGFVGLLIEQALKSGYEDWTNWLPCDSAVAVPCERGEPLSPYTRSTAREAGWQWRIPLQHRVGNGYVYSSAHISHQAAEDALMSRLEGKALAEPRRLRFATGRRKDCWKRNCVAVGLSSGFLEPLESTSIHLIQSAITKLITLFPSQKNSEGLRSEFNALMQEEFVTVRDFLILHYKVNQRAGSFWSQVRDMPIPGRLAAKIALFEETGRIVRRDHDIFSESSWLAVAVGQGLTPRGRHPISDVISHDANLGRLSAIRDSIWRTADALPTHEDVLATTMNRKAF

SEQ ID NO: 82811 - protein, 502 aa, Asticcacaulis biprosthecum
  misc_feature (1)..(502): tr|F4QJG0|F4QJG0_9CAUL Tryptophan halogenase PrnA OS=As ticcacaulis biprosthecum C19 OX=715226 GN=ABI_15830 PE= 4 SV=1
MTAIETIVIVGGGTAGWMAAAALSRLRSGRPVNIVLIESEEIGTVGVGEATIPPFLDFNRLLDIDEREMLAAVQGSFKLGIQFVNWGKLGDSYIHPFGNYGYQVDGVSFHHIWHRYKMAGDKRPIQIFNIETMAAQFGRFARTDDYKHEDLPPINYAYHIDAGRYARYLRGYAEKRGVVRLEGKVTDVICNAQTGFVESLSLNNGDSLKGDFFIDCSGFRGLLIEQALKTGYDDWSHFLPCNRAVALPCERGDGSGPLPYTRATAHTAGWQWQVPLQHRNGNGHVYCSAYMEDEEALDILVNNIAGKPGASPNFLRFVTGRRKKFWNKNVVALGLASGFMEPLESTSIHLVNTGINKLISLISLDGVTQAQEDAFNRLTGKEYERIRDFLILHYKATSRDDSDFWNYCRTMPVPPSLTEKIELFQHNGQIFREDDELFTETSWAAVMMGQGIVMKGHNVMADSLEDAKTRKELDGIEKSIQHVVQHMPSHGDYLKNYCPSKM

SEQ ID NO: 82812 - protein, 507 aa, Oleiagrimonas soli
  misc_feature (1)..(507): tr|A0A099CZ85|A0A099CZ85_9GAMM Tryptophan halogenase OS =Oleiagrimonas soli OX=1543381 GN=LF63_0102950 PE=4 SV= 1
MVVAGGGTAGWMTALLLAHSAYGPRLQITLLESPQVGAIGVGEGSTPWLRGFFDELDIEEAEWMPACNATYKSGITFEGWSTRPGFESYFHSFASMLDNLTMPQFVDNVHARLNRADVHAHPDRFFISTKLARDCLAPKPQRSFPFDVWYGYHFDSVLLGRFLHDKGVQRGVRHRVGHVTAVQQHDNGDIALLRLDDDTTLAADFFVDCTGFASLLIGKTLQTPFVSYAENLFNDAAVALPVPHDGPIMSQTVSTALRNGWSWKIPLTHRHGHGYVYSSAFCSAEDAETELRAHLGLLDADVPVRHLKMRVGRMQKHWHRNCVANGLAQGFIEPLEATALLFVQRTATLLVRALEKGDLGERAQTDFNTTVNDLFEGTRDYIVAHYKTNTRTDTDYWRENAANTRLSPSLERLLRTWLASEPIIPGLNGGAFGKGYPIMSWYSLLAGMGLFPNAGQMRPATKEEARHDLAQIDNLIERSATNFPDHRELLQNIPLRSRENSLQAYFW

SEQ ID NO: 82813 - protein, 522 aa, Asticcacaulis sp.
  misc_feature (1)..(522): tr|V4PAC4|V4PAC4_9CAUL Tryptophan halogenase OS=Asticca caulis sp. AC460 OX=1282360 GN=ABAC460_08465 PE=4 SV=1
MLIVGGGAAGWLTASYLASHLGQERHGGPRITLLESPDIGIIGVGEGTFPTTRNILRTLGIEEAEFMRESQAAFKQGIRFDDWEVAPKNDVHSHYFHPFEAPYIGKDELDLLPYWLIQDPATRPPYAEAVTFQKRIADARLAPKRLFQGHYSGPLNYAYHFDAARFAGVLARRSKALGVHHLQGLLGEVVLDDTGAISHAISPDHGRLEADLYIDCTGFRSELLGKALNVPFRPVSDMLFADRAVVCQVPYPNPNAPLESYTIATAHEAGWTWDIGLANRRGIGYVHSSHHSSEARAEGVLAAYVARSGGKEEVEMRHIKFDAGYRTQHWVKNCVAVGLSAGFLEPLESTGMVLIEAAVNKIAEFFPHSGRIDASAGLFNDLMVKRYEAIITFIKLHYCLSKRDEPFWRDNAAPDSIPERLRMLLDIWQHRPPSRYDFVIDHETFAHFNYQYILYGMNFQTDYRLAGQALPMKDKAEQIFARIHSFGEQAAKDLSAHRATIKAIYDNGFVERAPSPAPALAR

SEQ ID NO: 82814 - protein, 520 aa, Asticcacaulis benevestitus
  misc_feature (1)..(520): tr|V4PLZ9|V4PLZ9_9CAUL Uncharacterized protein OS=Astic cacaulis benevestitus DSM 16100 = ATCC BAA-896 OX=11210 22 GN=ABENE_18400 PE=4 SV=1
MVSGDAAFDRGGDNTRIERVVIVGGGTAGWMTAAALAKTVPAHVKIVLIESEEIGTVGVGEATIPSIRTFNNILGLDEFDFIRYTHATYKLGIEFVDWNRLGERYFHPFGDHGRHTQEFKFLQLWLRLKSGYARGMCPDPGPISDYNLCSVAAARGRFLTTNGATSTPGPSLRYAFHFDASLYAKYLRRYAEGRGVTRIEGRIAGTDLRSDDGFISSVTLDDGRTIAADLFVDCSGFRGLLIEGHLNAGFESWSQFLPCDRAVAVGSEPLSDFPPYTRATADSAGWRWRIPLQHRVGNGYVFSSDHISQDEATARLLSQIEGKPINDPHLITFTAGHRRSMWVKNCVAIGLSGGFIEPLESTGIHLIQTGIAKLLLFFPDKRFAQANIDEFNVATLLEYEAVRDFIILHYCATERSDSSFWRERGAMVIPERLKARMSLFCSTGRIFRYQDELFTDDSWLAVMLGQGVTPKSYDPLVDKIPLPEIAKNVARLRQITAQVVDSMPSHRDFIRQYCGAATVD

SEQ ID NO: 82815 - protein, 503 aa, Asticcacaulis biprosthecum
  misc_feature (1)..(503): tr|F4QP47|F4QP47_9CAUL Tryptophan halogenase OS=Asticca caulis biprosthecum C19 OX=715226 GN=ABI_25190 PE=4 SV= 1
MTAGPVRRIVILGGGTAGWAAAAAMAKFGDGRDFDITVIDSSEIGTVGVGEASVPNIRNFNAWLGLGELDFIASTRGTFKLGIEFVDWRTTGTRFFHPFGRYGVDLEDVDFHQCLARARAAGFDAPLEAFSLPIAMARQDRFSQPVSDPRSPLSDYGYAYHFDAGLYAKRLRRYAVERNVKHLDRRVAGAAMKDNGHVDALLFDDGNRFEADLFIDCSGFRGLLIEGALKTGYDDWTHWLPCDRAVALPCRRAGSALEPYTHATAREAGWTWRIPLQHRVGNGYVYCSAFLDDQAAIDRLTGAMESDPLAEPNLLRFVTGTRKQFWNGNCVALGLAGGFIEPLESTSINLVHRALSTLMEYFPDTGFDPRLQAVANRRMRLETEHIRDFIILHYKASQRRDTAFWRQCADMTIPDSLALKMDAYRAAGHLLQFEAESFKPESWLTLFEGLGLLPETVEPLAGQIDACELTGPLNAMRASVVQAAQQAMPHAAFIERFCPAPAE

SEQ ID NO: 82816 - protein, 500 aa, Oleiagrimonas soli
  misc_feature (1)..(500): tr|A0A099CXY7|A0A099CXY7_9GAMM Tryptophan halogenase OS =Oleiagrimonas soli OX=1543381 GN=LF63_0102710 PE=4 SV= 1
MNDRRIRRIVIVGGGTAGWMTAAALGQALQGNCRIDLVESEHIGSVGVGEATIPPIKLFNQRLGIDENDFIAATQGTFKLGIEFVNWTRTGQRYFHPFGQFGAEFDKVPLHHYWLRERARGDDTPLEEYALAWVAARANKFMPPSSDPRQVLSTLDYAYQFDASLYAAFLRTYAERHGVRRSEGKVTEVNLREDGFIADVALENGTRLEGDLFIDCSGFRGLLIEGALHAGYEDWRHWLPCDRAIAVPCAHGEAFAPYTRSTAHAAGWQWHIPLQHRVGNGHVYCSHYISDDEATATLMNHLEGEALGEPRLLRFVTGRRRRFWHRNCVAIGLSAGFLEPLESTSIHLIQTAVSRLLALFPDRDFDPVTTAEFNRLTATEYERVRDFLILHYHANQRSEPMWRHVARMDIPEPLAYKLAHFRGHGRLVAERLELFQNPNWLAVLVGQEVWPERYDPLADLRSEVDATRMLAGLRDAIRQTVDAMPTQREYIDRYCRARPI

SEQ ID NO: 82817 - protein, 488 aa, Asticcacaulis biprosthecum
  misc_feature (1)..(488): tr|F4QGJ2|F4QGJ2_9CAUL Tryptophan halogenase PrnA OS=As ticcacaulis biprosthecum C19 OX=715226 GN=ABI_21140 PE= 4 SV=1
MLPVKSIVIAGGGTAGWMTAAALARVFGPSLNITLVESDEIGTIGVGEATIPAIARFNSMLRLDEDAFLRETQGTFKLGIEFRGWRERGHSYMHSFGAVGRDLAYLPFHHYWYQDRMQGGDAGELGDYDLNQAAAYAGRFARSDDLVHAFHFDAGLYAAFLRRYAEAGGVTRIEGRIADVAVEEDIRALRLADGRAIAGDFFIDCTGFRALLIEGALKTGYEDWRHWLPCDRALAVPSARTCPLLPYTRATAQTAGWTWRIPLQHRTGNGHVYCSDHISDEEAHAALMVQLDSEALADARPIRFTTGRRKKLWNKNCLAIGLSAGFIEPLESTSIHLIQSAIERFIMLFPRGPDHDRLAQDFNDSSIHEMENIRDFIILHYHVNGRYDETFWNSCRNMTIPDSLHHRIELFRDTAALHIPPADIFRLPSWLQVLHGQGVEPQAVHPFTERVARDDRARFLRGLRFECHERLELLPAHDAFVWRHCYHR

SEQ ID NO: 82818 - protein, 517 aa, Shewanella psychrophila
  misc_feature (1)..(517): tr|A0A1S6HPV0|A0A1S6HPV0_9GAMM 2-polyprenyl-6-methoxyph enol hydroxylase-like oxidoreductase OS=Shewanella psyc hrophila OX=225848 GN=Sps_02370 PE=4 SV=1
MPEKNKITKVLIVGGGTAGWLAANHLGKRFSDLDGPNIEVTLIESPNIPNIGVGEGTVPMMRETLRYLGIDEGYFVQSCDATFKQSIKFVDWVYNPKEKNHSYHHLFDYPMSHDSAFYWHKTSASSRDSFANSVSVQSVLADAGLGPKLVTQPQFQGVTSYAYHLDARKFSEVLRLNALSKFGLSHILDDVLEVTLSDSGDISTVSTSQNGELEADLFIDCTGFSARLIEKACKVPFVDKGDVLFVDSALAVQVPYEKSHDAIPCFTLSTAKEAGWIWDIGLTERRGVGYVYSSRHSSRQDAEKVLSEYLGGKVSEAEFRHIPMRIGYREKAWHRNCVAIGLSGGFVEPLEATGLLVFDVTSRMLAECIPNKLSSMHLVAERFNQRTVDTWNKVIDFIKLHYVASKRNDTEFWSDNRKEASIPDSLKQKLALWSSELPNRYDFTSTLEIFNLENYQYVLYGMDFDTDLGYSEVSKDGLDKFLSEQNKIAEFIHQAKTQLEPHRELIEKIHKFGIQKV

SEQ ID NO: 82819 - protein, 478 aa, Asticcacaulis biprosthecum
  misc_feature (1)..(478): tr|F4QTE3|F4QTE3_9CAUL Tryptophan halogenase family pro tein OS=Asticcacaulis biprosthecum C19 OX=715226 GN=ABI _44400 PE=4 SV=1
MVCGSGLAAQQVCAALAPYLCDALSVTWITGMSGADSDIVYGNLAPPTAYDFNLSLGVSEPDLILNSDTTFSYGTHVTNWGARRLNWVQAFHQPLPVLEGATFQHYLTQQGQSALEPFLVSAMAARRGVFAHPPEDLAHPLSRAEYGYHFDAAAYGALFELAAARGGVRKVAADISAIDAVDGVINAVHLSNGQTLTAGLWIDATGPQAMLLSQIAGVRQGTRRLCFHLTRMETETPGPAVTTINGTPYGWQAKTALRTSTLMLTTSDPDSDLEAQAALETAPLRSATVDICWRDMAWVGNCVGIGHAACVAEPLTIAPMRLLQRDIERLLPLLPVSDDLSVERREYNRQALADYVHADLFTRALFETQPMDGAPYWRAATRTPADERLVRKIEQFESRGLHVAFDLEPFGPEDWLTLHYGMGRSPLRYDRTVDGADSARIRQYLETLRGNIENAVRSMPPHASYLNGLTNYLRQTKG

SEQ ID NO: 82820 - protein, 509 aa, Sphingobium algorifonticola
  misc_feature (1)..(509): tr|A0A437JCC2|A0A437JCC2_9SPHN Tryptophan 7-halogenase OS=Sphingobium algorifonticola OX=2008318 GN=ENE74_0287 0 PE=4 SV=1
MEAENGRGRRIGQVVILGGGTAGWMTATALARTLGRSVAITLLESEEIGTVGVGEATIPTIHWFNDLIGLDEAAFVAATQASFKLGIEFVDWARPGHRYFHPFGQYGVAFPGVPFHHRWLKAQRDGLDLPLDAFSLASQLAKDNRFAKPVSEARSILSTLGYAYHFDAGLYARHLRGLAEAMGVRRVEGKLGAIAQDPQNGFITAITTQAGERLDGDLFIDCSGFRALLIEGVMQAGFEDWSHWLPCDRAVAVPCARVADTTPYTRSTARSAGWQWRIPLQHRTGNGYVYASAFLSDDEAAATLLAGLDGEALADPRFLRFTAGRRRRAWVKNVVAIGLSSGFLEPLESTSIHLIQSGIAKLLTLFPDADCDPGLADRFNLLLDRDMDNIKDFLILHYHATADKPEPLWQHCRAMVLPDTLVAREAHYRATGRIMIETDELFREASWLAVLNGQGILARDYSPIADTLEAPANRTQLEQIAALIARAVPTLPRHDAAIAALTGGGRAAA

SEQ ID NO: 82821 - protein, 503 aa, Asticcacaulis sp.
  misc_feature (1)..(503): tr|V4PTQ6|V4PTQ6_9CAUL Tryptophan halogenase OS=Asticca caulis sp. AC460 OX=1282360 GN=ABAC460_14255 PE=4 SV=1
MTAPRTIVIAGGGSAGWMTAAALSRFMKNFPADRAVKIILVESDEIGTIGVGEASIPLLGVFNALIGVEERDFIQRTQGTFKLGIEFHGWTRDGESYLHPFGNYGQSLDMTDFHHYWLRARAAGYSAPLDDFNLNTLLARSNRFALRDANPASPLSSIAYAYHFDAGLYARYLRSLAQGNGVERIEGRIVEVQQHAETGFLTGLKLASGQVVEGDFFVDCSGFRGLLIEETLKAGFTDWTGLLPCDSAVAVPSARTEPLLPYTRATARTAGWQWRIPLQHRTGNGYVYATSHISDDEAAATLLANLDGPALTDPRVIRFRTGRRTKAWVKNCVAIGLSAGFLEPLESTSIHLIQKGVTKLLTFMPSGTWSQTLVDEFNRQTTFDYEDVRDFLVLHYKANSREGQPFWDALRHNPVSDSLQARMDLFRDSGRVPVSDHELFKLTSWVAVMLNQGIVPRDYDPMADAIPLSTITGRLDQMRGVLARAALAQPTQAEFIARNCAAF

SEQ ID NO: 82822 - protein, 507 aa, Brevundimonas nasdae
  misc_feature (1)..(507): tr|A0A0B4CMX6|A0A0B4CMX6_9CAUL Tryptophan halogenase OS =Brevundimonas nasdae OX=172043 GN=RM53_15160 PE=4 SV=1
MTQNDAGSIRKIVILGGGTAGWMTAAALSYRLAGSAVSIELVESDEIGIVGVGEATLPHIRAFNTAMGIDEQTLIDQTQATFKLGIQFVDWGRPGDSYIHPFGAYGEPIEGIDFHHVWAAHRAMGDAADISDYSYPVRAAEANRFQRPISDPGSMLSTFSYAFQFDASLYAAFLRQVSCGRGVVRTEGKVVDHVLDDATGDVDAIVLSDGRRIRGDLFVDCSGFRGRLINQALETTFEDWSHWLPCDSAFAVPCQTTAPVGPYTRATARAAGWQWRIPLQHRTGNGHVFSSAHISDADAVATLMSNLEGPALAEPRRLGFKTGRRQRLWSRNVVAIGLSGGFLEPLESTSIYLIQLGITTLLDLFPDRAGMAADAEEYNRIMALEFDRIRDFLVLHYVANQRDEPFWREMRTMAWPDSLSAKVEAFKSRGLLPDYDIGVFLPPSWLAVLVGQNIVPNGWDPRVDRLEPHVLSDKLAALRDAVRSTVDRTPDHMTFIRQAAQRAGGVR

SEQ ID NO: 82823 - protein, 514 aa, Asticcacaulis sp.
  misc_feature (1)..(514): tr|V4Q082|V4Q082_9CAUL Uncharacterized protein OS=Astic cacaulis sp. AC460 OX=1282360 GN=ABAC460_06610 PE=4 SV= 1
MTISPTRVVILGGGTAGWMTAASLIKAFQPHFCTVRLIESDEIGIVGVGEATLPQVHDFNDFLGLDEPEFMRETNATFKLGIDFSNWARNGDSYIHPFGIHGQAINGVPLFQYWLRARLNGHNTDLESYSFPIVACRNNRFDFPSDDDRSVRSTFAYAYHFDAVLYSRYLRKWATARGVQRTEGKVVDVTLRPEDGFIQSLTMQSGEIIEGDLFIDCSGFRGVLISQALKMGWEDWTQWLPCDRALAVPSDRSEAFTPYTRATAREAGWTWRIPLQHRTGNGYVYSSRFTTDERAAEVLLGALDARAQAEPRMLKFQAGRRQQSWYKNCLVIGLASGFLEPLESTSIYLAQIASNFLMRLFPGKTIDPKLAQEYNRLVDIEYERVRDFLILHYHANEKPAEEDPTGLWRYVREMAVPDSLLTKMETWRHRGHIHRYKDGLFAPPSWVAVYTGQRIFPQNYDRQVDTMSLEMVLQKMAEMKERVAVNVEAMPTHADFVRDYCFDPSAKVMMEDAQ

SEQ ID NO: 82824 - protein, 520 aa, Asticcacaulis biprosthecum
  misc_feature (1)..(520): tr|F4QLY4|F4QLY4_9CAUL FAD dependent oxidoreductase fam ily protein OS=Asticcacaulis biprosthecum C19 OX=715226 GN=ABI_19960 PE=4 SV=1
MTSARKVLIAGGGTAGWLTAAYLARVLGHGKLTCPQITLIESPDIGTIGVGEGSFATIRTTLQTLGLDEETFLREATATFKQGIRFADWEKKDSWYFHPFDPPYPVEGAGLLPYWLLQDEAARLPFAQAVALQKKVAETQRAPKRLFENRFGGALNYAYHFDAGKFAKLLSRHAVSMGVTHLQGRINDVKLAQDGSIAGVVTADHGELNADLYIDCTGFAAVLIGKALGSPYKSVRKHLLTDRAIACQVPYPRPDAPIESYTVSTGHEAGWTWDIGLDVRRGVGYVYSSDHSSDERAEEVLRTYVGPTATDFSTRVIKFDTGYREQQWIKNCVAIGLSGGFFEPLEATGIMLIEVAIGMLTEYFPHAGPIDANAAVFNRLMTLRNEKLVNFLKLHYCVSKRHEPFWRENCDPATIPEELNELLDMWKYRMPSRFDVLDDIDTFAFFNYQYILYGMGFSTDLSAQRDSHPKVAEAKAIFDKIALIGDQAARDLPTHRALIDQVYSYGYAEPPAQRFMSVKR

SEQ ID NO: 82825 - protein, 507 aa, Asticcacaulis biprosthecum
  misc_feature (1)..(507): tr|F4QKK1|F4QKK1_9CAUL Tryptophan halogenase PrnA OS=As ticcacaulis biprosthecum C19 OX=715226 GN=ABI_05860 PE= 4 SV=1
MHANPMIKSVTIVGGGTAGWMTAALLSKLLLGRFDITLIESEEIGTIGVGEATIPAIKVFNQFLDLNETEFIRATQGTFKLGIEFVNWRDKGHSYIHGFGKIGSDLMWLHTHQFWLKMHEKGEVRDFDHYALNTLACRMNRFRPRQPNEPPPMADFDYAYHFDASLYARYLSKQAQGRGVKRIEGRITKVELRAEDGYIDHVVLQSGETVGGDLFIDCSGMRGLLIGDALGVGYEDWNHWLLNDRAWAVPCERATVLTPYTRSMAHGCGWQWRIPLQHRTGNGHVFSSSHMGDDEAASILLKNLDGKALADPRLVKFRPGKRHRAFEKNCVAIGLAGGFLEPLESTSIHLIQTGILRLLALFPGQSFDPRDIAEYNAQTDFEYRDVRDFIIAHYKVTDREDTPYWAYLKHMDIPESLTQRLDLCRSSARFFKHSAAELFHEESWVQVLLGQGLRPRYDPMVDMIPEDDIRAHLKDIEEVIAEYAAKLPTHGDYIERYCKAPPLLEMA

SEQ ID NO: 82826 - protein, 507 aa, Salinispora arenicola
  misc_feature (1)..(507): tr|A8M0H4|A8M0H4_SALAI Tryptophan halogenase OS=Salinis pora arenicola (strain CNS-205) OX=391037 GN=Sare_2119 PE=4 SV=1
MLGVLLVKGEIYVTTRTDRSVDVVVVGGGPAGSTAATLVAMQGHRVLLLERERFPRYQIGESLLPSTVHGICRLIGADEALERAAFTIKRGGTFRWGANPQPWTFSFGISPRFAGEAATAYQVERMKFDQILLDNARSRGVEVREECDVRDVVAEHGRVVGVRYADASGHEREVRAAYVVDASGHASRLRAHAGTRHYSKFFRNLALFGYFTGGKRLPPPNEGNILAAAFDSGWFWYIPLGPELTSVGAVLLPEALDRIQGDRERALLDLIEECPLIAEQLADAERVRTGPYGEIRIRKDYSYLQDRFWRPGLVLAGDAACFIDPVFSSGVHLATYSAMMAARSINTVLRGEADEAAAFEEFEARYRREYSRFHDFLVAFYDMHQDENSYFWSAKKLTSNAGTELESFVELVGGGGWQEDALLAPGVKGGGRDAAMRQLADIVDQPVRAAGEDRNLLQASLARSVVREGSRLQVQAVMGGNVDEVRPIREGGLIPSADGMHWVRPDS

SEQ ID NO: 82827 - protein, 506 aa, Phenylobacterium hankyongense
  misc_feature (1)..(506): tr|A0A328AX95|A0A328AX95_9CAUL Tryptophan halogenase OS =Phenylobacterium hankyongense OX=1813876 GN=DJ021_0011 5 PE=4 SV=1
MSAPLTEVVVVGRDAALWLAASVIQAALRPGVRVTAVELPSRLCPADVYASLPALEAFHNLLQLDEAQLLRLAGGSFSLGQNFQSSGGAGPSFFHAYGSYGAAIDHKDFFAYWLKARSLGLSVALEDFSLTAAAAKQGRMLLPDETTERFGRTDYGYHLPALAYASVLKTLAVRHGVTALQTDAAHAVLDPDSGDILALDLAGGRRVEGQFFLDASGAEGCLIAGVLGVGREDWRSHFVADRTLVARAAPYAAAPVYAELRAWEAGWVGLFPTQAATHIVQAYSSAYCDDGAALVGAAKVAQLDLDDAVVRRADPGRRLVAWARNCVALGEAACLFDATHAVELHAVQLGLVHLLELFPLGGAFAVERQEYNRITQSAFERIRDFQSAFYVLNRYGDSEFWSAARRAPASPELTHKIETFAARGEATLLEDETFLIDSWRALFVGQGLMPGSHIPIIDQTSPEEVKREFRRILGFIKEQVLKQPSHQQYLDRLCRREKVPEIASGS

SEQ ID NO: 82828 - protein, 508 aa, Asticcacaulis sp.
  misc_feature (1)..(508): tr|V4PU96|V4PU96_9CAUL Uncharacterized protein OS=Astic cacaulis sp. AC460 OX=1282360 GN=ABAC460_03295 PE=4 SV= 1
MAQHPGKAVRKVVIAGGGTAGWMCAAWFSKILRDDIDEIILVESEEIGTVGVGEATTPYIRVFNHHLGIDEDAFIRATQGTFKLGIEFVDWGRRGHTYHHPFGATGREFGSLPFHAIWLRDVLERGGSDDLGLYNLQAMAARRGRFMRPQGQNSPLAGIDYAFHFDAGLYAQTLRQFAEARGVRRIEGRIETVELTDMGNIRALQLNEGRRVEGDLFIDCTGFRSLLLGEALQTGFEDWSHWLPCDRAYAAPTRRAGAPAPFTRSTAMTAGWQWRIPLQHRDGNGLVFASPFLSEAEALDGFLARLPDGRLSDPKLIRFRTGRRKVFWHKNCVAIGLAAGFLEPLESTSIMLIQNGIARLQYYFPDTGFDPADIAAYNRAMSREYDDIRDFLILHYHVGERDDSEFWRYCTGMPVPDSLAHRLELFRSRGRIPEERGEQFRLNSWLAVMWGQGLRPRSPDPLTLSLDGDGLSQWLGDVREVIARCCDIMPAHEDFILRNCRAAVIQRQ

SEQ ID NO: 82829 - protein, 589 aa, Microcystis aeruginosa
  misc_feature (1)..(589): tr|L7EAA2|L7EAA2_MICAE Tryptophan halogenase family pro tein OS=Microcystis aeruginosa TAIHU98 OX=1134457 GN=O5 3_553 PE=4 SV=1
MQMTQDKEYDVVIMGAGFAGLCQARHLMLKIPNIKVALVDPRPEQRTDKDLKIGESTIEIAALFLAKELGLHDYLIENHAPKQGLNFHWPKNPAKTETIDDYYHAGSNRQVPIPSFQINRSKFEQDLLKMDKAMGINFYNGQVVDVDLTPGDAIKTVKIKVGDERMELQAKHVIDAAGRKFIIGRKTDNLLFGPENLMGLNTGSAWVRVKNVDRTIFHSGYDPLNASTSHYYSTNHYFGEGHWLWMIPIDTQTMELSIGVIHHHDVINSTQVNSWEKFHDFLRNNHQILANIIDSGEAVDFHYWPRISHTSKTLFSPDNWYVLGDAAYIFDAFYSYGTTTIALAIEGITEIVRAKLAGEADAEQKRAAYNEFNLAYSRSVNCLYRGHAKQLGQASVMSWRIYFEYMWWFGVQVPMYVGKWHLDLTYIPIFLKTLNSNIDGLFADLNEQFTELADKDVNIGLMDCYRGDQLFKGYHTLKHFDDFLENTKFEPRRCNVFAGLKATCFYAALWYALFQWKGFGIQGCLNPRHIYHFLRLLGLSGQATIGELIYKFKTKGLPANSEIEAMRQEFKTYQYQPKLQPWLAEATNS

SEQ ID NO: 82830 - protein, 480 aa, Sphingomonas sp.
  misc_feature (1)..(480): tr|A0A4R2XM37|A0A4R2XM37_9SPHN Tryptophan halogenase OS =Sphingomonas sp. JUb134 OX=2485112 GN=EDF69_1302 PE=4 SV=1
MTATGVNRAPALRSVVVVGHGVVARTAALALARGTPGASVTLVPAPIAPGALADWFPTLLASGRDAPQLWGTTGDALLRAGVATPRLAAAFDAWPRNGRWLHPEGSPTRMAGPGATHARWMNAEPHADVPTFEAMFPATAMLDAGTFAIEPSAPLAEADHALCLDPRRLVEWLSPRLRAAGVVTASAPFARVTLDGRGRVDAIQLHDGCAITGDLIVDASGPPALIAGASRTDWLDWSDPLPEDRMLIAAATDQTPSMVDRYRLLPFGWDASWPFPVRPLRAVAYRGGSCTDDDARAALGADLDSGAIPIAPGRRAEAWRGNCVAIGEASVQPGPLRLAGFTLAQAQLSLLLDLLPARDMPRSIVTAYNVRAAARADRLRDWLAAHRCEGAGATPNDLPALAATLTRFRRNGGLPHFDEETASEAAWHAVLIGQGVRAARAVPPVIGDDTRLFAMAARAAAARMVEAAGALPSLSELRNR

SEQ ID NO: 82831 - protein, 514 aa, Sphingobium ummariense
  misc_feature (1)..(514): tr|T0J7G3|T0J7G3_9SPHN Tryptophan halogenase OS=Sphingo bium ummariense RL-3 OX=1346791 GN=M529_08005 PE=4 SV=1
MATDNPPSLGRIVILGGGTAGWLAAATFSRAWKMPRVTLVESSDIGIIGVGEGTFPTIRTTLAGLGVAEAEFLSRADATFKQGVLFDGWATDADSYFHPFNMPVGGEGEPLLPHWIAAGEQRASWADSVTVQERVIRAGRAPKRPQDPDFSGPMNYAYHFDAARFADYLRTISVAAGVERIEGTVAEVERAPDGDIAALLLAGGKRVEGDIFLDCSGFGALLIGQTLGSSFTGCGDTLFNDRALAMQVPYDRPDAPIRPYTLATAHEAGWTWDIGLSERRGIGYVYSSRHCSDEDAEATLRRYVGPAGDALAARQLRFQTGYRERQWIGNCIAVGLSAGFFEPLESTGIMLIETALRMIGDLLVPGTRATREAAARRFNDLMRARFERIVRFLKLHYCITRRTDTAYWRDNADPASIPEDLRDLLAQWRHRPPSRFDFTVDLETFLPPSYHYILYGMGFRTEPARPMPGAAEARAAFAQVAAASRAAVANLPDHRTLLHHYRRQSAPTLAQGIR

SEQ ID NO: 82832 - protein, 502 aa, Massilia sp.
  misc_feature (1)..(502): tr|A0A1G7P4M7|A0A1G7P4M7_9BURK Tryptophan halogenase OS =Massilia sp. PDC64 OX=1881046 GN=SAMN05428966_12321 PE =4 SV=1
MSDKAIRKIVIVGGGTAGWMTAAPLALKLGGSCEIVLVESPEIGTVGVGESTLPTIRYYNHALGIDGADFVRRTKATFKLGIDFRDWGHLGNRFFHGFSDFGPTIENRPAFMYWLRLARDNPNMPSYEEWSISTVMAHENRFVPPYGDQPGPTNAYTYAFQFDAGLYALYLREYATARGVRRVEGTVGNVEQHPETGFITALQLQDGRRIQGDLFVDCTGFRGLLIEGVYKAGYEDWSAMLPCNSAQAVPSALADRLTPYTRSTAKPAGWQWRIPLQHRNGNGHVYCDAFMSDEEAGRVLLDGVDTEPLESPRQLRFTTGRRRKSWIKNCVAVGLSSGFLEPLESTSINIIELAVGWLLQYFPDRDCSPELADEFNRLAAQRYEFVRDFIILHYKLTNRTDSEFWRYCANMKVPDTLQHQIELFRATGRVTIYDREGFQADSFAAIMLGHGIRPGRNDPLIDRMDQAALADHFRKVRATIRQVVGTMPDHAALVAQVAGAAM

SEQ ID NO: 82833 - protein, 503 aa, Sphingomonas spermidinifaciens
  misc_feature (1)..(503): tr|A0A2A4B420|A0A2A4B420_9SPHN Tryptophan halogenase OS =Sphingomonas spermidinifaciens OX=1141889 GN=COC42_150 70 PE=4 SV=1
MTDGHAQRVVIVGGGTSGWMAAAALARLLPRRCSIHLVESEAIGIVGVGEATLPHIRHFNERLGIAEADFMRWTRATFKLGIEFRNWGRIGDSYVHPFGTFGRGQGDVDFHHYWTRARLAGHDVPPLEQFSIACMMARLGKFTTPGDPQSLAGTFGYAYQFDAVLFAPYLRALAEGLGVRRTEGRVVDVELDGERGDIRAIVLDGGLRIEGDLFVDCSGFRSLLLGEALGEPFQDWSRWLPADRAAAMPCRTRTDVTPYTSAIAMPAGWRWRIPLQHRTGNGYVYSSAFVSDDEAASAIEAAVEGEPMASPRLLRFRAGRRERSWVRNCVAVGLASGFLEPLESTSIYLVQQAITALVELWPERDIADADRDEFNRIIDLEYDRIRDFLILHYHATERDDSAFWNYVRTMPIPDSLAEKIELFRRRGRIVKYREGVFLDASWVAVYLGQRVIPKGFDPRADLPASADLLRSMKALHQEVAETAAAMPAHLDFIHRYCPMAEAA

SEQ ID NO: 82834 - protein, 502 aa, Pelomonas sp.
  misc_feature (1)..(502): tr|A0A397RZG8|A0A397RZG8_9BURK Tryptophan halogenase OS =Pelomonas sp. BT06 OX=2135721 GN=C8K28_1574 PE=4 SV=1
MPASLVRRIVIVGGGTAGWMAAAAFSRLLGPGHDIRLVESDEIGTVGVGEASIPYLADFNVALGIDENEFLRATQGTFKLGIEFVDWARLGDRYTHAFGQVAMDIGALSFHHYWLRLRSQGDSRPLGTYSLNALAASQGRFMRSRQDLPNSPLGNIAHAFHFDAGLYARFLRGFAEQRGVQRVEGKVVEVRQREDGGIAGVRLESGSVVEGDFFLDCSGLRGLLIEQTLKAGYHDWREWLPCDRAVAVPCASVQPLLPYTRATARPAGWQWRIPLQHRIGNGHVFSSRFMSEDEATALLLSRLDGERLAEPRCIPFVPGQRKRFWIKNCVALGLAAGFFEPIESTNIHLIQTAIMRILALLPRADMDPVDIDEYNAQTQAEYERIRDFVILHYHATERDDTPFWTQCRTMAVPDTLRRKMELFRGNGRLFHDGKELFADSSWLQVLVGQRVEPRGYHPLADGMALDQVQGMADSIEQLMRRCVESMPTHDAFIRAECAASRP

SEQ ID NO: 82835 - protein, 517 aa, Sphingobium algorifonticola
  misc_feature (1)..(517): tr|A0A437J9U3|A0A437J9U3_9SPHN Tryptophan 7-halogenase OS=Sphingobium algorifonticola OX=2008318 GN=ENE74_0860 0 PE=4 SV=1
MEEEQTKRVVILGGGTAGWLSACVLAAENIRRGLGLSITIVEAPDIPTVGVGEGTWPTMRGTLQTIGLDEATFLAACGGAFKQGSRFDGWVSGAADDSYLHPFTPPAGDDLAALLAAWDRDSGQSFAAAANAQQAVVDMRLAPRQTAMPDFAGALNYGYHLDAVRFAALLREHATTRLGVIHIADRIGEVIPDERGGIAALHGVSHGTISGDFFIDCSGHAALLIGGTLNVPFMDRSDMLLNDRAMAVQVPVLPDSAIASATIATAHAAGWLWDIGLPERRGIGCIYASRFMADDEAEAVLRDYVLANVPGATGQSLSPRRILFPTGHRERFWQGNCIAIGLSAGFLEPLEASAIVMIELSLRALTENFPRSRAAMPFLADRFNTLFRYRWDRVVEFLKLHYVLSQRPEPYWQAQRATDSLPPRLAALIALWRDQPPSAWDFPHVDEIFSAASHAYILYGMDFPLPRYLPPPAPAARRAIADVAQRSRAMLAALPDHRLCLAATAQQAPGAGVRSAS

SEQ ID NO: 82836 - protein, 600 aa, Legionella spiritensis
  misc_feature (1)..(600): tr|A0A0W0Z440|A0A0W0Z440_LEGSP Tryptophan halogenase OS =Legionella spiritensis OX=452 GN=Lspi_1432 PE=4 SV=1
MFQPKKHRIAIIGSGPVGLYTAILLKWKYGESIDVTLIDSHINDYERPGIIAKKAVQIINSSFQSRDIPEIDVPDSGGEPANSVFIGDLQKSLLKHAQKLGVNLVEDAFASLEENTITTKKGQSMTSDLVIDCSGEGRVVANFTNKRFGGDSVFNVETIAENPIKQHFIAYVHMDVENSNLCRMEDLKKRDPVVHAKTMEELRKTFGWKEFADPEMVVSKWDQKTEGARYCFYFEVPSQVAQAGMKEQEAYLKALLLLKTGKFIAFEREEGKFKFIPFDVDPKRVLQPVNTTNYSIPVVVCGDALVSAEYRFGTGVANGVTCASGLVNSIEVTPKEVVISKDRFEIETRATVESHVDEIKKSYQSKRSQLSGRNLVEAFEMYTKALKILATSEESESDLLKIEGGLFDLAAKFKESAREKFLQGVDSRKKEQHFIPFFQEAEALYKHALDIYENYCPNRQETKDLHSERAKIYSNLSRVFYQTGRIDEAIQFAEQSLNIAIKYDIKDMFESAFVSLEGSCKKALSDYNKDFPNSKWGEKIELNEKMAKMASQIGKDVKPYQEELERLKQKLLEAQSTMKSEMSTMRPDNDEKEKHFNLGN

SEQ ID NO: 82837 - protein, 504 aa, Sphingomonas spermidinifaciens
  misc_feature (1)..(504): tr|A0A2A4B8X6|A0A2A4B8X6_9SPHN Tryptophan halogenase OS =Sphingomonas spermidinifaciens OX=1141889 GN=COC42_072 20 PE=4 SV=1
MSADPAPIRRVVILGGGTAGWMTAKALSRSFGPTLSITLLESDAIGTVGVGEATIPTIHWFNQLAGIDEAAFLRETQASFKLGIEFVDWTRPGHRYFHPFGQYGVELPGPPFQHRWLKAKAAGLDLPLGAYSLATALAEAGRFARPSGGGRSILSTLGYAYHFDAGRYAAFLRRLSEGEGVVRVEGELAVVDRDAESGFVTALRTRRGEVLEGDLFIDCSGFRALLIEGEMQAGFEDWSNWLPCDRAVAVPCARVAATTPCTRSTARPAGWQWRIPLQHRTGNGYVYASAQISDDEAAGSLLAALDGEPLAEPRFLKFTAGRRRRAWVGNVVSIGLASGFLEPLESTSIHLIQSGIAKLVTLFPERDCDPALAARFNAVFDRDMLNIRDFLILHYHATEGHEGALWRHCRAMAVPDTLVERVHHYRRTGRVIVESDELFRETSWLAVLDGQGIVAEGWSPLADALDPATNRAQLEQIAEVIARAVPTLPSHDDAIAETIARAAA

SEQ ID NO: 82838 - protein, 509 aa, Xanthomonas sacchari
  misc_feature (1)..(509): tr|A0A2P5Z1V5|A0A2P5Z1V5_9XANT Tryptophan 7-halogenase OS=Xanthomonas sacchari OX=56458 GN=XsacCFBP4641_14685 PE=4 SV=1
MNLANTTDGRIRKVVIAGGGTAGWLAGCALAHQFRDRLDITLVESEQIGTVGVGESTVPPIRTFHRFLQIDEQEFLRAVAGTFKLSISFEHWRRPGDRFIHPFGTIGQGTWATPFHHFWLDSLRRGMPSDLGDFCLESVASRADRFSLETQPQVNYAYHFDAALYAKFLRRKAEGYGLRRVEGQIREVRQHAHDGSVASLLLADGQLIEGDLFIDCTGFRGLLTEQTLHTGYEDWREWLPSDRAVAVQTEAVAPPVPYTRAIAHEAGWRWHIALQHRVGCGLVFSSRHMSDDEAHAKLLRDVDGPPLRDPWLVPFRSGRRLQAWNKNVVALGLASGFIEPLESTSIHLTISAVVRLIQLFPHDGISPALVELYNTVSRQEMEHVRDFIILHYHATQRDEPMWKACREMALPESLAIRLRAWRERAHAWQDPGELFRVDSWTSVLLGQGIQPGPPHPLAAAIGDADLRTLLTRIRQPLQQASAAMPSQAEFIERYCKATPDVWQRSVSLA

SEQ ID NO: 82839 - protein, 515 aa, Asticcacaulis benevestitus
  misc_feature (1)..(515): tr|V4PH04|V4PH04_9CAUL Uncharacterized protein OS=Astic cacaulis benevestitus DSM 16100 = ATCC BAA-896 OX=11210 22 GN=ABENE_18395 PE=4 SV=1
MAKSIIIVGGGTAGWMTAAYLARMLATSTPGGARITVVESEDFGIIGVGEGTFPSIRKTLGRIGLAEADLIRSANATFKQGIAFVNWRSTGSAGPDRYFHPFQIADQGSGLDLLPYWLAGAASGQDWASASNVQMRVADAYRAPKLITHPEYAGPLNYAYHFDAVAFAGLLRSRAIEQGVTHVFDTIDNVTMAPTGEIESLVGRKTGRLTADLYVDCTGFRAQLIGQAMGVPFKSFKSQLFTNRAVAIQVPYDDPAAPIPSYTKAVAQTNGWIWDIGLQERRGTGYVYSSDHTSDEAAEACLRTYIGHAADDLPSRILKFEAGYREVQWKKNCVAVGLSAGFIEPLEATGIGFAEIAGVILAALFPWSDQCDSGAEQFNAQMRERYAHVIDFIKLHYCVSNRRDTDFWLDNINPGSISDGLRDRLEQWKYRAPSFIDVDLKHDIFTEHNWQYVLYGMGYKTILGDRIAALRYFDEARAEFQEIQKQAEYALTIMPEHRSLVELVRRQGFTPKRAA

SEQ ID NO: 82840 - protein, 504 aa, Maricaulis maris
  misc_feature (1)..(504): tr|A0A495CXW5|A0A495CXW5_9RHOB Tryptophan halogenase OS =Maricaulis maris OX=74318 GN=C7435_3090 PE=4 SV=1
MTPNRIKSVLIVGGGTAGWMAAAALSRFLGETIKIQLVESEQIGTVGVGEATIPQIKHLNSALSIDEREFVARTNGSFKLGIEFINWRRQGEAYLHNFGSIGLNLQQVPFHHYWLRARAGGASESLWDYCLNTAAARQMRFAPLEKVGNSPLSGIAYAYHFDASLYGKFLRDYAEQRDVIRVEGLIDDTIMAPESGHVTAVRLRDGRTLEADLFIDCSGFRGLLIEQALKTGYEDWAHWLPCDRAIPVPSSNAQAPIRPYTQAIAHNAGWQWRIPLQHRTGNGHVFSSAHMSEAAATETLLANLEGEALAEPRVIRFVTGRRKQFWNRNVVALGLASGFLEPLESTSIHLVQSGISRLIALFPDGDLAAADRDEYNRQMALEYERVRDFIILHYHLNERTDSDFWQDCAAMSVPDTLSAKLDLFRANGRLYHREEDLFTDSSWLQVMLGQGVNPKGYHPMADALAAGQLSDFLGNIQKIVGQAAATLPTHSDFLAKHCPAAMDS

SEQ ID NO: 82841 - protein, 512 aa, Pelomonas sp.
  misc_feature (1)..(512): tr|A0A397R132|A0A397R132_9BURK Tryptophan halogenase OS =Pelomonas sp. BT06 OX=2135721 GN=C8K28_3284 PE=4 SV=1
MENHKPLQKVVIVGGGAAGWMSAAALSAVLRPPYEIRLIESDEIGIIGVGEATIPPIRVFNDLAKLDEAEFLKATQGSFKLGIEFVNWGRQGERYFHGFGNIGREPLWPVDFWQYWLRMRALGRALPLDAYAISNMAAQAHRFMLPRPEMRNSPLGNIGYAYHFDASLYARFLRRISESRGVRRTEGKVVQVLLNEQAGPNQGHVRAVRMESGVLVEGDLFLDCSGFFGLLIDKAMGTGFEDWSHWLPCDRAVAVPSESSGPLLPYTRSTAHRAGWQWRIPLQHRVGNGHVYSSAHVSDDEAAATLLKHLDGKPLAEPRLIKFRTGMRDHAWKHNVVAIGLAAGFVEPLESTALHLIQMGIGKLIEHFPHSGFVPEEIAEYNRQSRARFEDVRDFIILHYHLNQRDHGEGIDFWKACAAMSVPERLRRRMDLYAASGRILYEDGELFRTPSWLEVMEGQNLRPRGWLALAELQGVDDTANYMKGISDTIAACVAAMPEHAEFLRRYCPAAPV

SEQ ID NO: 82842 - protein, 379 aa, Vitiosangium sp.
  misc_feature (1)..(379): tr|A0A2T4VER0|A0A2T4VER0_9DELT Tryptophan halogenase OS =Vitiosangium sp. GDMCC 1.1324 OX=2138576 GN=DAT35_3022 5 PE=4 SV=1
MDRARHDVAVLGGGPAGTAVALALRRHTGHSVALIERSTYQEPRLGETLPPDSRTLLARLGVWEAFLQQGHLRSGGTCSNWGSETLGYNDHLLSPWGPGWHLDRRRFDLMLAEEAARRGVDLYTSAALAGWEHLEEGGYRLHVRRPGEGGPTTCLHARFVVDATGRRAAFATARGARRLTLDRAFSLYGFFHVRPGQMFDAYTLVEAREEGWWYSALLPGGRVVVGLVGDGESLRGLKPGHPEPWLALLERAPATRRKLDACAFTGETLLSLPANIARLDRMRGEDWLAVGDAACTYDPLSSQGISQALRSALLAAEALRRHFRGEPGALNSYEDTLQRQFQAHLHTRARYYRMERRWPTAPFWSHREQVPGQGFARAR

SEQ ID NO: 82843 - protein, 527 aa, Sphingomonas spermidinifaciens
  misc_feature (1)..(527): tr|A0A2A4B6G5|A0A2A4B6G5_9SPHN Tryptophan halogenase OS =Sphingomonas spermidinifaciens OX=1141889 GN=COC42_046 85 PE=4 SV=1
MATEERAATSSENAVRKVVIAGGGTAGWMTAAALAADLADAGLEIELVESPEIGTIGVGEATVPFIHTFNRMLGLDQADFMRRCNATFKLGIEFVGWRDVGESYFHSFAQFGPNFKDVSFYHMYLRYAALMAAKGADVPIEASNVGAVAARHSRFRHPHTVEKSGLPPHHYAFHFDAALYADYLRTYATARGVRHISGRIVEVAQVPETGFIKSLRLEDGRVLAGDLFVDCTGLAGLLIEKTLGSGYEEWKHWLPCDRAVAVPCAKAASPIPYTQASAEASGWRWRIPLQHRTGNGMVYSGAFADSDDAVEARLMEAIDGEPLAAPRRIRFTPGRRREVWVKNCVSVGLASGFLEPLESTNIHLVQSIAFKLLSYFPDRHFDQREIDAFNAEMQLEIEHIRDFIILHYKVTEREDTPFWAYCKHMSVPDSLQARIDMFRPHGRLFVKPGEFFTYNSWLSVMHGQGLRADRLVRQIDRLTDEEVIAYFEAFNGRVASVVASMPAHDAYLQAFVSARDTVTALRGAAGR

SEQ ID NO: 82844 - protein, 492 aa, Asticcacaulis benevestitus
  misc_feature (1)..(492): tr|V4PHG1|V4PHG1_9CAUL Uncharacterized protein OS=Astic cacaulis benevestitus DSM 16100 = ATCC BAA-896 OX=11210 22 GN=ABENE_17215 PE=4 SV=1
MTAAALAHKLRGLPVRIELVESEEIGTVGVGEATLPLIRKFNEALNIDEATFMKETEATFKLGIEFCDWGRPGDRYIHPFGDYGRPVDNIPFYQAWLRLRQLGETARLDDYSYPIIAAEMGRFQRPGGDPDAIQAGFGYAYQFDSSRYAQFLRRYAEASGVIRTEGKVATTVCDPETGFVRSLVLDNGKTAMAELFVDCSGFRGVLIEQTLKTGYDDWSNWLPCNRAIAVPCESRGPLMPFTRATAREAGWQWRIPLQHRVGNGHVYCSSFISDDEATTQLLGHLEGPALASPRQLFFTTGRRRKFWNRNVVAIGLAAGFLEPLESTSIHLIQEGITELLQLFPDTGFHSADADEYNERMGLAFERVRDFLLLHYVANQRDDGELWLHFQNLALPASLEEKISAWMTRGHIIKYEFGTFLPPSWLAVLLGQNLIPRGYDPRTLKIPEDRLRAESRRLREAVLAAAQRTPDHAAFLRQVGGASHQAPLTAGVG

SEQ ID NO: 82845 - protein, 500 aa, Sphingobium algorifonticola
  misc_feature (1)..(500): tr|A0A437JAC2|A0A437JAC2_9SPHN Tryptophan 7-halogenase OS=Sphingobium algorifonticola OX=2008318 GN=ENE74_0858 5 PE=4 SV=1
MTQPHLPRRIVIAGGGTAGWMTAAAIARTLGPVAQVTLIESDQIGTIGVGESTIPPLVAYNRILGIDEAAFMRATQATFKLGINFENWRVAGESYFHSFGGTGKDHWSAGFQHFWLHGRDQGMAHAYGDYCLELKAAEAGRFAHLPDDRTNYAYQLDSALYARFLRGMAESDGTVRVEGRIAHVELDSETGDIAALLLEGDRRIEGDLFIDCTGFRALLIEGALHAGYDDWTHWLPCDGAVAIQTASVRPPVPYTRAIAHEAGWQWRIPLQHRQGNGIVYCSAFMEPDAALERLLATIEGEALVRPNPIRFQTGARRRQWHRNCVAVGLSAGFLEPLESTSIHLIQRAVLRILRMLPAGPVSVRDIDEFNDQQMTDMVQIRDFLILHYKVTDRRDSPFWRHCAAMAVPDSLTHRLALFRETGRVFRKNEELFAENSWVQVMMGQGILPQSYHPVAAKLRPEELAHLLQSLRDQVARTVDAMPSHADYIARYCNAQAPIAA

SEQ ID NO: 82846 - protein, 507 aa, Maricaulis maris
  misc_feature (1)..(507): tr|A0A495D699|A0A495D699_9RHOB Tryptophan halogenase OS =Maricaulis maris OX=74318 GN=C7435_1830 PE=4 SV=1
MTDQRIRKIVIVGGGTAGWMTAAALAKVLGKDYADITLVESDAIGIVGVGEATIPQIKIFNAMLGLDEDRFMRDTKGSFKLGIQFRDWGRKGDSYFHPFGPFGVDMEGVSFHAFWLRMNQLGEPYPITDYSVQSVAGENGKFMRPIANAGTSPLGQIAYAFHFDAHLYAKFLRGFAEERGVKRIEGKIDQVHQRGEDGFIEAVELENGTRIEGELFIDCSGFRGLLIEQTLKAGYEDWTNWLPCDRALAVPCEGSDEITPYTRATAREAGWQWRIPLQHRVGNGYVYSSNHISDDEAAAALLANLDGKPLADPRLLRFVTGRRKQAWVKNCVALGLSSGFLEPLESTSIHLIQSGIAKLLQMFPRTSFEPADIDRFNARTREEFERVRDFIILHYNATTRDDTPFWDHCRTMQVPPGLAEKYRIFEGYGRVFRENEELFNDTSWFAVMIGQGLKPRSFDPVAECLSVEETRRRLAQIRQAMRASSDHMPTHADFIAKTCAAEMEPMT

SEQ ID NO: 82847 - protein, 527 aa, Pseudoxanthomonas suwonensis
  misc_feature (1)..(527): tr|E6WQL7|E6WQL7_PSEUU Tryptophan halogenase OS=Pseudox anthomonas suwonensis (strain 11-1) OX=743721 GN=Psesu_ 0608 PE=4 SV=1
MDKNRIRKVVIAGGGTAGWVTACALTHQFRDLLDITLVESEEIGTVGVGESTIPTIRTFHRLLQIDEREFMKAVAGSFKLAISFENWKRPGERYFHPFGTTGVNTWSCDFHQFWLESRARGVQSELGDYCLETAAARLDRFALFDASEATQQWSMRWTKQATKLERSDVSYAYHFDAALYAVFMRNKCEGRGLKRIEGKIAQVRQDPDSGFVQSLVLEDGQVVEGDLFIDCTGFRGLLIEQTLKTGYEDWNNWLPCNRAVAMQVETSTPPVPYTRAIAHEAGWRWHIALQHRVGCGWVFSSDHMSDDEAAAKLRACYPDDNLVREPWIVPFRTGRRKQAWNKNVVALGLASSFIEPLESTSIHLTLSAVTRLVQMFPFEGISQAVADRYNKVSRDELEHIRNFIILHYHLNQRDEPMWKQCREMELPPELAQRIQVFRDTAYAWQGEDELFRLDSWTHCMLGQGVVPANHHPLTRGLSDADMRTLLEGVRRPIDRVVAQMPQHQEFLNRYCPADPSVWQMRRRSTVG

SEQ ID NO: 82848 - protein, 510 aa, Sphingomonas spermidinifaciens
  misc_feature (1)..(510): tr|A0A2A4B7B3|A0A2A4B7B3_9SPHN Tryptophan halogenase OS =Sphingomonas spermidinifaciens OX=1141889 GN=COC42_065 15 PE=4 SV=1
MAGSVTRIVIVGGGTAGWLAAARLAAAVEPGRVQVTLIEAPDIPTIGVGEGTWPTMRCTLSRIGISETEFLSACDASFKQGSRFFGWRDGRDAYHHPFTPPVEGSAAALVAGWGGAGAFADAVCAQPAVAERGLAPRQPAMPDYAGALNYAYHLDAGKFAALLRAHATERLGVAHIADHVESVVPGEGGTIAAVATRANGEVAGDLFIDCTGHAALLLGGYCRVPFVDRSDALFNDRALAVQVPVAPGSTIAAVTDATAHEAGWIWDIGLPTRRGIGCVYASAHMDDDRAAAVLTDYLRRSAPDCDPRAISFRKLQFRSGHRERFWAGNCLAIGLSAGFLEPLEASAIVLIELSLDALVEDFPADPGAMAGAAGRFNARFRQRWDRIVAFLKLHYVLSERDEPYWQAHRDPATIPAELGVMLDRWRHRAPMPSDFDAVDELFPAASHQYVLYGMGAPMPPPPAMRIEDAAPVADRMGQLRQRARALAASLPTNRTYLDTLAARPLLKEAR

SEQ ID NO: 82849 - protein, 495 aa, Alteromonadales bacterium
  misc_feature (1)..(495): tr|A0XZU4|A0XZU4_9GAMM Putative tryptophan halogenase O S=Alteromonadales bacterium TW-7 OX=156578 GN=ATW7_0798 4 PE=4 SV=1
MTKTNAVKNVVIAGGGTAGWMAAAALAKLIGKNIHVTLVESDDIGTVGVGEATIPPIRTFHKLLGINEQAFMKATQASFKLGISFENWGDENTRYIHSFGVTGKECWAGEFHHFWLQGKVLGINNPFGDYCYELQAAKAGKFAFNQQNPINYAYHMDATRYAQFLREFSEPLGVKRVEGKIQKVVKSAKTGHIESLLLHSGEQINGDFFIDCTGFRGLLIEQALHTGYEDWSHLLPCNSAIAVQTKSTSDTVLPLTRSIAHKSGWQWRIPLQNRVGNGLVYCSQYMDDEQAKALLLNNIEGEALTEPRVIKFKTGRRLKGWNKNCLALGLASGFVEPLESTSIHLIVSGIIRFMRLFPFNGITNYAIDEYNKQLKSEIENIRDFIVLHYKVTNRDDSEFWQHCSAMEVPTTLQHKIDLFKQTGRVFLDDGDIFRVDSWVQVMLGQGIVPEQHHLIASMMSDEELARFLHGIKQQIEQRVSQLPPHHEFLKHYCPA

SEQ ID NO: 82850 - protein, 512 aa, Sphingomonas spermidinifaciens
  misc_feature (1)..(512): tr|A0A2A4B7J6|A0A2A4B7J6_9SPHN Tryptophan halogenase OS =Sphingomonas spermidinifaciens OX=1141889 GN=COC42_044 25 PE=4 SV=1
MRGGETIGRVVIVGGGSAGWMTAAALSRLCAAGVEVTLVESDAIGTVGVGEATIPPLLDFNAALGIDEPAFVKATRATFKLGIEFVDWARRGERYLHPFGRIGRAQMGVPFHQIWLRQRQLRRPDLDPGPLGAYSIAEAAAVRGRFAKPVANPEAVLSGLSYAYHFDAGHYARFLRDFAEARGVRRVEGRIAAVERRGEDGFITGVTLDDGRRVEGELFADCSGFRSLLLGEALGVPYRSWQHWLPCDRALAVQSEPTAPLLPYTRATADVAGWRWRIPLQHRTGNGHVYSSAHLGDEAAREALLAGLDAPALSQPRMLRFVAGRRERLWDRNCVAIGLSGGFIEPLESTSIHLIQQGITRLLSLFPDTGFAEGEVAAYDRLMVEEYEHIRDFIILHYHATARRDSAFWRDVAAAELPDSLAERIELWRGKGRLLPIPNGLFTEESWLAVLIGQGILPTGSDPFAAILPAGETARFMAHLRHVVARTAEAMPFHEDFLGGDARIEPQERLRA

SEQ ID NO: 82851 - protein, 144 aa, Shewanella psychrophila
  misc_feature (1)..(144): tr|A0A1S6HTF7|A0A1S6HTF7_9GAMM Tryptophan halogenase OS =Shewanella psychrophila OX=225848 GN=Sps_03681 PE=4 SV =1
MARDSGWQWRISLQHRVGNGLVYCSRFISDEDAIASLMDNLESAVITEPRVFKYKTGSHRIELFKDTACVFLTETELFRIDFWTQVMLGQGIMPKHYHRIVDNMNDTELKRFLASLKQMVDKQVTQMPSHQDFIDQYCKSPQLA

SEQ ID NO: 82852 - protein, 527 aa, Maricaulis maris
  misc_feature (1)..(527): tr|A0A495DDJ5|A0A495DDJ5_9RHOB Flavin-dependent dehydro genase OS=Maricaulis maris OX=74318 GN=C7435_1538 PE=4 SV=1
MNQTCNSILILGGGSAGWLTAAYLARRLGSGRPDGPTITLVESPNVPSVGVGEGTLPSLRLTLATLGVDEAAFMRASEATFKQGIHFSGWSQSPDGSPASYFHPFNSPRQLGGIDLAPYWSLGAAGKGDSYTRAITPQHDVYTAMKAPKRLEDAPFSGPLNYAYHLDVHRFGEFLKAYALGLGVKHVSDHITAVERAETGDIAGLDGEASGRLTADLYVDCSGFKARLIGDALGEPLVPVGDSLFCDRAVAIQVPWERPDAPLPSATISTAHEAGWTWDIGLRQRRGVGYVWSSAHSDADAAETILRRYVGQDADDHPVRHLTMTTGFRRRQWVGNCVAVGLSAGFLEPLESTGILLIEAAAHLIADNLPRRGDFAPAARHFNSAMGQRFTCAVDFLKLHYALSNRRDTAFWRDNADPASWPLSLRDKLDRWQVRLPNAHDLDSAHDSFRHINYAYVLIGMGAAPDLAGDRARYPFMSEASAEFARIQDATGRAMAALPDHRTLVESLQTHRFGAAAPRTASMGGAR

SEQ ID NO: 82853 - protein, 499 aa, Rheinheimera sp.
  misc_feature (1)..(499): tr|A0A3S2UHI1|A0A3S2UHI1_9GAMM Tryptophan 7-halogenase OS=Rheinheimera sp. YQF-1 OX=2499626 GN=EMM73_15775 PE= 4 SV=1
MPTPIRHLVIAGGGAAGWMTAAMLSKLFPHHLQITLVESEEIGIVGVGEATIPPILLFNQALGITEADFIRATQGTFKLGIQFENWGQQGDKYMHAFGDIGKDLGLTSFHHFWLRAQQQGVTDSYWDYSPCYQAARRNKFAPLHQLPGTPFKQLSYAYHFDASLYAATLRRLSEQQGVTRIEGKIASVTQHQTSGDIQTLVMENGQVIQGDLFIDCSGFKALLAEQTLKTGYEDWSRWLPCNRALAVPSANCSAAVPYTRAIAHQTGWQWRIPLQHRTGNGVVYCSDFLSDESAQQHLLSNLEGKALAVPRPIRFTTGRRKQQWHKNCISLGLASGFLEPLESTSLHLIQSGIIRLAKLFPSTTDYASQRDQYNRQSVTEFEQIRDFIILHYHQTQRDDSEFWRYCRTMSIPDSLSHKMELFRQSAVVQREQDDLFSEVAWQQVMLGQNLKPQYYHPLANQVPAEKLQQFMTDLKLIVADIVGKLPSHQASIEQLLARA

SEQ ID NO: 82854 - protein, 506 aa, Pelomonas sp.
  misc_feature (1)..(506): tr|A0A397QT69|A0A397QT69_9BURK Tryptophan halogenase OS =Pelomonas sp. BT06 OX=2135721 GN=C8K28_4702 PE=4 SV=1
MKTRRIAIIGGGTAGWLAANHLGYELCADAEVEITVIESPDVPIIGVGEGTVPAIKTSLRKFGISEADLLVACDTTFKNGIKFQGWLDAAKHGEGHFYYHPFASPFPDGLDITPAWLEQQQRPFSDVSISTRVAEAQRCPKQISSPPYAGEVEYAYHVNAHKFAALLAENAQKRFRVRHLFATVVDAERAADGSIAALRMASGEIAPFDFYVDCSGFASLLTQRVLKVPFVDKSHQILTDTALVQQVPTNPDEEIPPYTLAVAHEAGWIWDIPVTHRRGTGFVYASSHMSESRAIECYARHLGVSPDTLAPRRIPMKIGYRQQFWFQNCVALGLAQGFVEPLEATSILVTDFSANLLSRNFPRMRDDAQALRHGYNEAVTYTWERVIDFVQLHYHLSDRGDSSFWLENRHEAHLSDLLRERLARWAIRHPQKNDFSSRFDLFDVDNHLYVLYGMRFATRPLPISDFERRESLEQFEHVTRAVEQAVRTLPSHRDWLVGLRAAYQRP

SEQ ID NO: 82855 - protein, 481 aa, Asticcacaulis benevestitus
  misc_feature (1)..(481): tr|V4NC16|V4NC16_9CAUL Uncharacterized protein OS=Astic cacaulis benevestitus DSM 16100 = ATCC BAA-896 OX=11210 22 GN=ABENE_22660 PE=4 SV=1
MLAKTLGTEIFNITLVESEEIGTVGVGEATIPPIQLFNEILGINEDEFVRETNATFKLGIHFLDWRKPGVRYFHPFGQYGVDMDGIGFNAFWLRMAQMGGDGDYGRFNAETLAAGQNRFGRTQKSLTSILPDINYAFQFDASQYAAFLRRYSEARGVKRIEGKIATVTQHPENGFIKSVQTEDGRIIEGDFFLDCSGFRGLLIEQTLKSGYEDWSAWLPCNRAVAVPCEKAPGPIAPYTRATAREAGWQWRIPLQHRTGNGYVFCNEFIGEDEACDNLLACLDGKPLKDPKVLSFVTGHRKKIWNKNVLALGLASGFLEPLESTSIHLVQTCLTRFLAMMPKRDIDDATVDAYNQIVLAEYVNIKDFLIAHYNVTEREDTPFWKYCKHMSIPDSLKARLDIFARQGNANVRPTELFKESSWFAVLLGQGLVPRDYHPVADVISEADLKRRLDKIRANITERVKGLPTHNDFIARYCASRTS

SEQ ID NO: 82856 - protein, 504 aa, Sphingobium algorifonticola
  misc_feature (1)..(504): tr|A0A437J8T7|A0A437J8T7_9SPHN Tryptophan 7-halogenase OS=Sphingobium algorifonticola OX=2008318 GN=ENE74_0650 0 PE=4 SV=1
MREQTRQPAPLPRRIVIVGGGTSGWMAAAAFSRFLGEGWYVRLIESEDIGTVGVGEATIPQIQHFNAGLGIDEADFVRATQGSFKLGIVFADWLRPGHRYIHAFGGIGRPLGLIAFHHYWLRHCVQDGADDLWAFSATAQAAAQNRFGPAPAIAHAYHFDASLYAAYLRRYAEARGVERIEGKVVDVTQDSASGDIVSVTLDGGLSVEGDIFVDCSGFRGLLIEGALNSGYEDWRHWLPCDRALAVPCESVSPITPYTQSTARAAGWQWRIPLQHRIGNGHVYCSDHMSDDEAARILLDNLDGPALADPRPLRFVTGKRRQIWKNNCVSLGLASGFLEPLESTSIHLIQAGIARFLQYLPGETVDTADRDAFNAQMDFEFASIRDFIILHYHATEREGPMWQHCREMALPDSLAQKIALFRANGRIARFNEELFTETGWLQVLWGQGIRPRGWHPLADALSEADLAEFMMLAKAQASQQAAALPTHEAYIAAHCAAPIPQRIPA

SEQ ID NO: 82857 - protein, 488 aa, Pelomonas sp.
  misc_feature (1)..(488): tr|A0A397QW36|A0A397QW36_9BURK Tryptophan halogenase OS =Pelomonas sp. BT06 OX=2135721 GN=C8K28_3303 PE=4 SV=1
MIPPKHIAIVGGGTAGWMTANLLRHRWAGLGVDVTLIESADIGTVGVGEGSTPFMRHFFRTLGIEERDWMPACDATFKSSIRFPGWSRVAGYESYVHPFFSEADRELGNLFFTNACLRRRGQAADANPQDFFLAAELARQRRAPLGTDYAYHFDAGKLGGFLREHAVGLGVRHVVDTVARVEQHENGDIAAVHLKSGARIAADLFVDCSGFKGLLITETLGEPFHPYRDNLFNDRAIAIPTPLVDNEDIPCETVSTALRHGWAWQIPLTTRYGNGYVYSSDFVSDDEAERELREHLGAAAEGATARRLRMRVGRVKQHWRQNCVAIGLAQGFIEPLEATALMLIQLSVEQFIAALEDDGFGRARQSAYNERVNAMFEGVRDYVVAHYQLNTRRDTDYWRANRANRNISDRLASLLDVWDRGGDFEAELERHGAGLMYLRPSWYCLFAGMGRFPAELRAAPQTITAAQAQERLNQMVRAFASHRAHLTA

SEQ ID NO: 82858 - protein, 515 aa, Thalassobius activus
  misc_feature (1)..(515): tr|A0A0P1IV03|A0A0P1IV03_9RHOB Flavin-dependent tryptop han halogenase RebH OS=Thalassobius activus OX=1715691 GN=rebH PE=4 SV=1
MTKSDPTHLVIVGGGTAGWLAAHLFKTESERQGIPMRITLVESSKVPTIGVGEGTTSVFGGVLQSLGFDEEDFLAHTDATIKYGIRHRDWRRLGHVYDGPIDDAYALTDRIPGAGSWIDTFCVAAGRSVSAPHIFAKLMETGKAPVAEMGGRRVPVSRFHHAYHFDQAKVGAYLRRKATDISKIDALVESAERDGKSGCVTKLRLDTGETIAGDFFIDCTGFRRTLIQGTMGASWVSYSDALPVNRAMPFWLDLAEDEEIPTFTHAWAQASGWMWQIPTQGRIGCGYVYSDRHSSPDIALAEIEGVLGRKIEPRADIPVDAGRISEVWRGNVLALGLASSFLEPLEATSIHGTIVAVLLFCRRHLLQISAPLQKNQQRYNAAIAKQVDDFRDFINLHYVSERDDSPFWRDVATDFILPQVRQKLINWQERMPGPEDFTNDLDGLPHVEELLHYPVLDGLGLLNRSVARERMAQDRKLRDFARATVDHLEKQAGNVASHAISHRAWLSSLSSNAIA

SEQ ID NO: 82859 - protein, 500 aa, Unknown
  misc_feature (1)..(500): tr|A0A0N0J8C9|A0A0N0J8C9_9PROT Tryptophan halogenase OS =beta proteobacterium AAP51 OX=1523421 GN=D621_18585 PE =4 SV=1
MTLEPVRNIVIVGGGTAGWMTAAMLSEVLEGRYAMRLVESDEIGIIGVGEATIPRIIEFNTALGIDEDEFLRATQGTFKLGIEFVNWGAIGDRYVHGFGFVGQATQALPFHHFWLRMAQLGRAQPLDAYSINTAAPRAGKFMRARKDMPGSPVADISHAFHFDAGLYARFLRGLAEGRGVRRTEGKIARVSQREPDGFIDAVVMESGERIEGDFFIDCSGMRGLLIEQTLKSGFDDWSHWLPVDRALAVPCASAGPLLPMTRATAHRAGWQWRIPLQHRTGNGHIYCSSFMGQDEATDILLQHLDGEPLADPRPLKFTTGRRRQFWNRNCVAVGLSSGFLEPLESTSIHLIHTAITRIIGFFPHAGFDAADIAEYNAQTHWEYERIRDFLVLHYKCTERDDSEFWNYCRTMPVPETLQRKMDLFRSNGRVQRDGLELFAESSWLQVMVGQRLMPKAHHPFADLRSEDEVAAYVQHIALVIDKCVKAMPTQAEFIAQHCRA

SEQ ID NO: 82860 - protein, 481 aa, Asticcacaulis benevestitus
  misc_feature (1)..(481): tr|V4Q205|V4Q205_9CAUL Uncharacterized protein OS=Astic cacaulis benevestitus DSM 16100 = ATCC BAA-896 OX=11210 22 GN=ABENE_09560 PE=4 SV=1
MTAAFLTRFFSPLQMSITLIESTEIGTVGVGEATIPPIRAFNHSLGINEAEFMRATQATFKLGIEFRGWREPGHTYMHPFGYTGAKINGQSFHPFWIRARQMGQGHAFAEYSLNTLAAYAGKFDWPSADPSSPKSTLAYAYHFDAALYAAYMRRLSETRGVQRLEATITHAKRSAEDGGIDTLCLSDGREVAGDFFFDCSGFRALLIGEAMNVPFEDWSNHLPANRAVAIPSGVSQDILPYTQATAQSAGWHWRIPLQHRTGNGYVYASDFISDEAAAASLLQALDAPPMADPRVLKFTTGHRKAFWVKNCLAIGLSGGFLEPLESTSIHLIQNALTRLSSVFPTRRIDGVSARLYNRVMSEEFETIRDFLIFHYHVNGRQGEPMWDYLRHMSIPSSLAEKIDLFCERGLTSFPNQTVFQEENWMSVMLGQGLVPQTFDPLVGAVPDAGMLAALKQIHQTCLQTLSEMPAHTVALKKAQTP

SEQ ID NO: 82861 - protein, 514 aa, Xanthomonas gardneri
  misc_feature (1)..(514): tr|F0C4Y3|F0C4Y3_9XANT Pyridine nucleotide-disulfide ox idoreductase OS=Xanthomonas gardneri ATCC 19865 OX=9257 77 GN=XGA_1944 PE=4 SV=1
MHVQERIDMIPAPLRNIVIVGGGTAGWMAAAAFARVLGPGFNVQLIESEQLGTVGVGEATVPHIKAFNNLLGINEAEFVRQTQGSFKLGIEFVDWQRPGTSYIHGFGTQIGHPLGLLPFHQYWIKQHLRGKAQPLGAYTLNTVAAVRGKFMTSAGDVPANSPLANIAYAYHFDASHYARFLRSYSEQRGVTRIEGMIEQVQLHPNTGHVQSLQLASGQVVSGDLFIDCSGFRGLLIEEALHTGYHDFTHWLPCDRALAVPCEKVGPPTPYTRSTARAAGWQWRIPLQHRTGNGYVYSSAHISDDEAAATLLANLDGKALADPRPLRFTTGRRKQFWNRNVVALGLASGFLEPLESTSIHLIQAGISRLLELFPREGISPVLVQRYNDRLAFEFDRIRDFLVLHYHATERDDSAFWRHCRTMPITPELQTTLDLFRDSGRFYRNAEEMFAEISWVQVMVGQGVLPQGYHPLVDQVPDRDAEGFLTSIAQTIGHCVDVMPTHQQFIDRYCRAAALP

SEQ ID NO: 82862 - protein, 506 aa, Pelomonas sp.
  misc_feature (1)..(506): tr|A0A397RUM2|A0A397RUM2_9BURK Tryptophan halogenase OS =Pelomonas sp. BT06 OX=2135721 GN=C8K28_3102 PE=4 SV=1
MMPGRINTLVIVGGGTAGWMTAAALAKVTHGRVKITLVESEEIGAVGVGESTIPMIRLFNQMLGIAEDEFMRETQATFKLGIEFRDWGALGDCYLHAFGQIGHRSRILPFHHYWLRMHQAGKAADLWAHSINGAAMRAHRFMRADASLGHSPLAEIVHAFHIDAGLYARYLRRYAERLSVQRTEGRVLDAQLHENGHVRSVRMASGELIEGDLFIDCSGFRGLLIEQTLKTGYEHWNHWLPCDRAVVVPSRSDPDLLPFTRATARPAGWQWRIGLQHRVGNGHVYASQAMGDDEAAALLLRNLDGEALAEPRVLRFESGRRRKVWNRNVIAIGLASGFMEPLESTSIHLVHSAIARLIQFFPDAGFNPADIAEFNRQSDFETERIRDFLILHYHATSRSDTHFWNHVRTMDVPDTLQAKLDLWRASGRIVRHGDELFSEVGWLQVLHGQGLQPRGHHPLADALPESEINDYLEDTRAVIQRCVAQMPTHAGFISAHCAATKDLETC

SEQ ID NO: 82863 - protein, 518 aa, Alteromonadales bacterium
  misc_feature (1)..(518): tr|A0Y3N6|A0Y3N6_9GAMM Putative tryptophan halogenase O S=Alteromonadales bacterium TW-7 OX=156578 GN=ATW7_0911 6 PE=4 SV=1
MNQQNKKIKAVVVVGGGIAGWLTAGRLAAHHKSNTPDGLNVVLVESPNVPIIGVGEGTWPTMRSTLIALGISETDFIRECEASFKQGAKFAKWVDGSEDDFYYHPLVLPQGFSKTDMAGHWLNNTAESTSFSNAVCYQEAICEQGLAPKTIRTPEYAAIANYAYHLDSAKFAVFLQKHCTQQLGVKHILADVTQVNSADNGDIASVITKQQGEISGDLFVDCTGFSSLLLGEHYKVPFMPCDDVLFIDTALAVQVPYENDDENIASHTISTAQEAGWIWDIGLQHRRGVGYVYSSKYSSEAQAREKLKAYVGDKIESLTIRKIPIKSGHRSHFWQNNCVAVGLSAGFLEPLEASALVLVEMSAQMISEQLPQTRDIMDITAKRFNETFTYRWEKIIDFLKLHYILSTRDDNAFWRDNRDPKTIPQSLQDLMKLWQYRAPADHDFTSNNEVFPAASYQYVLYGMGFKSDYSTTTYMLKDTVFAKSQFDKNKSMINQAVTNLPSNRELLNKIKHHGFSAI

SEQ ID NO: 82864 - protein, 527 aa, Rheinheimera sp.
  misc_feature (1)..(527): tr|A0A3S2TIJ3|A0A3S2TIJ3_9GAMM Tryptophan 7-halogenase OS=Rheinheimera sp. YQF-1 OX=2499626 GN=EMM73_18885 PE= 4 SV=1
MLDADKAADRTVQTVVIVGGGNAGWLTAGRIAAKHKAKAGGIKVVLVESPSVAPIGVGEGTWPTMRSTLIALGISETDFIRECDATFKQGAKFARWVTGAEEDFYYHPLVLPQGFSKADMAAYWLQAQSKPELAPQFSSFSNDLCYQEAICERSLAPKTIRHPEFGAVANYAYHLDSGKFGLFLQKHCTEQLGVEHILDDVTAIQSAANGDIAAVQTKNSGLIAGDLFVDCTGFSSLLLGKHYQVPFKACDDILFIDTALAVQVPYPNEDAPIASHTISTAQDAGWIWDIGLQHRRGVGYVYSSKHCSEEEARATLARYVGPAISDLKVRKIPIVSGHRTEFWKNNCVAVGLSAGFLEPLEASALVLVEMSAQMISEQLPANRQVMDIVAKRFNQTFLYRWDKIIDFLKLHYILSKRSDTAFWRDNRKPETIPQSLQELMQLWSHRAPCDLDFTSNNEVFPAASYQYVLFGMGFKPNLSAQQYLLDNWDFATQQFQQNRKMIEQAVSTLPTHRELISKIRHYGFSRI

SEQ ID NO: 82865 - protein, 536 aa, Pelomonas sp.
  misc_feature (1)..(536): tr|A0A397QST6|A0A397QST6_9BURK Tryptophan halogenase OS =Pelomonas sp. BT06 OX=2135721 GN=C8K28_4708 PE=4 SV=1
MADTATIFNQQVAARPSSGSTDKPPPVQHVCVVGGGTAGWMTALMLATSAYGPRLKVTVLESPQVGIIGVGEGSTPWLRGFFDGLGIEESAWMPACNATYKSGITFEHWSTKPGFERYFHPFASMLDNMTMHQFVDNVHARLDGADVHAHPDRFFVAAALARQGRGPRPSHNFPFDLWYGYHFDATLLGQFLGRQAVARGVRHLERHVTQVQLTDNGDIGRLQLDGGETLAADFFVDCTGFASLLIGKALQTPFIPYAENLFNDSAIAMPTPLEGAIESQTTSTALRHGWAWKIPLTNRRGNGYVYSSAHCTADEAETELRRHLGLLDADVPARHLKMRVGRMEKQWRRNCVAVGLSQGFIEPLEATALLFVQRTAAALVEALELGDLGPAAQDRFNEGMRVRFENTRDYIVAHYKTNSRTDTDYWRANAENMHLSESLQGVLMTWMSRKPLAAGLKAGRFGQGYPIVSWYALLAGMGIFPDAADLQPPTPHQARHRLDAVDDFVTRSAMNFPDHRELLADIPPRVGDKTLQLYLW

SEQ ID NO: 82866 - protein, 497 aa, Pseudoalteromonas sp.
  misc_feature (1)..(497): tr|A0A0Q0FAF2|A0A0Q0FAF2_9GAMM Flavin-dependent tryptop han halogenase RebH OS=Pseudoalteromonas sp. P1-25 OX=1 723758 GN=rebH_2 PE=4 SV=1
MKPIKHVVIAGGGTAGWITAALLNKVLGKVIKITLIESSTIGTIGVGEATIPPIIQLNNALGINEQDFINTTHASIKLGIEFENWKNTSHSYMHAFGSFGKDFPFCDFYNFWIKGKITGSENSLWDFSLNYQAAKKHKFAPLNTIPNTQLPGLSYAYHFDATLYAEFLKNLAVARGVEHVDAKIEQVEQCPLSGNIKSLTLDNSQQINGDLFIDATGQRALLIEQTLNTGFVDWAHYLPCDSAVAVQSKGTDELKPYTRSIAHSAGWQWQIPLQSRIGNGLVYCSRYLSDDAATQLLLNNLSAELITAPRVIKFKTGRRLKQWHRNVVSVGLASGFLEPLESTSIHLIQSAVTRLIKLFPHNGISDALVTEFNRQSVTEIEHIRDFIILHYKLTEREDSPFWRQCKQMDIPDSLAHKLELFKETGKVVRENDELFAEVAWQQVFIGQGLIPEDYNSIVDSLSSEQLNDLFSTLNTLITSTVEQLPTHKEFLAKIKKA

SEQ ID NO: 82867 - protein, 498 aa, Planctomycetes bacterium
  misc_feature (1)..(498): tr|A0A5C5WB58|A0A5C5WB58_9BACT Tryptophan halogenase OS =Planctomycetes bacterium KOR42 OX=1938619 GN=KOR42_410 80 PE=4 SV=1
MTHWDVVILGASFSGSLIAAILAKNGLNVALVDSATHPRFAIGESSTPSADLILSSLVQDYELDELAPLCRYGSWTQTYPEIRCGCKRGFSYVWHGGDSGYQATANHNCELLVTASESNELADTQWYRTDIDQFIFEQAINLGASDWTSSTIETIQHVEPQSWSLAVTRAGQTERMRADFLIDTSGASGVLLSSLDIADVTQLLRTNTAAVFSHFDHVPSCEDWLAQSQARTKDFPYSIDHSAVHHVTEEGWLWQLRFRGGPTSVGFVTTPDSSEFREMKPIFETGQWDHPKNRFPASLFGGSQCSSIPGQVFSTGRLQRLRESGAGPDWAALPSTVGFIDPLHSTGIAHSLSGIQRLAKIILSGNSTSAREQLQAYSQSILTEHRLIDEMVSGCYRSLWSFELFSAWTMVYFAAATTFEKNYNSGRRDFLCSDDSSFLKTVSRLSQSLDQLNASGRCEKRIVEHLNFLRDQLAPYNHVGLFEPSIPGMYARTAAEKT

SEQ ID NO: 82868 - protein, 510 aa, Stenotrophomonas terrae
  misc_feature (1)..(510): tr|A0A0R0D0V7|A0A0R0D0V7_9GAMM Tryptophan halogenase OS =Stenotrophomonas terrae OX=405446 GN=ABB27_00750 PE=4 SV=1
MDAAKTHDGARIRKVVIAGGGTAGWLAGCALSHQFRDQLDITLVESEQIGTVGVGESTVPPIRTFHRFLQIDEQEFLRAVAGTFKLSISFENWRRPGEHFFHPFGTIGKGTWATPFHHFWLDSLRRGMPSDLGDFCLESVASRDDRFSLQTQPQASYAYHFDAGLYAKFLRRKAEGHGLRRVEGKIREVRQHAHDGSVQSLVLEDGQVIEGDLFIDCTGFRGLLTEQTLHTGYEDWHQWLPSDKAVAVQTEAVGPPVPYTRAIAHEAGWRWHIALQHRVGCGLVFSSKHMSDDEAHAKLLRDVGAPPLRDPWLVPFRSGRRLKAWNKNVVALGLASGFIEPLESTSIHLTISAVVRLIQLFPFDGISPSLVDLYNDVSRAEMEHVRDFIILHYHATQRDEPMWKACREMELPASLELRLRAWRERAHAWQDPGELFRVESWTSVLLGQGIQPGSPHPLARSLGDADLRTLLDGIRQPVWQAAAQMPSQADFIERYCKAEAEVWRPSVAMA

SEQ ID NO: 82869 - protein, 477 aa, Amycolatopsis lurida
  misc_feature (1)..(477): tr|A0A2P2FF85|A0A2P2FF85_9PSEU Tryptophan halogenase OS =Amycolatopsis lurida NRRL 2430 OX=1460371 GN=BB31_4185 5 PE=4 SV=1
MSSPQYDVIVVGGGPAGSTVSTLVSKAGHRVLLLEKEKFPRYQIGESLLPATVHGVIPILGVEKEVAEAGFTVKRGGTFKWGKRPEPWTFEFAVSSKMPGPTSFAYQVERMKFDDILLRNARKHGVEVREESSVVKAITDETGRVRGVHYKDSDGKVHEVFARYVVDSSGNTSRLFKASGAERHYSPFFRNLALFTYFEGAGRLPAPNAGNIFSVAFEHGWFWFIPLSPDLTSVGAVVHQDSAELVQGDPDEAMRRFIDACPRIKDILGDAKRITEGPYGSYRVRKDWSYCNSRFSGPGMVLVGDSACFVDPVFSSGVHLATYGGLLAARSINGCLAGTVDEDAAFAEFEKRYRREYGLFHEFLIGFYDMNKSEDSYFWQARKVSESASNDVEAFVELVGGVASNDLRLTADDLAATVESVEHKPGGAANGTVLTRMLKAGAGLQGRALLGSRSGEGAALEPGGLRASDDGLSWVRS

SEQ ID NO: 82870 - protein, 504 aa, Pelomonas sp.
  misc_feature (1)..(504): tr|A0A397S2G2|A0A397S2G2_9BURK Tryptophan halogenase OS =Pelomonas sp. BT06 OX=2135721 GN=C8K28_0440 PE=4 SV=1
MDAPRRIVIVGGGSAGWMSAAALAARLGQGAWQITLVESDEIGIVGVGEATIPPIRGFNARIGLDEDEFLRETGGTFKLGIEFVNWGARGERYMHAFGDIGRPLDELPFHQHWLRLGSEVPLAEFSINNLAALAGRFMRPRPDMAGSPLAEIAYAFHFDASRYAALLRRHSEKLGVQRIEGRIARVEREGDHIHRLHLHNGAFVEGDFFLDCSGLHALLIGQTLGVAFEDWSNWLPCDRAWAVPTASHGPLLPFTRATAHDAGWQWRIPLQHRVGNGHVFASAFTDEAAARDTLMRNLDAEPLAAPRLIKFRTGRRQQAWVGNCVAIGLSSGFLEPLESTSLHLIQSAVLRLIDLFPSAGLEAADIAEYNRQTAAEMASVRDFIILHYKLTRRDDSPFWRHCRAMAVPESLQARMDLFASHGRLFRQGQELFSEPSWLQVLIGQGPRPRGHHPLADTRPREQVQAFVADVRHVVRRCVDVMPTHADFLADINAVNQRHPSPHET

SEQ ID NO: 82871 - protein, 510 aa, Sphingomonas spermidinifaciens
  misc_feature (1)..(510): tr|A0A2A4B436|A0A2A4B436_9SPHN Tryptophan halogenase OS =Sphingomonas spermidinifaciens OX=1141889 GN=COC42_134 55 PE=4 SV=1
MSGGAGPIRDVVIVGGGTAGWMIAAAAARFLDDGQRRITLIESDAIGTVGVGEATIPPILNFNALLGIDEAEFVAVTRASFKLGIEFVGWGRAEDRYIHPFGTYGRDIHGVAFHQLWRKFAGRPGVGRIDDYAMSIAAARAGRFAHPAADPRDPRSQLAYAYHFDAGLYAAFLRRRAEAGGVARIEGRIAGVDRDAASGNVLAVTLDDGRRVEGELWIDCSGFRSLLLGETMGVPFVDWSHWLPCDRAWAVPCVRVDPLLPYTRSTARPAGWQWRIPLQHRTGNGHVFSSAFMTEEAALDLLLTNLDTAPTAEPRLLRFTAGRRTDPWRGNVVALGLAAGFLEPLESTSIHLVQHGIQLLFALFPDRSFAGIERAEYNRLMTAQFDAIRDFVILHYHATQRTGSPFWDHVRTMPIPDTLAAKIALFREKGRVFRYDDELFAVPNWTAVMLGQGIVPRGHDPVADSLDDARILAMMASHRRACAAAAAAMPDHDAFIDRLIGSSRGVSAGG

SEQ ID NO: 82872 - protein, 505 aa, Xanthomonas sacchari
  misc_feature (1)..(505): tr|A0A0A8DX80|A0A0A8DX80_9XANT Tryptophan halogenase OS =Xanthomonas sacchari OX=56458 GN=SB85_11965 PE=4 SV=1
MIAAPLRNLVIVGGGTAGWMAAAALARVLGSAYRITLIESEQIGIVGVGEATVPHIKAFNNLLGINEAEFVRHTQGSFKLGIEFADWQRPGTSYVHGFGTEIGHPLGLLPFQQYWFKQALAGKARPLGAYTLNTVAAKRDRFMTSASDVPPNSPLANIAYAYHFDAALYAGFLRRYAEQRGVTRREGIVEEVQLHPESGDVRAVRLASGEAIAGDLFIDCSGFRGLLIEQALHTGYHDFSHWLPCDRALAVPCAKVGPPTPYTRATARAVGWQWRIPLQHRTGNGYVYCSAHISDDEAASTLLANLDGPALADPRPLRFVTGRRKQVWNRNVVALGLASGFMEPLESTSIHLVQSGISKLLELFPREGISPVLVRRYNERIAFEFDRIRDFLLLHYHATERDDSAFWRHCRTMPITPELQETLELFRDSGRFYRNGDEMFAEISWVQVMVGQGILPRAYHPLVDQVPQADLERFMASVEQTIGHCADAMPPHQAFIHRYCAAKPV

SEQ ID NO: 82873 - protein, 508 aa, Pseudoalteromonas sp.
  misc_feature (1)..(508): tr|A0A0N8TTN2|A0A0N8TTN2_9GAMM Flavin-dependent tryptop han halogenase RebH OS=Pseudoalteromonas sp. P1-25 OX=1 723758 GN=rebH_1 PE=4 SV=1
MNKAIKTIAVIGGGTAGWLSAAIIASYHQGNKGDGLKVMLVESSDIPTIGVGEGTWPTMKNTLQQIGLREVDVFKACNATFKQGGKFVNWTHGNNDFYYHPFTVPLGYGRIDLAPYLDNVENFAQQTNFQHDICEANLAPRGIAQGEYQANCNYAYHLDAGAFAELLKQHCKSKLGIEHIIGTVEQVKLDESGAINTLTLKDQTRTINADLYIDCTGFSSLLLGQALNVPFKKMDHVLFNDSALAMQVPYEEGDESLASHTIATAQNAGWIWDIGLTHRRGVGHVYSSKFLSDEEAEQNLRNYLGDAAKGLTARKINFESGYREKFWHKNCVAVGMSAGFVEPLEATAIMLVEISSRFVAEHMPADTQVMPIVAKRFNEQMDYRWQRIIDFLKLHYMLTKRPEPYWQAHVQPQSIPQSLQEDLLLWGARGPLIQDFHGALELFPAASYQYVLYGMGFKPDFTKQAYLYSNDAQANQIIERNSQLTQQMLQTLPPHRAYIEQWLAANPV

SEQ ID NO: 82874 - protein, 501 aa, Rheinheimera sp.
  misc_feature (1)..(501): tr|A0A437J828|A0A437J828_9GAMM Tryptophan 7-halogenase OS=Rheinheimera sp. YQF-1 OX=2499626 GN=EMM73_18735 PE= 4 SV=1
MAFMHRIAIVGGGTAGWMTACLMAKAWPDADIRVIESPDIGIIGVGEGSTPSLKRFFQTLNIPDSEWMSACNATYKTNIEFVDWSPASGRQSYSHPFISQPDHFSERAFYSNCFSRRMGIDVETRPEKFLLNAYLAAAARAPVTPANFPFRIEYGYHFDAFLLGQFLRQKATEAKVQLMPLTIAQVVQQPNGDIKELVSQDGQSVSADLFVDCTGFGSLLMQQTLAVPFESFASNLFNDSAVVMPTAALAKLPVQTKATALSNGWAWQIPLQNRTGHGYVFSSAFITADQAETELRSHLGLLDADVQARHLKMNVGQLKQHWHKNCLALGLAQGFIEPLEATALHLVQTAVEIFIDQYSCSEATAAQQSRYNQLITERFDKVRDYIVAHYKLNSRDDSDYWRANRANTDLSDSLLQILDCWYRKNDLDQEIKRQQLNSHFGTTSWHCLLSGYGVYPAVAEPSTDINQRPDPFKQMQLEGFFSGCLLNFMPQNELLSIYQGN

SEQ ID NO: 82875 - protein, 509 aa, Xanthomonas sacchari
  misc_feature (1)..(509): tr|A0A0A8DYP2|A0A0A8DYP2_9XANT Tryptophan halogenase OS =Xanthomonas sacchari OX=56458 GN=SB85_15250 PE=4 SV=1
MNLATTTDGRIRKVVIAGGGTAGWLAGCALAHQFRDRLDITLVESEQIGTVGVGESTVPPIRTFHRFLQIDEQEFLRAVAGTFKLSISFEHWRRPGDRFIHPFGTIGQGTWATPFHHFWLDSLRRGMPSDLGDFCLESVASRADRFSLETQPQVNYAYHFDAALYAKFLRKKAEGYGLRRVEGQIREVRQHAHDGSVASLLLEDGQLIEGDLFIDCTGFRGLLTEQTLHTGYEDWREWLPSDRAVAVQTEAVAPPVPYTRAIAHEAGWRWHIALQHRVGCGLVFSSRHLSDDEAHAKLLRDVDGPPLRDPWLVPFRSGRRLQAWNKNVVALGLASGFIEPLESTSIHLTISAVVRLIQLFPHDGISPALVELYNTVSRQEMEHVRDFIILHYHATQRDEPMWKACREMALPESLAIRLRAWRERAHAWQDPGELFRVDSWTSLLLGQGIQPGPPHPLAAAIGDADLRTLLTRIRQPLQQASAAMPSQAEFIERYCKATPDVWQRSVSLA

SEQ ID NO: 82876 - protein, 498 aa, Chromatiales bacterium
  misc_feature (1)..(498): tr|A0A520X1J6|A0A520X1J6_9GAMM Tryptophan 7-halogenase OS=Chromatiales bacterium OX=2026725 GN=EX272_11365 PE= 4 SV=1
MPRKIVILGGGTAGWMAANLFVKRWTGEQVSVSLVESPDIGIVGVGEGSTPFLERFFRVLDVPDAEWMPRCNATYKLGISFAGWSPASGIERYSHPFLSQTDHFTERAFVVNCHRRRLGLDVNTQPDDFFINSRLVNERKGPRAPENFPFTIGHGYHFDSGLLGQYLGELAVSRGVQHVQAKIIDVEMAPDGMIAALLCEDGTRLAADMFVDCTGFASLLMQKSLGVRFESFKTNLFNDAAVVMPTPAEDAPRPETVSYAMSNGWCWKIPLTNRLGNGYVYSSDFLSADDAETELRTFLGTLDSDVDARHLKMSVGQLERHWEKNCIALGLSQGFIEPLEATALLLVQQAIEMFIARYEKGNFTPEFRDDYNAKVHERFERVRDYIVAHYKLNTRDDSDYWRANRDNMELSTSLRQILDVWYRRGDLAQEIQRQDIESHFTSMSWHCLLAGYGAFPPLAAEQPGKGDVYKEQNVAQFLSGCSLNFESHRNNLEAKRDS

SEQ ID NO: 82877 - protein, 504 aa, Asticcacaulis benevestitus
  misc_feature (1)..(504): tr|V4PBA9|V4PBA9_9CAUL Tryptophan halogenase OS=Asticca caulis benevestitus DSM 16100 = ATCC BAA-896 OX=1121022 GN=ABENE_10870 PE=4 SV=1
MGKAGIRNLVIVGGGTAGWMAAAALSKVFGTQSYAITLIESDEIGTVGVGEATIPTIQEFNTLLEIDENQFMKETNASFKLGIRFLNWKHEGSDYFHPFGTYGVDMNVNFTHYWMRYHLAGGSGDFGLFNPQTLASRLNRFGRMAEINPKAPKVNYAFHFDASLYAKFLRRHSEARGVVRHEGKITSVVQHPDDGDITCVALESGKTIEGDLFIDCSGFRGLLIEQTLKTGYEDWSQWLPCNRAVAVPCDKVSGLTPYTTSTAREAGWQWRIPLQHRTGNGYVFCDSYLSEDQAMDLILQRLDGRPQADPRVIRFTTGHRKKQWNRNVIAMGLASGFLEPLESTSIYLVQEAIMKLLRYFPRDQITESARSSFNRDMLFAYDDVKDFLIAHYKVTERAETPFWAYCKHMDVPDSLRARLESFERHNQSLVKADELFKEASWFAVLAGQGLMPKSYHPIADLIAEDEFRWRMDRVKEGTAGLANAMPGHEAYIAKACPSLATGKA

SEQ ID NO: 82878 - protein, 510 aa, Maricaulis maris
  misc_feature (1)..(510): tr|Q0AL33|Q0AL33_MARMM Tryptophan halogenase OS=Maricau lis maris (strain MCS10) OX=394221 GN=Mmar10_2724 PE=4 SV=1
MPVDPIRSVLIVGGGTAGWMTAAALAKIFGDQALDIRLVESEQIGTVGVGEATIPQILLFNRMLGIDENEFVRATQGTFKLGIEFVNWRREGHSYIHPFGSYGSDMDGVMFHHFWLHARQRGYEVDLPEFCLQIIAARQGKFLRPVPDARNSPLGHIAYAFQFDASLYAAYLRRYAEGRGVTRTEGRIANTRLDPETGHVQGVQLENGETIEADFFIDCSGFRGLLIEQALKTGYEDWSSWLPCNSALAVPSENTGPPSPYTRATARKAGWQWRIPLQHRTGNGHVYCSDHISDDEAANILLSNLDGPALRDPLQLRFTTGHRKKFWNKNVLAIGLSAGFMEPLESTSIHLIQSGIARLMTLFPDRAFNPVDIDEYNRLTLQEYDYVRDFLVLHYRQTERDDSEFWRYCRNLPLTDHLARKLALYQTNGRVSREKDELFNETSWLAVLDGQGVVPQGHHPLVTGLGDAEVDARLEQILGAVRASARQMPSHADFIANQCAAPADIQLFQA

SEQ ID NO: 82879 - protein, 504 aa, Asticcacaulis benevestitus
  misc_feature (1)..(504): tr|V4PWR0|V4PWR0_9CAUL Uncharacterized protein OS=Astic cacaulis benevestitus DSM 16100 = ATCC BAA-896 OX=11210 22 GN=ABENE_09480 PE=4 SV=1
MSQGTIKKVVIAGGGTAGWMTAAWFSRILRDDFEEIVLVESEEIGTVGVGEATTPYIHVFNRHLGISEDEFVRFTKGTFKLGIEFVNWGRQGHAYHHSFGPYGRDYGALPFHAVWLRHYLENGADRLENYSLQSLASINGRFMRPTGANSPLAEIAYAYQFDASLYARFLRSISEAAGVVRLEGKIGRVNLGDSGAIESLSLEDGRCIDGDLFIDCTGFRALLLGEALGVGYIDWSRYLPCDRALAVPTARKGPPAPYTRSTALSAGWQWRIPLQHRDGNGHVFSSAFIDDTQAMDALLANLDSPPLADPRPIRFTTGRRETFWKKNCIAVGLSAGFLEPLESTSIMLIQNAILRLQYLFPDKDFSKADTAAYNAAMAREYEDIRDFLILHYKVGTRDDSEFWRYCRHMDIPEGLQNRIDLFSSRGRIPEERGEQFRTPSWLAVMIGQGLMPAAPEPLSLSIPSDAMKTWLSDLRSVIGNCLTRMPTHEDFIAQHCQARLSESA

SEQ ID NO: 82880 - protein, 283 aa, Chromatiales bacterium
  misc_feature (1)..(283): tr|A0A520X0E8|A0A520X0E8_9GAMM Tryptophan 7-halogenase (Fragment) OS=Chromatiales bacterium OX=2026725 GN=EX27 2_12230 PE=4 SV=1
FVSLLMDKTLGTDFEDWTHWLPCDRAIAVQTTAVSDPIPYTRSIARESGWQWRIPLQTRVGNGLVYCSEFMSDDEARDTLLANIEGELITEPRVLRFRTGQRVKHWNRNCVALGLAAGFLEPLESTSIHLIQRGVIRLLQMFPYGGIVESDRTEFNRQMDAEFRFIRDFIIMHYHVTERTDSEFWRRCRNMDIPDDLKHRLDLFRDSGRVFEAEFDIFRENSWTQVMLGQGIEPQSYHPIVDMMSEQELRQFMQIQGQKVDRVLQQLPTHQEFIDRYCPTTAG

SEQ ID NO: 82881 - protein, 504 aa, Pelomonas sp.
  misc_feature (1)..(504): tr|A0A397QYX2|A0A397QYX2_9BURK Tryptophan halogenase OS =Pelomonas sp. BT06 OX=2135721 GN=C8K28_4270 PE=4 SV=1
MHQLDRIVIVGGGTAGWMTAAALSTVLRGRYRIQVVESDEIGIVGVGEATIPMIQRFNRLVGIDENEFMRETQGSFKLGIEFVNWGKRGDRYMHGFGRLGQDLWTVPFDQYWHRMRALGKAQALENYSITRMAAKANKFMPARTDMGNSPLADITYAYHFDASLYARYLRRLSEGRGVQRTEGKITHATRRGEGAHAGHVDAVVLESGERVEGDLFIDCSGFRGLLIEQTLQTRFEDWTHWLPCDRALAVPCESVAPLTPYTRATAHRAGWQWRIPLQHRIGNGHVYSSAHVSDDEAAATLLANLDGKPLADPRPIRFKTGMRKQAWTENVIAIGLASGFLEPLESTSIHLIQSTIQQLIDFFPDRGFDATDIAEFNRHSRFHYERIRDFVILHYHLNQRDDSAFWKDCAHMAIPDALQEKLDLFRTHGRVIRRDNELFSEVGWVQVMEGQNLVPQRHHPLAALQSEQDTHDYMESVREVIAKCVDVMPDHAAYIAQNCAAKPM

SEQ ID NO: 82882 - protein, 502 aa, Asticcacaulis benevestitus
  misc_feature (1)..(502): tr|V4PZN0|V4PZN0_9CAUL Uncharacterized protein OS=Astic cacaulis benevestitus DSM 16100 = ATCC BAA-896 OX=11210 22 GN=ABENE_07260 PE=4 SV=1
MTNPAISSITIVGGGTAGWMTAALLSKLLMGRYAITLIESEEIGTIGVGEATIPAIKIFNDMMEIDEAEFLKATQGTFKLGIEFVDWREKGHSYIHGFGKIGVDRLWLHTHQFWLKMFPKGGFRDFDSYSMCTAAARKGRFAPPDARRGPPMSDLDYAYHFDASLYARYLRSLSEKRGVKRIEGRITDVVLKAESGFIDKVVLQSGQAIGGDLFIDCSGMRGLLIGDALGVGYQDWSQWLLCDRAYAVPSANPTQITPYVTCTTRDAGWQWRIPLQHRTGNGYVHSSAYTSDQQAVDTLMSTLGGPALGDPRLIKFRPGKRHQTWEKNCVAIGLSAGFLEPLESTSIHLIQTGLLRLLSLFPGQGFHAADIREYNTYSDDEYRDIRDFIIAHYKITRRDDTPFWAYVKHMEVPETLQRKIDLFQSSARIFKRGAFELFREESWVQVLLGQGMWPDYDPNVDMMTEADIAGYLHDIEAVIGEHTDAMPRHEDYINRYCKAASL

SEQ ID NO: 82883 - protein, 508 aa, Maricaulis maris
  misc_feature (1)..(508): tr|A0A495D506|A0A495D506_9RHOB Tryptophan halogenase OS =Maricaulis maris OX=74318 GN=C7435_1829 PE=4 SV=1
MINPKTLDQVVIVGGGSAGWMTAAALSRLIGNGHTRITLIESEAIGIVGVGEATIPPIRHFNELLGLDERDFLRATQGTIKTAIEFVDWTRPGHTYLHPFGTYGADMNAVKFHQYWLKLRQLGQAEAFGEYNLCDVAARQNRFGPVARDRQSPVSSLHWAYHFDASLYARHLRRYAEQRGVQRIEGKVVDVHQRPEDGFIASVEMESGDRIGGDLFVDCSGFRGLLIEQTLKSGFEDWTHWLPCNRAIAVSSASAGELTPFTRSTARDAGWQWRIPLQHRIGSGFVYSADHLSEDEATSVMLDNLDGEPLNTPKPIRFTTGRRKQAWIKNCVAIGLASGFLEPLESTSIHITQAGISRLMALFPDKDFDPAGITEYNRQAEYLYRHIRDFIVLHYHANERHGVPLWDHCRNMAIPETLQRKLDLFRLKGRLFRYEDELFAESSWHAVLLGQNVMPDGYDPLVDAAPEDRIIDAFRQMHQAVAGAVASMPKHQTFIDQHCRAAMTAPPA

SEQ ID NO: 82884 - protein, 510 aa, Asticcacaulis benevestitus
  misc_feature (1)..(510): tr|V4NNK2|V4NNK2_9CAUL Uncharacterized protein OS=Astic cacaulis benevestitus DSM 16100 = ATCC BAA-896 OX=11210 22 GN=ABENE_20280 PE=4 SV=1
MKIVILGGGTAGWMSAAALTRAFKPEFCSVRLIESDDIGIVGVGEATLPQVHDFNQFLAIDEAEFMRETNATFKLGIEFRDWAQRGDSYIHPFGVHGQAMGGVPFFQYWLRARQNGHDLNIEDYSYPIAACRHMKFDMPSDDEKSIRSTYSYAYHFDATLYAKFLRKWSEGQGLKRTEGQVVDVTLDAESGYIRALTLKSGEVVEGDLFIDCSGFRGLLISQTLKMGWEDWTQWLPCDRALAVPCERVGDLTPFTRATAREAGWQWRIPLQHRTGNGYVFSSQFTTEERAAEVLLANLDGKPLADPRLITFQSGRRQQSWYKNCIAIGLASGFLEPLESTSIYLAQIAASYLIELFPGKQIDPRISGEFNRLVDIEYERVRDFLILHYHATAGRDEPLWRHAQSMQVPESLVEKMAIFKRRGHVHRYKDGLFSPASWIAVYTGQGITPVGYDRQADNLSAYELLARLSEMKGRIDVNVAAMPSHADFVRDFCFDAKAASKAAMMGETAHG

SEQ ID NO: 82885 - protein, 507 aa, Asticcacaulis benevestitus
  misc_feature (1)..(507): tr|V4PP63|V4PP63_9CAUL Uncharacterized protein OS=Astic cacaulis benevestitus DSM 16100 = ATCC BAA-896 OX=11210 22 GN=ABENE_14915 PE=4 SV=1
MTRSADHFVILGGGTAGWMAAACLSRLLFRVPGSPKRVTLVESAEIAPIGVGEATIPSIQDMLRYLNIDEADFVSATDATYKLGIRFRDWRVAGSDFFHGFGELGPTIENLPLFQHWLSEKIAGRPVPPLEALSMSAQLALNNRFAKPKQDGNSPLFMAGYAYHFDAAKVATYLRDYAEAKGVKRIEGHVAEVALAVDGSVNSLRLTDGRDITGDFFIDCSGFKGLIIEKALGSPFEDWSHWLPCDRAVALPSQSIAPLQPYTQVTARDAGWTWRIPLQSRIGNGYVYASRFCDAAQAEQTLRGALESQPLAEPRQIHFTPGRRREAWVKNCLSLGLASGFLEPLESTSIHLIFANLFRFFDHFPRDIDSAVLRQTYNDRSVREIEEIRDFLILHYWASARRDTPFWRYVTAMDIPDSLGAKLEAFRTQGKILADYYDLFKPASWMAIYDGMGFTPKAPDPLADLVPGDFSRRVLQNVTQGIRQAALAAPPHEASLAALLRRPLSPV

SEQ ID NO: 82886 - protein, 481 aa, Xanthomarina gelatinilytica
  misc_feature (1)..(481): tr|A0A3C0F4N4|A0A3C0F4N4_9FLAO Uncharacterized protein OS=Xanthomarina gelatinilytica OX=1137281 GN=DCM10_1111 5 PE=4 SV=1
MKNICIVGGGTAGLISALMLKQSLNIDITVIKSDKIGIIGVGEGSENKFTQFLKFCNIDKEEIIKETGATLKYGILFKDWTDKDFIHEVSPQVFDIRKEQYLAGFGYAITNNLQQNEYTQIDQLKDNKVVHQYISDQFHFNTFKLNKFLLKKCEQYDINIIEDEILDVEITNNNISKLVGEKTIHTSDFYIDSTGFKRLLISKLGAKWESYNKYLKLNEAIAFQTEDTDNYNVYTLAKAMKYGWFWRIPVYGRWGNGYIFDNNYINKDEAKQELERRLPKEIEIARHIKFDPGKVDKTWIGNCCAIGLSANFIEPLEATSIGTSINQSFLLAHYLHNYSELDIQDYNKKVNYIMENIRDFVCLHYMVKREDTEFWKDVKKIDIPLSLQNNLLKWQRRLPIREDFEQTQYLLFWAPNFTSVLHGIGFWENNKLSVIEEYNSYNANWSEKIRVAEHKRNNIFNNNKKIKHKDYLTYIRGQHEL

SEQ ID NO: 82887 - protein, 517 aa, Verrucosispora sp.
  misc_feature (1)..(517): tr|A0A4Q9CX60|A0A4Q9CX60_9ACTN Tryptophan 7-halogenase OS=Verrucosispora sp. SN26_14.1 OX=2527879 GN=EYA84_030 05 PE=4 SV=1
MIRDVVIVGGGTAGWMTATYLKTAFQDRISVTLVESAAVGTIGVGEATFSTIRHFFDYLGLDEREWMPQCSGSYKLAIKYDNWRGDGSHFFHPFERLRTSDGFTAAEWNLALGDPTESFDRGSFITPYLCEAQRSPRMLDGSLFTASLDGELGRSTLDEQRAQFPYAYHFDAALMARYLTKLGVAQGVRHVVDDVVGVGQDERGWITHVSTRDQGDVTGDLFVDCTGFRGLLINQTLKEKFVSFTDVLPNNRAVALRVPRDMAEHGIAPYTRATAKDAGWIWTIPLYGRIGTGYVYSDEFCEPEEAERTLREFAAPGQDDLQANHIRMRIGRNERSWVNNCVAVGLSSGFVEPLESTGIFFIQHAIEQLVKHFPDNTWDETLIRGYNDKVARVIDGVKEFLVLHYVASPRQDTDYWRETKVRAIPDGLAERLETAAVRLLDESTIYPYYHGFEVYSWITICLGMGLAPKSPRPALAHIDPTRASAELAAIRADAERLVSTLPSAYEYLSTIQPAAEG

SEQ ID NO: 82888 - protein, 512 aa, Asticcacaulis benevestitus
  misc_feature (1)..(512): tr|V4PDK1|V4PDK1_9CAUL Uncharacterized protein OS=Astic cacaulis benevestitus DSM 16100 = ATCC BAA-896 OX=11210 22 GN=ABENE_20270 PE=4 SV=1
MESKVRKIVIVGGGTAGWMSAACFAKALGTQGYDITLVESEEIGTVGVGEATIPAIIRYNRFLNIDEDEFIRETNATFKLGIQFVDWQKEGVSYFHPFGYFGVDIDGFTFPNYYLRDYYRRGGGVIDLGRYNAETEAALQGRFGRVKPENGKPDLNYAFQFDAALYARFLRKYSEARGVTRREGKIVKVHQNPETGYVTSVEQENGSQIAGDLFIDCSGFRGLLIEETLKCGYTDWSQWLPVNRAAAVPCERGDDLIPYTRATAREAGWQWRIPLQHRTGNGYVFCNSFISEDEASEKLLSRLDGKPMADPKILRFVTGHRKRFWDRNVVALGLASGFLEPLESTSLHLVQAGLFKFLALFPRQGFNPRIVEEYNRQMLFDYDNVKDFIIAHYKVTERDDTPFWNYVRNMEVPDSLRERLDVFRSTGQTLSNERELFREVSWYAVLTGQGLVPEDYHPAADTLDDDDIRLRLGRWRTAVVDRVKTLPMHEDFIRKSCASAALKQRDEARAGG

SEQ ID NO: 82889 - protein, 508 aa, Alteromonadales bacterium
  misc_feature (1)..(508): tr|A0XX27|A0XX27_9GAMM Putative tryptophan halogenase O S=Alteromonadales bacterium TW-7 OX=156578 GN=ATW7_1506 1 PE=4 SV=1
MNKAVKTVAVIGGGTAGWLSAALIASYHQSQNGDGLKVMLVESSDIPTIGVGEGTWPTMKNTLQQIGLREVDVFKTCNATFKQGGKFVNWTHGNNDFYYHPFTVPLGYGRIDLAPYLDNVVDYAQQTNFQHDICEASLAPRGIAQGEYQGNCNYAYHLDAGAFAEMLKQHSKSKLGVEHVIGTVDEVKLDNDGAIDTLTLKDQTRTINADLYVDCTGFSSLLLGQALNIPFKKMDHVLFNDSALAMQVPYAEGDESLASHTIATAQNAGWIWDIGLTHRRGVGHVYSSKFLSDDEAEQNLRNYLGDAAEGLTARKISFESGYREKFWHKNCVAVGMSAGFVEPLEATAIMLVEISSRFVAEHMPADTKVMPIVAKRFNEQMDYRWQRIIDFLKLHYMLTKRPEPYWQAHVDPDTIPQSLKDDLLLWESRGPLIQDFHGALELFPAASYQYVLYGMGFKPDFTKQAYLYSQDAQAKQIIERNSQLTQQMLQTLPPHRAYIEQWLAANPV

SEQ ID NO: 82890 - protein, 512 aa, Sphingomonas spermidinifaciens
  misc_feature (1)..(512): tr|A0A2A4B8X2|A0A2A4B8X2_9SPHN Tryptophan halogenase OS =Sphingomonas spermidinifaciens OX=1141889 GN=COC42_072 65 PE=4 SV=1
MTTPSRMRVVIAGGGTAGWLAAALLTRQLSALVNVTLVESEEIGTVGVGESTIPTVRAFHALIGLDEAEFMAATGATFKLGISFEHWSRVGDRYIHSFGDLGRSTWMGDFHHFWLEARAQGIAAELGDYCLEHRAAELGRFATGGETPLNYAYHFDAGSYARYLREACETAGLERVEGRIARVERDGESGHITRLHLADGRIVAGDLFLDCTGFRALLIGEAMGVGFEDWSHWLPANRALPVQTSSVEPARPYTRAIAHSAGWQWRIPLQHRVGNGLVYCSDYLSDDEAQARLYAQVEGERLVEPNPIRFRTGRRLQAWSGNCVALSLASGFVEPLESTSIHLVMIALTRLLQVMPLGGISPAAVARYNEQARRELEAIRDFITLHYYLNGRPEPFWVRCRTTPPPDSLTERIALFAEGAHAYQDTHDLFRVASWVQVMLGQRLQPKRHHPLGRIMPPDRLAGALNDIRSRVGQTVAGLPTHQVFLGSYLQRHGTSTSSAVMPPEQSGRFAP

SEQ ID NO: 82891 - protein, 519 aa, Rheinheimera sp.
  misc_feature (1)..(519): tr|A0A3S2U4U8|A0A3S2U4U8_9GAMM Tryptophan 7-halogenase OS=Rheinheimera sp. YQF-1 OX=2499626 GN=EMM73_03305 PE= 4 SV=1
MLKSTLDEIVIVGGGTAGWLTAAILAKKLNAGKPGSVQITVIESPDIAILGVGEGTWPTMRTTLQTVGVDEGEFMRECDATFKQGAEFVNWQHTPVPGEKHSYFHPLSAVFHSSYDFNLAPYWLQGASDLPYDLAVASQSRICQLGLAPKKITTAAYSALQNYAYHFNALKFAAFMKKHCTEKLSVRFISGNVQQVSLHPCGAIASVSTDSAGEIKADFFVDCTGSKALLLGEALGVPWHGINDIIFNDTALAMQVPYPAPDWPIATHTIATAHEAGWTWDIGLHNRRGVGYVYSSSHSTDERAEQILRQHIGVQSEGLEARKIKLNLGYRQQFWRKNCVAIGMSAAFIEPLEASAIFLIEAAANMLADQFPRSSASLEFVEKKFNDTFKLRWDKSIDFIKLHYCISQRRDTEYWVDNCTDSSIPQSLQQRLAHWRLHPPGKYDFDYAFEPFVLDSYLFVLYGMKFNTDISHNLSSYSDIQSAHQLFAEIDRTTAILQQQLPTHRELLDKVYQYGMPKL

SEQ ID NO: 82892 - protein, 502 aa, Sphingomonas spermidinifaciens
  misc_feature (1)..(502): tr|A0A2A4AZR3|A0A2A4AZR3_9SPHN Tryptophan halogenase OS =Sphingomonas spermidinifaciens OX=1141889 GN=COC42_135 05 PE=4 SV=1
MTDRCEPIRSIVIVGGGTAGWMSAAYLARRLSHLPIAITVVDSAEIGTVGVGEATVPAIRDFLAAVELGEPDVLAATEGTIKYGIRFEGWGGEGHGFFHPFGLYGVPANGVAFHQYWLKLRAAGHDLPLGDYCLATQLAERGLFLPPSTQPGSDLGVFNFALHFDATRFAHLLRRLSLANGVAHIDGRIVDVERDDEGVRSVRLADGRAVESDLWIDCSGFRSLLLGEAMGVPYVDWRRWLPCDRAIAIPCRSARVHRPFTTATAHAAGWRWHIPLQHRVGNGIVYSGAHLSDEDAETRLRSTLEGEPIAEPNRLRFVTGHRARFWAGNVVGVGLSSGFLEPLESTSIVLVQSALERFVALFPDRGGDPRLAATYNRQSVLEFERIRDFILLHYWANHRTGEPFWDANRALELPDSLAERIDAWRAGGVFVRREWDTFQDPSWLSIYAGFELLPERVSPLADQMGESELLTALARMREAIDRAARTAEPHADFLARQRASAA

SEQ ID NO: 82893 - protein, 499 aa, Rheinheimera sp.
  misc_feature (1)..(499): tr|A0A437JQU9|A0A437JQU9_9GAMM Tryptophan 7-halogenase OS=Rheinheimera sp. YQF-1 OX=2499626 GN=EMM73_01065 PE= 4 SV=1
MLEPIQTIVIVGGGSSGWMSAALLAKLTGQRYRIELVESEQIGTVGVGEATIPAIKLYNHLCGIDEQEFIRATGATFKLGIEFVNWGQKGDSYFHAFGALGRQWEWLSFYQYWLKLKQQGQALPFEHYCIASQMAQQHKFMPADPTKPKSPVSEIAYAYHFDASLYAVYLRKLSEQRGVIRHQGLIKHVERDAVSGHIRHLLLEDGRQVAGDLFIDCSGLRALLIGQTMGVGYDDWSHWLPNDSAWAVPSAALSELPPYTRATAHEFGWQWRIPLQHRTGNGLVFSSAYASDDLAQQRLLQKLEPQHSAEPRLIRFTTGKRKQMWVGNCVAIGLSSGFLEPLESTSLHLVQTAITRLVNLFPDRSFAQANTDHYNLLAAEEMEQIRDFIIAHYKVTERDDSEYWRYLKQMTVPDSLQQKLDIFQAYGRVHRVADELFREDSWVQVLLGQRLMPERYDPMVDNKTLAQIGDFAASTAGVITACVEKMPTHTNFLAGLAAH

SEQ ID NO: 82894 - protein, 507 aa, Maricaulis maris
  misc_feature (1)..(507): tr|Q0AL36|Q0AL36_MARMM Tryptophan halogenase OS=Maricau lis maris (strain MCS10) OX=394221 GN=Mmar10_2721 PE=4 SV=1
MGQDAPRRIVVVGGGTAGWMAAAALVSVLPSQRVQVTLVESEAIGIIGVGEATLPHLRHFNETLGINEADFIKATSATLKLGIEFVNWARKGDSYVHPFGDFGTEIAGLPFHQAWTRMRAAGKARDIGAYSLPVRMCAANRFDRPAEDPADFASRFGYAYQFDATRYAPFLRQHAEARGATRIEGIVDTVHCDPETGDIERLDLKDGQEIEGDFFFDCTGFRGVLIEQALNVGYEDWSHWLPCNRAIALPSEKSGPTPPYTRATAHQAGWLWRIPLQHRTGNGHVYASDFIDDETARQTLLDNLEGAPLADPRPLRFTTGRRKQFWAHNCVSIGLAGGFLEPLESTSIHLTQIAITQFIELFPVDNDYTLERESYNAHMTREFERVRDFLILHYHATERTDSEFWNYVRTMPVPDSLTEKMALFRQTGRVGRYQQGLFLEPSWLAVYLGQRIVPQSWDGRLDTIPEESLGQSLTTIESQIDQAMSRMPDHDTWLANLAGVEAETRHG

SEQ ID NO: 82895 - protein, 515 aa, Pelomonas sp.
  misc_feature (1)..(515): tr|A0A397QYQ3|A0A397QYQ3_9BURK Tryptophan halogenase OS =Pelomonas sp. BT06 OX=2135721 GN=C8K28_4878 PE=4 SV=1
MNTAMKPFNRVVIAGGGTAGWMMAALMSKLLGKRLDIKLIESEEIGTVGVGEATIPALHTFHNLLGINEAEFMAATNATFKLGIGFEGWKNIGENYFHSFGSTGNDHWSAGFQHFWLKGRAEGLSKTYTDYNPETVAAFANRFAHLPRSGLNYAYHLDAGRYAKYLRAMSESCGVKRIEGKIATVLMDGPQGRDGDITALQMQDGTRIDGDLFIDCTGFRAMLIGEALGMGYEDWSHWLPCDRAVAVQTASVREAWPYTRSICHPFGWQWRIPLQHRVGNGLVYSSKELADADAPEVLKKNVEGELLIQPRVLKFTPGQRHKVWERNCIAVGLASGFIEPLESTSIHLIQRTAIRLMQLFPTGGINPADVQEFNLQCERELVHIRDFIILHYHVTERTDSGLWNHVRTMELPATLKHRIELFRESGRVFRPSDELFAENSWVQVMMGQGLIPQSYHPVADLMGREELARFLGDIQLQVSRTVAGLPQHQAYVEQLCAPYRNATTAQLAATPLLRA

SEQ ID NO: 82896 - protein, 500 aa, Xanthomonas gardneri
  misc_feature (1)..(500): tr|F0C237|F0C237_9XANT FAD dependent oxidoreductase OS= Xanthomonas gardneri ATCC 19865 OX=925777 GN=XGA_0900 P E=4 SV=1
MTQAPIRKVVIVGGGTAGWIAACALSHQFRELLEITLVESEQIGTVGVGESTVPPIRTFHRFLQIDEQEFLRAVAGTFKLSISFEHWRRQGERYIHPFGITGQSTLVCAFHHLWLESQRRGMPGTFGDYCLETVASRVDRFALLREPAVNYAYHLDAALYAKFLRARSEAFGVKRIEGKIQQVTLQPDSGDVATLVLEDGQVLDGDLFIDCSGFRGLLIEQALHTGYEDWSHWLPCDRAVAVQTEAVGPPVPYTRAIAHQAGWRWHIPLQHRVGNGLVFSSRHLSDDEAHAKLLRDAAAPALKDPWLVPFRTGRRRKAWNKNVVSLGLASGFIEPLESTSIHLTIAAVVRLITLFPADGIAPSQVQLFNDISRAEMEHVRDFIILHYHATQRDEPLWRQCREMELPESLALRLRAWRERAHAWQGADELFRVDSWTHVLMGQGLIPAQHHPLARAVSDRDLHRLLDGIAQPIQRAVEQMPSQQAFIDAYCKAGASAWGAA

SEQ ID NO: 82897 - protein, 529 aa, Vitiosangium sp.
  misc_feature (1)..(529): tr|A0A2T4VP78|A0A2T4VP78_9DELT Tryptophan halogenase OS =Vitiosangium sp. GDMCC 1.1324 OX=2138576 GN=DAT35_0886 0 PE=4 SV=1
MGVATTRSSSEGVRPATTSGAGCTIAWRPTAGSPRPGRTTSVWPPQPGERVEERLETEVCVIGGGPSGAALALRLARLGHAVCLVERHAFPRPHVGESLTPGVWPLLDALGVGEMVRQAGFLPAREALVRWEDATGRRVRAPAREPGVLVDRGRFDALLLGAAASAGVKVLQPAVARRPERKADGWELRVLHEGRWVLVSARFLADASGRASCLGGRKVPVSTRTLALYGYWRGEIPHGPETRVEAGPDAWYWGAHLPDGTFNAMAFVDPESLRERGIGRRTLEPFYRELLGRSGLLGAWTAPRLVSGALACDATCYRDAEPIGEDFIKVGEASFSLDPLSSSGVQKALQTALSGAVAVHTLLVRPGSADAALRFYTDDQRYSVEQHAAWAAGYYREQHGYEERPFWKRRALPSPPTLAPPEVRPVAGDELQHRRWRLASEASLVDTPCIVGDVIEVRRALSHPRLARPVAYVDGVELAPLVEAMCEGLTMPQLADTWARQVPFRQGVALLGWFYRQGLLSEAAASDPP

SEQ ID NO: 82898 - protein, 502 aa, Rheinheimera sp.
  misc_feature (1)..(502): tr|A0A3S3S6M3|A0A3S3S6M3_9GAMM Tryptophan 7-halogenase OS=Rheinheimera sp. YQF-1 OX=2499626 GN=EMM73_07555 PE= 4 SV=1
MIEKIRKIIVLGGGSAGWMTAAALGKVLKNQYCQIQVIESEQIGTVGVGEATIPQIMLYNELIGLDENDFMRRTQATFKLGIQFVDWQKQGSSYFHAFGDVGKNMEGLQFYHYWLRMRALGKAAPLDEYTLSSLACLEQRFMRSMDAGNSPLSNIAYAFHFDAGLFAQYLRELAEQWGVQRTEGEVVEVRQLDNGFIRSLRLADGTEHEADFFIDCSGFRGLLIEQTLKTGYEDWSHWLPCDRAIAVPSATTSEPWPFTRATAQRAGWQWRIPLQHRVGNGHVYCSRFMSEDEATAILLKNLDGEALAEPRPIRFVTGKRKQFWNKNCLAVGLAGGFMEPLESTSLHLVQATISKLFSFFPDRNFAQSDIDEFNRQMHFDYDKIRDFLILHYHATERNDSEFWNYCRTMPVPDELSQKIQQFKANGRIFRFNNEMFSDLSWFEVMLGQGITPQGYHPMADLFPEAELAKRLEGIRSVVRKSVDYMPSHQSFIDQNCKAGKIY

SEQ ID NO: 82899 - protein, 497 aa, Alteromonadales bacterium
  misc_feature (1)..(497): tr|A0XZI4|A0XZI4_9GAMM Uncharacterized protein OS=Alter omonadales bacterium TW-7 OX=156578 GN=ATW7_07434 PE=4 SV=1
MKPIKNVVIAGGGTAGWIAAALLNKVLGKVINITLIESSSIGTIGVGEATIPPIIQLNNALGINEQDFINATNASIKLGIEFENWKTPSHSYMHAFGSFGKDFPFCDFYNFWVKGQISGSEDSLWDFSLNYQAAKKHKFAPLSAIPNTQLPGISYAFHFDATLYAEYLKKLAVSRGVKHIDAKIERVTQCPNTGQINSLTLDNNSQIEGDLFIDCTGQRALLIEQTLNTGFVDWSHYLPCDSAVAVQSTGSDELRPYTRSIAHNAGWQWQIPLQNRTGNGLVYCSRYLSDEGATALLLNNLPGEPTTDPRLIKFKTGRRLKQWHKNVVAVGLSSGFLEPLESTSIHLIQSAVIRLIKLFPHNGISDALVTEFNKQSVTEIEHIRDFIILHYKLTEREDSPFWRQCKQMDIPQSLAHKIDLFRQTGKVVRENDELFAEVAWQQVCIGQGLIPEDYNNIVESLSSEQLNDLFSTLKTLITSTVDQLPTHKDFLAKIKKA

SEQ ID NO: 82900 - protein, 505 aa, Maricaulis maris
  misc_feature (1)..(505): tr|Q0AL24|Q0AL24_MARMM Tryptophan halogenase OS=Maricau lis maris (strain MCS10) OX=394221 GN=Mmar10_2733 PE=4 SV=1
MSTTPKGPAPGLPRIAIIGGGSAGWMTAAAIINATKGAASLTLVESEQIGVVGVGEATIPPIKLFNQMLGIDENDFVRATNGSFKLGIEFVDWSRKGQRYFHPFGTHGRDFDSVPLYQYWLRERKRGDDTPLDAYSMAWEIARQNRFSPPARDPRLVQSTFDYAYHFDTILYGQFLRRYAETRGVVRQEGRVVDTRRTETGDVEAVMLEGGRAVEADFFIDCTGFFGLLIEQVLETGYEDWTHWLPCDRAVAVPCEGVGDFTPYTRSTAREAGWQWRIPLQHRTGNGHVYASQFISDEAATDTLLANLDGEPLADPRLLRFTTGRRRKFWNRNVVALGLSAGFMEPLESTSLHLIQTGINRLLALFPGTGDTQKEAAEFNRLTGEEYERIRDFLILHYHATTRDDAPLWRHTANMAIPDSLAWRMEHYRANGRLVSPGTELFLNPSWMAVYAGQEIEPAGLDPLAAASPVDGAQRLAGLRRVMAEATAPVPDHRDYIERFCTAAV

SEQ ID NO: 82901 - protein, 517 aa, Halioglobus japonicus
  misc_feature (1)..(517): tr|A0A2N5YCT5|A0A2N5YCT5_9GAMM Tryptophan 7-halogenase OS=Halioglobus japonicus OX=930805 GN=C0029_07060 PE=4 SV=1
MDNGRIKSVLVVGGGTAGWLAACHLARKLHPSDPQGVRVTLVESPDIPTIGVGEGTVPAIRNSLQYLGISETEFIRHCEATFKQSIRFDGWMAAPDHSYHHVFDYPRRDPVDVTPYWLLGGEEQSYAQWVGIQAGICDAGLGPKQMTQPEYAGVANYAYHLDAGKFAELLTRHATEKLGVEHLKANVREVKLAANGDIEALDTDRLGELRADLFIDCTGFNSMLLGKALGVEFIDRSDVLLADHALAVQVPYPEPDSPIPSQTIATARSAGWIWDIGLVTRRGTGYVYSSNHIDHDAAELELRDYLRQSLGDRVDDLACRRIPMQVGYRERFWFRNCAAIGLSQGFVEPLEATGLLMFDATARMLAEQFPASRDLMPLLSERFNRRVQFAWERVIDFIKLHYCISDRDDTAFWRDNRDPAGIPESLQENLALWRHQVPSEYDFSSKLEIFNLENYLYVLYGMNYGTAIEPLAYRYRDSALAAKAVQRTQAVVEEARANLLPHRELIEKIHRYGLQPV

SEQ ID NO: 82902 - protein, 509 aa, Maricaulis maris
  misc_feature (1)..(509): tr|Q0AL34|Q0AL34_MARMM Tryptophan halogenase OS=Maricau lis maris (strain MCS10) OX=394221 GN=Mmar10_2723 PE=4 SV=1
MTGTISKVVIAGGGTAGWMTAAALSRFLVPSGVTVELVESEQIGTVGVGEATIPGIIDFNRMLGIDEADFIAATKGTFKLGIEFVDWDRVGNRYLHPFGEYGFDLEGVPFHHYWLRDRLRGSDHPLSAYSMCCQAAMSGKFMRPVSDPQSPVAQMRHAYHFDAGLYARYLRNYAEQRGVTRVEGRIKAVDQSTETGSLTALELENGSRIEGDIFVDCTGFRALLIGETLGVDYDDWRRYLPCDRAIAVPCEKIGAAAPYTRATAREAGWQWRIPLQHRTGNGYVYSSSFLNDDEAESALLANLDAPTTGPTNRLRFTPGRRRSVWKKNCVAIGLSAGFLEPLESTSIHLIQEGVSKLLALFPRGGINQREVTRYNSIIGNAYDYVRDFLILHYNATTRDDTPFWDYVRTMAVPDSLTETVELFAENGRFFAHKSDLFSITSWVAVMIGQGILPRGYDPVADSIPDQDLVATLTNMREIYAQAASKMPPHQAFIDHLAKSARQGGQAHAR

SEQ ID NO: 82903 - protein, 531 aa, Sphingomonas spermidinifaciens
  misc_feature (1)..(531): tr|A0A2A4B2N2|A0A2A4B2N2_9SPHN Tryptophan halogenase OS =Sphingomonas spermidinifaciens OX=1141889 GN=COC42_150 60 PE=4 SV=1
MNEHTIRNVVIVGGGTAGWMAAAAFSRFLANGVTRVTLVESDEIGTVGVGEATIPPILTFNRMLGIDEGEFLRETAGTFKLGIEFVDWGGPGERYFHPFGFHGRDLQGVHFHQLWLRERARRAIPDISSWSMSAVAAAAGRFGRPAPDAKSAVKDLLYAFHFDAGRYAAFLRRYAERGGVTRVEGKIEAVETRPGDDHVAAVKLADGQRVEGDLFIDCSGFRGLLIEEALQTGYDDWTRWLPADRAVAVPCALPGEPDPFTRATARGSGWQWRIPLQHRMGNGLVYSSQFLDDDAAEAELLANLEGEPLADPRRIRFTTGRRRHCWNRNVVALGLSSGFIEPLESTSIHFIQSGIARLIALFPDQRFDPVERDEYNRQMRDLYEDVRDFVVLHYKATRRSDTPFWNHCRTMEVPESLTRKIDLFRGKGRVFREGQELFGTTSWVAVCLGQHIVPERHEPAADALDEEKVAAALAQMYEEYQAVAERLPTHAEFIERSGARSPLAAPPAAEPALPTFSFENESPFADRSFSL

SEQ ID NO: 82904 - protein, 512 aa, Verrucosispora sp.
  misc_feature (1)..(512): tr|A0A4Q9CY38|A0A4Q9CY38_9ACTN Tryptophan 7-halogenase OS=Verrucosispora sp. SN26_14.1 OX=2527879 GN=EYA84_003 80 PE=4 SV=1
MIRSVIIVGGGTAGWMTASYLKAAFADRLDVTLVESAQVSRIGVGEATFSTVRHFFDYLGLDEVDWLPKCAGGYKLGIRFENWRKPEEHFYHPFERLRTVHGFSLADWWLELGDHSQTFDRACFITTALCDAKRSPRMLDGSLFVSGLDSSLGRSTLEEQRAQFPYAYHFDADEVARYLAGYATARGVRHVVDNVDRVDQDERGWISAVRTAEHGDLTGDLFIDCTGFRGLLINQTLGTAFQSFEDVLPNNRAVALRVPREDSTEMSPYTTATAMNSGWMWTIPLFRRNGNGYVYSDQFISPEEAERELRNTIAPGRDDLPANHIRMRIGRNTDSWVKNCVAIGLSSAFVEPLESTGIFFIQHAIEQLVKHFPDERFDPVTIAAYNTRVARAVDGVKEFLVLHYKSAKRDDTPYWKEAKTRAMPPGLAEKFQLSESRLLDEDTIYPYYHGFESYSWNAMNLGLGHQPRTANPALRHIDPANAIAEFDRLRAEADEMVAALPSCYEYLASINR

SEQ ID NO: 82905 - protein, 454 aa, Amycolatopsis lurida
  misc_feature (1)..(454): tr|A0A2P2FU70|A0A2P2FU70_9PSEU Tryptophan halogenase OS =Amycolatopsis lurida NRRL 2430 OX=1460371 GN=BB31_1580 0 PE=4 SV=1
MDDYDVIVVGGGPGGSTAAGLIAAEGHRVLLLDKDHFPRYQIGESLLPATIHGICAMLGVRDEIERAGFVRKRGGTFKWGTGAEPWTFSFAASDRMAGPTSYAYQVERTRFDALLLDGARRLGAEIRQGHRALGTIRVGERVGGVRYLDEAGHERRATARFVVDASGHGSRLHHDVGGTREYSPHFRNLALFGYFEGGRRMPAPDTGNILCVSFPDGWFWYIPLSDTLTSVGAVVRHESADRVQGDPDVAYSALIEDCPLIEEYLRDARRATEPPYDRLRVRKDYSYDRTVLWSPGMVLVGDAACFIDPVFSSGVHLATYSALLAARSINSTLAGFSDEKRCFAEFEARYRREFGLFRDFLITFYQLDSDEDDYFRQARRLTGHHGAAEAAFAGLVGGVSSQDFSRAMFGDVLAEGVQLQLRGLLGEAAGDEPPMFPGGLVPTADGRRWRVPDA

SEQ ID NO: 82906 - protein, 507 aa, Sphingomonas sp.
  misc_feature (1)..(507): tr|A0A4R2XNH4|A0A4R2XNH4_9SPHN Tryptophan halogenase OS =Sphingomonas sp. JUb134 OX=2485112 GN=EDF69_1303 PE=4 SV=1
MQQCADSPLRVVIVGGGTAGLMTAAALTALAGRTCAVTLIEAADIPIIGVGEATLPHLRAFVARLGIDETAFMAATSATFKLGIRFSGFGARDSDYFHPFGDYGPDFGRAEFHHYWLRRHAAGDAAPLGDYGIADMAAAANRFARPEDMQWSGEHDTAGLPYGYAYQFDATRFAPFLRDWTCARGAQRREAQVTRVVRSSENGRVLALEIADGQRVSGDLFIDCSGFRAILRDEDLWEDWSHWLPCDRAVAVPCTAAGATIEPYTRAKAMDAGGWRWRIPLQHRVGNGYVYPSAFVGDDHAQDTLLAALEGAPLADPRVLRFRAGRQRRAWAHNVVAIGLAAGFLEPLESTSIHLVQAAITHLIEHFPDAQGCDADRDGFNRAMDAEHDRIRDFLILHYHATIRDDAPFWTHVRTMAVPDTLAATLELWRETAQVARYGFGLFKPPSWVAVLIGQGMIPRRWDQRADAAPADMLARELAGLRASIADRVAALPNHSATLARVAASSA

SEQ ID NO: 82907 - protein, 499 aa, Asticcacaulis benevestitus
  misc_feature (1)..(499): tr|V4PUT0|V4PUT0_9CAUL Uncharacterized protein OS=Astic cacaulis benevestitus DSM 16100 = ATCC BAA-896 OX=11210 22 GN=ABENE_14170 PE=4 SV=1
MNEQRVKKVVIAGGGTAGWCTAAALSKLIGPLLDITLVESEDIGTVGVGESTIPTVRTFHRFLGIDEREVMRATNATFKLGISFENWAREQDQYFHAFGTIGRSPWMADFHHIWLQARADGYGGDLGDYCLELQAAKAGRFQTSEKATINYAYHLDAGLYGQFLRKLSEANGVRRIEGKIARVEQDAKSGFLTGLVMDSGATIEGDLFIDCTGFRGLLIEQTLKTGWDDWSHWLPTDRALAVQTDSVGTIMPYTRAIAHDAGWRWRIPLQSRVGNGLVYCSQYLSEEDARTRLLGALDAPPLFDPRLIPYSTGRRKMSWNKNCVALGLSSGFIEPLESTSIHLFQIGVTRLVQMFPFSGITQALTDRYNQAARAELERVRDFVILHYKATERDDSAFWHDRHNMSVPDTLAARIELFREKAYAYQAPDDLFRVDSWVQVLLGQRIEPRGWHGVGKLMPREDAVRGLEGLKGSIAKAVAAMPPHDHFLAQYCPMKDVVPA

SEQ ID NO: 82908 - protein, 498 aa, Xanthomonas sp.
  misc_feature (1)..(498): tr|A0A0Q5GJL6|A0A0Q5GJL6_9XANT Tryptophan halogenase OS =Xanthomonas sp. Leaf131 OX=1736270 GN=ASF73_20210 PE=4 SV=1
MTQPRIRKVVIAGGGTAGWIAACALAHQFRDLLDITLVESDQIATVGVGESTVPPIRTFHRFLQIDEQEFLRAVAGTFKLSISFEHWRRHGERYIHPFGITGQSTLVCAFHHLWLESQRRGMPGTFGDYCLETVASRVDRFALLREPAVNYAYHLDAALYAKFLRARSEAHGVTRVEGKIQQVTLQPDSGDVAALVLEDGQVIEGDLFIDCSGFRGLLIEQTLHTGYEDWSHWLPCDRAVAVQTEALGPPVPYTRAIAHEAGWRWHIPLQHRVGNGLVFSSRHLSDDEAHAKLLRDVAAPAVKDPWLVPFRTGRRRKAWNKNVVSLGLASGFIEPLESTSIHLTIAAVVRLISLFPADGIAPSQVELFNDISRAEMEHVRDFIILHYHATQRDEPLWRQCREMELPESLALRLRAWRERAHAWQGADELFRIDSWTHVLLGQGIVPQQHHPLAAALSDNDLRRLLDGIAQPIQRVVEQMPPQQDFISAYCKMDARAWG

SEQ ID NO: 82909 - protein, 536 aa, Dyella sp.
  misc_feature (1)..(536): tr|A0A1G7LNE0|A0A1G7LNE0_9GAMM Tryptophan halogenase OS =Dyella sp. 333MFSha OX=1798240 GN=SAMN04515659_1122 PE =4 SV=1
MARLKKVLVVGGGTAGWLTACYLARAVNAVDPRSVQVHLVESPDIGLLGVGEATFPSIRGTLAAIGLDERRFLVGATATYKQGIHYRHWVRPPGAPGADHFFHPFNAPSQRPGGPELLPYWLLGAAPAGMPFADAVSMQTALVDHSRAPKRVKDADYQGPMNHAFHFDAACFARVLAEHGQETLGVVRHTATVERAELDEHGAIARVVTKEEGELTADLYVDCTGLRGMLIGGAMQSPFRSRADVLFADRAVAMQVPYDAPDTPIPSYTISTAQEAGWIWDIGLQKRRGVGYVYSSRHTDDERAEAVFRKYLGEAGKGGRAMQIKFETGYRPEHWRKNCVAVGLAGGFVEPLESTGIALIELATYLLTHLLPGDTDDMESAARHYNEMMVARYDRIIDFIKMHYCLSQRRDSAFWLENADPSSIPQTLREKLEKWKTRPPHRLDFVSDLEMFMTSSWQYILYGMEFRTDLEPMRSAYPDVEVARREFGMIQQAAVRALDDLPDHRGLVEQLCAEHRPRSPATHAGHDDRIAERSRI

SEQ ID NO: 82910 - protein, 491 aa, Novosphingobium sp.
  misc_feature (1)..(491): tr|A0A4R1URC8|A0A4R1URC8_9SPHN Tryptophan halogenase OS =Novosphingobium sp. PhB165 OX=2485105 GN=EDF56_10315 P E=4 SV=1
MTDKAPIRSIVILGGGTAGWMTAAALSKALQPNGIAIRLVESDAIGTIGVGEATIPTIHWFNQLLGLDEAEFMAATKATYKLGIEFQGWQGDGHNYLHPFGTYGSPGDAVMFPHRLIRAWLGGHDLSPEDYSLTTQLARQRRFISPANDPRSLLSTLGYAYHFDASLYAGYLRKHAEARGVQRHEGKVTEIEQDGETGFIRSVSTDKGERLSGDLFIDCSGLRGLLIEDRLQAGFEDWSHWLLCDGAWAAPTPADAEPVPFTRSITHEAGWRWRIPLQHRVGNGYVFSSAFQTPEAARETLLAAIGEPSAEPRLIRFTPGRRKRAWVGNVVAIGLSSGFLEPLESTSIHLIQTGIGKLLSLFPRAGCEPLLAEQYNRIFAREMEDVRDFLVLHYHFTAGRSEPMWQHCQTAAMPETLAYRIAQYEASGRIMLTGEDLFRDASWFAVMTGQGIRARDYSPMLDAAPEAENLRHLEAVRAAVRQSSERIPRIA

SEQ ID NO: 82911 - protein, 529 aa, Asticcacaulis taihuensis
  misc_feature (1)..(529): tr|A0A1G4RAM2|A0A1G4RAM2_9CAUL Tryptophan halogenase OS =Asticcacaulis taihuensis OX=260084 GN=SAMN02927928_172 7 PE=4 SV=1
MTPLKKVVIVGGGTAGWMAAALLAKLARKGLEIELVESEEIGTIGVGEATIPAIKRFNHLLELDETDFIRSTQATFKLGIEFVNWGREGDSYIHGFGKIGQDLGWLRMHQYWLKMRDTGKVSDRFADYSINTAAAYANRFMRARADMKASPLNDIAYAYHFDAGLYALYLRKYSENLGVKRTEGKIVKVNQRATDGFIEGVVLESGAVVEGELFIDCSGMRALLIEETLGAGYEDWSHWLPCDRAVAVPCSYMRSDAARASPPNGSGGQSALPRTGEPALGKSELLTPYTRSIAHKSGWQWRIPLQHRIGNGHVFSSRYISDDEATAVLMGNLDGAPLAEPRVIRFRTGKRRKVWDRNVVAVGLSSGFMEPLESTSIQLIQSVILRLLAFFPDSGFAPAPRDSFNRLVDEEYREIRDFLIAHYKLTARDDSPMWRYCRDMDIPDALRERLDLWRVAGRFFKTGEELFVDESWIQVLIGQGLIPTGYDPFVDLRAEGEIVKYLNDISGVIGKCVAAMPSHEQYIEATCKA

SEQ ID NO: 82912 - protein, 499 aa, Novosphingobium sp.
  misc_feature (1)..(499): tr|A0A4R1UUE9|A0A4R1UUE9_9SPHN Tryptophan halogenase OS =Novosphingobium sp. PhB165 OX=2485105 GN=EDF56_102201 PE=4 SV=1
MNTPRKRVVVAGGGTAGWLAATALVRQLSGLIDVTLVESEEIGTVGVGESTIPTIRTFHEFIGVQENDFVRATHATFKLGIGFENWDRLGDHYFHPFGSVGRSTFVADFQHFWLEGRKAGFGGDYGDYSLEQQAAMAGRFGASGDNSLGYAYHLDASAYARFLRGVAEGAGARRVEGRIASVEQDGESGDITALVLASGERIEGDLFIDCTGFRGLLIEQTLKTGFEDWSHWLPTDSAFAVQSEATGDPVPYTRAIAHGEGWRWRIPLQHRVGNGIVYDSNFLSDGEARDRLLQSLDGPPLFEPRLLRFTAGMRKRVWNRNCLSLGLASGFVEPLESTSIHLVMVAVTWLIQNFPFGPDNTAVADWFNARSRHEWEHVRDFIVLHYAMTHRDDTAFWRERAAAAIPDSLAARIQLFREAAIAYQSQDDLFRVDSWVAVLIGQGVWPERHHQLPAMLPKPQLQAALNDLRRNIVGAVERMPSHAARLAQIADETREREVL

SEQ ID NO: 82913 - protein, 509 aa, Sphingomonas sp.
  misc_feature (1)..(509): tr|A0A432VEV7|A0A432VEV7_9SPHN Tryptophan 7-halogenase OS=Sphingomonas sp. TF3 OX=2495580 GN=EJC47_16665 PE=4 SV=1
MPAKRKILVVGGGTAGCLAAAYLARFFDGRIEITLLESPDIGIIGVGEGAFPTIRATLQFLGIDEAHFLRETSGTFKQGIRFDDWLHAPTADGRRHRYLHPFEAPFHTERTSLVPYWLLQDAAKRAPFAEAMTIQNRVAESGRAPKRADEGAFSGPLNYAYHFDAGKFVEIIEHRAVELGVRHLKGLLTDVALAEDGSIAHVATREHGALEADLYIDCSGFRAELIGKALGAPFKSVRDQLFTDRALACKIGYDRADAPIESFTIATAHPAGWTWDIALEGARGIGCVYSSAHMTDDRAAEMLQRYIGHDRFTARTIPFESGYRTQQWIGNCVAVGLSGGFLEPLESTGVVLVEAAVAMIAELFPHTGPIDAPARRFNALMAARYDRIITFLKLHYCLSRREEPFWRDNIAPDSIPEALRDLLDQWRHRPPNRFDFLIDVESFAYFNYQYILYGMDFPTDLAAGRGDFPDGAVAEKMFARIRSFGERAVADLPTNRALLHDINAGLMLR

SEQ ID NO: 82914 - protein, 513 aa, Sphingomonas sp.
  misc_feature (1)..(513): tr|A0A430BI24|A0A430BI24_9SPHN Tryptophan halogenase OS =Sphingomonas sp. S-NIH.Pt15_0812 OX=1920129 GN=BRX43_0 8610 PE=4 SV=1
MQPINHIVIVGGGTAGWLTAGTIAARHKGRMAHGFTVTLVESPNVPIIGVGEGTWPTLRTTLRRMGVSETEFFRQCDAAFKQGALFAGWTTGAADDAYYHPLMLPQGFGQLNLAQHWLADPDAANFCDSVTPQGKICDAGLAPKTIATPEYEGPANYAYHLDAGKFSAFLQRHCTENLGVRHVLADVREVRMTEGGDIAAVRTEQAGEIAGDLFVDCTGFAARLIGEAMGVPFRSCADTLFCDTALAIQMPYEDEDAPIASHTKSTAQSAGWIWDIGLPTRRGVGHVFSSSHIGVDEAERELRAYLGEGARDLPMRTLKIRAGHRETFWKGNCVAVGLAAGFLEPLEASAIVLIELSAKLIAEQMPACREVMDTIAARFNATTHYRWGRIIDFLKLHYALTQRRDTDFWRDNVRPETIPDRLQGLMELWRWNAPWMHDEFDRADEVFPAASYQYVLYGMGHRSAVTPGSLDAEAVQASRAWRENRSQTERMLAGLPRHRDLIRKIHQHGMPTL

SEQ ID NO: 82915 - protein, 504 aa, Sphingomonas sp.
  misc_feature (1)..(504): tr|A0A430BEC5|A0A430BEC5_9SPHN Tryptophan halogenase OS =Sphingomonas sp. S-NIH.Pt15_0812 OX=1920129 GN=BRX43_1 4190 PE=4 SV=1
MTETPPIRVVIVGGGTSGWMAAAALAKLLPRRCTVHLVESEAIGIVGVGEATLPHIRAFNERLGIREADFMAWTRATFKLGIEFRDWGRIGDSYIHPFGTFGRGQSEVDFHHYWARLMQAGVDVPPIEQFSMACTMAREGRFALPTTDPRQITTTFGYAYQFDAVLFAPYLRALAEDMGAVRSEGIVVDVERDGEGGDLTAIRLADGRRIEGDLFVDCSGFRSLLLGGAMGEPFQDWSRWLPADRAVAMPCRTETALTPYTSAIAMPAGWRWRIPLQHRTGNGYVYASGFTADDAARDALVAAVEGEPIADPRLLRFTAGRRERSWVGNCVAIGLASGFLEPLESTSIYLVQQAITALIELFPQGRVRGVDRDEFNRVIDLEYERIRDFLILHYHATERDDSEFWRYVRTMTIPDSLAEKMELFRRRGRIVKYREGVFLDASWVAVYLGQRVRPEGRDPRADLPAMDVLMRGMTNLRDEVAATAAAMPGHLAFIDRYCPMSPTA

SEQ ID NO: 82916 - protein, 507 aa, Asticcacaulis taihuensis
  misc_feature (1)..(507): tr|A0A1G4SG55|A0A1G4SG55_9CAUL Tryptophan halogenase OS =Asticcacaulis taihuensis OX=260084 GN=SAMN02927928_265 0 PE=4 SV=1
MAEPIRKIIIAGGGTAGWMTAAALRTSLAQDVEILLIESEDIGTIGVGEATIPTIRLFNEHVGIDERSFIRATEATFKLGIEFQGWGHEGNRYFHPFGDYGGTHEGLAAHQIWRRLNLAGDHTPLEAYSVGTQMAYAGKFFPPNPDPRSPMHDYSYAFHFDAGLYARFLRQHCEQRGVRRLNAKIANVNLRGEDGYIDSLTLDDGRVETADLFIDCTGFRALLLGGALGVPFVDWSHYLPVDRAWAVPTAKAASPAIMPFTRSTAHEAGWQWRIPLQHRTGNGHVFSSSHISEQAALDTLMQNLDAPPLKDPMLIRFKTGHRQRFWEKNCVAVGLATGFLEPLESTSINFIQNAAIRLLELFPAKEIDPYLRDEYNLRNQASYDYVRDFIIAHYCLNSREGELWRHCANMPIPDDLQWKLELYRRRGEVLIRKFDHFHEPSWISIYHGHGLRAAAYDPLADRIPLETLSALMQRRREGIQRVVAQVPFHAEFIAKHCPSESFMKAGV

SEQ ID NO: 82917 - protein, 489 aa, Asticcacaulis taihuensis
  misc_feature (1)..(489): tr|A0A1G4TQ52|A0A1G4TQ52_9CAUL Tryptophan halogenase OS =Asticcacaulis taihuensis OX=260084 GN=SAMN02927928_007 2 PE=4 SV=1
MALHKSDDNVKKIVVCGNGLAAQMTVCALARQLPDQIQLTWLRIAGSEQSDIFYGNTAPPATYEFNLNLGISEPELLSGSEASFSFGTRYQNWGGAAWTQCFQQPLPIIDGVLFHHYLSQQNIFELEPFLVSAVAAQKGAFAHPPEDRRHALSRAEYGYHIDPLDWGRFFERMVPRDRVDIAAGEIADIVVHDGDIETVRLSDGRELVADLYVDGSGAGAVFLSSLGVVFKAERRLAAHMQYRPLSGAEGVVRTLTGCDFGWVSDTPLQSHVATLTVFDPQMPGQAALIAVPEGAAVAEVPIGRHPIAWAGNCVAIGQAAGVVEPLTAAPVVLLIRDVDRLLSLLPNTRDMRVESREFNRQYDEDYRNAGLFHRAFYEGHAFPDTSYWRAARAQPIDERLSAKLAQFESRGLHVAYDLEPFTQEDWLILSYGMGRRPGRYDRIADRADRDRVRQFLSGMRQDIERCVSAMPNHTDYMQNFMRYLRQQET

SEQ ID NO: 82918 - protein, 510 aa, Asticcacaulis taihuensis
  misc_feature (1)..(510): tr|A0A1G4TRX7|A0A1G4TRX7_9CAUL Tryptophan halogenase OS =Asticcacaulis taihuensis OX=260084 GN=SAMN02927928_007 1 PE=4 SV=1
MTRPIKKIVILGGGTAGWMTAAALSSVLASKDVSITLVESELIGTIGVGEATIPDIINFNRLLGIREDEFMKATQATFKLGIEFVDWGRKGDVYVHPFGSHGVDMNGIDFHHYWLHSRNGGNPQPIHRYSLCAVAALEERFALPDANPRSLRSHLRYAYHFDAGLYAAYLRKYAETRGVRRIEGQMRTVDQDADTGDILRLHLDDESVIEGDFFFDCTGFRALLIEKALGAGFVDWKHWLPCDTAQAVACKHAGGLLPFTRSTARKAGWQWRIPTQQRTGNGHIYSSDFMSDDEAQSILMRNLDGEMIGQPRRIQFRAGHRETFWSKNCVAIGLSAGFLEPLESTSIYLIQEGISRFISLYPDLPAPEIVRHEYNRHMQTEFEQVRDFIILHYCATERSDSPFWDYCRTMSLPDSLVHKIELFRQVGRVFRYEEELFSKASWVAVFLGQGILPRSYDPIVRNLPPGEVSQSLESMRVAMINEVGRMATHADFIQNYCAARRLTSIDVASA

SEQ ID NO: 82919 - protein, 506 aa, Asticcacaulis taihuensis
  misc_feature (1)..(506): tr|A0A1G4RY14|A0A1G4RY14_9CAUL Tryptophan halogenase OS =Asticcacaulis taihuensis OX=260084 GN=SAMN02927928_223 7 PE=4 SV=1
MTNPPIKTITIVGGGTAGWMTAALLSKLLMGRYDITLIESEEIGTIGVGEATIPAIKVFNEMLEVNEAEFLKATQGTFKLGIEFVGWRDGPHDPADSYIHGFGKIGIDRLWLHTHQFWLKMREKGAVKHFDHYAICCAAARKGRFTPPDPRRGPPVSDLDYAYHFDASLYARYLRTLSEGRGVKRIEGRITQVNLRPEDGFIDTLTLQNGHSIGGDLFIDCSGMRGLLIGEALGIDYEDWNEWLLCDRAYAVPSVNPAQITPYVTCTTRDAGWQWRIPLQHRTGNGYVHSSGYTDDQTAVDTLMSTLGGPALAEPRLVKFRPGKRHKSWEKNCVAIGLSGGFLEPLESTSIHLIQTGILRLLSLFPGQGFNAADISEYNTYTDDEYRDIRDFIIAHYKVTNREDTPFWKYLKHMPVPESLARKLDLFRSSARFFKRGAFELFREESWVQVLLGQGMTAGYDPNVDLLSEAEMIGFLRDIEAVIDGNVNAMPTHDAYIARYCPAPKV

SEQ ID NO: 82920 - protein, 527 aa, Pseudoxanthomonas taiwanensis
  misc_feature (1)..(527): tr|A0A562E074|A0A562E074_9GAMM Tryptophan halogenase OS =Pseudoxanthomonas taiwanensis J19 OX=935569 GN=L613_00 1800000190 PE=4 SV=1
MDNNRIRKVVIAGGGTAGWVAACALTHQFRDLLEITLVESEEIGTVGVGESTIPTIRTFHRLLQIDEREFMKAVAGSFKLAISFENWKRPGERYFHPFGTTGVNTWSCDFHQFWLESRRRGIHSDLGDYCLETAAARLDRFALFDANDSAQQWSMRWTKAATRLERSDVSYAYHFDAALYAAFMRAKCEGRGLKRVEGKIAQVRQDPGSGYVQALVLEDGQVLEGDLFIDCTGFRGLLIEQTLKTGYEDWNNWLPCNRAVAMQVESDVPPVPYTRAIAHEAGWRWHIALQHRVGCGWVFSSEHMSDDEAAARLRAAYPDDRLVREPWVVPFRTGRRRQAWNKNVVSLGLASSFIEPLESTSIHLTLSAVTRLVQLFPFEGISQAVVDRYNKVSRDELEHIRNFIILHYHLNQRDEPMWKQCREMQLPPELAERIQVFRDTAYAWQGEDELFRLDSWTHCMLGQGVVPKDHHPLTRGLSDADMQTLLQGVRRPIERAVQAMPQHHEFLKRYCPADPSVWHNRRRSTVG

SEQ ID NO: 82921 - protein, 518 aa, Massilia lurida
  misc_feature (1)..(518): tr|A0A562R0C4|A0A562R0C4_9BURK Tryptophan halogenase OS =Massilia lurida OX=1036180 GN=IP91_04489 PE=4 SV=1
MNKPIEHVVIVGGGSAGWLAAGIIAADHQARAPHGLRVTLIESPDVPPIGVGEGTWPSMRDTLHRIGVSESDFFRECDAAFKQGSRFNGWRHGGAADEDYYFHPFVLPQGYGDTDLVAPWLQRRGDVPFADLVSFQPHLCVNGRAPKQAGTPEFAAVANYGYHLDAGKFGVFLRRHCLEKLGVHYVPDHVTAVNSHENGDIASLQTKEHGALAGDLFIDCTGMQSLLLGGHYGVPLLHQKHVLFNDSALAVQVPYEREDSPIASQTTSTAQRAGWIWDIGLPTRRGIGHVYSSAHTDDEQAERDLRAYVAATGGPADMPAPRKLTFQPGYRQQFWHRNVVAIGLSAGFIEPLEASALALVELSAAMVSDDLPATRAAMDIVSRRFNEAFTYRWERVIEFLKLHYVLSGRDDSAYWRDNRSDAAMPERLRELLTLWRHRPPSRLDFHRIEEVFPSASWQYVLYGMGFRPDRAHGTRRIEPQAAEQQFHAAADLTRRMLRALPSNRELLAHIRLHGLPKL

SEQ ID NO: 82922 - protein, 513 aa, Alteromonadaceae bacterium
  misc_feature (1)..(513): tr|A0A495DC23|A0A495DC23_9ALTE Tryptophan halogenase OS =Alteromonadaceae bacterium 2052S.S.stab0a.01 OX=130490 0 GN=K256_2619 PE=4 SV=1
MTEHRKPAIAIIGGGTAGWMAAMVFAHTWQQEIDISLVESDAIGTVGVGEGSTPALKNFFDQLGIAESEWMPACNATYKCGITFSGWSTRPGFEHYYHPFASQLDHFTLPLFIRQAQERVQGLDVDAHPDRYFLSAYLAQHHLAPKPGDSFPFELQYGYHFDASLLGQFLRQRACRMGVIHRRATVVEVNRATDGNIASLRLDTGELAAADIFVDCTGFAGLLIQQHLGTPFVSYQRQLSNNAAVAVASPLDSTVGDEPAPALPSQTLSTAMACGWAWKIPLTNRFGNGYVYSRDYCSADQAEFELRQRLGLLDADVEARHLSMKVGRVAEHWRGNCLAVGLSQGFIEPLEATALFLVQQTVSLFAESFTRGDYSSQYRDQFNQRMNRQFDGVRDYIVTHYKTNSRDDTEYWRDARANPDDISDPLRQLYRCWMAGGDLAAEVRRQQMDEFYPVASWYCILAGMGIFPSSERLRKPASADRQRELGRIDDFIRRCALNYQDHRQQLAELSRGT

SEQ ID NO: 82923 - protein, 510 aa, Asticcacaulis taihuensis
  misc_feature (1)..(510): tr|A0A1G4RFZ3|A0A1G4RFZ3_9CAUL Tryptophan halogenase OS =Asticcacaulis taihuensis OX=260084 GN=SAMN02927928_188 5 PE=4 SV=1
MQTAVRKIVIVGGGTAGWMAAAALIKALGSHAYDITLIESEDIGTVGVGEATIPPILEYNYFLGLDEDEFIRETNATFKLGIQFQDWRHLGHSYFHPFGLFGTEIDGFSFPHYYFRHYHKAGLSAVDIGKYNAETEAALQGRFGRVRREPGKPPVNYAFQFDAALYARYLRKYAEKRGVVRQEGKIVTVNQHPETGFITSVQMEKGRVIEGDLFIDCSGFRGLLIEQTLKTGYTDWSHWLPMNRAVAVPCERAGELLPYTRATAREAGWQWRIPLQHRTGNGYVFCDEFISEDAACETLLGRLDGKALADPKILRFVTGRRNLAWNKNVVALGLASGFLEPLESTSIHLVQSGVFRFLALFPRHGFNPHIVNEYNREVELSYNNIKDFIIAHYKVTERDDTPFWRHVRQMAIPESLQNRLDVFRASCQTLWRDSELFREVSWVAILTGQGLVPEDYHPAADAMDDDDLRLHLGRWRSAVLDRVKGLPTHEDFIRRNCASEAFKRLEAAGG

SEQ ID NO: 82924 - protein, 543 aa, Asticcacaulis taihuensis
  misc_feature (1)..(543): tr|A0A1G4RJP2|A0A1G4RJP2_9CAUL Glycine/D-amino acid oxi dase OS=Asticcacaulis taihuensis OX=260084 GN=SAMN02927 928_1970 PE=4 SV=1
MSHTDTSASERKAREVLIVGGGAAGWMTAAYLAKNLGTDRTGGPRITVLESPDISIIGVGEGTFPTIRNILRSLGIDEAEFMRESHATFKQGIRFDDWEMPPQREPNGQLIHSHYFHPFEAPYWSREELNLVPYWLLKDRDKRLPFAQAVTFQKKVADAGLAPKAIHQGHYQGPLNYAYHFDAYRFAGVLAKFAKGLGVHHLSGNLTGVGLAADGAIDHVATAEHGDLKAGLYVDCSGFRAELIGKAIRAPFRPIRDILFTDRAVTAQVPHDCSDCQLESYTVSSAHEAGWTWDIALSDRRGIGYVYASDYTTDERAEAVLREYIGRTSKAEISPRHISFTAGYREQQWMKNCVAVGLSAGFLEPLESTGMVLIESAVNKIVEFFPFSGPADASATIFNESMTRRYETIIGFIKLHYCLSKRPESFWVDNTKPETIPPHLRDLLALWKFRPPSRFDFVLDHESFAFFSYQYILYGMNFETDYEAARPSLSQSELADQLFARIAAFGEQASKDLISHRDLVDAVYREGFVERQAPPPRMRGIKM

SEQ ID NO: 82925 - protein, 500 aa, Asticcacaulis taihuensis
  misc_feature (1)..(500): tr|A0A1G4TRW7|A0A1G4TRW7_9CAUL Tryptophan halogenase OS =Asticcacaulis taihuensis OX=260084 GN=SAMN02927928_007 0 PE=4 SV=1
MNDLRIRKIVIVGGGTAGWMTAAAMARLLRDDEISIRLIESEAIGTVGVGEATIPHILYFNRLLGLDESEFMRRTHATFKAGIEFVDWGGLGQRYIHPFGAYGEPMNSLHFHHSWLRYDQMGKAQPLDKYNLIVEAARLGKFQKPEGGRLNASSGAYSYAFQFDAGLYARYLREIAEAGGVKRTEGKISHVSRQPETGHVESVTLETGETVPGDLFIDCSGFRGLLIEQTLQSGFEDWSAYLPCDRAVARACERVAPPLPYTRATAKSAGWQWRIPLQSRTGNGHVYCSEFISDEEALEGLNRDLDGPVTSEPNFLKFKAGVRKSPWNRNVVAIGLSSGFLEPLESTSIHLIQSAIARLMENFPDKTFNQPDIDYYNRRTQLEYEQVRDFIVLHYCATQRDDSPFWNYCRTMQIPQTLADRLAVYSENARLYRHDNELFDETSWLAVLHGQNIRPKRYHPIADIMPAAELETRMKRIEGQVAAGVSLMARHPDFLERYIR

SEQ ID NO: 82926 - protein, 538 aa, Burkholderia pseudomallei
  misc_feature (1)..(538): tr|A0A0F6G7Q1|A0A0F6G7Q1_BURPE Tryptophan halogenase OS =Burkholderia pseudomallei MSHR2543 OX=1249472 GN=prnA PE=4 SV=1
MSNPIQNIVIVGGGTAGWMAASYLVRALQQQANITLIESAAIPRIGVGEATIPSLQKVFFDFLGIPEREWMPQVNGAFKAAIKFVNWRKSPDRSRDDYFYHLFGSVPNCDGVPLTHYWLRKREQGFRQPMEYACYPQPEALDGKLAPCLPDGTRQMSHAWHFDAHLVADFLKRWAIERGVNRVVDEVVQVHLNERGYISSLSTQEGRTLEADLFIDCSGMRGLLINQALKEPFIDMSDYLLCDSAVASAVPNDDARVGVEPYTSAIAMNSGWTWKIPMLGRFGSGYVFSSKFTSRDEATADFLNLWGLSDKQPLNQIKFRVGRNRRAWVNNCVAIGLSSCFLEPLESTGIYFIYAALYQLVKHFPDTSFDPRLTDAFNAEIVYMFDDCRDFVQAHYFTTSREDTPFWRANRHDLRLSDAIKEKVQRYKAGLPLTTTSFDDSTYYETFDYEFKNFWLNGNYYCIFAGLGLLPDRSLPLLRHRSESIDKAETMFARIRREAERLRTSLPTNYDYLRSLREGDVGLSRSRPGPTLAAPEIL

SEQ ID NO: 82927 - protein, 496 aa, Asticcacaulis taihuensis
  misc_feature (1)..(496): tr|A0A1G4TMW0|A0A1G4TMW0_9CAUL Tryptophan halogenase OS =Asticcacaulis taihuensis OX=260084 GN=SAMN02927928_365 5 PE=4 SV=1
MNSVQQQEIVILGGGAAGWIAAALLAKRTDRRHIRITLVESEEIGIIGVGEATVPILTHCNALLGIGENDFIRSTQGTFKLGIEFCDWGVAGNRHFHAFSDYGHHVDNVSTHHYWLRLRQSGDERPIDDYSFAYAVAKNNNFAPSDPQNSRYHHAYHFDAALYARYLRDVATGLGVQRIEGRMTHFDLDGASGNIAAVHLAEGVKVPGDLFLDCTGFASELLGKALDTPFVDWSRWLLCNSAIAAPSKRTGALMPFTRSTAHAGGWRWTIPLQHRNGNGMVYNSDLWSDDAAREALLGNLDGELLAEPRVFRFTSGHRKWFWNRNCIGIGFASCFLEPLESTGLQLIVTGVLKLLRLFPQRTINPVLRDEYNRITTIELERIRDFIIAHYYLSRRPEPLWAASRDIEIPDSLRHKLEIWKASGQIALGDLESYMEPSWLAILLGNGVVPARYAVAADLYPLEQIRKGMEIRREEIIRSAQAVTSHQDFIDQYCKAS

SEQ ID NO: 82928 - protein, 495 aa, Porphyrobacter mercurialis
  misc_feature (1)..(495): tr|A0A0B2BXC0|A0A0B2BXC0_9SPHN Tryptophan halogenase OS =Porphyrobacter mercurialis OX=1572751 GN=PK98_11790 PE =4 SV=1
MTREQGVTRVVIAGGGTAGWLAAAALTRQLRGQVAVTLVESDEIGTIGVGEATIPTIRAFHALLGLDENAFLRAAKASFKLGIQFEGWAREGDSYIHSFGALGRGTWMAEFHHMWLEAHAQGFGGELSAACAEHEAARAERFATDENGSLNYAYHLDAGLYARALREQAEAQGLVRIEGRIARVERDGASGDIAALVLEDGARVAGDLFLDCTGFRALLIEGEMQAGWEDWSHWLPTNRALAMQTRAVGPAVPYTRAIAHDAGWRWQIPLQHRVGNGLVYASDFLSDDEARHRFLGLVEGEPLIEPRLIRFTTGRRKRVWVNNCIALSLASGFVEPLESTSIHLTMIAITRLLQLFPFNGSTPALARRFDDLAQRELERVRDFVMLHYVLNQRPEPFWQRMREMELPASLTERIAVWREAAHAWQGADDLFRVDSWVQVMLGQRLEPEGHHHVARLMPPERLRQALADMQAATAATVAKLPTHQQYLDRHGGVAA

SEQ ID NO: 82929 - protein, 534 aa, Streptomyces sp.
  misc_feature (1)..(534): tr|A0A1K2FLX6|A0A1K2FLX6_9ACTN Flavin-dependent tryptop han halogenase RebH OS=Streptomyces sp. F-1 OX=463642 G N=rebH PE=4 SV=1
MTGEDRRIKKVVILGGGTAGWMTAAYLGKALQNTVEITVLEAPTIPRIGVGEATVPNLQRVLFDFLGINEDEWMRECNASFKTAVRFVNWRTEGAGQATARELPQGGPDHFYHPFGLLPDYDQTPLSHYWYKNKYEGLTDEPFDYACFREPPVMDAKLSPRWLDGRHATRYAWHFDAALVAKFLCRFATEKQGVRHVQDEMTRVEQDERGFVTALHTASGKVLDADLFVDCSGFRGLLINKAMAEPFIDMSDHLLCDSAVATAIPHDDEANGVEPYTSAIAMSSGWSWKIPMLGRFGTGYVYSSKFTGKDEATREFSEMWGLDPENHEFNHVRFRVGRNRRAWVKNVVGIGLSSCFVEPLESTGIYFITAAIYQLAKHFPDRSFNETLINRFNREVESMFDDTRDFIQAHFYFAPRNDSPFWRANKELTLPENIREKIDAYRAGLPINSPVTDESTYYGNFEAEFRNFWTNGSYYCIFAGLGLVPDAPLPALSYKPESVIGAQPLFERVKRQQQDLLDTLPTTYDYLRQLHGTS

SEQ ID NO: 82930 - protein, 499 aa, Sphingopyxis sp.
  misc_feature (1)..(499): tr|A0A1G3KHP4|A0A1G3KHP4_9SPHN Tryptophan halogenase OS =Sphingopyxis sp. RIFCSPHIGHO2_01_FULL_65_24 OX=1802171 GN=A2885_15650 PE=4 SV=1
MTDPIRTIVIVGGGTAGWMAAAAAARFLNDGQRRILLVESDAIGTVGVGEATIPPIRDFNNMLGIDEAEFIRETGATFKLGIEFVDWGALGERYLHPFGDPGHNFEGIAFHQYWLKHRHDPRIGPFTDYFITDAAVRHRGCAPQSGDPRSPLHQMAAAYHFDAALYAAYLRRRAEAQGVERIEGRITGVARDGGSGHVAALRLADGRDVAGDFFIDCSGFVSLLLGREMGVAYRDWSRWLPCDRAFAVPSARTDPLIPATRATAHGFGWQWRIPLQHRTGNGIVWSSAHAGEDEARDTLLANLDSEALAEPRQLRFTAGVRERLWEGNVVALGLAGGFIEPLESTSIHLIQTGINKLFWLFPDRNFSAVERDEYNRLMIDQYEYVRDFIILHYKATARNDTPFWRDMAAMEIPDSLAQKIELFRTKGRIRRFDHDLFGVANWAAVMLGQNIVPDGYDPLVDATDDDRIVAAMERIASVFDQQARAMPSHADYIARLIAR

SEQ ID NO: 82931 - protein, 502 aa, Sphingopyxis sp.
  misc_feature (1)..(502): tr|A0A1G3JYS1|A0A1G3JYS1_9SPHN Tryptophan halogenase OS =Sphingopyxis sp. RIFCSPHIGHO2_01_FULL_65_24 OX=1802171 GN=A2885_16340 PE=4 SV=1
MDEGLFNLVIVGGGTAGWMCAAACAAKLDRSRFRVRLIESEEIGTVGVGEATLPQMKDFNDFLGLDEVEFMQATQASFKLGIEFVNWGRQGDRYVHPFGTFGRPIGEADFFSYWVRGRNAGVAAPLSDYCFPIVAALQNRFMLPNGDPNDVRNAFAYAYHLDAFLYARYLRGWAEARGIERVEGRIVDVARDANSGNIAAVTLASGTSVAGDMFVDCSGFRSLLLGGTLGVDLDDWSKWLPCDSAAAVPSVRSTDFTPYTRSTRRKAGWQWRIPLQHRTGNGYVYASKDISDDEAAATLLANLDGEALAEPRVLRFKAGKRDQAWAHNVVGMGLAGGFLEPLESTSIYLVQMAIMHMLTLLPSCDGIDPALPAEFNRVMDVEYDRIRDFLILHYIANDADAPLWEQVTTMNVPDTLAGKIDRFRQRAFVQAYRDGLFGPPSWQAVFVGQGIVPHAADRLADTLPDDLLADRLGNLAATITLGAKSAPSHADFVASYCPAPAP

SEQ ID NO: 82932 - protein, 496 aa, Alteromonadaceae bacterium
  misc_feature (1)..(496): tr|A0A495DF02|A0A495DF02_9ALTE Tryptophan halogenase OS =Alteromonadaceae bacterium 2052S.S.stab0a.01 OX=130490 0 GN=K256_3205 PE=4 SV=1
MQFNVKKIVVLGGGTAGWSAAALLARQFQPSAVEIVLIESPNITPIGVGEATVPAILNVHNHLQIDEREFLKATQATFKLGIEFRDWRSVGQDFFHPFSNFGVPIEGVDFHQCWLRLNQAGKRTNLQDYSLCTALAKAGRFAIPDNESPNSLAWYGYAYHFDASLYAQFLRDYSEKRGVRRLADTVVGVDKDPQTHFVKSLALESGESLAADFFIDCSGFNSLLLEGQYQVGYEDWSHWLPCNRAWAVQTESDGELLPYTTSTAMSAGWRWRIPLQNRTGNGYVYSSAFTDDDRARTEFLETLQEPMITEPRLIQFTAGMRPNFWVNNVAAVGLSSGFIEPLESTSISLMHTGIGKIIAHMPELVVTDAAIAHANEQNRMEYERIRDFIILHYWASQRDDTDFWRSVRSTPLPDKLEAKIQQFLRDGSMLSYEQESFRDPSWLAMYNGFGLNPAACSEAAEKLSPDMIENIFEKIGSAIVKGVDQAPSQQEFLKTL

SEQ ID NO: 82933 - protein, 505 aa, Asticcacaulis taihuensis
  misc_feature (1)..(505): tr|A0A1G4SPK2|A0A1G4SPK2_9CAUL Tryptophan halogenase OS =Asticcacaulis taihuensis OX=260084 GN=SAMN02927928_278 9 PE=4 SV=1
MPAEPIRKLVILGGGTAGWMAAAMASRTWGKRLNITLVESEAIGTVGVGEATIPPLIKLLRFLGLDEDVTLRNIQGTFKFGIEFDGWRRKGESYMHSFGTPGAPIGIVPFYQYWLRRHLAGEDCGSLWDYSLNTQVSYAGKMSREPRIEGNLPGPERAFHFDAGLLAQFMRRGCEASGVVRHEGKVSGVNLRPEDGFIESLTLDSGEVIAGDMFIDCSGFVGVLIEGALKAGYEDWTHWLPCDRAVAVPCTLPADKSVGILPYTRSTAHVAGWQWRIPLQHRTGNGHVFCSGAMTNDEATRILLENLDGEPLADPRVIGFRTGRRKATWVKNCVALGLASGFMEPLESTSIHLVQSVMTRFLDFFPDKDFNPVEIEEFNRRCRREYEYIRDFLVLHYHANERDEPFWRDCRTMAIPDSLAHKMDYFRQHGRLLVEEGDLFREDSWVQVLIGQGIMPKAASPLTETVGQEALASFMSGMKMAMDKAVTAMPSHDAFIARHCAATTV

SEQ ID NO: 82934 - protein, 441 aa, Actinosynnema pretiosum
  misc_feature (1)..(441): tr|A0A290Z6K7|A0A290Z6K7_9PSEU Tryptophan halogenase OS =Actinosynnema pretiosum OX=42197 GN=CNX65_16200 PE=4 S V=1
MLDAIVMGGGPAGSVCAAVLARQGRSVLVLERQEFPRFHIGESMLPYMVGLLERHGLLDAVREQGYVVKRGGEFIDPTGTKFFRAGVFRADFAKTGDGRHHETFQVERSHFDRVNLDQARAAGATVREGAQVVGLLEEGGRVVGVRYREGGVEREERARYVVDATGRAGVVANRFGLRRMIEDLRMVAVFHHRDGLDEAHNPGHEGDIQVGSHSDGWIWAIPLSADRISVGTVMHRDRLRGRTPAEAFAEHVERVPRINQRLTGTSATSDFWVETDYSYHSDQVTGPGWVMVGDAGCFGDPMFSGGVLVGMATGAEAAEALGRALDSPADEEQALTGYSNFFKTGYDTYVRLIFSFYEGELLPALAEAHSEAGNLSEADMEMYVVRLLGGDFWSARNPVANALRANPAWSTFSPFEPVHRCPVYPELDVAELGGLAGTVGR

SEQ ID NO: 82935 - protein, 505 aa, Sphingopyxis sp.
  misc_feature (1)..(505): tr|A0A1G3JYW4|A0A1G3JYW4_9SPHN Tryptophan halogenase OS =Sphingopyxis sp. RIFCSPHIGHO2_01_FULL_65_24 OX=1802171 GN=A2885_16455 PE=4 SV=1
MAKTVERVVIVGGGTAGWLAAARLAAARPTLNVTLIEAPDIPTIGVGEGTWPTMRATLAAIGISEGEFLAACDGSFKQGSRFDFWVDGAADDRYLHPFTAPPALPTGELLAAWQATAADRSFGAAMTAQAAVCDLDLAPRQRAMPDYQGAANYAYHLDAGKFAALLRDHATRRLGVRHLADHVTAVTRGEGDTLTAVATRAHGEIAGDLFLDCTGHAALLIGGELGVEWIDRSDTLFNDRALAVQVPVAEGSAIASQTISTAHRAGWIWDIGLPGRRGIGCVYASRFLGDDAAEAELRAYIARVLPGAPDVPVRRLSFPTGHRARFWQGNCVAIGLSAGFIEPLEASAIVLIELSLNALIDNFPASASAMPIHAERFNTLFRYRWDRIVEFLKLHYVLSKRPEPYWLAQRDPASVPQRLTDMLALWQEQPPSAWDFPQVDEIFSAESHQYILYGMGYPIPPGLVASDRAVAALAEQRQRARSLASALPTNRDYLDALTATATAAE

SEQ ID NO: 82936 - protein, 498 aa, Sphingopyxis sp.
  misc_feature (1)..(498): tr|A0A1G3JYT1|A0A1G3JYT1_9SPHN Tryptophan halogenase OS =Sphingopyxis sp. RIFCSPHIGHO2_01_FULL_65_24 OX=1802171 GN=A2885_16440 PE=4 SV=1
MTDKKQRIVIAGGGTAGWMAAAAIARTMGNAVDLTLVESEAIGTIGVGESTIPPLVNYNRLLGINEADFMRATQATFKLGILFDHWREPGHRYFHSFGLTGKDHWSAGFQHFWLHGKTRGHEQSYDEYCMELVAALEGKFAHLPNEGINYAYQLDSGLYARFLRQMAEGDGTKRIEGKIARVELDSESGDIAALVLDGDRRIEGDLFLDCTGFRALLIEGALHAGFDDWTHWLPCDSAIALQTPNVRPPVPYTRAMAHDAGWQWRIPLQHRTGNGLVYCSRYLDRDAALDRLLGNIEGEALTEPNFLRFTTGVRRRQWYRNCIAVGLSSGFTEPLESTSIHLIQRAVLRFIRMLPLGKVSERDIAEYNDQQMQDNLQIRDFLILHYKATERRDSAFWRQCADMPIPDSLAQKIELFRETGRVFRKNEELFAENSWVQVMMGQGIAPQSHHPIATKLSDEELARFLGGIRDNVRDTVAKLPEHHAYVARYCGAAVPQAA

SEQ ID NO: 82937 - protein, 301 aa, Acetobacteraceae bacterium
  misc_feature (1)..(301): tr|A0A4Q4BP83|A0A4Q4BP83_9PROT Tryptophan 7-halogenase (Fragment) OS=Acetobacteraceae bacterium OX=1909293 GN= EON48_16680 PE=4 SV=1
RIEADFFIDCSGFRALLIGKALGVGYHDWSPWLLCNRAVALQVSNPTPPGPYTLAHAQDAGWCWRIPLQQRSGVGYVFCDRFVSDDEALANLLSQAEGEPVVDPWIIPFKTGMREKLWDKNVLSLGLAGGFIEPLESTALHLIYRGMDFFIRYLPDKDCDPNLITEYNRRMGQDYEEIRDFVIMHYATTRRDDNAFWRECRDMEMPESLQSKIDLFKVNGTVREGVDLMFRNVSWQSVLEGMGQHPRGYHPLMNRIAFDGMPRYLDQGAAMIRKAVEGLPTHAEFLDAHCTAPSPDWLAPV

SEQ ID NO: 82938 - protein, 519 aa, Flavobacteriaceae bacterium
  misc_feature (1)..(519): tr|A0A2E2ZDU9|A0A2E2ZDU9_9FLAO Uncharacterized protein OS=Flavobacteriaceae bacterium OX=1871037 GN=CMC73_0775 5 PE=4 SV=1
MNQLKLKTAETLRKLKTNPNNIVIVGGGSSGWMTAAILCTRFPNKNITLVESPDIPTVGVGESTLGSINLFFNLLGLEDKDWMPYCNATYKLAIQFTDFYKKGETFYYPFGDKDFSNSRGIDDWMIKKANNKDLSIKDYYDTFYSIMPFVYDNKIPATKVGNFNFTKDAAYHMDAAAFGEFLKEKICIPKGVKYIQDTIQDVKLQDNDVHCLKCNNHTVHGDLFVDCSGFRSLLLEQTMKVPFTSFKDHLPNDRAWTCHLPYDDKDAEIENVTNCTAYNNGWIWNIPLYHRAGSGYVFCTDFISEDDALIEYKQYIQQLGKDTDKLKFRLVKIKNGRHDVCWKNNVVGVGLAYGFIEPLESTGLLSTQEMLLALCETLYNDNVGSLQVKNFNYFCANMLDTFKEFVAYHYIASSRKDTEYWKHVTENISIDSDASIDLAHNYTVNHTTPNDSAGLPDILVGMHYYSHNPLSVDWTSFVTGSPLVTSKNWENTVSQKNRLYQSISDKSLSHYNYLERFIY

SEQ ID NO: 82939 - protein, 493 aa, Flavobacteriaceae bacterium
  misc_feature (1)..(493): tr|A0A2E5ZPJ4|A0A2E5ZPJ4_9FLAO Uncharacterized protein OS=Flavobacteriaceae bacterium OX=1871037 GN=CMC89_0302 0 PE=4 SV=1
MKVVVVGGGTAGWLAALMISKIRPEHDVTVIESSKIGIIGAGEGSTGSLTNIVQNEMWNLGCVEQDFIRECDATIKLGIKHIGWNKDTKSHYYGPIDGSPTSGDVVDIVFQNALGYREQDMLHISTELGYKIHHNKNSFVENKGNHAYHFDAHKVGQYFKKVCDTVKHIDSEVDDVIQDKEKGWVTELKLSNGQTVQGDMFIDASGFNQVLMRAVGSKWKSYKDNLPVNSALPFLLPYEDDEVIEPVTNAWAQKNGWCWQIPTLNRRGCGYVFCADFVTPDKAQEELEQTIGKKIDPIRLLTFDSGRQEKLWIKNVLSVGLCAAFAEPLEATSIHTTIFQLKHFVFGCLGKDRDETCNVGQIDDYNDKNGHLYDTLKDFLVAHYTCGRNDTEFWKYIDSGKTTTDFVRTMHEVCKNRVPNHTMFPRHEGCAGWPLWSYVLAGTGKLTDKICRRELHFNNDARISDTAYVYHVAQHDGKTMHLPSNTDYIRDMQ

SEQ ID NO: 82940 - protein, 501 aa, Sphingomonas sp.
  misc_feature (1)..(501): tr|A0A0Q4KSG7|A0A0Q4KSG7_9SPHN Tryptophan halogenase OS =Sphingomonas sp. Leaf34 OX=1736216 GN=ASF00_14345 PE=4 SV=1
MTEQRVKKVVIAGGGTAGWLAAAALSRQLGQLLDITLVESDEIGTIGVGEATIPTMRSFHAILGLDERKFMRETQATFKLGISFENWARDGDRYIHSFGDLGKSTWMGDFHHFWLAAKAAGDPSEIGDYCLELQAAKAERFALPSEGEIHYAYHLDAGLYARFLRARSEANGLKRIEGRIASVDRDGETGFIRALVLDSGERVEGDLFIDCTGFRGLLIEGTYAAGYEDWSHWLPTNSALAVQSAATGPAHPYTRAIAHDAGWRWRIPLQHRVGNGLVYASDHLSDDEAHARLLSAIDGAPLTEPRLIRFRTGRRRQVWMGNCVALSLASGFVEPLESTSIHLVMTGVTRLMQAFPFGGIAPAAVTRFNEQAQAELERVRDFIVLHYHLNERTEPFWAARRDMPIPATLVERIALFAEAAQAYQGGEDLFRVASWVQVMLGQRLAPRDHHRLGSIMGGAQLAGVLTNIRSTIADAVAGMPMHQQFLDRYLPAPAVSAAQIR

SEQ ID NO: 82941 - protein, 528 aa, Sphingomonas sp.
  misc_feature (1)..(528): tr|A0A4Y8ZSR1|A0A4Y8ZSR1_9SPHN Tryptophan 7-halogenase OS=Sphingomonas sp. 17J27-24 OX=2555898 GN=E2493_13085 PE=4 SV=1
MNDTGPGEPLRKITIVGGGTAGWMTAAVLSRWLSQVEIKLIESDAIGTIGVGEATIPHIRNYFALADIDVAKMIDAAKATFKLGIQFVDWGAPGETYFHGFGRIGRDMLWLHTHQLWLAARERAPGSVKDFDRYSISAQAALRNRFMFPDPRDRTSPLADYEYAYQFDASLFARLLREESEARGVERIEGRIVEVRRNSETGFVEQLRLEDGREVDGELFVDCSGMRALLIGEALGVGYDHWDRWLLCDRAMAVPCESVAPLTPYTRSTAKRAGWQWRIPLQHRIGNGYVYNSGMIGDDEVADALLASLDGTPTADPRPVRFAPGRRLKAWEKNVVAVGLSSGFLEPLESTSIHLIQTAIQRLLALFPARGLCAPDIDEYNRQSRDEYEDVRDFVIAHYKVTRRSGDPFWDHVRTMDVPDSLAERLELFRSSGRFFKHGAAELFAEESWVQVLIGQGFEARADPVTRFVGTEDLVHYLDDMAAVMSDVAGRMPEHAAFLSRLPASGAGRGASAGGPPKIDLGFEAARR

SEQ ID NO: 82942 - protein, 498 aa, Sphingomonas pokkalii
  misc_feature (1)..(498): tr|A0A2U0SF58|A0A2U0SF58_9SPHN Tryptophan halogenase OS =Sphingomonas pokkalii OX=2175090 GN=DD559_12305 PE=4 S V=1
MDDPSTIVIAGGGTAGWMAAAALARFAGTGWRIRLIESDAIGTVGVGEATIPQIRLFNAGLGMDEAEFLRATGGTIKLGIEFAGWNGEGSRYLHAFGTIGRGLGLIEFQHYWLRAHAAGTALPFSAYALNNEAAHAGKAARLDGQGPIPAMPYAYHFDAGLYAAFLRRYAEARGVERHEGRIADVERGPAGIAALRLDDGRRIAGDLFIDCTGFPALLMAALGVGYTDWSHWLPCDRAVAVPSARTAPLLPYTRATARGAGWQWRIPLQHRTGNGLVYARAHCSDDEAMATLLANLDGDALTDPRPLRFTTGTRDCFWQANCVALGLAAGFLEPLESTSIHLIQSGIARLLQFLPRGQATNAARAEYNQLTQFEYAAIRDFLVLHYHANGRTEPLWQACRAMALPEELARKIALFRATGRISRREDELFAEPGWLQVLLGQGIVPDRWHPFADQLSDAELTMFLGTIRTMIERTTAAMPSHAGFLAGIDAVQKEVEPA

SEQ ID NO: 82943 - protein, 505 aa, Caulobacter sp.
  misc_feature (1)..(505): tr|A0A2R7L689|A0A2R7L689_9CAUL Tryptophan halogenase OS =Caulobacter sp. HMWF025 OX=2056860 GN=DBR10_16630 PE=4 SV=1
MADTAIKALTIVGGGTAGWISAALLSRTLGPSVTITVVESEEIGIVGVGEATIPAIRLLNGLLGLDEDDFLAATNGTIKLGIEFVDWHTVGQSYLHAFGPVGRPLGMAPFHHYWLRRRQAGHAESLWDYSLNARAAKGGKFDRIGQVGGGYLEGLVYAFHFDAALYAQYLRRYSEAQGVTRVEGRIVGVDQHPETGFVTGLTLQDGRKVGGELFIDCSGFRGLLIEETLKSGYEDWRSWLPMDSAIAVPCASATPLTPYTRATAREAGWQWRIPLQHRTGNGHVFCSDHIDAARATDVLMANLDGAPLAEPRQLKFTTGRRKQFWNRNVVALGLASGFMEPLESTSIHMVQSALNRLLALFPDRSFNPVEIAEYNRQTAAEYEYIRDFLVLHYKASTREDTPFWQAMRRMEMPDSLKARIELFSQSGRLFSQDDDLFKEASWIQVLIGQGVIPEAFHPLTGVVTDAQLDDYLGNLRQIMSRAVEALPAHGDFIARTCPSRSRPAA

SEQ ID NO: 82944 - protein, 491 aa, Caulobacter sp.
  misc_feature (1)..(491): tr|A0A2R7L9B1|A0A2R7L9B1_9CAUL Tryptophan halogenase OS =Caulobacter sp. HMWF025 OX=2056860 GN=DBR10_13465 PE=4 SV=1
MTALPLGRVAIIGGGVEGWMTAAGLARATGGRASLRLVETGPGPRGALSTLPSLRSFHALLGLDEAALMAATQATFKLGTRFSGWTPGTSFCNAFGELGASLEGVGFHHYWTRLQQAGGAPPLDDFNLAAVMARSGRFSPPASDPRSPLATLAYGLHMDAGAYVAVLRDLATRRGVAVSHGAVGEVLRRETGDIAAVILAGGERIEADLFVDCTGAEARLIGSEPFEDWSSLLPANRSLRLRAEVRRDAPALTEIEAAAEGWRWRIPLRDGVESGLTYRQDLTDDETALKAARTGLPKHGLSDPEVTPLRNGRRTRSMAGNCVAIGTSAGVVEAMDAADLHLVQSGVTRLIALFPRPGDAAVAAAEYNRLGEETLLRVRDLAITHYRLGQRTDGALWALGRNGPVPEPLAYRLAQFESRGRVVMYDEETFLEPHWIATLIGHGLLPRRYDPLADRMPLEKTRAMLERMRLIFRQTAESLPTHAAALAGLAP

SEQ ID NO: 82945 - protein, 516 aa, Caulobacter sp.
  misc_feature (1)..(516): tr|A0A2R7L610|A0A2R7L610_9CAUL Tryptophan halogenase OS =Caulobacter sp. HMWF025 OX=2056860 GN=DBR10_17015 PE=4 SV=1
MCGTRKPSPQQSGRLVSRPVRNVVIVGRDAAAWLTALGLKRAFGRQGVNVTVLELPSMVRSADVLVGLPTLEGLHRLLGLDTDDMLAATAGAYALGQQFANWSQARPPFVHAYDTHGAPIHRIDFLQHWLKARSEGMNVPLEEFSLGAAAAKHGRFVVHGDATSGFSKARAGYHLDASAYIRLVRQKAIELGVQRQAGTLGEVVRSDSGIVSVSLAGGEPLAADLFVDASGVDAVLIGKVLEQPLESWSPWFGCDRVLVTSGPKLNPLPAMSRISGFKAGWIGMFPLRDRTPVVAAYDSRRISDAEMLQSASVLCGMRLGDAFVAPCEPGMRSAPWTGNCVAIGEAAVVLEPLDAASLHMIHVGLSHLITLFPVSAEAMLEAEPFNTSMQNHARNLRDFQIVHYRLNGRLDEPFWDRARETPPPPELAAKLDLFAARGAVALYDDETFQEENWASVLIGHGLIPRGYDPQVDTLAPDELIAAFQRMLGFIASTVRDMPSVEAQLELFAPLPSNASF

SEQ ID NO: 82946 - protein, 538 aa, Pseudomonas sp.
  misc_feature (1)..(538): tr|A0A285GB81|A0A285GB81_9PSED Tryptophan halogenase OS =Pseudomonas sp. LAMO17WK12:I10 OX=1286371 GN=SAMN05660 489_01224 PE=4 SV=1
MNKPIKNIVIVGGGTAGWMAASYLIRALQQQANITLIESEAIPRIGVGEATIPSLQKVFFDFLGIPEREWMPQVNGAFKAAIKFVNWRKSPDSSRDDHFYHLFGNVPNCDGVPLTHYWLRKREQGFQQPLEYACYPQAGALDGKLAPCLPDGTRQMSHAWHFDAHLVADFLKRWAVERGVKRVVDEVVDVHLNERGYISSLFTKEGRTLEADLFIDCSGMRGLLINQALKEPFIDMSDYLLCDSAVASAVPNDDAREGVEPYTSAIAMNSGWTWKIPMLGRFGSGYVFSSKFTSRDQATADFLNLWGLSDNQPLNQIKFRVGRNKRAWVNNCVSIGLSSCFLEPLESTGIYFIYAALYQLVKHFPDTSFDPRLSDAFNAEIVYMFDDCRDFVQAHYFTASREDTPFWLANRHDLRLSDAIKEKVQRYKAGLPLTTTSFDDSTYYETFDYEFKNFWLNGNYYCIFAGLGMLPDRSLPLLQHRPESIEKAEAMFASIRRETERLRTSLPTNYDYLRSLRDGDAGLSPSQRGPTLAAQEIL

SEQ ID NO: 82947 - protein, 504 aa, Caulobacter sp.
  misc_feature (1)..(504): tr|A0A2R7L936|A0A2R7L936_9CAUL Tryptophan halogenase OS =Caulobacter sp. HMWF025 OX=2056860 GN=DBR10_13455 PE=4 SV=1
MNIDNRLRSIVIVGGGTAGWMTAAALGRFLTKDGQTRVTLVESDAIGTVGVGESTIPQINIFNRMLGLDENEFVRRTKATFKLAIEFRDWERIGHSYHHPFGPYGLDMEAVSFHAYWLKLHAMGEDDDLGAYSLQAVGARQDRFMRPNGQANSPLGAIAYAFHFDAGLYARFLRDYAEARGVRRREGRITSVQQDGLNGHVTSVILESGEAVEGDLFIDCSGFRGLLIEETLHSGFEDWSNWLLNDRAVAVPCASGGSFSPVTRATARPAGWQWRIPLQHRIGNGYAYSSAHISQDEAAAYLLSHLDGEPLAEPNHIRFKAGRRKKSWNRNVVAIGLAAGFMEPLESQSIHLIQVGISRLLAMLPDRDFRQPDIDRYNRVMAFEYEKIRDFLILHFKATSRNDTPYWDYLREMAIPDYLADKIALFESYGRIFRENEELFNDTSWFSVMVGQGLRPRGYDPMVDVMPVEELRARMADIRTVIARSAEVMPDHRAFIRDHCDAMA

SEQ ID NO: 82948 - protein, 511 aa, Sphingomonas sp.
  misc_feature (1)..(511): tr|A0A4Y8ZSU2|A0A4Y8ZSU2_9SPHN Tryptophan 7-halogenase OS=Sphingomonas sp. 17J27-24 OX=2555898 GN=E2493_06890 PE=4 SV=1
MNGEPIRNIVIVGGGTAGWMTAAAAARFLAGGGKRRIRLIESAEIGTVGVGEGTIPPMIEFNQQLGIPEADFLRETKGTYKLGIDFVGWGAEGERYFHPFGKLGLNLNGVDFHQLWLKHRSNPAVGPITAYSISALAAQEHRFAHPDKSGRSALTNIGYAYHLDAGLYAAMLRRYAEAGGIERIEGRIVDVARDPQSGHVTAVTLADGQRIEGELFIDCSGFRSLLLGQTLGVAFEDWSHWLPCDRAIAVPSARREPITPFTRSIAHKAGWQWRIPLQHRTGNGHVYSSAYLGDDEAERILVEHLDSAQIGNFNRLRFTAGRRARSWEANVVAIGLSSGFLEPLESTSIYLIQYGIHRLFSLFPDTGFAEAERREYNRFMSESYEAVRDFIILHYQATRRPEPFWRDVRAVEMPDSLRRKIELFADKGRIFRYSDELFELPSWVAVMLGQGIVPSGHDPLADSLPDDQVVAAMAELRKGYAKIAGQLPTHESVIGQALAAAGGQQAVRQSL

SEQ ID NO: 82949 - protein, 500 aa, Robiginitomaculum sp.
  misc_feature (1)..(500): tr|A0A2G2J3M1|A0A2G2J3M1_9RHOB Tryptophan halogenase OS =Robiginitomaculum sp. OX=2030823 GN=COA69_06195 PE=4 S V=1
MSNNRIRKVVIVGGGSAGWMTAATLSKLLKDKFCDIELIESEQIGTIGVGEATIPLIGTFNRTLGIDETDFVKATKATFKLGIQFENWGRIGDKYFHPFGPYGLDMGGVSFHAFYQKRHPEHRHELLEQYSLQALAAKQNRFMRPVNAGNSPLSTIAYAFHFDAGLYAQFLRGHAEGRGVKRTEGKVVDVTQRDADGFIESVTLEDGQIITGDLFIDCSGFRGLLIEQALKTGYNDWGHWLPCDRAVTVASESLDVLRPYTRSMARDAGWQWQIPLQHRVGNGHVYSSKFMEDDVAQDVLMSTLESKPLADPHLIRFSTGHRKKFWNKNCVAIGLSAGFLEPLESTGLHVIQSGISSLLQMFPTREFNQIDIDRYNRITTFEFERIRDFIILHYHATQRDDTDFWNYTRTMSIPDYLVDKMAVFKSQGRIFRENEELFNDTSWFSVMMGQNFVPDQYDTVADVLSTEETTEKVDHIREVIATSVTHMPLHADYIAKNCTG

SEQ ID NO: 82950 - protein, 504 aa, Sphingomonas sp.
  misc_feature (1)..(504): tr|A0A0Q4KNQ2|A0A0Q4KNQ2_9SPHN Tryptophan halogenase OS =Sphingomonas sp. Leaf34 OX=1736216 GN=ASF00_11485 PE=4 SV=1
MANHPLRIVIAGGGTAGWMAAATFARFLETGYEIDLIESDAIGTVGVGEATIPQIHLFNDALGLDEGAFLRATGGTFKLGIEFVDWFKPGHRYMHAFGDVGRDVGLLPFHQYWLRARSLGLAGDLGAYSLNTHAALAGRMQRGPARTARTLPSMPYAYHFDAGLYARYLRRYAETRGVNRIEGKIVRVTRDGESGDVSGLVLENGTTVAADLYIDCTGFRGLLIEEALGTGYEDWTHWLPCDRAIAVPSARSEKFTPYTRSTAHGAGWQWRIPLQHRTGNGVVYSSAHLSEDEATATLLRGLDTSAMADPRTITFRTGRRKRMWNHNVVALGLAAGFMEPLESTSIHLIQSAVARLLKLLPGRVIAEVDRAEFNRQSDFEYERIRDFIILHYKATARDDTAFWRACRDMAVPDTLAAKIELWRGNGHIVREHEELFTEVGWLQVLAGQGIVPDGHHPLADAISTADLGEFMDTIDKLNAREANQMQDHAAFVAQHCAAAPSLAA

SEQ ID NO: 82951 - protein, 494 aa, Sphingomonas sp.
  misc_feature (1)..(494): tr|A0A4Y8ZV02|A0A4Y8ZV02_9SPHN Tryptophan 7-halogenase OS=Sphingomonas sp. 17J27-24 OX=2555898 GN=E2493_02445 PE=4 SV=1
MRRVVIAGGGTAGWMTAAAIAKTMGRTVAVTLVESDAIGTIGVGESTIPPLQIYNRLLGIGEAEFMRETQATFKLGILFDHWKQVGHSYFHSFGMTGKDHWAAGFQHFWLYGREKGHAQSYDDYCLELIAALQGRFAHLPDNRMNYAYQLDSTLYARFLRTLAEKEGTRRIEGKIAQVELDGASGHIAALSLESGERIEGDLFVDCTGFRALLIEGALHAGHDDWTHWLPCDSAIAVQTESVRPAVPYTRAMAHDAGWQWRIPLQHRTGNGIVYCSRYLDRDAALERLLGNIEGQTLTQPNFLRFAAGARRRQWHRNCVAIGLSAGFMEPLESTSIHLIQRAVLRLLRLFPEGGISEADVAEFNEQQDADMLQIRDFLILHYKATDRRDSPFWRQCADMPVPDSLAHRIELFRETGRVFRKNEELFAENSWVQVMMGQGIMPRRHHPVAERLSDEELDQFLSGIRESVERTVASLPEHAAYIQHYCGAGRAQAA

SEQ ID NO: 82952 - protein, 490 aa, Sphingomonas sp.
  misc_feature (1)..(490): tr|A0A0Q4KNL4|A0A0Q4KNL4_9SPHN Tryptophan halogenase OS =Sphingomonas sp. Leaf34 OX=1736216 GN=ASF00_11495 PE=4 SV=1
MTACLIAHRWRARGMRVTLVESPEIGIVGVGEGSTPQLKHFFDTLGIAENAWMPACDATYKLGIGFEGWSDRAGYDRYFHPFPTALDGHTAPQFFYNTRALRTGRDVEAHPDRFLLPARLAAAHCAPQPAESFPFEVSYGYHFDAYKVGAFLAAHATGTLGVAHLQRRIASVERTPTGQITALIDTDGVRIAGDFFVDASGFRSTIFAALDVPFVSYADTLFNDRAVVMPTAHAPGAPIPSQTRATALSAGWAWHIPLTSRNGNGYVYSSRHLTEAQAEAELRAHVGAEAGEARHLKMRVGRVRDSWSHNALAVGLAQGFLEPLEATALHLVIATVEALLDGVDGGGATDAVRSAFNTRIAARYDGVRDYIVAHYRLNQRHDDPTGYWAQARGIEALSDELKMLMSAWFTGADMVAAIDRAGLARYYSAISWHCLFAGYGTFPEPARLIPPGADIDPVAMPRIDDFLTRCAMNFGLHASRLRPADLKDFA

SEQ ID NO: 82953 - protein, 508 aa, Sphingomonas pokkalii
  misc_feature (1)..(508): tr|A0A2U0SAZ3|A0A2U0SAZ3_9SPHN Tryptophan halogenase OS =Sphingomonas pokkalii OX=2175090 GN=DD559_03405 PE=4 S V=1
MQGRRRILIVGGGTAGWLTAAYLARYLEIAQQPAFEIRVLESPELGIIGVGEGAFPTLRATLAFLGIDERAFVRAASATFKQGIRFDDWRHAPLPDGTRHRFLHPFEAPLYAEGAGLVPYWLLQPEATRPPFAAAMTIQNRVIEGGRAPKRAEEDPFGGALPYAYHFDANRLAALLQARAIELGVGHIEGRLVGVEPDGMGGIARVLTREHGALAADLYVDCSGFEAALIGKALGSPFHSVRHVLFADRALACKIAAETPDGPIQPVTIAAAHAGGWTWDIGLQAARGIGCVYSSAHLRDDDAAAVLRAHIGHDRFSARTIPFEPGFRRVQWVANCVAVGLSAGFVEPLEATGLVFIETAAAMIAELFPHAGPIDAPAARFNARMAARYLRIVDFLKLHYCLSRREEPFWRDNADAASIPDSLAALLEQWRFRPPSRFDFVIDHESFAYFNYQYVLYGMGFHTDLSAGRAAFPNDAAAARRFARIRSFGAQAVADLPAHRDLIRQLGG

SEQ ID NO: 82954 - protein, 503 aa, Caulobacter sp.
  misc_feature (1)..(503): tr|A0A2R7L6A7|A0A2R7L6A7_9CAUL Tryptophan halogenase OS =Caulobacter sp. HMWF025 OX=2056860 GN=DBR10_17010 PE=4 SV=1
MSAQRIRDIVIVGGGTAGWMAAAALAKVMGTQAYTITLVESEAIGTVGVGEATIPMITMFNNVLGIDENEFVRETNATFKLGIEFAGWRREGHSYFHPFGQFGVDMDGVNFNHYWLRWMLSGGSNDYGRFNAETEAARQRRFGRTGHGPQTSLPNINYAFQFDASLYAAYLRRFSEKRGARRIEGQIVKVDRNGQTGLIERLTLKDGQTVQGQLFIDCSGFRGLLIEETLQAGYEDWSHWLPVNRAAAVPCAKVEEPIPYTRSTAREAGWQWRIPLQHRTGNGYVFCDSFISEDEATRLLMSRLDGEAQAEPRMLRFVTGRRRKSWVGNCIALGLASGFMEPLESTSIHLVQVGISKLLAMFPKGGFNPLITDRYNAEMEADYINIRDFLIAHYKVTEREDTPFWRYCKNMDIPDSLATRLEIFRTRGEAMVVQHELFKEQSWFAVLAGQGLMPVDYHPVADLLSEDELKLRLAKIRTGIQDRVSGLPTHQAFLDSCARAPAA

SEQ ID NO: 82955 - protein, 534 aa, Sphingomonas pokkalii
  misc_feature (1)..(534): tr|A0A2U0SF68|A0A2U0SF68_9SPHN Tryptophan halogenase OS =Sphingomonas pokkalii OX=2175090 GN=DD559_12275 PE=4 S V=1
MNEHSIRDVVIVGGGTAGWMAAAAFSRFLNNGYTRITLVESDEIGTVGVGEATIPPILRFNQMIGLDENEFLAATGGTFKLGIEFVDWGGLGERYFHPFGNYAQDLQGVHFHQLYLRERARRPIPDIAAWSMSAVAASLGKFGRPSASAQSPVRELFYAFHFDAGLYAQLLRRLSESRGIVRVEGKITDVTLRPEDGYVQSVTLADGRTIAGDLFIDCSGFRGLLIEEALETGYEDWRHWLPCDRAVAAPCANVREPDPFTRSTAHAAGWQWRIPLQHRMGNGLVYCSDYLDDDTAEQQLLAALEGPLLADPRRIRFTPGRRRESWSRNVVALGLSSGFLEPLESTSIHLIQSGIARLIALFPDKRFDPIERFEYNRQMRDLYEDIRDFIILHYKATTRTDSPFWNRVRTMEIPESLAHKIALFEHKGRLFREGNELFTTTSWVAVCLGQHIVPREHEPAADALDEKLVAQALEQMRLGYWDTAQKMPSHAEFLARIAPQPVSQTPPSPPQAADALPVFSFAQDAPFAPPGSPV

SEQ ID NO: 82956 - protein, 505 aa, Robiginitomaculum sp.
  misc_feature (1)..(505): tr|A0A2G2LGZ2|A0A2G2LGZ2_9RHOB Tryptophan halogenase OS =Robiginitomaculum sp. OX=2030823 GN=COA85_12160 PE=4 S V=1
MQNRRNLRRIAIVGGGSAGWMTAAALANNLHGNCAVELIESDQIGVVGVGEATIPPIKHFNQALGIDEREFLTHTNGSFKLGIQFVDWAHKGKSYFHPFGQYGADFDSIPLQHYWLREHQKGKAPSLDEFSLAWVAANMGRFDIPMTDKRRVQSTYDYAYHFDAILYGKHLRKYAQERGVIRSEGKVVDVNLDADSGFIDHLVLEDGRLIEADFFIDCTGFRGLLIEQALKTGFEDWSHWLPCNRAMAVASENTGPLLPYTRSTAQSAGWQWRIPLQHRTGNGYVYCSDYLSDDEAATQLLDQLDGKPIGDPRPIRFTTGRRKKFWHKNCLALGLAAGFMEPLESTAIHLVQTGITRMLALFPDRDFNPLAIEEYNRITANEYEWIRDFIILHYHANTRDEPLWRASANMSIPDALRYKIDHFRTYGRHVSEGAELFANPSWLAVFIGQNIMPEKYAPLVDERTHIDAPRLMAGLHRVIGEAAGAMPSHNDFIAQNCPAPRTGGQ

SEQ ID NO: 82957 - protein, 533 aa, Streptomyces sp.
  misc_feature (1)..(533): tr|A0A4R7HI14|A0A4R7HI14_9ACTN Tryptophan halogenase OS =Streptomyces sp. BK141 OX=2512171 GN=EV588_102560 PE=4 SV=1
MTDNDSRIRKVVILGGGTAGWMTAAYLGKALQGTVDIQVLEAPAIPRIGVGEATVPNLHRVLFDYLGIPEEEWMRECNASFKMAVRFVNWRTPGRGEPGARTLEDGRPDHFYHPFGILPDHDNTPLSHYWFKNKYEGSTDQPFDYAVFREPPVMDAKLSPKWLDGTPSTRYAWHFDAALVADFLRRFAVEKQGVEHVQDEMVRAEQDERGHVTALHCKSGRVMDADLFVDCSGFRGLLINQALGEPFLDMSDHLMCDRAVATAVPHDDEANGVEPYTSAIAMSSGWSWKIPMPGRFGSGYVYSSKFTTQEEATAEFCEMWGLDPNETKFNHVRFRVGRNRRAWVNNVVSIGLASCFLEPLESTGIYFITAAIYQLAKHFPDRSFNPALVDSFNNEIEEMFDDTRDFIQAHFYYAPRNDSPFWRAQKELVLPENIQKKIEAYKAGLPINSPIADESTYYGNFEAEFRNFWTNGSYYCIFAGLGLEPDTPLPALAHKPESVAGAQSLFEQVRQQQEHLLQTLPSAHDYLRRLHGK

SEQ ID NO: 82958 - protein, 543 aa, Idiomarina taiwanensis
  misc_feature (1)..(543): tr|A0A432ZK74|A0A432ZK74_9GAMM Tryptophan 7-halogenase OS=Idiomarina taiwanensis OX=337250 GN=CWI83_04125 PE=4 SV=1
MQKKKVLIVGGGSAGWMAAAYLNGALNQRGERPRVDIQLLESPDTPRISVGEATIPSMRHLLSVVGVDELDFMKSTNASFKQSIRYTNWVHNDMSFYHHPFSSMRRQPLDRAGMDWLMSDQSIPFMETCSVQPILCEWGLAPVMLGKWDMGAPLNYAYHMNAQKFADYLRDFSTPRGVVHTLANMVDVVMRDDGHIAAVRTDKGETIEADLFVDSTGFSAQLIEQQIGVGFEDCSQYLLCDRAVTMHLPYETHFPGMVRPYTTATALSNGWIWDIPQNDRRSIGYVHSSAFIDKEAAEREMRAYQGGNTDDLPARFVDFKVGRRKQIWSKNVIAIGLAGGFIEPLESTGLYLSDLGAVLLAEHFPWHDDGMEQLASRYNHIMSNRFYEILDFINMHYCLTKRTDTEFWKTVQLREHITDRLQAKFDFWRFKPPTPHDFQDQWFSGMSQAPQAADLCSHDRRPAVDTGGLWNHESYECILFGMEFLKEESEQWFGPNRPATQVHPAIIQRLQMARQKLPPHHIWLNRVLGMPQYPMAYKPVGWG

SEQ ID NO: 82959 - protein, 518 aa, Caulobacter sp.
  misc_feature (1)..(518): tr|A0A2R7LBQ7|A0A2R7LBQ7_9CAUL Tryptophan halogenase OS =Caulobacter sp. HMWF025 OX=2056860 GN=DBR10_12140 PE=4 SV=1
MERRRSILIVGGGTAGWLTAAYLARSLRIAEQGHLEITLLESPEVGVIGVGEATFPTIRNTLQFLGIDEGRFIRETTATFKQGIRFDDWAWAPEDGRRHQYFHPFEAPFSTDGSSLAPYWLLQDERTRAPFAEAMTIQARVAAAQRAPKRPHEDDFAGPLNYAYHFDAIKLSQVLAERARELGVRHLQGHVTGVEVDGTGDIAGVSAGGHCRLEADLYIDCTGFRAELIGQTLKSPFSSVQDVLFADRALACKIPYDRPDAPLQSFTVATAHEAGWLWDIGLSGARGVGCVYSSRHMSDDRARAVLQAYVGKDLELSIRSMAFSAGYRPKAWVGNCVAVGLSAGFLEPLESTGVVLIEAAVAIIAELFPHSGPVNAPAQRFNSLMSARYDNIVTFLKLHYCLSQRPEPFWRDNADPASIPVRLVELLEQWRHRPPSRYDFILDLETFAFFNYQYILYGMGFRTDLSPGRNAYPDAPAADRLFARIQAYSDRALADLPGHRDLIAQIHQAGRDLSPGTA

SEQ ID NO: 82960 - protein, 509 aa, Xanthomonas oryzae
  misc_feature (1)..(509): tr|A0A411Y8U4|A0A411Y8U4_XANOO Tryptophan 7-halogenase OS=Xanthomonas oryzae pv. oryzae OX=64187 GN=EBA04_2195 0 PE=4 SV=1
MIPAPLRNIVIVGGGTAGWMAASAFARVLGPTFNVQLIESEQLGIVGVGEATVPHIKAFNNLLGIDEAEFVRQTQGSFKLGIEFVDWQRPGTAYMHGFGTQIGHPLGLLPFHQYWIKQRARGKAQPLGAYTLNTVAAARGKFMTSAGDVPANSPLANIAYAYHFDATQYAHFLHRYSQQRGVTRIEGLVEQVQLHPESGHVQSLQLASGQTVHGDVFIDCSGFRGLLIEKALHTGYHDFTHWLPCDRALAVPCEKVGPPTPYTRSTARAAGWQWRIPLQHRTGNGYVYCSAHISDDEAAATLLANLDGKPLADPRPLRFTTGRRKQFWNRNVVALGLASGFLEPLESTSIHLIQSGISKLLELFPREGISPVLVQRYNDRSAFEFDRIRDFLLLHYHATEREDSAFWRHCRSMPITPELQTTLDLFRDSGRFYRNAEEMFAEISWVQVMVGQGILPQGYHPLVDQVPDRDAEGFLASVAQTIAHCADVMPPHQQFIDRYCKAAALPCGG

SEQ ID NO: 82961 - protein, 498 aa, Sphingopyxis sp.
  misc_feature (1)..(498): tr|A0A1G3K4K6|A0A1G3K4K6_9SPHN Tryptophan halogenase OS =Sphingopyxis sp. RIFCSPHIGHO2_01_FULL_65_24 OX=1802171 GN=A2885_20975 PE=4 SV=1
MRLMIIGGGTAGWMAAACLRRFLPRDWSVQLLESDEIGTVGVGEATIPQIRLFNDALGIDEDEFLAATQGTIKLGIEFRDWTRRGHRYMHAFGAVGRGLGLVDFHHYWLRARTAGLAESLDHYSLNERAARARRMQRGAPRTSRYLLEMPYAYHFDAALYAAFLRRRAEAGGVERIEGRIGEVRLDPQRGDVAGVTLDDGRRFDGDFFIDCSGFRGLLIEGALASGYEDWSRWLLNDRAVAVPCAHGTVPQLPWTGATARDAGWQWRIPLQHRIGNGYVYCSAHIGDDAALDTLLANLDGAAQAEPNQLRFVSGKRRRMWNRNVVALGLASGFMEPLESTSIHLVQAGISRLVKMLPSGASDPAVAAEFNRQSDFEWERIRDFIILHFKATERRDTPYWRDRAEMDIPDTLAAKIDLFRAQGLIFREHEELFTESGWLQVLVGQAVEPRRWHPLADSLEPAELAQFMAGISLTIEREVAQMENYDAFLAAARPAGVAA

SEQ ID NO: 82962 - protein, 500 aa, Sphingopyxis sp.
  misc_feature (1)..(500): tr|A0A1G3KGI3|A0A1G3KGI3_9SPHN Tryptophan halogenase OS =Sphingopyxis sp. RIFCSPHIGHO2_01_FULL_65_24 OX=1802171 GN=A2885_15560 PE=4 SV=1
MEATRIQSIVIVGGGTAGWMTAAALARILGPDYASITLVESDEIGTVGVGEATIPQINIFNRMLGIDEDDFVRRTKGSFKLGIEFVDWGGIGQRYFHPFGNIGVDMGGVSFHAFWQRLRGEAEFADVEDYSVMAKAARHGKFMRPTTAPGSLLSSIAYAFHFDAGLYALYLRELAEGSGVTRIEGKITSVTRNGENGHIENVTMQDGRTVGGQLFIDCSGFAGLLIGRELEVPYIDWSAFLPCNRAVAVPCELGEDFSPYTRSTARSAGWQWRIPLQHRVGNGHVYCSDYIGDDEAAAVLLANLGGKPLADPRFLKFTTGHRARFWEKNCVSIGLSAGFMEPLESTSIWMIQTGIARLLSNFPDAGFEAASIDRYNRLMVEESELVRDFLVLHYHVTTRDDSDFWNYCRTMPIPDRLAEKIRVFQSSGRAFREHEELFNDTSWFAVMEGQRLGARRYDPVAELMPIEQTRDRLRQIKAAVTASVDHMPRHRDYIRDHCAA

SEQ ID NO: 82963 - protein, 512 aa, Sphingopyxis sp.
  misc_feature (1)..(512): tr|A0A1G3KBY1|A0A1G3KBY1_9SPHN Tryptophan halogenase OS =Sphingopyxis sp. RIFCSPHIGHO2_01_FULL_65_24 OX=1802171 GN=A2885_07955 PE=4 SV=1
MAKRSILIVGGGTAGWLTAAYLARFFDLARNPRLSVTLLASDEIGSIGVGEGAFPTIRNTLQYIGIDESEFVRRASATFKQGIRFDDWVRTPREGQSSHFLHPFEAPYHGDGHSLVSYWLLQDEATRRPFAEAMTIQNRVAEAQRAPKRPGEEAFGGPLNYAYHFDATRLAEVLSNQARALGVDHLPGTLTGVGLHPESGTIDHVVTAEHGVLTADLYIDCSGFRAELIGALGAPFRSVKHQLFTDRALACKIPYDAPDAPLESYTIAAAHEGGWTWDIGLAGARGVGCVYSSDHLSDDRAADILSGYTGGRSQDVGVRSIPFAAGYRPTPWVKNCVAVGLSGGFLEPLESTGLVTIETAAAMIAEMFPLGGPVAAPARRFNELMTARYENIVNFLKLHYCLSRRDEPFWRDNADPASIPDRLKELLDEWRYRPPGRFDFILDLESFAFFNYQYILYGMEYRTDLTPVREEFPDVAEAERIFARIRSFGAQAAHELPSHRALVDQINAASYA

SEQ ID NO: 82964 - protein, 524 aa, Sphingomonas sp.
  misc_feature (1)..(524): tr|A0A0Q4KNF0|A0A0Q4KNF0_9SPHN Tryptophan halogenase OS =Sphingomonas sp. Leaf34 OX=1736216 GN=ASF00_08810 PE=4 SV=1
MPDADNSPGAVQTVVVVGGGSAGWLAACRLAARSVQTGSRLTVRLVESTNVPSVGVGEGTWPTMRNTLRKIGIDETTFIRSCDAALKQGARFVGWTDGSADDAYYHPLNPPAGAGDIDLAPYWLGRPIAGASADAASFADWVDYQAALCDAGLAPKTITAPEYGGHANYAYHLDAGKFATLLRDHAVNSLGVEHVLGDVVRANQADNGDISDVELADGRRLAGDLFVDCSGFAALLIGGVYDVPFRSCRDILFADRALAMQIPYQTEHDPIACHTISTAQDAGWIWDIGLWTRRGVGHVYSSAHTSDDEAEAALRRYAGPAAEQLPVRRITFEGGHRERFWQNNCVAIGLSAGFIEPLEASALMLIETSLDALVDRLPQTRSTMDAVARQFNATFQHHWQRIIEFLKLHYVITQRRDTAFWRDNVAAASIPDGLQERLDLWTHHSPAPQDFAHAREVFSWPSYQYVLHGMRFGGSYRGQPATAEGSSAAALVARNARVRAELVSKMPRHRDLLRAVREHGLQRV

SEQ ID NO: 82965 - protein, 504 aa, Sphingomonas sp.
  misc_feature (1)..(504): tr|A0A0Q4KWK3|A0A0Q4KWK3_9SPHN Tryptophan halogenase OS =Sphingomonas sp. Leaf34 OX=1736216 GN=ASF00_01125 PE=4 SV=1
MTDRALRSIAIIGGGTAGWMAAAALAHVLGTRNVAITLIESEEIGTVGVGEATIPPIQAFNALLGIDEDAFVAATMGSFKLGIEFVDWLRPGARYFHPFGVYGTDVGAVPFEGLWHRLRAVGDAASLDAYSICAAAAQDGRFMRPLTDGGNTPLHRIGYAYHFDASLYARFLRRHAEATGVVRREGRVVDVAVRGADGFVETVTLASGERIAADLFVDCSGFRALLLGETLGTGYEDWSRWLPNDRAVAVPSAPVGPPTPYTRSTARAAGWQWRIPLQHRTGNGYVFASGHLSEDEAIATLLASLDGEPLAEPRALRFRTGRRDAFWVKNCVGLGLSSGFLEPLESTSIHLIQAGIARLLEMLPTRDFEAADIRRYNRLMIAEYDSIRDFIILHFHATQRDDTPYWDHVRTMAVPETLAERIRIYQATGRVFREADDLFTKTSWLAVMDGQGLCANGFDPLAASLSADEARTRLARMAAVTAAAATRMPPHEQFIARHCARSIA

SEQ ID NO: 82966 - protein, 505 aa, Xanthomonas oryzae
  misc_feature (1)..(505): tr|A0A0U4VJN3|A0A0U4VJN3_XANOO Tryptophan halogenase OS =Xanthomonas oryzae pv. oryzae OX=64187 GN=BCR61_18410 PE=4 SV=1
MTQAQIRKVVIAGGGTAGWITACALSHQFRGLLDITLVESEQIGTVGVGESTVPPIRTFHRFLQIDEQEFLRAVAGTFKLSISFEHWRAQGERYIHPFGITGQSTLVCAFHHLWLESQRRGMPGSFGDYCLETVASRVDRFALYGEPAVNYAYHLDAALYAKFLRARSEACGVKRIEGKIQQVTVQPHSGDVASVVLEDGHVIEGDLFIDCSGFRGLLIEQTLHTGYEDWSHWLPCDRAVAVQTEAVGPPVPYTRAIAHEAGWRWHIPLQHRVGNGLVFSSKHLSDDQAHAKLLHDVAAPAVKDPWMVPFRTGRRRKAWNKNVVSLGLASGFIEPLESTSIHLTISAVVRLLALFPGEGIAPSQVQLFNDVSRAEMEHVRDFVILHYHATQRNEPLWQQCRAMELPESLALRLRAWRERAHAWQGADELFRVDSWTHVLMGQGIEPEQHHPLTRAFSDHDLRRLLDGIAQPIQHAVQQMPSQHAFIERYCKAGAQVWGMRSPVPA

SEQ ID NO: 82967 - protein, 502 aa, Sphingomonas sp.
  misc_feature (1)..(502): tr|A0A0Q4KU87|A0A0Q4KU87_9SPHN Tryptophan halogenase OS =Sphingomonas sp. Leaf34 OX=1736216 GN=ASF00_08010 PE=4 SV=1
MKRVQRLVILGGGTAGWMTAAAMSATFGDLVNISILESDAIGTIGVGEATIPTIHWFNQLIGLDEEAFVAATKASFKLGIEFVDWARPGTRYFHPFGRYGVDLGPVPFHQHWLRGKGDGLDRPLSVYSLAAQLAAAGRFAKPVDDPRSILSTLGYAYHFDAGLYARHLRQLAEKRGVVRHEGLLRDIERHPKTGFVTALTSDRGERLEGDLFIDCSGFRALLIGETMGARFEDWSHWLPCDRAVAVPCARIAATTPFTRSTLRPAGWQWRIPLQHRTGNGYVYASSFVSDDEAVATLLSNLDGEALAVPRMLRFTAGFRREAWRGNVVAIGLSSGFLEPLESTSIHLIQSGIAKLITLFPDADCDPVLARQFNTLFARDMDGIRDFLILHYHATQGHDAPLWQHTRHMTPPPTLVDKIAQYTRAGRLMLSADELFREASWLAVLEGQGVGALGHAPLADTLDAATNRRQLNQIETVIARATPTLPLHDAAIAALVAPQVAGR

SEQ ID NO: 82968 - protein, 514 aa, Sphingomonas sp.
  misc_feature (1)..(514): tr|A0A4Y8ZVC6|A0A4Y8ZVC6_9SPHN Tryptophan 7-halogenase OS=Sphingomonas sp. 17J27-24 OX=2555898 GN=E2493_02460 PE=4 SV=1
MAIVGGGTAGWLAAGLIAARGNEVAAAPLEVTLIESPDVPTIGVGEGTWPTMRRTLQRIGIGEAEFLLACDAAFKQGSRFDGWVTGEPGDHYFHPFTAPVDGEPRDLVQAWSGRGGRAFAEAVSPQPRACALDLAPRQRAMPDYAGALNYAYHLDAGKLAELLRGHATQRLGVRHVRDHVVAVEAAPNGDIAAVRTRSSGDVAADLFLDCSGHAALLIGEHYGVPFVDRSRELFNDRALAVQVPVDNGSPIASQTNATAHSAGWIWDIGLPTRRGIGCVYSSLHADDEAAAATLEAYLRKAVPAVGVDRAAFRRLAFASGHRERFWERNCLAIGLSAGFLEPLEASAIVLIELSLDALLANFPRTRAAMALQAKRFDALFRYRWDRIVEFLKLHYVLSRRDEPYWRAHRDAASIPPRLAELLQVWRHQPPSRFDLPMVDEVFPAASYRYVLYGMGFPVPAEPAAASVSCAAVDAALRQVEQRGRALAASLPAHRAYLDALRDQGASRPSIATIC

SEQ ID NO: 82969 - protein, 500 aa, Caulobacter sp.
  misc_feature (1)..(500): tr|A0A2R7LAP6|A0A2R7LAP6_9CAUL Tryptophan halogenase OS =Caulobacter sp. HMWF025 OX=2056860 GN=DBR10_13460 PE=4 SV=1
MTLNPIRKVLIVGGGTAGWMTAAALGKVLKSVQVTLVESDAIATVGVGEATIPPITTFNQLLGIDEAAFMKATQASFKLAIEFVDWTRPGSRYLHPFGSFGLDIEAIKFHQLWLKAQSLGSTQPLDDFNLSATAAKLGRFMLPSKDPGQVLSSLKYAFHFDAGLYARFLRSFAEARGVQRLEGRVVDVGLRGEDGFIRSVTLDDGRELEADLFIDCSGFRGLLIHQALDTPYEDWSHWLPNDRAVAMPCETAGDGLTPYTRATADTAGWRWRIPLQHRTGNGYVYASAHLSDDAAVARLRATLDGPPRGEPNFIRFQAGRRREMWVKNCVAIGLASGFLEPLESTSIHMIQSGITKLLALFPDRGFDPVETAEYNRLTILQTELIRDFIILHFKANERDEPYWQQAREMAIPESLQRKIDLFAARGRLFQSDYDLFAEPSWVAVMLGQNIRPRGYDPLVDSLDAQLVQDQMQRLAALVRQTAEALPSHQAFIARYCAASA

SEQ ID NO: 82970 - protein, 499 aa, Acinetobacter haemolyticus
  misc_feature (1)..(499): tr|A0A380UUL6|A0A380UUL6_ACIHA Geranylgeranyl reductase family OS=Acinetobacter haemolyticus OX=29430 GN=NCTC1 0306_03318 PE=4 SV=1
MLNLRGMKRVCVIGGGTAGWFAALHMRQLFSPAVEIILVSSSEIPIVGVGEGGTLTLMQSLVELGIPFYEFLEETSAVHKLGFAYEGWRDSNKNKKDIYYHMFPLMRNDIFFKENDYYPAFSALLNHDIPISYAVDSIELRENNVSQQELTKMLISKSKENFASSFHFDTYKVGQYLKKIAIQRGVIHREGMFREVVQDAETGLVTAIQVDDIIIDVDFLIDATGFSKQIIGNKLKGAWQSFKEYLPQNTAIPFHLKHRRKNPDLVTLSTAMNAGWVWQIPLQERIGAGYVFNRDFITPDQAVEEIEQWLGYEIEPIKTISFEAGCYEEVWKGNVLAIGLASGFIEPLEATSIGQMLSQLDFFVRIVKASHGIISQQSIKLFNKENVQCWYGIRDFIRMHYDSGRVDTEFWRVTQQLPLSDHYQALKECWKHRTPRNLDFYDYEMDGYSPFNIYSWLAIGQALGVVKAEASVAELYALAPEKKQKVAQYLSIIKQRYMI

SEQ ID NO: 82971 - protein, 286 aa, Flavobacteriaceae bacterium
  misc_feature (1)..(286): tr|A0A2D7VPF7|A0A2D7VPF7_9FLAO Tryptophan halogenase (F ragment) OS=Flavobacteriaceae bacterium OX=1871037 GN=C MC15_00120 PE=4 SV=1
MNNSQNQCGLHRVVIVGGGTAGWLAAGVFGAKLSTKHSVTLVESPTVSSIGVGEGSWPSLRDTLLDIGISESEFLTLCQGAFKQGSSFVNWRKNAHSYYHPFTVPAAYNELDIHACWKALAPNTPYQDAFSLQAAMCVAGKAPKQIATPDYAHVLNYGYHFDATKLADLLKQHCVDKLNVDYVSGHIGSIKSSSDGYIEKLITECGKEIVGDLFIDCSGSSGLLIDKHFNVPWIPVKRTMLNDRAVALQVPYSDTDTEIKSTTVATAQTCGWTWDIALQHRRGVGL

SEQ ID NO: 82972 - protein, 525 aa, Robiginitomaculum sp.
  misc_feature (1)..(525): tr|A0A2G2GKH6|A0A2G2GKH6_9RHOB Uncharacterized protein OS=Robiginitomaculum sp. OX=2030823 GN=COA47_05045 PE=4 SV=1
MAARMGARRAARSGRMSKTQYCIIGGGTAGWLSALILQEAARRSALDIDITVIESSTIPTIGVGEGTTAVFRGLLLQLGFDEFEFLRETGATIKYGIKHQDWRRLGHSYFGPIDDPLKMVGTPPGVTSSWLNQYCVGAGRAVSEPHLFSQLMRRNRAPFAIRANKTRLPVGPFHHAYHFDQAKVGAYFKQKAKGIGLIDALVVGAETDPDSGDIVSLKLDGAQDIAVDFIIDCTGFKRALIGDVMGARWVSFDDKLPVNRAIPFWLEHPETGEIPTYTLARAMKAGWMWQIPTQDRLGCGYVYSDKFLSPKQAQAEVEAVLGHSIIPRADIPIDAGRLDRAWIGNCLSTGLAQSFFEPLEATSIHGTIVQMMMFTQFHMRAKGADRATHQATYNNNVARQADDFCTFINMHYVSERDDTDFWRYVRTNCISKEVRQLLKVWSDHLPRNDDFAPFPGGLAHVEDQLYYPVLDGLGLLDRALAKQEIGQNPKLRIHARKTTEKLVKEYKRVAAMACGHRSFLESLRE

SEQ ID NO: 82973 - protein, 502 aa, Flavobacteriaceae bacterium
  misc_feature (1)..(502): tr|A0A2E5ZQF9|A0A2E5ZQF9_9FLAO Uncharacterized protein OS=Flavobacteriaceae bacterium OX=1871037 GN=CMC89_0302 5 PE=4 SV=1
MKRIKNITIVGGGSAAWLAATYIQNNFWDLPVTVIDKEVGNPIGVGEATVLTFPHFLRQCGIDLTQWFQRVDATYKAGIDFPHWKNPKGRVWHPFYLNRSYFDLKCTQYDIWAQKQELDYCKHALPCYETVMDNQVDMMNSFETLAYHIDAGKLVTELQNICKDTVKTIKSDVINVNRDQNGFITSLDLKNGATHVSDFYLDCTGFISLLKGQKKKELLDTGRLFTNSAVAGHVPYEDFEKECTPYVKCPAVDHGWIWKIPVQSRIGSGLVFNRDITDPDTAMQYFSDHWNGRIKPEDLKLIDWTPYYSENFWEKNVVSLGLSGGFIEPLESTGLASMTYGVQELAKQIPQYVYNEEAIASYNMSMMNWYSDAVDFVGSHYADTEWNTPFWDYVKFMHVKSDKHLWYEEWLRDPQRSFYSDVSSNTLFHPQNWQLWLIQMGYPVSKDMNRHNPMQLDFAMTEFLRAEEVRKRTSISHINAIESTNMGMDWYKASQGQREGFL

SEQ ID NO: 82974 - protein, 515 aa, Caulobacter sp.
  misc_feature (1)..(515): tr|A0A2R7LFH5|A0A2R7LFH5_9CAUL Tryptophan halogenase OS =Caulobacter sp. HMWF025 OX=2056860 GN=DBR10_09635 PE=4 SV=1
MADHDRQSPRSSPVIDPKTDNLPGSIVILGGGTAGWMAAALLARALGRRCAITLVESAEIGTVGVGEATIPPIRGFNQTLGLNEAEFVRETKGTYKLGIEFHGWTRPGEAYFHPFGVYGTAPDPGYFHHYWLKLSGLGKAGPLEDYSLCAQAARRGRFGQQSADPRSPLSTFGSAFHFDAGLYARYLRTYAERLGVIRIEGKVARVAQRGEDGFIEALHLEGDRRVDGDFFIDCSGFRGLLIEETLKTGYEDWSHWLPCDRAMAMPCTREGAPPPFTRSTAQAAGWIWNIPLQHRDGNGYVYSSQFIDDDAAEATLRASLGGTPLAEPNRLRFVTGRRKKAWNKNVLSLGLASGFIEPLESTSIHMIQAGLLKFLSAFPGKTWDPVQTDDYNDRIQLDFERIRDFIVLHYHANQRDEPLWQARREMVLPETLTRRLALFRACGRLTQHPEEMFTATSWQAVLDGQGIRPRSYDPLVDLHDIDRVAVEFEQIRRELRQTAEAMPPHAAALPRPVMA

SEQ ID NO: 82975 - protein, 497 aa, Sphingomonas pokkalii
  misc_feature (1)..(497): tr|A0A2U0S9C7|A0A2U0S9C7_9SPHN Tryptophan halogenase OS =Sphingomonas pokkalii OX=2175090 GN=DD559_00070 PE=4 S V=1
MAEQKQFRVVIAGGGTAGWVAAAALVRHLGASLDITLVESDAIGTVGVGESTIPTARSFHALLGIREPVFMRETNASFKLGISFENWLREGVRYFHPFGTVGRSLPLADFQHFWLEAKTRGFGGEYGDYSLETQAALANRFATADPAPLGYAYHLDATAYAVFLRGLAEPAGVRRVEGQITAVERDGESGNIAALLLENGERLAGDLFIDCTGFRALLIEGALETGYDDWRHWLPTDRAFAVQSETTEPPVPYTRAIAHGAGWRWRIPLQHRMGNGFVFASDYLDDDAAREQLLAAVPGRALFDPRLIRFTTGMRKKSWNHNCVALGLASGFIEPLESTSIHLVMIAVTRLLQNFPRRHDMAAAAQRFNAQARAEAEHIRDFIILHYKRNDRPEPFWRDHAARAVPDSLAARIALFEEGANAYQSGDDLFRVDSWNAVMLGQGVVPRAHHPMPGEIPSADLERALGDLRAGIAAQLAKLPTHEAFLQRYCGRESIAA

SEQ ID NO: 82976 - protein, 479 aa, Sphingomonas sp.
  misc_feature (1)..(479): tr|A0A0Q4LG04|A0A0Q4LG04_9SPHN Tryptophan halogenase OS =Sphingomonas sp. Leaf34 OX=1736216 GN=ASF00_04315 PE=4 SV=1
MTAAALAAVAGPTVADVHLVESEEIGIVGVGEATLPHIRAFNTRLGIDEAEFMRATGATFKLGIEFCDWARIGDSYIHPFGAFGHDVDGVGFHHYLSRAGQIATLPDYSLPVVAARHAKFAPPLDDPRSLLSTFGYAYQFDATRYAPFLRARAERQGVTRTEGRVVDVERSSTGDVVAVVLGDGRRMTGDLFVDCSGFRSLLLGQAMGEPFEDWSHWLPCDRAVAVPCADAGTLKPYTTATAMPAGWRWRIPLQHRVGNGYVYSSAHIDDGAAQDALLRSIESTSLADPRMLRFKAGRRARSWVGNVVGVGLAGGFLEPLESTSIYLIQLAITQLLELFPATPISPVDRDTFNRVVDLEYDRIRDFLILHYHATTRDDSPFWDHVRTMAVPDTLAEKLALFRKRGRVMTYREGVFLEPSWIAVYLGQGVVPAGYDQRADQPSDAALAQALARLRTETRDAVMTMPDHAAYIAQSGAAAA

SEQ ID NO: 82977 - protein, 171 aa, Armatimonadetes bacterium
  misc_feature (1)..(171): tr|A0A254QD17|A0A254QD17_9BACT Tryptophan halogenase (F ragment) OS=Armatimonadetes bacterium Cent15-Ar3 OX=198 7502 GN=CBB60_009515 PE=4 SV=1
MRDVIFIGGGPAGSTGSTLLKKYAPGMDVLVLEREKFPREHVGESQLPPISIVLDEMGCWDKVEAANFPIKIGATYRWGNTNDLWDFQFLPIERVEDEPRPAKYEGWRKLTAFQVERSVYDKILLDHSREMGVEVREETKVVEILKEGDRITGLKLEDGTIETARYYVDAT

SEQ ID NO: 82978 - protein, 517 aa, Robiginitomaculum sp.
  misc_feature (1)..(517): tr|A0A2G2HR78|A0A2G2HR78_9RHOB Tryptophan halogenase OS =Robiginitomaculum sp. OX=2030823 GN=COA60_08840 PE=4 S V=1
MSKTIDSILIVGGGTAGWMAAAYLARHLGSDLPNGVKITLVESSDIPVIGVGEGTFPSIRTTLGLIGIDEAEFIRKADATFKQGIKFVNWKTNPNTPEHFYYNLFENPHRIQNHEELAPYWAFRHAQTNPSFSDSVSFQHGICEEKKAPKQKGDKNFFAPMNYAYHLDAGKLAELLKEHSLRLGITHLIGTVDKVNVKENGEIASVKLEDGKELEADMFIDCTGFAAVLIDKTMGSKLKPVDDVLFVDRALVAQVPYEDEMCPIASSTLSTAQEAGWLWDIGLRHRRGTGHVYSSRHSTDEQAERVLEEYLGKSAKNASPRLLKMKTGYRETHWIKNCVSVGLSGGFLEPLEATGIVLIEAAIRMIGDYFPRYGDFEVSAKHFNRAMRERYEDAVSFVKMHYYLSERDDSAFWIDNRNDDSVPDYLLEKLELWKYRLPQVSDFHSNNRLFSHEIYQYILLGMGFKPDIIRNQSAFPFVRQADAEFNNVQLAKENAVKMMPNHRDLIEAAQDESFKFG

SEQ ID NO: 82979 - protein, 512 aa, Sphingomonas sp.
  misc_feature (1)..(512): tr|A0A0Q8XA67|A0A0Q8XA67_9SPHN Tryptophan halogenase OS =Sphingomonas sp. Root241 OX=1736501 GN=ASE13_16215 PE= 4 SV=1
MTDTVRGPVPIKIVTIVGGGTAGWMTAAMLSHLFRGYEIRLIESDEIGIIGVGEATIPAIRDYMLMAGIDQVEMVRATQATFKLGIDFVDWRTGDDRYFHGFGRIGQDFMWLHPHQLWLKLKASGKPVGHFDDYALNCRAGMANKFCFPDPRNPTSPISGIDYAYHFDASLLAKFLRVRAEGKGVTRIEGRIVDVKLDGESGYVEHVVLANGRTVDGDLFVDCSGMRGLLIGQALGVGYEDWSQWLLNDRALAVPCESVSPLTPYTRVTARAHGWQWRIPLQHRIGNGHVFASSQISDDEAASVLLANLDGKPLADPRPVGFRPGKRHKAWEKNVVAIGLSSGFLEPLESTSIHLIQTGITKLMALFPHQGFAVPDVAEYNRQHDFEFTDVRDFIVAHYKVTDREDTEYWRYLKHMAVPDSLTERLELFASSGRFFRRAAQELFREESWVQVLLGQGLKVAYDPMVEMIPQATVAEFMHDVQEVVADVANAMPDHAAFIDRHCKAPPLTVAG

SEQ ID NO: 82980 - protein, 484 aa, Sphingopyxis sp.
  misc_feature (1)..(484): tr|A0A0W1DTL7|A0A0W1DTL7_9SPHN Tryptophan halogenase OS =Sphingopyxis sp. H050 OX=1759072 GN=ATE67_07390 PE=4 S V=1
MTAAALAKLLPGQADIHLVESEEIGIVGVGEATLPHLREFIRRLGLDEMDFMRKTRATFKLGIDFVDFGAIGERYIHPFGAYGTDIAGVGFHHYWLRMKAAGRVPPICDFSLPIVASRARRFAPIPAGGDFLDSSYSYAYQFDATRMAPMLRAFAEAHGVRRSEGKVVGVDRDGTSGDIAALRTDRDETIAGDLFVDCSGFRALLIGEALGSPWEDWSQWLPCDRAAALPCTAPDGPIEPYTRATAMPAGWRWRIPLQHRVGNGYVYSSAHLSDDEACGAILGAIEGEPLADPRVLRFRAGRRTKSWDRNVVAIGLASGFLEPLESTSIHLVQQAVTRLVELFPQRRIDASDRDTFNALVDREYDRIRDFLILHYHATRRDDSDFWNHVRTMAVPETLQRKMDLWRTSGRVELYTQGLFLEASWVAVYLGQGVVPISYDQRADTPAPDRLAKSLTELDQAIRQRVAAWPDHGDYLRQAGAWEAA

SEQ ID NO: 82981 - protein, 110 aa, Burkholderia sp.
  misc_feature (1)..(110): tr|U2G9L7|U2G9L7_9BURK Tryptophan halogenase PrnA OS=Bu rkholderia sp. AU4i OX=1335308 GN=L810_5673 PE=4 SV=1
MGDTCQVCQVNPAITDAVTQVNVKVVAEAPAMAMGSLYQAQSHSLSILFENAVQQQSQAAIQSQTSTNVGTMQLYTIGPESAGAAATEIGANGIISILADVIAIGKAMRP

SEQ ID NO: 82982 - protein, 509 aa, Xanthomonas floridensis
  misc_feature (1)..(509): tr|A0A1A9M8Y0|A0A1A9M8Y0_9XANT Tryptophan halogenase OS =Xanthomonas floridensis OX=1843580 GN=A7D17_21330 PE=4 SV=1
MIPAPLRNIVIVGGGTAGWMAAAAFARVLGPTFNVQLIESEQLGTVGVGEATVPHIKAFNNLLGIDEAEFVRQTQGSFKLGIEFVDWQRPGTAYIHGFGTQIGHPLGLLPFHQYWIKQHARGTAQPLGAYTLNTVAAARGKFMTSAGDVPANSPLANIAYAYHFDASQYARFLRGYAEQRGVVRLEGMVAQVQLHPESGHVQSLQLESGQRIAGDLFIDCSGFRGLLIEDALHTGYHDFTHWLPCDRALAVPCEKIGPPTPYTRSTARAAGWQWRIPLQHRTGNGYVYCSAHISDDEAAATLLANLDGAPLGDPRPLRFTTGRRKQFWNRNVVALGLASGFLEPLESTSIHLIQSGISRLLELFPREGISPVLVQRYNDRLAFEFDRVRDFLLLHYHATERDDSAFWRHCRHMPITPELQTTLDLFRDSGRFYRNAEEMFAEISWVQVMVGQGILPQGYHPLVDQVPDREAEGFLASVAQTISHCVDVMPTHQQFIDRYCKAPAIRQAR

SEQ ID NO: 82983 - protein, 179 aa, Sphingomonas sanguinis
  misc_feature (1)..(179): tr|A0A147J3R6|A0A147J3R6_9SPHN Tryptophan halogenase (F ragment) OS=Sphingomonas sanguinis OX=33051 GN=NS258_18 130 PE=4 SV=1
GRRPHGFTVTLVESPNVPIIGVGEGTWPTLRATLKNMGVSETAFFRECDASFKQGARFNRWTTGAAEDGYYHPLMLPQSFGQVNLASHWLAGEGDASFCDAVTPQGRICDGGLAPKTIATPEYEALANYAYHLDAGKFADFLRRHCCEQLGVRHVLADVEEVLLAESGDIRAVRTAQAG

SEQ ID NO: 82984 - protein, 533 aa, Dyella sp.
  misc_feature (1)..(533): tr|A0A369UJ88|A0A369UJ88_9GAMM Tryptophan 7-halogenase OS=Dyella sp. L4-6 OX=2282381 GN=DVJ77_17410 PE=4 SV=1
MEELIRDVVILGGGTAGWMTASYLARAVGSKVRITLIEAATIPKIGVGEATIPNLQKVFFDFLGIPEEEWMRHCNASFKMGIRFVNWRPQPQSAGDDYFYHLFGLIPNCDSVPLSHYWVLRQQERMDDRPLAYACYKEAPLLDAKLSPRMMDGTRVTNYAWHFDAHLVADYLQKLAVGWGVQHVVDELDHVELAPDGSIAALHTRMGNRYGADLFIDCSGFRGLLINKALGEPFIDMKNHLLCDSAVAASVPHDDERHGVEPYTSSIAMKHGWTWKIPMLTRFGSGYVYSSDFTSQDEATDEFLKLWNLDANQVKLNQIRFRTGRNRNAWVKNCVSIGLSSCFLEPLESTGIYFIYAAIYQLVKHFPDRSFNPSVIAAFNDEIAGMYDDCRDFIQAHYFTTSRNDTAFWRANKNELHLSDSIRHKLELYKAGLIVTAPLSDAGAYYENFETEFRNFWTNSSYYCIFSGMGWMPKAPLAKLRYSPASLSKAQQSFTDLQHQTAELKTKLPSCHEYLQTLHGGAKPMQAARTGSA

SEQ ID NO: 82985 - protein, 496 aa, Alteromonas sp.
  misc_feature (1)..(496): tr|A0A3N5ZAK0|A0A3N5ZAK0_9ALTE Tryptophan 7-halogenase OS=Alteromonas sp. U0105 OX=2259342 GN=DRW07_10480 PE=4 SV=1
MWKKIIIAGGGTAGWMTAALLAKSLGRAGFEITLVESPNIPTVGVGEATVPSFMHFNRLLGIDERHLIKQTKATYKLGIQFVDWEKIGNDYIHGFGALGDQAAGLPFYHYWFRWLKSNPTAKLEDMSLCAVSGRKRRFVHPDPKVNPILGGMGYALHIDAGLYAEFLKQYSTERGIKHIQADITGVNLNQKTGFISSLNLADSSVLEGDFFIDCTGFKSMLLGQALRVPFVSWKQWLKTDSAQVLPTALTQDNFVPYTRAKAHHAGWQWRIPLQHRVGNGLVYSSEHMTDQEAEALLLEQIDSEPLMAPRKLHFEAGMRERFWEKNCVAVGLSSGFLEPLESTSIHIIQTTISRLVTLFPNADTNEVMAKRFNAQATFEMERIRDFIILHYALNHRDDPFWRSLSEMRLPDSLEEKITLFKKTGYIHYEDGDLFADTNWLSVLFGQGVRPENSMYMVNTMSDEQLDKYISSIRHQIVSLTDNFPFHIDYLTRLLKS

SEQ ID NO: 82986 - protein, 606 aa, Fischerella thermalis
  misc_feature (1)..(606): tr|A0A2N6LUZ2|A0A2N6LUZ2_9CYAN Tryptophan halogenase OS =Fischerella thermalis CCMEE 5205 OX=2019671 GN=CEN40_2 5835 PE=4 SV=1
MLMNNTQSQVYDVVIMGAGMAGICQTRHLLLNIPNIKIALVDPRPEERADKDMKVGESTVEISTLMICKELGLYDYMIENHPPKFGLNFHWPKDPAKTENTDDYFHLWATRQPPLASVLINRPKFERDVLKMNKEMGVEFYNGRVVDVDLTSGDELNSVQVKVGDQQLELKTKHVIDAAGRKFIIGRKTDNLVFGPENLYGVNNGSAWMRVRNIDRTIFHSGYDPANATCSHYYATNHWMGHGHWVWMIPTDTESMELSIGLVHHHEVIPAQSVNTKEKFSAFLEANHNVVYQLLKSGEEVDFHYLPRLAHKSKQMYSRDNWYVIGDAAAMFDPFYSMGMTMMSFQIENVTEIIRAKFAGEPDVERKRVVYNNFAVNMIARNNHLVSHHEKQLGNASIMSWRIFLENMWWFGVLIPMYIGKWHLDLPFLHKFGKQGRGAVVAETLEEAYKLFDKLLEKKQNLGFMYTHRMDELPFGYSITKDVSKYIGLSKYEPKHCNIYAEMRNTYFFVALWYLKLLWKGFGLSGLLAPKNVKRVLTLLKISAQSYVDELIFDYQTRNIPTNSAVAKQREEFKNYQPRTELQPWQNLATVDVNDTKLPELVEVGS

SEQ ID NO: 82987 - protein, 514 aa, Sphingobium sp.
  misc_feature (1)..(514): tr|A0A0C5XHS8|A0A0C5XHS8_SPHYB Tryptophan halogenase OS =Sphingobium sp. (strain YBL2) OX=484429 GN=TZ53_09660 PE=4 SV=1
MVHPVRNIVIVGGGTAGWLTAGVIAARHRSRIGNGFTVTLVESPNTPIIGVGEGTWPTLRTTLSRMGISETDLFRECDAAFKQGARFARWTTGTPDDGYYHPLMLPQNFGQVNLAPHWLASEGDESFCDSVCSQGRICDDGLAPKTIATAEYDALANYAYHLDAGKFAPFLQRHCCEKLGVRHVLADVEQVLMKEDGDIRAIRTTQAGEIEGDLFVDCTGFKALLIEGAMKVPFRDCNDVLFCDTALAMQVPYERPDSPMASHTISTAQSAGWIWDIGLPTRRGIGHVYSSNHISDEEAERELRAYIGPLAEGLGARKIAIRSGHRETFWKGNCVAVGLAAGFLEPLEASAIVLIELSAKIIAEQMPACREVMDIIASRFNATTHYRWGRIIDFLKLHYVLTKRTDSDFWRDNVREETIPDRLKELMLLWRYQSPWFLDEFDRVEEVFPAASYQYVLYGMGFRTEVDRPALARDAHLADRARRENTAMTAKLRAGLPRHRDLIDKIVAHGLQPV

SEQ ID NO: 82988 - protein, 536 aa, Sphingomonas sanguinis
  misc_feature (1)..(536): tr|A0A147HV91|A0A147HV91_9SPHN Tryptophan halogenase OS =Sphingomonas sanguinis OX=33051 GN=NS319_12480 PE=4 SV =1
MTPNHDQMIRRVVIVGGGTAGWMAAAAFARLLNNGYTQVTLVESEEIGTVGVGEATIPPIITFNQMLGLDENDFLAKTAGTFKLGIEFVDWGERGERYFHPFGRHGQDLQGVHFHQLWLRERSRRALPDIAEWSMSAMAARSGKFGRAKPDARSPIRELFYAFHFDASLYARYLRGYAERGGVTRIEGRIDAVNLRPEDGYVEAVTLADGRRIEGDLFIDCSGFRGLLIEEALETGYDSYAQWLPCDRAVAAPCALPNPAEPDPFTRATAREAGWQWRIPLQHRMGNGLVYCSEYLEADAAEAQLLASLEGELLGDPRHLRFTAGRRRESWNRNVVALGLSSGFLEPLESTSIHLVQAAIQRLIALFPDKRFDPAERTEFNRQMRDLYEDVRDFIILHYKATRRSDTPFWDRVRTMNVPDSLARKMDLWAGKGRLFREGYDLFSNPSWVAVSLGQGIVPQSWEPAADALDEDLVAQALEQMRVGYADTAARMPSHGDFLRMTAPSPLAPALAPGRPADGGFDFTRTPSGGASGPLL

SEQ ID NO: 82989 - protein, 500 aa, Sphingopyxis sp.
  misc_feature (1)..(500): tr|A0A0W1DSR6|A0A0W1DSR6_9SPHN Tryptophan halogenase OS =Sphingopyxis sp. H050 OX=1759072 GN=ATE67_07315 PE=4 S V=1
METNRIQSIVIVGGGTAGWMTAAALARILGPDYARITLVESDEIGTVGVGEATIPQINIFNRMLGIDEDDFVRRTKGSFKLGIEFVDWGGIGQRYFHPFGNIGVDMSGVSFHAFWQRLRGEPEFADVEDYSVMAKAARHGKFMRPTTAPGSLLSSIAYAFHFDAGLYALYLRELAEANGVRRVEGKITDVARNGETGHIEHVTMADGRVVGGQLFIDCSGFGGLLIGRALGVPYIDWSAYLPCNRAVAVPCEHGGDFTPYTRSTARSAGWQWRIPLQHRIGNGHVYCSDHISDDEAAAVLLANLDGKPLADPRFLKFTTGHRARFWDKNCVAIGLSAGFMEPLESTSIWMIQTGIARLLSNFPDTGFEPASIDRYNRLMVEESELVRDFLVLHYHVTTRDDSDFWTYCRTMPIPDRLAEKIRVFQSSGRAFREHEELFNDTSWFAVMEGQRLGARRFDPVAELMPIEQTRDRLRQIKAAVTASVDHMPLHRDYIREHCAA

SEQ ID NO: 82990 - protein, 107 aa, Burkholderia sp.
  misc_feature (1)..(107): tr|U2G8X6|U2G8X6_9BURK Tryptophan halogenase PrnA OS=Bu rkholderia sp. AU4i OX=1335308 GN=L810_5675 PE=4 SV=1
MPEQVSAAVTDAVTQANVKVMGEAPAVALGTLMQSNSHASAILLHNAVQMQANQAMSNLAATTVGVMQLYAGSPVAVAAAARSANDNLASQLTAVAQLMNAIGHWRG

SEQ ID NO: 82991 - protein, 496 aa, Alteromonas sp.
  misc_feature (1)..(496): tr|A0A3N5Y8S7|A0A3N5Y8S7_9ALTE Tryptophan 7-halogenase OS=Alteromonas sp. U0105 OX=2259342 GN=DRW07_08630 PE=4 SV=1
MFANKTIAIIGGGTAGWMSAAWLQHHCDDTARILLIESDDIGTIGVGEGTTPHLSVFFDTLGIKEQTWMPACSATFKNGITFTNWTSRPTAPSYFHPFPSASDRYSAGFFLQAVEAMRKNVPIGPTLPDSYFLSWHLTQAAQSPRRIKTGANIPLSYAYHFDAGLLARFLREWCEQRGVIRYQGRITRVGQHENGQISAVYTNNIDSPINADFFIDCSGFRSLLAQQTLNTPFVSYADSLLNNAAIALPCEALSPLSPHTVSCAMPSGWRWQIPLQHRTGNGYVYSDSYISAEEAEQQLVQAVASKPLNQSPTHLTFRVGRLEKTWSENCLSVGLSQGFIEPLEATGLHLVLCTLSEFTAAMARCNESQQAMNTVNESISARFDGIKDYIVAHYLMSDRNDSEYWRAARSVTPSDTLQALLDCWHNGGNLITKIDKLGISQYYSVISWYCLLAGYDAFTQNKTHPRAPLQWQQLQEKLKSWQAHFLDHEEALNQFL

SEQ ID NO: 82992 - protein, 498 aa, Sphingopyxis sp.
  misc_feature (1)..(498): tr|A0A0W1DWS6|A0A0W1DWS6_9SPHN Tryptophan halogenase OS =Sphingopyxis sp. H050 OX=1759072 GN=ATE67_00920 PE=4 S V=1
MRLIIIGGGTAGWMAAACLRRFLPRQWSVRLVESDAIGTVGVGEATIPQIRLFNEALGIDEEAFLAATRGTIKLGIEFADWGGRGERYMHAFGAVGRGLGLLEFHHYWLRGRAAGIAAPLGAYSLNEQAARALRMQRGAPRTSPHLLEMPYAYHFDAGLYAAFLRRRAEASGVERIEGKIADVKLDGGSGDVTGVTLDDGRTLDGDFFIDCSGFRGLLIEEALGTGYDDWSHWLINDRAIAVPCAHGAVAQQPWTTATARDAGWQWRIPLQHRIGNGYVYSSAHLSDEDALATLLAGLDGPSQAEPNRLRFTSGKRRRMWNRNVVALGLAAGFMEPLESTSIHLVQSGISRLIKLLPAGNCDPAVAAEFNRQSDFEWERIRDFIILHFHATARRDTPYWRDRAAMDLPDTLAAKLELYRAQGLIVREHEELFTESGWLQVLAGQGVEARRWHPLADSIDPADLGQFLAAQLLLIEREVAQMQSYDRFLSAVRPEGVTA

SEQ ID NO: 82993 - protein, 544 aa, Alteromonas sp.
  misc_feature (1)..(544): tr|A0A3N5Y3L4|A0A3N5Y3L4_9ALTE Tryptophan 7-halogenase OS=Alteromonas sp. U0105 OX=2259342 GN=DRW07_00410 PE=4 SV=1
MQKRRVVIVGGGSAGWMTAAYLNGALNNKGADPKVDIHLIESPDTPRISVGEATIPSMRHLLAVIGVDEMEFMRATEATFKQSIKYTNWVHKNNTFYHHPFSRATVQPRDNMGMRWLQSDQSIPFMETCSAQPIICEMGLTPKMMGEWRMGQPLSYAYHMNAQKFADYLCEFSVQRGVKHTFANVVDITLRDADHIQSVTTDQGETLESDIFVDCTGFRARLIEEKLGVGFEDCSQWLLCDRAITMHVPYDDFYPGMVRPYTTATALSNGWIWDIPMQSRRSIGYVHSSAFIDEESAEREMRAYQGDDTGALDARLVRFKVGRRHRTWHGNCVAIGLSGGFIEPLESTGLYLSDMGAVMLAEHFPWQDSGMDLLSTRYNRLMSNRFYEILDFINMHYCLTQRTDTDFWREVQKPERINDRLKAKFEYWKVKPPSPSDFDDMWLPGQSVLPVDQTIAGQDRRPAVDTAGLWNYQSYECILYGMDFLKQESEQWFGTNRPPTEINPIILQRLQAAKQNLPPHAYWLQQKVGMQQYQTHAKPAGWVA

SEQ ID NO: 82994 - protein, 521 aa, Xanthomonas floridensis
  misc_feature (1)..(521): tr|A0A1A9MGR5|A0A1A9MGR5_9XANT Tryptophan halogenase OS =Xanthomonas floridensis OX=1843580 GN=A7D17_10470 PE=4 SV=1
MDPAPASDPRQRPVRRVVIAGGGTAGWMAAAALSKLLGRQLQITLVESDEIGTVGVGEATIPSLVTFHRLLEIDEAAFMAATQATFKLGIAFEHWRDVDRHYIHSFGHTGTDHWSAGFHHFWLKGQQRGVARDFGDYCLELRATQEGRFAHLPSGAMNYAYHLDAGLYARFLRRFSEGFGVQRIEGRIGQVETDPESGFLTALTLQNGTRVEGDLFIDCTGFAGLLIGKTLGVGSEDWSQWLFADSALAVQTESVGPPVTYTRARADQSGWMWRIPLQHRVGNGIVYSSRYTDQDSARAVLERNLQGRALTEPRALRFTPNQRHRVWEKNCVALGLASGFLEPIESTNIHLIQRGIVRLLQTFPQVIHTVDIAEYNRQAADEIAHIRDFVILHYHATDRRDTPFWRDCAAMDIPDSLRHRIALFQESGRVFHRANELFAENSWVQVMLGQGITPRQHHPVADLMGDAELRHFLEGIRQRVDATVARLPPHADFLRHHCPAAPLPDPPARVPADAALAPPAR

SEQ ID NO: 82995 - protein, 561 aa, Ruegeria conchae
  misc_feature (1)..(561): tr|A0A497YV76|A0A497YV76_9RHOB Tryptophan halogenase OS =Ruegeria conchae OX=981384 GN=CLV75_3902 PE=4 SV=1
MNNRLRKITIVGGGTAGWMTALILDMVFSRTSAPKDRPRICLIESPNISTVGVGEATVPRMPVTLRQAGIAERDFFRETNASFKLGVKFCNWNNDAKGNRVDYVNPFAHGQLLEGLEAAEYFLRFGNGDRDFTQSISPHDDLARLCKGARPLGAPEFEQRFGYAYHLDAVKFAGMLTKVCTKRGVEHIQDEVQSVELDEHGNVSHLMLERKGRHEIEMVIDCTGFRGLIINQALGEPFMDYSEYLPNDRAMALQIEHPDPERIESVTRSTALGAGWTWRVPLYNRVGTGYVYSSAHRTDDQAADEYLEWLGDSGKGLTPRVIPMRVGRVRNAWVKNCLAIGLSGGFIEPLESTAIHMIDHAIRWFAEHLPTRDIEPALRNRYNRQMNKLYDEVLDFICLHYRLGNRTDDQYWIDARTEMKIPDRLAENLELWQHRLPMEHDIEFATLFNFRVYQTVLLGKQVYDTGYGTGIRDRIRPLKKPIWFQWWKGAKMDLAQILKSMPDHKTLLRDIRGELEKPAFGKAAVAKPTVAMPGTAPAPVVVQNMPNFAEIQSGAKDLQLF

SEQ ID NO: 82996 - protein, 517 aa, Alteromonas sp.
  misc_feature (1)..(517): tr|A0A3N5Y420|A0A3N5Y420_9ALTE Tryptophan 7-halogenase OS=Alteromonas sp. U0105 OX=2259342 GN=DRW07_06005 PE=4 SV=1
MNIDINNVVIVGGGTAGWLTAAVLAAQFDTRKNFSVTLIESPNIKTIGVGEGTWPTMAATLRRIGLSEAQFISECDASFKQGSRFINWRSGQNESYYHPFSLPVGYNDINIVDHWLDNGATTSFDEFATNQASVCSRHLAPKQASTPEYANVVNYGYHLDAGKFARLLKTHCVERLGVQHISADVTRVNHTNEHIDSVILADGRAVLGHLFIDCTGFKRLLIGDHMGARFISQKSVLFNDRAMAFQVPYADEHAPINSTTHATAHKNGWIWDIGLPSRKGIGIVYSSDYGNEQQAYDMMENYIEQQAPHCNLADITPNKITLDPGHLNTFWKGNCVAIGLSAGFIDPLEATAMVLIEFSAKFIRDHLPAGKQDLGFLSNKFNQRMDLHWRNIIDFIKLHYVLSERTDSQYWLDHRAQHSVPESLNRLLTVWARRAPWHADIEVAESMFPPASYQYILYGMGFRSLSALSDKRFADKERAHLKKLLSHKQTELQKLYQHLPTNRTLLRDIKHSWNSRL

SEQ ID NO: 82997 - protein, 591 aa, Fischerella thermalis
  misc_feature (1)..(591): tr|A0A2N6LUY2|A0A2N6LUY2_9CYAN Tryptophan halogenase OS =Fischerella thermalis CCMEE 5205 OX=2019671 GN=CEN40_2 5870 PE=4 SV=1
MNTNTTAQQLEYDVVIMGAGYAGVCQARHLLLKIPNIRLAIIDPRSQDPSQVNHRPGESTLEAASMFLFSELGLHDYLLEEHTHKAGLNWHWPKDVDKTESLDDYYNIWVNRQLTIPSFHLNRLKFDLDVLEMNKQMGAHFYNGRVVDVDLTPGDEHNTVKVKLHNDYIHLKAKHLIDAAGRKFIIGRKTDNLLLHPKELPVHIKPSSGWVLVRNVDRTIFDNSVYSTESLESRYYATNHWMGKGHWLWMIPVDSQSKELSVGLLHHPDIIPCELVNTKEKFYAFIKANHNLVYKVLQSGEHVEFNYWPRIAHTSKKLFSRDNWYVIGDAASNFDALYSTGTTMSCIAIESVTEIIRAKLANEKDAEKKREAYHHFNLALARFMNLAVSSQEKQVGNASIMSWRLYGNYMVWFNTLLPIYVGKWHLDLLFSRLALIFFKINGSFWVDTYKQLSYLAERGTNIGFMDQLRADQLIGGYHPDKFFDNFLENAKLEPSKLNVFAGLRAYCFYIVIWFMMWQWKGFGPIGLLRPRNIFQIVRLLLTGVVMAIAELTHKLKLLGQPTNSIVAKTRQEFKSYRYQSRLQNWVGSSEL

SEQ ID NO: 82998 - protein, 499 aa, Alteromonas sp.
  misc_feature (1)..(499): tr|A0A3N5Y1N1|A0A3N5Y1N1_9ALTE Tryptophan 7-halogenase OS=Alteromonas sp. U0105 OX=2259342 GN=DRW07_08700 PE=4 SV=1
MSTPLHVVIAGGGTAGWMAANLFAALCPKERVRVTLVESPDIGIIGVGEGSTPTLKRFFEIIKVPEQVWMPTCNATYKVGIKFNDWSPKSGIHSYRHPFISQTDIFTQRAFEVNCHTRRLGLDTHTRPEDFLINGVLAKKNLGPLTPAHFPFTIQYGYHFDSALLGQFLSEHAQKQGVTHIKKGILAVKTHPDTSIASLLCDDDTEISGDFFIDCTGFRSLLLQQTLGVQFKSYKSNLFNDSAVVLPTSISNTIPSETEATALSAGWCWRIPLQNRFGNGYVYSAEYLSPDSAEEEFRRHLGILDSDDSCRHLSMKVGQVEQHWKKNCLALGLSQGFIEPLEATALHLVQICAEMFISKWQQGDYSSTHQQAFNAFAKERFDRVRDYIVAHYKLNTREDSEYWRDNRENDAISSSLANIINCWFQRKDLTQEIKRQDIGMHWDPISWHCLFSGYGAYPPLAPDQPGKGDHFAEKNIDTFVQGCALNFESHNANLASLLE

SEQ ID NO: 82999 - protein, 500 aa, Erythrobacter nanhaisediminis
  misc_feature (1)..(500): tr|A0A1I5NHL2|A0A1I5NHL2_9SPHN Tryptophan halogenase OS =Erythrobacter nanhaisediminis OX=604088 GN=SAMN0448806 0_1863 PE=4 SV=1
MAIEHIVIVGGGTAGWMAAAALSRIREGRNLKITLLESEQIGTVGVGEATIPPFVEFNQALEIDEREMLSATQGTFKLGIQFSNWGQVGESYIHPFGNYGYDIGGINFHQVWHAMRQRGDKRPIQAFNLETMAAYFGRFSRTQDYNRDDLPPMNYAYHIDASRYAGFLRQYAEKYGVVRQEGRVDDVALHPETGFVTCVTLQSGEKIEGDFFVDCSGFRGLLIEQALETGYEEWTHLLPCDRAVALPCNRDDGSPPPPFTKATAHSAGWQWQVPLQHRNGNGHVYCSEFMSDDEAHDILVKNLAGKPTAEPNFLRFVTGRRKKFWNKNVVALGLASGFMEPLESTSIHLINTGVNKLIALLSLDGVNEAQISTYNRLTRKEYERIRDFLVLHYNATRRTDSPFWDYVRTMDVPETLTEKVEIFKANGQVFREEDELFTTTSWAAVMMGQGIAMEGNSPMADDVATHMAGEVDEMEKSIRWLVERMPGHGQYLQKYSPAPA

SEQ ID NO: 83000 - protein, 493 aa, Cellvibrio mixtus
  misc_feature (1)..(493): tr|A0A266Q7Y8|A0A266Q7Y8_9GAMM Tryptophan halogenase OS =Cellvibrio mixtus OX=39650 GN=CBP51_03025 PE=4 SV=1
MQPIKKLVIVGGGTAGWLAAAAVGKIYQGQVSVTLIESDAIGVVGVGEATIPTMLAFHKLIGIPEVEMMRATHATFKLGINFKDWGEIGEDYIHSFGQVGRIFWAGEFQHFWARAKKNGLDIPFGAYCLEHEAARAEKFSISENPALNYAFHFDAGLYAKFLRKFSEGLGVVRHEGKIERVEQDVESGFVQRLHLDSGLTIDADFFIDCSGFRGLLIEETLKTGYENWQHWLPCDSALAVQTAKVKPATPYTTSTAREFGWQWRIPLQNRTGNGLVYSSQYADRIWAEKTLTENLEGEMLTAPRLIQFTTGRRKLGWHKNCVALGLASGFLEPLESTSIHMVTSGLIRFLRLFPLRGVQRVLVDEYNRQSKEEAESIRDFIILHYHATRRNDTEFWRHVRTMPVPDSLRHRIDMFTQSGMVFLGGDELFRTNGWTQVLIGQGFTPENYQPIVDNMSDMEFRAYMTGFRDHVANNISRLPGHEEFIAQYCAMEK

SEQ ID NO: 83001 - protein, 514 aa, Caulobacter sp.
  misc_feature (1)..(514): tr|A0A0Q6V8A9|A0A0Q6V8A9_9CAUL Tryptophan halogenase OS =Caulobacter sp. Root343 OX=1736520 GN=ASC70_09365 PE=4 SV=1
MVRPVKNIVIVGGGTAGWLTAGVIAAKHRARQAGGFTVTLVESPTTPIIGVGEGTWPTLRTTLAKIGVSETDFFRECDAAFKQGAKFARWTTGAPDDAYYHPLVLPQSFGQVNLAAHWLASGAAQSFCDAVCPQGVLCDDGLAPKTITAPPYQGAANYAYHLDAGKFAPFLQRHCCEKLGVRHVLADVRNVTLTEDGDIQGVVTEQCGEVRGDLFVDCTGFRSLLLGEALGVKFRECGDVLFCDTALAIQVPHEREDSPLSTHTISTAQSAGWIWDIGLPTRRGVGHVYSSRHISDEDAERELRGYIGPAARDLSARKISIRSGHRETFWKGNCVAVGLAAGFLEPLEASAIVLIELSAKLIAEQMPACREVMDVVAARFNATTHYRWGRIIDFLKLHYVLSQRSDTAFWRDNRAPETIPERLSDLLRLWRHQPPWLHEEFDRVEEVFPAASYQYVLYGMGFRTEIEPGALADEAALAQRALRENALQTERLRASLPRHRDLIRKIVEHGLQPV

SEQ ID NO: 83002 - protein, 179 aa, Sphingomonas sanguinis
  misc_feature (1)..(179): tr|A0A147IJ60|A0A147IJ60_9SPHN Tryptophan halogenase (F ragment) OS=Sphingomonas sanguinis OX=33051 GN=SB4_1863 5 PE=4 SV=1
AVGLAAGFLEPLEASAIVLIELSAKLIAEQMPACREVMDTVARRFNDTTLYRWGRIVDFLKLHYALTQRTDSDFWRDNGRPETMPDRLRDLMELWRYQVPWMHDEFDRVEEVFPSASYQYVLYGMGQRTEIAPGSLAAETIAAQRARRENDVQTGRLLAGLPRHRDLIRKIVERGLPTI

SEQ ID NO: 83003 - protein, 507 aa, Erythrobacter luteus
  misc_feature (1)..(507): tr|A0A0G9N041|A0A0G9N041_9SPHN Tryptophan halogenase OS =Erythrobacter luteus OX=1581420 GN=AAW00_06315 PE=4 SV =1
MDKGAGTQGYDPVRNVVIVGGGTAGWMAAAALSRFLGRDRTITLVESDAIGIVGVGEATIPPIRTFNSMLDIAEEDFLRETRGTFKLGIEFVNWGRVGDRYMHPFGAYGQDFHGVPFHQMWLRYRALGGDAGLEDFSMCIAAAHRGKFGKARPGEPTPLQHIAWAYHFDAGLYARFLRGIAEQQGVVRREGRIVAFHRDGESGDVTSVEFEGGTRLAGDLFLDCSGFRGLLIEEALETGWEDWSHWLPMDSALAVPTANTEAPAPFTRSTAHAAGWQWRIPLQHRTGNGHVFCSAHTDADQAERTLRENVEGDLLADPRMIRFTTGMRRQAWNHNVVSLGLASGFIEPLESTSIHLIQHGVLRLIGLFPDRKINPTEREEYNRNLRSIFEFVRDFVILHYKANQREDSVFWRQMAAMSVPDTLQHRMDLWQAHGRVFPKEADMFNIPSWVAVMLGQNVTPDRYDPVADALVEKQLTAALADMRTRYAETAGRLPSHETYLQKVGAWA

SEQ ID NO: 83004 - protein, 534 aa, Pelagimonas varians
  misc_feature (1)..(534): tr|A0A238KDN9|A0A238KDN9_9RHOB Flavin-dependent tryptop han halogenase RebH OS=Pelagimonas varians OX=696760 GN =rebH_1 PE=4 SV=1
MAKPITSITIVGGGTAGWLAATFLRSKCSKKIDITLIESPNVPTVGVGEATVPNMSATLRELGINDQQFFQRCNASIKMGVMFRQWNVNHRGDFFDYMNPFITPPSLDKMEMGYFYHAYGAGKRDFIQSFSPLMELLEAGKCPLSFGGKEDPMPRVGYAYHLDAVKFAGLLAEVGTERGVTHILDDVEDVELDNRGHVAALQLKEHGRHEVEFVIDCSGFQGLITQKALGEPFESYGDYLANDRAMALQIPHSETTSIPAATSSTALGAGWSWSVPLFNRTGTGYVFSSAHRTDEQARDEFMAHLGDRAPKGAEPRVIPMNVGRTQRAWVKNCLSLGLSGGFIEPLESTAIHMVDMGLRWLLMCFPTQDFDDATRNRYNQTVDAMYNEVRDFICLHYRLGNRTDDQYWIDARTQLKVPDRLAENLELWKHRLPSPLDLQTQFLFTHHTYQAVLLGKQVYRNGYGDGSFSRPYAMSEKNWKEYLRKSAAHTRATVAFKADHRQMLLALRGELGPGGVQIKKLGTVEPDDSTMALF

SEQ ID NO: 83005 - protein, 530 aa, Streptomyces sp.
  misc_feature (1)..(530): tr|A0A1A9CH49|A0A1A9CH49_9ACTN Tryptophan halogenase OS =Streptomyces sp. Ncost-T6T-1 OX=1100828 GN=YW5DRAFT_01 220 PE=4 SV=1
MSDNLIKKILVLGGGTAGWMAASYLGKALGPTVQLTVLEAPAIPKIGVGEATIPNLQRVFFDYLGLTEEEWMPECNASYKMGIRFINWRTPGAGTAGPRPYGRYGDQFDHLFGLLPNHEDLPLSHYWTYKKINGLTDEPFDRSCYPQPALFDRKLSPRFLDGRRVASYAWHFDADLVADFLRRFATGKQGATHIEDKFATAETDQQGRLVAVTTEAGRRLEADLFIDCSGFRSLLINQVMKEPFLDMSDHLLNDRAVATRVDHDDEEHGIEPFTSSIAMSSGWAWKIPMLGRFGTGYVYSSRFTSEEEATREFCEMWGISPDTHPMNHVRFRVGRNRRAWVKNCVGVGLSSCFLEPLESTGIYFTYAALYHLVRNFPDKRFDPVLRNRFNSEIESMFDDTRDFIQGHFSFAPRDDTPYWRACKELELAPEFLHKVEMYKAGLGVDLPVTDEDTYYGNFDAEFRNFWSNANYYCVFSGLGMMPEHDPTPLGYRPGSVESAEAVFAQVQRRRDELLDTLPPMHTYLRRLHGK

SEQ ID NO: 83006 - protein, 503 aa, Massilia yuzhufengensis
  misc_feature (1)..(503): tr|A0A1I1I9X9|A0A1I1I9X9_9BURK Tryptophan halogenase OS =Massilia yuzhufengensis OX=1164594 GN=SAMN05216204_105 140 PE=4 SV=1
MHNEPIKDIVIVGGGTAGWMTAAALSTMLNGRYNIRLVESDDIGIVGVGEATIPMIQRFNRVLGIDENEFMRETQGSFKLGVEFVNWGKLGDRYMHGFGRLGQDLATLPFDQYWQRMRRAGKAAPLEEYSITRMAAKADKFMPPRMDVPNSPLRDIAYAYHFDASLYAKYLRKLAESRGVVRIEGKITRATQRESDGFIDAIELESGARVEGELFIDCSGFRGLLIEQTLQTGYEDWTHWLPADRALAVPCESVAAMTPYTRATAHQSGWQWRIPLQHRTGNGHVYCSRFISDDEAASTLLANLDGRALAEPRLIKFQTGMRKQSWNRNVVAIGLASGFLEPIESTSIHLIQSTIQRLVDFFPDRGFSTIVRDEFNRQSRFEYERIRDFIILHYKLNQRSDSAYWTACANMAIPETLQHKMDLYRTHGRVVRVDNELFSEVAWIQVFEGQNMPIEGYHPLADTQSESDIADYLGGVRDVIAKCVNVMPSHRDYIAKTCAAKKM

SEQ ID NO: 83007 - protein, 507 aa, Shewanella baltica
  misc_feature (1)..(507): tr|A0A380A4W2|A0A380A4W2_9GAMM Tryptophan halogenase OS =Shewanella baltica OX=62322 GN=NCTC10735_03134 PE=4 SV =1
MTIKTIAIVGGGTSGWLAANHIGRFLKDNPELSITLIESPGIPIIGVGEGTVPSIRKSLSSFGISESEFINSCDVTFKQSIKFVNWLDRTKHGNNNFYHHLFDMPSPFGEDLTPYWLINPREHFADLVSSQHAVCEENKAPKFITTPEYSGVTGYAYHLNAAKFAMLLAKNATERFNVEHVHATVNDVSFGIDGSIRSLLTDKGELIFDFYIDCSGFESILLAKRFDVPFIDKSQQLFVNTALVTQVPTQDFEKIPPFTIATAHKAGWIWDIALTQRRGTGFVYSNDHMSNAEAEDKFDQYLGGKLAELTPRKIPMKVGYRQQFWVKNCVALGLAQGFLEPIEATSILLTDFSARFLAERFPSDKDDIDYLAKRFNEIVSQAWERVVEFAKLHYCLSDRSDSAFWRDNRSDKTIPEGLKQRLKMWRNFIPIAEDFPSKFEVFNRENYLYVLYGMKYFTRPTYSNAEVDKRVVQHLAKMKLLKSKMISELPEHRELLDKIRLYGLQSI

SEQ ID NO: 83008 - protein, 523 aa, Brevundimonas vesicularis
  misc_feature (1)..(523): tr|A0A2X1BP89|A0A2X1BP89_BREVE Tryptophan halogenase OS =Brevundimonas vesicularis OX=41276 GN=NCTC11166_00907 PE=4 SV=1
MTTTSVEAPRTSDRGAAIRKVVIVGGGTAGWMAAAALARHLATTDVAITVVESSEIGTVGVGEATIPTIRRFYAQLGLTDADVMSATQATCKLGIRFEGWGGPRSDFIHPFGLYGQDLNGVGFHHYWMRQAETGDATPLSAYSLGASLALANKFVEPSPNPPSSLSVFDWALHFDAALFAQRLRRYSEGSGVTRIDARIAAVKLRAQDGFIDRLVLDDGREIEGDLFVDCSGFRGLLIGEALGTPYEDWGDWLACDAAYAVQTENTPGDPVAPYTRVTAHQAGWRWRIPLRHRTGNGLVFSSAHMSDDAAQAALMANLQGRPLSAPRRIDFRPGRRRQAWVKNCVALGLAAGFLEPLESTSIALIENGIERLKALFPDRDFAPAVLEEFNDQSAREMERTRDFIILHYWLNGRNEAFWRERREAAVPDTLRRKVDLWKARGAFVRYRWEMFHPASWLAIYDGLGLMPERVDPAVQGIDPVQLRQGLWGMRDAVADMVERTTSHDAFLARFGGVSDPKGISNAS

SEQ ID NO: 83009 - protein, 480 aa, Streptomyces sp.
  misc_feature (1)..(480): tr|V4KNM3|V4KNM3_9ACTN Tryptophan halogenase OS=Strepto myces sp. PVA 94-07 OX=1223307 GN=B590_01709 PE=4 SV=1
MPSPGDAASAESFDVIVVGGGPAGSSAATFVAMQGHRVLLLEKESFPRHQIGESLLPSTVHGICALLGVDEELHAAGFVKKRGGTFRWGSSTEPWSFDFALSEKFAGPTSFAYQVERMKFDQILLDNARRKGVVVRERCSVRDVVEENGRVSGVRFEDENGAAREASSRFVVDASGNQSRLYGRVGGRRRYSDFFQNIALYGYFEGGKRPAAPNSGNITCVAFDAGWFWYIPLSDTLTSVGAVVRKECADLIRGDRDKALAAMIADCPLVEGYLSEAKRVTSGPYGEVRVRKDYSYLSDNFWSPGLTLVGDAVGFIDPLFSSGVHMATFSALLAARSVNSVLRGDLEEEECFAEYATRYRREYQTFHDFLVSFYDVTRDEQQYFDDARRVTRDSSPGAGAFAGLVGGGASDDTALTSDSYRDQRKKDLSRQSRDIHWEGHRIQMQAAFGEADDDVPAVEGGLTIAQDGMHWAKSQESAAV

SEQ ID NO: 83010 - protein, 508 aa, Brevundimonas vesicularis
  misc_feature (1)..(508): tr|A0A1Z3U4I1|A0A1Z3U4I1_BREVE Tryptophan 7-halogenase OS=Brevundimonas vesicularis OX=41276 GN=CEP68_00870 PE =4 SV=1
MMTQNDAGPIRKIVILGGGTAGWMTAAALSHRLAGSAVSIELVESDEIGIVGVGEATLPHIRAFNTAMGIDEQTLIDQTQATFKLGIQFVDWGRPGDSYIHPFGAYGEPIEGIDFHHVWAARRAMGDVADISDYSYPVRAAEANRFQRPVSDPGSMLSTFSYAFQFDASLYAAFLRQVSCGRGVVRTEGKVVDHVLNGATGDVDAIVLSDGRRISGDLFVDCSGFRGRLINQALETTFEDWSHWLPCDSAFAVPCQTTAPVGPYTRATARAAGWQWRIPLQHRTGNGHVFSSAHISDEDAVTILMSNLEGPALAEPRRLSFKTGRRHKLWSRNVVAIGLSGGFLEPLESTSIYLIQLGITTLLDLFPDRVGMAADAEEYNRIMALEFDRIRDFLVLHYVANQRDEPFWREMRNMAWPDSLSAKVEAFKSRGLLPDYDIGVFLPPSWLAVLVGQNIVPNGWDPRVDRLEPHVLSDKLAALRDAVRSTVDRTPDHMTFIRQAAQRAGGLQ

SEQ ID NO: 83011 - protein, 415 aa, Burkholderia multivorans
  misc_feature (1)..(415): tr|A0A1W0YRJ7|A0A1W0YRJ7_9BURK Tryptophan halogenase OS =Burkholderia multivorans OX=87883 GN=UA18_04731 PE=4 S V=1
MNEKKSNSVDVAIIGAGPSGAVAAALLRKCGRSVLVLERQHFPRFSIGESLLPQSMCYLEEAGMLQAVVEAGFQFKNGAYFVHRDRTSSFDFREKFSDGWGTAYQVERATFDDLLIRCAASQGADVRFGHTVRAFQPGDMPRLDVVDEAGSEYAVEASFVLDASGFGRVLPRLLGLEAPTGLPTRAAIFSHVQDSLPAGSTDRDKICIAVHPERRDVWFWMIPLTNGRSSVGCVADAAFLDVPEAQQESLLRELLQSEPTLARLVGSKSFVMPVRRIAGYASNVASLHGHGYALLGNAGEFLDPIFSSGVTIAMRSAHLAVAALERQLRGETVDWARDYDLALRKGIDTFRAFVERWYSGVLQDIVFHEDKASDVKRMVCSILAGYAWDEANPFVREPARGLDLLAEICRSNAAR

SEQ ID NO: 83012 - protein, 538 aa, Burkholderia ambifaria
  misc_feature (1)..(538): tr|Q0B6E7|Q0B6E7_BURCM Tryptophan halogenase OS=Burkhol deria ambifaria (strain ATCC BAA-244 / AMMD) OX=339670 GN=Bamb_4726 PE=4 SV=1
MSNPIKNIVIVGGGTAGWMTASYLVRALQQQANITLIESAAIPRIGVGEATIPSLQKVFFDFLGIPEREWMPQVNGAFKAAIKFVNWRKSPDPSRDDHFYHLFGNVPNCDGVPLTHYWLRKREQGFQQPMEYACYPQPGALDGKLAPCLADGTRQMSHAWHFDAHLVADFLKRWAVERGVKRVVDEVVDVHLDERGYISSLSTKEGRTLEADLFIDCSGMRGLLINQALKEPFIDMSDHLLCDSAVASAVPHDDVRDGIEPYTSAIAMNSGWTWKIPMLGRFGSGYVFSSKFTSRDQATADFLKLWGLSDNQPLNQIKFRVGRNRRAWVNNCVSIGLSSCFLEPLESTGIYFIYAALYQLVKHFPDTSFDPRLSDAFNAEIVYMFDDCRDFVQAHYFTTSRDDTPFWLANRHDLRLSDAIKEKVQRYKAGLPLTTTSFDDSMYYETFDYEFKNFWLNGNYYCIFAGLGLLPDRSLPLLQHRPESIEKAEAMFASIRREAERLRTSLPTNYDYLRSLRDGDAGVSRSQRGSTLAAQEIL

SEQ ID NO: 83013 - protein, 512 aa, Saccharomonospora glauca
  misc_feature (1)..(512): tr|I1D1Z0|I1D1Z0_9PSEU Tryptophan halogenase OS=Sacchar omonospora glauca K62 OX=928724 GN=SacglDRAFT_02058 PE= 4 SV=1
MIHSVVIVGGGTAGWMTASYLKAAFADRIDVTLVESAAVSRIGVGEATFSTIRHFFDYLGLDEADWLPKCAGGYKLGIRFENWHGNGEYFYHPFERLRVVDGFSLADWWLAIGDHSRPMDRQVFLTSALCEAKRSPRMMDGSLFVSGLDGSLGKSTLAEQRAQFPYAYHFDADQVAAYLRSYATERGVRHVVDNVQEVLQDQCGWISGVRTAEHGVLTGDLFVDCTGFRGILINKTLGTKFESFEDVLPNNRAVALRVPRETETDMAPYTTARAMSAGWMWTIPLFRRNGNGYVYSDQFITPEEAERELREAVAPDRDDLEANHIRMRIGRNERSWVKNCVAVGLSSAFVEPLESTGIFFIQHAIEQLVKHFPDKTFDPALIEAYNRRINRAIDGVKEFLVLHYKASSRADTPYWKESKVRAMPEPLAERLKLAETQLFDEETIYPHYHGFESYSWNSMIIGLGYRPKKPLPALAHLDPTDALAEFDKIKTEAAEMVAALPSCYDYLASLNE

SEQ ID NO: 83014 - protein, 501 aa, Shewanella baltica
  misc_feature (1)..(501): tr|A0A379ZZV5|A0A379ZZV5_9GAMM Geranylgeranyl reductase family OS=Shewanella baltica OX=62322 GN=NCTC10735_028 61 PE=4 SV=1
MKVKQAIRKIIILGGGTAGWMAAAALANNPVFAAIELCLVESDNIGTIGVGEGSTPHLKRFMDNLGISEKDWMEQCHASYKTGIDFINWNGDGQQYFHPFYFQMDVKPAEVFFINANARRRGHGNAVKPDAFFSSGVLAKHNLSPRPKKTLPCANEYGYHFDATELANYLKDYACQRGVRQIIADVVEVSTTQHQQIETLILANGERLSADFFIDASGFSAKLIHKALGVPFQSFAEELLNDSAVTVPVPALLDSTQTQQAKYHTRATALSAGWLWQIPLTHRLGNGYVYSSRHLSANAAAKELLHNVNLPESTQVRFLKMRVGVSDKAWHNNVLAIGLAQSFIEPLEATSIMMTQFTLEKFMSLFERYQLNKQAETLSRQTLNQAVMQLVLGIKDYIQAHYVTSQRSEPYWVAARKVAISQRLTQLLKAWYQGEDFDLLLYQYDQQLAYFRPSWYALLAGMDYHDPKLKRPFEPISADITAQAISYCQTLVEQYFQPKHS

SEQ ID NO: 83015 - protein, 501 aa, Shewanella piezotolerans
  misc_feature (1)..(501): tr|B8CSA4|B8CSA4_SHEPW NAD(FAD)-dependent dehydrogenase , putative OS=Shewanella piezotolerans (strain WP3 / JC M 13877) OX=225849 GN=swp_3710 PE=4 SV=1
MKIKPKSIVIVGGGTAGWMAVNSLLSSWRDTVKITLVESKDIGIIGVGEGSTPYLKQYFSSLGIKESEWMPACDATYKAGISFPDWSTKAGYESYFHPFFSKLDLKPADLFFHNSGLRRRGVKVDALPNHYFVSSQLIELNKSPVPKIDLPFDVDYGYHFDSAKLGRFLKERALKLGLTHVIGNVASVETSVDGHITAVNVEAQQSLNADFFIDCSGFKGLLVNETLGLSFCSYKDSLFNDAAVAIPTNLASHTEVPAQTVSRALTNGWSWKIPLTSRWGNGYVFSSDFISPDSAETELRAHLGLLDADIEARHLKMRVGRLNQHWHKNCLAVGLSQGFIEPLEATALMLIQFTIERFISSFEDESKSDELTKADYNKDLNKTFDGVRDYIVAHYKLNSRNDSTYWQACREDARTPDSLANLITIWDNGGDFESALKQQQDSLIYLRPSWYCLFSGMGRFPSTSIEDTQSVPAYRAKEYCQKIAKKYFISHQTQLEKIYQN

SEQ ID NO: 83016 - protein, 509 aa, Colwellia sp.
  misc_feature (1)..(509): tr|A0A1D8S0V6|A0A1D8S0V6_9GAMM Tryptophan halogenase OS =Colwellia sp. PAMC 20917 OX=1816218 GN=A3Q34_05240 PE= 4 SV=1
MVILGGGTAGWMTANLMVEKWQNHPVSITLIESPSLGVIGVGEGSTPQLKSFFDKIGVTEQEWMPQCNATYKNGILFNGWSTRVGFESYFHPFTSLIDAHTAPAFVYNTQYRRKGFNVDCHPDRFFLSAQLAKQKKSAVGEYNFPFDIGYGYHFDAILLGKFLGKVAQKKGVKHILAQVDEVNVNDAGDIQSLTLDNGEVIAGDFFVDCSGFNSLLLQKTLKVPFISFKDNLFNDSAVTISVARDENAQQGLNSQTIATAMKCGWAWDIPLTNRTGNGYVYSSKHCTGEQAELELREKLSLVDEAIDVRHLKMKVGRVKQHWHKNCVAIGLSQGFIEPLEATALHFVQESIEGFIDDFSLGEYSNIYQDRFNEKMNHRFDGIRDYIVAHYRLSSRDDTEYWRKNSINPNISNNLKKIVQCWVAGDDLNKALIQPGMVSFYPPVSWHAMLAGYGIFPELSQDKRLAEKFGEQALDAAHKYDLAHIDQFIQRCSVNFADHQQFINDKLINK

SEQ ID NO: 83017 - protein, 517 aa, Colwellia sp.
  misc_feature (1)..(517): tr|A0A1D8RXD3|A0A1D8RXD3_9GAMM Tryptophan halogenase OS =Colwellia sp. PAMC 20917 OX=1816218 GN=A3Q34_13475 PE= 4 SV=1
MDDGMINQVVIVGGGTAGWLTAAKLAKHLGSNKSDAVQVTLIESPDIPTVGVGEGTWPTMRKTLADLDIEEHDFINYCNASFKQATKFVNWRTPAKNGQDSVYYHLFSSVAHADEFNLSPYWSLSDQQIDYANFVSPQALICEGGLAPKTIANRGYDGLLNYAYHLDAGKFADFLKKISCERFGVKHLAANVLSANLNALGEISSIETKELGRIEGDFFVDCTGGRCLLLGEALGVGFTPINDVLFTDNAIAIQVPYQNEEDAISSSTISTAHSAGWTWDIGLSNRRGTGYVYCSDFVSHDQAEQTLRDYIGPQAEQLSARRLKISSGYRNKFWEKNCVAVGMSAAFVEPLEASAIFLIEASANMLCELFPRNKRQLPAVEKTFNDSFHYRWKRTIDFIKLHYFLSQRQESFWLENKSLNSVPESLLEQLDNWKHRPVSKYDFQNTFEPFIQDSYQYVLHGMGYVQALEYNASTFNEHRMLESILKKNAKLKQQLQNNLPTNRDLLNKVRAFGFQKI

SEQ ID NO: 83018 - protein, 531 aa, Streptomyces caatingaensis
  misc_feature (1)..(531): tr|A0A0K9XBN8|A0A0K9XBN8_9ACTN Tryptophan halogenase OS =Streptomyces caatingaensis OX=1678637 GN=AC230_20560 P E=4 SV=1
MTDDNRIKNIVVLGGGTAGWMSAAYLGRALGDTVRITVLEAPAIPRIGVGEATIANLQKVFFDFLGLREEDWMPECNASFKMGIRFVNWRTPGAGEATGRPLGGGKDHFDHLFGLLPEHDDLPLSHYWTYKRLNGLTDEPFDRACYPQPAVFDRKLSPRFLDGTKWASYAWHFDAQLVADFLRRFATQKQGAIHVEDTFVGADIDQRGHITAIRTEGGRTLEADLFVDCSGFRSLLVNQVMKEPFLDMSDHLLNDRAVATQVPHDDEADGVEPFTSAIAMSSGWTWKIPMLGRFGTGYVYSSRFTTQDEATEEFCRMWGLDPATQPLNHVRFRVGRNRRAWVKNCVGIGLSSCFLEPLESTGIYFVYAALYQLVKNFPDKRFDPVLVNRFNSEIETMFDDTRDFIQAHFSFAPRDDTPFWRACKELELAEGFKEKVALYKSGLGVNLPVTDESSYYGNFEAEFRNFWSNANYYCVFAGLDYLPDHVMPALAHRPESIATAESAFAEVAKRREELLRTLPSTYDYLRRLHRK

SEQ ID NO: 83019 - protein, 423 aa, Streptomyces sp.
  misc_feature (1)..(423): tr|A0A2W2MHE9|A0A2W2MHE9_9ACTN Tryptophan halogenase OS =Streptomyces sp. NTH33 OX=1735453 GN=C1I97_00950 PE=4 SV=1
MSSSLHGVPDEYDVIVIGGGPAGSTTAGLLAKRGHRVLVLERERFPRYHIGESLIPAFMRPMDELGITERMDARGFERKYGGTLVWGNAQVPWNFSFVEGGSHEYAYHTRRADMDSLILDRARELGAFIIEEATVKEPIETDGRVTGVRYTLRGTDGSHEARAKLVIDASGQARLLSRRYADITWHEELRNVAVWTYFDNCERLGGDEYTNILIEGLDEGWFWAIPIDKGTVSVGYVTRSEDASKDGKSLEDLFKGEVEKSTKLKKMLAGANQSAGWRTARDWSYTSQSFNGNGWVCVGDSAAFVDPLFSTGVALATLAGSTLARIVDQIIQHPEIEEQALKRYVTAYRAFFDEIRDFVERFYDRTKYKEFYHSLATEMVDPDRERTPSSNFVRLISGLSGKHPMLTLQIDDLIEQSAEAAES

SEQ ID NO: 83020 - protein, 520 aa, Altererythrobacter epoxidivorans
  misc_feature (1)..(520): tr|A0A0M3TAV4|A0A0M3TAV4_9SPHN Tryptophan halogenase, p utative OS=Altererythrobacter epoxidivorans OX=361183 G N=AMC99_02458 PE=4 SV=1
MSGTMSASVARTVILGGGTAGWLAACFLAVRRPELSITLVEAPDIPTIGVGEGTWPTMRGTLEAIGIEESEFLARCDASFKQGSRFDGWVDGEPDDRYYHPFSAPPPGDMHGLVAAWQQAAQDRSFAHAMTPQAQLCDRDLAPRQTGMPGYAAAANYGYHLDAGKFAALLAEHGEQRLGIRRIAARVDEIERAAGGDIAAVVTSDGERIEGDFFIDCSGHAGVLIGGALGSEWVDRSDVSFNDRALAVQVPVAPGSAVASQTVGTAHEAGWLWDIALPTRRGIGCVYSSRFIDDDRADAILRRYVAAHVPHIDVEGLQPRKLSFRTGHRRDFWRRNCVAIGLSAGFIEPLEASAIVLIELSVRALADNFPASRRAMDIHAGRFNDLFRYRWDRIVDFLKLHYVLSRREEPYWQAQRSAESIPPRLAEQIELWRDQPPSSWDFPQVDEIFSAASQQFVLYGMGFPVPPSATNPAPEAALARIAEVRDQTRALSAALPTNRAYLDKVAASRTDAAMQKEQTA

SEQ ID NO: 83021 - protein, 543 aa, Nostoc punctiforme
  misc_feature (1)..(543): tr|A0A367R6Y4|A0A367R6Y4_NOSPU Tryptophan halogenase OS =Nostoc punctiforme NIES-2108 OX=1356359 GN=A6769_30775 PE=4 SV=1
MAQNIKNIVIVGGGSAGWMTAAYLSKALDKNVQITLIESSNITTVGVGEATFSTIKLFFDFLGLQEHEWMPKCNATYKMAIKFVNWNSQGQYFYHPFQRYETVDGFDISEWWLKTKRHEAPFDYSCFMIPLLCDLKRSPRHFNGEVFDNKAQDLFTQEITTQKNVLADLKAQYPYAYHFDANLLARFLKDYGKQRGVRQIVDDVVDVNLGEDGSIDYVKTKEHGTIKGDLFIDCTGFRGLLINKALGEPFISFSESLLCDSAIAMQIPTDIKKNGINPYTTATALSSGWVWNIPLYGRVGTGYVYSSAFISKEEAETEFRQHLGEAANDCRASHIKMRIGRNRNSWVKNCVAIGLSSGFVEPLESTGIFFIQHGIEELVNNLPDTSFNEDVIKNYNKTVANCIDGVRDFLTLHYCASNRADTEFWKASKRDIVISEELQERLRLWKTRLPNNKSINPNYHGFESYSYSVMLLGLNYLPENNLPVLNHIEDQKAIATFDAIKERTDYLSATLPSQYEYLTYVIKSQEQSEYLSENDLVRSLVTT

SEQ ID NO: 83022 - protein, 497 aa, Mycobacteroides sp.
  misc_feature (1)..(497): tr|A0A0R3EW96|A0A0R3EW96_9MYCO Tryptophan halogenase OS =Mycobacteroides sp. H092 OX=1720573 GN=AOT91_20215 PE= 4 SV=1
MTASYLKVAFGDRIAVTVVESARIGAIGVGEATFSTIRHFFEYLGLEEHEWMPSCCATYKLGIRFQDWRKPGHHFYHPFERQRVVDGFGLTDWWLDNPRSDSFDRDCFLIGTLCDNDKSPRRLDGSLFMGTDGENTAYRTTLSEQDTQFPYAYHFDASLLADFLRDFAVRRGTRHVVDDVVDVLQDDRGWISQVRTRAHGSIGGDLFIDCTGFSGLLLGRAMGEPFESYQGSLLNDRAVALRVPTDQDRGHLPPYTTATAQDAGWIWSIPLFDRIGTGYVYAEDYCSPEDAERALRDFVGPEAEGLEASHIRMRIGRSRRSWVGNCVAIGLASGFVEPLESTGIFFIQHGIEQLVKHFPDANWEESLRDSYNRVINRCMDGVREFLVLHYYLAARVDTQYWRDSKSVQLPAALAERIEHWRSKLPDTGSVYPHYHGFEPYSYVCMFVGLGGIPARPSTVVRYLDATRAQREFDLLAQQASRLRHSLPTHREYLAQMY

SEQ ID NO: 83023 - protein, 501 aa, Massilia yuzhufengensis
  misc_feature (1)..(501): tr|A0A1I1DP91|A0A1I1DP91_9BURK Tryptophan halogenase OS =Massilia yuzhufengensis OX=1164594 GN=SAMN05216204_101 292 PE=4 SV=1
METKGPNGMGRPVRRVVIAGGGTAGWMAAACISKVLGKQLDIRLVESDEIGTVGVGEATIPTLLNFHNLLEINEQEFMAETKATFKLGISFENWRNVNEDYIHSFGLTGTDHWTAGFQHFWHKGRERGLAGDYGDYCLELRAAQENKFAHLPRNGMNYAYHLDASAYARYLRKFSERLGVQRIEGKIVDVTTSALTGHIRSITLDSGADIEGDLFIDCTGFRALLIGEAMKVKYQDWSQWLFNDCAAALQTASAGDAVPLTRSIAHAFGWQWRIPLQHRVGNGIVFSSRYVEQDEAIAALQANIVGEPLMKPRVIKFTPGQREQVWKGNCVAIGLSSGFLEPIESTSIHLIQRGIVRLMQMFPANGIAQTDVEEYNRQAATEIEHIRDFIILHYKVNNRLDPYWRDAREMQVPVSLQHRIDLFRQTGRVFRVPNELFAENSWIQVMLGQGIMPLQHHQTADLMGDAELSHFLGAIKGQVDKTVAQLPAHQAYVERYCSAPK

SEQ ID NO: 83024 - protein, 497 aa, Streptomyces sp.
  misc_feature (1)..(497): tr|A0A2W2N5T4|A0A2W2N5T4_9ACTN Tryptophan halogenase OS =Streptomyces sp. NTH33 OX=1735453 GN=C1I97_07035 PE=4 SV=1
MSNTEAFDVVVVGGGPGGSTLAALVAKRGHSVLVLEKEFFPRYQIGESLLPSTIHGVCRLTGVADELAKAGFTIKRGGTFRWGANPEPWTFAFSVSPRMAGPTSTAYQVERSKFDKILLGNARRVGAVVREGCAVTDVVEDGDRVTGVRYTDDQGVRHEVSARFVVDASGNKSRLNQRIGGRREYSDFFRNLALFGYFENGKRLPEPNRGNILCAAFESGWFWYIPLTDTLTSVGAVVRREMAEKVQGDPEKALQALIDECPIISDFLASARRVTEGQYGQIRVRKDYSYHHTAFWRPGMMLVGDAACFVDPVFSSGVHLATYSALLAARSINSTLAGAVEEEAAMKEFEARYRREYGVFYEFLMSFYDMHQVENSYFWQAKKVTRNSRPELESFVDLVGGVSSGESALSDADAVARRLHAQTEEFASAVESIADGKNDNWAPLLGSSVVREAMAESSKVQMHAVLGEDAEEETPLFEGGLIPSPDGLSWATPAGRD

SEQ ID NO: 83025 - protein, 467 aa, Sphingomonas sp.
  misc_feature (1)..(467): tr|A0A2U0USF8|A0A2U0USF8_9SPHN Tryptophan halogenase OS =Sphingomonas sp. CF311 OX=2135485 GN=C7501_3655 PE=4 S V=1
MIRRIGIVGGGVAGWMTALALTRALPGVRIDLVETAGPDWSLGPFGPAEASLPDFPWWLADHGVDENQLLRAAHGSFALGTAFSGWAGQEADWFLPFGTIGAPLGTTAFHQLAARLRAGGQQLRIADFSLAAIAAASGRFARPSDDPRSVLSSYGYGLHLDRAGLAATLRAASGLEPIGSFRAFAGDMVTLQDGTSIAADLWLDCSGPAALLAGYGGWESWAEWLPCDRVVESWNPAEGVPPPYGHAGAFEAGWQRTLPLVGGQGGALFYASAHLPAQPGAIPLVQGRRSQAWTGKVIALGAAAMLLEPLHGWNLALLQNALARLLALLPAAPNGPEPAEYNRLTAGEADRVRDFAILHYKTNGRTGEPLWDAARAMPVLEPLRHKLDLYESRGRVPLYDEELFEADDWIAVLDGQGIRPRRHDALADAIPEPALAQHAGRIREVILDAVRTMPHHGTTLRAEGLIA

SEQ ID NO: 83026 - protein, 493 aa, Planomonospora sphaerica
  misc_feature (1)..(493): tr|A0A171CRR3|A0A171CRR3_9ACTN Tryptophan halogenase OS =Planomonospora sphaerica OX=161355 GN=PS9374_02769 PE= 4 SV=1
MSSPQEYDVVVVGGGPAGSTVSTLVGKRGHRVLLLEKEGFPRYQIGESLLPATVHGIAHLLGVDDELRRAGFTVKRGGTFKWGSNPKPWTFEFAVSRRMAGPTSYAYQVERMKFDSILLDNARKNGVEVRENSPVTGVVEEDGRVRGVRYRDLDGRTAEVRARYVVDASGNTSRLYGRAGAERRYSPFFRNLALFAYYEGGGRLPAPYEGNILSVAFDHGWFWYIPLSPTLTSVGAVVGRESAQLVQGDPEAAMRRFVDACPLIREKLAGATRVTEGPYGRFRVRKDWSYCNTRFWGPGMVLVGDSACFVDPVFSSGVHLATYGGLLAARSVNSCLAGTVDEESAFAEFERRYRREYGLFHEFLIGFYDMHQSEDSYFWRARKVSDTAPTDVEAFVELVGGVASEEIAGGVMARARLAATSRELAKTVAAFEEEPVDSLGAASGPVLSRLLEQGAALQGRALLGERAGEGGPLEPGGLRASADGLMWVRHEPA

SEQ ID NO: 83027 - protein, 518 aa, Pelomonas saccharophila
  misc_feature (1)..(518): tr|A0A4R3VG95|A0A4R3VG95_PELSC Flavin-dependent dehydro genase OS=Pelomonas saccharophila OX=304 GN=EV671_10012 23 PE=4 SV=1
MSDIQSIVIVGGGTAGWLAAAFLQRTLSATRPTPLPITLIESPQIGTIGVGEATVPTLRATMQALGLPESTLFTAADATLKNGIRFNGWRKGGTAAEDSYDHPFDMPLPFNGYPATVHWLNLMQRGMLQPPMAEACTVQTRLYDGNQSPKLMHSPDYQAPVSYGYHLDAVKLATLLQQTAIERGVQHVQGNVAQVHRGPAGIESVELDDGRRFAASFFVDCSGFQSLLLQKTLDVPWESFSDWLPCDRAVAFPVAYADENAPLRSYTTSTAQDAGWTWEIDLQSRSGTGYVYASRFCSDDEAVATLQRHNAGRTALAEPRLLRMRVGHAARAWEQNCLALGLAGGFIEPLESTGIYLIEWVLQLFVDHIAPAGDSTVCRDRLNRAVGDVYEELRDFIVAHYALSQRRDTPFWRTCTDPASMPPRLAELLQLWDAKLPTPTDLDKRLSLFGPANWTYILAGMHRLPSRGIGLAAHIAPEVSLKAMEHVRSVRQMASQQSPTLRDFVRKLRGAVDHKPAR

SEQ ID NO: 83028 - protein, 506 aa, Pelomonas saccharophila
  misc_feature (1)..(506): tr|A0A4R3VEZ4|A0A4R3VEZ4_PELSC Tryptophan halogenase OS =Pelomonas saccharophila OX=304 GN=EV671_100411 PE=4 SV =1
MTDMHDTASPRALRRIVIVGGGSAGWMAAASLATALASRRCAIMLIESDEIGTVGVGEATIPPIRTFNQSLGLDEAEFMRRTQGSFKLGIQFVNWGRQGQRYFHPFGPHGVAFDYAPLHQHWLKSRHEGGDTSIDEHSMAWAAARLNRFAPPVGDPRDVRSTYDYAYHFDAGLYARFLREMAEPRGVQRVEGRIAAVQLHPDSGHVDRLTLADGREIEGDFFIDCSGFRGLLIEEALHTGYEDWSHWLPCDRALAVPCDRGPDFTPYTRSTAHAAGWQWRIPLQHRTGNGHVYCSRFISDDEAAATLLAHLDAPAQSVPRPLRFTAGRRRQFWNRNVLALGLASGFMEPLESTSLHLVQSGISRLLALFPDRDFDPLTIAEYNRIGIQEWERIRDFLILHYKLTERDDGELWRYCAAMPVPDALQWKIDHFRRYGRLVSEGNDLFGNQSWLAAHIGQFNWPQRHDPLVDLRGIDGSAMLRRQREAMAQVAQGMPTHEDFVARHCAA

SEQ ID NO: 83029 - protein, 534 aa, Streptomyces sp.
  misc_feature (1)..(534): tr|A0A2S4XMT5|A0A2S4XMT5_9ACTN Tryptophan halogenase OS =Streptomyces sp. Ru73 OX=2080748 GN=C3486_25675 PE=4 S V=1
MTSTDTRLKKVVILGGGTAGWMTAAYLGKALQGTVDITVLEAPAIPRIGVGEATVPNLQRAFFDYLGIAEDEWMRECNASFKMAVRFVNWRTDGQGEAAARELPDGRPDHFYHPFGLLPDYDQTPLSHYWYLRKHEGRTTEPFDYACFREPPVMDAMKAPRWLDGRPATRYAWHFDAQRVADFLRRFATEKQGVHHVQDEMTRVEQDERGYVTALHTKAGRVLDADLFVDCSGFRGLLINKAMDEPFLDMSDHLLCDSAVATAVPHDDEENGVEPYTSAIAMSSGWAWKIPMLGRFGTGYVYSSKFTERDEATAELSRMWGLDPEETEFNHIRFRVGRNRRAWVKNVVGIGLSSCFVEPLESTGIYFITAAIYQLAKHFPDKTFNQGLIDSFNHEIEVMFDDTRDFIQAHFYYAPRNDTPFWQANKELKLADNIKKKIAAYKAGLPINSPITDESTYYGNFEAEFRNFWTNGSYYCIFAGLGLEPDAPLPALAHKPESVAGAEPLFETVKRQQQNLLETLPSTYDYLRRLHGQA

SEQ ID NO: 83030 - protein, 508 aa, Pelomonas saccharophila
  misc_feature (1)..(508): tr|A0A4R3UZJ7|A0A4R3UZJ7_PELSC Tryptophan halogenase OS =Pelomonas saccharophila OX=304 GN=EV671_10134 PE=4 SV= 1
MSNSAIRRIVIVGGGTAGWMTAAPLAQRFEKAGAGRCEIVLVESPDIGSIGVGEATLPPIRAYNRTLGLDDADFVRRTQGSFKLGIEFRDWGRLGRRFFHGFGDFGPAIDNRSPWQHWLRLSRIVDGLPGYEDWSMATVMALRNRFTPPVDGAPSAANAYSFAYHFDAGLYAAYLREYALARGAQRVEGTIVDVELRPEDGFVAAVRLADGRRVDGDLFIDCSGFRALLIAGAMQSPFEDWSALLPCNSALAVPSERVAPLTPYTMSTAKPAGWQWRIPLQHRTGNGHVYCSGFIGDDEAAATLLAGLDSRALDTPRQLRFTTGRRRQGWVKNVVAIGLSGGFLEPLESTSIQLIMDGVGRLIQLFPDKRFKPHLAAEFNRRMAGQYESIRDFIVLHYKLTERRDSELWRYCAAMPIPDSLAHQIELFRGAARVAIFDPEGFAEPSWVSLFLGLGLQPESHDPFVDHIDAKALLQHFTRLRQAIAQTAAGVPDHGDYIERHVKAPPQP

SEQ ID NO: 83031 - protein, 489 aa, Asticcacaulis excentricus
  misc_feature (1)..(489): tr|A0A3G9G4H9|A0A3G9G4H9_9CAUL Tryptophan halogenase OS =Asticcacaulis excentricus OX=78587 GN=EM6_2269 PE=4 SV =1
MRTVVIVGRDEALWLTAAVLQRTFARSDLSFTAVELPSLLRPGEVLPTLGSQAGFHARLGLEEAVLMRALGATFTLGQQYVGWAKTAPPVFVGYSSTGVALHNVPFHHLWLRARASGMNVAFEDFAINAACAKQGRLLTPDADLSGFADADRGFHLPAAPYAEMLRQVAIKRGVRHLPAAHVSPVVKGPEMTAVVLSDGQTVEGDLFIDTTGSDARLLSQMPETGFSSWRQWLPFDRLLTTYAAPATPLPAYAQITAFRSGWAGLFPLRDYTAVQQAYIRDELSDDEAFEAAAMVVKMSLHPQATVTPFEAGRRPAWSGNVIGLGEAAAVLDPLGTARMPALLLGLSHLTALFPLDTSGLESAVYNRTVGQAYDRLRDAQIWLYSLNKRRDQPVWDHLRSVSLPPELAYKREVFAACGHLPVYDDETFDEAWWIAAGLGHGLFPATHDVRADQLAEPELIRHFQTALGYVRKQVEAMPTPDAVSRAATV

SEQ ID NO: 83032 - protein, 502 aa, Brevundimonas vesicularis
  misc_feature (1)..(502): tr|A0A1Z3U4H2|A0A1Z3U4H2_BREVE Tryptophan 7-halogenase OS=Brevundimonas vesicularis OX=41276 GN=CEP68_00885 PE =4 SV=1
MSDGSIINRIVIVGGGTAGWMAAAALAHALEGAGKTVALIESEAIGIIGVGEATIPEILKFNARLGIDEADFLRETKATFKLGIEFDGWRREGERYFHPFGAFGLDMEGIAFHHFWLKACAEGGSEPLETYSMAWQAARRGRFVHPQGGPQSPLSSLGYAYHFDAALYAGFLRRFAEGLGVVRREGRVVEVQQAADGDITGVRLNDGRVVEGDFFIDCTGFVGLLIEQALKSGYEDWSNWLPCDSAVAVPCVREEALSPYTRSTAREAGWQWRIPLQHRVGNGYVYSSAHISHQEAEDALMSRLEGTALAEPRRLRFATGRRKDCWKRNCVAVGLSSGFLEPLESTSIHLIQSAITKLITLFPSHKNSEGLRREFNALMEEEFFTVRDFLILHYKVNQRAGPFWSQVRDMPIPDRLAAKIALFEETGRIVRRDHDIFSESSWLAVAVGQGLTPHGRHPISDVINHDANLGRLSAIRDSIWRTADALPTHEGILTTTMNRKAF

SEQ ID NO: 83033 - protein, 506 aa, Pseudomonas nitroreducens
  misc_feature (1)..(506): tr|A0A239KU00|A0A239KU00_9PSED Tryptophan halogenase OS =Pseudomonas nitroreducens OX=46680 GN=SAMN05216209_389 6 PE=4 SV=1
MMLNLSNCRRVAVVGGGSAGWFAALELRKLFLHKVEVVLVEAESLGIIGAGEGSLPNFNRALEHYGLDRTEFMRETHSTHKLGLALEGWRSGAPDDIFLHQFSYSHDGVDLTSWVEPNGSYPLASILINQGYQLQHYPATWKMWQEGASQATAEAFLQSLPAKTPMAYHFDARKLASYLRDIAIKRGVQHINATVESVRLDEKRHVTALVLPDREIEVDFVIDASGLHRLIIGKTLNASWQSYADHLLLNRALPFFIPSQTEHPPLVTRAIAMKHGWMWCIPTLERLGVGYVYCDRYTDKEAAVKEVQDYWGMDIEPANDFAFEPGHYDQVWLGNVMAVGLSSGFVEPLEATSIGQTLDQLARFGELIFACDGIIPQQLIDQFNHEIGRYWDGIRDFLFLHYDTPRNDTAFWRAASNAAAPSTYKELKRTLAHRPPRLMDMEQYQGGPFRMFGVPNWMSVAAPLGILSREATALDLRSLSQEKRQRLGSFLAKVESRMKAESGASN

SEQ ID NO: 83034 - protein, 483 aa, Sphingomonas sp.
  misc_feature (1)..(483): tr|A0A2U0USH1|A0A2U0USH1_9SPHN Tryptophan halogenase OS =Sphingomonas sp. CF311 OX=2135485 GN=C7501_3654 PE=4 S V=1
MLIGRVLVVGGGTAGWMAAAALAHKFAGTGLAITLVESAEIGTVGVGEATIPHIRHFNATLGIDEAEFLAATRGTYKLGIEFVNWGRIGDSYIHPFAEFGEALGGVPFHQQWLATPEAGAFEDYSLPIQAARRGRFRRPEGDPYNYAYQFDAGLYARFLRSYSEARGVVRREGKVVDVALDGDSGFVRSVTLESGEAIEADLFLDCSGFRGLLIEQALKTGYEEWTHWLPCDRAIAIPCANQGPLPPLTRATAQDAGWIWRIPLQHRTGNGHVYSSGFTSDEAALETLLAQLPAAPMAEPNRLRFVTGKRRRQWVGNTVAIGLASGFLEPLESTSIHLIQVAIGRLLDLFPTQAWDPIDAAEFNRLMALDYERVRDFLILHYHATEREDSAFWRHCRSMALPDSLEHKLALFRERGVVVQYRDGTFLEPSWLAVYLGQHVTPRHPDPRAGGEGIAAALAAMRAEIVAVAGAMPSHEAALGMAA

SEQ ID NO: 83035 - protein, 505 aa, Asticcacaulis excentricus
  misc_feature (1)..(505): tr|A0A3G9G4U9|A0A3G9G4U9_9CAUL Tryptophan halogenase OS =Asticcacaulis excentricus OX=78587 GN=EM6_2268 PE=4 SV =1
MTPIRNITILGGGTSGWMTAAVLSRAFTPDACTIRLIESEEIGIVGVGEATLPQVRDFNTWLGLDEAEFMRATNATFKLGIEFRGWGTSGSYHHPFGVHGQSAGGIPFHQLWLKARTFMDPGSIEDYAFPIRLARENRFDFPVEDPKSIRSAYAYAYHFDAVLYARYLRQWCEARGVQRIEGQVTGVDQNAETGFVERLTLASGESVGGELFIDCSGFRAVIAGQALNLGWEDWTPWLPCDRALAVPCERTDDLTPYTRATAREAGWTWRIPLQHRTGNGYVFSSRFTTEDRAREVLLGALDAPAQAEPRLLRFQAGRRTASWHKNVIALGLASGFLEPLESTSIYLSQIALTFLMRLMPDTRFDPALAREFNRLIDIEYERVRDFLILHYHANSASQGPLWDYVRSMPVPDSLKEKMALFRHRGHVQQYKDGLFSPASWIAVFMGQDVMPQAYDRQADGLSEEALTGYLKDLKRKIDSNLAVLPSHAEFVAAHCYNPNSGISHD

SEQ ID NO: 83036 - protein, 491 aa, Pelomonas saccharophila
  misc_feature (1)..(491): tr|A0A4R3VJK4|A0A4R3VJK4_PELSC Tryptophan halogenase OS =Pelomonas saccharophila OX=304 GN=EV671_1002288 PE=4 S V=1
MAQKYERIVVVGGGSAGWMTATALATEFKGRIGIELVESEDIGIIGVGEATFPSIREYNRLVGIDEAEFLRATNGTYKLGIRFHDWLELGRDYFHTFGHFGNLFGSQTLWAQHRRMGLAEPLGQQCVPTVMAMQGRFVLPSEQAQFKYAYHFDAVQYAAFLRQLAIQRGVRHTQGRIVEVARRADGGVAALQLDDGRRVEGDLFIDCSGFRSLLLGDALQEPFVDFSHWLPVDGAWACPCERSGEEIKPYTEATALEGGWAWRIPLQNRTGHGHVFSSRFIDVDRAREQLLARLDGKPLAEPRLLRFTTGHRQRFWVHNVVSIGLSSGFLEPLESTSIYLIQDGIARLMAALTTGRPLDENDLALFNDGAARRFARIRDFIILHYCLTRRRDSELWRHVATMELPETLAFRLALWRGYGVLHEYDEEGFDATSWLAIHAGMDHWPERQDPVIAEIPAERALQALKGRSKAIAASVERMPLHRSTLRQVLGQ

SEQ ID NO: 83037 - protein, 504 aa, Shewanella violacea
  misc_feature (1)..(504): tr|D4ZIJ0|D4ZIJ0_SHEVD Tryptophan halogenase, putative OS=Shewanella violacea (strain JCM 10179 / CIP 106290 / LMG 19151 / DSS12) OX=637905 GN=SVI_1518 PE=4 SV=1
MMNSMTNSNKKVQKIVIAGGGSAGWMTAAALSKLLGKNLDICLIESEEIGRIGVGEATIPPIRVFNQLLGIDEQDFMRSVQGTFKLGIEFTNWGALGDDYIHSFGTTGKECWAAEFQHFWLKGKQQGLTAEFGDYCVELQAARAGKFFSSKDSSLNYAYHIDAGLYAKYLHDLSIKHGVQHIEGIIDDVSIDAQNGHITSVTLKDGQLIKGDLFIDCTGFSARLIEGALNTGFESYSHLLPCDAAVAVQTEKSAEPRPYTQSMARDSGWQWRIPLQHRVGNGLVYCSRFISDKDAIASLMNNLESPAITEPRVFKYKTGRRLKGWNKNCVAIGLASGFVEPVESTALHMIMSSILRLMKLFPHDAISHANINEYNKQTKEEMERIRDFIILHYKATSRDDTAFWRYCQNMEIPATLSHRIELFKDTACVCLTETELFRIDSWTQVMLGQGIIPKHYHQIVDNMSDTELKRFLAGLKQMVDKQVTQMPYHQQFIDQYSKSVPITE

SEQ ID NO: 83038 - protein, 501 aa, Massilia sp.
  misc_feature (1)..(501): tr|A0A085FY88|A0A085FY88_9BURK Tryptophan halogenase OS =Massilia sp. LC238 OX=1502852 GN=FG94_00251 PE=4 SV=1
MEQGLNGIGKPIRRVVIAGGGTAGWMAAACISKVLGKRLDIKLVESDEIGTVGVGEATIPTLLNFHNLLEINEQEFMAETKATFKLGISFENWRNVNEDYIHSFGLTGTDHWTAGFQHFWHKGRERGLAGDYGDYCLELRASQENKFAHLPRGGMNYAYHLDASAYARYLRKFSERFGVQRIEGKIVDVTTSALSGQVRSITLDSGADIEGDLFIDCTGFRALLIGQAMGVEYEDWSEWLFNDSAAALQTSSVRDAIPLTRSIAHPFGWQWRIPLQHRVGNGIVFSSRYVEEGAAIEALLGNIEGEALMKPRVIRFKPGQRRQIWKNNVVAVGLSSGFLEPIESTSIHLIQRSIIRLMQMFPTSGIVQSDVDEFNRQAWEEVSQIRDFIILHYKVNNRIDAPYWTDARNMEVPKSLQHRIDLFRETGRVFRISNELFAENSWIQVMLGQGIMPYRHHQSADLMGDEELSHFLGSIKGQIDRTVAGLPSHQSYVERYCSTPK

SEQ ID NO: 83039 - protein, 500 aa, Shewanella baltica
  misc_feature (1)..(500): tr|A0A165IYQ9|A0A165IYQ9_9GAMM Tryptophan halogenase OS =Shewanella baltica OX=62322 GN=A1L58_04350 PE=4 SV=1
MNKIKDIVIVGGGSSGWMTAAMLARLFKSTLNITLIESEDIGTVGVGEATIPPLQIFNNVLGISEADFINATQATFKLGIQFENWGKPDEAYMHAFGNIGKDIGFTQFHHYWLSTSPTEVNSFWDYSVNYQAAKHNKFQVLQQIPNSPLAGLTHAYHFDAALYAQFLRRFSEQLEVKRIEGQITEVELTPNGDIESVTLGSGQTIKADFFIDCSGFAALLIKKALKVGFDSYQHWLPCDSAYALPCEKTPAITPYTRSIAHDAGWQWRIPLQHRTGNGLVYCSRYISDDAAKQLLLSNLDGKPLAEPKKINFTTGRRIKQWHKNCVAIGLSSGFLEPLESTSLHLVQSAIIRLSKLFPHQGIAQANVDEFNRQSQLEFEQIRDFIILHYHLNQREDAQENGFWHQCRSMLLPESLQQKIALFRATGTVFRHQDELFTEAAWIQVMLGQGIRPRDFNPLAATIQPQALSEFLRNMRTIIDNTVTKLPTHDQYLAHLSTHKA

SEQ ID NO: 83040 - protein, 504 aa, Pelomonas saccharophila
  misc_feature (1)..(504): tr|A0A4R3VAA0|A0A4R3VAA0_PELSC Tryptophan halogenase OS =Pelomonas saccharophila OX=304 GN=EV671_1008154 PE=4 S V=1
MEANKVKQIVIVGGGTAGWMTAAALAKVLKGQYPIRLVESDEIGTVGVGEATIPMVQVFNRMLELDEDEFMRRTQASFKLGIEFVNWGKLGDRYIHGFGVIGQDNWTVDFHQYWLKQYMAGKAKELVHYSINTAACLQNKFVRAQPDMPNSPLSQIAHAFHFDASLYAKFLREFSEARGVERLEGKIVEVRCREGDGHVEALQLQSGQWIEGDLFVDCSGFRALLIEGALKTGYVDWSHWLPCDRALAVPCVSASAEITPYTRATARQSGWQWRIPLQHRVGNGHVYCSKYISDDEAASVLLSNLDGEPLASPRPIKFLTGKRSKTWNKNVVSIGLSSGFLEPLESTSIHLIQMGIGHLLTYFPSAGFDEADRAEYNRIMDQEYEWVRDFIILHYKATERTDSPFWNYCRTMDVPESLAQRMRLFESHGRVYREGNELFTKISWLQVLHGQRIRPKSYHPLVDLLPEAEIQSYLEEVEQVITACVEVMPSHAKFVAENCSSVKM

SEQ ID NO: 83041 - protein, 492 aa, Parasphingopyxis lamellibrachiae
  misc_feature (1)..(492): tr|A0A3D9FEA3|A0A3D9FEA3_9SPHN Tryptophan halogenase OS =Parasphingopyxis lamellibrachiae OX=680125 GN=DFR46_09 00 PE=4 SV=1
MSGEKGPLTSIAVFGQGDALWPVATLLEKALPEYIALILVEDESATIPSGAATLACDNPFFELAGLEARELVTGGNATLGLGTDCLGWQGEGSRFFVAPSGTLPAINDIALHHIMLRAAMMHEGPERLAHLFQPLRFAARVALAGKFADRSDDPGSPLRMLGPTVQFDRADLGVQLKTRFPKGSAEILAGKPVDAAMKPDGDILSIGLDDGREIAADLFVDVSGAISLLERNGEQPLAHSLADILPFDWAIRSVDASNPPVGHLHTVARAKPGGLVIETPLRDGVACEMLFSSAEIEAEGASFPFEPRYCETPWTANLVRLGSAAAQLGPCLSADTMLLLEQARHLTRALPASRAMEIEATEFNRNQLGSARQICDFLALPFVLNGRKEPLWASIREARRPEQLQIRLEQFLSRGRFVEFDHELFEQQSWIETMIGFGATPERYDPRTAYLDMKRLPPILRKMIDDFDRAIEEMPDHADYMRGLRADVRKSQ

SEQ ID NO: 83042 - protein, 503 aa, Massilia sp.
  misc_feature (1)..(503): tr|A0A085F262|A0A085F262_9BURK Tryptophan halogenase OS =Massilia sp. LC238 OX=1502852 GN=FG94_03640 PE=4 SV=1
MHTEPIKDIVIVGGGTAGWMTAAALSTVLNGRYNIRLVESDEIGIVGVGEATIPMIQRFNRVLGIDENEFMRETQGSFKLGIEFVNWGKLGDRYMHGFGRLGQDLATLPFDQYWNKMRRAGKAAPLEEYSITRMASKANKFMPPRFDVPNSPLRDIGYAYHFDASLYAKFLRKLSESRGVVRIEGKITRATLREPDGHVDAVELENGTRVEGELFIDCSGFRGLLIEQTLQTGYEDWTHWLPADRALAVPCESAPVITPYTRSTAHKSGWQWRIPLQHRTGNGHVYCSRFISDDEAAATLLANLDGRALAEPRLIRFQTGMRKLAWNRNVVALGLASGFLEPLESTSIHLIQSGIQRLLDFFPDRGWSAIDRDEYNRQSRFDYERIRDFIILHYHLNQRTDSAYWKECANMAIPDTLRHKMAMYRSHGRVVRVDNELFSEVGWIQVFEGQNMPIDGYHPLADAQSDQDIAEYLESVREVIAKCVDVMPSHNDYIARMCAARKM

SEQ ID NO: 83043 - protein, 505 aa, Sphingomonas sp.
  misc_feature (1)..(505): tr|A0A2U0USH3|A0A2U0USH3_9SPHN Tryptophan halogenase OS =Sphingomonas sp. CF311 OX=2135485 GN=C7501_3657 PE=4 S V=1
MTPKNQSSRNIRSILIVGGGTAGWMTAATLSRILGPDYAKITLVESDEIGIIGVGEATIPQMATFNRMLGLDEDQFMRETKGSFKLGIEFHNWGRIGHRYFHPFGGYGLDMKGVSFHAYYLRLRQLGEAPDIDQWSLQAMAARDDKFMRSIDAGNSPLSDIAYAFHFDAGLYAKFLRGYSEARGVTRREGKIVDVKLRGEDGFVQSVRLQDGTELEADLFIDCSGFRGLIIEQALKAGYTDWSQYLPCNRAIAVPCASVDAWTPYTRSTAHTAGWQWRIPLQHRIGNGHVFSSDYMSDDEATAILMSNLDGEPLADPRTVPFKTGHRNKMWVKNCVAMGLSGGFLEPLESTSIWLIQSGLSRFLTMFPDRDFNQADIDRYNRIMTTDYEEIRDFLVLHYHATERTDSPFWNYCRTMEIPERLAEKMRVFRTHGRAFRENEELFNDTSWFAVMLGQLIEPASHDPVADVMPLDETRSRLAHIREAIANSADYMPKHRDFIREHCAA

SEQ ID NO: 83044 - protein, 515 aa, Massilia sp.
  misc_feature (1)..(515): tr|A0A085EQJ9|A0A085EQJ9_9BURK Tryptophan halogenase OS =Massilia sp. LC238 OX=1502852 GN=FG94_05135 PE=4 SV=1
MNDKPIRRIVIVGGGTAGWMAAAPLAQRLLGRPEEPCEVILVESPDIGTIGVGEATLPTIRYYNAALGLDADDFVRRTKASYKLGIEFKDWGHLGNRFFHGFGDFGPSLDRHPSHLFWLRMSTQFDNMPALENWSVSSIMARKNKFVPPHKGTPSITDAYSYGYHFDAGLYANYLRDYAVTHGAQRLEGTVVEVEQHPESGFITAVKLRDGRRIEGDLFVDCSGFRGLLIEGALKAGYDDWSEQLPCNSALAVPCASAPALTPYTRSTAKEAGWVWRIPLQHRTGNGHVYSNAFTSDARAREVLLDSLDGAALDEPRQLRFVTGRRRKSWVKNCVAVGLSAGFVEPLESTSISLIETAVGKLVELFPDRDCRPELADEFNRYMGVRYESVRDFIVLHYKLTKRDDSEFWRYCANMPIPDTIRHQIELFRETGRVTILDPHGFAEPSFVAMLMGLGAVPKRYDPFVDAVDIREVHGHFAGVRDMIVQAVDRMPTHDAYIAEQLRTSQLRAASPRAA

SEQ ID NO: 83045 - protein, 530 aa, Planomonospora sphaerica
  misc_feature (1)..(530): tr|A0A171DNP1|A0A171DNP1_9ACTN Tryptophan halogenase OS =Planomonospora sphaerica OX=161355 GN=PS9374_06366 PE= 4 SV=1
MDHRIKNVVILGGGTAGWMAASYLGKVLQGGVRITVLEAPAIPRIGVGEATVPNLQRAFFDVLGIPEEEWMPECNASFKMAVKFVNWRTPGAGESTPRTLEDGRPDQFYHPFGILRSHDGLPLSHYWYNEVHEGRTGEPFDYACFREPPLMDARLSPRWLDGRRSTAYAWHFDAHLVADFLRRFATGKQGVVHVQDEMTEPVVDERGFVTALRTKGGLTLEGDLFVDCSGFRGLLINKAMAEPFIDMGDHLINDSAVATSVPHDDEAEGIEPYTSSIAMPSGWAWKIPMLGRFGSGYVYSSQFASRDEATADFARLWNLDPDATSFNHIRFRVGRNRRAWVNNVVSIGLASCFLEPLESTGIYFTYAAIFQLAKHFPDRRFDPALVDGFNREIEEMFDDTRDFLQAHFYYSPRVDTPFWKANKELHLTDNIKGKMAAYKAGLPINQPVTDEGTYYGNFEAEFRNFWTNGSYYCIFAGLGCLPDNPLPSLTYKERSIEQARALFADVKQEQRELLATLPSNREFLRLLHGR

SEQ ID NO: 83046 - protein, 479 aa, Sphingomonas sp.
  misc_feature (1)..(479): tr|A0A2U0VG35|A0A2U0VG35_9SPHN Tryptophan halogenase OS =Sphingomonas sp. CF311 OX=2135485 GN=C7501_0057 PE=4 S V=1
MSTSFTVIVAGRDVPLWLTVAALARALGPSGVAVEAVELPGALTPADAYATFPALEALHNQLRIDEAGLLRATGGSLTLGQNFTDLAGTHPAFLHAHGSAGTQIGGRDFFAHWVKARRFGLNVPLDDFSLTAAAARHGRLMLPDEENEIYGRCDYGYHLPAIPYAGLLRDAAIRHGVTVHPTGQLTVERQGETIAALGLDDGRRLSADLFVDAGNVLGARHQSWRAHFPVDRVLTAAGPAFADPPVYAENRAGPTGWTALHPGRPATFVTHGWSSALATDEQALHAATVAAGLPLADVVIRAIEPGRPVRPWTGNSVALGASFDPVHGLDLLGLQIGLVQLLADFPAGPEFAAERAEYNRVTPQALDRLRDFQSAHYALARYAGPFWEAARATLVSPDLAHAIALFRARAELAPFEEENLPPDSWRALFLGHGVEPESWPPAIDRVPAEDVKAQFRQMLGFVRAQVLRQPTQAEWFAHG

SEQ ID NO: 83047 - protein, 510 aa, Parasphingopyxis lamellibrachiae
  misc_feature (1)..(510): tr|A0A3D9FDQ5|A0A3D9FDQ5_9SPHN Tryptophan halogenase OS =Parasphingopyxis lamellibrachiae OX=680125 GN=DFR46_09 01 PE=4 SV=1
MSDPVGRPVRDIVIIGGGTAGWMAAAALAHRFGGTETSITLVESAEIGIVGVGEATLPQIRYFNRSLGIDEREMMARTSATIKLGIEFCDWGKAGDRYTHPFGAYGETIGPADFHHYWVRQNTGGDAHDFGEYCYPIVAARNDRFALPDEDPASPLDAFSYAFQFDASLYGVFLSDFAKQKGAKRVEGKVVSVQTDGETGFVAGIALESGREIAGDLFVDCSGFRGLLIEQELETGYEDWSEYLPCNRAYAVPCAITDTVGPYTRATARKGGWQWRIPLQHRIGNGHVYCDRYISDQEALDQLMTTLEGEPLADPKQLFFKTGKRRKLWNRNVVAIGLSGGFLEPLESTSIDLIQSGIVNLLALFPERDCDAADRDEYNRLMDLEFERVRDFLMLHYVATQRDDAALWRDMRNMEWPDSLKYKIDAFRRRGIVPEYTHGLFLPPSWLSVFIGQNIVPEAYDPRVDLMSEQELAANLERVRSRIAAAVVQTSRHDDFLENYGATFAGESAS

SEQ ID NO: 83048 - protein, 528 aa, Massilia sp.
  misc_feature (1)..(528): tr|A0A085FY91|A0A085FY91_9BURK Tryptophan halogenase OS =Massilia sp. LC238 OX=1502852 GN=FG94_00254 PE=4 SV=1
MASTTIRHVVIVGGGSAGWLTAAVLASGFQALEQGGLRVTLIESPDVPTIGVGEGTWPTMRDTLRAAGLSESAFFRECDAAFKQGSRFNRWVHGGDHDYYFHPFVLPQGWGEADMAGRWLERHTDIPFADLVTYQPHLCVHGRAPKQAATPEFAAVANYGYHLDAGKFGLFLKKHCLEKLGVHYVPDHVTGIRSHEFGEMSGDIAALHTKAHGELAGDLFVDCTGMQSLLLGKHYGVPFIPQRGVLFNDSALAVQVPYLAEDDPIASQTTSTAQEAGWIWDIGLPTRRGIGHVYSSAHTSDEQAERALRAYIRATGGPDDIPAPRKLSFEPGYRERFWHRNCVAIGLSAGFIEPLEASALAMVELSASMLLDEMPTTRAQMEIGARRFNETFTYRWERVIDFLKLHYVLSRREGALDPHGYWRDNRSSETIPQRLADLLALWRHRPPSRYDFNRIQEVFPAASYQYILYGMGFLPEPGQARRERIGEGNGAMADGFLRQAAELTRRMLPALPDNRALIAHIVRHGLPT

SEQ ID NO: 83049 - protein, 516 aa, Pelomonas saccharophila
  misc_feature (1)..(516): tr|A0A4V2VQF8|A0A4V2VQF8_PELSC Tryptophan halogenase OS =Pelomonas saccharophila OX=304 GN=EV671_101784 PE=4 SV =1
MDDRLRDVVVLGGGSAGWLVAALLAAVHGGQQGGLRVTLVESSEAPPIGVGEGTWPGMRDTLRRIGLSEADFARRCQVSFKQGSRFDGWLHGGDGAQGDRYYHPFMLPVGFGDADLVAAWLATRPEQAFADAVSPSVQVCEAGLAPKQVQTPEFGAVANYAYHFDAGLFGQVLREHATARLGVRHVVDHVDDVLSHENGDIAALQTRAHGAIAAGLFIDCSGLAARLIGQHFGMPLRSEREVLFNDAALALQVPYARPDAPLPSCTIATAWAKGWIWDIGLPARRGVGAVFSRTHAGEDEALAALQAYLNATGAPAERPAPRLIRFEPGYRERFWVRNCVAIGLSSGFIEPLEASALALVELSAARLCDELPMRRATMDGAARRFNDDFGYRWARVIDFLKLHYALSSRQDEPGSDYWRAHRDPATWPERLREQLAAWQLRPPARHDFGRIDEVFPAASYQYVLYGMGFRPHAQPLPAPKLQAAQACFDEAARQARRFLSGLPGHRSLIDHLHRQA

SEQ ID NO: 83050 - protein, 495 aa, Pelomonas saccharophila
  misc_feature (1)..(495): tr|A0A4R3UKF5|A0A4R3UKF5_PELSC Tryptophan halogenase OS =Pelomonas saccharophila OX=304 GN=EV671_102748 PE=4 SV =1
MTAPKHIAIIGGGTAGWMTANLLRHRWARLGIDVTLIESAEIGTVGVGEGSTPYLRRFFATLGLAERDWMPACDATYKCGIRFPGWSRVAGYESYVHPFFNEADRELGNQFFTNACLRRRGQAADANPQDFFLAAELARQRRAPLYAGEGPGTDYAYHFDAGRLGAFLRGHALGLGVRHIVDTVARVERHEGGDIAAVQLKGGTRIAAELFVDCSGFKGLLINETLGQAFLPYRDNLFNDRAIAIPTALVEGEDLPSETVSTALRHGWAWQIPLTTRYGNGYVYSSDFIGDDEAERELRAHLGAAAEGASARRLRMRVGRADKHWSRNCVAVGLSQGFIEPLEATALMLIQFSVEGFIDALEGNGFEPGRRDAYNRRVNEMFEGVRDYVVAHYQLNTRSDTDYWRANRANRHISDRLASLLDVWDGGGDFEAELERHGSALMYLRPSWYALLAGMGRFPAELRPAPQSVTASQARARLHQMARAFSSHRSQLMGG

SEQ ID NO: 83051 - protein, 503 aa, Pelomonas saccharophila
  misc_feature (1)..(503): tr|A0A4R3VK86|A0A4R3VK86_PELSC Tryptophan halogenase OS =Pelomonas saccharophila OX=304 GN=EV671_100167 PE=4 SV =1
MNGERRIVIVGGGTAGWMSAAALASRLLGKDGAARWTLRLVESDEIGIVGVGEATIPPIRGFNALIGLDEDEFLRETGGTFKLGIEFFDWGALGERYMHAFGDVGRSLDELPFHQHWLRLGAALPLAEYSINNQAALAGRFMRPRPDMAGSPLAEIAYAFHFDAARYAALLRRHAEARGVQRVEGRITHVERDGGGVRRLRLQDGEVVEGDFFIDCSGLHGLLIDKTLGVAFEDWSHWLPCDRAWAVPTPPSGPLLPYTRATAREAGWQWRIPLQQRTGNGHVFASAFVDEAAARETLLRHLEAEPLAEPRLIRFRAGRRREAWVGNCVAIGLAGGFLEPLESTSIHLIQSAVLRLIEIFPGDRAEPADIAEYNRQTAAEMEAVRDFVILHYKLTRRDDSPFWRHCREMAVPEALQARMARFASHGHILRRGQELFSEPSWLQVLVGQGLRPRHAHPLAGLSAGERVQAFVDNTRDVVRRCVAVMPAHADFIAAHCVAPSQKP

SEQ ID NO: 83052 - protein, 505 aa, Sphingomonas sp.
  misc_feature (1)..(505): tr|A0A2U0USM2|A0A2U0USM2_9SPHN Tryptophan halogenase OS =Sphingomonas sp. CF311 OX=2135485 GN=C7501_3656 PE=4 S V=1
MTAPAPIRQIVIVGGGTAGWMAAAALTRLVPAGVAVTLVESEAIGTVGVGEATIPPIRNFNALLGLDEADFLAATQGTIKLGIEFVNWTRDAHRYVHPFGEFGFDIEGVKFHQIWRKLYEQGRAREIEEYNVCALAMRAGRYQPPVSDPGSILSRMAYAYQFDAGLYARYLRNYAEARGVVRVEGKVAHVPLRAGDGFIEAVVLEGDRRIAGDLFLDCTGFRALLIEQALGAGWESWSHWLQCDRAVAVPTESASAEITPFTRSTAHRAGWQWRIPLQHRVGNGHVYCSADISDDEARETLLANLDGAPLRDPFILRFEAGRRKLAWHRNCVALGLSSGFLEPLESTSIHLIQSGIHKLMALLPDTGFSPVERDEYNRLTDLQMEQVRDFIILHYHANQRQQGDLWRRMREMAIPDSLERKLALFRGRGRFFRYEDELFAESSWIAVLLGQGVFPAGWDPLADGLDEDKLATSLSRLHEMFARAAQAMPRHEDWLARNAPARTPV

SEQ ID NO: 83053 - protein, 514 aa, Pelomonas saccharophila
  misc_feature (1)..(514): tr|A0A4R3UYN9|A0A4R3UYN9_PELSC Tryptophan halogenase OS =Pelomonas saccharophila OX=304 GN=EV671_101479 PE=4 SV =1
MSTTQRRILIVGGGTAGWLTAAYLAKALRLGERSHLEVTVLESPDIGVIGVGEGTFPTIRTTLQFLGIDEARFIRETAATLKQGIRFVDWARTPVGGESRHFFHPFEAPFYAEGLNLVPYWLLQDEATRLPFAQALTIQQRVAEAQRAPRRAHEAPYTAPLNYAYHFDALKLARLLAEHARQLGVRHLQGTVTQAGLDATGAIAHVDTPELGRLQADLYIDCTGFRAELIGRALGAQLKSARGILFADRALACKLPVNADDAVMESCTIATAHEAGWIWDIGLNGARGLGCVYSSDHLGDDRAAEILRRHAGAGAGEVALRSIPFAPGYRERQWVKNCVAVGLSAGFLEPLESTGLVLIEAAVGMIAEMVPHSGPMEAPARRFNELMTARFENIINFLKLHYCLSGRREPFWRDNAAPATIPERLAELLEQWRLRPPGRFDFGLDTETFAFFNYQYILYGMGFSTDLGAGRADFTQVEEANRLFAKIQRFTERALVDLPSHSALIRQLTGAPLR

SEQ ID NO: 83054 - protein, 538 aa, Burkholderia ambifaria
  misc_feature (1)..(538): tr|A0A2S9KMF8|A0A2S9KMF8_9BURK Tryptophan halogenase OS =Burkholderia ambifaria OX=152480 GN=C6P77_29095 PE=4 S V=1
MSNPIKNIVIVGGGTAGWMAASYLVRALQQQANITLIESAAIPRIGVGEATIPSLQKVFFDFLGIPEREWMPQVNGAFKAAIKFVNWRKSPDPSRDDHFYHLFGNVPNCDGVPLTHYWLRKREQGFQQPMEYACYPQPGALDGKLAPCLADGTRQMSHAWHFDAHLVADFLKRWAVERGVKRVVDEVVDVHLNERGYISSLSTKEGRTLEADLFIDCSGMRGLLINQALKEPFIDMSDHLLCDSAVASAVPNDDARDGIEPYTSAIAMNSGWTWKIPMLGRFGSGYVFSSKFTSRDQATADFLKLWGLSDHQPLNQIKFRVGRNRRAWVNNCVSIGLSSCFLEPLESTGIYFIYAALYQLVKHFPDTSFDPRLSDAFNAEIVYMFDDCRDFVQAHYFTTSREDTPFWLANRHDLRLSDAIKEKVQRYKAGLPLTTTSFDDSTYYETFDYEFKNFWLNGNYYCIFAGLGLLPDRSLPLLQHRPESIEKAEAMFASIRREAERLRTSLPTNYDYLRSLRDGNAGLSRSQRGSTLATQEIL

SEQ ID NO: 83055 - protein, 499 aa, Asticcacaulis excentricus
  misc_feature (1)..(499): tr|A0A3G9G8W7|A0A3G9G8W7_9CAUL Tryptophan halogenase OS =Asticcacaulis excentricus OX=78587 GN=EM6_1364 PE=4 SV =1
MADTIKRIVIAGGGTAGWMTAAALSQIMGEQLSLTLIESEEIGSVGVGEATIPMIAHFNALLRLDENDFLRETKGTIKLGIAFEGWRHEGHSYMHAFGTLGRDLGSVPFHHYWLQAHLDGQDDDLWAYSLNERAAYANRFAPLNQIPNTPLPGIPYAYHFDASLYALYLRRLAEANGARRIEGRIRDIALHAETGHVTRLSLEDGQQFEGDLFIDCSGFRGLLIEGALKTGVESWKHLLPCDRAWAVPCESVSPLTPYTRSIAREAGWQWRIPLQHRTGNGYVFCSDHISEDEAATRLLSRLDGQALADPRLIRFETGRRRLQWNGNVIALGLSSGFIEPLESTSIHLIQSGIARLITLFPHAGFDPAVVAEYNRQSALEFELIRDFIILHYHANERHGEAFWDQVRHMAIPDALAHKMALFRASGLIQPNPNDLFQLPAWLQVMVGQNVRSAAAHPFVAAVPDAARQDYLANLRTIIGRAADGLPTHEAYIAQHCRAV

SEQ ID NO: 83056 - protein, 500 aa, Sphingomonas sp.
  misc_feature (1)..(500): tr|A0A2U0UT58|A0A2U0UT58_9SPHN Tryptophan halogenase OS =Sphingomonas sp. CF311 OX=2135485 GN=C7501_3858 PE=4 S V=1
MQTEQPIRIVIAGGGTAGWMAAAAFARFLDKRFHITLVESEAIGTVGVGEATIPQIRLFNAGLGIDENQFIAATQASFKLAIEFVGWTRGGRYMHAFGDVGRENGLLAFQHSWLRGLAEGGAKPLEAYSLNNQAALANRMQRGPARTARLLPEMPYAFHFDAGLYARFLRGLAESGGVQRVEGKIVSVERDGGSGDVTALKLDGERQLVGDLFLDCTGFRALLIGETLGVGFEAWSDLLPCDRALAVPSERARDFTPYTRATAHGAGWQWRIPLQHRTGNGIVYSSAHLSDDEAASRLLAGLDEKALDDPRPLRFTAGKRTSFWKQNVIALGLASGFLEPLESTSIHMIQSGIERILKLLPGRQVSQAQRDEYDRQAHAEYDRIRDFLVLHYWANDRDEPFWAERRAATLPESLQHKIGLWRASGQIVRGEADLFSEVAWLQVLAGQGIAAASYHPLADAPSRAEIGEYLELIELLNAREVGQMADHAAFVAQHCAGDVV

SEQ ID NO: 83057 - protein, 486 aa, Asticcacaulis excentricus
  misc_feature (1)..(486): tr|A0A3G9FYT4|A0A3G9FYT4_9CAUL Tryptophan halogenase OS =Asticcacaulis excentricus OX=78587 GN=EM6_0861 PE=4 SV =1
MAAAALRRSFPALPYTVTLIESDEIGTVGVGEATIPPMIQFNDMLGLDENAFMKAVNGTFKLGIRFKDWSAPGSDYFHPFGVYGVDMGGLNFNHYWMRYHKAGGSADFGFFNPQTLAARANRFGRMKEINPNVPAVNYAFHFDASLYARYLRDVCVQRGVVRKEGRITEVQQNPDNGDVTAVVLASGERIEGDLFIDCSGFRGLLIEQTLKSGYEDWSKWLPCNRAVAVPCDKVDPLTPYTTSTAREAGWQWRIPLQHRTGNGYVFCDSYLSEETASDLLMQRLDGKAQAEPRVIRFQTGHRKQMWNRNVIAMGLASGFLEPLESTSIWLVQEAIATLQLYFPRGGITDTARASFNRAMLDAYTNVKDFLIAHYKVTTREDTPFWAYCKHMDIPDSLQFRLDSFREHNQPLVRPQDLFKEASWFAVLAGQGLMPKSYHPGADLMPEDEFRWRMQKVREGTTGLVNMMPGHEAYIAKTCASPHFISA

SEQ ID NO: 83058 - protein, 515 aa, Pelomonas saccharophila
  misc_feature (1)..(515): tr|A0A4R3UUV0|A0A4R3UUV0_PELSC Tryptophan halogenase OS =Pelomonas saccharophila OX=304 GN=EV671_101788 PE=4 SV =1
MNTPTTNPMRRIVIAGGGTAGWMMAALMSKLLGRQLDIKLIESEEIGTVGVGEATIPALLTYHNLLGINEAEFMAATNATFKLGISFEGWKNIGENYFHSFGSTGTDHWSAGFQHFWLKGRAEGIAKAYTDYNPETVAAHANRFAHLPRNGLNYAYHLDAGRYAKYLRAMSEGYGVQRIEGRIAAVLQDGPGGKAGDITALQMQDGSRIDGDLFIDCTGFRSMLLGETLGVGYEDWSYWLPCDRAVAVQTASVREAWPYTRSIAHPFGWQWRIPLQNRVGNGLVYSSRELSDANAPELLTKNVEGELLIQPRVLKFLPGQRDKVWERNCIAVGLASGFVEPLESTSIHLIQRSAIRLMQLFPGGGINPADVDEFNLQSRRELEHIRDFIVAHYHINERSDSALWRHVREMEIPASLRHRIELFRESARVFRPSDELFGENSWVQVMMGQGILPRSHHPVADLMGRPELSNFLGDIQLKVARTVAGLPGHQAYVEQLCAPYRHATTAQLAATPLRA

SEQ ID NO: 83059 - protein, 430 aa, Streptomyces sp.
  misc_feature (1)..(430): tr|A0A2S4XQ82|A0A2S4XQ82_9ACTN Tryptophan halogenase OS =Streptomyces sp. Ru73 OX=2080748 GN=C3486_21235 PE=4 S V=1
MSETQNYDVVVVGGGPAGSTVGALLAKAGHRVLILERERFPRYHIGESLVTGMTPLMEELGLVEQLDARYRHKTGISLRWGKDPQPWRSDFSAAGTDYDHAWHVTRSDFDELMLDNARKLGAEVREEAHVTEILQDESGTVTGVVYTHEGRTHRVSSRYVADASGQSRTVSRRLTETQWQDDLRNVAIWGYYDTYTPLEDEDDILVEAIEGGGWMWGIPLSKSKLSLGYVLSVEKLTEATRQGLSHQEIFAQGLESSIMARTMVDAGVSVPLKSARDWSHLSDRFFGPGWVAVGDAAAFIDPLFSSGVWLGTSGAWLAARALDAALSDPSNEAPALERFEAVYRQLFSDILSYVRFFMEPNRLREEYMERAQQIARVYTRSSRVGFMALVSGIGAVADLVNFDPMGVEGLQEIMVERQKIAAERAAAAAE

SEQ ID NO: 83060 - protein, 493 aa, Sphingomonas sp.
  misc_feature (1)..(493): tr|A0A2U0VGX8|A0A2U0VGX8_9SPHN Tryptophan halogenase OS =Sphingomonas sp. CF311 OX=2135485 GN=C7501_0423 PE=4 S V=1
MEQAPVRRVVIAGGGTAGWIAAAALAKLLGPLLEITLVESDEIGTIGVGESTIPTARTFHQLLGIDERDFLRETLSTFKLGISFEDWARDGDRYIHSFGTIGKSTWMGDFHHFWMEARDEGWGGALEEYCFELQAAKAGRFAIPEQGHINYAYHLDASRYARFLRGFAEPLGVHRVEGRIERVEQHPETGFVTALKLASGERLEGDLFLDCTGFRGLLIEQTLQAGYEDWGHWLPTDSAIAVQTESTGPAMPYTRAAAHQAGWQWRIPLQHRVGNGLVYAKDCLSDDAAHALLDSRIEGAKLIEPRVIRFKAGRRRKIWDKNVIALGLASGFVEPLESTSIHLIMIAITRLVQLFPFGGVGEGVAARFNALSRIEIERIRDFIVLHYHLNERADGGFWDQCRTMAIPDSLAERIEAFRDGAIAWQASDDLFRVDSWVQVMLGQRLEPRSHHHMGRMIVEGELQDALGSLKAGIARTVAQMPPHQQFLERYLAE

SEQ ID NO: 83061 - protein, 517 aa, Sphingomonas sp.
  misc_feature (1)..(517): tr|A0A2U0UYE0|A0A2U0UYE0_9SPHN Tryptophan halogenase OS =Sphingomonas sp. CF311 OX=2135485 GN=C7501_3137 PE=4 S V=1
MNNPDALRKVCIVGGGTAGWIAAAVMAHHMKGKLFEIELVESDDIGTIGVGESTIPPFMELIAKLDINEQDFVREVQASFKLGIEFKDWYKKGERYFHPFGDVGQRIELSDFYQCWRKATLAGHDFDLQDFAPASVMAREGRFMLPFKAQRTPIAGASYALHVDAKRVAQFLRAHAEARGVKRTEGMVTDVALDDRGFVSTLTLKDGRTVEADFFIDCSGFRALLIGKALGTGYTDWSNYLFCDRAIAAQTENVGPPNPYTLAEAQDAGWRWRIPLQHRTGNGHVYASEFMSDEEATRILLDKVEGDVVAGPMVVPFKTGVRQQIWHKNVLALGLASGFIEPLESTAIHLIYRGMDFFFRFLPDRHCDPALADEYNRRMVADYTEIRDFIVLHYCISVRDDTPFWRKVRDMEWPDSLRERVELFRSNGSLREGHDELFRSVSWFSVLDGMGIRPRTYHPLVDRIDETALFAGMDKAREQLAAMVRQLPTHQQFIDAHCRADKVDLARPAQSAMAAGA

SEQ ID NO: 83062 - protein, 513 aa, Shewanella violacea
  misc_feature (1)..(513): tr|D4ZIJ1|D4ZIJ1_SHEVD Tryptophan halogenase, putative OS=Shewanella violacea (strain JCM 10179 / CIP 106290 / LMG 19151 / DSS12) OX=637905 GN=SVI_1519 PE=4 SV=1
MMHAIKEVTIVGGGAAGWLTAAVIAAEHISHLRDSIHVTLIESPEVSSIGVGEGTWPSMRSTLEKIGISESEFMLCCDASFKQGSKFVAWKNGHHTDSYYHPFMAPQGYGQANLHHAWQEYHPDDTFAHITCVQASICDAGRAPKQLGTPQYAAVTNYGYHLDAAKFAKLLMQHCTAKLGVKHIVDHMTDIISAENGDIAQICTRKSGKISGDLFIDCTGMSSLLLGKHFNIPFIEKRHILFNDTAMALHVPYEDDNIQIASTTLSTAQTCGWIWDIGLPSRRGVGYTYSSSHTCDQQVQDDLITYIAKSIGQKRAEQLSPRKISFTPGHREKFWHRNCVAVGMASGFIEPLEASALALIELSASMISEHLPVNREQMEITAKRYNERFRYRWSRVIDFLKLHYVISERQDSQYWHDNRDQQTITASLKEQLALWKYQPPNRHDLMQNEEIFPSASYQYVLYGMGFNTHISKAKMSDKVEFARQCFGEVSQNKAKYIEGLPSNRDLIKAIKQG

SEQ ID NO: 83063 - protein, 514 aa, Asticcacaulis excentricus
  misc_feature (1)..(514): tr|A0A3G9G906|A0A3G9G906_9CAUL Putative tryptophan halo genase OS=Asticcacaulis excentricus OX=78587 GN=EM6_232 5 PE=4 SV=1
MTGKRRILILGGGTAGWLAAAYLARYFDIKRQPRLEIVLVESPEISSVGVGEGTFPTIRQTLKFIGIDEAPFMRRTTATFKQGIRFADWVKTPVNGRHEHYFHPFEAPYYTEGEGLVPYWLLQDEATRKPFAEAVTFQKRVAEARRAPKRPHEGDFSGPLNYAYHFDAHQLAGVLAERAVTLGVAHKPARLDGVVLDHTGQIDHIVAEGEVLTADLYIDCSGFRAELIGKALGSPFRSVRGTLFTNKALACKAPYERPDAPIESYTVATAHAAGWTWDIGLDGQRGIGYTYSTDHTSDDEAEATLRRHVGSKAALNLREIAFEPGYRERPWIGNCVAVGLAGGFMEPLESTGIVMIEVAVAMIAELFPHAGPIDAPARRFNALMTARYENIVTFLKLHYALSHRSESFWRDNADPQTWPERLRELLEQWRYRPPSRFDFLIDVETFAFFNYQYILYGMGFRTDLSGARDHFPHVEDANRTFAKVHNFGERATLDLPPHRTLIRQIYAEGFAESA

SEQ ID NO: 83064 - protein, 495 aa, Rheinheimera pacifica
  misc_feature (1)..(495): tr|A0A1H6J8Z9|A0A1H6J8Z9_9GAMM Tryptophan halogenase OS =Rheinheimera pacifica OX=173990 GN=SAMN05660691_00143 PE=4 SV=1
MQHHTVKKVVIAGGGTAGWVAAAALSKRLKGLIDVVLIESEEIGTVGVGESTVPPVQLFHNLLGINEQEFMQATDATFKLAISFENWGQQGDHYFHPFGVTGKGSFLSDFQHYYLHGLSQGIAAPFGDYCYELQAAKQHKFAKTEQSTINYAYHLDAGRYARFLRRFSEDLCAVRIEGKIAQVQQHVNGDIRALVLESGQEITGDLFIDCTGFRALLIEQTLKTGYERWDHWLPCNKAVVVQTEPGPTVPPYTRAIAHDSGWQWKIPLQHRVGNGLVYASDYLSDDKARQRLLDGLEAPAIMEPRVLSYQTGRRKKLWHKNCVAIGLSSGFIEPLESTSIFLFMSGIIRLLRLFPFNGVTPALTDEYNQQSITEVEKIRDFIILHYHQTERNDSPFWDYCRTMTIPDSLAHRIALFRESAHAFQTGDEMFRLESWSHVMLGQRLQPQSYHQLVAGLGSGELSRHLQQIRETINSAVHRLPSHRDFLRQYCPSNLT

SEQ ID NO: 83065 - protein, 507 aa, Sphingomonas sp.
  misc_feature (1)..(507): tr|A0A2U0UR86|A0A2U0UR86_9SPHN Tryptophan halogenase OS =Sphingomonas sp. CF311 OX=2135485 GN=C7501_3219 PE=4 S V=1
MANNAPIRKITIVGGGTAGWMTAAMLSKLFVRGYEIRLIESDEIGIVGVGEATIPAIREFNQLAGVDYVEMVKATQATFKLGIEFRNWRDVGSSYIHGFGKIGQDVWWLHAHQLWLKMQALGKAKHFDHYALNCVAARQDKFCFPDPRNPGSPIAGLDYAFHFDASLYGRFLRGQAEARGVTRIEGRIVEAKQRGDGFVDHVVLADGRTVDGDLFVDCSGMRGLLIGQTLGVGYADWSKWLLNDRALAVPCESVEALTPYTRCTAHGSGWQWRIPLQHRTGNGHVYSSAHISDDEAASVLLANLDGKPLADPRPVRFAPGKRDRAWEKNVVAIGLSSGFLEPLESTSIHLIQTGILRLVALFPGQGFDAADIAEYNRQHDFEFGDVRDFIIAHYKVTDREDSEYWRYLKHMEVPDSLAERLALFESSARFFQHGKAELFREESWVQVLIGQGMQMRYDPMVDMIDADELARFMDDMVEVIADVAKAMPTQQAFIDRNCKAPPLPAMA

SEQ ID NO: 83066 - protein, 508 aa, Pseudomonas nitroreducens
  misc_feature (1)..(508): tr|A0A239KUD3|A0A239KUD3_9PSED Tryptophan halogenase OS =Pseudomonas nitroreducens OX=46680 GN=SAMN05216209_389 5 PE=4 SV=1
MLNLSNYRRVAVVGGGSAGWFAALELRKLFLDQVEVVLVESETLGIIGAGEGSLPNFNRALDRYEIDRAEFMRETRSTYKLGLTLEGWRTGKKDDIFFHPFSFHSDGVDLNAWIEPNGSYPLASILLNQDLQLHHFPDAWRLYREGASQQQAEAYLQEQLKLYAVPPMAFHFDARKLAEYLREVALKRGVKRVNARVESVRLNERRHVTHLILENGELEVDFVIDASGLHRLIIDKALHSPWESYSDHLLLNQALPFFIPAQGAHPSLVTRAIAMKNGWMWCIPTQDRLGVGYVYSNQHTDKEGALREAQAYWGREIEPVNHFAFSAGHFKEVWIGNVMAVGLSSGFVEPLEATSIGQTLVQLARFNQVVSACDGLIPQQLIDQFNRDITRHWDGIRDFLFLHYDTPRQDTEFWKAASSATPPSTYAELKRTFALRPPRDVDLEPYRGGTFSLFGPTSWMSVAAPLGVLTRKATAADLVPLSKEQRWNIGEFLAKVEPRMTAEAAMSI

SEQ ID NO: 83067 - protein, 511 aa, Pelomonas saccharophila
  misc_feature (1)..(511): tr|A0A4R3UQJ4|A0A4R3UQJ4_PELSC Tryptophan halogenase OS =Pelomonas saccharophila OX=304 GN=EV671_101981 PE=4 SV =1
MDNWGRPLRKVVIVGGGAAGWMSAAALSAVLKPPYEIRLVESDEIGIIGVGEATIPPIRLFNSLARIEEADFLKATQGTFKLGIEFVNWGRQGERYFHGFGGIGREKLWPVDFSHYWLRMRALGRALPLDAYAICNMAARAGRFMLPRPEMQNSPLNAINYAYHFDASLYAQALRRIGEARGVRRTEGKVVNALLHEQPGPRQGQLRAVQMEGGELIEGDLFLDCSGFQALLIEKALATGHEDWSHWLPCDRAVAVPSEPAGPLLPYTRSTAHRAGWQWRIPLQHRVGNGHVYASSHVGDDEAADVLLRHLDGRPLAEPRVIKFRTGIRRQAWNRNVVAIGLAAGFIEPLESTALHLIQMGIGDLIERFPHAGFDALEIAEYNQRSRARYESVRDFIILHYHLNKRDDSAFWQACAAMDIPGTLRRRMQLYESSGRLLYGDGDEFREPSWLEVMEGQNQRPRAWLPLVELQDADDTAAYLKSVSDTIAKCVAVMPEHEAFVRRYCAAAPMD

SEQ ID NO: 83068 - protein, 503 aa, Caulobacter vibrioides
  misc_feature (1)..(503): tr|Q9A835|Q9A835_CAUVC Tryptophan halogenase, putative OS=Caulobacter vibrioides (strain ATCC 19089 / CB15) OX =190650 GN=CC_1529 PE=4 SV=1
MGEAIQSIVILGGGSAGWMAAALLNAALGKRCAVTVVESAEIGVVGVGEATIPAIRQFNAMVGLKEPAFMRATRATLKLGIEFVDWGCSGERYLHPFGVLGGQPTLGVFPQHFLRLMAADPDASLEDYSVCALAARLGRAGPAATDPATPLSQLMSAYHFDAVLYGRFLRRLAEGRGVRRIEGEVVAVDQRPEDGFVERLRLKDGRAVEGELFIDCSGFRGLLIEGALAAGYDDWSRWLPVDRAIAAPCAKVGPAAPYTQSIAQEAGWRWRIPLQHRTGNGYVYSSAFTDDGRAETVLREGLDGALEAEPRKLRFVTGRRRAAWKANVVALGLASGFIEPLESTSLHMVHSGLQALLKFFPDRSFSPVLRAGYNAAVKAEGELIRDFIILHYHATRRSGDPFWDYVRTMPIPDSLAERVALYAERGVLVSGSDELFSPSSWMAVMHGQGLRPRRASPLYDGVSPAALATEYAATARRLRRSVEALPLHEAYLADAGAWAEPEA

SEQ ID NO: 83069 - protein, 502 aa, Brevundimonas vesicularis
  misc_feature (1)..(502): tr|A0A2X1CF94|A0A2X1CF94_BREVE Geranylgeranyl reductase family OS=Brevundimonas vesicularis OX=41276 GN=NCTC11 166_01243 PE=4 SV=1
MSDGSIINRIVIVGGGTAGWMAAAALAHAFEGAGKTVTLVESEAIGIIGVGEATIPEILKFNARLGIDEADFLRETKATFKLGIEFDGWRREGERYFHPFGAFGLDMEGIAFHHFWLKACAEGGAEPLETYSMAWQAARRGRFVHPQGGPQSPLSSLGYAYHFDAALYAAFLRRFAERLGVVRHEGRVVEVQQAADGDIAGVRLDDGRIVEGDFFIDCTGFVGLLIEQALRSGYEDWSSWLPCDSAVAVPCEREGALSPYTRSTACEAGWQWRIPLQHRVGNGYVYSSAHISHQEAEDALMSRLEGKALAEPRRLRFAMGRRKDCWKRNCVAVGLSSGFLEPLESTSIHLIQSAITKLITLFPSHKDSEGLRREFNALMEEEFITVRDFLILHYKVNQRAGPFWSQVRDMPIPDRLAAKIALFEETGRIVRRDHDIFSESSWLAVAVGQGLTPQGRHPISDVIGHDANLGRLSAIRDSIWRTADALPTHEDVLMTTMNRKAF

SEQ ID NO: 83070 - protein, 502 aa, Caulobacter vibrioides
  misc_feature (1)..(502): tr|Q9A4M5|Q9A4M5_CAUVC Tryptophan halogenase, putative OS=Caulobacter vibrioides (strain ATCC 19089 / CB15) OX =190650 GN=CC_2805 PE=4 SV=1
MDPIRKIVIVGGGTAGWISASGLAAVLKGLPITIELIESAEIGTVGVGEATVPHIRYFNARLGLDEADFMRKTQATIKLGIQFCDWGRKGEAYIHPFGAYGHAIDGLPFHQHWLAARARGEAGPIETYSLPIMAGLAGKFAPPSSDPRSLGSTFNYAYQFDASLYAQYLRAYSEARGVTRTEGKITSVQQRPNDGFVTGVTLEDGRVVEGDLFIDCSGFRGLLIEGALQAGYEDWTQWLPCDRAVAAPCASVEAPTPYTRATADRFGWRWRIPLQHRVGNGHVYCSSYVSDDEAARALVENLDGELQQDPRFLRFVTGRRKKQWFKNVVAVGLSSGFLEPLESTSIHLIQVAVTTLLELFPHRGFDPADEDEYNRVMDLEFERIRDFLVLHYHANQRDDSPFWIERREGPIPDSLAYKMALFRERGAVVGYKDGFFLEPSWLAVYFGQNILPHGHDPLVAASDPARTAKIMADLAAAVTRTVDAMPTHAAFLRAMADARTPA

SEQ ID NO: 83071 - protein, 503 aa, Brevundimonas vesicularis
  misc_feature (1)..(503): tr|A0A2X1CY05|A0A2X1CY05_BREVE Uncharacterized protein conserved in bacteria OS=Brevundimonas vesicularis OX=4 1276 GN=NCTC11166_01420 PE=4 SV=1
MSDQAEPVRHIAIVGGGTAGWMAAAALGKAFTRSNGLSLKITLVESEQIGTVGVGEATIPPIRQFVQMIGLSEEDFIRSTAATAKLGIAFKDWTAPGSEYFHGFGDYGPTIAGQAWRQYLFRLKAAGRIDTLAPWSMPTAMARAGKFAPPVEDSRSVLSHYSYAYQFDAGLFARRLRTLAETLGVVRREGRITGVDRDGETGLVRAVTLEHGGEVEADLFIDCSGFRGLLIEQTMQAGYEDWTHWLPCDRAVAVPCSSTLPPEPITTARAREAGWQWRIPLQHRVGNGYVYSSDHMDDQTALDDLLGQIESEPLAEPNRLRFVTGRRREAWKGNVVSLGLASGFVEPLESTSINLIQTGIGRLLEMFPDRSFDPALIREYNRRSAQEFERIRDFIILHYHLAGRAGAMWDRCRETAPPDTLMEKIELFRARGEVGLLADESFREDSWAAVFTGLGTWPKQASPLACLDDLETVDRQARQFAQLIARAAAALPDHSTTFTGYAR

SEQ ID NO: 83072 - protein, 502 aa, Sphingomonas sp.
  misc_feature (1)..(502): tr|A0A2K8MGL2|A0A2K8MGL2_9SPHN Tryptophan halogenase OS =Sphingomonas sp. Cra20 OX=1327635 GN=CVN68_09115 PE=4 SV=1
MNAPAIRSVVIVGGGTAGWMTAAALARMVRAGVRVTVVESDAIGIVGVGEATIPPIRAFNAMLDIDESHFLAHTRGSMKLGIEFVDWNASGHRYLHPFGEFGFSIEGVRFHQIWHKLRAAGRAGAIEEYSMCAAAARLNRYAAPAAEQSSPLSQLVQAYHFDASLYARYLRGYAEARGVTRREGKIDRVTLRGEDGFIEAVTLEDGSRVEGELFVDCSGFRGLLIEEALHTGYEDWTHWLPCDRALAVPTVSTGPLTPYTRATARAAGWQWRIPLQHRTGNGYVYSSAHLSDDAAAAALLANLDGEPLGDPRPLRFTAGRRKLAWNRNCVAIGLSSGFLEPLESTSIHLIQAGISRLLGLFPDAGWGDAERDTYNDLTRTQYEQVRDFVILHYKANGRDEPLWRQVRAMAVPQSVSRRIDLFRNRGRIFRREDELFAETSWIAVMLGQGITPAGWDPLADALDSDQLAAMLERVRSTFRNAAEVMPDHAAYLARHCAAQGFA

SEQ ID NO: 83073 - protein, 505 aa, Caulobacter radicis
  misc_feature (1)..(505): tr|A0A2T9JZB7|A0A2T9JZB7_9CAUL Tryptophan halogenase OS =Caulobacter radicis OX=2172650 GN=DDF65_00885 PE=4 SV= 1
MSDQRVRSVVVVGGGTAGWMTAAALAKTLSAQGLKITLVESEAIGTVGVGEATIPPILTFNAMLGIDEPTFMRATKASFKLGIEFVDWGAVGETYHHPFGTFGLDLEGIKFHQVWRKFADLAGPIGDYNLTEAAARRWRFALPDPDPSKVMSSLRYAYHFDAGLYARFLRGFSEQRGVVRIEGRIGRVDQNAGTGFVEAVVLEDGRRVEGDFFVDCTGFRGLVIGQALKVPYQDWGRWLPNNRAVAIGCQLGGDGLTPFTRATAREGGWQWRIPLQHRIGNGYVYSSHHVDDQRALDTLLANLDGAPTDEPNFLRFTPGRRERAWEKNVCSIGLSAGFIEPLESTSIHMIQAGVTKLLALFPRNGVDPLEIDEYNRLTAEQVDRIRDFVILHFHATRRDDTDYWRYLSSMTVPDSLARRMELFAHRGRWFPSEYDLFHEPNWLAVLLGQGIVPEEWDPLVDSLPEDQVRQRLSHLSALIARTAEAMPDHAEFVARYCGAPQGVAA

SEQ ID NO: 83074 - protein, 498 aa, Nostoc sp.
  misc_feature (1)..(498): tr|A0A318BGU1|A0A318BGU1_9NOSO Tryptophan halogenase OS =Nostoc sp. 3335mG OX=2204170 GN=DMC47_08140 PE=4 SV=1
MKADERISVVVIGGGTAGWMTAAALSTLASGAADVHLIESAEIGIVGVGEATLPHLRAFVTRLGIDEAAFMAATHATFKLGIEFRDFGKLGDRYIHPFGGYGRALGGVGFHHYWLRRHHAGAAAPIGDYSTAVAAAEARRFTRPGDDPEDLASAFGYAYQFDATRFAPFLRAHAEARGAVRTEGRVEQVERDPTSGDVTAVVLADGRRIEGDLFIDCSGFRALLIGGTMDEAWEDWSHWLPCDRAVAAPCASPPGAIEPFTRATAMSAGWRWRIPLTHRVGNGYVYSSAHLSDQDAQDALVASLESPPLADPRLLRFRAGRRRRSWVGNVVSVGLASGFLEPLESTSIYLVQMAITQLIEHFPGRRVADADRDGFNALVDAEYDRIRDFLILHYHATTRDDSPFWDHVRTMAIPDSLADKMELWRRSAQVSRYSHGLFLEPSWIAVYLGQNIVPDGWDTRADLPDAAALDRALEALRGGIAEAVAAMPDHAAYLKAAA

SEQ ID NO: 83075 - protein, 519 aa, Cellvibrio sp.
  misc_feature (1)..(519): tr|A0A1U9NAI2|A0A1U9NAI2_9GAMM Tryptophan halogenase OS =Cellvibrio sp. PSBB023 OX=1945512 GN=B0D95_10690 PE=4 SV=1
MTSHTLRNVVIVGGGTAGWMTAAALAKFLPPQQYHIQLVESDAIGTVGVGEATVPHIRFFNQVLGIDENEFMQKTNATYKLGIEFSHWGKRGDRYIHPFGIYGQARNDISFHHYWLKLQQSGDPHPIGDYSVGVVAAYAEKFAYPHRDTHSLFSKYSYAFHLDASLYASFLRDYSTTRGVTRVEGKIIRVEQHPDSGFIRAVELDSGAQLAGDLFIDCSGFRGLLISDTLKTDFEEWSHWLPCDRAIAVPSSKTREPLPYTKAIACTAGWQWRIPLQNRTGNGQVYSSHHISDDEVAHNLLHNLDGEPLANLHYLRFKAGRRVQSWNKNCVAIGLSSGFLEPLESTSIYLIQIAIMTLVECFPDAAMEETNRHEFNRTMANEYERIRDFLILHYHATQRDDSAFWNDCRTMIIPESLHYKMQLFREQGHVERYKQGMFLEPSWVAVYMGQGIIPTAYHPAVNALDIQHLRDYLHSLRNTIATGVNAMPSHTNSIQRYCNNPHSETTWPPAAMSLYGVFS

SEQ ID NO: 83076 - protein, 503 aa, Brevundimonas subvibrioides
  misc_feature (1)..(503): tr|A0A258HIR0|A0A258HIR0_9CAUL Tryptophan halogenase OS =Brevundimonas subvibrioides OX=74313 GN=B7Y86_08880 PE =4 SV=1
MTGAPIKSVLIVGGGTAGWMAAAAIKRSVGPNAEVRLVESADIGIVGVGEATVPPIRDFNALIGLDEAEFMRETKATIKLGIEFKGWGAKDSAYFHPFGTFGAGPTLADFPGSYFALKDRGKAGSLESYSITSHAARRGRVGARSNDPRSALSGFHTAYHFDATLYGQYLRKVCATRGIERIEGEIVEVVQKPENGFVDHVVLKDGRTLTADLFIDCTGFRGLLIEGALKAGYEDWSHWLPMNRALAVPCAKVRAVDPYTSSTAREAGWQWRIALQHRTGNGYVYCSDFIEDEAAKQTLLANLDGEALADPRPLRFVTGRRKTLWDKNVVSLGLSSGFIEPLESTSIHLVQSGIVRLLQHWPDTAFSQTNTDGYNRRLTREIELIRDFVILHYHATRRDDTPFWRHVRDMAIPDSLAERVEMFRDRGLLFQVGADEYFSQGSWMAVMMGQGIVPRAHNPLYGYQDLDRVAAGFEQIKQAWATTAENLPAHEDYLKANRMWADA

SEQ ID NO: 83077 - protein, 505 aa, Sphingomonas sp.
  misc_feature (1)..(505): tr|A0A4V2QNE8|A0A4V2QNE8_9SPHN Tryptophan halogenase OS =Sphingomonas sp. PP-CC-3G-468 OX=2135656 GN=C8J41_1014 77 PE=4 SV=1
MTLGSPVRRIVIVGGGTAGWMAAAALARLIPTGASVTLIESDTIGTVGVGEATIPPIRAFNAMLGIDEAAFLAATAGSFKLGIEFVDWGAIGERYLHPFGGFGFDIEGVRFHQHWRRRRAAGVVEDIDAYSLCAVAARAGRFAPPSPDPASILSQMAHAYHFDAGLYAQFLRGRAERDGVIRIEGEIGDVALDGDTGHVRHVTLAGDRRIEGDLFLDCSGFRGLLIEQALGAGYEEWTQWLPCDRAIAMPTANTGTAITPYTRSTAQASGWQWRIPLQHRTGNGYVYSSAHCSDDEAAATLLDGVEGPPLADPRVLRFTAGRRRKQWIGNVVALGLASGFTEPLESTSIHMVQTGISKLLALFPDQGFSPVEIDTYNRLAETQFDQVRDFLVLHYHATRRKDSPFWRDAGARAIPDSLAERIALWRRRGRLFRWEDDLFAEASWVAVLLGQGIVPEGWDRLADAVDARDVDARFDRLRAMFADAAARMPRHEDYLARTSPTRVRA

SEQ ID NO: 83078 - protein, 500 aa, Sphingobium sp.
  misc_feature (1)..(500): tr|A0A2A3MSG9|A0A2A3MSG9_9SPHN Tryptophan halogenase OS =Sphingobium sp. D43FB OX=2017595 GN=SxD43FB_16435 PE=4 SV=1
MSTLPPPRRIVVAGGGTAGWMTAAALARTLGPVAQVTLVESEQIGTIGVGESTIPPLVAYNRILGINEADFMRATQATFKLGINFENWRVPGESYFHSFGGTGKDHWSAGFQHFWMHGQAQGHDAPYGDYCLELKAAEAGRFAHLPDDRMNYAYQLDSGLYARFLRRMAEADGAQRIEGRIAKVELDSESGDIAALRLDGDRRIEGDLFIDCTGFRALLIEGALHVGYDDWTHWLPCDGAVAIQTSSVRPPVPYTRAIAHEAGWQWRIPLQHRQGNGIVYCSGFLDPDAALEKLLASVEGDKLVQPNPIRFRTGARRRQWHRNCVAVGLSGGFMEPLESTSIHLIQRAVLRILRMLPAGTVSPLDIAEFNDQQMTDMEQIRDFLILHYKATDRRDTPFWRHCAAMAVPDSLAHRMELFRQTGRVFRKNEELFAENSWVQVMMGQGITPQSHHPVASKLRPDELTHLLASLKDQVSRTVANLPDHAAYIARYCSAQEPVAA

SEQ ID NO: 83079 - protein, 496 aa, Sphingomonas sp.
  misc_feature (1)..(496): tr|A0A2K8ME47|A0A2K8ME47_9SPHN Tryptophan halogenase OS =Sphingomonas sp. Cra20 OX=1327635 GN=CVN68_01435 PE=4 SV=1
MTEQRVRRVVIAGGGTAGWVAAAALVKQLGPMLDITLVESDEIGTVGVGESTIPTARRFHQLLTIDERIFMRETQASFKLGIAFENWTRDGSRYFHSFGQIGRPSTWMADFHHFWLEAREKGFGGDLGDYCLELQAAAAGRFATGPDATIQHAYHLDATLYARFLRRLSEGAGVRRVEGKIARVEQDPESGFLTALALESGARIEGDLFLDCTGFRALLIEQTLGAGFEDWGHWISTDSAFAIQTRATEDAVPYTRAIAHQAGWRWKIPLQHRVGNGLVFCSEFLSPDAARQQLLDAVEGEVLTEPRLIRYKTGQRRKVWDRNCIALGLSSGFIEPLESTSIHLIQVAITRLIQTFPFSGVGEAQAERFNAQARHEMERIRDFIILHYHLNARDGPFWQRCREMSVPDTLVERLALFGEAAHAYQAADDLFRVDSWVQVLFGQGLAPRGYHQLARMMPPEELRNAFGGIRGDIAAAVQAMPRHGDFLKSYCPAGDA

SEQ ID NO: 83080 - protein, 435 aa, Rhodopirellula sallentina
  misc_feature (1)..(435): tr|M5UJI6|M5UJI6_9PLAN Tryptophan halogenase OS=Rhodopi rellula sallentina SM41 OX=1263870 GN=RSSM_02375 PE=4 S V=1
MILRTGANTMKTSYDCVVVGAGPAGGTAAAIVASAGHETLLLEREAVPRFHVGESLMPEAYWPLERLGLIDRMKQSGWQQKKSVQFVTHTGKESEPFFFREHDERECSTTWQVERSEFDKMLFDRAAELGAECRDRMRVTDILFDSAETPDQPPRATGVVVRDPDGKEHTINARVVVDATGQQSFIAGRLGLKEVNPNLKKAAIWTYYKDAVRGDGDNEGATIILNTENKNTWFWFIPQSRGITSIGCVADHEYLLKGRGTPEEIFGEELAYCPGLAPRLENATRVGKFTTAKEFSYMTRQHAGPGWVLVGDAFGFIDPVYSSGVYFALEMGVRAGDAIIEGLQSDDLSGEQLGKWSGEFKAGAERIRKLVHAFYDKDFSIGRFMREFPQYRGNVTDLLIGRVFTDDAGRMFPDMQQSIENTRQQKLAAAKEMNA

SEQ ID NO: 83081 - protein, 509 aa, Sphingomonas sp.
  misc_feature (1)..(509): tr|A0A4R1U3E9|A0A4R1U3E9_9SPHN Tryptophan halogenase OS =Sphingomonas sp. PP-CC-3G-468 OX=2135656 GN=C8J41_1032 62 PE=4 SV=1
MKEQNVPANPGCIRRVVIVGGGTAGWMTASALGRYLKSDAPEIILLESSDIATVGVGEATIPSITKFHRALGLDERKLLAATGATFKLGIEFVDWQNIGDRYFHPFGLFGKDVGGVGFHNLYLKISKSVTYDDAWRYSPCAVAAASGRFGPQAANNAKPTGGFPHAFHLDAKLYAAHLRDYAEAKGVFRVEGRVVEVVRRKENGFVQSVVLQDGRTIDGDLFIDCTGGRGLLIGDAMGVDYLDWRDSLPCNRAVVVPSKADSTPALYTRATAKPAGWQWRIPLQHRCGNGYVYSSDHVSDDAAAQELLNDVSDRLETPRILTFRTGRRAEFWRGNVVAIGLSAGFLEPLESTSIHLIQTGVSKLLNLFPDKTFSRALAAEYNKTMINAFEGVRDFIILHYKATKRTDTTFWDRVREMPIPTSLRDRVELFRESGRFVRDENELFSLESWILVMLGQGIVPERYSPLVDAIDDVLVNSAEKEIRAEIADAVRSMPTHEVYLRSLSKTADA

SEQ ID NO: 83082 - protein, 489 aa, Nostoc sp.
  misc_feature (1)..(489): tr|A0A318B7K1|A0A318B7K1_9NOSO Tryptophan halogenase OS =Nostoc sp. 3335mG OX=2204170 GN=DMC47_24155 PE=4 SV=1
MTPDRRFVILGGGTAGWITAHLVERAWPDATVTVVESPDIGTIGVGEGSTPSLKRFFEIIGADEAEWMPRCGATYKAGIRFVDWSPAAPWRDYRHPFTTQIDVHTEEAFVLNCRNRRLGHDVPVRPDDFLLNGVLAARGLAPVAPGNFPFRIEYGYHFDAGLLGQYLRERAVARGVVHHAARVTEVRRTENGDIAALVTDRGQDIAGDLFFDCSGFNGLLIERTLGVPFRSFGENLFNDAAIVLPTALPGDPPVETVATALSNGWCWSIPLRHRVGNGYVYASDFQSPDAAETELRRTLGVADTVPARHLTFRVGQVARHWERNCVAVGLSQGFIEPLEATALHLVLNTVEQFIRHYRDGDGTDRHRAAFNAVAAERMDGVRDYIVAHYKLTTRTDTDYWRANAANMALPDPLLHLLDRWFRRGDIAEELARQGQRSHFGNLSWHCLLAGYGAFPPVTMTDRTDLDFYAARRIGAFLDGCSLNFARQAI

SEQ ID NO: 83083 - protein, 508 aa, Caulobacter radicis
  misc_feature (1)..(508): tr|A0A2T9JPL5|A0A2T9JPL5_9CAUL Tryptophan halogenase OS =Caulobacter radicis OX=2172650 GN=DDF65_06705 PE=4 SV= 1
MSEAIRDIVVVGGGTAGWMTAAALAQTVGTRRYSITLVESEQIGTVGVGEATIPMILLFNKVLGLDEDVFIRETNATFKLGIEFVDWRRLGHSYFHPFGLYGADMDGVGFQHFWLRWARESGDWRHDAFNAETLAAADGRFMRTPPAPNLPKINYAFQFDAALYAAFLRRYAEARGVVRVEGKIAGVERDGESGHVSRLVLDDGRTIGGDFFADCSGFRGLLIEETMGAGYDDWSRWLPCNRAAAVPCARAGELTPYTRATAREAGWQWRIPLQHRTGNGYVFCDAFIGEDEAVRLLGQRLDGAALADAKILKFTAGRRRKSWIGNVLAIGLSSGFLEPLESTSIHLIQAAIAKLLTLFPKTGFDPFVVDKFNREMALEYEQVRDFIIAHYKVGERDDTPFWRWCRDMVPPDSLAQRLEVFRARGEVLIDQKELFKETNWFAILAGQGLLPDDYHAVADKISSEELGLRLGRIRAAINERVAGMPPHDLYLEKAGLLGAARAGASIPA

SEQ ID NO: 83084 - protein, 500 aa, Fimbriiglobus ruber
  misc_feature (1)..(500): tr|A0A225DMX6|A0A225DMX6_9BACT Tryptophan halogenase OS =Fimbriiglobus ruber OX=1908690 GN=FRUB_05798 PE=4 SV=1
MIRSVIVLGGGSAGFLAALTLKTKLPQLNIMVIHSKDIGIIGVGEATTVALPKLLHGYLSFDPGDFYRRVETTWKLGIRFLWGPRPYFDYTFGFQLDWKWANLGKFNGFYCDDDFSYVDTQSALMSHNKAFVRRPDGSPMVGINNYAYHIENQKFVEFLHQKALERGVTVRDETVDEVLQDDAGIAGLRVASGVVRAADLYVDCSGFRSTLLGKTLGEPYTSFKSSLYNDRAVTGGWARGSDEPVKPYTTAESMDHGWCWQIDHLDRINRGYVYSTDFVSDSEAEAEFRRKNPEVTSTRLVRFSTGRYHRSWVKNVVGIGNSAGFVEPLESTGLAVICDESRLLAEALSDADCHPTPSLMAAYNDIFAREWDAIRFFLAIHFKYNTRFDTPYWRACRADIDIGSAAAVVDFYRENGPTPYAKTTVLGTNDIFGMEGYLCLLVGQKVPYNRAHKPTPQERLLWRGIQAENRVKALTAVDVADAYQAVSAPSWQWNTDVFRV

SEQ ID NO: 83085 - protein, 523 aa, Pelomonas sp.
  misc_feature (1)..(523): tr|A0A5C7VEF7|A0A5C7VEF7_9BURK Tryptophan 7-halogenase OS=Pelomonas sp. OX=1909303 GN=E6Q67_04550 PE=4 SV=1
MMPIRNILIVGGGSAGWLAAAYLARTLGAGDPEGPRITLVEARGIPTIGVGEGSFPSLRGTLAAIGIAEDRFIRDCSATFKQGIRFDHWVRPPGQPGADHYFHPFSQPSQRPGGPELLPYWLLGEAGEGQAFAEAATLQKRVADASRAPKRPTDADYVGALNYAYHFDAGRFADLLAEQARALGVQHVAATVERVEMGDGGLIAAVHTREAGRLAADLFLDCTGFHAALIGGALGSPFKSLADQLFVDRALAIQLPYPRVDAPIASYTISTAQPAGWIWDIGLQERRGVGHVYSSRHVDDDQAEAQLRAYLGPAADALSARRLELRIGYRETQWVGNCVAVGLSSGFIEPLEASGLGLVEAAVYLIAHLFPHGGELDAAARQFNAQMRTRYERIADFVKLHYGLSQRRDSAFWVDNTAPESFSPLLREQLMMWRQRAPHRLDFIADLEMYPPSSWQYVLYGMEYPTRLARNARAWPRAAEARQEFQTLRQLAPRAIADLPTHRALVQHLCARANAAVAPGVRS

SEQ ID NO: 83086 - protein, 507 aa, Shewanella sp.
  misc_feature (1)..(507): tr|A0A3Q9E5E9|A0A3Q9E5E9_9GAMM Flavin-dependent tryptop han halogenase RebH OS=Shewanella sp. TH2012 OX=1965282 GN=rebH_1 PE=4 SV=1
MKVRTIAILGGGTAGWLAANHLGAELAGDAEIEITLIESPDIATIGVGEGTVPYIMKSLKRFGISEAELLVKCDTTFKQGIKFVNWLDPKLHGENHYYHPFDIPYPSGYDVTPYWLTQDGNQPFDEVSIQGRVCELGLAPKKKSSGEYVGDLSYAYHFNAQKFANLLAENAKSRFNVKHQYATVTGGLLDDNGAIKALVTENGQELAFDFYVDCSGFHSVLLDKVLNVPFVDKGHELLTDSVMVQQVPLKEGEALAPYTTATAHKAGWIWDIPLTTRRGTGFVYCSKYMSDDEAHTLFAQYLGVDKASISPRKIPMQIGYRQEFWAKNCATLGLAQGFVEPLEATSILVTDFSAELLAKNFPRDSDDMDIVRPYYNKVLTYAWERVIDFIKLHYCLSDRQDTGFWDDNRNSATWSDELKERLAKFAIRPPQQSDFFTRFDLFDDKNFLYVLYGMKFKTKAKAITLVEIEQSQKLLELNNKMVEAAPKQLLAHKDWLDGLKAAMARAG

SEQ ID NO: 83087 - protein, 496 aa, Streptomyces sp.
  misc_feature (1)..(496): tr|A0A014MMS2|A0A014MMS2_9ACTN Tryptophan halogenase OS =Streptomyces sp. PRh5 OX=1158056 GN=Z951_38785 PE=4 SV =1
MSEGRQEYDVVVVGGGPGGSTLAALVAMRGHRVLILEKETFPRYQIGESLLPSTIHGVCRMTGVAEKLAAAGFTPKKGGTFRWGANAEPWTFSFSVSPKIAGATSHAYQVERSKFDNILLEHAVEKGAEVRFRVSVTDVLEDGDRVTGVRYTDADGAEHEVHARYVVDASGNGSRLHKRVGGTREYSQFFRSLALFGYFEGGKRLPAPNSGNILSVAFESGWFWYIPLTPDLTSVGAVVRRENADKIQGDPERALLALIDECPLIKEYLSDATRVTEGQYGQLRVRKDYSYHQTTFWRPGLVLIGDAACFVDPVFSSGVHLATYSALLAARSISSSLAGIVSEEAAFTEFEARYRREYGVFYEFLMSFYDMHVDENSYFWSAKKVTRNQHTELESFVELVAGVSSSEFDLDGAESAALRMKSKSAEFVSAIDEMSADAEGNMTPLFRSSAVRQAMQEGAQVQSRAFLGEDLGPDVPMFPGGLITSDDGMLWQPGPA

SEQ ID NO: 83088 - protein, 516 aa, Rhodanobacter sp.
  misc_feature (1)..(516): tr|A0A1V3Q0P9|A0A1V3Q0P9_9GAMM Tryptophan halogenase OS =Rhodanobacter sp. C03 OX=1945858 GN=B0E48_09850 PE=4 S V=1
MEADPPVRRIVVVGGGTAGWMTALALANSAYGSRLEVTVIDSPQVATIGVGEGSTPFLRRFFEDLGIEEAEWMPACNATYKNGITFDKWSTRPGFESYFHAFASMLDNLTMTQFINNVHSRLNHADVHAHPDRFFIASRLARDCRAPKPAHSFPFDIWHGYHFDATLLGAFLLKKALERGVRHIACHVNEVILKDNGDIGSLHLEGGETLDADFFIDCTGFASLLIGKALKTPFVPYAENLFNNAAIALATPIDGPIMSQTVSTALTNGWAWKIPLTNRYGNGYVYSTDFCSPEQAETELRAHLGVLDADVPARHLKMRVGRVAESWNRNCLAIGLAQGFIEPLEATTLLFVQRTAYMFVAALEKGDLGAEARATFNQTINVQFEGTRDYIVTHYKTNTRTDTDYWRANAANTHLSNPLKHLLTTWLSSKPIIPGLKKGVFGQGYPTMSWYSLLAGVGLFPDSQHMRPPTPEEAQHDLTQIDNMLERSAMNYPDQRELLQRIPLKSREPSLQVYLW

SEQ ID NO: 83089 - protein, 501 aa, Sphingomonas sp.
  misc_feature (1)..(501): tr|A0A4R1U6F8|A0A4R1U6F8_9SPHN Tryptophan halogenase OS =Sphingomonas sp. PP-CC-3G-468 OX=2135656 GN=C8J41_1028 53 PE=4 SV=1
MAEQRIRKVVIAGGGTAGWLAAAALSRQLGQLLDITLVESEEIGTIGVGEATIPTMRAFHTILGLDEREFMRATQATFKLGISFENWARDGDRYIHSFGDIGKSTWMGDFHHFWLAAKADGDTSEIGDYCLELQAAKAERFALPSEGQINYAYHLDAGLYARFLRARSEANGLKRIEGRIASVDRDGETGFIRALVLASGKRVEGDLFIDCTGFRGLLIEGTYAAGYEDWSHWLPTNSALAVQTAATGPAHPYTRAIAHDAGWRWRIPLQHRVGNGLVYASDHLSDDEAHARLLATIDGAPLTEPRLIRFRTGRRRQVWMGNCVALSLASGFVEPLESTSIHLIMTGITRLMQTFPFGGIAPALVKRYNDQAQAELERVRDFIILHYHLNERPEPFWAARRDMPIPDTLVERIALFTEGAQAYQGGDDLFRVASWVQVMLGQRLTPRDHHRLGSIMGGPQLAGVLTNIRSTIADAVAGMPTHQQFLDRYLAAPVTAAARMR

SEQ ID NO: 83090 - protein, 501 aa, Nostoc sp.
  misc_feature (1)..(501): tr|A0A318BET9|A0A318BET9_9NOSO Tryptophan halogenase OS =Nostoc sp. 3335mG OX=2204170 GN=DMC47_11310 PE=4 SV=1
MTTADQRLRRVVIAGGGTAGWMAAAAIARTLGRTVDLTLIESEAIGTIGVGESTIPPLVNYNRLLGINEAEFMRATQATFKLGILFDDWKEPGSRYFHSFGLTGKDHWSAGFQHFWLYGRSKGHEQSYDDYCLELIAALKGRFAHLPEDRMNYAYQLDSGLYAKFLRKMAEGDGAARIEGRIARVELDGESGDIAALHLDSGQRVEGDLFIDCTGFRALLIGEALHVGHDDWTHWLPCDSAIALQTESVGPAVPYTRAMAHDAGWQWRIPLQHRVGNGIVYCSRYLDRDAALDRLVGNVEGEVLTEPNFLRFGAGARRKQWHRNCVAVGLSGGFMEPLESTSIHLIQRAVLRVIRMMPLGKISEHDIAEFNDQQHNDMLQIRDFLVLHYKATDRRDSAFWRQCASMEIPDSLAHKIELFRETGRVFRRNDELFAENSWVQVMMGQGIMPRSWHPIAEKLRDDELTRLLTMLRDDVTRTVGTLPEHAAYVARYCGAARPASA

SEQ ID NO: 83091 - protein, 504 aa, Caulobacter radicis
  misc_feature (1)..(504): tr|A0A2T9JZL9|A0A2T9JZL9_9CAUL Tryptophan halogenase OS =Caulobacter radicis OX=2172650 GN=DDF65_00890 PE=4 SV= 1
MTNDRIRHVVIVGGGTAGWMTAAALGRFLKDGVTRVTVIESEAIGTVGVGESTIPQINMFNRMLGLDEDDFLRRTKATYKLAIEFRDWKEIGHTYHHPFGPYGVDMEGVSFHAYWLRYQAMGEAADLSEYSLQSLAAAKARFQRPTGQKNSPLGDIAYAFHFDAGLYARFLRDYAEARSVRRIEGRIVDVALRGTDGFVQSVTLENGTVVEGDLFIDCSGFRGLLIEGAMKSGFEDWSHWLLNDRAVAVPCASGGSTDPVTRATARPAGWQWRIPLQHRIGNGYAFSSQHISEDEATAYLLANLDGEALADPWTLRFKAGRRKKSWNKNVVAIGLSAGFMEPLESQSIHLIQVGISRLLAMFPDRRFQQPDIDRYNRVMTFEYEKIRDFLILHYKATQRSDTPYWDYLREMEIPEYLADKIAVFESHGRIFRENEELFNDTSWFAVMVGQGLKPKGWDPMADIMSDDLLRARMNEIRAVIARSAEGMPDHMSFVAERVAGARAA

SEQ ID NO: 83092 - protein, 495 aa, Sphingomonas sp.
  misc_feature (1)..(495): tr|A0A4R1U8X8|A0A4R1U8X8_9SPHN Tryptophan halogenase OS =Sphingomonas sp. PP-CC-3G-468 OX=2135656 GN=C8J41_1014 78 PE=4 SV=1
MTDALRSVTIVGGGTAGWMAAVAFGRLLGPAGTRVTLIESDDIATVGVGEATIPPIRTFHAMLGIDEDAFLRATGGSYKLGIRFEGWTRPGESYVHPFGQIGTDIAGVPFAAQWLRARQAGAAEPLGAYSLEACAAEAGRFSRPIANGNSPLSRIGYAYHFDAGRYAAFLRTQAEAYGVVRQEGLVERVERGPAGIAAVHLADGSRIAGDLFLDCSGFRALLIEGAMEAGWTDWSEWLPCDRAVAVPSVADAAPLPLTRAIAERAGWRWRIPLQHRTGNGHVFSSRHIGEDEATATLLAGLHGEALAEPRVIRFATGHRNRFWSGNCIALGLAAGFMEPLESTSIHLVQSGLQHLLRMLPTGAPPAPAVVERYNRIMTAEYTRIRDFLVAHYHLNARAEPFWRDRATAAIPEGLAEKLALFRAGGRIFREADELFNETSWLAVLTGQNAPVLGHDPICDCIPIETAANRLARIERVVATSLTHMPSHAHALARLA

SEQ ID NO: 83093 - protein, 485 aa, Shewanella sp.
  misc_feature (1)..(485): tr|A0A3S9LAY8|A0A3S9LAY8_9GAMM Flavin-dependent tryptop han halogenase RebH OS=Shewanella sp. TH2012 OX=1965282 GN=rebH_3 PE=4 SV=1
MQQFDLLIVGGGSAGWMAAALCSRLRPQWRIALVESERIGTIGVGEGSTPHFGRLMATLGLAESLWMPECDASFKTGIDFGSWGGDEQRYFHPFLSPMDLKAAEVFYLGANARRRGRGPWTGPDEYFIAARLARAGVDPIAAKPLPAPLEYGYHFDAAKLAVLLRRVAEGAGVQRIAAEVVQVHMQDADTLAGLSLSDGQRLDASRFIDASGFAALLIGDALQVPFESLADKLLCDSAVTVATEAVSGMPFTRAEALEAGWLWQIPLASRTGNGYVYSSAHLSADEAAFRLRARLGLTPDVAVKHLAMKVGVRSRCWQGNVLAIGLAQGFVEPLEATSLMVTQHTLEQYLQQEALDTPLVSRQQAFNQAWRTLMDGIVDYIQAHYLCARRRDSEFWQTASQTPPGPLLSELLTVWRAGGDLDAFLHQHDSKLAYFRPSWYALLAGLDDRNPQLVMPYQPPAADLRAAASAFSQRLMQQFFTAKAG

SEQ ID NO: 83094 - protein, 503 aa, Umboniibacter marinipuniceus
  misc_feature (1)..(503): tr|A0A3M0AHY7|A0A3M0AHY7_9GAMM Tryptophan halogenase OS =Umboniibacter marinipuniceus OX=569599 GN=DFR27_2161 P E=4 SV=1
MVDNSIKKVVVVGGGTAGWMAAALLGKLMGKLVSVELVESDQIGTVGVGEATIPQIRHLTDALQISEQDFLKSVQGTYKLGIEFNDWGKLGDSYIHTFGDVGRRLGVLDYHQVWLRGRELGLTEDFWGASFNEIAARANKFAPVEKIGNTGLLGLGYAFHFDATLVAKYLRNYAEPLGVKRSEGHIQQVLKDPDSGYITQLKLEDGRLVEGDLFIDCSGFRSLLLGEALATPYVNWSHWLPCNSAQAVPTKATEPLVPYTKATARKAGWQWRIPLQHRVGNGHVYASDFISDAEATDILLANLDAEPLMAPKQLRFTTGKRENFWVKNCIALGLASGFMEPLESTSIHLVQSALSRLIDLFPTREFSEADVAEYNTRTHFEYDTIRDFLILHYKATSRDDSEFWNYCRNMSIPDSLQHKFDLWQNHGRFFRNDDELFTQMSWVQVFLGQNIIPSDCHPIAKSLTKDQVQGYSADIRRILLQTVDQMPSHAEFIAQHIAAPRLD

SEQ ID NO: 83095 - protein, 526 aa, Rhodanobacter spathiphylli
  misc_feature (1)..(526): tr|I4W0A8|I4W0A8_9GAMM Tryptophan halogenase OS=Rhodano bacter spathiphylli B39 OX=1163407 GN=UU7_09992 PE=4 SV =1
MSRIQKILVVGGGTAGWLTACYLARTLNGAAPGSIRVELLESPNIGLLGVGEATFPSIRGTLAAIGLDERRFLVGATATYKQGIQYVNWVRPPGAAGADRFFHPFSQPSQRPGSPELLPYWLLGGAPEGMSFAEAVSMQQRLIEQGRAPKRLVDADYQGPMNHAYHFDAACFARVLAEHGQELGVTRHLATVERAELDESGAIARIVTRETGELRADLYVDCTGLRGALIGGTMQSPFHSRRDVLFGDRAVALQVPYARPDAPILPFTRATAQEAGWIWDIGLQKRRGIGYVYSSRHTDATRAEEVIRRYVGEQAAGLEALHIKFETGYRPEHWRRNCVAVGLAGGFVEPLESTGIALVELGAYLIAHLLPGDLDDMERSARHYNQMMVARYERIIDFIKMHYCLSQRRDHAFWIDNADPASIPQTLQDRLALWRHRPPHRLDFVTDLEMFLPCSWQYVLYGMEFRTDLEPMRSAYPQMAAARREFAMIREMAGHALVDLPDHRTLVEQLCREHVQRTAQREGSAA

SEQ ID NO: 83096 - protein, 502 aa, Nostoc sp.
  misc_feature (1)..(502): tr|A0A318BJ98|A0A318BJ98_9NOSO Tryptophan halogenase OS =Nostoc sp. 3335mG OX=2204170 GN=DMC47_14865 PE=4 SV=1
MTDNRIRTIVVLGGGSAGWMAAAALATYLGRGVSVRLVESEEVGIVGVGESTVPHMKTFNSETLGIDERAFVLRTNATFKLGIRFTDWARIGDSYIHGFGTIGQGLGPLPFHQLWLRRFLAGKAAPLGDYSLQTVAAPAGRFRWDGPAGTPLANIAYAYHLDAVLYARFLRDLAERRGVERIEGKVEGVEQHPESGHVAALTLADGRRVEGEFFIDCSGFRGLLIERTLKTGYIDWRHWLPCDRAFAVPSAAVGPPMPYTEAAARPSGWQWRIPLQHRVGNGHVYSSAHESDEQAMATLLQTVQGSPLDSPRQLRFTAGRRAKAWNGNVVALGLAAGFLEPLESTGIYLAQAGIRRLLGLFPGRDLDPALAERFNRETAFEYERTRDFLILHYKATTRDDTSFWRYCRTMDVPDPLREAIELFRADGRYFRNGGDFFALPSWVQVMIGQGIVPGDYHPIVDAMPEGHLDQYLARVRGEIAATVAAMPPHHEFIDKHCKAMIA

SEQ ID NO: 83097 - protein, 200 aa, Nostoc sp.
  misc_feature (1)..(200): tr|A0A318B3I6|A0A318B3I6_9NOSO Tryptophan halogenase (F ragment) OS=Nostoc sp. 3335mG OX=2204170 GN=DMC47_27930 PE=4 SV=1
GLDGAPLAGPNFLRFTAGVRRKAWDRNVVALGLASGFLEPLESTSIHLIQTGIARLLTNFPDRSFNQPDIDYYNRRTRLEYEQVRDFLILHYKATARDDSPFWRRCRDMTVPDTLAERMAIFRENARLYRHDNELFSETSWLAVLHGQNIHPKRHHPIADILSEEELDRRMTHIAAAMDSGVRAMPDHMAFIDRYCRSPS

SEQ ID NO: 83098 - protein, 515 aa, Sphingomonas sp.
  misc_feature (1)..(515): tr|A0A4R1U4D7|A0A4R1U4D7_9SPHN Tryptophan halogenase OS =Sphingomonas sp. PP-CC-3G-468 OX=2135656 GN=C8J41_1021 1 PE=4 SV=1
MTGNATAGNGAGRVTKVVIVGGGTAGWMTAAALSRLVPSGVSVTLVESEEIGTVGVGEATIPPLLDFNRMLGIDEDAFVRATGATFKLGIEFRDWARLGDAYLHPFGTHGRDIGGVPFHQLWLRQAALGNPDPGPIGDYCLSAVAARRGRFTRPSANPESVLSTLFYAFHFDAALYAKFLRDMAEQDGVVRVEGRVVAVERDAGTGFIEAVRLEGDHRIDGELFIDCSGFRSLLLGDALDVPFTSWKHWLPCDRAWAVPSQRQGGLTPYTRATADTAGWRWRIPLQHRVGNGYVYSSAHIDDDDARRALLAGLEGEALGEPRQLRFEAGRRDRLWERNCVAIGLSGGFLEPLESTSIHLIQSGITRLMSLFPDLGFGVTEIDEYNRVMLREYEQVRDFIILHYHATERSDSPFWDQCRTMAIPASLSAKLALWSGKARVFREQGELFTPDGWIAVLLGQGIRPASFDPLASALPADESARFLAHVRDVIDKTAAAMPTHEAFIAQNCAARTHQAA

SEQ ID NO: 83099 - protein, 532 aa, Kaistia algarum
  misc_feature (1)..(532): tr|A0A2S5TXU2|A0A2S5TXU2_9RHIZ Uncharacterized protein OS=Kaistia algarum OX=2083279 GN=C3941_11710 PE=4 SV=1
MENGAQRPRHTTRPNRGCPMPEPARFIVVGGGTAGWLAAFVLQDKIRRLKLDARVVVVESSKIPTVGVGEGSTAALRVLMQYFNLNEFEFFRETGATFKLGIRHKDWRRKGFTYDGPIDDPHQVVKAPDGAPSDYLNVFCVAAGRKLQDMHLFGPLLEQKKAPYALKEDGGLVPLGPFHHAFHFDQALVGRFLKSKSRGVHVVDAAIDGVMRDGESGHITALKLDTGETLEGDFFVDASGFRKRLIVKELNAPWISYAKELPVNRALPFWIDIKPGEEIANYTLAWAQEAGWMWQIPTQTRYGCGYVYSDEFKTPEEAKLEIERALGHEIDVRDDIRFQIGRLETPWLGNCLAVGLASSFLEPLEATSIHGTVVQLMLFAERYLKHPDRMNNDDRADYNRRIGRQVDDFRTFINTHYVTQRDDTPFWRNVRAERLHSETRERLARWKKEMPRREHFPTFLDGLPHVETQLHYPVLDGLGLLDPAVARAEMAKDPALRAFARDTVDSLVKEYRWAADRAIGHAAFLEHVRRMA

SEQ ID NO: 83100 - protein, 536 aa, Pelomonas sp.
  misc_feature (1)..(536): tr|A0A5C7VH97|A0A5C7VH97_9BURK Tryptophan 7-halogenase OS=Pelomonas sp. OX=1909303 GN=E6Q67_02615 PE=4 SV=1
MTDTATVFNQQLAPRTASAATDATPPVQHVCIVGGGTAGWMTALMLASSAYGPRLKVTVLESPQVGIIGVGEGSTPWLRGFFDGLGIEESEWMPACNATYKSGITFEGWSTKPGFERYFHPFASMLDNLTMHQFVDNVHARLQGADVYAHPDRFFVAAALARQGKGPRAQHSFPFDVWYGYHFDATLLGQFLADKARQRGVQHLPRHVTQVQLSERGDIARLQLDGGDTLDADFFVDCSGFASLLIGQALQTPFVSFADNLFNDAALALPTPLDGPLPSQTVSTALRHGWAWQIPLTGRCGNGYVYSSAHCSADAAETELRRHLGLLDADVPVRHLKMRVGRMSKIWHRNCVAVGLSQGFIEPLEATALLFVQRTAAMLVEALEKGDLGPAAQQDFNEALRQRLENTRDYIVAHYKTNSRTDTDYWRANAENMRLSDSLQQVLMTWMSRQPLAPVLRAGRCGQGYPIVSWYALLAGMGIFPDVADLQPPTPQQARHRLDAVDDFVARSALNFPDHRALLADIPPRVGDRTLQLYLW

SEQ ID NO: 83101 - protein, 502 aa, Sphingomonas sp.
  misc_feature (1)..(502): tr|A0A4R1TWC3|A0A4R1TWC3_9SPHN Tryptophan halogenase OS =Sphingomonas sp. PP-CC-3G-468 OX=2135656 GN=C8J41_1181 1 PE=4 SV=1
MKRVQRLVILGGGTAGWMTAAAMSATFGDLVNISILESDAIGTIGVGEATIPTIQWFNQLIGLDEEAFVAATKASFKLGIEFVDWARPGTRYFHPFGRYGVDLGPVPFHQHWLRAKGDGLDRPLSTYSLAAQLAAAGRFAKPVDDPRSILSTLGYAYHFDAGLYARHLRQLAEKRGVVRHEGLLRDIERDPKTGFVTALTSDRGERLEGDLFIDCSGFRALLIGETMGARFEDWSHWLPCDRAVAVPCARIAATTPFTRSTLRPAGWQWRIPLQHRTGNGYVYASSFVSDDEAVATLLSNLDGEALADPRMLRFTAGFRREAWRGNVVAIGLSSGFLEPLESTSIHLIQSGIAKLITLFPDADCDPVLARQFNTLFARDMDGIRDFLILHYHATQGHDAPLWQHTRHMTPPPTLVDKIAQYTRAGRLMLSADELFREASWLAVLEGQGVGALGHAPLADTLDAATNRRQLNQIETVIARATPTLPLHDAAIAALVAPQVAGR

SEQ ID NO: 83102 - protein, 504 aa, Caulobacter radicis
  misc_feature (1)..(504): tr|A0A2T9K9M4|A0A2T9K9M4_9CAUL Tryptophan halogenase OS =Caulobacter radicis OX=2172650 GN=DDF62_05460 PE=4 SV= 1
MVDQRIRKVVVVGGGTAGWMAAAAFSRLLVGDAVSVEVVESEAIGTVGVGEATIPTIRNFNQTLGLDEVEFIRATQASFKLGIDFRDWGRVGHRYFHGFGDFGADHEAVQAHQLWRRLKALGDPSGLEDWSLPTAAAALNRFIPPSPDPRSPLHDYAYAYHFDAGLYAAFLRRFAEARGVTRTEGRIVDVALRGEDGFVEAVVLEDGRRVEGDLFVDCSGFRALLIEGALKAGFEDWSRWLPCDRALAVPCKLGGDGLTPYTRSTAREAGWQWRIPLQHRIGNGYVYSSAFVDDERASRTLMENLDGQALDDPRPLRFLAGRRRKFWDRNVVAVGLSGGFLEPLESTSISLIQNGVARLLEFFPDRRCDPLLADEFNRVSAQEYERIRDFIILHYCINQRDEPMWRQVREVELPDSLQAKIALYKARGHVAIHEGDGFARPSWIAIYNGLGVVPEAYDPLADRIPEAELRKLMEHRRALIRHTAQSMPTQDAFIARHCAAPPLS

SEQ ID NO: 83103 - protein, 504 aa, Caulobacter radicis
  misc_feature (1)..(504): tr|A0A2T9JQT2|A0A2T9JQT2_9CAUL Tryptophan halogenase OS =Caulobacter radicis OX=2172650 GN=DDF62_17855 PE=4 SV= 1
MSNDRIRHVVIVGGGTAGWMTAAALGRFLKDGVTKVTVIESEAIGTVGVGESTIPQINMFNRMLGLDEDDFLRRTKATYKLAIEFRDWKEIGHTYHHPFGPYGVDMEGVSFHAYWLRYQAMGEAADLSEYSLQSLAAAQAKFQRPTGQKNSPLGDIAYAFHFDAGLYARFLRDYAEARSVRRIEGRIVDVALRGTDGFVESVTLENGTVVAGDLFIDCSGFRGLLIEGAMKSGFEDWSHWLLNDRAVAVPCASGGSTDPVTRATARPAGWQWRIPLQHRIGNGYAFSSEHISEDEATAYLLANLDGEPLATPWTLKFKAGRRKKSWNKNVVAIGLSAGFMEPLESQSIHLIQVGISRLLAMFPDRRFQQPDIDRYNRVMTFEYEKIRDFLILHYKATERSDTPYWDYLREMEIPDYLADKIAVFESHGRIFRENEELFNDTSWFAVMVGQGLKPKGWDPMADVMSDDLLRARMREIQAVIARSAEAMPDHMSFVADRVARAQAA

SEQ ID NO: 83104 - protein, 567 aa, Rhodopirellula sallentina
  misc_feature (1)..(567): tr|M5U9C7|M5U9C7_9PLAN Tryptophan halogenase PrnA OS=Rh odopirellula sallentina SM41 OX=1263870 GN=RSSM_00662 P E=4 SV=1
MRTSSQLGTIFPEQDEPHDCHIVIVGGGTAGWMSAATLKRRVGCRVTVVESDRVPPIGVGEATIPAMVDWIENMGIDEDEFIRRTGATYKLAIRFDDWIEPSHRYWHPFGICGCSIEGVDLIHAWQRGVREGWLPNDSQYTDYSFQKELCDHGCGPRQPGMPSIAENYAFHLDAGKLAVFLREVALAEGVQHRVGDVEDAPLDEHGNIACLCLADGSPLQGNLYVDCTGFASVMIENAMNSPWEDWSEQLICDRAITFRIAGNTSQQDDGAVDVGRRALAPYTISTGMNAGWSWQIPLAENTGCGYVFSSKHISDEAAKSELCALVGADPDMVSAKTVPMRIGMRPRQWIGNCVSIGLSAGFVEPLESTGIFLVQRALDELFECLPPATPLAFHAGHFDHATFNGRMTEVYRQVRDFVLMHYVVSRRRDTPFWIDAATVDQPESLRGLLDEYVSTGRVRLPQRDPTFAEANHHFILSPAGVRAGTHEFGHPGESPAIPGVPAGQYQPVHPSVIFDSIRASHRELCAALPAHDALIQSIHGVKTTCDDRDDATHFPPKLYPPTANLLS

SEQ ID NO: 83105 - protein, 471 aa, Maricaulis sp.
  misc_feature (1)..(471): tr|A0A2D8BWW7|A0A2D8BWW7_9RHOB Uncharacterized protein OS=Maricaulis sp. OX=1486257 GN=CMF74_13645 PE=4 SV=1
  misc_feature (398)..(398): Xaa can be any naturally occurring amino acid
  misc_feature (427)..(427): Xaa can be any naturally occurring amino acid
MKNICIVGAGTAGLISALIFKQSLNVNITVIKSNKIGIIGVGEGSENKFTQFLKFCNISKEEIIKETGATLKYGILFEGWTNKDYLHEVSPKIFNVKKEQYLAAFGYAITNNLSVDKYTQLNQLKNNKVVNKYISDQFHFNTFKLNDYLIKKCKERNIKIIDDEITNIQIKNKKIISLNKKYKFDFYIDATGFKKLLIKKLGGKWDSYSKYLPMNEAIAFPTKGTKEYPAYTLAKAMNAGWMWRIPVQDRWGNGYVFDNRYINAEQAKQEVEKYLGYKIEIGKNIKFNAGAIDKPWIGNCVAIGLSANFIEPLEASSIGSCIQQSFLLINYLPNYDSTAIKQYNKSCTALFENIRDFVLIHYLCNKKDSRFWKNLKIKIPESLKTNLQKWKQRLPIEXDFKSSYILFYETNFALILKELNLIKLNEXKKEYKTKIQDADEKAIENYYKIFYKYRQDLINHKKYIKEINEYV

SEQ ID NO: 83106 - protein, 500 aa, Sphingomonas sp.
  misc_feature (1)..(500): tr|A0A2K8ME30|A0A2K8ME30_9SPHN Tryptophan halogenase OS =Sphingomonas sp. Cra20 OX=1327635 GN=CVN68_09110 PE=4 SV=1
MTDNRIRNIVIVGGGTAGWMAAATLARILGRDYASITLIESDDIGIIGVGEATIPQMATFNRMLGIDENEFMRATQGSFKLGIQFVNWGRQGHTYFHPFGKYGVDMQGVSFHAYFLRLHQLGEAPDVDLWSLQAMAARSNKFMRAIDAGRSPLSDIAYAFHFDAGLYARFLRSYAEARGVVRCEGKIVDVKLRGEDGFVQSVVMENGSEVEGDLFVDCSGFRGLIIEQALQAGFTDWSQYLPCDRAIAVPCASVETWTPYTRSTAHKAGWQWRIPLQHRTGNGHVFCSEFMSDDEATAILLANLDGAPLAEPRTVPFRTGHRNQFWVKNCVAMGLAGGFIEPLESTAIWLIQSGLSRFLTMFPDKQFNQADIDRYNRIMATDYEEIRDFIILHYHATEREDSPFWEHCRNMAIPERLAEKMRVFRSHGRAFRENEELFNDTSWFAVMHGQLLQPQGFDPVAEVMSLEETRSRLAHIREAIANSADYMPSHRDFIRENCAA

SEQ ID NO: 83107 - protein, 530 aa, Frankia sp.
  misc_feature (1)..(530): tr|A0A1V2IWQ8|A0A1V2IWQ8_9ACTN Tryptophan halogenase OS =Frankia sp. BMG5.30 OX=1834514 GN=BL254_03235 PE=4 SV= 1
  misc_feature (130)..(130): Xaa can be any naturally occurring amino acid
  misc_feature (239)..(239): Xaa can be any naturally occurring amino acid
MEDQRITKVVVLGGGTAGWMSASYLGKVLGPAVQITVLEAPSVPKIGIGEATVPNLHKTFFDFLGFAEEEWMRECNASYKMGIRFVNWRTDGTGEADARPFGDSIDHYYHLFGLLPNHGNLPLSHHWTYXKLNGQTSEPFDYACYREPPVMDKKLSPRFADGTKWTNYAWHFDANLVADFLRRFAVNKQGAVHVEDVMTEALIDHRGYVTGLRTKSGAVIEGDLFVDCSGFRGLLINQXMKEPFLDMSDHLLNDSAVATQVPHDDEANGVEPYTSAIAMSSGWTWKIPMLGRFGTGYVFSSRFQSRDDATLEFCRLWGLDPETQPLNQIKFRVGRNRRTWVKNVVSIGLSSCFLEPLESTGIYFIYAALFQLAKHFPDKRFDQILIDRFNAEIETMFDDSRDFIQAHFSFAPRNDTPFWRACKDLVLADDITEKIKMYRVGLAVNMPSTDESTYYANFEVEFRNFWNNSNYYCIFAGLNFLPDHPLPALAARPEEVESAEPVFDQIKRTQEKLISTLPSTYDYLKSLHGA

SEQ ID NO: 83108 - protein, 510 aa, Caulobacter radicis
  misc_feature (1)..(510): tr|A0A2T9JPM6|A0A2T9JPM6_9CAUL Tryptophan halogenase OS =Caulobacter radicis OX=2172650 GN=DDF65_06715 PE=4 SV= 1
METSAPLDIVIVGGGTAGWMVGTALVSGLRPHQARVRLVESDEIATVGVGEATIPAMRDYNRFVGIDEVEMMRETNGTFKLGIEFLDWGFKGSSYHHPFGVHGAAIGGAGFHHHWNRARLAGHDFDIEQFSYAIAAARDDRFEFPNPDPDKIDSTYSYAYHFDASLYAKYLRKVAEGRGLKRTEGKVVDVARDPLSGDVASITLVSGEVIRGDFFVDCTGFRGLLIGQTLNSPFEEWTDWLPCDRAWAVPCARADRFTPFTRSTAREAGWQWRIPLQHRTGNGYVYSSRYISDDEAAATLMANLDGEALAEPRQIRFKAGRRTASWTRNVMAAGLASGFLEPLESTSIYLVQIAVMNLLKLFPGKRVEPALVEEFNRRVDMEYDRVRDFLILHYHANTRTDGELWKHCREMEIPESLKHKLELFRHRGVAPNYHDGLFALPSWISVLLGQGVLPGGYDRMVDNVPLPQALAEMERQRSAIARRVPAMPTHADFVASHCAIPERPVAETMA

SEQ ID NO: 83109 - protein, 538 aa, [Pseudomonas] mesoacidophila
  misc_feature (1)..(538): tr|A0A2A4EVC7|A0A2A4EVC7_9BURK Tryptophan halogenase OS =[Pseudomonas] mesoacidophila OX=265293 GN=BZL54_31975 PE=4 SV=1
MSNPIKNIVIVGGGTAGWMAASYLVRALQQQANITLIESAAIPRIGVGEATIPSLQKVFFDFLGIPEREWMPQVNGAFKAAIKFVNWRKSPDRSRDDHFYHLFGSVPNCDGVPLTHYWLRKREQGFQQPMEYACYPQPEALDGKLAPCLPDGTRQMSHAWHFDAHLVADFLKRWAIERGVKRVVDEVVQVHLNDRGYISSLSTKEGRTLEADLFIDCSGMRGLLINQALKEPFIDMSDYLLCDSAVASAVPNADARVGIEPYTSAIAMNSGWTWKIPMLGRFGSGYVFSSKFTSRDQATADFLNLWGLSDKQPLNQIKFRVGRNGRAWVNNCVAIGLSSCFLEPLESTGIYFIYAALYQLVKHFPDTSFDPRLTDAFNAEIVHMFDDCRDFVQAHYFATSREDTPFWLANRHDLRLSDAIKEKVQRYKAGLPLTTTSFDDSTYYETFDYEFKNFWLNGNYYCIFAGLGMLPDRSLPLLRHRPESIDKAEAMFARIRREAERLRTSLPTNYDYLRSLREGDAGLSRSQPGPTLAAPEIL

SEQ ID NO: 83110 - protein, 517 aa, Mitsuaria sp.
  misc_feature (1)..(517): tr|A0A2G9C6A5|A0A2G9C6A5_9BURK Tryptophan halogenase OS =Mitsuaria sp. HWN-4 OX=2049333 GN=CS062_17755 PE=4 SV= 1
MTPIQDILIVGGGTAGWLTAAFLARQLGTAQGGVRITLVESSDIGIIGVGEGTFPSIRGTLSAIGIGEAEFLQACSATYKQGIRFDHWVRPPGTPGADHYFHPFSQPSQRPGAPELLPYWLGGEAGPTRAFAEAVTLQKAVADARHGPKRVGDGDYLGPLNYAYHFDAGRFATLLATHGQALGVRRVIATVDRVDLDEQGAIAAVHTREAGTLTAGLYIDCSGFRARLIGEALGSPFSSMRDVLFVDRALAMQVPYARPDAPIASYTIASAQESGWIWDIGLQERRGIGHVYSSRHCDDSDAERALRRYIGPAADDLSPRRLTLDIGYRETQWVKNCVAVGLAGGFLEPLESSGIGLIETAAYLIGQLFPFNGDTAPVARHFNAFMKERYARIVDFIKLHYGLTQRTDTAFWRDNADPASFTESLKEKLAMWRCRPPQRLDFITDVEMYLPASWQYVLYGMEFKTEPGAWMAPLNRGEEARREFATIAQLGAHALRDLPPHRTLIEQILARSDRRAA

SEQ ID NO: 83111 - protein, 542 aa, Dehalococcoidales bacterium
  misc_feature (1)..(542): tr|A0A2E9M978|A0A2E9M978_9CHLR Uncharacterized protein OS=Dehalococcoidales bacterium OX=2026733 GN=CL877_1004 5 PE=4 SV=1
MWTTGCLVWSRDNRENHLSKVLRNIRLVYVGMSEPLHNIVVLGGGTAGWLSAYMLQDFCRQHGISAKLTVVDSSKIPTIGVGEGTTAIFKTFMESFGLEEQEFLRETHGTIKYGIRHRDWKRLGHQYDGPIDDPHFLIPKEEPDDFEFINAYCIASGRCVSEAHLFQKLLSEGLAPVRKIPDGSLEPNHPFLHAFHIDNIAVGRYLRKKAKGIEIIDGVFEEVQRDPQSGNINALKLDGQRKIEGDFFIDCSGFSRLLVEQVFQSDWISYKDELPVNRAMPFFLDHDPAREIPPYTLAWAQGSGWMWQIPTQDRMGCGYVYSDEFLSPDEAHSEIESVLGESVEPRQDLRFEVGRVQDSWKGNCLAIGLSAGFLEPLEATSIHSTLVQLILFSKEYLEDVLHGNDRGRERFNQRIGRQFDDFKTFLNIHYRGERDDTPFWQHVHDHCLGEESARRLEMWKRELPMISHFQHYLSGLPHVETQLYYPVLDGMGLLNQQKAREEMARRKLKRKAQQQFQQLKDEYKQMTTGSLGHREYLLKLTH

SEQ ID NO: 83112 - protein, 507 aa, Hyphomonas jannaschiana
  misc_feature (1)..(507): tr|A0A059F712|A0A059F712_9RHOB Tryptophan halogenase OS =Hyphomonas jannaschiana VP2 OX=1280952 GN=HJA_16360 PE =4 SV=1
MGIPEQRAGMVQSILVVGGGSAGWITANLLNAHIRRAGRPTTVTLVESPDIPTIGVGEATVPTIRRTLSDIGLPEQDLLTSAEATFKTLIRFRDWNPGESYDHPFDRRQRPHTDAAVRGWTAQNGQAFDRAFSTLTQLADFNIAPKSPHAPPYRGNFPYAYHLDAIKLAKRLSKFGQARGIRHKLANITEVKVSPEGQISSVETDQGETLTADLYVDCTGFRSALLGKALDVPMKSYAKYLLCDRAVTMRVPYEVYKPERILTYTLATAREAGWQWDINLQSRRGIGYVYSSQFLSDDAAEAALRRYEGPHSDTLEARHIKFTSGKREMSWKGNCVAVGLSDGFLEPLESSGLYFIEFAALAVASMLEDYAAAPEATVRYYNRISNELFQEILGFINLHYVTSKRRDTPFWQAATADEAVLDDLRDRLELWKRRSPTQFDFPGADRLFAQDSYEFILHGMKYVEGPAGTAPMPPDLSGMVAKSRSELPEHEAFLALVQKAAAARPAG

SEQ ID NO: 83113 - protein, 507 aa, Sphingomonadaceae bacterium
  misc_feature (1)..(507): tr|A0A257DPC2|A0A257DPC2_9SPHN Tryptophan halogenase OS =Sphingomonadaceae bacterium PASS1 OX=2015579 GN=CFE36_ 01620 PE=4 SV=1
MSNSGQKPIHVIVLGGGTAGWMAATGVAVMLGDQVRVTLVESEDIGIVGVGEATLPHLRSFVESLGINESDFMRETHATYKLGIDFRDFGKIGDSYIHPFGSFGEELAGISFHHYWLAAQQRGDAGPISDYSMGVAAALANRFRPPANDHTLGSTYGYAYQFDATLFGPYMRTFALSKGVERIEGKVIEVRKDSETGNVTTLLLDNGQCVNGDLFVDCSGFRSMLLGEAVGAEWEDWSHWLPCDRAVAMPCAAASEIIEPYTRAIAMPAGWRWRIPLQHRVGNGYVYASSFIDDEKAADAIVAAAEGTSLADPRILKFRAGRRKNSFVKNVIGVGLASGFLEPLESTSIYLAQMAITYLIELFPKDGKIENADRAEFNRLVDMEYDRIRDFLILHYHATTRDDSPFWDHVRTMQVPDSLAGKIELWKRTGRVAKYSEGLFYDASWIAVFLGQNIIPNGIDPRVSIPDPGGMARALSSLKHAIDMEVATMPDHRAYLHSRSERLAPQL

SEQ ID NO: 83114 - protein, 526 aa, Rhodanobacter sp.
  misc_feature (1)..(526): tr|A0A0Q8MCA8|A0A0Q8MCA8_9GAMM Tryptophan halogenase OS =Rhodanobacter sp. Root179 OX=1736482 GN=ASD82_08225 PE =4 SV=1
MSRIQKILVVGGGTAGWLTACYLAKTLNSAAPGSIRVELVESPNIGLLGVGEATFPSIRGTLAAIGLDERRFLVGATATYKQGIQYVNWVRPPGEAGADRFFHPFSQPSQRPGSPELLPYWLLGGAPEGMSFAEAVSMQQRLIEQGRAPKRAGDPDYQGPMNHAYHFDAACFARVLAEHGQELGVTRHLATVERAELDESGAIDRIVTREIGELRADLYVDCTGLRGALIGGAMQSPFHSRRDVLFGDRAVALQVPYARPDAPILPFTRATAQEAGWIWDIGLQKRRGIGYVYSSRHTDATRAEEVIRRYVGEQAAGLESLHIKFETGYRPEHWRRNCVAVGLAGGFVEPLESTGIALVELGAYLITHLLPGDLDDMERSARHYNQMMVARYERIIDFIKMHYCLSQRRDHAFWIDNADPASIPQTLQDRLALWRHRPPHRLDFVTDLEMFLPCSWQYVLYGMEFRTDLEPMRSAYPQMAAAQREFAMIREMAGHALVDLPDHRTLVEQLCREHAQRTAQHEGFAA

SEQ ID NO: 83115 - protein, 511 aa, Sphingomonas sp.
  misc_feature (1)..(511): tr|A0A2K8MHW2|A0A2K8MHW2_9SPHN Tryptophan halogenase OS =Sphingomonas sp. Cra20 OX=1327635 GN=CVN68_09190 PE=4 SV=1
MVTGGSAANAIERVVIVGGGTAGWMAAAALSAHLAGSGVSITLVESSDIGTVGVGEATIPTIRRFYGQLGMSDAEVMQACQATAKFGIRFVDWLRDGHDFVHPFGRFGQDLKGVDFHHYWLRARAAGDRAPLGDYSLGSLLAGEGHATLPAPDPGSQLGIFDWALHFDAALFAQHMRRFAERMGVARVDARIAHVSLWGEDGFIEGLTLDNGARIGGDLFVDCSGFRSLLLGEALGVGYEDWSHWLLCDGAFAVQSERAGPPPSCTIVTARRAGWQWRIPLRTREGNGLVFSSRFQSDDDARDELLAQVPGKPVMEPRRLRFTPGRRKVAWTKNCVGLGLASGFLEPLESTSIALIETGIERLKQLFPDKDFDPAVIAEYNEQSAEEIERVRDFLILHYKLNGRPGAFWQTCRDMELPDSLNAKRALWRARGAFIRYRWEMFSPASWLAIYAGFENIPARIDPAIAGLDTDQLRRSLEAMRRSVRETLADTPTHQEFLEIMDGAAAKGRAA

SEQ ID NO: 83116 - protein, 507 aa, Nostoc sp.
  misc_feature (1)..(507): tr|A0A318BMM8|A0A318BMM8_9NOSO Tryptophan halogenase OS =Nostoc sp. 3335mG OX=2204170 GN=DMC47_02955 PE=4 SV=1
MDTSEIERVCIVGGGTAGWMTAAAIANKFAGLGVQVQLVESDEIGTVGVGEATLPHIRAFNATLGIAEADLMRATEATFKLGIEFCDWGRIGDRYIHPFGNYGPSEDGVAFYHQWLRLRALGDATRLDDYSFPVIAAEQNRFRHPGTDTTKVESSFGYAYQFDASLYAAFLRRYAEARGIERVEGKVVDVALDGERGHVRDVTLADGRVLAADLFIDCSGFRGLLIEGALQSGYDDWSRWLPCNRAVAVPTQSRGPLGPYTRATARTAGWQWRIPLQHRVGNGHVYCSSFISDDDAEAQLVANLDTPMQASPRRLRFTTGRRRVFWKRNVVAIGLAGGFLEPLESTSIHLIQDGITELLALFPDRSFDAGGIDEYNRRMALHFERVRDFLLLHYVATQRDDSEMWRHFRALTMPDSLRSKIDAWLSRGYVVPYQFGLFLPPSWVAVMLGQGLMPGGYDPRVLSDDDATIAARAAALRGAVARAVQATPDHEDYLRRSPAAAALAVRV

SEQ ID NO: 83117 - protein, 496 aa, Nostoc sp.
  misc_feature (1)..(496): tr|A0A318BKQ1|A0A318BKQ1_9NOSO Tryptophan halogenase OS =Nostoc sp. 3335mG OX=2204170 GN=DMC47_06850 PE=4 SV=1
MTDPIRHVVIVGGGTAGWMTAAAAGRYLDDGQRRITLIESDAIGTVGVGEATIPTILNFNRLLGIDEDEFLRETRGSFKLGIEFAGWHRPETGYFHPFGSFGRDIDGVHFHQLWAKLKGRAGVGPIGDYSPTTVAARANAFGPAHPDPRSPLSGMVHAYHFDATLYAQFLRRRAEADGVARVQGRIVAVERGEHGHVTAVRLDDGHRVEGDLFIDCSGFRSLLLGEAMGVGFEDWSHWLPCDRAIAVPTERTEPVLPYTRATAHAAGWQWRIPLQHRTGNGVVYASRYMDDDAAEALLLSRLDAAPTAEPRRLSFTAGRRDAMWAGNVVAIGLSGGFLEPLESTSIHLIQQGISKLFALFPDRGFSAVERDEYNRQMADSYRSIRDFIILHYHATARNDSPFWNHVRTMEVPDSLTRKIELFRQKGRVFRYDDELFTLPSWVAVLMGQGIEPVGHDPIADALDEERLLPAIRQMRSATAAAVATLPQHGAVLARLR

SEQ ID NO: 83118 - protein, 149 aa, Deltaproteobacteria bacterium
  misc_feature (1)..(149): tr|A0A4Q3KLL1|A0A4Q3KLL1_9DELT Tryptophan 7-halogenase (Fragment) OS=Deltaproteobacteria bacterium OX=2026735 GN=EOO40_11480 PE=4 SV=1
RLCDELPLTRASMDVVARRFNDDFSYRWARVIDFLKLHYALSQRDDSDYWRAHRDPATWPERLRELLPMWRLRAPARHDFGRIDEVFPSASYQYVLYGMGFRPDAPTPPAAKLQAAQACFDEAARQARRFVSALPGHRSLIDHIHRSAP

SEQ ID NO: 83119 - protein, 500 aa, Sphingomonas sp.
  misc_feature (1)..(500): tr|A0A4R1U7I8|A0A4R1U7I8_9SPHN Tryptophan halogenase OS =Sphingomonas sp. PP-CC-3G-468 OX=2135656 GN=C8J41_1014 75 PE=4 SV=1
MSARIQVVIIGGGTAGWMTAATLAMSFAGRLADVTLVESEDIGTVGVGEATVPHIRFFNQRLGIDEADFIRRTNATFKLGIEFRDWGRIGDSYIHPFGDFGHDIDGLPFHQYWAHATRGGADGLPTLENCSLPIVAARDNRFTPPLEDPRSIGSTYSYAYQFDATLYAAYLRDYSEARGVVRIEGRVDAVEQSAGGIAAVRLADGRRIAGDLFIDCSGFRALLIDGALKVGHEDWSHWLPCDAAWAVPTANAGALTPYTRATAREAGWQWRIPLQHRTGNGHVFSTRFTDPETARSVLMDSLEGEALAEPRMLRFRTGRRHRQWVGNCVAIGLSAGFLEPLESTSIHLIQLAIGKLIELFPSGGVFDPADEAEFNRAMALEYDRVRDFLVLHYCATDRDDTPFWRYMRTMTLPSSLTEKIAEFRERGIVASYREGMFLPASWLAVYYGQRIMPGRVNPLIADIPMATSRDHVARVAAACASAAKAMPLHEDYIARVKAAA

SEQ ID NO: 83120 - protein, 499 aa, Sphingomonas sp.
  misc_feature (1)..(499): tr|A0A4R1TSI1|A0A4R1TSI1_9SPHN Tryptophan halogenase OS =Sphingomonas sp. PP-CC-3G-468 OX=2135656 GN=C8J41_1181 3 PE=4 SV=1
MNDTSEPPRTRVVVAGGGTAGWIAAAAIVRQLGSLVDVTLVESDEIGTVGVGESTIPTARSFHAFLGIDEAAFMRATQATFKLGIAFENWRQVGDRYFHPFGSIGRSVAIADFQHFWLEARARGFGGAYGDYSLEQQAAGAGLFGHDEQHSLAYAYHLDATAYARFLRTLAEPWGVRRVEGCIERVERDGEGSDIAALVLASGERIAGDLFVDCTGFRALLTEGTLETGFEDWSEWLTTDRALAVQTETVGPPVPYTRAIAHGAGWRWQIPLQTRTGNGLVYSSAHMSDDEAHETLIGALDGRPLFEPRPLRFRSGMRRLAWNRNCIALGLAAGFIEPLESTSIHLIMNAVIRLIQLFPFRGDDHGALASRFNAQSRHEWEHVRDFIVLHYHVTQRDDSAFWRDCARMTIPDSLAERIALFTKTAGAWQGQDDLFRIDSWVSVMLGQGVVPRAHHRIASIIKGQELRTSFEDLSRGIASTVRLLPRHCDFLARYCPADG

SEQ ID NO: 83121 - protein, 500 aa, Gammaproteobacteria bacterium
  misc_feature (1)..(500): tr|A0A424LQU9|A0A424LQU9_9GAMM Tryptophan 7-halogenase OS=Gammaproteobacteria bacterium TMED243 OX=1986753 GN= CBE03_005390 PE=4 SV=1
MEHQKVHKVVVAGGGTAGWMAAASIAKLLGKTLDVTLIESDEIGTVGVGEATIPTLQTLHELLQIKEQDFVAAVQGTFKLGISFENWRDKGDDYIHSFGYTGQDCWAAGFQHFWLKGKQLGLSEEFGNYCTELVAAQDNRFAVLPNNGLNYAYHFDASLYAKFLRGIAEENGAVRKEGKIRQVEQHAGNGFISAVELESGERIEGDLFIDCTGFRGLLIEQTLHTGYDDWSHFLPADSAVAVQTESAGPPVPYTRSIAHESGWQWRIPLQHRVGNGMVFCSKFWSDDEATSKLLGNLAGEPLTDPRVIKFTTGTRRKHWNKNVIAMGLASGFMEPLESTSIHLIQRAVIRLMQMFPYDGVRQPDVDEFNNQMKFEIDNVRDFIILHYHVTNRRDTKFWRHCSSMPIPDSLQHRIDLFRETGRVFKVPTELFGENSWIQVMLGQGMEPEQYHPIVNMMDKRELDGFLKGIRANVGKVVGQLPAHQRFIDHYCKAEPPMMAR

SEQ ID NO: 83122 - protein, 498 aa, Cellvibrio sp.
  misc_feature (1)..(498): tr|A0A1U9NBQ1|A0A1U9NBQ1_9GAMM Tryptophan halogenase OS =Cellvibrio sp. PSBB023 OX=1945512 GN=B0D95_11585 PE=4 SV=1
MNSIKKIVILGGGTSGWIAAAMLAAHVRRDLCSIELIESDDIGAVGVGESTIPPVVRLITSLGIDEEDFIRETQACYKLGIKFVDWRHRNQSYFHPYGAIGQRIGSQDFYQCWLKATMAGESYPLQDFSPCSVMAAQGRFFLPSQSMNTPIGGAGYAIHLDAKLVAAYLRRYAEARGVTRSEGNYVAVERRDNGFISALVLADGRKIEGDFFIDCSGFRALLIDGAMAAGFEDWSHYLPCDRAIVVKTEAAGSRMPYTTATARKAGWSWRIPLRNATGHGYVYSSRFCTDADAKTTLLSNLDAPRINDPRLISFTAGRRLEFWKNNCLALGLSGGFVEPLESTAIHLITRGMDYFLRFFPDLECDPSLRREYSRRMGADYEEVRDFILLHYCTSERSDSDFWRWCQTMPLPDSLRERIELFKAHGIVREEHDELFRSTSWQSVFEGMGIRPAKYSPRVDNIELAQITEKLALARSAILNMVKTLPTHDEYLDHRFGER

SEQ ID NO: 83123 - protein, 448 aa, Roseateles sp.
  misc_feature (1)..(448): tr|A0A1H7QVY8|A0A1H7QVY8_9BURK Tryptophan halogenase OS =Roseateles sp. YR242 OX=1855305 GN=SAMN05216359_110140 PE=4 SV=1
MNTRHAIVVGGGTAGLIAAISLVRLAGIRVTVIRSSDIGHIMVGEGTFSSTPRLLHDVLGIPRPEFFDKVNPTWKLGIHFLWGNRPYFDFPFSFAVSHDNQILPGTEKPWGYYNLDEHLGRYTTVSNTDPAVLAKMQSGIGYHFENQRFVEYLEGFFTASGGQLLEGKVTDVVTGDHGIAYLRTADGRQLDADLFIDASGFSGRLIHGAMAEPYVPMSDRLFCDTAVVGGWRRGEDEPIKPYTTAETFSSGWCWQIEHETIVNRGYVYSSKYQTPEAAAAEYLSKNPKVDPGRLRTVPFESRRIRRAWVKNVVAIGNSCGFVEPLEATNIQLICEQSIELARLLTQEDVSKASDEYNGRVVEQWNDICDFLSLHYKFNDRLDTPFWRMAQEKTSLGKLDAYVQRYLTHGPMLYDDAAGQKYMFGADGNLAILLGMGVPWAESPAVRRR

SEQ ID NO: 83124 - protein, 518 aa, Cellvibrio sp.
  misc_feature (1)..(518): tr|A0A1U9N8Q9|A0A1U9N8Q9_9GAMM Tryptophan halogenase OS =Cellvibrio sp. PSBB023 OX=1945512 GN=B0D95_07910 PE=4 SV=1
MSNSIKKIIIVGGGSAGWLAAGLLAAEFKHAESSIEITLIESPDVNTIGVGEGTWPSMRATLRKIGISETELVRECFVSFKQGSKFVGWRTGASDDVYHHPFSIPHGYAESNLAAAWQAKFADHPFAEIVSSQFVVAEHGCAPKQVATPEYAGVLNYGYHLDAGKFAVILQRHCTANLGVKHILDHVTKVVSADNGDIAAVDTKATGIISGDLFIDCSGLSCLLLGQHFGVPFVDKKHLSLNDTALAMQVPYPEKNSPIESCTVATAQSAGWTWDIGLSSRRGVGYVFSSGYISEEQAERELRAHIAKSVGAAVADSLSSKKLSIRAGHRQEFWHKNCVAVGMSAGFIEPLEASALALVELSMNMICEEFPVDRSAMSVVAKRFNEVFCYRWERIIDFLKLHYALTERRDSDYWRDMSSPEALPDRLRELLVLWKSRPPHRNDFIQVEEIFPSASYQYVLYGMGFKMDASALPRTSDNLPTALARIRETAEKTRKFLAGLPSNRDLIDHVMLHGMPLI

SEQ ID NO: 83125 - protein, 447 aa, Streptomyces yokosukanensis
  misc_feature (1)..(447): tr|A0A117PZL7|A0A117PZL7_9ACTN Tryptophan halogenase OS =Streptomyces yokosukanensis OX=67386 GN=AQI95_34940 PE =4 SV=1
MAKETTDVVVIGAGPAGAVSAYVLAKQGHSVVLLEKETDPRFHIGESLLPYMMGLFERIGLRDVVASQGYVPKFGGEFIDPTEKKFFEGVFRADFTKQGPGRHDNAFQVERRRFDRMLAEQAEAAGAQVVFGAHVNELLMEGDRMVGVRYERDGESHEVRSTYVIDASGRTGKIAHRFGLRKTLEKLRMVAVFRHYTGLDESHNLGVEGDIQVAAHDDGWVWAIPLSKDTISVGTVMPRDVLRASTPEKVFEEHLARVPRIVSRLTGTQPSMDFKIETDYCYHTDTVTGPGWLMVGDAGCFGDPMFSGGVLVATATAVRAAETLGEALADPSAEERLLDRYAGYFKTGYDTYIRLIHAYYDGELVAMAADAARSTDRDTLEKYLIRLIGGDFWSEHNSVAQEMRRRKEWDTFEPFQRVYGCPSYPHLDEVDRKERSESRVRRVTAGR

SEQ ID NO: 83126 - protein, 478 aa, Streptomyces sp.
  misc_feature (1)..(478): tr|A0A014MEF1|A0A014MEF1_9ACTN Tryptophan halogenase OS =Streptomyces sp. PRh5 OX=1158056 GN=Z951_25695 PE=4 SV =1
MNSAGQSDYDVVVVGGGPGGSTLSTLVALQGYRVLLLEKEEFPRHQIGESLLPSTVHGICRLLGVTDELANSGFMKKHGGTFRWGLNAEPWTFDFSVSEKFSGPTSYAYQVERMKFDKILLDNARSKGVDVRERSEVVGVLEEEGRICGVRYDDAEGVRREVRARFVADASGNKSRIHKRIGGARKYSDVFQNIALFGYFTGGRRAPAPWTGNITCASFDLGWFWYIPLSDELTSVGAVLRREALARLQDGPRDKVLEGLIDECPLIADYLSEAERVTEGPYGQVRVRKDYSYIQENFWRPGMVLVGDAACFIDPLFSSGVHLSTYSALLAARSINTTLRGAIDEAYCFREYETRYRREYDVFHDFLVAFYDLQKDEHAYFRKAKSVIGSSAPAAESFAELVGGGASNEEALIGTAPSVSQERRADLLERSRKIHWQGSRVQVQALFGESVGDAPLYEGGLVESPDGMHWAHPEQPAS

SEQ ID NO: 83127 - protein, 509 aa, Shewanella sp.
  misc_feature (1)..(509): tr|A0A3S9L4F1|A0A3S9L4F1_9GAMM Flavin-dependent tryptop han halogenase RebH OS=Shewanella sp. TH2012 OX=1965282 GN=rebH_2 PE=4 SV=1
MTEKHSAITSVLIVGGGSAGWMSAALLARVFKGRLAITLVESSEVGTIGVGEASIPPLTLFNQALGIDEAEFLRHTQGSIKLGIEFQGWGDKHSCYMHAFGAMGKDLGLIPFHQLWLKRFLGSGDTGNSANPASDFWRYSLNSQAAKANRFAPMAQIHGTPLSGLTHAYHFDAGLYGAFLKDYSTARGVTHIEGHIASVDLEHSHHERRIASVSLTNGEVLSADFYIDCSGMKALLIEEALGAGFDDYSALLPCNRAIAVPSERTEPLTPYTQSIAFEAGWRWRIPLNHRTGNGVVYSSEFISDDEAEARLLASLDGKPLGEPRRIRFTTGRRKQQWAGNCVAIGLSSGFLEPLESTSIHLVQSALLQLVRFFPASSDFKASRDGFNRASQQEFEEIRDFILLHYVLNRRDEPFWRARAALTLPESLARRMALFAENGSLERHSDELFSALAWQQVLLGQGLVPISHAPIADTVPGPELAEYLENIHKIQQRALSSLPLHSEFLAKLSR

SEQ ID NO: 83128 - protein, 498 aa, Cellvibrio sp.
  misc_feature (1)..(498): tr|A0A1U9NEE8|A0A1U9NEE8_9GAMM Tryptophan halogenase OS =Cellvibrio sp. PSBB023 OX=1945512 GN=B0D95_16805 PE=4 SV=1
MQKPQKIVIVGGGTAGWMTANLLAARWGGIEIGLLESSDIGIIGVGEGSTPHLKFFFDEVGIEESEWMPRCNATYKNGISFVNWSSIPGFESYFHPFPAQTDDIFTVPAFLSSIHARMQGYNVNAHPDSYFLETYITQKNLGPIPTENFPFGVAYGYHFDSGLLGQYLAEKAVSRGVKRIFGTVTEVLMNESGELSSVRLDDDSQLAADFFIDCSGFKSLLLQSALKVTYKSFKENLFNNAAVVMPTAMAEIIPPETKSTALSNGWAWKIPLTNRFGNGYVYSADYITPDQAEAELRQHLGMLDSDVAARHLQMKVGRVEKHWAKNCVAVGLSQGFIEPLEATALALSFNTVSAFIKCYEKGAYTNQYEDEFNKEMNARFDGVRDYIVCHYKANQRKDTDYWKDNAANTHLSDVLKQVLHFWQAGGDFAKNMYANNLIGSYQPKSWACLLAGYGVFPPLRASENDDHYKSLHDMAQLADFIRRCGLNFKKHNELLRLT

SEQ ID NO: 83129 - protein, 496 aa, Cellvibrio sp.
  misc_feature (1)..(496): tr|A0A1U9NBW5|A0A1U9NBW5_9GAMM Tryptophan halogenase OS =Cellvibrio sp. PSBB023 OX=1945512 GN=B0D95_13540 PE=4 SV=1
MHANSVKRLVIAGGGTAGWMAAAAFAKKFGELLEITLVESDEIGTVGVGEATIPPMRVFHKLLGIDEQEFMRATKATFKLGISFENWARQGDKYIHSFGKTGKETWLGDFHHFWLRSRELGMDFEFGDFCLEFQAAQANKFFTGPGADINYAYHLDASRYATFLRAMSEKYGAKRIEGKVIEVKQDHDTGFISALVLASGVVVEGDFFIDCSGFRGLLIEQTLRTGYEDWSQWLPCDTALAVQTESVGPAVPYTRAIAHHAGWQWQIPLQHRVGNGLVYCSNFMTDEEARATLLQNINGPRVNEPRLIKFRTGRRRKSWNKNCVALGLASGFIEPLESTSIHLFIMAITRLMRFFPFSGVEPVLVDEYNRETLAEIEPIRDFVIMHYKATERDDSPFWRYCRNMEVPATLAHRMKLFKKTGHAYQAQGELFRIDSWTQVLFGQRVMPEQYHHIAQLMSEQELRQFLMRMKESIRDATEKLPLHEEFVRQYCRAQME

SEQ ID NO: 83130 - protein, 508 aa, Nostoc sp.
  misc_feature (1)..(508): tr|A0A318BBB2|A0A318BBB2_9NOSO Tryptophan halogenase OS =Nostoc sp. 3335mG OX=2204170 GN=DMC47_21595 PE=4 SV=1
MIDDNRLRHILIVGGGTAGWMTAAALSRFLVDGFTKVTLIESDAIGTVGVGESTIPQIRIFNRLLNLDEDDFVRRTKATFKLAIEFVDWRRIGDRYYHPFGPYGVDMGGVSFHPYYLRALKEGHGGRLDEYSLQSLGAADAKFSRPVPDAGNSPLADIAYAFHFDAGLYASYLRDYAEARGVVRREGRIADVAQHAETGFVESVTLEGGETIEADFYVDCSGFRGLLIEQTLKAGYEDWSHWLMNDRAVAVPCTLGGSLNPVTRATARPAGWQWRIPLQHRLGNGHAYSSVHMSDDEATALLLANLDGEPLADPLALRFTAGRRKKSWDRNVVAIGLAAGFMEPLESQSIHLIQVGISRLMTLLPTRSMGQPEIDLYNRWMTWEYEKIRDFLILHYHATERDDTPYWDHCRTMEVSDYLKEKIAIFRSTGRVFREHDELFNDTSWFAVMMGQGLTPGRYDPIVDEMPEPVFLDRMSQIRRAIRNSVDWMPNHFDFIAKHCASEGFTRP

SEQ ID NO: 83131 - protein, 503 aa, Cellvibrio sp.
  misc_feature (1)..(503): tr|A0A1U9NDP9|A0A1U9NDP9_9GAMM Tryptophan halogenase OS =Cellvibrio sp. PSBB023 OX=1945512 GN=B0D95_16795 PE=4 SV=1
MQNNLNSICIVGGGTAGWMAASLLSSSLQGTGIKITVVESPDIAIIGVGESTVPSILEFLRVCRINLKEFVQATSASFKLGIRFEDWLKPGEHYFHPFGRVGQDLHGFEFYQAWLKTCADGHVSRWVDHSPCAIMAENHRFMLRPPQEQNWVLRNTGHALHFDAVLVARYLREFSLARGVERIEATVDNVIVDERQFISALELNNGTTITNDFFVDCTGFKGLLIAEALNVGYEDWTHYLPCNRAIAVQTTNTGEPSPFTTATAREAGWTWKIPLQHRTGNGYVFSGEHCSDEKAIDTLLKAVDGELLIEPRVIPFTTGRRKKVWHNNCLSVGLASGFLEPLESTAIHLVYKVLLRFISHFPDKDFDLRVEQAFNQKINLDYQEVRDFIILHYCTTNRDDTEFWRWCQNMPIPDSLNEKIHLFRERGELEHSYGQFFSQDSWCSILEGMNVRPKKYHPLMDGFDSQGLAKTLRENVQDIYSTVMQMPKHGDFIRQHCAAKKVL

SEQ ID NO: 83132 - protein, 530 aa, Sphingomonas sp.
  misc_feature (1)..(530): tr|A0A4R1U623|A0A4R1U623_9SPHN Tryptophan halogenase OS =Sphingomonas sp. PP-CC-3G-468 OX=2135656 GN=C8J41_1029 30 PE=4 SV=1
MAGRLTPPRICPAMAAPDGFEAGTRTMANHPLRIVIAGGGTAGWMAAATFARFLETGYEIDLIESDAIGTVGVGEATIPQIHLFNDALGLDEDAFLRATGGTFKLGIEFVDWFKPGHRYMHAFGDVGRDVGLLPFHQYWLRARSLGLAGDLGAYSLNTHAALAERMQRGPARTARTLPSMPYAYHFDAGLYARYLRRYSETRGVNRIEGKIVRVTRDGESGDVSGLVLENGTTVAADLYIDCTGFRGLLIEEALATGYEDWTHWLPCDRAIAVPSARSEKFTPYTRSTAHAAGWQWRIPLQHRIGNGVVFSSAHMSDDEATATLLAGLDTPAMADPRTISFRTGRRRQMWNSNVVALGLAAGFMEPLESTSIHLIQSAISRLLKLLPGRVIADADRTEFNRQSDFEYERIRDFIILHYKATARDDTPFWRQCRDMAVPDTLAAKIDLWRGNGHIVREHEELFTEVGWLQVLAGQGIMPTGHHPLADAISTSDLGEFMDTIDKLNAREAGQMQDHAAFVAQHCASPAGLGA

SEQ ID NO: 83133 - protein, 504 aa, Cellvibrio sp.
  misc_feature (1)..(504): tr|A0A1U9NBL8|A0A1U9NBL8_9GAMM Tryptophan halogenase OS =Cellvibrio sp. PSBB023 OX=1945512 GN=B0D95_11375 PE=4 SV=1
MHDNNIRRIAIVGGGTAGWMTAAALSKLIKPDYCQIRLIESEDIGTVGVGEATIPQIQLFNKLLDLDENEFVRKTQGTFKLGIQFVNWKKIGHKYIHAFGEVGKDMEGVQFYHYWLKMRAQGKAEELDNYTIGGLASDRGKFMRPIDAGNSPLSNIAYAFHFDAGLYARFLREYSEARGVLRTEGKIVDTILRASDGFIESVQLASGERVEADFFIDCSGFRGLLIEQALNTGYEDWAHWLPCDRAWAVPCESVGEPTPYTRSTAHSAGWQWRIPLQHRVGNGHVFSSRFMSEDEACSILLNNLDGKPLAEPRLLKFVTGKRKKVWNKNCVAIGLASGFMEPLESTSLHLVQSTIARLMSFFPNKSFDQEDIDEFNRQASFEVEKIRDFLILHYHATERNDSDFWNYCRTMSIPEDLTQKIEQFKKNGRIYRNNTEMFNELSWFEVMHGQGIHPHAYHPLVDRMSNDEIAKRLEGIRGVIEKSVDYMPTHAEFIAEHCKAIKIY

SEQ ID NO: 83134 - protein, 498 aa, Nostoc sp.
  misc_feature (1)..(498): tr|A0A318B3T8|A0A318B3T8_9NOSO Tryptophan halogenase OS =Nostoc sp. 3335mG OX=2204170 GN=DMC47_24150 PE=4 SV=1
MAAAIERVVIVGGGTAGWMTAALIAKVIGPQLRITLIESDDIGIIGVGEATIPPIQHVNAVLGIDEAEFLRETRATIKLAIRFDDWGAIGQSYYHSFGAAGRNTAFCSFHHYWTRAKRAGIAADYWDYDLNYLCAREGKFAKIQVDDPLWHLPYAYHFDSALYGRYLRRYSEARGVERVEGLVERVGRDGETGHVTALTLRGGREVAGDLFIDCSGARGLLIQLQLNVGYEDWGHWLPCDRAMAVPTARHDETPPYTRSTARSAGWQWRIPLQHRVGNGLVYSSRHLSDDAAADLLLGNLDGAVLADPRIIPFRTGRARRQWDRNVVAIGLSSGFLEPLESTSIYLIQSAIVRLLHLFPHAGFDERQIAEYNRQSRIEFETVRDFIILHYHATRRDDSDFWHHVRTMALPDRLADKIALFRATGTLTQDPLDIFMEASWVQVLMGQGIEPADYHPLADGPTDAELAEQLRQLAAMKREPVPNMPGHDRWLRGFGGAMA

SEQ ID NO: 83135 - protein, 490 aa, Nostoc sp.
  misc_feature (1)..(490): tr|A0A318BJM8|A0A318BJM8_9NOSO Tryptophan halogenase OS =Nostoc sp. 3335mG OX=2204170 GN=DMC47_08150 PE=4 SV=1
MNSAPISRVVIVGGGTAGWMAAAAASRFLDDGQRTITLIESDAIGTVGVGEATIPPIRGFNARLGIDEAEFLRATGGTAKLGIEFVNWGNRGDRYIHPFGTHGRDIQGLNFHQLWLRLRDEPGIGEIEDYSISAVAARAARFAPPVSDPRSPLSRIEYAYHFDAGLYAAFLRRRAESQGAQRIEGRIIGVEQDERGHVSAVRLEGDRRVEGDLFIDCSGFRSLLLGETMGVGFEDWSHWLPCDRAIAVPTERTRPLLPYTRATAHDAGWQWRIPLQHRTGNGHVYSSAFVSDDDAERVLTANLDAPATGELRRLSFKAGRRERMWSGNVVALGLASGFLEPLESTSIHLIQDGISKLFALFPDMRFTDIERNEFNRLMGNQYAAIRDFIILHYCATQRDDTPFWDHVRTMELPDTLAHKIALFREKGRVFRYDDELFSIPSWVAVMLGQGIMPTGYDPVVDALDADRVAAELRQMRAGYAAAAQKMPLAG

SEQ ID NO: 83136 - protein, 510 aa, Sphingomonas sp.
  misc_feature (1)..(510): tr|A0A4R1U6N5|A0A4R1U6N5_9SPHN Tryptophan halogenase OS =Sphingomonas sp. PP-CC-3G-468 OX=2135656 GN=C8J41_1029 33 PE=4 SV=1
MIDGLGQHIVILGGGTAGWMTACLIAHRWRDRGVRVTLVESPEIGIVGVGEGSTPQLKHFFDTLDIKEAEWMSACDATYKLGIGFDGWSDREGHERYFHPFPTALDGHTAPQFFYNSRARRTGRNVDAHPDQFLLPARLAAAHRAPQPAANFPFEVSYGYHFDAYKVGAFLAAHATETLGVVHLQRRIASVERALTGEITALIDTDGGRIAGDFFIDASGFRSTIFGALDVPFVSYADALFNDRAVVMPTAHNTGAPIPSQTRATALSAGWAWHIPLTSRNGNGYVYSSRHLTEAQAEAELRAHIGAEAGGARHLKMRVGRVRDSWSHNALAVGLAQGFLEPLEATALHLVIATVEAFLDMVDHGGATDAVRTAFNTRIAARYDGVRDYIVAHYRLNQRHDDPTGYWAEARGVDVLSDDLKMLMSTWFTGADIVAAIDRAGLGRYYSATSWHCLFAGYGTFPDAARLIPPGADIDPIDLPKIDDFLTRCASNFRSHASRLRAAADHKDHV

SEQ ID NO: 83137 - protein, 523 aa, Cellvibrio sp.
  misc_feature (1)..(523): tr|A0A1U9N7P1|A0A1U9N7P1_9GAMM Tryptophan halogenase OS =Cellvibrio sp. PSBB023 OX=1945512 GN=B0D95_05870 PE=4 SV=1
MADHVTRVVIVGGGSAGWLAAGIIAATSPNHVQVSLIESPDVAPIGVGEGTWPTMRATLQSMGISETDFFRECDASFKQGSKFSRWTSLSKDDDYYHPFTLPAKYHEINLAPFWLPFKEKIPFASAVCPQAAVCDLGYAPKQITSPEFSAVLNYGYHLDAGKFAPFLHKHCVEKLGVNYISANVTVINSHENGDIRSVNTDTQGEVVGDLFVDCTGLSSMLLGQHYKVPFVSQQHVLFNDSALAVQIPYIENADAIASHTLSTAQTNGWIWDIGLQSRRGIGHVFSSRYTTDELAERELRNYIAPSVGEKMAEELSVRKISFNPGHRDTFWHKNCVAIGLAAGFIEPLEATALVLIEISAKMIAEQFPVNRSTMDIVAKRFNNTLGHHWRRIIDFLKLHYVLTKRTDTEYWRDNCLAGTIPDSLQELLALWKVQSPWLHDEMRREEMFPSASYQYVYYGMRGMTESAGVDRYALGGKPLCDRKLRKAEALFMENAQHIQQLRKILQPNRELIEKIKLYGLQTI

SEQ ID NO: 83138 - protein, 507 aa, Rhodanobacter sp.
  misc_feature (1)..(507): tr|A0A1V3Q3U2|A0A1V3Q3U2_9GAMM Tryptophan halogenase OS =Rhodanobacter sp. C03 OX=1945858 GN=B0E48_06520 PE=4 S V=1
MTDPRIKNIVIVGGGTAGWMAAAAFAKVLGPAYSIRLVESEEIGMVGVGEGTVPHLKLFNDLLGVHDIEFMQNTQGTFKLGVQFNDWGRLGDSYIHGFGTIGHDVSLLPFHQFWIKAMQKGVASEIGAYSINTLAAPRGKFMTSATDVPASSPLADIAYSYQFDATLYAKFLRGYAEKRGVRRTEGKVAQTVLRPDDGFVEAVVLESGERIEGDLFIDCSGFRGLLIEQALHTGYIDFTHWLPCDRALAVACEKVEEPTPYTRSSARPAGWQWRIPLQHRTGNGYVYSSAHVSDDEAAATLLKHLDGKPLGDPRLLRFTTGVRKKSWNKNVVALGLASGFLEPLESTSIYMIQSGIARLLNLFPQRDFSEVVVDRYNAQAKFEYEHIRDFLILHYHATERDDTPFWNQCRTMSIPAQLQDNIRLFRDSGRFFRDAEEMFATTSWVQVMLGQRIVPRGYHPLVDQMPDQELAKFMAGVGQVVASCVDAMPSHQAFIDRHCVAPSLAVA

SEQ ID NO: 83139 - protein, 496 aa, Streptomyces yokosukanensis
  misc_feature (1)..(496): tr|A0A101NJV3|A0A101NJV3_9ACTN Tryptophan halogenase OS =Streptomyces yokosukanensis OX=67386 GN=AQI95_43495 PE =4 SV=1
MQVEDDHEFDVVVVGGGPGGSTVSTLVAMQGYRVLLLEKEEFPRYQIGESLLPSTVHGICRLLGVSEELEKAAFMPKRGGTFRWGSSPEPWTFSFSVSATFSGPTSLAYQVERMKFDQILLDNARDKGVEVREKSSVVDVIEEDGRVCGVLYSDVDGVRHEVRSRFVVDASGNKSRIQSRIGGTRHYSDFFQNIALFGYFEGGKRLPAPNSGNILCAAFNSGWFWYIPLTDELTSVGAVLRREALERVQGDREKALMGLIEECPLIAEYLSEARRVESGPYGEVRVRKDYSYCQDTFWRPGMVLVGDAACFIDPVFSSGVHLATYSGLLAARSINSSLSGDFEEKKCFEEYEARYRNEYSLFHDFLVAFYDMHQDEDSYFWTAKKVMNSSAPGLESFVELVGGGASHEGGLVNAASYTEQRESTFREFSELVDRPAGESGTDRDLFDSMLVQSVLEEGAKIQVHAALGEAVDDEGPMREGGLVPSADGMRWADFGY

SEQ ID NO: 83140 - protein, 598 aa, Microcystis aeruginosa
  misc_feature (1)..(598): tr|A0A552DRY0|A0A552DRY0_MICAE Tryptophan halogenase OS =Microcystis aeruginosa Ma_SC_T_19800800_S464 OX=248625 7 GN=EWV81_12990 PE=4 SV=1
MVATNTNEYDVVIMGAGFAGVCQARHLLLNVPNIKIALIDPRPEERTNKDLKIGESMVEIATLFVCKELGLYEYMIENHPPKFGLNFHWPKKKEKTTTTDDYYHIWNNRQPPLASFQMNRARFERDLLKMNKAMGATFYQGRVVDVDLTSKDELKTVIAKVENEQITLKAKHVIDAAGRKFIIGKKTDNLLFGADNLFGLDTGSVWVRVNNIDRTIFHDGYDPYGTTCSHYYATNHWFGHGHWLWMIPTEKDSQEISIGIAYHRSAIADHQINTKEKFYDFLKANHEILYRLVNSGENIDFHYLPRPSHTSKTMFSADNWYVIGDAACIFDPFYSLGSSMISYQIECTTEIIRSKLVGEAIGEKKQAAYNDFILTYTRFNNHLIKHHDKQLGNASIMSWRIYHDYIWWFGVQVPMYTGKWFLDLDFLARYTLGLKEHQTGYCEHLYQQFNEVIKQGKNLGFMDCYRGDQLWRDYHTLKHFDNFVENTKLEPKRSNVFASMKWTNFYTAIWYAKFLWKGFGWRGFLNGKNLYYLAEHFVHMLQAMIGEMFYKHFTKGIPDNSQIELTRQEFTNYRYRPQLNTWVTESVAKSPEKVPVNV

SEQ ID NO: 83141 - protein, 538 aa, Burkholderia ubonensis
  misc_feature (1)..(538): tr|A0A105YSW6|A0A105YSW6_9BURK Tryptophan halogenase OS =Burkholderia ubonensis OX=101571 GN=WK95_22430 PE=4 SV =1
MSNPIKNIVIVGGGTAGWMAASYLVRALQQQTNITLIESAAIPRIGVGEATIPSLQKVFFDFLGIPEREWMPQVNGAFKAAIKFVNWRKPPERSRDDHFYHLFGSVPNCDGVPLTHYWLRKRELGFQQPMEYACYPQPGALDGKLAPCLPDGTRQMPHAWHFDAHLVADFLKRWAIERGVKRVVDEVVEVHLNERGYISSLSTKEGRTLEGDLFIDCSGMRGLLINQALKEPFIDMSDYLLCDSAVASAVPNADARVGIEPYTSAIAMNSGWTWKIPMLGRFGSGYVFSSKFTSRDQATADFLNLWGLPDNQPLNQIKFRVGRNGRAWVNNCVAIGLSSCFLEPLESTGIYFIYAALYQLVKHFPDTSFDPRLTNAFNAEIVHMFDDCRDFVQAHYFASSRDDTPFWLANRHDLRLSDAIKEKVERYKAGLPLTTTSFDDATYYETFDYEFKNFWLNGNYYCIFAGLGLLPDQSLPLLRHRPESIDKAEAMFARIRREAERLRTSLPTNYDYLRSLREGDAGLPRSQPGPTLAAPEIL

SEQ ID NO: 83142 - protein, 522 aa, Deltaproteobacteria bacterium
  misc_feature (1)..(522): tr|A0A2E9KXK4|A0A2E9KXK4_9DELT Uncharacterized protein OS=Deltaproteobacteria bacterium OX=2026735 GN=CL921_00 150 PE=4 SV=1
MQIRNVLIVGGGTAGWMTATALVKLCPHIQVSLIESKDQPIIGVGESTLGQINDFFALLDLKDEEWMKETGSTYKSNIRFTDFYKKGETWDYPFGKSTIVNDLPHGWMSWFALNIEKPEKFTRDTFARSMNIIGHLAYANKLTRCDKFPFDHDTAYHMDAVKFGQWLRDNRCQEVNHMYGHITGCVKDEHGNIDILYAGSKELKYDLYIDCTGFNSVLLEGIMNVPFKSFHVNEGGCLLNDTAVTCHMPHEQPEIEVTNTTTCTAIDNGWVWDVPLWQRSGCGYVHSKDFAKNPEEELYQYLVRRSGKTRADQAKFRTVPFRNGKHEKAWEKNVVAVGLANCFVEPLEATGLLTTHEQIIRICNTLKGREGFVPKVEADMLNLVNDLEIEGFKNFIAAHYAFSARETPYWQTVANDVEYDFTTASLDNLFVKYSSEKHVTYEWSGDQNYNDGLRYIGAGMGFNPLNKHTLKLTRLQNQLSEAADKIELDKAELLFDGWNKAMYHWCDDLPSSYEFQKQTIYS

SEQ ID NO: 83143 - protein, 505 aa, Xanthomonas translucens
  misc_feature (1)..(505): tr|A0A1M4IQ16|A0A1M4IQ16_XANCT Tryptophan halogenase OS =Xanthomonas translucens pv. graminis OX=134874 GN=XTGN CPPB3709_3308 PE=4 SV=1
MIAAPLRNLVIVGGGTAGWMAAAALARVLGPDYRITLIESEQIGIVGVGEATVPHIKAFNNLLGINEAEFVRQTQGSFKLGIEFVDWHRPGTSYIHGFGTEIGHSLGLLPFQQYWFKQALAGKAKPLGAYTLNTVAARRGKFMTSASDAPPNSPLGNIAYAYHFDASLYAAFLRRFSEQRAVTRREGIVEQVQLHPESGDVLSVRLASGDTIAGDLFIDCSGFRGLLIEQALHTGYHDFTHWLPCDRALAVPCAKVGPPTPYTRATARAAGWQWRIPLQHRTGNGYVYSSVHISDDEAAATLLANLDGAALADPRPLRFVTGRRKQVWNRNVVALGLASGFMEPLESTSIHLIQSGISKLLELFPREGISPVLVQRYNDRIAFEFDRIRDFLVLHYTATERDDSDFWRQCRAMAITPELQATLDLFGDSGRFYRNGDEMFAEISWVQVMVGQGILPRAYHPLVDQVPAADIERFVASIEQTIGHCVDAMPPHQAFIDRYCAAAPR

SEQ ID NO: 83144 - protein, 509 aa, Stenotrophomonas maltophilia
  misc_feature (1)..(509): tr|A0A1A6Y0Q8|A0A1A6Y0Q8_STEMA Tryptophan halogenase OS =Stenotrophomonas maltophilia OX=40324 GN=A9K58_06290 P E=4 SV=1
MDTASATEGRVRKVVIAGGGTAGWLAGCALSHQFRDQLDITLVESEQIGTVGVGESTVPPIRTFHRFLQIDEQEFLRAVAGTFKLSISFENWRVPGDRFFHPFGTIGQGTWAAPFHHYWLDSLRRGMASDLGDFSVESVASRGDRFSLQTQPQASYAYHFDAGLYARFLRGKAEGHGLRRVEGRIAEVRQHAHDGSVQSLVLEDGQVIEGDLFIDCTGFRGVLTEQALHTGYEDWHEWLPCDRAVAVQTESIEPPVPYTRAIAHEAGWRWHIALQHRVGCGLVYASRHMSDDEAQARLLRDVGAPPLREPWRVPFRSGRRLKAWNRNVVALGLASGFIEPLESTSIHLTISAVVRLIQLFPFDGIRDSLVELYNDVSRQEMEHVRDFIILHYHATQRDEPMWKACREMAVPASLQNRLRAWRDRAHAWQDPGELFRVESWASVLLGQGIQPGSPHPLARALSDADLRTLLKGIQRPVQQAVAQMPSQAAFIDGYCRSAPQVWRTGMAMA

SEQ ID NO: 83145 - protein, 505 aa, Sapientia aquatica
  misc_feature (1)..(505): tr|A0A4R5W2D3|A0A4R5W2D3_9BURK Tryptophan 7-halogenase OS=Sapientia aquatica OX=1549640 GN=E2I14_08530 PE=4 SV =1
MTQQPSSPAATKPIRRVVIAGGGTAGWSVAAAISKVLGKILDITLIESDEIMTVGVGEASIPAMLAFHNLIELNEQEFMAATQATFKLGINFENWRDVKQDYFHSFGHTGIDHWTAGFQHFWHKGVERKLASDFGDYCLELKAAMAGRFAHLPNNKLNYAYHLDATLYAKYLRKMSESFGIKRMEGKINKVETDAATGHITSLRLDSGVNLEADFFIDCTGFRALLIGDAMKVGYQDWSNWLFCDSAVAVQTESVADAIPYTRSIAHEAGWQWRIPLQHRVGNGLVYSTKYINDEDAQKTLLANIQGPLVTQPRIIRFKPGQREATWRGNCVALGLSSGFLEPLESTSIYLIQRNVIRLLQMFPTNGISPTDVAEFNRQSDQEMEHIRDFIILHYHVTNRRDTQFWRDCSSMSIPPSLQHRIDLFRETGRVFRAPNELFAENSWIQVMLGQGIMPQQHHQSADLMGDAELSGFLNNIRSNVSKTVAQLPPHLDYVKRYANGQMRK

SEQ ID NO: 83146 - protein, 506 aa, Metallibacterium scheffleri
  misc_feature (1)..(506): tr|A0A4S3KKC0|A0A4S3KKC0_9GAMM Tryptophan halogenase OS =Metallibacterium scheffleri OX=993689 GN=B1806_11825 P E=4 SV=1
MQKPALESVAILGGGTAGWMAAALLAKALGSRVRIALVESADIGTVGVCEATIPQIRHINAFLGLDENAVMRAAQATFKLGIQFNDWLRPGHSYIHAFSDIGLPYGLLPFQQYWLRARALGQTHGLWAYSINAQAAAQNRFARMERVGSSPLTGVRYAYHFDAGLYAQHLRGVAESLGVVRHEGKVAHVEQRPEDGFIDALVLESGARIAAELFIDCSGFRALLIEGALRAGYDDWRRWLPCDRALAVASARVTPLRPYTQANARTAGWQWRIPLQARSGNGHVYCSEFISDDEAASVLLANLEGPALGEPRALRFTTGMRKQTWLRNCVALGLAAGFMEPLESTSIHLIQSGISRLLSLWPDRDFDPALRDEYNRQTRFEYERVRDFLVLHYCTTQRDDTPFWRHCAHIDLPDGLARKLALFRANGQIVRDGDELFAEVAWLQVMVGQGIEPQRHHALADGMEVARLDEFLGGMRMLIKRAVAGMPTHAQYVAEQCPASAQSATR

SEQ ID NO: 83147 - protein, 514 aa, Sphingobium sp.
  misc_feature (1)..(514): tr|A0A2A3MSG0|A0A2A3MSG0_9SPHN Tryptophan halogenase OS =Sphingobium sp. D43FB OX=2017595 GN=SxD43FB_16505 PE=4 SV=1
MVHPVRNIVIVGGGTAGWLTAGIIAARHRTRIGQGFSVTLVESPNTPIIGVGEGTWPTLRTTLSRMGVSESDFFRECDAAFKQGARFDRWTTGAVDDGYYHPLMLPQNFGQVNLAPHWLASNQGESFCDSVSAQGRICDDGLAPKTIATAEYDALANYAYHLDAGKFAPFIQRHCCETLGVRHVLADVEQVLMHENGDIRAIQTAQAGEIEGDLFVDCTGFKALLIEGAMNVPFKDCNDVLFCDTALAMQVPYEQPDSPMASHTISTAQTSGWIWDIGIQTRRGVGHVFSSSHISDEEAERELRAYIGPAADGLNARKIKIRSGHRETFWKGNCVAVGLAAGFLEPLEASAIVLIELSAKIIAEQMPACREVMDIISSRFNATTHYRWGRIIDFLKLHYVLTKRTDSDFWRDNVRDETIPDRLKELLLLWRYQSPWFHDEFDRVEEVFPAASYQYVLYGMGYHTEVDPASLSRDHRLADRARRENAALTDKLCAGLPRHRDLINKIVAHGLPPV

SEQ ID NO: 83148 - protein, 466 aa, Sphingomonas sp.
  misc_feature (1)..(466): tr|A0A4R1U7G5|A0A4R1U7G5_9SPHN Tryptophan halogenase OS =Sphingomonas sp. PP-CC-3G-468 OX=2135656 GN=C8J41_1014 76 PE=4 SV=1
MSQTVAILGANLCGWMTAAALARRLPRDAYRVVVIDDGTTGDGLGDFAPVIAVPPALGGFHADLGIEPTALVRATGGGHALGVAFGGWRKDGAAAFLSYGETGAPLQGIAFHQLGGRLRKDGIHVRLADYAPSAVAAQSGRFALEAPIAHALHLPVERYTAVMRAAAMNFGASCANAPFADAQIDANGIVETLELTDSTSIAPLLVLDCSGSSARIASRTAPAFEDWSAWLPCNRTHTQTLSATGAPPPYTQVDAQGSGWTATWPLGGADVRLTCAAGGEGTPFRAGRRVEAWRGNCIALGAAAGLIEPLHPTALTVLLRSLAQLIQLWPAERRAPVEAKAFNRFTANAMTGARNFVIAQKAAGRGSNAIGDEPGGTMLPDAVEAKRTLFAARGRLPMFDDEPFEEEDWAAMFDAMGLMPRRYDALADALPLATIQQHFADHRARIIAQVRALPPYAHAMAELAAA

SEQ ID NO: 83149 - protein, 504 aa, Cellvibrio sp.
  misc_feature (1)..(504): tr|A0A1U9NEU4|A0A1U9NEU4_9GAMM Tryptophan halogenase OS =Cellvibrio sp. PSBB023 OX=1945512 GN=B0D95_20010 PE=4 SV=1
MNKPIKKIVIAGGGTAGWMSAALLTKVLKQRVDIELVESEEIGIIGVGEATIPPIQTFNSVLGVDEAEFLRETKATIKMAIRFDNWKQQGHSYYHTFGAPGATIGFSAFQHHWLRARQQGLNTTIWDYDLNYLCCEAGVFGKFDGKDPMYQMPYAYHFDSALYGRYLRKRSEQAGVVRTEGKIRAAHLNPDTGFVQSLLMEDGREIHGDLFVDCSGMRGLLIQGALHTGYEDWNHWLPCDRALAVPSERFEKTLPYTRSIAHKAGWQWRIPLTHRNGNGLVYSSQYLSDDEATNTLLNNLDSAALADPKPIKFRTGRTLQQWNKNVIAVGLSSGFLEPLESTSIHLIQSAVVRLLKNFPNRGISQAQVDEYNRESKLEYETVRDFIILHYHANERDDSDFWRNLRTMDIPDRLAHKLALFRETGTLFNDHGDIFLDSSWLQVMLGQGIMPRDYHPSADILDAAQLQSMLARIAAAKRQPLTQLPTHDAFLQHYTGVVSAGVHRG

SEQ ID NO: 83150 - protein, 449 aa, Polaromonas sp.
  misc_feature (1)..(449): tr|Q127S0|Q127S0_POLSJ Tryptophan halogenase OS=Polarom onas sp. (strain JS666 / ATCC BAA-500) OX=296591 GN=Bpr o_3311 PE=4 SV=1
MTEQSSPTPSFPETLSECDVLVIGGGPAGATAGALLAQRGHKVVVLEKEHHPRFHIGESLLPANLPLFEKLGVADAVKAIGMEKWGAEFVSPWHEAKSQTFKFGDAWDKSMPFSYQVRRSEFDEILIRNAARLGAEVIEGCRVKDVAFAADHGSATVHAQHEDGRTQHWRARFVVDASGRDTLLGKQFDVKRRNPKHNSSALYGHFTGAIRHPGQDEGNITIFWFEHGWFWLIPLADGFTSIGAVVWPHYLKSRTKPVRDFFLDTIAMCPALSERLAHATLASEVEATGNFSYACDRTHGPNYVMIGDAFTFIDPVFSSGVMLAMQGGFVGAETVDTCLREPAKAASALAHFDQQVRLGPKEFSWFIYRVTNPTMRDMFMAPSNVWRVKEALLSMLAGDIFGKTPIWGSLAVLKGIFYIASALNFKRSWQAMRLRKANIRVVDGPGLAR

SEQ ID NO: 83151 - protein, 491 aa, Proteobacteria bacterium
  misc_feature (1)..(491): tr|A0A1W9HBK2|A0A1W9HBK2_9PROT Tryptophan halogenase OS =Proteobacteria bacterium SG_bin6 OX=1827383 GN=A4S16_0 2840 PE=4 SV=1
MRIVVLGGGTAGWMAANLFATAWPQARVSVIESPEIGIIGVGEGSTPQLKAFFDRIGLAERDWMPRANATYKTGIAFHGWSERSGCESYFHPFPSDLDLHTNDAFFSHCAARRGGVDFVAHPDRFYLPARLAAEARGPHPAEDFPFEISYGYHFDAYLVGAVLRDHAVARGVAHLPLKVTEVRVSAEGQVAALVTEDRQAIKADLFVDSSGFRSVIAQEALGVKFRPFADNLFNDSAVVMPTPRAGQAIAPQTRATALSAGWCWAIPLTNRTGNGYVYSSRYIDAAAAEAELRAHLGLGPDDPPARHLKMKVGRVENSWTANCLTVGLSQGFIEPLEATALHIVQATVEGFIAAYEAGGFTPKHRDDFNARTNARYEGIRDYIVCHYRVNRRTDTQYWRDNAANQAASDTLRRLLHFWYTGADLAAEIDRLGLNRYYSAVSWHCLLAGYGVFPDRIEPRGQGFDMARIDAMLAKSARHFAPHHEQLAALER

SEQ ID NO: 83152 - protein, 508 aa, Sphingomonas sp.
  misc_feature (1)..(508): tr|A0A1R1Z494|A0A1R1Z494_9SPHN Tryptophan halogenase OS =Sphingomonas sp. Sph1(2015) OX=1628084 GN=BSZ14_00430 PE=4 SV=1
MDDRPTADHIAQRVVIVGGGTAGWMAAAALARFVPATTRITLIESDAIGTVGVGEATIPGIRLFNQMLGLDEAEFLRATNGSFKLGIRFEGWSGEGSGYLHAFGSIGRGLGLVPFHHYWLRGGGAANPASLWGHMASAQAAMAGRFAPDPGRPDLPSGLAWAYHFDASLYAALLRRHAEAAGVERVEGRIASVARDMAGRIDHVVLDGGEAHAGDLFIDCTGFRALLIGETLAEPFDDWSQLLPCDSALAVAGERTSPLPPYTRAIAHGAGWRWRIPLQHRTGNGLVYDSRHLSDDEAANRLLTALNGEAMGEPRRLRFTTGRRARAWVGNCVALGLAAGFLEPLESTSIHLIQSGLARLLDYWPGQTLQPVEVDAYNRETAAEWLAIRDFLILHYHANARSEPFWTERRAVPLPDSLAARIALFRANGRFRREGDELFAEPAWVQVMIGQGIVPAGYQPLADTLSADELDDFLSLTRRHAAQVAARLPTHDAFLAAHCAAPAPKVFA

SEQ ID NO: 83153 - protein, 511 aa, Sphingomonas sp.
  misc_feature (1)..(511): tr|A0A2U1G205|A0A2U1G205_9SPHN Tryptophan halogenase OS =Sphingomonas sp. URHD0007 OX=1298856 GN=H952_1973 PE=4 SV=1
MNEHSIREVVIVGGGTAGWMAAAALSRFLNNGYTRTTLIESEEIGTIGVGEATIPPLISFNSLLGINENDFVRETKATFKLGIEFVNWGSLGKRYFHPFGTLGQDLQGITFHQLYLRERQRRVLPDISAWAMSAVAAANGRFGRPGRGAQYPLNQLLYAFHFDAGLYAKFLRNYAEQSGVRRIEGKVVDVRLRGEDGHVESVQLGDGQVIEGDLFIDCSGFRGLLIEQALETGYEDWSHWLPCDRAIAAPCSHAGRLDPFTRSSAHSSGWQWRIPLQHRMGNGHVYCSAFISDDEAEQVLRSNLEGELLGDPRRLSFTTGRRKLAWNRNVVSLGLSSGFVEPLESTSIHLIQAGISRLLSLFPDKRFNPIERDEYNKRMQSLSEWVRDFIILHYKATTRDDSEFWKRCGAMDIPDSLSGRIEQFRNKARVFADAELFNTVSWVAVMLGQGIVPDDYEPVVDGLDENKVAQALEQMRLSMLETAQRLPSHEEFVAQCCTATSAAPQPAEIVL

SEQ ID NO: 83154 - protein, 516 aa, Sphingomonas sp.
  misc_feature (1)..(516): tr|A0A1R1Z3P7|A0A1R1Z3P7_9SPHN Tryptophan halogenase OS =Sphingomonas sp. Sph1(2015) OX=1628084 GN=BSZ14_01220 PE=4 SV=1
MVPQPVREDVRVVEGQARSILIVGGGTAGWLTAAYLARFLGPETRITLLEDPAIGAIGVGEGAFPTMRSTLRFLGIDEAQFIRAAGATFKQGIRFDDWRHAPDGGRRHRYVHPFEPPFQADGVDLVAHWLAQDPAARAPFAEAVTIQHRVAAAGRGPKRAGEGAFDGPLSYAYHFDAHRLVALLADRAMGLGVGHLEGRLTGAVVGADGLIDHVVTDRQGMLTADLYVDCTGQRAELISGALGEPLASVRDQLFTNRALACRLPYDTTRGHALPTMTIASAHRAGWTWDIGLAEGRGIGTVYSDAHMDDEAALATLAAYLGRNPDRLKPRLLTFEPGYRQRPWIGNCVAIGLAGGFLEPLESTGIVLIEAAVAMLAELFPHRGPIAAPAARFNTLMTARYRTIVDFLKLHYCLSSRDEPFWHDNGAAGTISDRLRDLLEQWRYRPPGRFDFTLDVESFAHFNYQYILYGMGFADGDARPTRASGEAERLFRKLQMFGDRAVADLPSHDELVAAMRG

SEQ ID NO: 83155 - protein, 510 aa, Stenotrophomonas maltophilia
  misc_feature (1)..(510): tr|A0A317BZA2|A0A317BZA2_STEMA Tryptophan halogenase OS =Stenotrophomonas maltophilia OX=40324 GN=DKY64_07095 P E=4 SV=1
MSDTESTPAGRIRKVVIAGGGTAGWLAGCALAHQFRDQLQITLVESEQIGTVGVGESTVPPIRTFHRFLQIDEQEFLRAVAGTFKLSISFENWRLPGDRFFHPFGTVGHGTWAAPFHHFWLDSLRRGMPSDLGDFCLESIASRGDRFSLHTQPQASYAYHFDASLYARFLRHRAEAHGLRRIEGRIALVRQHAHDGSVQALVLDDGQVIEGDLFIDCTGFRGLLIEQALGTGYEDWHEWLPCDRAVAVQTEAVAPPVPYTRAIAHEAGWRWHIALQHRVGCGLVYDSRHLSDDEAAAKLLRDAGAPPLRDPWKVPFRSGRRLKAWNGNVVSLGLASGFIEPLESTSIHLTISAVVRLIQLFPFDGIRASLVKLYNDVSRQEMEHVRDFIILHYHATQRTEPMWKACREMRVPESLQQRLQAWRERAHAWQDPGELFRVESWTSVLLGQGIAPGPAHPLARAVSDADLRTLLKGIQQPVQQAAAQMPTQAEFIAQYCRSRVDVWRSTAANA

SEQ ID NO: 83156 - protein, 512 aa, Proteobacteria bacterium
  misc_feature (1)..(512): tr|A0A1W9HLC0|A0A1W9HLC0_9PROT Tryptophan halogenase OS =Proteobacteria bacterium SG_bin6 OX=1827383 GN=A4S16_0 6780 PE=4 SV=1
MRDSERPGRLRRVVILGGGTAGWMTATALAKSFGPRLSITLLESAEIGTVGVGEATIPTIHWFNELIGLDEAEFLRATKASFKLGIEFVDWTRPGHRYFHPFGTYGVQLPGVAFHHRWLKARAEGLDLPLSAFSLATRLAAENRFAKPQGDARSILSTLGYAYHFDAALYAQHLRGIAEAAGVTRVDGKLRDIERDGESGHVTALTTERGDRLAGELFIDCSGFRALLIEGAMGAGFEDWSHWLPCDRAVAVPCERLAETTPYTRSTARAAGWQWRIPLQHRTGNGYVYARALLSDDEAAATLLANLDGAPLAEPRFLRFTAGMRRRCWVGNVVAIGLSSGFLEPLESTSIHLIQSGIAKLLTLFPDADMDPGLAARFDRVFAADMDDIKDFLILHYHATHDKPEPLWAQCRHMQLPETLVEKEAQYRRSGRVMIEGDALFREASWLAVLNGQEVLAGDYNPLADTLDPAVNRAQLEQIAAVVARAAPTLPKHDAAIAALIGAPSPQVALAG

SEQ ID NO: 83157 - protein, 505 aa, Proteobacteria bacterium
  misc_feature (1)..(505): tr|A0A1W9HBX0|A0A1W9HBX0_9PROT Tryptophan halogenase OS =Proteobacteria bacterium SG_bin6 OX=1827383 GN=A4S16_0 2815 PE=4 SV=1
MPEAPLREIVIIGGGTAGWMAAAALARFLGHQARVTLIESEAIGTVGVGEATIPQIKLFNQGLGIAEPDFVRQTQASFKLGIEFVGWGAPDQRYIHAFGAVGWPLGLLPFHHYWLRHRAEGGASGLWDYSAGARAAARNAFQPPADRPGQPAAGYDYAFHFDAGLYAAFLRRHAEAAGVVRIEGRIGAVRLRDDGFVAGVTLDDGRAVGGELFIDCSGFRGLVIEQALHAGYEDWTHWLPCDRALAVPCARVEPLTPFTRATARAAGWQWRIPLQHRTGNGIVYSSAHLSDDQAAAILLDGLDGAPLAEPRPLRFTTGKRRAMWVKNCVALGLAAGFMEPLESTSIHLIQAGIARLLHLFPRAGFDPADIAEFNRQSDFEWRAIRDFLILHYHANGRPEPFWADCREMRIPDSLAHKLALFRANGRITREHEELFTELGWLQVLIGQGVTPAGYSPLADALPAADFARFLGDARAHAERVAAALPSHADFIARHCPALPQEVIAA

SEQ ID NO: 83158 - protein, 511 aa, Sphingomonas sp.
  misc_feature (1)..(511): tr|A0A2U1G210|A0A2U1G210_9SPHN Tryptophan halogenase OS =Sphingomonas sp. URHD0007 OX=1298856 GN=H952_1972 PE=4 SV=1
MRGDRIRRIVIVGGGTAGWMAAAAMSQILGDMPDLSIELVESDEIGTVGVGEATIPQINLFNALLGIDERDFVRATNATYKLGIEFRDWTRIGHSYVHPFGFYGLDMLGIEFHHHWLKGRMAGDATPLDAYSLGVVAGLQGRFSHPRPDQPGSPLSRIAYAFQFDASLYARYLRQRAEALGVRRTEGRIVDVVQNGETGFIEAVVLADDQRVSGDLFIDCSGFRGLLIEQTLQSGFEDWSKWLPCDRAVAVPCESSNDQQPLTRSTARPAGWQWRIPLQHRTGNGYVFSSAHISDDEAADVLLANLDGTVLADPRVLRFKAGYRKQAWIKNVVALGLAGGFLEPLESTSIHLIQTGIARLMTLFPTRRFDDLEIERYNRLTVEEYTDIRDFLVLHYHANERTDSELWRYCRELTPPEGLSYKLDMFRRTGRVIREHEELFTETSWLAVMVGQGIEARDYHPAADALPDSETLQRLAHIREVVAQTAALMPMQNDYLASSGSASGLSLRRAS

SEQ ID NO: 83159 - protein, 515 aa, Sphingomonas sp.
  misc_feature (1)..(515): tr|A0A1R1YYU0|A0A1R1YYU0_9SPHN Tryptophan halogenase OS =Sphingomonas sp. Sph1(2015) OX=1628084 GN=BSZ14_10255 PE=4 SV=1
MVQPVQNIVIVGGGTAGWLTAGVIAARHQGRRPHGFTVTLVESPNVPIIGVGEGTWPTLRTTLKRMGVSETAFFRECDASFKQGARFNRWTTGAADDGYYHPLMLPQSFAQVNLAPHWLTSEDKEVSFCDAVTPQGRICDAGLAPKTIATPEYEAIANYAYHLDAGKFADFLRRHCCEQLGVRHVLANVEEVLLTENGDIRSVRTAQAGEVAGDLFVDCTGFRSLLLGEAMEVPFQPLNDVLFCDTALAIQVPCDDPEAPIASHTISTAQSSGWIWDIGLPTRRGVGHVFSSSHIDRDDAERELRAYLGEAGRDLPVRELKIRAGHRTRFWERNCVGVGLAAGFLEPLEASAIVLIELSAKLIAEQMPACREVMDTVAKRFNETTLYRWGRIVDFLKLHYSLTKRTDSDFWRDNCRPETMPDRLQELMELWRYQAPWMHDEFDRVEEVFPSASYQYVLYGMGQRTDIAPGSLIAESVAAERARRENDVQTGRLLAGLPKHRDLIRKIVERGLPTI

SEQ ID NO: 83160 - protein, 505 aa, Rhodanobacteraceae bacterium
  misc_feature (1)..(505): tr|A0A2Z6E976|A0A2Z6E976_9GAMM Tryptophan halogenase OS =Rhodanobacteraceae bacterium Dysh456 OX=2010829 GN=ALS L_2664 PE=4 SV=1
MIPANLERILIVGGGTAGWMAAAALARVLGTACRITLVESDEIGTVGVGEATVPHLKLFNNLLQIDEREFVRQTQGTFKLGIQFNGWGRPGDSYVHGFGGIGRELGSQPFHQYWIKAFLAGRAKDIGAYSLNTAAAPRGKFMTSASDVSPSSPLANIAYAYHFDAGLYARYLRRYAEARGVRRHEGRIDQVRLDPESGFVTSVVLADGQALSADLFIDCSGFRGLLIEDALHTGYHDFSHWLPCNRALAVPCEKVGPPTPYTRSTARAAGWQWRIPLQHRTGNGYVYSSAHVSDDEAAATLLAHLDGRPLGDPRLLRFVTGRRKKFWNRNVVALGLASGFLEPLESTSIYLIQSGIAKLLSLWPRRDFNPVLIDRYNAQSAFEFDRIRDFLILHYRLNDRAEPFWRACRYMDIPIELADNIALFHDSGRFYRHAEEMFAEPSWVEVMLGQGLMPRAYHPLVDQVPEAELQAFIAHVEEVIASCVAAMPPHEAFIARHCAAAAQAA

SEQ ID NO: 83161 - protein, 524 aa, Luteibacter rhizovicinus
  misc_feature (1)..(524): tr|A0A0G9HH59|A0A0G9HH59_9GAMM Tryptophan halogenase OS =Luteibacter rhizovicinus DSM 16549 OX=1440763 GN=BJI69 _18130 PE=4 SV=1
MARLKKVLIVGGGTAGWLAACYLAKAVNAVDPRSVQVHLVESPDIGLLGVGEATFPSIRGTLAAIGLDERRFLVGATATYKQGIHYRHWVRPPGTPGPDHFFHPFNAPSQRPGGPDLLPYWLLGAAPEGTSFADAVSMQSFLVDHSRAPKRPKDADYQGPMNHAFHFDAACFARVLAEHGQETLGVVRHVATVERTELDEHGAIARVVTKEEGELTADLYVDCTGLRGMLIGNAMQSPFRSRADVLFADRAVAIQVPYETPDAPIPSYTISTAQEAGWVWDIGLQKRRGSGYVYSSRHTTDDRAEEVFRRYLGKAGEGLKAFHIKFETGYRPEHWRKNCVAVGLAGGFVEPLESTGIALIELATYLLTHLLPGDTDDMESAARHFNEMMVARYDRIIDFIKMHYCLSQRRDSPFWIDNTDPASIPQTLQEKLEKWKLRPPHRLDFVSDLEMFMTSSWQYVLYGMEFRTDLEPMRSAYPDMDVARKEFAVIRQAGSLALDDLPDHRAFVEQMCREHRQRSEAVGV

SEQ ID NO: 83162 - protein, 506 aa, Pseudoalteromonas sp.
  misc_feature (1)..(506): tr|A0A0M8KJB1|A0A0M8KJB1_9GAMM Tryptophan halogenase OS =Pseudoalteromonas sp. SW0106-04 OX=1702169 GN=W04_3132 PE=4 SV=1
MKKLRKVVIVGGGTSGWLAANHIGKRLLGSDIEVCLIESPTIPTIGVGEGTVPMMVSTLQSFGISEQTFITQCDATFKQSIKFINWLDKHHHGEYNYYHHLFEYPFPNNQDVTQTWLSDTTAASFAETVSFQHMLCEQGVGPKAITQAQYTGHASYAYHLNALKFAQLLKDNATSRFNVKLLKTNVTAVKCNDEGHISELQTDDSGQVSGDFFVDCSGFSSILHRQALGVKSVDVSDQLPIDKAITAQVPTPADDAIPPYTLATAHQAGWIWDIALTTRRGTGFVYASDYLTKEQAYTKFERYLGQPLSGLKVREIDMKAGFAERAWHKNCVALGLAQGFVEPLEATSILLTDFSAKLLAENLPVQHHALALAAKKYNEIVDYAWRRVVDFIQLHYYLSDRQDSAFWRAMKSTDSMSVVLKERLALWQYQVPKKSDFNSKYEVFELENYLYILYGMHFKPCAHLVAKPEHKELIAMLTSYGEQLLKQLPKHRALLNNIAQHGLQKI

SEQ ID NO: 83163 - protein, 529 aa, Mycobacterium sp.
  misc_feature (1)..(529): tr|A0A557XQJ9|A0A557XQJ9_9MYCO Tryptophan 7-halogenase OS=Mycobacterium sp. 16-83 OX=2592811 GN=FPZ47_14435 PE =4 SV=1
MTRPDAVSPAGGGCLPDQAVGRTESREAMIQSVLVVGGGSAGLLTALALKQQAPALEVRVVRSKDIGVIGVGESTTPQIVNLLFDYLKLPQKQFYSTVRPTWKTGIHFLWGPRTSFDYGFAFQLDGFYTDLDRYNGFYCGDDFDSVDMNAALMAQGKAFEKHPSGQGPLITPNTALHLFNPALVEALESASVARGIEIVDARITGVPVDEQGVRAVVLDDGRTFSADLYVDATGFRSELLGRALGTPFLPYDSSLFCDRAIVGSWDRTDEYIYPYTIAETMEAGWCWQIDHEHAINRGYVYSSHFLSDDQAREEFVQKNPKAKTWDHVVKFRSGRYEKGWVKNVFAIGNACGFVEPLEATALMVASSQIKAMVEMLVQSQLDPTPSLKALYNTLFVDWWDGIRDFLSVHYRFNTRLQNEFWTACCNEVDVTPVQPLLDFYRENGPTGFCRHYVTSTIGQDNQFGLEGYLVMLVGQKVPYRDAHPPSEADMAIFRRHCADNRARAASGLTVAEALQYVHRPDWRWNSDAQ

SEQ ID NO: 83164 - protein, 538 aa, Burkholderia ubonensis
  misc_feature (1)..(538): tr|A0A3N7Q410|A0A3N7Q410_9BURK Tryptophan 7-halogenase OS=Burkholderia ubonensis OX=101571 GN=DF011_09980 PE=4 SV=1
MSNPIKNIVIVGGGTAGWMAASYLVRALQQQANITLVESAAIPRIGVGEATIPSLQKVFFDFLGIPEREWMPQVNGAFKAAIKFVNWRKSPGGSRDDHFYHLFGNVPNCDGVPLTHYWLRKRELGFQQPMEYTCYPQPGALDGNLAPCLPDGTRQMSHAWHFDAHLVADFLKRWAIERGVNRVVDEVVEVHLNDRGYISSLSTKEGRTLEADLFIDCSGMRGLLINQALKEPFIDMSDYLLCDSAVASAVPNDDARVGIEPYTSAIAMNSGWTWKIPMLGRFGSGYVFSSKFTSRDQATADFLNLWGLPDKQPLNQIKFRVGRNGRAWVNNCVAIGLSSCFLEPLESTGIYFIYAALYQLVKHFPDTSFDPRLTDAFNAEIVHMFDDCRDFVQAHYFASSREDTPFWLANRHDLRLSDAIKEKVERYKAGLPLTTTSFDDATYYEAFDYEFKNFWLNGNYYCIFAGLGLLPDRSLPLLRHRPESIDKAEAMFARIRREAERLRTSLPTNYDYLRSLREGDAGLSRSQPGPTLAAPEIL

SEQ ID NO: 83165 - protein, 525 aa, Alteromonas sp.
  misc_feature (1)..(525): tr|A0A2E9PGH0|A0A2E9PGH0_ALTSX Tryptophan halogenase OS =Alteromonas sp. OX=232 GN=CL591_05510 PE=4 SV=1
MMSEVNRIVIVGGGTAGWLTAGLLAATHSGADNNGQRLSVTVIESDAVPPIGVGEGTWPTMRRTLATIGISEAELVTQASATFKQASKFVNWYSDNGRNQDNSYYHPFSAPQGSATLDITPYWLTTAQTHSHYAQDVCFQPALCDAGLAPKLTANGKQSFTANYGYHLDAGQFISLLRRHCVNRLGVTHLVDKVTQVNTQADSPEAGIVSLQTQQSGKIEGDLFVDCSGFSGLLINKALGVKLKDASHRLFANSALVCQAPFENETAPIPCHTLSTAQEAGWIWDIGLQHRRGTGYVFSREHQDVDRAADTLSRYLSQVAPSMATPDAFREIQFKTGYRETFWHNNCVAIGLSSGFLEPLEASSLMLIEQSAMLLAEQLPANTTIMSKVSQRFNSRLTYLWERTIEFLKLHYVLSNRPEAFWQDNKQRGSIPERLADLLEEWRYRPILDSDFPQANEAFSAQSYRYILYGMGPKTDFNWDMSTTERSLKHHNFATKQGQLNQTLIGQLKERLPSHRGLVESFFQS

SEQ ID NO: 83166 - protein, 532 aa, Streptomyces malaysiensis
  misc_feature (1)..(532): tr|A0A291T144|A0A291T144_9ACTN Tryptophan 7-halogenase OS=Streptomyces malaysiensis OX=92644 GN=DNK48_09680 PE =4 SV=1
MAQQGQGETTARVDKVVIVGGGTAGWMTASYLVAAFGGRVDVTLVESGRVGTIGVGEATFSDIRHFFEFLQLEEKDWMPACNATYKLAVRFENWREPGHHFYHPFEQLRSVDGFPLTDWWLRHPTTTRFDTDCFVMASLCDANRSPRYLDGTLIDQDFVESGERRLARSTIAEFQGAQFPYAYHFEASLLADYLRGYATERGVRHVVDDVVDVERDHRGWIERLRTQEHGTVEGALFVDCTGFKGLLINKALGEPFESYQDSLPNDSAVALQVPLDMDRELLRPCTTATAQDAGWIWTIPLISRLGTGYVYARDYLDPEEAERTLREFVGPAATDVPANHIRMRIGRTRRSWVNNCVAIGLSSGFVEPLESTGIFFIHHAIEQLVRFFPGGDWDPTLRTLYNNSVAHVMDGVREFLVLHYRGAKRADNEYWRDTKTREIPDALAERMERWRSKLPDSETVFPYYHGLPPYSYNCILLGTGGIPVRPSPALDIADEKAALLEFQAIRDKARRLVAELPTQHEYFAAMRAQAQG

SEQ ID NO: 83167 - protein, 503 aa, Rheinheimera sp.
  misc_feature (1)..(503): tr|A0A0U4VJ53|A0A0U4VJ53_9GAMM Tryptophan halogenase OS =Rheinheimera sp. F8 OX=1763998 GN=ATY27_06455 PE=4 SV= 1
MTAQPIEKFVIAGGGTAGWIAAATLARIFAGSNVRIELVESAEIGIIGVGEATIPPLLATLESLGIDLVEFIKATQATFKWGIRFEDWHTKGQGYFHPFGVLGKQIDGHDFYQCWLKCRAMGDPSSLMSHSPEAVLAEANKFFLPHQAVNTPLAMAQYALHLDSALVGQYLRRYAENLGVVRHEGKIAAVQQHPCGDIKELLLDDGRVLTGEFFIDCTGFRGLLIEQTLKAGYEDWSYMLPCNRAVTVQTENVADPRPYTIARAQDAGWTWQIPLQHRAGNGYVYCSDFISDEQAKQTLLQTVEGTPLIEPRVIPFVTGIRKQPWQRNCLALGLAQGFLEPLESTAIHLVSKTLALFVRMFPDRGDNSALRNEFNRRVYSDYQEIRDFLALHYCETNRSDTEFWRWCQQMPVSDSLRYKLDYFRHSGSIIPGAEELFQPTSWYAVFTGMGVLPTRYNPTVDALNAQKLQQSLQAGQQGILRYAQTQPSHGDFLRQYCAAPKLM

SEQ ID NO: 83168 - protein, 502 aa, Pseudoalteromonas rubra
  misc_feature (1)..(502): tr|A0A0L0EVY3|A0A0L0EVY3_9GAMM Tryptophan halogenase OS =Pseudoalteromonas rubra OX=43658 GN=AC626_03630 PE=4 S V=1
MNKKRIVILGGGTAGWMAANLMAKSWQDQPIEIALVESPDIGIIGVGEGSTPQFKGFMDFMGISEAQWMPACNATYKNGIRFIDWSTRPGFSSYFHPFPSQPDDYSAPAFFHNSFVRRKAIDVAGHPDPFFLTTYLAEQAKAPIAAHHFPFEINYGYHFDAGKLGLFLAQTARDLGVEHIQANVSDVRKHTNGDIAALVCEQGTEITGDVFIDCSGFRSLLMQQHLDVGFESFANNLFNDAAVVLPTEQGDVISSETQSIARKFGWSWHIPLTNRIGNGYVYSRRYCDPDKAETELRTALGLLDSDVEARHLTMKVGQVKKHWHKNCLAIGLSQGFIEPLEATALHIVQETVQSFIECYQDGEFTDKLKTRHNQSLDARYQAIRDYIVAHYRVNSRADTQYWRDNANNNQLSRSLYDVLQTWVSGKNLSDELHRQDIDKYYPSVSWHCLLAGYGIYPEQSQLIAGNEAANKYDLSQVQDYIARCGLNFEDHRAQLERLAQMR

SEQ ID NO: 83169 - protein, 502 aa, Rheinheimera sp.
  misc_feature (1)..(502): tr|A0A0U4VEP1|A0A0U4VEP1_9GAMM Tryptophan halogenase OS =Rheinheimera sp. F8 OX=1763998 GN=ATY27_06460 PE=4 SV= 1
MAKPISSVVIVGGGTAGWMAAISLARMTRTEPLQITLIESSRIGTVGVGEATIPGIVHFNHQVGLEEIAFIKATQASFKLGIQFENWYQQDSRFFHPFSDFGLPIDQVAFHHYLNRLALAGHPVNFEDYSFASVLARHDKFAQPHPQPSSPLADFNYAYHFDASLYAAYLKQHAMAAGVKHLDAEISQVVLQPTTGFIDQLVLDNGETLSAELFIDCSGFRSLLLGEALGVGYQSWQQWLLCDAAQAVQTVRTGPILPYTRSIAMDAGWQWRIPLQHRMGNGHIYASAFCSDESARQTLLDTVEGEVLNSPRKLSFTPGRRDVIWHKNCFALGLASGFLEPLESTSISLVQTALAKLQAFFPDQDFAPAAIAEVNRLHNAELENIRDFLILHYKLTDRRDSEFWRYCAAMQVPDTLQHKMDLYRERGHLVQYDQESFKGASWLAMYNGYRFQAQGYDPRAGQVPLDLMQQRLTQLKQSIQQAAGSAVSHQDFISRHCAATPL

SEQ ID NO: 83170 - protein, 487 aa, Mycobacterium pseudoshottsii
  misc_feature (1)..(487): tr|A0A100IGX5|A0A100IGX5_9MYCO Tryptophan halogenase OS =Mycobacterium pseudoshottsii JCM 15466 OX=1136880 GN=M PS_5479 PE=4 SV=1
MDDNLIKKVVVLGGGTAGWMTAAYLGKALQGNVEITVLEAPSVPRIGVGEATVPNLQRVVFDFLGIPEDEWMRECNASFKTAVKFINWRTPGEGSPVARHWRGRPDHFYHPFGLLPSPQHIPLSHFWARNQLKGGTSEPFDYACFREPAIMDAMKAPRYLEGTQATYYAWHFDAALVADFLRRFATKNLGVVHVQEKMTLAEKDSNGYITALRTEEGRRLDGDLFVDCSGFRGLLINEAMNEPFIDMNDHLLCDSAVATPIRHDDAANGIEPYTSAIAMKSGWTWRTPLLGRFGSGYVYSSQFASQDEAIRDFCNLWQFDPEDTPLNKIRFRVGRNRRSWVKNVVSVGLSSCFLEPLESTGIFLIYAALYQLAKHFPDRRFDPVLIDRFNRKIDTLFDETRDFPQAHFYFSPRTDTEFWRANKELTLTDSIKEKVAMYKAGVPVNPPIATESSYYSNFDAEFENFWTNGSYYCIFAGLGVLPGLRRC

SEQ ID NO: 83171 - protein, 517 aa, Microbulbifer thermotolerans
  misc_feature (1)..(517): tr|F1SWD2|F1SWD2_9GAMM Dehydrogenase (Flavoprotein) OS= Microbulbifer thermotolerans OX=252514 GN=SAMN05660479_ 02363 PE=4 SV=1
MSQPVKSVVILGGGTAGWITAGTLAARFKRDQAEPVSVTLIESPNVPTIGVGEGTWPTMRNTLKRMGVRETDFIRECNVGFKQGAKFARWSTGAKEDFYYHPLVLPEGFNSHNLAPHWLAGDRSVSFSNTVCPQEALCQRNLAPKTIDTPEYAAIANYAYHLDAGKFSRFLQEHCTENLGVRHILADVSGVRESETGDIAALQTDTAGEVSGDLFIDCSGFRSKLLGEHFGIPFHSCKSVLFIDTALAVQVPYEHENSPMATHTISTAQSAGWIWDIGLQNRRGVGHVYSSAHSDESSAYRELASYLNMSEPQLDELGVRKIPIVPGHREKFWHRNCVAVGLSAGFLEPLESSALVLVEISANMIAEQFPASRAAMDVVARRFNESFLYRWDRIIDFLKLHYVLTKRKDSEFWLDNCDPVSVPDSLKELLTLWRYQPPWHDDFDRAVEVFPAASYQYVLYGMGYETKPRPGGISAPNLEMAAQLFEQKNRGLEKMLRLLQPHRDLINKIRKFGLQKI

SEQ ID NO: 83172 - protein, 67 aa, Mycobacterium pseudoshottsii
  misc_feature (1)..(67): tr|A0A100IBL4|A0A100IBL4_9MYCO Tryptophan halogenase OS =Mycobacterium pseudoshottsii JCM 15466 OX=1136880 GN=M PS_3775 PE=4 SV=1
MLPGHTLPAINYQSEAIHEADALFLDVKQKQRHLVETLPSNYEYLLKLHGKDMEPNDPMEPEVTFVA

SEQ ID NO: 83173 - protein, 513 aa, Alteromonas sp.
  misc_feature (1)..(513): tr|A0A2D5LGT6|A0A2D5LGT6_ALTSX Tryptophan halogenase OS =Alteromonas sp. OX=232 GN=CL592_01365 PE=4 SV=1
MITRVVVVGGGTAGWLTAGIIAAKNPLVGENSHTEVILVESPDVKNLGVGEGTWPTMRDTLRLLGIAEKQFLSECDASFKQASKFVGWQQGGEDKYYHPFTAPAGFGAVNLVEAWHDEGCPGDFESWVCAQGMACERYQAPKMPQLPEYAYNFNYGYHLSADKFVALLHRHCTEQLGVQYKSAHVAGIQSHPDGAIAAIELAQGEPLAGDLFIDCSGFSARLIGQHYNVPFVSKRHILFNDTAVAAQVNHVGDQTPIASCTVATARPHGWVWDIALQSRRGIGHVFASELTTESQAEDALRAYISSDQSLSQKAIMPRTIRFDPGHRARFWEHNCVAIGVSAGFVEPLEATALVLIEKSAEWIAEQLPRSRAAMAVLRKRYNDMTDARWDEIIDFIKLHYVLSERRDSPYWQAHADPASWTDSLQEALQLWQSQPPGLLETNLRQELFSSASKQYVLYGMGFRSRDWQPGGITSLRKPLIERVRREFLHNGDKLLAQLPTNRDYFNRLKATSA

SEQ ID NO: 83174 - protein, 505 aa, Xanthomonas campestris
  misc_feature (1)..(505): tr|A0A0A3WE36|A0A0A3WE36_XANCH Tryptophan halogenase OS =Xanthomonas campestris pv. phaseoli OX=317013 GN=AC609 _15265 PE=4 SV=1
MTQAQIRKVVIAGGGTAGWIAACALSHQFRNLLDITLVESEQIGTVGVGESTVPPIRTFHRFLQIDEQEFLRAVAGTFKLSISFEHWRRQGERYIHPFGITGQSTLVCAFHHLWLESQRRGMPGSFGDYCLETVASRVDRFALHGEPAVNYAYHLDAALYARFLRARSEACGVKRVEGRIQQVTVQPHSGDVASLVLEDGQTIEGDLFIDCSGFRGLLIEQTLHTGYEDWSHWLPCDRAVAVQTQALGPPVPYTRAIAHEAGWRWHIPLQHRVGNGLVFSSKHLSDDEAHAKLLRDVAAPAVKDPWMVPFRTGRRLKAWNKNVVSLGLASGFIEPLESTSIHLTISAVVRLLALFPAEGIASSQVQLFNDVSRAEMEHVRDFVTLHYHATQRDEPLWQQCRQMELPESLALRLRAWRERAHAWQGADELFRIDSWTHVLMGQGIAPDQHHPLTRAFSDHDLRRLLDGIAQPIQHAVRQMPSQQDFIEHYCKAGEQVWGMRSPVPA

SEQ ID NO: 83175 - protein, 531 aa, Streptomyces alfalfae
  misc_feature (1)..(531): tr|A0A1P8TQL9|A0A1P8TQL9_9ACTN Tryptophan 7-halogenase OS=Streptomyces alfalfae OX=1642299 GN=A7J05_33480 PE=4 SV=1
MDQRVKEIVILGGGTAGWMSAAYLAKKLGETVRVTVLEAPSIPRIGVGEATVPNLQRVFFDQLGLSEEEWMPECNAAYKVAVKFINWCTPGKGEARAREIDGRPDHFHHPFGLLPEHEGLPLSHYWVYNRKHGVTGKPFDYACFPGVAIMDALKAPRDHGGEPVTRYAWHFDAHLVADFLRRHATEKQNVTHVQDEMVEARRDGRGFVTALRTKSGAVIEGDLFIDCSGFRGLLINQAMEEPFVDMSDHLLCDRAVAYALPNDDEANGVEPYTSAIAMESGWTWKIPMLGRFGTGYVYSDAFADQDRATTDFCRMWGLDPDEVGDRLNHVRFRVGRNRRAWVKNVVSVGLASCFLEPLESTGIYFITAALHHLAKHFPDQRFDAVLADRFNAEIEAMFDDTRDFIQAHFALSPRTDTPFWKANKDLHLPEGIKEKVAMYRAGLPINQPASTEGAYYDNFDVEFRNFWTNGSYYCVFAGLGLEPDHPLPALMHHPDAAEGAQHLFDRVAEEQRKLADTLPLNHEYLRRLHGA

SEQ ID NO: 83176 - protein, 528 aa, Alteromonas sp.
  misc_feature (1)..(528): tr|A0A2D6HXI3|A0A2D6HXI3_ALTSX Tryptophan halogenase OS =Alteromonas sp. OX=232 GN=CL591_14935 PE=4 SV=1
MNKLVKHVVIVGGGTAGWLSAGILAAKLKPDYKVTLIESPNVPTIGVGEGSWPSLRDTLLDIGINEREFLTACKGTFKQGSSFVNWRACAANSQTFAHQYHHPFTVPTAYNELDIHACWQSIAKHESYENSFSLQSLMCTQGKAPKQATTPDYAHVLNYGYHFDATALANLLKKHCLESLGVHYVSAHVSKVEEHPNGYIRQLLTDNGQAISGDLFIDCSGKSGLLIQQHFNVPWLSLETTMLNNRAMAVQAPYAPDDQAISSTTVATAQRVGWTWDIGLQHRRGVGLVYASEFCNEDAAIDILFKQVSQRLRHAKAQDLSVRTLSFEPGYRKDFWVKNCLSLGMSSGFVEPLEASAIAMVELGLRMLCESFPHNAEHMEHVSQRYNQRFEYRWQRVVDFLKLHYVLSERNEPYWLAQRHESRTPPSLSTLLEIWKYQSPSRLDLIENEEIFPSASYQYVLYGMGYNTALPAIALSDADLSKAKAIRSKMTQMKQAYLHALPNNRALLDELCGLNEEKGNKEHNHVHI

SEQ ID NO: 83177 - protein, 518 aa, Microbulbifer thermotolerans
  misc_feature (1)..(518): tr|A0A143HIF4|A0A143HIF4_9GAMM Tryptophan halogenase OS =Microbulbifer thermotolerans OX=252514 GN=A3224_00665 PE=4 SV=1
MTEQTHDNNIRHIVIAGGGTAGWSAAAALARVLAGSGSTITLVESEAIGTVGVGEATIPTIHTFHRMLGIDETEFVRATQATFKLGIEFRGWGSADNRYFHPFGHYGREFDSIPFHQYWLYGSRFEDCGNLSEYSLCTLAAERGRFLPANSDPRSILSQLGYAYHFDAGLYAKFLRNYAERLGVRRQEGQVVDVTLRKEDGAIRELVMASGQRVEGDFFIDCTGFAGLLIGGALNVGYEDWSHLLPANSAVAVPSENVGPTAPYTRSTAAAGGWQWRIPLQHRTGNGFVYSSRFLSDEQAVETLLQNLEGRALAEPRQLRFTTGRRKKFWHKNCVALGLAAGFMEPLESTAIHLVQTSISRLLLLFPGRELHPADIEEFNRQTAREYEYIRDFIILHYHANQRSEPLWQYCREMPVPETLTHRIALFRNRGRFFEREEDLFKTASWLAVLMGQGIQPQGYHPVMEGKTPQKVLGMLREMRELLRSGAEAMPTHDEFIAQNCRAPSPSEPLVNSHSRSR

SEQ ID NO: 83178 - protein, 519 aa, Alteromonas sp.
  misc_feature (1)..(519): tr|A0A349Z747|A0A349Z747_ALTSX Tryptophan halogenase OS =Alteromonas sp. OX=232 GN=DCW59_13485 PE=4 SV=1
MRKSVLIVGGGTAGWITAAYMARMLAADTPGGVSITLVESEEIGILGVGEGTFPIIRKTMGRIGLDESDLIKHADATFKQGIRFNNWKKNPADDPNDSYFHPFQVASQHTDMDLLPYWLLGVAGDVPWSECCTVQERAVEAKLAPKLISHPNYEAPLNYAYHFDATKLAALVRRRAMEMGVKLLIDTIDDVKLDEDGAIAAVTARQHGDLTADLFIDCTGFRATLIGETMGSEFTSYKNELFCDRAVALQVPYEQAGGPIPSCTYTTAKDYGWIWDIGLHERRGLGYVYSSKYCDEETAVATLKAHIGPAADKLQHRLLKFEPGYRKTQWHKNCVGIGLSVGFIEPLEATGISFAEVAALMLCNLFPWSGDYERSATQFNNAMSKRFEHVKDFIKLHYYLTERDDTAFWRDNQDPATASEYLKGKLEQWRHRPPSFLDIDASHDIFDENSWQYILYGMGFKTDISAREGALRFFDDARNEFASIRQQSENAKRAVPTHRDLVNEICQSGFKPQPRRARR

SEQ ID NO: 83179 - protein, 512 aa, Caulobacter flavus
  misc_feature (1)..(512): tr|A0A2N5CNB4|A0A2N5CNB4_9CAUL Tryptophan halogenase OS =Caulobacter flavus OX=1679497 GN=C1707_10580 PE=4 SV=1
MSEDVRNGRIRSIVIVGGGTAGWMAAASLRRHFGKAPIDITLVESSEIGTIGVGEATIPTIRNFYQSLGLDDLEVLRATQGTCKLGIRFKDWMAPGSAFIHPFSLYGQDLGGIPFQHYWLKARAFADVGEMGEYSLGASLAAAGKFTVPAANPPSSLSVFDWALHFDAALFAQLMRRVAEANGVRRIDAKVVKVNLRPEDGFVASLSLHTGQVVEGDLFVDCSGFRGLLIEEALQTGYEDWSQWLFCDRALAVQSQPPEGAEPPPYTDVTAHSAGWRWRIPLQHRYGNGYVYSSRHIDDEAAKAELVAAVPDRLLHEPRLIRFTPGRRKQVWNRNVVALGLASGFLEPLESTSIALIETGIEKLKALFPDRRFDPAVVDEFNDWSRREMERVRDFVVLHYKAAQRGDTPFWRTTRDAEIPETLARKVELFRSRGHIARYRWEMFQPPSWLAIFAGFDILPEGWDPALDGVDGAALAASLNQMRAGVARVVANAPGHGDFLHRYVGQAPAAAE

SEQ ID NO: 83180 - protein, 509 aa, Caulobacter flavus
  misc_feature (1)..(509): tr|A0A2N5CSV5|A0A2N5CSV5_9CAUL Tryptophan halogenase OS =Caulobacter flavus OX=1679497 GN=C1707_15850 PE=4 SV=1
MSGAIRNIVVVGGGTAGWMTAAALAQTVGTRRYSITLVESEQIGTVGVGEATIPMILLFNKVLGLDEDVFIRETNATFKLGIEFVDWRRLGHRYFHPFGLYGADMDGVGFQHFWLRWARESGDWRYDAFNAETLAAADGRFMRTAPTPNLPKINYAFQFDAALYAAFLRRYAEARGVVRVEGKIAGVERDGESGHVSRLVLDDGRAIEGDFFVDCSGFRGLLIEETLGAGYDDWSRWLPCNRAAAMPCERAGELTPYTRATAREAGWQWRIPLQHRTGNGYVFCDAFIAEDEAVRRLGERLDGAAMADARILKFTAGRRRRSWIGNVLAIGLSSGFLEPLESTSIHLVQAAVAKLLTLFPKTGFDPIVVDKFNREMALEYEQVRDFIIAHYKVGERDDTPFWRWCRDMVPPDSLAQRLEVFRTRGEVLIDQKELFKETNWFAILAGQGLLPDDYHAVADTLSSEELRLRMGRIQAAINERVAGMPPHDVYLDKAGLLGAAARAARSVPV

SEQ ID NO: 83181 - protein, 501 aa, Caulobacter flavus
  misc_feature (1)..(501): tr|A0A2N5CT68|A0A2N5CT68_9CAUL Tryptophan halogenase OS =Caulobacter flavus OX=1679497 GN=C1707_24765 PE=4 SV=1
MDRAIGSIAILGGGTAGWMAAAVLAQVLRGTGTTITLVESAEIPTVGVGEATIPPIVDFLRLLEIDQGQFMAATEGSFKLGIRFDDWRVLGERYWHPFGTFGPSVDRRPFHHMWHRLRAAGEDPRVEAYSLATALGDAGRMAFADGQGQGPLGGMRHALHFDAGLVARFLRTYSEQRGVRRLERRVEGATLKDDGFVEALVLEGGERLAADLFIDCSGFRGVLIEGALKTGYEGWSAFLPCDRAVAGLTVRDANPPPFTQAAARPAGWRWRIPLRHRTGNGYVYSSAHVSDDEALADLEREAGKLLTEPRVLKFTGGRRKAFWNRNVIALGLASGFIEPLESTSIHFVTSGLMKLLDHFPDKDFDAANIADYNAALVAEYEAARDFIVLHYQPTRRDEPFWRERAAAALPPDLAERLALYRGTGRIPHRPTELFTELSWFYVLEGMGVRPAAYDPLVGLSNLSQVREGLSGWRRRVAEIVQAAPAHDAALDLVAGRRRPAA

SEQ ID NO: 83182 - protein, 528 aa, Alteromonas australica; identical to SEQ ID NO: 83176
  misc_feature (1)..(528): tr|A0A350NYN8|A0A350NYN8_9ALTE Tryptophan halogenase OS =Alteromonas australica OX=589873 GN=DCW74_00285 PE=4 S V=1

SEQ ID NO: 83183 - protein, 521 aa, Xanthomonas campestris
  misc_feature (1)..(521): tr|A0A0A3WK23|A0A0A3WK23_XANCH Tryptophan halogenase OS =Xanthomonas campestris pv. phaseoli OX=317013 GN=AC609 _20460 PE=4 SV=1
MPDTTPSDPQQRPVRRVVIAGGGTAGWMAAAALSKLLGRHLQITLVESDEIGTVGVGEATIPSLVTFHRLLEIDEAMFMAATQATIKLGIAFEHWRDVDQHYIHSFGHAGTDHWSAGFQHFWLKGRQRGVARDFGDYCLELRAAQEGRFAHLPNGGMNYAYHLDAGLYARFLRRFSEGFGVQRIEGRIGQVETDPESGFLTALTLHNGARVEGDLFIDCTGFAGLLIGKTLGVGSDDWSRWLFADSALAVQTESMGPPVTYTRSRADQAGWMWRIPLQHRVGNGIVYSSRYMDQDGARAVLERNLTGRALTEPRPLRFTPNQRHRVWEKNCVALGLASGFLEPLESTNIHLIQRGIIRLLQTFPQVINAVDIAEYNRQAAQEITHIRDFVILHYHATDRRDTPFWRDCAAMDIPDSLRHRVELFRQSGRVFHQANELFAENSWVQVMLGQGIVPQQHHPVADLMGDVELGRFLETIRTRVEAALVRLPAHADFLQRYCPAPPLPEPAARVPAPQVMATPAG

SEQ ID NO: 83184 - protein, 504 aa, Caulobacter flavus
  misc_feature (1)..(504): tr|A0A2N5CUT3|A0A2N5CUT3_9CAUL Tryptophan halogenase OS =Caulobacter flavus OX=1679497 GN=C1707_01455 PE=4 SV=1
MTNDRIRHVVIVGGGTAGWMTAAALGRFLKDGVTKVTVIESEAIGTVGVGESTIPQINMFNRMLGLDEDDFLRRTKATYKLAIEFRDWKQIGHTYHHPFGPYGVDMEGVSFHAYWLRYQAMGEAADLSDYSLQSLAAAQARFQRPTGQKNSPLGDIAYAFHFDAGLYARFLRDYAEARQVRRIEGKITHVAQRGTDGFVESVTLENGTVVEGDLFVDCSGFRGLLIEQTLKSGFEDWSHWLLNDRAVAVPCASGGSTDPVTRATARPAGWQWRIPLQHRIGNGYAFSSEHISEDEATAYLLANLDGEALADPWTLRFKAGRRKKSWHKNVVAIGLSAGFMEPLESQSIHLIQVGISRLLAMFPDRRFQQPDIDRYNRVMTFEYEKIRDFLILHYKATERSDTPYWDYLREMPIPDYLADKIAVFESHGRIFRENEELFNDTSWFAVMVGQGLKPKGWDPMADVMSEDLLRARMNEIRAVIARSVDGMPDHMAFVADRVARAQAA

SEQ ID NO: 83185 - protein, 515 aa, Streptomyces thermoautotrophicus
  misc_feature (1)..(515): tr|A0A132N5D1|A0A132N5D1_9ACTN Tryptophan halogenase OS =Streptomyces thermoautotrophicus OX=1469144 GN=TH66_02 755 PE=4 SV=1
MENAIRNVVIVGGGTAGWMSATYLKAAFGDRVSVTLVESDRVSTIGVGEATFSTIRHFFDYLDLPEEKWMPHCSASYKLAIRFENWRKPGHHFYHPFERLRVVDGFHLAEWWLQLGEDTAAFDRACFLTPWLCEAKRSPRNLDGSLFVAGLDGPLGRSTLAEQRAQFPYAYHFDADLLAKFLARFGIERGVRHVVDDVIAVGQDERGWITHVRTKGHGDLTGDLFIDCTGFRGLLINQTLGEPFRSFQNVLPNNRAVSLRVPRDIERVGIAPYTTATAMEAGWIWTIPLYGRIGTGYVYSDEFCTPEEAEQTLRKFAAPGQDDLEANHIRMRIGRNERSWVANCVAIGLSSAFVEPLESTGIFFIQHGIEELVKHFPDATWNPVLVDSYNRRVARVVDGVKEFLILHYRAAARDDTLYWKETKTREIPESLAERLALASTMLPDENNIYPYYHGFEPYSWVTMVLGLGGVRTKARPALASMDPSAARRQFAVLRREADLLTASLPSCYEYLATLN

SEQ ID NO: 83186 - protein, 477 aa, Streptomyces malaysiensis
  misc_feature (1)..(477): tr|A0A291T4B6|A0A291T4B6_9ACTN FAD-dependent oxidoreduc tase OS=Streptomyces malaysiensis OX=92644 GN=DNK48_039 50 PE=4 SV=1
MTHPTDGKVYDVMVAGGGPAGSSVAAFAAMQGHRVLLLEKEEFPRYQIGESLLPSTVHGICGLLGVTEELESAGFVRKRGGTFRWGSNSEPWSFDFALSEKFAGPTSYAYQVERAKFDQLLLDNARRKGVEVRERCAVRDVLEDDGRVRGVRYTDPDGAEREVHAQFVVDATGNQSRLQRYIGGQRRYSDFFQNIALFGYFEGGRRLPSPNSGNITCVAFPSGWFWYIPLSDTLTSVGAVVRKECADQVRGDRAEALSALIADCPLIADYLSDARRVTSGRYGEVRVRKDWSYLHDTFWQPGMALVGDSVGFIDPLFSSGVHMATYSALLAARSLNTALRGDLGERECFAEYEARYRKEYQSFHDFLVNFYDVNRDEQQYFEVARRVTRDTAPGAGAFVGLVGGGASDEAALTSESYRDKRKKDLLDQSRAVHHEGHRIQLQAAFGEAVDDTPLSADGLVVSQDGMHWEKSVTSSTV

SEQ ID NO: 83187 - protein, 516 aa, Endolissoclinum sp.
  misc_feature (1)..(516): tr|A0A1Z8SEK2|A0A1Z8SEK2_9PROT Tryptophan halogenase OS =Candidatus Endolissoclinum sp. TMED37 OX=1986638 GN=CB B97_17040 PE=4 SV=1
MKANEANFDDSISSILIVGGGSAGWLTAGILAARYGKTMSITLVESPDVKIIGVGEGTWPTMKGTLREMGISETDFFRECDASFKHGAKFAKWVNGDEADYYYHPLMLPQDFTKINLAPFWLKSNCDRSFSESVCFQEALCERALAPKTVTMPEYNSAANYAYHLNAGKFTKFLTDHCTTKLNVKHKLATISEVLKSEDGGIRCVKTTDGQHLSADLFVDCTGMASLLLGKTLGVEFIDKNDSLFIDRALAAQKPYESEEEPILPYTVSTAQKAGWIWDIGLTSRRGIGYVYSSNHSSGEEAEETLADYIGPSFKELSVKKISIRSGHREIFWKQNCVAIGLSAGFLEPLEASALMLIEISAKFVRDQLPETRKTMPIIARRFNKAMTYHWERIIDFLKLHYVLSKRDDTDFWIDNRCSSTIPESLAELLELWKSHTPYRQDFSHKEEVFPAASYQYVLYGMGFRTEISNRSVECTDEAYRAAVAENERMISKAVELLPDNRQLLQKINRYGMSAL

SEQ ID NO: 83188 - protein, 490 aa, Alteromonas sp.
  misc_feature (1)..(490): tr|A0A2S9V6G3|A0A2S9V6G3_9ALTE Tryptophan halogenase OS =Alteromonas sp. 190 OX=2079529 GN=C6Y40_19140 PE=4 SV= 1
MSNKPLHVVIAGGGTAGWMTANLLAKRWLNQPVTITLVESPDIGIIGVGEGSTPTLKRFFSDMGIAEQDWMPECNATYKVSIRFEGWSPGANIPAYSHPFISQLDTFSERSFYVNCFHRRMGQDVTTRPDEFLFNGWLAKHQRSPVTPPNFPFRIEYGYHFDSGLVGEFLKKHAQGLGVIHKALNITDVECHPNGDIAALHSKEGERVEGDFFIDCTGFQSLLLQKTLGVNFKSFKDNLFNDSAVVCPTPAQTELPVETRATALSAGWAWQIPLTNRTGNGYVYSSDFISDEQAASELCRHLGVEEESAALRKITMNVGQVERHWAKNCLAVGLSQGFIEPLEATALHLVQTSVEIFLDHVDEGGFSETQRRAYNQLISERFERVRDYIVAHYRLNTRSDSEYWLANQNNENLSDSLLHLLNVWYRRGDLGQEIQRQQLDSHFGNTSWHCLLAGYGAFPPLEKGATATDLYKQNELAAFFEGCLLNFKAQ

SEQ ID NO: 83189 - protein, 496 aa, Alteromonas sp.
  misc_feature (1)..(496): tr|A0A2S9V6E8|A0A2S9V6E8_9ALTE Tryptophan halogenase OS =Alteromonas sp. 190 OX=2079529 GN=C6Y40_19145 PE=4 SV= 1
MPDAIKKVVIAGGGTAGWMTAALLNKVLGNSVTIELVESEQIGIVGVGEATIPPIQTFNRFLGIDEKAFLRETQGTIKLAIKFENWRKPGESYYHTFGAPGTTMGFCSFHHYWLKAKEAGLDKSFWDFDLNYLACQQGKFNKINTQNPLYDMPYAYHFDSALYGQFLRRFAEQGGVKRTEGIIEHVQQHPQSGFITGLQLTDGRQIEGDLFIDCTGLNGLLIRKTLGVNYEDWSHWLPADSAQAVPSERFDKTLPYTRSIAHSCGWQWRIPLTHRNGNGIVYSSQFTTDEQANETLLGNLDTEALGEPRTIRFNTGRTDQQWCKNVVAIGLSSGFLEPLESTSIHLIQSGIIRLMKMFPNQGISPAMVDMYNAESKDEFETIRDFIILHYHVNERDDSEFWRAMREMTIPDRLAQKIEAFKETAAIFNEQNDIFRDASWVQVMMGQGLSPRDYHAAVNAMDKQTLLSAMQQIQQAKMQPVAKLLGHDEFIERYTSA

SEQ ID NO: 83190 - protein, 508 aa, Sphingomonas gei
  misc_feature (1)..(508): tr|A0A4S1XH11|A0A4S1XH11_9SPHN Tryptophan 7-halogenase OS=Sphingomonas gei OX=1395960 GN=E5A73_05560 PE=4 SV=1
MPEAPLSRIVIVGGGSAGWMTAAALARLVAAGLAITLVESDEIGTIGVGEATIPPLVDFNAALGIDENAFVAATQGTFKLGIEFRDWGHPGNRYVHPFGNYGRQTQGINFHQIWLRQRLLGVAETDPGPFDLYAISIAAAARGRFTKPAGDPEGVLQGLAYAYHFDAGLYAEFLRMRAEAQGVRRVEGKVVRVEQSSDTGFLSAVVLEGGRRIEGDLFIDCSGFRALLIGETLGVPYRSWRHWLPCDRAVAVPSAAVAPPVPYTRSTADKAGWRWRIPLQHRVGNGHVYSSAHLEDEAAARALLDRLDGAPLAEPRTLRFTAGRREKLWEKNCIAIGLSAGFIEPLESTSIHLIQSGIVRLMASFPDRNFAAVEIAEYNRWLIDEYENVRDFIVLHYHASTRSDSDFWNDCRAMDIPDSLAARLDLWRGKGRVFRGFNALFTEESWTAVLLGQGVMPADSDPLVAMLPVDETTRFLTHMRNIIAQTAEAMPRHEEYIARHCAAAGTTS

SEQ ID NO: 83191 - protein, 498 aa, Sphingomonas gei
  misc_feature (1)..(498): tr|A0A4S1X8X1|A0A4S1X8X1_9SPHN Tryptophan 7-halogenase OS=Sphingomonas gei OX=1395960 GN=E5A73_12905 PE=4 SV=1
MQRIVILGGGTAGWMAAACLARTLGTSRQTITLIESEEIGTVGVGEATIPLIETFHQILGINSIDVLRASEATFKLGIEFVDWRKKGHRYLHPFGPIGADLNGAGFLQHWLRHRADGGESDLLVYNLESQAAMAGRFGMAQLRAPGDRQLHFAYHFDASLYAAMLRRYSERLGVERVEGMVGHVQRDGATGDVTALALKDGREVAGDFFLDCSGFRGVLIEQTLGAGYDDWSHWLPCNRAVAVQSGRLPELSPYTRSTALDAGWQWQIPLQHRTGNGHVFCDAFISEDQATDAVLARLDTPAITDPRMLRFVTGRRRKSWDHNVVALGLAGGFVEPLESTSIYMVQSALAKLLTLFPRGDRVNPLAADQFNASMATEWERVRDFIVAHYKVTERDDTPFWAHCRNMPIPDSLTERLALFEEEGLFVEQPHDLFKEGSWAAVLIGQGILPRRHHPIADVAPRAALEEQLGSMRAAITARLAELPSHAAYVDLCMGRAAA

SEQ ID NO: 83192 - protein, 501 aa, Sphingorhabdus contaminans
  misc_feature (1)..(501): tr|A0A553W942|A0A553W942_9SPHN Tryptophan 7-halogenase OS=Sphingorhabdus contaminans OX=1343899 GN=FOM92_08265 PE=4 SV=1
MNDAGPVRNVVIAGGGTAGWMAAAALSKMLPMHESTITLVESDEIGIVGVGEATIPPIKTFNGMLGIDENEFVAATKGSFKLGIEFDGWQRAGEAYLHPFGPYGHDINGIKFHHFWLKLQKLGFAVPLNEFNMSAVAARHYRFDRPEHLLAPAGAALDYAYHFDAGLYANFLRAYSELRGVVRHEGKIERVEQNPATGFITELILDNGTQIEGELFIDCTGFRALLIEQCLQTGYDDWSHFLPCNRALAVPTERTEPLIPYTRSTARVAGWQWRIPLQHRTGNGLVYCSSELSEDEASTILMENLDSQPLAEPRPLKFTTGRRKLAWNKNCVALGLAGGFLEPLESTSIHLIQAGISKLLALFPDKDFKSHERDEYNRLTASQWEHIRDFLILHYKLNERPEQFWRHCAAMDVPESLRRKIDLFAGRGRLFRYEDELFTDTNWTAVMVGQGLVPAGYDPLVDAIPDGPMKKLLAGIGQSFRQAADRMPTHADYIMHNCRGV

SEQ ID NO: 83193 - protein, 383 aa, Sphingomonas gei
  misc_feature (1)..(383): tr|A0A4S1XF70|A0A4S1XF70_9SPHN Tryptophan 7-halogenase OS=Sphingomonas gei OX=1395960 GN=E5A73_05185 PE=4 SV=1
MRHYAEARGVTRHEGRIVEVLRDGESGDVTALRLERRYSASSPPPVRAEPVEAPFFTSASPAESCPSTSSGRTEGGASTQGDTDTTKIPGDLFIDCTGFRALLIGETLGVGFEDWSHWLPCDRALAVPSARATDFTPYTRATAHAAGWQWRIPLQHRTGNGIVYAGAHLSDDEATAHLLANLDEPALDEPRALRFTAGKRRAFWRANVIAVGLASGFLEPLESTSIHMIQSAVERVLKLLPGRRIAEAQRAEYNRQADREMDRIRDFLILHYWANDRDAPFWRARRETPLPEGLAHKIALWRAAGQIVREEGDLFSEVAWLQVLAGQGVAAEGHHPLADRPGRAEIAEYLDLLGKLAAREAAQMPDHAAFIRQNCAAREEIAA

SEQ ID NO: 83194 - protein, 502 aa, Sphingorhabdus contaminans
  misc_feature (1)..(502): tr|A0A553W960|A0A553W960_9SPHN Tryptophan 7-halogenase OS=Sphingorhabdus contaminans OX=1343899 GN=FOM92_08255 PE=4 SV=1
MPNRPIENIVIVGGGTAGWMTAAALSHMLSGQKFAIQLIESEEIGTVGVGEATVPHIRFFNQKLGFNEADFMAKTKATFKLGIEFCNWGRKGDSYIHPFGAFGESIGGVAFHQHWSRMHRSTGIYPIEEYSLPVMAARAGRFAYPSADPDSLLSTYSYAFQFDAGLYAKYLRSYAEARGVKRIEGKITDVALESESGFVQSVQTNQGDSISADLFIDCSGFRGLLIEGALQTGYDNWQHWLPCDRAVAVPCSIAGPLTPYTRATAQDAGWIWRIPLQHRVGNGHVYCSNYISDDAAATALLGQLESAPLAALNQLRFVTGKRRKQWSKNVVAMGLSAGFLEPLESTSIHLIQLAIGRLLEFFPDKSWDPALASEYNRLMDLEYERVRDFLILHYHATERDDTPFWNYVRTMPVPDTLEHKIEMFRERGIVVNYRDGMFLDASWIAVYLGQRIIPQNNDPLGNAIAEADLQVQLERLRSDCRAAAEGLSSHADFIRQIGAHAH

SEQ ID NO: 83195 - protein, 511 aa, Sphingomonas gei
  misc_feature (1)..(511): tr|A0A4S1XET2|A0A4S1XET2_9SPHN Tryptophan 7-halogenase OS=Sphingomonas gei OX=1395960 GN=E5A73_08460 PE=4 SV=1
MGNRGSAANAIERVVIVGGGTAGWMAAAALSAHLAGTGVSITLVESSDIGTIGVGEATIPTIRRFYAALGMSDAEVMQACQATAKLGIRFVDWLRPGHDFVHPFGRFGQDLKGIDFHHYWRKARDAGDPAPLGDYSLGALLASEGHATLPAPNPASQLGIFDWALHFDAALFAQHMRRFAEKMGVTRIDARIVDVGLRGEDGFIDTLTLDSGVRVRGDLFVDCSGFRALLLGEALGVAYESWSHWLLCDGAFAVQSERAGDPPSCTTVTARSAGWQWRIPLRQREGNGLVFSSRFQSDDDARNELLANVPGKPVMEPRRLRFTPGRRQVAWKKNCVALGLASGFLEPLESTSIALIETGIERLKSLFPDKDFDPAVTGEYNEQSAEEMERVRDFLILHYKLNGRPGPFWQACRAMEVPESLNGKLALWRARGAFVRYRWEMFSPASWLAIYAGFEDLPDRIDPAVAGLDADQLRRSLEGMRRSLQETVADTPSHREFLEIMDGAAAQGRAA

SEQ ID NO: 83196 - protein, 510 aa, Sphingomonas gei
  misc_feature (1)..(510): tr|A0A4S1XCH4|A0A4S1XCH4_9SPHN Tryptophan 7-halogenase OS=Sphingomonas gei OX=1395960 GN=E5A73_08465 PE=4 SV=1
MRAPDALRKVCIVGGGTAGWIAAAVMAHHFKGKLFEIVLVESDDIGTIGVGESTIPPFMELIAKLDINEQDFVRATQASFKLGIEFEDWHRKGERYFHPFGTIGQQVELSEFYQCWLKARLAGQPFELMDFAPAAAMARSGRFMLPFKAHKTPVGGAAYALHVDAKRVARFLRAHAEDRGVKRCEGIVSDVRLDDRGFVDTLVLKDGREVAADFFIDCSGFRALLIEKALGVGYEDWSEWLFCDRAIAAQTLNVGAPRPYTLAQAQDSGWRWRIPLQHRTGNGHVFCSEFLSDDEATRILLDQVEGEVVAGPMVVPFKTGMRQKIWHRNVLSLGLASGFIEPLESTAIHLIYRGMDFFFRYLPDRNCDPRLAIEYNRRMAADYTEIRDFIILHYCTTQRDDTPFWRKCRDMTLPDSLHERIALFRTNGVLREGLDELFRAVSWHSVFEGMGIRPPTYHPLVDRIDEAKLFDGMNMLRAQLGQVVASLPTHQQFIDAHCRADAVDLGQPGR

SEQ ID NO: 83197 - protein, 507 aa, Asticcacaulis sp.
  misc_feature (1)..(507): tr|A0A258BJ21|A0A258BJ21_9CAUL Tryptophan halogenase OS =Asticcacaulis sp. 32-58-5 OX=1970317 GN=B7Z26_02165 PE =4 SV=1
MSSAPPPLKSIVIVGGGSAGWMTAAALSEALGQSCAITLIESEAIGTVGVGEATIPPIRHFNRRLGIDEATFVRETQGSCKLGIQFVDWGKLGHSYFHPFGQYGAEFDSVPFYHHWMREYLAGRTSGPIDDFSMCWAMAKQGKFAHPSPDRRQIQSTFDYAYHFDAGLYAAFLRRFSESRGVTRIEGRVVDVGLRGEDGFIEAVTLDNGTRVAGEFFIDCSGFRGLLIEEALHAGYDNWQHWLPCDRAVAVPCERGEFTPYTRSTAKAAGWQWRIPLQHRTGNGYVFCDAYLDEARASELILQRLDGKPQADPRVIRFVTGHRKQMWNKNVIAMGLSSGFLEPLESTSIWLVQEAITKLLKYFPKERVTAVQRECFNRDMLSAYDNVKDFLIAHYKVTEREDTPFWAYCKHMDIPDSLKFRLESFAEHNAPLVAPTELFKDASWFAVLAGQGMVPKSYNPAADVMPDDEFRWRMQRIREGSLGLADMMPSHEAYLAKACPSPQLVAV

SEQ ID NO: 83198 - protein, 501 aa, Sandaracinobacter sp.
  misc_feature (1)..(501): tr|A0A501XRH9|A0A501XRH9_9SPHN Tryptophan 7-halogenase OS=Sandaracinobacter sp. PAMC 28131 OX=1715348 GN=FJQ54 _05830 PE=4 SV=1
MEDTAIRSILVVGGGTSGWISAAVLARFLDPRKTRITVVESEEIGIVGVGEATVPIIRNLNGLLGIDENDFVAATNGSFKLGIEFRDWGETGNVHFHGFGDFGDDIGGVAPHHHWLKLRRLGDKRRIEDYSLPYALGQRGRFTPPNPESGRGDSDYRYAFHFDAALYAQYLRRMCEARGVVRVEGRITNVAQHAESGDIASVTLADGRVLEADFFIDCSGFRGLLIEQTLKTGYESWQHWLPCDRALAVPSSSEGEPPPFTTSTALEAGWQWRIPLQHRDGNGYVFSSRFTDEDRARELLLANIKGEALAEPRLLQFEGGRRRLAWAHNCVAIGLASGFLEPLESTSIQLIQTAIARLIDYFPERRTNPAIRDEYNRLCANEVERVRDFIILHYCLTRRTEPMWEFVRSMELPETLAAKIDLWKAMGRVPMMTEESYQEPSWAAIFLGNDVLPDRYDPLVDRIDPDMLARGMAARRADYAAWAERMPTQAAYIRRHCAMPA

SEQ ID NO: 83199 - protein, 482 aa, Sphingorhabdus contaminans
  misc_feature (1)..(482): tr|A0A553W939|A0A553W939_9SPHN Tryptophan 7-halogenase OS=Sphingorhabdus contaminans OX=1343899 GN=FOM92_08260 PE=4 SV=1
MRILYGRSAPMPIDRIVIVGGGVAAWLSALALTLKVTGMIIVIDTEGIDDSLGIPLAIEPTLPSLADLHALIEIDEDNLVVQTGSSFGLGRALSNWGPSEAVAFHPYGEIGANLGPVAFQHLIARIRADGGTANLANYSVAALCAQSGRFAPYRGNARSVLSTMSHGLHLQIDRYRHFIKNAALQNGASVVVGIPEEIHVDAKNQISSIRLSSGQIVMGDFFLDCSGPARLVSGKMAGFSFEDWSEWLPNNEVKQSVTPSTAPPPLYAHVEAHDQGWQRFVSCQDHVEELFFTRRAQMYDAGAYTFTNGRIRTPWTGNCLAIGGAAAVIEPIASTQLHLAASAISRLLDLFPHRRDSSVEAIEYNRRTIEQLENARDYAILHFANQHQSKHRFPGRLANRLSAYQASGRVALYDEETFETWDWIALFETLGIAPRRYDVVADGISRGAIAEHVERVRSVMLTAVSTLPTQQSYLHTRRDDLA

SEQ ID NO: 83200 - protein, 520 aa, Novosphingobium sp.
  misc_feature (1)..(520): tr|A0A4D7DN26|A0A4D7DN26_9SPHN Tryptophan 7-halogenase OS=Novosphingobium sp. ABRDHK2 OX=2571749 GN=FA702_2023 5 PE=4 SV=1
MVRAVRDVVIVGGGTAGWLTAAIIAARHRPRMGHDFSVTLVESPNVPIIGVGEGTWPTLRSTLKSVGISETDFFRECDAAFKQGALFAKWTTGADDDAYYHPLVLPQRFGQLNLAPHWLAGTLAEDDDADETFCDAVCPQGRICDENLAPKTMADAEFEGQANYAYHLDAGKFAPFMQRHCTEKLGVRHVLADMRQVLQDESGDIRAIVTEQAGEIAGDLFVDCTGMRSLLLGETMGVGFKDCNDVLFCDTALAVQVPYPDPDAPIATHTISTAQSAGWIWDIGLPTRRGVGHVYSSRHISREQAEAELRAYIGPAADGLAVRKIDIRSGHRELFWKGNCVAVGLAAGFLEPLEASAIVLIELSAKMIAEQMPPAREVMDIVARRYNEKTLYRWGRIIDFLKLHYVLSQRRDTAFWRDNMDPATIPERLRELLALWRWQPPYMHEEFDRVDEVFPSASYQYVLYGMGFRSEVSARALEPEVRDARRARGQNADVTARMLTALPRHRDLINRIVEYGLQPV

SEQ ID NO: 83201 - protein, 500 aa, Lentzea guizhouensis
  misc_feature (1)..(500): tr|A0A1B2I0U1|A0A1B2I0U1_9PSEU Tryptophan halogenase OS =Lentzea guizhouensis OX=1586287 GN=BBK82_44290 PE=4 SV =1
MTASYLTAAFGDRVNVTLVESARVGAIGVGEATFSTVRHFFEYLGLEEKEWMPACNATYKLAIRFENWREPGHHFYHPFERQRVVDGFPLTDWWLREPKSDRFDKDCFLVGTLCDDLKSPRHMSGELFEGGLGERSSYRTTLAEQTTQFPYAYHFDATLVANYLRDYAVARGVKHVLDDVQDVALDDRGWISHVVTKENGDLTGDLFIDCTGFRSLLLGKALQEPFESYQSSLPNDSAVALRVPQDMENRGLRPCTTATAQEAGWIWTIPLFDRIGTGYVYASDYTTPEEAERTLRAFVGPAAEHADANHIKMRIGRSKRHWVNNCVAIGLSSGFVEPLESTGIFFIQHGIEQLVKHFPDARWDDGLRTSYNRLVNNVMDGVREFLVVHYYAAKRQDNQYWKDTKTRPLPDGLAERLERWQTRLPDNESVFPHYHGFESYSYVCMLLGLGGLELKSSPALGLMDRSSAQHEFKLVAEQAAELARTLPTQYEYFAQLHRAR

SEQ ID NO: 83202 - protein, 533 aa, Streptomyces sp.
  misc_feature (1)..(533): tr|A0A1C4HZ99|A0A1C4HZ99_9ACTN Tryptophan halogenase OS =Streptomyces sp. DfronAA-171 OX=1839777 GN=GA0115252_1 00419 PE=4 SV=1
MPETDNRIRKVVILGGGTAGWMTASYLGKALQGTVDIQVLEAPAIPRIGVGEATVPNLHRVLFDYLGIPEEEWMRECNASFKMAVKFVNWRTPGRGEPDSRTRPDGKPDHFYHPFGILPDHDNTPLSHYWFKNKYEGVTDKAFDYSCFREPPVMDAKKSPKWMNGESSTRYAWHFDAALVADFLRRFATDKQGVEHIQDEMVRAEQDERGYVTALHTKSGRVLDADLFVDCSGFRGLLINKALGEPFIDMSDHLMCDRAVATAVPHDDDANGIEPYTSAIAMSSGWAWKIPMLGRFGSGYVYSSRFTTQEEATREFCELWNLDPETTKFNHVRFRVGRNRRAWVNNVVSIGLASCFLEPLESTGIYFITAAIHQLAKHFPDRTFPQALVDSFNEEIEVMFDDTRDFIQAHFYYAPRDDSEFWRAQKTLKLPENIQRKIAAYKAGLPINSPITDESTYYGNFEAEFRNFWTNGSYYCVFAGLGLEPDAPLPALAHKPESVAGAQPLFTKVAQEQRHLLDTLPSAHDYLRRLHAK

SEQ ID NO: 83203 - protein, 515 aa, Lentzea waywayandensis
  misc_feature (1)..(515): tr|A0A1I6DE10|A0A1I6DE10_9PSEU Tryptophan halogenase OS =Lentzea waywayandensis OX=84724 GN=SAMN04488564_102370 PE=4 SV=1
MLKNVVVVGGGTAGWMTASYLTAAFGDRINVTLVESARVGAIGVGEATFSTVRHFFEYLGLEEKEWMPACNATYKLAIRFENWREPGHHFYHPFERQRVVDGFPLTDWWLRDNRSGRFDKDCFLVGTLCDDLKSPRHRDGELFEGGLGQRSAYRTTLSEQTTQFPYAYHFDATLVANYLRDYAVARGVTHVLDDVLDVTLDDRGWISHVVTKEHGNLTGDLFIDCTGFRSLLLGKALAEPFVSYQDSLPNDSAVALRVPQDMENRGLRPCTTATAQDAGWIWTIPLFDRIGTGYVYAGDYISPEEAERTLRAFVGPAAEHADANHIKMRIGRSSRHWVNNCVAIGLSSGFVEPLESTGIFFIQHAIEQLVKHFPDARWDDGLRTSYNRLVNNVMDGVREFLVVHYYAAKRQDNQYWKDTKTRSLPDGLAERLERWQTRLPDGESVFPHYHGFEAYSYVCMLLGLGGLDLKSSPALNLMDPSSAQHEFKLVGEQAAELARTLPTQYEYFAQLHRAR

SEQ ID NO: 83204 - protein, 499 aa, Sphingomonas gei
  misc_feature (1)..(499): tr|A0A4S1XF36|A0A4S1XF36_9SPHN Tryptophan 7-halogenase OS=Sphingomonas gei OX=1395960 GN=E5A73_07215 PE=4 SV=1
MNQPRKKVIVVGGGTAGWMAASALARLLPHAASVELIESAEIGIVGVGEATLPHLRAFIQTLGLDEAEFMAATHATYKLGIEFRDFGKPGDAYLHPFGDFGRPLNDVPFLHWWLRMHARGQGGDIGDYCVANVMAAQRRFAPPAADPDSLLSAYSYAYQFDATRFGPFLRGFAEKHGVKRTEGRIVSVERDAETGDVAALLLESGARIEGDLFVDCSGFRSLLLGAALGEDWEDWSHWLPCDRAMALPCASPPGEIEPLTRATAMPAGWRWRIPLQHRIGNGYVYSSTHLSDEDAAAAILAAVEGDPLADPRVLRFRAGRRKRSWSHNVVAVGLASGFLEPLESTSIYLVQVAIQQLIDLFPIGAIENSDRDEFNAQVDYEYDRIRDFLILHYHASTRDDSAFWREARHMPIPDSLTEKIELFRRAGRIQRYSRGLFFAPSWIAVLIGQGVMPESWDQRVDAANPHELGHALDRLRAQIARDVATLPGHGAALGLQEPA

SEQ ID NO: 83205 - protein, 509 aa, Sphingomonas gei
  misc_feature (1)..(509): tr|A0A4S1X3M4|A0A4S1X3M4_9SPHN Tryptophan 7-halogenase OS=Sphingomonas gei OX=1395960 GN=E5A73_19010 PE=4 SV=1
MSVFRDQVTSDTKRVRSVVILGGGTAGWMTAAALARQFGAALDIKLLESEEIGAVGVGEATIPTIHWFNALIGLDESAFLRETKATFKLGIEFVDWTRPGYRYFHPFGAFGARLGGVAFHHRWIKARAEGLDLPLAAFSLAETLAAQGRFAKPEGDARSILSTLGYAYHFDASLYGRHLRGIAQANGVTRVEGRLQDVERDPESGLIIALTTQRNERLAGELFIDCSGFRALLIGGVMQSAFEDWSHWLPCDRAVAVPCERVAETTPFTRSTARQAGWQWRIPLQHRIGNGHVFSSRFLSEDEATATLLANLDGAVLAEPRTLRFTAGTRRKAWVGNVVALGLSSGFLEPLESTSIHLIQSGIAKLLTLFPDRDMDPMLADRYNMLLNADMDTIRDFLILHYHANPGRAEPFWVERREMPLPESLQAREAHYRRSGRLMLGGDELFREASWLAVLNGQGIVAEDYNPLADTLDGASNIAQLRQIAEVIARASPTLPLHDAALAAAMAQG

SEQ ID NO: 83206 - protein, 497 aa, Sphingomonas gei
  misc_feature (1)..(497): tr|A0A4S1XC95|A0A4S1XC95_9SPHN Tryptophan 7-halogenase OS=Sphingomonas gei OX=1395960 GN=E5A73_07950 PE=4 SV=1
MEQIRRILIVGGGSAGWMAAALLAKLFQGLYQITLIESEEIGTIGVGEATIPAIKKYNDLLGLDENDFLRRTQGTFKLGIQFVDWLRQGSSYIHGFGVIGQDLGWLRCHQYWLKMHGLGRASDFAAYSINTAAALEDKFRRADPKMAESPIGHIANAFHFDASLYAKFLRGFAEERGVIRREGKVVDVALRTDGFVESVTMADGEALEADLFVDCSGFRGLLIEQAMATGYEEWTQWLPCDRAIAVPCARSAAFTPYTRATARSAGWQWRIPLQHRTGNGHVYSSRYVDDAEAERVLLADLDGEQLAEPNRIRFVTGKRRRTWNRNCVAIGLAAGFLEPLESTSLHLIQSAIIRMVRLLPDARFDPATIAEFNRQTDFEYERVRDFIILHYKATERSDTPFWRYCRDMEVPDTLRRKIDLFAANGRIFREDEELFAEESWIQVLLGQGVIPRGYDPLVDIKSEAQIGQYLGNIERVIRKCVDLMPTHADYVARTCPA

SEQ ID NO: 83207 - protein, 561 aa, Phaeobacter gallaeciensis
  misc_feature (1)..(561): tr|V9WFB2|V9WFB2_9RHOB Uncharacterized protein OS=Phaeo bacter gallaeciensis DSM 26640 OX=1423144 GN=Gal_00772 PE=4 SV=1
MNNRLRRITIVGGGTAGWMTALILETELSRTSAPKDRPKICLIESPNIATVGVGEATVPRMPKTLRQAGISERAFFRETNASFKLGVKFCNWNTDAKGNRIDYVNPFAHGQLLEGLEPAEYFLRFGNGDRDYTQSISPHDDLGRLCKGARPLGQPEFEQRFGYAYHLDAVKFAGMLTKVCTKHGVEHIQDEVTSVELDEQGNVSHLMLEQRGRHDVEMVIDCTGFRGLIINQALGEPFMDYSDYLPNDRAMALQIDHPNPEKIESLTRSTALGAGWTWRVPLYNRVGTGYVFSSAHRTDDQAADEYLAWLGDSGKGATPRIIPMRIGRVRNAWVKNCVAIGLAGGFIEPLESTAIHMIDHAVRWLTEHMPTRDIAPSLRSRYNRQMDKLYDEVLEFICLHYRLGNRTDDQYWIDARTEMKIPDRLAENLELWQHRLPMPHDIEFATLFDYRVYQTVLLGKQVYDTGYGPGIRDRLRPLKKPIWFQWWKGAKVDLAQILKSMPDHKTLLRDIRGELDQRGFGMAAAMKPTVSMPCPEAVPCMIQNMPSFSEIENGQKDLQLF

SEQ ID NO: 83208 - protein, 413 aa, Asticcacaulis sp.
  misc_feature (1)..(413): tr|A0A258B6W3|A0A258B6W3_9CAUL Tryptophan halogenase (F ragment) OS=Asticcacaulis sp. 32-58-5 OX=1970317 GN=B7Z 26_09360 PE=4 SV=1
MGTVGVGEATIPPLVNLFIFLGIPEHEMLAVVQGTYKLGIEFVDWHRKGHRYTHAFGSPGRDLGIVPFYEYWLKEHLAGRGGSLWDYSLNDLAAQANRFAPLKQVPNAPMAGLTHAWHFDAGLLAKFLRRACEAQGVIRREGMVSGVNLRAEDGFIDSLTLSDGAVIEGDLFIDCSGFRGLLIEGALKAGYEDWTHWLPCDRAIAVPCASTETLLPYTRATAHSAGWQWRIPLQHRIGNGHVFCSAFMGEDEARDILMKNLDGKALADPRTLTFTTGRRKASWVKNCVAFGLSSGFMEPLESTSIHLVQSGMTRFLKFFPDKGFSPLEIAEYNRLTRHEYELIRDFLVLHYKATLRDDSDFWNHCRTMAIPDSLAHKIDYFREHGRLPPKSSCNCSAATATARPMCISSSRRP

SEQ ID NO: 83209 - protein, 510 aa, Dyella thiooxydans
  misc_feature (1)..(510): tr|A0A161IVW9|A0A161IVW9_9GAMM Tryptophan halogenase OS =Dyella thiooxydans OX=445710 GN=ATSB10_28850 PE=4 SV=1
MNEQAIRNIVIVGGGTAGWMAAAAFARVLGSACTIRLVESEEIGTVGVGEATVPHLKLFNNLLEIDEIEFVRQTQGTFKLGIQFNDWGRIGDSYIHGFGELGHDLGLVPFHQCWGRARQLGFAGDLGDYSINTLAAPRGRFMASASDAPRNSPLANIAYAYHFDSGLYARFLRRYAEARGVQRTEGKVAQTRLRPDNGFVEAVVMENGGAIAGDLFIDCSGFRGLLIEQALHAGYEDWTHWLPCDRALAVGCEKVGPPTPYTRSTARPAGWQWRIPLQHRTGNGYVYSSAHVSDDEAAATLLANLDGKALGDPRSLRFTTGMRRKFWDRNVVALGLSSGFMEPLESTSIYLIQSGIAKLLNLFPRQGISPVLVDRYNEQSRFEFERIRDFLILHYHTTQRDDTPFWNQCRTMDIPTSLKDNIALFRDSGRFFRNAEEMFALVSWVQVMIGQGIVPQACHPLADQISPQELRAFMQHVRRVIADCVQAMPAHEAFIARYCAAPVPGAPMPA

SEQ ID NO: 83210 - protein, 501 aa, Sphingorhabdus contaminans
  misc_feature (1)..(501): tr|A0A553WGR4|A0A553WGR4_9SPHN Tryptophan 7-halogenase OS=Sphingorhabdus contaminans OX=1343899 GN=FOM92_00090 PE=4 SV=1
MAIEKIIIVGGGTAGWMTAAALSRLRAGRPVDITLIESEEIGTVGVGEATIPPFLDFNRLLEVDEREMLSAVQGSFKLGIQFVNWGKLGDSYIHPFGAYGYQVEGISFHHVWHKYHQAGDKRPIQVFNIETMAAHFGRFARTEDYQREDLPPVNYAYHLDAGRYARYLRAYAEKRGVVRREGKVADVALNGENGFVSSVTMDNGDVIEGDLFVDCSGFRGLLIEQALKTGYEDWTNFLPCNRAVALPCVREDGSGPLPYTRATAHTAGWQWQVPLQHRNGNGHVYCSEFMSDDEALSILLGNIAGKPGADPNYLRFTTGRRKKFWNKNVVALGLSAGFMEPLESTSIHLINTGINKLIALLSLDGITQAQEDAFNRLTGKEYARIRDFLILHYNTTTRDDSPFWDYCRNMAVPETLTEKTDLFRLNGQIFREDDELFTETSWAAVMMGQGIMMGGHNPMADAVREPATAKEMDAMEQSIRFVVQHMPSHGDYLQKYCPAPA

SEQ ID NO: 83211 - protein, 499 aa, Alteromonas sp.
  misc_feature (1)..(499): tr|A0A2S9VG51|A0A2S9VG51_9ALTE Tryptophan halogenase OS =Alteromonas sp. 190 OX=2079529 GN=C6Y40_01305 PE=4 SV= 1
MTTPPKQIVIAGGGTAGWIAAVALARKMGPLVNIRLVESSTIGTIGVGEATIPPLRTFHKLLQIDEQAFMRATAATFKLGIRFENWGRIGEQYIHSFGMTGQQSWLAEFVHFYLSAKARGLEGDYGDYCFELEAARQHKFATSAQSNIQYAYHLDAGNYVAFLKRFCSNLGVTHCDGVISQVLQHDNGDIKALRLASGELIEGDFFIDCTGFKGLLIEETLHTGYEDWSHWLLCDSACAVQTTSTEPAAPFTRSAAHHAGWQWEIPLQHRTGNGNVYSSAFMDDNEASEQLMQNVKGEAITTPRTLRFKTGRRNKAWHRNCLALGLASGFVEPLESTSIHLVIMGITRFMQLFPHGGNYQALTDEYNQQTQLELERIRDFIILHYHVTQRDDSPFWEHCKNMTVPDSLQTRIALFKEQAHAFQKQNELFRVDSWAQVMLGQGVTPDYHHPAAAMLSDAQLNQSMQQQRQRVLQAVAQLPAHEDFIRRYCATPQKAEALL

SEQ ID NO: 83212 - protein, 508 aa, Opitutae bacterium
  misc_feature (1)..(508): tr|A0A2E9RQ79|A0A2E9RQ79_9BACT Tryptophan halogenase OS =Opitutae bacterium OX=2026771 GN=CMI26_00010 PE=4 SV=1
MSNENLKNIVILGGGTAGWMAANLLQKKWRHLGINITVVESPDIGIIGVGEGSTPLLKDFFDSLDISESEWMPKCNATYKNGISFNNWSTVAGYEAYFHPFPCSLDFATFGLLYKYSALRRKGVDVLAHPNRFSLMSNLTQKKLAPIPSENFPFHFQYGYHFDSVLIGKFLRDRAKADGVAHIEATVEHVEQSLNGDIKLLKLNNGEEIAGDFFVDCSGFASILLQKTLKIPFVSFGENLFNDSAVAIPTELEPNIPSETISTALSNGWAWKIPLTNRYGNGYVYSSHYLSKEAAETELRSHLGILDRDVEARHLKMRVGRTEESWSKNCLAVGLSQGFIEPLEATALQFVYSTVDEFAKALEEGSFTNQYREEFNNRMNRNFEGIRDYIVLHYKTNSRTDSQYWVDNRENNNLSNNLKEMLKCWYGIEDIEAALSRLNIGNYYSQRSWACLLAGVGVFPRQENLSAADAESAKMAEADLDYVDKFITGCSMNFEPHERKLAVKSPNS

SEQ ID NO: 83213 - protein, 502 aa, Actinobacteria bacterium
  misc_feature (1)..(502): tr|A0A2N3G2Q6|A0A2N3G2Q6_9ACTN Tryptophan halogenase OS =Actinobacteria bacterium HGW-Actinobacteria-3 OX=20136 48 GN=CVT63_08335 PE=4 SV=1
MSIQPIRDIVILGGGTAGWMSAAALSKLLPPSCRIRLIESEEIGIVGVGEATIPNIKHFNAALDIDEDEFLKATQGTFKLGIEFVNWGQLGDRYIHGFGKVGPDTSLVGFHHYWLRLKQLGKASGLDAYSINTVAPRQARFLRYRKDMPGSPLGDIVHAFHFDASLYARWLRGLAEKRGVVRTEGKVKQVLRRAEDGFIEALVMESGEQINGEFFIDCSGIRALLIGDALGVGYDDWSHWLPCDRALAVPSAPVKPLLSMTRSTAHSAGWQWRIPLQHRVGNGHVYSSRFMSDDEATSILLANLDGEKLADPRLIRFRTGMRRKLWERNCVAVGLSSGFLEPLESTSIHLIQTAISRIATFFPHAGFDAADIDEYNAQGELEYQQVRDFLILHYKATERTDSAFWNYTRTMSIPATLQRKIDLYRSNGRLFRDGNELFAEPSWLQVMEGQRIHAQGYHPFAGFMPESELCEFVGGVEAVIGKCVGVMPDHAQFIAEHCAAQR

SEQ ID NO: 83214 - protein, 538 aa, Burkholderia cepacia
  misc_feature (1)..(538): tr|A0A0U4CAU2|A0A0U4CAU2_BURCE Tryptophan halogenase OS =Burkholderia cepacia JBK9 OX=1395570 GN=P350_37320 PE= 4 SV=1
MSNPIKNIVIVGGGTAGWMSASYLVRALQQQANITLVESEAIPRIGVGEATIPNLQKVFFDFLGIPEREWMPQVNGAFKSAIKFVNWRKSPDPSRDDYFYHLFGSVPNCDGVPLTHYWLRKREHGFQQPMEYACYPQPEALDAKLAPCLPDGTRQMPHAWHFDAHLVADFLKRWAVGRGVKRVVDEVVEVHLNERGYISSLSTKEGRTLEADLFIDCSGMRGLLINQALKEPFIDMSDYLLCDSAVASAVPNDDARVGIEPYTSAIAMNSGWTWKIPMLGRFGSGYVFSSKFTSRDQATADFLNLWGLPDKQPLNQIKFRVGRNGRAWVNNCVAIGLSSCFLEPLESTGIYFIYAALYQLVKHFPDASFDPRLRDAFNAEIVYMFDDCRDFVQAHYFTTSRDDTPFWLANRHDLRLSDAIREKVERYKAGLPLTTTSFDDATYYETFDYEFKNFWLNGNYYCIFAGLGMLPDRSLPLLRHRPESIDKAEAMFARIRREAERLRTSLPTNYDYLRSLREGDAGLSRSQPGPALATPEIL

SEQ ID NO: 83215 - protein, 500 aa, Sphingorhabdus contaminans
  misc_feature (1)..(500): tr|A0A553W944|A0A553W944_9SPHN Tryptophan 7-halogenase OS=Sphingorhabdus contaminans OX=1343899 GN=FOM92_08270 PE=4 SV=1
MTDNRIRSIAIVGGGTAGWMTASALSKVLGRDYAKITLIESDAIGTVGVGEATIPQINIFNRMLGIDENDFVRRTKGSFKLGIQFVDWGRKGHTYFHPFGKYGVDMEGVSFHAYWQRLYQSGLAPWIDEYSIQAKAAECGKFMRPIDAGNSPLSQISYAFHFDAGLYALFLREYAEAAGVVRHEGKITRIVQHGENGFVEAVELEDGSRIEADLFIDCSGFHGLLIEGALQSGYVDWSRYLPANRAMAVPCAGKEDITPYTRSTARDAGWQWRIPLQHRIGNGYVYCSDFTSDEAVYDTLLANLDGEPLAEPRIIKFTTGHRKKYWVKNCVAIGLASGFMEPLESTSIWMIQSGIARLLSNFPDRSFNPVDIERYNRVITTETEEIRDFLILHYKATERSDTPFWNYCRTMEIPERLAEKIAVFENSGRCFRENEELFNDTSWFAVMTGQLMKPRTFDPVAQLLSLEETQSRLKQIQTAVTNSADYMPKHRDFIRDNCAA

SEQ ID NO: 83216 - protein, 235 aa, Asticcacaulis sp.
  misc_feature (1)..(235): tr|A0A258AWT1|A0A258AWT1_9CAUL Tryptophan halogenase (F ragment) OS=Asticcacaulis sp. 32-58-5 OX=1970317 GN=B7Z 26_11010 PE=4 SV=1
MNSKRNILIVGGGTAGWLAAAYLAKFFDIGEQQQLNITLLESADIGIIGVGEGTFPTIRNTLKFLGIDEAQFMRQTSATFKQGIRFADWVRTPHNGQHEHYFHPFEAPFYTEGAGLLPYWLLQDEATRLPFAQAVTFQKRVAEAQRAPKRPHEGDFTGPLNYAYHFDSVKLAHVLAERARDLGVRHLSGTLKGVEVDSTGAIAHILTHEHGALTADLYIDCTGFRAELIGKALNA

SEQ ID NO: 83217 - protein, 507 aa, Sphingorhabdus contaminans
  misc_feature (1)..(507): tr|A0A553WHW5|A0A553WHW5_9SPHN Tryptophan 7-halogenase OS=Sphingorhabdus contaminans OX=1343899 GN=FOM92_02220 PE=4 SV=1
MESALKQIVIVGGGTAGWMAAAAFARFLGPGFSIHVIESDEIGTVGVGEATIPAIQLFNQNLGIDEKEFVRATQGSFKLGIEFADWYAPGNRYIHAFGAVGRPLGLLPFHHYWLRHHQQGGTSSLWDYSPTALAAAQNRFSPPQEKPGALPSGVAYAYHFDAGLYAAFLRRYSEARGVVRTEGKIVGTELNSQSGFIDAVTLSSGVNISGDLFIDCSGFRGLLIEEALHSGYEDWTEYLPCNRALAVPCASANPLTPYTRSTAREAGWQWRIPLQHRIGNGHVYCSDFIDDARATDILMENLDGAPLAEPRQLRFVTGKRRQIWKKNCIALGLASGFLEPLESTSIHLIQSGIAKLLNFFPSGRPDQADIDAFNTQMDFEFHAIRDFIILHYKANNREGAFWTHCREMDVPDSLAAKMELFQANGRIVRHNEELFTELGWLQVMWGQGLRPRGYHPLADQLTPAQLQEFLSVAHKHADFVASQMAPHQDYITAQCAAPPLEMKKAMP

SEQ ID NO: 83218 - protein, 513 aa, Alteromonas sp.
  misc_feature (1)..(513): tr|A0A2S9V700|A0A2S9V700_9ALTE Tryptophan halogenase OS =Alteromonas sp. 190 OX=2079529 GN=C6Y40_18110 PE=4 SV= 1
MITRVVVVGGGTAGWLTAGIIAAKNPLVGENSHTEVILVESPDVKNLGVGEGTWPTMRDTLRLLGIAEKQFLSECDASFKQASKFVGWQQGGEDKYYHPFTAPAGFGAVNLVEAWHDEGCPGDFESWVCAQGMACERYQAPKMPQLPEYAYNFNYGYHLSADKFVALLHRHCTEQLGVQYKSAHVAGIQSHPDGAIAAIELAQGEPLAGDLFIDCSGFSARLIGQHYNVPFVSKRHILFNDTAVAAQVNHASDQTPIASCTVATARPHGWVWDIALQSRRGIGHVFASELTTETQAEDALRAYISSDESLSQKAIMPRTIRFDPGHRARFWEHNCVAIGVSAGFVEPLEATALVLIEKSAEWIAEQLPRSRAAMAVLRKRYNDMTDARWDEIIDFIKLHYVLSERRDSPYWQAHADPASWTDSLQEALQLWQSQPPGLLETNLRQELFSSASKQYVLYGMGFRSRDWQPGGITSLRKPLIERVRREFLHNGDKLLAQLPTNRDYFNRLKATSA

SEQ ID NO: 83219 - protein, 519 aa, Alteromonas sp.
  misc_feature (1)..(519): tr|A0A2S9VF27|A0A2S9VF27_9ALTE Tryptophan halogenase OS =Alteromonas sp. 190 OX=2079529 GN=C6Y40_03265 PE=4 SV= 1
MRKSVLIVGGGTAGWITAAYMARMLAADTPGGVSITLVESEEIGILGVGEGTFPIIRKTMGRIGLDESDLIKHADATFKQGIRFNNWKKNPADDPNDSYFHPFQVASQHTDMDLLPYWLLGVAGDVPWSECCTVQERAVEAKLAPKLISHPNYEAPLNYAYHFDATKLAALVRRRAMEMGVKRLIDTIDDVKLDEGGAIASVTAREHGELTADLFIDCTGFRARLIGETLGSEFTSYKNELFCDRAVALQVPYEQAGGPIPSCTYTTAKDYGWIWDIGLHERRGLGYVYSSKYCDEETAVATLKAHIGPAADNLQHRLLKFEPGYRKTQWHKNCVGIGLSVGFIEPLEATGISFAEVAALMLCNLFPWSGDYERSATQFNNAMSKRFEHVKDFIKLHYYLTDRDDTAFWRDNQDPATASEYLKGKLEQWRHRPPSFLDIDASHDIFDENSWQYILYGMGFKTDISAREGALRFFDDARNEFASIRQQSENAKRAVPTHRDLVSEVCQNGFKPQPRRARR

SEQ ID NO: 83220 - protein, 500 aa, Sphingomonas gei
  misc_feature (1)..(500): tr|A0A4S1XGK4|A0A4S1XGK4_9SPHN Tryptophan 7-halogenase OS=Sphingomonas gei OX=1395960 GN=E5A73_08530 PE=4 SV=1
MTDQRIRNIVIVGGGTAGWMSAATLARILGPEYASITLIESDAIGIVGVGEATIPQMATFNRMLGVDENDFLRATKGSFKLGIQFVDWGRRGHTYFHPFGKYGVDMQGVSFHAYFLRLHQMGEAPDVDLWSLQAMAARGNKFMRPIDAGRSPLSDIAYAFHFDAGLYARFLRGYAEERGVVRREGRIVDVKLRGEDGFVQSVVLEDGSHVEGDLFVDCSGFRGLIIEQALKAGFTDWSHWLPCDRAIAVPCESVEEWTPYTRSTAHTAGWQWRIPLQHRTGNGHVFCSDYMSDDEATSILLANLDGKPLAEPRTVPFRTGHRNKFWVKNCVALGLAGGFIEPLESTAIWLIQSGLSRFLTMFPDKRFNQADVDRYNRIMATDYEEIRDFIILHYHATERDDSPFWERCRTMAIPERLAEKMRVFRSHGRAFRENEELFNDTSWFAVMHGQLLRPQGFDPVAEVMRLDETRARLAHIREAVGNSADYMPKHRDFIQENCAA

SEQ ID NO: 83221 - protein, 517 aa, Alteromonas sp.
  misc_feature (1)..(517): tr|A0A2S9VF07|A0A2S9VF07_9ALTE Tryptophan halogenase OS =Alteromonas sp. 190 OX=2079529 GN=C6Y40_03260 PE=4 SV= 1
MSHSANPVNTPEVKRVVIVGGGSSGWMCAAAIARIAPPETRITLVESEDIGVIGVGEATIPTLMEFNDFLGIKEHDLLRECQGTYKLGIDFVDWYQKGESYFHPFGFYGRDTPEFSFHQLWLRLNAMAEKGEIPADAPGIISDYNLCSVAAKQGRYAPPQGGADTILSTMRYAYHFDSARYGQMLRRYAEQRHVERIEGIVNSVERDHNTGLLQSVTLNSGQVLQGDLFVDCSGFKALLIDGAMQSEFVDWHHYLPCDRAIAVQTKLAGAPDPFTRSTADDAGWRWRIPLQTRLGNGHVYSSDFMEHDEALQKLLAGVEGEPVTQPLPLKFRTGHRKAFWDKNCVAIGLAGGFIEPLESTSIHLTQMGIQRLVNLWPGRGCNRSEIAQYNALMTADYERLRDFIVLHYNATEREDTEFWRYVKHMAIPDSLAAKLEIFRSSGRVIPSPEDLFTPHSWLAVMLGQGIYPQNYDVLVDRVPAQALLKNMQMLRMSVAKTAGSMPTHEEFIRRYCQASAA

SEQ ID NO: 83222 - protein, 503 aa, Shewanella sp.
  misc_feature (1)..(503): tr|A0A2M7HN73|A0A2M7HN73_9GAMM Tryptophan 7-halogenase OS=Shewanella sp. CG12_big_fil_rev_8_21_14_0_65_47_15 O X=1975537 GN=COW15_19045 PE=4 SV=1
MKVKRTIRKIIILGGGTAGWMAAAALANNPVFAAIELCLVESDNLGTIGVGEGSTPHLKRFMDNLGISEKDWMEQCHASYKTGIDFINWNGDGQQYFHPFYFQLDVKPAEVFFVNANARRRGHGHAVKPDDFFSSGVLAKRNLSPTPRKTLPSANEYGYHFDATELAHYLKNYACQRGVRQIIGDVVEVSTTQNQYIEALTLASGEQLSADFFIDASGFSAKLIHQSLEVPFQSFADELLNDSAVTVPISLEVSQTVATQPQVKYHTRATALSAGWLWQIPLTHRTGNGYVYSSRHLSANAAAKELLHSVNLPESTPVRFLKMRVGVSEKAWHNNVLAIGLAQSFIEPLEATSIMMTQFTLERFMALFERYQLNKQAAVLSRQTLNQAVMQLVLGVKDYIQAHYVTSQRNEPYWIAARKIVLSKRLTQLLQAWYRGEDFDLLLYQYDQQLAYFRPSWYALLAGMDYRDPKLKRPFEPISADITAQAIRYCQTLVEQYFHPSPQ

SEQ ID NO: 83223 - protein, 473 aa, Sphingomonas gei
  misc_feature (1)..(473): tr|A0A4S1XGS6|A0A4S1XGS6_9SPHN Tryptophan 7-halogenase OS=Sphingomonas gei OX=1395960 GN=E5A73_07220 PE=4 SV=1
MSDRAIRSIAILGGGIVGLSAAAAFARALPQLAITVIETPPDPAALADRLPGSTSAIHRFHASIGLEEQALLRAGAAVPRLGLRFRNWPAGAETWYHVHGEHGAAAGKVAFHQLWARARREGRADAWHLYAAAGVLAEAGKFAHPQPDTPLAAFDYALRLEPGRYRETLATLADRLGVTRRSGTFGSAEQREDGAVAALLLVDGQRIAADLYLDASGPAAPLANLMSQGFEDWGSMLPYHHVEIGEGPASAADPNDTIIGGAQGWQFASPLGARTFLGSVHASPATIDAHSVAIRPGRRSEPWCRNVLALGDAAVALDPLHWPNLHLAQSGIARAIELLPGRDCHPVEIAEYNRRARAEAEQMRDFQVLHYLRTGANTEVPHSLAAMLEQFERRGRFVHQDEDSLLEEVWISALFGLGVLPRDIDPLAAAVPADSAAAGMAGMRSQLARLPAGLPSFGDYLARGGAPAPPRSC

SEQ ID NO: 83224 - protein, 483 aa, Sphingomonas gei
  misc_feature (1)..(483): tr|A0A4S1XEB2|A0A4S1XEB2_9SPHN Tryptophan 7-halogenase OS=Sphingomonas gei OX=1395960 GN=E5A73_08525 PE=4 SV=1
MTAAALARMVRAGVAVTLVESDAIGIVGVGEATIPPIRSFNAMLDIDENDFLANTQGSMKLGIEFLDWNQPGHRYLHPFGEYGFSVEGVRFHQIWQKLRAAGRAGPIDQYSMCAVAAGRNRYAAPATEQTSPLSQLVQAYHFDASLYARYLRRYAEARGVVRREGKVMQVALRGEDGFIDAVTLEDGSRIQGELFVDCSGFRGLLIEEALHTGYEDWSHWLPCDRALAVPTVHAGPLTPYTRATARPAGWQWRIPLQHRTGNGYVYSSAHVSDDEAAATLLANLDGEPLGDPRPLRFATGRRKLAWNRNCVAIGLSSGFLEPLESTSIHLIQSGISRLLGLFPDSGWGDAERDSYNDFTAAQYAQVRDFVILHYKANGRDEPLWRQAREMDVPESLKRRIDLFRNRGRIFRLEDELFAETSWIAVMLGQGIAPQGWDPLADALNPDQLAAMLDRIRSTFRRAADAMPDHAAYLARHCAARGFA

SEQ ID NO: 83225 - protein, 428 aa, Pirellula staleyi
  misc_feature (1)..(428): tr|D2R1S0|D2R1S0_PIRSD Tryptophan halogenase OS=Pirellu la staleyi (strain ATCC 27377 / DSM 6068 / ICPB 4128) O X=530564 GN=Psta_2115 PE=4 SV=1
MVSTSGTSDISSVGNTDVIVIGGGPSGSTVSTLIAQQGYKVTLFEREHFPRFHIGESLIPETYWVLKRLNMLPKMRKTQFVKKHSVQFVTEKGKLSEPFYFSDNKPHECSQTWQVMRSEFDHMMIKNAAEHGVQVHEGVRVLEVLFEGTRAVGVKVADERGNVRDVFASVVVDASGQSSMIMSRLGLREWDQELKKAALWTYWEDAYRDKGRDEGATIVLQTQGKKGWFWYIPLHNNILSVGVVADYSYLFKDRETKDHEAVYFEEVAKCPGLQPRLEGAKRIAPYRAAKEYSYRSREVAGDGWVLVGDAFGFLDPLYSSGVLLALRSGELAADAVVAGLREGDTSGAKLGAWGPNYIQGMERMRRLVCEFYNGFSFGKFVKLYPQLKGHLTDLLIGDLFDEKVDDVVEPMNHIRRLQAEKSAALPVE

SEQ ID NO: 83226 - protein, 236 aa, Asticcacaulis sp.
  misc_feature (1)..(236): tr|A0A258ARV1|A0A258ARV1_9CAUL Tryptophan halogenase (F ragment) OS=Asticcacaulis sp. 32-58-5 OX=1970317 GN=B7Z 26_11835 PE=4 SV=1
EDWTEWLPCDRAMAVPCNRDTKDITPYTRSTARAAGWQWRIPLQHRTGNGYVYSSRFISDDEAAATLLANLDGAAQADPPPLRFAAARREKCWHKNCVAIGLASGFLEPLESTSIYLVQMAITFLLRLLPRDRVMDQALEDEFNRLIDAEYERVRDFLILHYHANTRTDAPMWQYCRDMDIPDSLRDKIARFKHRGYIHAYADGLFAPPSWQAVFFGQDVVPERYDALAEAMDRET

SEQ ID NO: 83227 - protein, 521 aa, Duganella sp.
  misc_feature (1)..(521): tr|A0A0Q5DYC3|A0A0Q5DYC3_9BURK Tryptophan halogenase OS =Duganella sp. Leaf126 OX=1736266 GN=ASF61_19090 PE=4 S V=1
MSSPDKQAPAGAGPVRRIVIVGGGTAGWMTAAPLAQRLARHPDQPCEVILVESAEIGTIGVGEATLPTIRVYNASLGLDANDFIAKTSASYKLGIEFKDWGHLGNRFFHGFGDYGPALAGVGAHHHWLRLAQAFEQMPDIAHWSVPSVMAREGKFVPPDEETPGVADAYSYGFHFDASLYAAYLRDYAVARGAQRVEGMIVGVEQHPHNGFVTAVRLADGRRVEGDLFIDCSGFRGLLIEGALQAGYEDWSNYLPCNSAQAVPCASAPHLTPFTRSTATGAGWLWRIPLQHRTGNGHVYSSDFITDEQAGRVLLDGLDGAALDAPRQIRFVTGRRRKSWVNNVVAIGLSAGFVEPLESTSINLIETAVGKLLELFPDRDCSPALADEFNRVMGSRYEAVRDFIVLHYKLTARDDTPFWRHCAQMAIPDTLAHQIALFRETGRVAILDRDGFAEPSFVAMMVGLGVMPKRHDPLADRVDLRVVHGHFAQLRDMIAQAVARMPSHGAYVTQQAAAGGLARAAA

SEQ ID NO: 83228 - protein, 498 aa, Duganella sp.
  misc_feature (1)..(498): tr|A0A0Q5CUT2|A0A0Q5CUT2_9BURK Tryptophan halogenase OS =Duganella sp. Leaf126 OX=1736266 GN=ASF61_14920 PE=4 S V=1
MSQSLRPVRRVVIAGGGTAGWMAAAALTRTLGKVLDITLVESDDIGTVGVGEATIPSLAQFHRLIDIDERAFMKATSATFKLGISFEHWRARGQHYMHAFGATGTDHWTAGFHHFWHKGRAAGVAGDYGDYSLEHQAARALRFGHLPDDGLVYAYHLDAGRYARYLRRYAEHFGIERVEGKIAAVERDPASGDVAALALDSGRRLEADLFLDCTGFRSLLLGQTMGVPYDDWSQWLFNDSAIAVQTASVGPAVPYTRAIAHDWGWQWRIPLQHRTGNGIVYASRYADDATARAALLANLEGEVLTEPRVIRFTPGQRRQVWAGNVIGLGLASGFLEPIESTSIHLIQRTIVRLLQLFPGAGIRPAMVEEFNSQAAEDIRTIRDFIILHYKVTERDDTPYWRAARDMAVPDALQHRIDLFGGAGQVFRHQNELFSENSWVQVMLGQGLMPCAHHPTADVMGATELAAFLADIRTGIGDTVAKLPGHQAYVERHFQSDTP

SEQ ID NO: 83229 - protein, 130 aa, Actinobacteria bacterium
  misc_feature (1)..(130): tr|A0A2N3G2C2|A0A2N3G2C2_9ACTN Tryptophan halogenase (F ragment) OS=Actinobacteria bacterium HGW-Actinobacteria -3 OX=2013648 GN=CVT63_08330 PE=4 SV=1
SFNEGIARDFDGVRDYIVCHYRMNRRTDTEYWRANASHDQLSDSLKAILTCWFTGQNLEQELARQNIADIYPAMSWHCLLAGYGQFPDVAKLRAPELGIGKADMAAIDDFRSRCALNFRDHAKVLSEMAA

SEQ ID NO: 83230 - protein, 203 aa, Asticcacaulis sp.
  misc_feature (1)..(203): tr|A0A258BD26|A0A258BD26_9CAUL Tryptophan halogenase (F ragment) OS=Asticcacaulis sp. 32-58-5 OX=1970317 GN=B7Z 26_05505 PE=4 SV=1
MQNPITRLIIAGGGTAGWMTAAALSVALPKSVEILLIESEDIGTVGVGEATIPTMRNFNQHIGIDEGEFIRATEATFKLGIEFLGWGRKEGRYFHGFGDYGADHQAISAYSLWRRLRAEGDDTPLEAWSLPTALAYANRFFPPNPDPRSPMHDYAYAYHFDAGLFAKFLRRHAEARGVKRLNAKISEVLLRAEDGFIDGLRLD

SEQ ID NO: 83231 - protein, 502 aa, Erythrobacter sp.
  misc_feature (1)..(502): tr|A0A1E4B4A0|A0A1E4B4A0_9SPHN Tryptophan halogenase OS =Erythrobacter sp. SCN 62-14 OX=1660099 GN=ABS49_01580 PE=4 SV=1
MAIRHIVIVGGGTAGWMAAAALSKMIGARGLAITLVESEEIGTVGVGEATIPPFVEFQNLIGVDEAEMMAACQASFKLGIQFVNWGRMGDSYIHPFGAYGYQMGGIAFHQIWHRIQELGDKRPIQAFNLETMAAYFGKFARTQDYAREDLPPINYAYHLDAGRYARFLRQLSEKRGVVRREGRVEHVALDGESGYVTSVQLTDGSVIAGDLFVDCSGFRGLLIEQALQTGYEDWRHYLPCDRAVALPCAREDGSPPPPFTRAMAHGAGWQWTVPLQHRNGNGHVYCSEYMADDKALDILLANIAGKPQADPNWLRFVTGRRKKFWNKNVVALGLAAGFMEPLESTSIHLINTGINKLVSLLSLDGINPAQVDAFNRLTGKEYARIRDFLILHYNATERSDTPFWNHCRTMAVPETLTEKVELFRANGQIFREEDELFTETSWAAVMMGQRIAMGGHNAMADTFGGPDLKKELDEMEASIRYLVEHMPTHAAYLERYCPARAA

SEQ ID NO: 83232 - protein, 520 aa, Sphingomonas gei
  misc_feature (1)..(520): tr|A0A4S1XED4|A0A4S1XED4_9SPHN Tryptophan 7-halogenase OS=Sphingomonas gei OX=1395960 GN=E5A73_05565 PE=4 SV=1
MVSDRRRILIVGGGTAGWLTAGYLARMLGADRPGGVAITLVESHDIGILGVGEGTFPTIRKTLSRIGIDEAALVRRCGATFKQGAKFVHWRHAPGTPGPDHYLHAFQETDDHAGPELLPYWLLGLAGDANWDDVNTPQKRAADAHRAPKLPSHADFLGPLNYAFHFDAVSLAVLLREQGVANGVTHLVDTVQEVLLGEDGAIAGVRGAESGVLTADLYIDCTGFRAELIGKALGQPWKSCRDTLFCDGAVAIQVPYAQPDDPIASYTISTAQQAGWIWDIGLATRRGIGHVYSSAHCDAEAAEKALRDYVGPAGAALETRRFRFDAGYREVNWVKNCVAVGLSSGFFEPLEATGIVFSEVAAGMIANLFPWAGDFETSARQFNANMRRRYARALDFIKLHYFLSARRDSAFWTDNTDPSSAPDSLKELLDRWRFRPPNEIDIDRNVDIFTESSWQYVLYGMGWKTDLSAKAGVYRFANEARAAFAEIRRQGDFAIRQLPSNRELVRFAQGSGFGKGAHAA

SEQ ID NO: 83233 - protein, 495 aa, Alteromonas sp.
  misc_feature (1)..(495): tr|A0A2S9VC05|A0A2S9VC05_9ALTE Tryptophan 7-halogenase OS=Alteromonas sp. 190 OX=2079529 GN=C6Y40_08565 PE=4 S V=1
MTNSTQQPESIVIVGGGTAGWMCAAYLAAKWSQRYRITLIESAQIGTVGVGEGSTPFLRQFFAELGWQESDWMPACDATYKTGIEFSNWTGSERFKRYFHPFFSALDLDTAEHFFANCNQVRRGQNAAVRPAQFFSAATMAEAAVTPVSTTLGGDIDYAYHFDAGKLASCLRSFAVQQGVKHLTGNVLNVQCTNGHITQLETDCSAPLTATLFIDCSGFRGLLMKQGLGQSLQSYQDCLFNDRAVAIPTPHNHPQQAITPQTRSEGLSCGWMWNIPLTSRVGNGYVYGSHFCSPEQAEAELRQRLKVSDETPARHLTMPVGRLQEHWHGNCVAIGLAQGFIEPLEATALMLVQYGIYQLSSRLGELVTITSRTQYNTEMNRMFDGIRDYIVAHYYLNTRNDSPYWQACRNDIRVPENLTLLVNAWDGKGQFEDALESIDEQLVYLRPSWYCILAGMGRFKSEAVNLSDPGAAAGIQQYLTRTVGEHFKAQLMPSR

SEQ ID NO: 83234 - protein, 517 aa, Photorhabdus temperata
  misc_feature (1)..(517): tr|T0NZL3|T0NZL3_PHOTE Tryptophan 5-halogenase OS=Photo rhabdus temperata subsp. temperata M1021 OX=1221520 GN= B738_12784 PE=4 SV=1
MIKSVLIVGGGTAGWMTAAYLSKAFAQNVDITVLESKRVKKIGVGEATFSTVRHYFDYLGLDESEWLAKCAGSYKLGIRFENWDGQDNHFYHPFERWETVKGFPISEWWLRKSTTNQGFDYATFLTPHLCEAKRSPRRLDGSLFAQSSDKSLGQSTLAEQRAQFPYAYHFDADEVANFLKRYAMNRGVSHIEDDVTHVEIDENGNIGHLETKIRGKLKADLYIDCTGFKGLLINQALNEPFVSFSDVLKNNRAVALRVSREDTRDIEPYTTARTMSNGWRWTIPLYKRNGYGYVYCDEYQSPEEAEAELRRSIPYENADCAANHIRMRIGRSNRSWVKNCVAIGLSSAFVEPLESTGIFFIQHGIEQLVRFFPRSSSNELLIEEYNTRVNRVVDGVKEFLLLHFSLAQRNDTLYWKEWKNIELPKELLKKIMLAKDHLLDKETIYPFYHGFEEYSWNTMILGLSSGSLTSKPALSLMIPDKADEILLQHHVKAKKMVSGLPTCHEYLQYLHNSEDRN

SEQ ID NO: 83235 - protein, 496 aa, Pseudoalteromonas sp.
  misc_feature (1)..(496): tr|A0A2N1BAE0|A0A2N1BAE0_9GAMM Tryptophan halogenase OS =Pseudoalteromonas sp. GutCa3 OX=888433 GN=CXF64_13785 PE=4 SV=1
MKPIKHVVIAGGGTAGWITAALLNKVLGKVINITLIESSAIGTVGVGEATIPPIIQLNNALGINEQDFINATNASIKLGIEFENWKTPGHSYMHAFGSFGKNFPFCDFYNFWLKGQITGCEDDLWDFSLNYQAAKQHKFAPLNTIPNTQLPGLSYAYHFDATLYAEYLKKLAISRGVKHIDAKISHVEQCDTGNVKSLALDNDSQISGDLFIDCTGLRALLIEQTLNTGFIDWSHYLPCDSAVAVQTKSTHELKPYTRSIAHSAGWQWQIPLQNRIGNGLVYCSRYLSDDDAKQLLLKSLPAEPITEPRIIKFKTGRRLKQWHKNVVSVGLSSGFLEPLESTSIHLIQTAVTRLIKLFPHNGISDALVTEFNKQSVIELEHIRDFIILHYKLTEREDSPFWRQCMQMDIPNSLTHKLNLFKHTGKVIREDDELFAEVAWQQVMIGQGLIPDDYNSIVDSLSDDQLSDLFSTLKTLISSTVTQLPTHQNFLASIKKV

SEQ ID NO: 83236 - protein, 505 aa, Arsukibacterium ikkense
  misc_feature (1)..(505): tr|A0A0M2VAZ3|A0A0M2VAZ3_9GAMM Tryptophan halogenase OS =Arsukibacterium ikkense OX=336831 GN=WG68_05955 PE=4 S V=1
MSVENIKKLTIVGGGAAGWMTAIYLNKVFNSQQPNFQITVIESPDIGIIGVGEATVHSIRFFFAAMGLDENALLRATHATLKTGIMFRNWMQPVAGQMHQYFHPFEQQQLGKDIDMSSSWLLSARYQQERYDEGVSLSAHLIKQGHGPKARQSAPYQGVVPYGYHLDAVLLARFLREHAVAAGVVYLEDTIVDVSVTDGNISSVSSATSCYQADIFIDATGFKGLLIEALQQRNWQSFADALPCNKAVAIQRPHLAGYQPKPYTVATALSHGWAWQIDLSSRQGTGYVYDGNRLTADQAEQELRAWLGPEACALPARHLQMKVGCRQQFWLGNCIAIGLAGGFIEPLESTGLHLINLGARLLSTHLSPGATAQAVRDSYNQAMNGFYQDLKQFIVLHYCLTDRDDTAFWRQARATAVQCAGLPEKLALWRHKICEYHDLAGGYATTFTDENYRYILYGMQHYPQLQLATGEALQQPFVLLQQRVQQALQRTMSHSEYLQQLMPCR

SEQ ID NO: 83237 - protein, 499 aa, Sphingomonadaceae bacterium
  misc_feature (1)..(499): tr|A0A2D4XZP2|A0A2D4XZP2_9SPHN Tryptophan halogenase OS =Sphingomonadaceae bacterium OX=1930536 GN=CMN67_00320 PE=4 SV=1
  misc_feature (465)..(465): Xaa can be any naturally occurring amino acid
  misc_feature (475)..(475): Xaa can be any naturally occurring amino acid
  misc_feature (483)..(483): Xaa can be any naturally occurring amino acid
MTESKPPRVVVLGGGSAGWITACLLHHRWHSRGGQVTVVESPQIGIIGVGEGSTPQLKAFFDHLGIDEADWMAACDATYKLGIRFTGWSERPGFESYFHSFPGPVDLHTEPGFVHNCALRRRGFDVPAHPDDWFLAKVLAEEHRGPHPRDNFPFMPSYGYHFDAHKLGQFLRDWATERGVLHRLLKATDVEQGTQAEIAALLCEDGTRIEGDIFVDCSGFRSVIAQQTLGAQFIPFGENLFNDRAVVLPSRHSTRFKPQTDSIAMRAGWRWSIPLTTRVGNGYVYSSKYVSDEDAEAELREAIGMQDEGEARILEMRVGRIAETWTGNCLAAGLSQGFIEPLEATALHIVIATALDFADSYEKGGYGSGHRDMFNQRIAAKYEGIRDYIVAHYRLNQRSDTQYWRDNAANDALSDNLKGMITAWFTHEDLREVNLRQHDGNPHYASMSWHALFAGYGTFPPEAKXVPTPTGLVTXEVDHTRRXLSACATNFLRYAPLSD

SEQ ID NO: 83238 - protein, 517 aa, Arsukibacterium ikkense
  misc_feature (1)..(517): tr|A0A0M2V639|A0A0M2V639_9GAMM Tryptophan halogenase OS =Arsukibacterium ikkense OX=336831 GN=WG68_05950 PE=4 S V=1
MAPASAIKQILVVGGGSAGWLTACHLARQLQCQQPGSVQVTLLESSDIPTIGVGEGTVPAIRQSLQYLGISETDFIRECDATFKQGIKFVGWRQAVSGLPHHYYHPFDYPEQQSVALTPYYLLNPGTDSFANRLTIQGRVCDAGLAPKTISHCEYDGLCNYAYHLDAAKFAAFLTRHATEKLGVKHVKANVRAVRQHADGSLASVLTDTAGDISADFFVDCTGFRSLLLGETLQVPFISKNDILLADQAVAMQIPYAEPDSPIPSYTLATAQAAGWIWDIGLSKRRGTGYVYSSQFADADTAERTLRQYLGPAAAALPCRHIPMQVGYRQSFWQKNCVAIGLSQGFVEPLEATGLLVYDAAARYLAELLPLDTRLLPAAAAQFDQHVHYAWDRVIDFIKLHYVLSDRRDSLFWQANRLPETIPASLQAKLSRWQQQLPSQYDFASRFEIFNLDNYLYVLYGMDFTTDLTLRRSCYPEHAVAERHFSQIRQQACQAVQQLPAHRQLLAQIQQYRLQTI

SEQ ID NO: 83239 - protein, 495 aa, Sphingomonadaceae bacterium
  misc_feature (1)..(495): tr|A0A431JQN9|A0A431JQN9_9SPHN Tryptophan 7-halogenase OS=Sphingomonadaceae bacterium OX=1930536 GN=EKK50_0246 0 PE=4 SV=1
MTTIVIAGGGTAGWMAAAAFGGLLESGYRIRLVESEEIGTVGVGEATIPQIRLFNQALGLDEDAFLRATGGTFKLGIAFDGWHDPGHSYMHAFGDVGRDVGLIAFQHYWLRARALGLAKPLDAYALNEVAARAGRMHRGGPITAQTLPTMPYAFHFDAGLYAAYLRRFAVNRGVERTEGKIDRFERNGDTGDIAALVLASGERIAGDLFLDCTGFRGLLIEGALETGYDDWTHWLPCDRAVAVPSANVGAPVPYTRAIAREAGWQWRIPLQHRTGNGYVYCSRHLSDDAATAALLANIEGEAQADPRHLRFVTGRRKRAWNRNVVALGLASGFLEPLESTSIHMIQSAIARLVKLLPAFPIADALRDEYNRQTDFEIERIRDFLILHYWANGRAEPFWQERREADLPDTLRAKIALWQQAGTITREHEELFTEDGWLQVLAGQGVQAAAYHPLADQIGTDDLGEYMETLELLYRREAQAMPSHADLIARHCAARP

SEQ ID NO: 83240 - protein, 494 aa, Duganella sp.
  misc_feature (1)..(494): tr|A0A0Q8R8K8|A0A0Q8R8K8_9BURK Uncharacterized protein OS=Duganella sp. Root198D2 OX=1736489 GN=ASE26_05625 PE =4 SV=1
MNTAYKRIVVVGGGTAGWMTATALATAFPVSTVELVESEEIGIVGVGEASFPSIRAFHKILGIDEAQFLRATDGTFKLGIEFRDWREAGAKYFHTFGDFGGLSGPYALWGQHRRLGEAELGALDRQCLPSVMASQGRFMAPGPGDGRQFNYAYHFDAALYAAFLRTMALQRGVRRSEGRIVDAVRRADGGIAHLALADGRVVEGDLFADCSGFASLLLGRALEERYVDFSRWLPVDRAWACPSARNGAALTPSTRCTALEAGWAWRIPLSNRTGHGHVFASRYIDEERAREQLMQQLDGAALADARLLRFSAGHRERFWVHNVVALGLSSGFLEPLESTSIFLVQSGLGRLIELLLAGARPGQEAVAAYNAGMRRQFERIRDFIILHYCLTARRDSQLWRDMASMELPETLAFKIHAWRQAGALHQYDQEGFDATSWLAIHAGMGHWPERADPSLHEMPHEDALRALRMRRDSIAATVATMPSHQDYLHSVLAR

SEQ ID NO: 83241 - protein, 497 aa, Novosphingobium sp.
  misc_feature (1)..(497): tr|A0A2T6MCX5|A0A2T6MCX5_9SPHN Tryptophan halogenase OS =Novosphingobium sp. GV027 OX=2135689 GN=C8K10_101343 P E=4 SV=1
MNEAAIRSITILGGGTAGWMAATLLAKAFDGQPLRITLVESEEIGIIGVGEATVPLFRLFNDRLGLDEHAFLQATMGSYKLGIEFCDWGQVGNTHFHGFGDYGEPIGGIAPHHHWLRLARSGEAAPIDDYSAPYALAQRGKFTPADPRQPRYSHAYHFDAVLYARYLRNLAESWGVTRVEGRVVDVPLDPQTGHIRALHLADGQVVDGEFFVDCTGFAAELIGKRLGTAYVDWSHWLPCDSAIAVPSARHDPPAPFTRSTALAAGWQWRIPLQHREGNGIVYASAYMSDAAAEDALLGSLGGAPLANPRRFRFTAGRREAFWQRNCVALGFASGFLEPLESTGIQLIQNGIGRLIEFFPDKHFDPRVAAEYNRVCQVEWDRIRDFIIAHYCVSQRPEPFWQAARAMDLPDTLQQKLDSWHATGKIPLLDGESYQEPSWAAILLGNGVWPQRHDPLIDALPIDMLRAHMARRREDLTRMGRSAPDHRFYLARHCQAAA

SEQ ID NO: 83242 - protein, 505 aa, Cellvibrionaceae bacterium
  misc_feature (1)..(505): tr|A0A2E2XEK8|A0A2E2XEK8_9GAMM Tryptophan halogenase OS =Cellvibrionaceae bacterium OX=2026723 GN=CL693_04680 P E=4 SV=1
MNIKPIENIIIVGGGTAGWVAASSLARVLPKQSYRITLVESDQIGIIGVGEATIPPIQDVHKMLGVDEADFIRSTEASFKLGIEFHNWSEQGSRYFHPFGQYGREFDSVSFHQYWMRARELGFESELSDFSLGTQMAKAGKFVPSNNDPQSILSSMGYAYHFDASLYAKFLRRLAEGMGVVRREGKVIDVSLDHDSGFIDTILMEDGEAISGDLFIDCTGFASILLGKTLGVEFEDWSHLLKANRAVAVPSQNVGETRPYTQSIAHPAGWQWRIPLQHRTGNGLVFCDDYLSEDEACQLLLSNLEGEALADPRVLRFRTGRRQQAWHKNCIAVGLSAGFLEPLESTAIHLVQTMVARLLQLFPSSGFQQADIDEFNQQFCREYDMVRDFIVLHYHVNQRSEPLWRDAREMAIPESLSHKIRLFESHGRFFERQDDLFKKASWLAVMMGQGLKPSDYDPIANRKPAAGLCQWLKNIQSAYGDAIGAMPDHDRFIAEYCRAKKDRVA

SEQ ID NO: 83243 - protein, 538 aa, Pseudomonas chlororaphis
  misc_feature (1)..(538): tr|A0A3G7HGF1|A0A3G7HGF1_9PSED Thioredoxin reductase OS =Pseudomonas chlororaphis OX=587753 GN=C4K26_4689 PE=4 SV=1
MNKPIKNIVIVGGGTAGWMAASYLVRALQQQANITLIESEAIPRIGVGEATIPSLQKVFFDFLGIPEREWMPQVNGAFKAAIKFVNWRKSPDPSRDDYFYHLFGSVPNCDGVPLTHYWLRKREQGFQQPMEYACYPQPGALDGKLAPCLPDGTRQMSHAWHFDAHLVADFLKRWAVERGVNRVVDEVVDVRLNDRGYISNLLTKEGRTLEADLFIDCSGMRGLLINQALKEPFIDMSDYLLCDSAVASAVPNDDARAGVEPYTSAIAMNSGWTWKIPMLGRFGSGYVFSSKFTSRDQATTDFLNLWSLSDNQPLNQIKFRVGRNKRAWVNNCVSIGLSSCFLEPLESTGIYFIYAALYQLVKHFPDTSFDPRLSDAFNAEIVHMFDDCRDFVQAHYFTTSREDTPFWLANRHDLRLSDAIQEKVQRYKAGLPLTTTSFDDSTYYETFDYEFKNFWLNGNYYCIFAGLGMLPDRSLPLLQHRPESIEKAEAMFASIRREAERLRTSLPTNYDYLRSLRDGDAGLSRGQRGPTRAARETL

SEQ ID NO: 83244 - protein, 569 aa, Alteromonas mediterranea
  misc_feature (1)..(569): tr|S5ALM4|S5ALM4_9ALTE Tryptophan halogenase OS=Alterom onas mediterranea 615 OX=1300253 GN=I633_21350 PE=4 SV= 1
MRDNESHNNINRVVVIGGGTAGWLAAGVLAAKLSAENSVTLIESPVIPTIGVGEGSWPSLKDTLLDIGISELEFLSVCHGSYKQGSSFANWRKGEHKYYHPFTEPAGYREIDIHAWWQAIAPTEAYENAFSIQAAMCEAGKAPKQATTPDYAHVLNYGYHFDATALATLLKKHCINKLNVTHVVGHIASVNSHQNGYIKSVVGDNGHVTEGDLFIDCSGSNGLLIDKHFKVPWVSVEHIMLNNRAVALQVPYSDNDSAIESTTLATAHPCGWTWDIALQHRRGVGLVYSSQLASDEQAYKTLINYVSRRYPKALAEALTPRTLAFEPGHREHFWVKNCLSLGMSSGFVEPLEASAIAMVELGLRMLCEGFPQTQEHMTIVSKRYNQRFRYRWRRVIDFLKLHYVLSDRDEPYWRAQRDMATVPESLRELLTLWKYQSPSRLDLIENEEVFPSASYQYVLYGMGYRTLPNSLRLSEEDRQKACNIREKLQQTKPSYFQALPSNNALLKSLAERYATSDLVDSQCPDGQTDKASSANNASKDNGNINNNVESYRDGTPNKKDTQYDRIGFR

SEQ ID NO: 83245 - protein, 538 aa, Pseudomonas chlororaphis
  misc_feature (1)..(538): tr|A0A0D5XYU5|A0A0D5XYU5_9PSED Tryptophan halogenase OS =Pseudomonas chlororaphis OX=587753 GN=PCL1606_28070 PE =4 SV=1
MNKPIKNIVIVGGGTAGWMAASYLVRALQQQANITLIESAAIPRIGVGEATIPSLQKVFFDFLGIPEREWMPQVNGAFKAAIKFVNWRKSPDPSRDDHFYHLFGSVPNCDGVPLTHYWLRKREQGFQQSMEYACYPQPGALDGKLAPCLPDGTRQMSHAWHFDAHLVADFLKRWAVERGVNRVVDEVVEVKQNERGYISSLLTKEGRTLEGDLFIDCSGMRGLLINQALKEPFIDMSDYLLCDSAVASAVPNDDAHEGVEPYTSAIAMNSGWTWKIPMLGRFGSGYVFSSKFTSRDQATTDFLNLWGLSDNQPLNQIKFRVGRNKRAWVNNCVSIGLSSCFLEPLESTGIYFIYAALYQLVKHFPDTTFDPRLRDAFNAEIVYMFDDCRDFVQAHYFTTSREDTPFWLANRHELRLSDAIKEKVERYKAGLPLTTTSFDDSTYYETFDYEFKNFWLNGNYYCIFAGLGMLPDRSLPLLQHRPESIEKAEAMFASIRREAERLRTSLPTNYDYLRSLRDGDAGLSRSQRGPKRAAREIL

SEQ ID NO: 83246 - protein, 508 aa, Duganella sp.
  misc_feature (1)..(508): tr|A0A3E1S9U7|A0A3E1S9U7_9BURK Tryptophan 7-halogenase OS=Duganella sp. BJB480 OX=1871181 GN=D0T24_16830 PE=4 SV=1
MNSNTNNRIKRVVVVGGGSAGWMAAAALATYLGKQASVRLIESEEIGIVGVGEASVPHIRMFNAQMLGIDEAEFVKRTQGTVKLGIQFQDWSRIGDSYIHGFGVIGRSLGPLPFHQFWLKLFQSGRAAPIGEYSPQTVMAPQGRFARGDGNAAAGSPLADIAYAYHFDASLYARFLRELSEQRGVRRTEGKIAGVNLRAGDGHVESVTMESGEVIEGELFIDCSGFRGLLIEQALKTGYEDWTHWLPCDRALAVPCERVDPLTPYTRATARAAGWQWRIPLQHRTGNGYVYSSRHIGDDEAASTLLANLDGKPLADPRPLRFTPGMRKKFWNKNVVALGLASGFLEPLESTSIYLVQSGISRLLALFPGADFNPLLAERFNRESAFEYERVRDFLILHYHATERNDTPFWDYCRTMSIPDSLREAMELFRSDGRYFRNGEDFFALPSWVQVMLGQRITPRGYHPIVDDMPEDKLAGYVEDMRQTLAHAVASMPTHGEWIDRYWKAPAP

SEQ ID NO: 83247 - protein, 503 aa, Duganella sp.
  misc_feature (1)..(503): tr|A0A3E1SCL4|A0A3E1SCL4_9BURK Tryptophan 7-halogenase OS=Duganella sp. BJB480 OX=1871181 GN=D0T24_09930 PE=4 SV=1
MGLGLVKNVVIVGGGTAGWMTAAALSTLISNGCKIRLVESDEISTIGVGEATIPVIRGYNQLIGVDENEFLRQTQGTFKLGIEFVNWGKQGDSYIHGFGVIGRDQLLAKFYQYWLKLYQDGQVPDIEHYSINTVAARKNKFLRAVSDSTGSPLSDISHAFHFDAALYAKYLRGLSEKRGVRRTEGRIVETVLRADDGHVQAIVLENGERIEGDLFIDCSGFRGLLIEGALNTGYEDWSHWLPCDRAIAVPCESVSPLLPYTRSTAHDAGWQWRIPLQHRIGNGHVYSSKFMEPEQAESILMNNLDGKPLAQPRHLRFTTGKRKRAWNKNVVAIGLAGGFMEPLESTSIHLVQTGITRLLTMFPHKGYDQPDIDAFNQATDEEYAAIRDFLILHYKLNAREGKPFWDYCRNMEIPATLQRRMDLYRSNGRIIRGSDELFTETSWLQVMHGQGLRAKGYHPLVDQRSAEDIAAFLGNVKEVVLRCAEHMPTHEEYIASCCAAPPL

SEQ ID NO: 83248 - protein, 495 aa, Shewanella frigidimarina
  misc_feature (1)..(495): tr|A0A106BXC5|A0A106BXC5_SHEFR Tryptophan halogenase OS =Shewanella frigidimarina OX=56812 GN=AWJ07_08230 PE=4 SV=1
MNKSIKKVVIAGGGTAGWMAAAAFSKLLGKNLEIVLVESDEIGTVGVGEATIPTLHIFHRLLGLKEQDVMAATNATFKLGIQFENWHDVNKDYLHSFGFLGKDCWACGFQHFWLKGKQQGLVSDIGDYCTEHLAARQGRFAVLPNQDYNHAYHMDASLYAKFLRKFAEHHGMTRIEGKIADVLQHDDTGNIRALKLENGALIEGDLFIDCTGFKALLIEQTLNTGFEDWSHWLPCDSAIAVQTEAVQKPIPYTRSIARESGWQWRIPLQTRTGNGLVFCSKYISDTDATELLLNNIEGAPINQPRVIKFKTGTRRQHWNKNCVAVGLSAGFLEPLESTSIHMIQRSIVRLLQLFPSQGIIDADIAEFNQQTKVEMDNIRDFIILHYKVTDREDSRFWRYCKNMPIPASLQHRIDMFSQSGKVYKYGNELFGESSWIQVMMGQGLMPKEYHPIVDMMDEAELTSFLNSIKATVKRKVDTLPAHHDFVQHYCKSTSM

SEQ ID NO: 83249 - protein, 516 aa, Massilia sp.
  misc_feature (1)..(516): tr|A0A350CU73|A0A350CU73_9BURK Tryptophan halogenase OS =Massilia sp. OX=1882437 GN=DCX52_16055 PE=4 SV=1
MTSSFIRHVVVVGGGSAGWLTAGLIAAEHGASRPDGLRVTLVESPEVAPIGVGEGTWPSMRDTLRRIGVRESDFFRECDAAFKQGSLFQRWVTGQDGDRYFHPFSLPQGYGEANLAARWQERYAGVPFAELASYQPHLCLQGRAPKQPATPEFAAVANYGYHLDAGKFGQFLKKHCLERLGVHYVPDHVLGIESHPNGDIAALRTQSHGLLAGDLFVDCTGMRSLLLGQHYGVPFLGQKHLLFNDTALAVQVPYAREDSPIASQTISTAQRAGWIWDIGLPTRRGVGYVYSSAHTGDDEAERALRDYVAHSGGPRDCPAPRKIGFAPGYRERFWQGNCVAVGLSSGFIEPLEASALALVELAAAMIADEMPVTRAHMDVVARRFNDTFRYRWERVIEFLKLHYVLSRREDSAYWIENRAPASMPERLRELLDLWRYRAPIRGDFPRIEEVFPTASWQYVLYGMGWRTEAGATGRGGGEQADGYFREAADLARRMLPALPSNRELIAHIRTRGLPRI

SEQ ID NO: 83250 - protein, 523 aa, Marinimicrobium sp.
  misc_feature (1)..(523): tr|A0A2D8WIV1|A0A2D8WIV1_9GAMM Tryptophan halogenase OS =Marinimicrobium sp. OX=2024837 GN=CMG77_04280 PE=4 SV= 1
MSVHNSPTEHVVIVGGGTAGWLTAGLLAADARLDSRPNRRITLLESPDIATIGVGEGTWPSMLETLRTIGLSESEFIRECDVSFKQGSRFQNWCRGDGDRYDHPFTLPAGYGRLNLAEHWRYAHRDLPFAYAVSPQSAVCDDGRAPKQLATPEYAFNLNYGYHLDAGKFTRLLQRHCVEHLGVVHYLGEVTGVQPRDNGDIKHLHLKSGETLAGDLFIDCTGMASRLLGQHYQVPWVSQRPVLFNDSALAVQVPYSSELSPVASQTLSTAHPDGWIWDIALPTRRGVGAVFSSAHIDKDRVYERLEAYVRGTDSGATLDELSPRLIQFDPGHRERFWQNNCVAIGLSAGFIEPLEATALVLVERSAQFLVQQMPENREEMSVVARRFNRRFCRHWDNIIGFLKLHYVLSTREDSDYWRAHRAEESVPDELAEQLLLWRSRSPWTCDSLYRDELFPSASYQYILYGMRPEYTAPEALERRVRSSGAAAQTAFHENGVQTRKLLQGLPDNRSLINHIRRHGLHTV

SEQ ID NO: 83251 - protein, 505 aa, Caulobacter sp.
  misc_feature (1)..(505): tr|A0A2T9JKZ9|A0A2T9JKZ9_9CAUL Tryptophan halogenase OS =Caulobacter sp. 774 OX=2172652 GN=DDF67_19505 PE=4 SV= 1
MTDNRIGRIVIVGGGTAGWMSAAMLARALGPGVAISLVESEAIGTVGVGEASIPQLRNFNAFIGLDEDAFLRATEGTIKLGIEFVDWLRPGHRYMHAFGPVGRPLGVTPFHHYWLDARRRGTAGDDFWAWSANALAARAGRFGRVPTSPAQAGGAEPLTWAFHFDAALYARHLRTRAEARGVARVEGRIVGVDQDGETGFLRAVTLEGERRVEGDLFIDCSGFRGLLIQEALETGYEDWREWLPMDSAWAVPSRDEAPPVPYTRAWARDAGWQWRIPLRHRTGNGHVFSSAWTDKDAAARVLMDNLEGEALAEPRLLTFVTGRRKRSWNRNVVALGLAAGFMEPLESTSIHLVQSGLARLLALFPDKGFDPLLAAEFNRQTADEYARIRDFLVLHYKATEREDTPFWASRRTMEIPDTLAERMALFASSGRVFSRDDDLFKESSWVQVLLGQGVTPAATHPMTGVVADDQIDGWLDDLSRITARTAAALPSHAAFLGRAETRLAG

SEQ ID NO: 83252 - protein, 494 aa, Marinimicrobium sp.
  misc_feature (1)..(494): tr|A0A2D8WLW4|A0A2D8WLW4_9GAMM Tryptophan halogenase OS =Marinimicrobium sp. OX=2024837 GN=CMG77_09900 PE=4 SV= 1
MVNKPVRKVVIAGGGTAGWVCAAALSSQLGDLLNIVLVESEDIGTVGVGEASIPPMRNFHRLIGVDEQQFMAATGATFKLGIAFENWARDGDRYIHSFGKTGKETWMADFQHFWLRAREQGFGGEFGEYCVEHEAAREGKFATSSNGSLNYAYHLDATRYAAFLRSKSESEGVTRIEGKIQQVQLNPDSGHIESLEMASGDVVEGDLFIDCTGFRGLLIEQALHTGYEDWSHWLPCDSALAVQTESVGPPPPYTLSSAHDSGWRWRIPLQHRVGNGLVYCSRYLSDEAARDRLLSSIEGKPLTDPRLIRFRTGRRRQTWNKNCVAVGLSSGFVEPLESTSIHLIMISMTRLIQLFPFDGVTPSLVSHYNRIAEEELEKIRDFIILHYHATERSDSPFWRHCGSMSIPESLRERIALFREQGHAYQSPNELFRLDSWVQVMLGQRINPERYHPVVRAMGDERLKKTLDDFRRQVSLGVEKLPPHGAFVEEYCRER

SEQ ID NO: 83253 - protein, 496 aa, Marinimicrobium sp.
  misc_feature (1)..(496): tr|A0A2D8WJ14|A0A2D8WJ14_9GAMM Tryptophan halogenase OS =Marinimicrobium sp. OX=2024837 GN=CMG77_04585 PE=4 SV= 1
MNHSIKNVLVVGGGSSGWMAAAVLSRFFSKQIRIQLVESSEIGTIGVGEATIPPIKNFNDVLGIKEADFLKQTRGTIKLGIQFENWNRPGDCYMHAFGEIGRNLGIAGFHHYWLKARQAGVAEDFWRYSLNEQAARHNRFAPMETIPGTQFPGLTHAYHLDAGLYAQMLRAYSEKLGVKRIDGKIQTVDKDSESGDIAAVELESGERLAADLFIDCSGFRALLIGEALDVDFEDWSHWLPCDRALAVPSEAAETITPYTRAIAHEGGWQWRIPLQHRTGNGLVYSHRHLSDDEATHTLLSNLDTPALADPRPIRFKTGRRVQQWCQNVVSLGLSSGFLEPLESTSLHLVQQGLTRLIKLFPRNGIQPSDIEEYNRQSQFEFEKIRDFIILHYHLNRKTDSPFWRMCREAPKPESLLRRIDLFVGSGRVFCEQEELFRETAWEQVMIGQGITPQDYHPLVDNIEDHQLREFMNFWQRIVDKTVAQMPSHNDFIASIK

SEQ ID NO: 83254 - protein, 500 aa, Sphingomonas sp.
  misc_feature (1)..(500): tr|A0A0Q4K4P6|A0A0Q4K4P6_9SPHN Tryptophan halogenase OS =Sphingomonas sp. Leaf30 OX=1736213 GN=ASE89_15650 PE=4 SV=1
MDTPPKTRVIIAGGGTAGWLAAALLTRQLGALIDVTLIESDEIGTVGVGEATIPTVQAFHALLGLDERAFMAATGATFKLGIAFEGWARPDDRYVHSFGDVGRSTWMGDFQHFWLEARANGLAGDFGDYCLELQAAEARRFTIGQQGPQLNYAYHFDAGRYARFLRERCETAGLTRIEGRIAGIDRSAETGHIDAVVLADGSRVAGNLFLDCSGFRGLLIGDALGVGYEDWSHWLPANRALAVQTTSVEPARPYTRAIAHAAGWQWRIPLQHRVGNGIVYSSEYLSDDAARDRLLASVQGRPLTEPRLLRFTTGRRLRAWEGNCIALSLAGGFVEPLESTSIHLVMTALTRLLRAFPFDGISSAVVAQFNAQTRREIEGVRDFVILHYHLNQRSEPFWKACAAMPIPDTLAKRIALFSDAAQAYQSPDDLFRVSSWTQVMLGQRLEPRDWHRLARMMPPERLGSSLAELKAGIAQQVDRLPAHQAFVDRYCAQDAPGVAA

SEQ ID NO: 83255 - protein, 516 aa, Pseudoalteromonas phenolica
  misc_feature (1)..(516): tr|A0A0S2K166|A0A0S2K166_9GAMM Tryptophan halogenase OS =Pseudoalteromonas phenolica OX=161398 GN=PP2015_1295 P E=4 SV=1
MIKKIVIVGGGTAGWLAASHIAMRLKPHLNKSYSVVLIDSPDIPTVGVGEGTVPVIKDTLKYFGISESEFIKQCDVSFKQSIKFVDWEYTPGTTEKNYYHHGFDFPKLKPFDITPNWLLDEELNKLHYADLVSVQSHACNLNLSPKRLVDKEYSGIFNYAYHLDAGKFTNLLSKHAIEKLGVENIKATVIDVSTTNDGYINGVTTEEAGFIDGDFFVDCTGFKGLLINETLKGEFINKGDILLADTALAIQVPYEDEEQEIPPFTISTAQKNGWIWDIGLRTRRGVGYVFSNKHETLDEALNVLSQYLNQEVTEKDVRKIDMKVGYQKQPWINNCVAMGLSQGFVEPLEATGLLMFDVTARIFADLIPPDKTLLNCTAELFNRDITQMWESTCDFIQLHYCLSKRTDSQFWIENTDESRLSPTLKEKLSLWQRKLPSQFDFRYSVDSFRLDNFLYVLYGMNFKTNLEHYAHMFENKEQDIQNLKNSISEGVRFCEQNLTGHRAFLEQVNKFGLTKV

SEQ ID NO: 83256 - protein, 512 aa, Caulobacter sp.
  misc_feature (1)..(512): tr|A0A2T9KDK4|A0A2T9KDK4_9CAUL Tryptophan halogenase OS =Caulobacter sp. 774 OX=2172652 GN=DDF67_01630 PE=4 SV= 1
MSQDVRSGRIRSIVIVGGGTAGWMAAASLRRHFGKAPIDITLVESSEIGTIGVGEATIPTIRGFYQNLGLDDLEVLRATQGTCKLGIRFKDWMAPGSAFIHPFSLYGQDLNGVPFQHYWLKARSVADIGEVGEYSLGASLAAAGRFTVPAANPPSSLSVFDWALHFDAALFAQLMRRVAEANGVRRIDAKVVKVNLRPEDGFVASLDLHTGATVEGDLFIDCSGFRGLLIEEALQTGYEDWSQWLFCDRALAGQSQPPEGAEPPPYTDVTAHSAGWRWRIPLQHRYGNGYVYSSRHIDDEAAKAELVAAVPDRLLHEPRLIRFTPGRRKKVWNRNVVALGLASGFLEPLESTSIALIETGIEKLKALFPDRSFDPAVIDEFNDWSRREMERVRDFVVLHYKAAQRADTPFWRTTRDAEIPETLARKVELFRSRGHIARYRWEMFQPPSWLAIFAGFDILPEGWDPALDGIDGAALAASLNQMRAGVARAVAGAPTHGEFLRRYVGAAPAAAE

SEQ ID NO: 83257 - protein, 506 aa, Novosphingobium sp.
  misc_feature (1)..(506): tr|A0A2T6M8K2|A0A2T6M8K2_9SPHN Tryptophan halogenase OS =Novosphingobium sp. GV027 OX=2135689 GN=C8K10_103138 P E=4 SV=1
MDSQVARSITIVGGGTAGWMCAAALGHFLGENTRITLVESDAIGTIGVGEATIPQIRMFNQALGIDETDFIRATGATFKLGIEFAGWLRPGHSYLHAFGDVGRDIGLGAFRHFWSRAHRLGLARPLGDYSVNDLAARAGKMHDGAPVTNRNVPQMPHAFHFDAGLYAAYLRRYAQAKGVIREEGLIVAVDRDGASGDVTAVRLADGRMIAGDLFIDCSGLRALLIGDTLGVGFDDWSHLLPANRAVAVPCASAAPLTPYTRSTAHAVGWQWRIPLQHRTGNGRVYCDAFLSDDEATAGLLANLDGAPLADPRVIRFTTGCRQQAWSHNVIAMGLASGFLEPLESTSIHLIQSMIARIMTFGPTCRPATAVRDTFNRQFADEMARIRDFIVLHYWANERKEPFWQACRNLPLPASLAEKIALFQSAGHLFRDQSDLFSEVGWLQVLVGQGIIPATSHALAEAVSEADLAGWLDTLHALFSREVAAYPTHADYIARHCAAPSPKGLVA

SEQ ID NO: 83258 - protein, 509 aa, Caulobacter sp.
  misc_feature (1)..(509): tr|A0A2T9KDC4|A0A2T9KDC4_9CAUL Tryptophan halogenase OS =Caulobacter sp. 774 OX=2172652 GN=DDF67_01635 PE=4 SV= 1
MANNLRKIVIVGGGSAGWITAAMISHYLKDSPCEIELIESEQIGIIGVGESTIPPFLQLIRSLGIDEKEFMQETQAAFKLAIRFENWRQKGEVYYHPFGLIGGLVDVHEFYQVWLRGKAEGHPSSLQDFAPASVMADRWKFMSPAMAPRTMLANANYAVHIDAALLAKFLRKFAEARGVKRTEGIVKDVATRPDGFIEKVILQDGREASGDLFIDCSGFRSLLNGKTLGTEFLDWSDVLLNDRAIAVQTANIQDPHPYTLAQAQDAGWRWRIPLQHRAGNGYVYCSQYCSDDEALATLMSQVEGEAVRDPWLVPFKTGMRKQLFNKNCVAIGLAGGFIEPLESTALHLIYRGVDYLLRFFPDRDCDPVLAAEYNRRMQVDYEEIRDFIVLHYFTTRRDDTPFWRAYQQVTPPESLRERIELFKASGVLRDGVDDMFRAPSWQSVMEGMGIRPKRYQQLVDTLPAGVVKGLLDKSAPMLSELVDTLPSHGDFLRQHCPAPVPEALLKRAG

SEQ ID NO: 83259 - protein, 510 aa, Caulobacter sp.
  misc_feature (1)..(510): tr|A0A2T9K1F9|A0A2T9K1F9_9CAUL Tryptophan halogenase OS =Caulobacter sp. 774 OX=2172652 GN=DDF67_11760 PE=4 SV= 1
METSTPLDIVIVGGGTAGWMMATALVSGLRPHQARVRLVESDEIATVGVGEATIPAMRDYNRFVGIDEVEMMRETNGTFKLGIEFLDWGFKGSSYHHPFGVHGAAIGGAGFHHHWNRARLAGHHFDIEQFSYAIAAARADRFEFPNPDPDRIDSTYSYAYHFDASLYARYLRTVAEGRGLKRTEGKVVDVTRDPLSGDVASITLASGEVVKGDFFVDCTGFRGLLIGQTLESPFEEWTDWLPCDRAWAVPCARADRFTPFTRSTAREAGWQWRIPLQHRTGNGYVYSSRYISDDEAASVLMANLDGEALAEPRQIRFKAGRRTASWTRNVMAAGLASGFLEPLESTSIYLVQVAVMNLLKLFPGKRVEPALVEDFNRRVDMEYDRVRDFLILHYHANTRTDGELWKHCREMEIPESLREKLELFRHRGVAPNHRDGLFAQPSWISVLLGQGVLPGGYDRMADNVPLPQALAEMERQQAVIARRVPAMPSHADFIARHCAITERPVAEIMA

SEQ ID NO: 83260 - protein, 493 aa, Marinimicrobium sp.
  misc_feature (1)..(493): tr|A0A2D8WJI4|A0A2D8WJI4_9GAMM Tryptophan halogenase OS =Marinimicrobium sp. OX=2024837 GN=CMG77_05425 PE=4 SV= 1
MNKPVRKVVIAGGGTAGWVCAAALSSQLGDLLNIVLVESEDIGTVGVGEASIPPMRNFHRLIGVDEQQFMAATGATFKLGIAFENWARDGDRYIHSFGKTGKETWMADFQHFWLRAREQGFGGEFGEYCVEHEAAREGKFAASSNGSLNYAYHLDATRYAAFLRTKSESEGVTRIEGKIQQVHLNPDSGYIESLEMASGESVDADLFIDCTGFRGLLIEEALHTGYEDWSHWLPCDSALAVQTESVGPPPPYTLSSAHDSGWRWRIPLQHRVGNGLVYCSRYSSDEAARDRLLSSIEGKPLTEPRLIRFRTGRRRQTWNKNCVAVGLSSGFVEPLESTSIHLIMISMTRLIQLFPFDGITPSLVSHYNRIAKDELEKIRDFIILHYHATERSDSPFWRHCSNMSIPESLQERIALFREQGHAYQAPNELFRLDSWVQVMLGQRINPERYHPIVRAMGDERLKKTLDDFRRQVSLGVEKLPPHGAFVEEYCRER

SEQ ID NO: 83261 - protein, 520 aa, Massilia sp.
  misc_feature (1)..(520): tr|A0A354IQR7|A0A354IQR7_9BURK Tryptophan halogenase OS =Massilia sp. OX=1882437 GN=DDZ22_02195 PE=4 SV=1
MASSTIRHVVIVGGGSAGWLTAGLIAAEHRASVPDGLRVTLIESPDVAPIGVGEGTWPSMRDTLRRIGVSESDFFRECDAAFKQGSLFARWSSDQEGDYYFHPFSLPQGYGEADLVERWQQAHAQVPFADLASYQPHLCMAGRAPKQAATPEFAAVANYGYHLDAGKFGLFLKKHCLEHLGVHYVPDHVLGIVSHENGDIAALRTQHHGLLAGDLFVDCTGMRSLLLGQHYGVPFLSQQHVLFNDTALAVQVPYAHDDSPIASQTTSTAQQAGWIWDIGLPTRRGVGHVYSSAHTSDEEAERALRAYVAASGGPRDCPAPRKIGFQPGYRERFWHRNCVAVGLSSGFIEPLEASALAMVELSAAMIVDEMPVTREHMDVVARRFNETFRYRWERVIDFLKLHYVLSRREDSADFSSYWRDNRTPESVPERLRELLSLWRYRAPMRGDFPRIEEVFPTASWQYVLYGMGWRNDAGATRRGDGALADRYFREAADLTRRMLPALPANRELLSHIRAHGLPRT

SEQ ID NO: 83262 - protein, 518 aa, Thalassomonas sp.
  misc_feature (1)..(518): tr|A0A553F6G6|A0A553F6G6_9GAMM Tryptophan 7-halogenase OS=Thalassomonas sp. M1454 OX=2594477 GN=FNN08_15925 PE =4 SV=1
MNQEIKRIVIVGGGTAGWLTAGIIAAEHSADGNSDVEVCLVESPDVKPVGVGEGTWPTMRGTLEKIGVTETDFIRQCDASFKQGAKFAKWVTGKEDDFYYHPLVLPQGYADINLAPFWQPQSDKVTFTNAVSFQGHLCDHGLAPKQNTTPEYAHIANYAYHLDAGKFAVFLQNHCTKKLGVKHILDHVVSINNNESGDIKSLSCKNQEDIEGDLFVDCSGFSSLLLGKHYQVPFISKKHILFNDSALAVHVPYESEQSPIASHTISTGQSAGWIWDIGLPSRRGVGHVYSSRHISDEQAADELREYIRESVGDKADQLEFRKIPIEPGHRQKFWHKNCVAVGLSAGFLEPLEASALVLVELSAAMISEQLPANRQVMDIVAKRFNDKFLYRWDRIIDFLKLHYILTKRTDTEYWRDNCDPESIPTELQDLLTLWKYQSPYHQDFTQVDEVFPSASYQYVLYGMGFKTEQPLSAKQKSMIDTAMENFQKNAKLSHKLLSVLPSNRDLINKIKEFGLQKI

SEQ ID NO: 83263 - protein, 500 aa, Sphingomonas sp.
  misc_feature (1)..(500): tr|A0A0Q4K6H6|A0A0Q4K6H6_9SPHN Tryptophan halogenase OS =Sphingomonas sp. Leaf30 OX=1736213 GN=ASE89_04030 PE=4 SV=1
MTAAIGSVVIVGGGTAGWMAAVAFGRLLGPAGTRVTLVESDDIATIGVGEATIPPIRTFHAMLGIDEDAFLRATGGSYKLGIRFEGWTRPGESYVHPFGQIGTDIAGVPFAAQWLRARQAGAAEALGAYSLEARAAEAGRFSRPIANGDSPLSRIGYAYHFDAGRYAAFLRAQAEAHGVVRREGRVDRVERGPAGIAAIHLADGSRIEGDLFLDCTGFRALLIEGALRAGWTDWSQWLPCDRAVAVPSAADAAPLALTRAIAEPAGWRWRIPLQHRTGNGHVFSSRHTSEDEATATLLAGLDGKALADPRVIRFATGHRTRFWNGNCIALGLAAGFMEPLESTSIHLVQSGLQHLLRMLPAGGPPAPAIVDRYNRTMTGEFVRIRDFLVAHYHLNARTEPFWRERAAAPIPDGLAEKLALFRAGGRIFREADELFNEVSWLALLTGQDAPVTGHDPICDALPIAIAAKRLAQIERVVSTSLTHMPPHATALAQLATNRML

SEQ ID NO: 83264 - protein, 510 aa, [Pseudomonas] geniculata
  misc_feature (1)..(510): tr|A0A0L8ADK7|A0A0L8ADK7_9GAMM Tryptophan halogenase OS =[Pseudomonas] geniculata N1 OX=1167641 GN=W7K_05215 PE =4 SV=1
MLDTESTPAGRIRKVVIAGGGTAGWLAGCALAHQFRDQLQITLVESEQIGTVGVGESTVPPIRTFHRFLQIDEQEFLRAVAGTFKLSISFENWRLPGDRFFHPFGTIGHGTWAAPFHHFWLDSLRRGMPSDLGDFCLESIASRGDRFSLHTQPQASYAYHFDASLYARFLRHRAEAHGLRRIEGRIALVRQHAHDGSVQALVLDDGQVIEGDLFIDCTGFRGLLIEQALGTGYEDWHEWLPCDRAVAVQTEAVAPPVPYTRAIAHEAGWRWHIALQHRVGCGLVYDSRHLSDDEAAAKLLRDAGAPPLRDPWKVPFRSGRRLKAWNGNVVSLGLASGFIEPLESTSIHLTISAVVRLIQLFPLDGISASLVKLYNDVSRQEMEHVRDFIILHYHATQRTEPMWKACREMRVPESLQQRLQAWRERAHAWQDPGELFRVESWTSVLLGQGIAPGPAHPLARAVSDADLRTLLKGIQQPVQQAAAQMPTQAEFIAQYCRSGVDVWRSTAANA

SEQ ID NO: 83265 - protein, 500 aa, Massilia sp.
  misc_feature (1)..(500): tr|A0A353HYR4|A0A353HYR4_9BURK Tryptophan halogenase OS =Massilia sp. OX=1882437 GN=DDX04_19405 PE=4 SV=1
METHVNNKPVRRVVIAGGGTAGWMVAACLGKSLGKRLDIKLVESDEIGTVGVGEATIPTLQNFHHLLEINEQEFMAATHATFKLGISFENWRDVHQDYIHSFGNTGIDHWTAGFQHFWHKGRERGLAGDYGDYCLEHRAAQLNRFAHLPKQIINYAYHMDAGAYARFLRRFSEHYGVQRVEAKIVDVVKDPDANTIRSIKLDSGTELEGDLFIDCSGFRALLIGGALGVEYEDWSHWLFNDSAAALQTASSGEAVPYTRSIAREAGWQWRIPLQHRVGNGHVFSSRFIDDEAAIATLNKHVTGEPLMQPRVIRFQPGQRKQVWVGNCVAIGLASGFLEPIESTSIHLIQSAISRLIEFFPDRGFQDVERAEFNRQSRFEYERIRDFIVLHYHLNQRTDSPYWLACANMAIPDTLRQKMDLYRARGKVVRVDNELFSEVGWIQVLEGQNMPVNAYNPLVDVQSEADIADYLDSVRGVIAKCVSVMPTHEEYIARHCAAPKM

SEQ ID NO: 83266 - protein, 561 aa, Phaeobacter inhibens
  misc_feature (1)..(561): tr|A0A2I7KC00|A0A2I7KC00_9RHOB Putative tryptophan halo genase OS=Phaeobacter inhibens OX=221822 GN=PhaeoP88_02 697 PE=4 SV=1
MNNRLRKITIVGGGTAGWMTALILETELSRTSAPKDRPKICLIESPNIATVGVGEATVPRMPKTLRQAGISERAFFRETNASFKLGVKFCNWNKDAKGNRIDYVNPFAHGQLLDGLEPAEYFLRFGNGDRDYTQSIAPHDDLGRLCKGARPLGQPEFEQRFGYAYHLDAVKFAGMLTKVCTKHGVEHIQDEVTSVELDEQGNVSHLMLAQRGRHDIEMVIDCTGFRGLIINQALGEPFMDYSDYLPNDRAMALQIDHPDPEKIESLTRSTALGAGWTWRVPLYNRVGTGYVFSSAHRTDDQAADEYLEWLGDSGKGATPRIIPMRIGRVRNAWVKNCVAIGLAGGFIEPLESTAIHMIDHAVRWLTEHMPTRDIAPSLRTRYNRQMDKLYDEVLEFICLHYRLGNRTDDQYWIDARTEMKIPDRLAENLELWQHRLPMSHDIEFATLFDYRVYQTVLLGKQVYDTGYGPGIRDRLRPLKKPIWFQWWKGAKVDLANILKSMPDHKTLLRDIRGELDQPGFGMAAAMKPTVPMPGAAPVPWAIQNMPSFSEIESGQKDLQLF

SEQ ID NO: 83267 - protein, 510 aa, Marinimicrobium sp.
  misc_feature (1)..(510): tr|A0A2D8WGX4|A0A2D8WGX4_9GAMM Tryptophan halogenase OS =Marinimicrobium sp. OX=2024837 GN=CMG77_00665 PE=4 SV= 1
  misc_feature (461)..(461): Xaa can be any naturally occurring amino acid
  misc_feature (473)..(474): Xaa can be any naturally occurring amino acid
MTVGPQRIVIVGGGTAGWMSAAALARLLPSRVSLQLIESEQIGTVGVGEATIPHIRYFNALLGIDEREFIHATQATYKLAIEFVGWGRETSRYLHPFSAFGGDIDGIDFHHYWLRTRDEWPELNLDAFSLAAQAARLGRFAPPPEHSEFGYGYAFHLDASRYAGYLRAYAEQRGVTRTEGRIQSVIPRESDGGVAALTLESGERIEGDLFIDCSGFRSLLLGQTLGVPFNSWKHWLPCDRAVAIASGALSEPPSFTRSTATTTGWQWRIPLQERTGNGQVYDSRSISDDEACAQLIGSLNGAPQSDPNLIRFEAGARARSWDKNVIAIGLSSGFLEPLESTSIYLIQMAIFKLVEFFPNSESGAVGREAFNRWMSLEYERVRDFIILHYHLNQREDSEFWQDCAHMSVPEGLQRKIALFKESAAIEFYDQGLFAPPSWLAVYLGQGLNPEAIDPRVAQQPXASLKGPLEQLAXXLNRTAQALPLHREVLARGGVAPSAAAPMSLYGGRYG

SEQ ID NO: 83268 - protein, 494 aa, Duganella sp.
  misc_feature (1)..(494): tr|A0A3E1SAB6|A0A3E1SAB6_9BURK Tryptophan 7-halogenase OS=Duganella sp. BJB480 OX=1871181 GN=D0T24_12215 PE=4 SV=1
MDTAYKRIVVVGGGAAGWMAATALATALPASTVELVESEEIGIVGVGEATFPSIRHFHRLVGIDEAEFLRATNGTYKLGIEFRDWRIQGESYFHTFGDFGELSGPDALWGHFRRLGDAGLGTLGEQCLPSVMASQGRFQGLASEENKPFNYAYHFDAALYAGFLRALALKRGVRRTEGRIVDVARRADGGVASLKLADGRELAGDLFIDCSGFASLLLGRTLDEPFVDFSHWLPVDRAWAVPSEPSGTALTPYTRATALEAGWAWRIPLSNRVGNGHVFASRYLDEERAREQLLAQLDGPALAEPRLLRFTTGHRQRCWVHNVVGLGLASGFLEPLESTSIFLIQSGLGHLIPLLERGGAPTAAEVGDYNTGMTRQFARIRDFIILHYCLTARRDSRLWRDMAGMALPETLEFKIHAWRQAGVLHQYQWEGFDANSWLAIHAGMGHWPERADPALAELPRDEALQALRQRREAIAAVVAAMPTHDAYLRRMVAR

SEQ ID NO: 83269 - protein, 496 aa, Thalassomonas sp.
  misc_feature (1)..(496): tr|A0A553F9X9|A0A553F9X9_9GAMM Tryptophan 7-halogenase OS=Thalassomonas sp. M1454 OX=2594477 GN=FNN08_12815 PE =4 SV=1
MNNKAIKNVVIAGGGTAGWMAAASLSKLLGKTINVTLVESDDIPTVGVGEATIPTLHIFHSLLGINEAEFMAATNATFKLGISFENWRDVNKDYIHSFGFLGQDCWACGFQHFWLKGLQKGMVSEIGDYCPEHLASREGRFAVLANQDLNHAYHLDAGLYAKFLQKIAFDHGCTRVEGKIDKVNLDEQTGYITSLNLGNGKVVEGDLFIDCTGFRGLLIEDALHTGYDDWSHYLPCDSAIAVQTETVGKPVPYTRSIARDAGWQWRIPLQNRTGNGFVFCSKYMSDEEAKQTLLENIEGKLLNEPRVIKYKTGARRKHWNKNCIAVGLASGFIEPLESTGIHLFQKAVVRLLQLFPSQGINQADVDEYNEQTKREADNIRDFIILHYHLTERRDSPFWRYCATMPIPESLAHRMKLFKESGRVFKKTDDLFGETSWVQVMMGQGLMPEQYHPIVDMMSDDELQGFLNKIKNGVQKRVANWPDHNDFIAHYCKAKTN

SEQ ID NO: 83270 - protein, 505 aa, Sphingomonas sp.
  misc_feature (1)..(505): tr|A0A0Q4KHL4|A0A0Q4KHL4_9SPHN Tryptophan halogenase OS =Sphingomonas sp. Leaf30 OX=1736213 GN=ASE89_04035 PE=4 SV=1
MTIGAPVRRIVIVGGGTAGWMAAAALARLIPTGASITLIESDAIGTVGVGEATIPPIRGFNAMLGIDEAEFLAATAGSFKLGIEFVDWGALGERYLHPFGGFGFDIEGVRFHQYWRRRRAAGIVEDIEAYSLCAVAARAGRFMPPSPDPASVLSQMAHAYHFDAGLYARFLRGRAERDGVVRVEGDVVDVALDGETGHVRHVTLAGDRVIEGDLFLDCSGFRGLLIEQTLGAGYEDWTHWLPCDRAVAMPTANAGAAITPYTRSTARAAGWQWRIPLQHRTGNGYVYSSAHCSDDEAAATLHAGVDGIPLAEPRLLRFTAGRRRKQWIGNVVALGLASGFTEPLESTSIHMVQTGISKLLALFPDQGFSPVEIDTYNRLAATQFDQVRDFLILHYHATRRDDSPFWRETRARAIPDSLSEKLALWRRRGRLFRWEDDLFAEASWVAVLLGQGIVPDGWDRLADAVDAREVDARFDRLRAMFADAASRMPRHEEYIARICPTRVRA

SEQ ID NO: 83271 - protein, 538 aa, Pseudomonas chlororaphis
  misc_feature (1)..(538): tr|A0A1H1Y1V3|A0A1H1Y1V3_9PSED Tryptophan halogenase OS =Pseudomonas chlororaphis OX=587753 GN=SAMN04489802_333 8 PE=4 SV=1
MNKPIKNIVIVGGGTAGWMAASYLVRALQQQANITLIESAAIPRIGVGEATIPSLQKVFFDFLGIPEREWMPQVNGAFKAAIKFVNWRKSPDHSRDDHFYHLFGNVPNCDGVPLTHYWLRKREQGFRQPMEYACYPQPGALDGKLAPCLADGTRQMSHAWHFDAHLVADFLKRWAVERGVNRVVDEVVEVRLNDRGYISTLFTKEGRTLEADLFIDCSGMRGLLINQALKEPFIDMSDYLLCDSAVASAVPNDDAREGVEPYTSAIAMNSGWTWKIPMLGRFGSGYVFSSKFTSRDQATTDFLNLWGLSDNQPLNQIKFRVGRNKRAWVNNCVSIGLSSCFLEPLESTGIYFIYAALYQLVKHFPDTSFDPRLSDAFNAEIVHMFDDCRDFVQAHYFTASREDTPFWLANRHELRLSDAIKEKVQRYKAGLPLTTTSFDDSTYYETFDYEFKNFWLNGNYYCIFAGLGMLPDRSLPLLQHRPESIEKAEAMFASIQREAERLRTSLPTNYDYLRSLRDGDAGLSRSQPGPTLAAREIL

SEQ ID NO: 83272 - protein, 504 aa, Caulobacter sp.
  misc_feature (1)..(504): tr|A0A2T9K3V9|A0A2T9K3V9_9CAUL Tryptophan halogenase OS =Caulobacter sp. 774 OX=2172652 GN=DDF67_09350 PE=4 SV= 1
MTNDRIRHVVIVGGGTAGWMTAAALGRFLKDGVTKVTVIESEAIGTVGVGESTIPQINMFNRMLGLDEDDFLRKTKATYKLAIEFRDWKEIGHTYHHPFGPYGVDMEGVSFHAYWLRYQAMGEAADLSEYSLQSLAAAHAKFQRPTGQKNSPLGDIAYAFHFDAGLYARFLRDYAEARSVRRIEGRIVDVALRGVDGFVESVTLENGAVVEGDLFIDCSGFRGLLIEGAMKSGFEDWSHWLLNDRAVAVPCASGGSTDPVTRATARPAGWQWRIPLQHRIGNGYAFSSQHISEDEATAYLLANLDGEALADPNLLRFKAGRRKKSWSRNVVAIGLSAGFMEPLESQSIHLIQVGISRLLAMFPDRRFQQPDIDRYNRVMAFEYEKIRDFLILHYKATERADTPYWDYLREMQIPDYLADKIAVFESHGRVFRENEELFNDTSWFAVMVGQGLRPRGWDPMADVMSEDLLRARMNEIRAVIARSAEAMPDHMTFVAERVAGARAA

SEQ ID NO: 83273 - protein, 494 aa, Acinetobacter venetianus
  misc_feature (1)..(494): tr|N8ZRD1|N8ZRD1_ACIVR Uncharacterized protein OS=Acine tobacter venetianus (strain ATCC 31012 / CIP 110063 / R AG-1) OX=1191460 GN=F959_02849 PE=4 SV=1
MLNLRGMNRVVVVGGGTAGWFAALQLRQLFSASVEIMVISAPQIPIVGVGEGGVLNLLTVLHDLNVDLKDFIAKTGSTLKLGFRYESWRTGQSDDYYYHLFPLATDDFVWNENGYNPFLSGLFNHGIDISKYMASYQFSEEKKPFEEVLKILLEGKNNFGASLHFDTFRVGQYLRDIAIARGILHVEEKVESFQIDTLTGHISSICLEKRNIDCDFLIDASGFARLLIGKQYQSEWCSFSDVLPLNRALPFHLQYGDEPKELVTRATAMSSGWMWQIPLQERIGAGYVFHDEFISDQQAQREVEAWLGCEIKPAKPISFEAGCYKEVWIKNVVAIGLASGFVEPLEATSIGQMLTQLQLLVSFIKENHGIISKQNIDCFNQQNTQFWFGIRDFIRMHYDTGRSDTDFWKFMLTVQQPETYQELKKCWVYRTPRDIDFVQHSMGGVSMFSVASWFAVGAGVGIIKPDATATELYALSPEKKARVAKFLHEFKRNS

SEQ ID NO: 83274 - protein, 485 aa, Alteromonas mediterranea
  misc_feature (1)..(485): tr|S5AE09|S5AE09_9ALTE Putative tryptophan halogenase O S=Alteromonas mediterranea 615 OX=1300253 GN=I633_10290 PE=4 SV=1
MASCIINEKGLGKAVDITLVESEAIGTVGVGEATIPPIRLVNQVLGIDEAQFLHDTKATIKLAIRFENWKTKGESYYHTFGAPGKSMAFCHFHHYWVKARQQGLKADLWDFDLNYHAAEAGRFAQINAKDPVVELPFAYHFDASLYAQYLRKLSENMGVVRKEGKISRVQRFTDSGFIQALHLESGDVVEGDLFVDCTGFKGLLIEEALGAGYDDWSHLLPCDSAIAVPSERHEKTAPYTRSIAHDAGWQWRIPLQHRNGNGHVYSSRYISDDQACDTLLSNLDTKPLGDPKLIKFTTGRRRKQWYKNVVAVGLSSGFLEPLESTSIHLIQSAIVRLIQLFPHNGFAPSLETEYNKQSELEFEQIRDFLILHYTVNERTDSAFFNDMRNITLPDSLAHKIALFKESGNLLREQNDLFLESSWLQVLYGQGVTPKDYHGLVNSVPEVQLNQMLTRLLEIKKEPIAKLPTHNEYINGMVAKYKRAMS

SEQ ID NO: 83275 - protein, 503 aa, Novosphingobium sp.
  misc_feature (1)..(503): tr|A0A2T6LQA7|A0A2T6LQA7_9SPHN Tryptophan halogenase OS =Novosphingobium sp. GV027 OX=2135689 GN=C8K10_12810 PE =4 SV=1
MDDRKIRKVLIVGGGSAGWMTAAMLSQALARDCAITLVESEEIGTIGVGEATIPPIRVFNQTLGIDEREFLARTKGSFKLGIEFVGWGAENSRYFHPFGPYGRNFDMVPMHQYWLQARRQGETAPLDEHAMAWHLARAGRFAHPSPDPRSVMSTFDYAYHFDAGLYARFLRTIAEQRGVTRVEGRIADVALHGETGFVEAVTMADGRRIEAELFIDCSGFRGLLIEGALKTGYEDWSHWLPCDRAVAMPCAHPAADPNPTPYTRSTARAAGWQWRIPLQHRIGNGYVFCSAFLDEDRAAEDLASSLDGTALGDPRAVRFQAGRRKLHWNRNVIAVGLSSGFLEPLESTSIHLIQANISKILALFPDRDFDPATRDEFNRIAHGEMERIRDFIILHYKLTQRQDAELWRHVAAMDIPDSLALKIAHFRRHGRLIARELDLFAPPSWLAVHIGQNNLPEGHDPLIDYRGVDGREWLGRLRGAMAAEAAQQPLHGAVLAGLAPQPA

SEQ ID NO: 83276 - protein, 501 aa, Marinimicrobium sp.
  misc_feature (1)..(501): tr|A0A2D8WKN4|A0A2D8WKN4_9GAMM Tryptophan halogenase OS =Marinimicrobium sp. OX=2024837 GN=CMG77_07580 PE=4 SV= 1
MNTDDRRLRRIVIVGGGSAGWMSAAALANATQGQCAITLVESDAIGTIGVGEATIPPIRLFNRVLGLDEREFLRRTKGTFKLGIQFVDWAHQGHSYFHPFGPHGRNFDTVSLHHHWLRARESGETSTPLHEHSMAWAAASRNRFAPPVQDPRNVLSTYDYAYHFDAGLYAAFLREYSEAKGVERREGTVTDVHLNSDSGFVESVQMASGERIEGDLFIDCSGFRALLIGEAMKVGYRDWSDWLPCDRAVTVASAPGELTPYTRSTAHAAGWQWRIPLQHRTGNGYVYCSRHISSDEAAATLLKHLDGERLGEPRELAFTTGRREKFWEKNVVAVGLSSGFMEPLESTSLHLVQAAISRLLGFFPDRDFDSAVIDEYNRITINEFERIRDFLILHYKLTERDDSPLWRECRDMPVPTPLENKLYHFGAYGRLIADGADLFGPDSWLAVHVGQNHRPKRVDPLLAFRTVDGGAWLEKLRAAVTAAADQLPEHQAFIHKYCSGG

SEQ ID NO: 83277 - protein, 517 aa, Pseudoalteromonas phenolica
  misc_feature (1)..(517): tr|A0A4Q7IKL2|A0A4Q7IKL2_9GAMM Tryptophan 7-halogenase OS=Pseudoalteromonas phenolica OX=161398 GN=C1E23_15600 PE=4 SV=1
MEISNTIDSVVIVGGGTAGWLTASKLAKKLNSNKEGAISVTLIESPDIPTVGVGEGTWPTMRKTLAEIGIDETEFIRFCNASFKQGSKFVNWKSAPASSDNHYYHLFSSILDPSEFNLSPYWNLGQAGEKTYAESVSTQGYLSDLFKAPKTISSKAYDGIQSYAYHLDAGKFSELLKRHATENLGVKFLSCNVTNVNSHNEEIISVNTDTYGEIKGDFFVDCTGFACLLLGKTLGIPFKPVSDILFTDHAVAIQVPHDDDNCDINSCTISTAQEAGWIWDIGLQNRRGVGHVYCSEFISHEEAEQTLRDYIGEKSKGLPAKLVPMNVGYREKFWHNNCVAVGLSAAFVEPLEASAIFLIEAASNMLSDQLPKDKSLLPLAAKKFNDSFQFRWNKTIDFIKLHYVLSKRDEPFWQKNKKPESIPQSLQDALLQWRSEPVSAYDFSHVYEPFPMESYQYVLNGMEFDQDLSLSAAKYDEIEHAKKAFAQIDKVKDILIKELPTNRELLNKLSSYSFTKV

SEQ ID NO: 83278 - protein, 538 aa, Pseudomonas chlororaphis
  misc_feature (1)..(538): tr|A0A3G7TQH7|A0A3G7TQH7_9PSED Thioredoxin reductase OS =Pseudomonas chlororaphis OX=587753 GN=C4K04_3703 PE=4 SV=1
MNKPIKNIVIVGGGTAGWMAASYLVRALQQQANITLIESAAIPRIGVGEATIPSLQKVFFDFLGIPEREWMPQVNGAFKAAIKFVNWRKSPDHSRDDHFYHLFGNVPNCDGVPLTHYWLRKREQGFRLPMEYACYPQPGALDGKLAPCLPDGTRQMSHAWHFDAHLVADFLKRWAVERGVNRVVDEVVEVRLNDRGYISNLLTKEGRTLEADLFIDCSGMRGLLINQALKEPFIDMSDYLLCDSAVASAVPNDDAREGVEPYTCAIAMSSGWTWKIPMLGRFGSGYVFSSKFTSRDQATADFLNLWGLSDNQPLNQIKFRVGRNKRAWVNNCVSIGLSSCFLEPLESTGIYFIYAALYQLVKHFPDTSFDPRLSDAFNAEIVHMFDDCRDFVQAHYFTTSRDDTPFWLANRHELRLSDAIQEKVQRYKAGLPLTTTSFDDSTYYETFDYEFKNFWLNGNYYCIFAGLGMLPDRSLPLLQHRPESIEKAEAMFASIQREAERLRTSLPTNYDYLRSLRDGDAGLSRSQPGPTLAAQETL

SEQ ID NO: 83279 - protein, 516 aa, Novosphingobium sp.
  misc_feature (1)..(516): tr|A0A2T6M704|A0A2T6M704_9SPHN Tryptophan halogenase OS =Novosphingobium sp. GV027 OX=2135689 GN=C8K10_104362 P E=4 SV=1
MTDMPATQHAKPIRQIVIAGGGTAGWMAACYFSGRLARQGVTITVVESSAIGTVGVGEATVPGIRDYFRAIGVEDIDVLRATGGTVKLGIEFRDWAQPGSRFFHPFGLYGVPSRGVPFHQYWLKLQHAGEPTDLAAYSLCSALAQRGAFMLPPDKPVNDLAVFDWAVHFDASRFAAMLRDRALAQGVHHIDDVINDVALDAQTGHIAHLVTKEHGSVAGDLFIDCTGFRSLLLGKALGVAWTDWTDLLPCDRAVAIPCAADATRDWPYTVSTAQEAGWQWRIPLQHRVGNGYVYSSAMLSDDEATAKLLSRLEGEALAEPNLIRFGAGHRQRFWAGNCVGMGLAAGFLEPLESTSITLIQTAIERLAEFFPDATFDPALADEFNRATTLEYARIRDFLILHYLGNRRVGEPFWDRLRDADVPEMLAHKLRLFRARGRLVRYEWESFLDPSWLSMYAGFDWLPRAHDPMADHFTDAEISEALRRMRETVAGAVAEARPHRDFIAHIAGSPPAGPLAA

SEQ ID NO: 83280 - protein, 507 aa, Shewanella frigidimarina
  misc_feature (1)..(507): tr|A0A125BE65|A0A125BE65_SHEFR Tryptophan halogenase OS =Shewanella frigidimarina OX=56812 GN=AWJ07_19590 PE=4 SV=1
MDQTIIKNIVIVGGGTSGWMTAAMLAKLFKTQLNITLIESDTIGIIGVGEATIPPLQIFNSVLGISEKDFIKATQATYKLGIEFENWHQQGDAYMHAFGNIGRDLGFTSFHHYWLSAQAHCGQQNQSTFSVKDFWQYSLNYQAAKHNKFQPIQSIAQAQMSGITHAYHFDASLYANLLRQYSIQRGVVRVEGTITSTQLTNDGAIDSVTLQNGDCINGDLFIDCSGFSALLIEKVLGIEYENWQHWLPCDCAYAVPCERISPLAPYTKATAHDAGWQWRIPLQHRTGNGIVYSSQHMSDEQAKQHLLANLDGKPLAEPRKINFTTGRRVKQWHKNCVAIGLSSGFLEPLESTSLHLVQSAIIRLTKLFPRNGIQSQHIDEFNRQSQTEFEQIRDFIILHYHLNAKQSADGEHGLWQQCRDMDIPESLQRRIDLFKSTATVFRHQDELFTEAAWIQVMLGQGITPTDFHPLTQAVSQVDLNNYLANIRKVIATTVNQMPTHEAYIKKC

SEQ ID NO: 83281 - protein, 507 aa, Novosphingobium nitrogenifigens
  misc_feature (1)..(507): tr|F1ZAZ4|F1ZAZ4_9SPHN Tryptophan halogenase OS=Novosph ingobium nitrogenifigens DSM 19370 OX=983920 GN=Y88_028 0 PE=4 SV=1
MTDAPPTRIAIVGGGTAGWIAASALTRFLPKGRFSIALVESEEIGIVGVGEATIPQIRLLNAALGIDEYAFMRASQATYKLGIEFVGWGTAASRYIHAFGSVGRPTGTVPFHHYWLRGRQLGQRQPLDAYSLNAQAAWSNRFAKTDGIDLPYAFHFDAALYARFLRGWAEARGVTRHEGRIVEVRRDGESGEVRDVVLSDGRAIAADLFLDCSGFRGILIEQALETGYEDWTHWLPCDRAIAIPCAPAPSLAPYTRSTAHRAGWQWRIPLQHRIGNGHVYCSAHTSDEEALAVLLANLDGEPLGEPRTLRFSTGRRKAFWNRNVVALGLAAGFMEPLESTSIHLVQSAIERVIRYLPNGPIRAADVAAYNAETVFEWERVRDFIILHYHANSRPEPFWRTCATMAVPETLAAKLALFRANGRITRQNEELFAEVGWLQVLIGQGIMPEGWHPLADGHSPAEVVELLTLLRQVTAKQASTLSDHAQFLARHCPAPSPTRQAAPSVMPS

SEQ ID NO: 83282 - protein, 503 aa, Sphingomonas sp.
  misc_feature (1)..(503): tr|A0A0Q4KB38|A0A0Q4KB38_9SPHN Tryptophan halogenase OS =Sphingomonas sp. Leaf30 OX=1736213 GN=ASE89_18315 PE=4 SV=1
MTQARLGSIVIVGGGSAGWMTAAALSSLVQTKDVSITVIESDAIGTVGVGEATIPDMLVFNQMLGISEAEFMRATDATFKLGIEFVDWGHKGDRYIHPFGQHGVDMEGIDFHQYWLRLRRDGGTAPIEDYSLSAVAAGAGRFALPDPNPRSVFSHLRYAYHFDATLYARYLRRYAEKRGVKRVEGVVNAVQRTAQGDGIAAVTMDSGAQVKGDFFFDCTGFRALLTGQTLDIDFVDWSAWLPCDSALAVPSAHVGPPPPYTRSTARPAGWQWRIPTQRRVGNGHIYSRSFMDDDEAERVLRKGVEGALLAEPRAIRFKAGHRRQFWRGNCIAIGLAAGFLEPLESTSLYLIQEGISRFISLFPNGDIPDILRVEYNRYMQKKFEQVRDFIVLHYVATNRDDTPFWRYCRRMSVPDSLQHKMELFRETGRIFRYDDELFARPSWVAVMLGQGIMPKRCDPIVEALPARDVANSLQSMASAMKDAASRMPTHASFIASYCAATEG

SEQ ID NO: 83283 - protein, 39 aa, Alteromonas mediterranea
  misc_feature (1)..(39): tr|S5AIC9|S5AIC9_9ALTE Tryptophan halogenase OS=Alterom onas mediterranea 615 OX=1300253 GN=I633_20155 PE=4 SV= 1
MTTATPITHIVVVGGGSAGWLTAGVLQRSISALPAKTLK

SEQ ID NO: 83284 - protein, 533 aa, Streptomyces sp.
  misc_feature (1)..(533): tr|A0A0M9ZFC8|A0A0M9ZFC8_9ACTN Tryptophan halogenase OS =Streptomyces sp. H036 OX=1519487 GN=ADK98_05425 PE=4 S V=1
MTSTDTRLQKVVILGGGTAGWMTAAYLGKALQGTVDITVLEAPTIPRIGVGEATVPNLQRSFFDYLGIAEDEWMRECNASFKMAVRFVNWRTDGQGESTARELPGGGPDHFYHPFGLLPDYDQTPLSHYWFKRKYEGRTTEPFDYACFREPPVMDAMKAPRWLDGRPATRYAWHFDAQLVADFLRRFATEKQGVNHVQDEMVRVEQDSRGYVTTLHTKGGLALDADLFVDCSGFRGLLINQALQEPFIDMSDHLLCDSAVATAVPHDDEANGVEPYTSAIAMSSGWAWKIPMLGRFGTGYVYSSKFADQDTATREFADMWGLDVEETKFNHIRFRVGRNRRAWVKNVVSIGLSSCFLEPLESTGIYFITAAIYQLAKHFPDKTFNEGLVNSFNHEIEVMFDDTRDFIQAHFFYAPRNDTPFWQANKKLVLPDNIKQKISAYKAGLPINSPITDESTYYGNFEAEFRNFWTNGSYYCIFAGLGLEPDAPLPTLAHRPESVAGAEPLFDTVKRQQQNLLETLPSAYDYLRQLHGA

SEQ ID NO: 83285 - protein, 506 aa, Marinimicrobium sp.
  misc_feature (1)..(506): tr|A0A2D8WN48|A0A2D8WN48_9GAMM Tryptophan halogenase OS =Marinimicrobium sp. OX=2024837 GN=CMG77_12150 PE=4 SV= 1
  misc_feature (5)..(5): Xaa can be any naturally occurring amino acid
  misc_feature (10)..(10): Xaa can be any naturally occurring amino acid
  misc_feature (20)..(20): Xaa can be any naturally occurring amino acid
  misc_feature (45)..(45): Xaa can be any naturally occurring amino acid
  misc_feature (66)..(66): Xaa can be any naturally occurring amino acid
  misc_feature (74)..(74): Xaa can be any naturally occurring amino acid
  misc_feature (76)..(76): Xaa can be any naturally occurring amino acid
  misc_feature (89)..(89): Xaa can be any naturally occurring amino acid
  misc_feature (116)..(116): Xaa can be any naturally occurring amino acid
  misc_feature (142)..(142): Xaa can be any naturally occurring amino acid
  misc_feature (145)..(145): Xaa can be any naturally occurring amino acid
  misc_feature (147)..(148): Xaa can be any naturally occurring amino acid
  misc_feature (173)..(174): Xaa can be any naturally occurring amino acid
  misc_feature (191)..(192): Xaa can be any naturally occurring amino acid
  misc_feature (213)..(213): Xaa can be any naturally occurring amino acid
  misc_feature (220)..(221): Xaa can be any naturally occurring amino acid
  misc_feature (270)..(270): Xaa can be any naturally occurring amino acid
  misc_feature (288)..(288): Xaa can be any naturally occurring amino acid
  misc_feature (302)..(302): Xaa can be any naturally occurring amino acid
  misc_feature (309)..(309): Xaa can be any naturally occurring amino acid
  misc_feature (327)..(327): Xaa can be any naturally occurring amino acid
  misc_feature (352)..(352): Xaa can be any naturally occurring amino acid
  misc_feature (361)..(361): Xaa can be any naturally occurring amino acid
  misc_feature (374)..(374): Xaa can be any naturally occurring amino acid
  misc_feature (377)..(377): Xaa can be any naturally occurring amino acid
  misc_feature (381)..(381): Xaa can be any naturally occurring amino acid
MTESXGHVVXVGGGTAGWLXAAMIAAHHNGHRPDGLKVTLVESSXIPTVGVGEGTWPTMKNTLQKXGIDEKTFXAXCHSTFKQGGKFIXWHTGNGDAYYHPFTVPIAYERLDLAPXINDLTHFAPETNFQHHICEAGLGPRXLTXPXXQGPCNYAYHLDAGEFAELLKQHATXXLGVHHLVDTVSNVSLSXXGFIDAITLEQTGKLEGDFFVXCTGFASXXLGQALGVPFKPMDSILFNDRAIAVQAPYPDERSPIPCHTLATAKAAGWXWDIGLTHRRGTGHVFSSXFISEDEAEFTLRQXLDLSESXADSRVIKFSSGHRACWWXKNCVAVGMSAGFVEPLEATAIMLVXLSARFISEXLPADRHTMAIMEXRFXQAMXYRWQRIIDFLKLHYMLNDRPESYWKAHRDPASIPDSLKEDLAVWATRGPQTADFDSALELFPAASYQYVLYGMGFRPDFSSQAWLYDQQRLAQQVFTRNQQLTRQLLDSLPSHRDLIDRWLGQAA

SEQ ID NO: 83286 - protein, 441 aa, Pseudomonas sp.
  misc_feature (1)..(441): tr|W6VA77|W6VA77_PSESZ Tryptophan halogenase OS=Pseudom onas sp. (strain GM41(2012)) OX=1144708 GN=PMI27_002189 PE=4 SV=1
MILILGAGPAGAAVALGLRRLGYPVTLVSEWRRFAALEGVSIRVLEALRGAGLHQALADAALPSQRQVSWNGQQHAQNIEFLLDRPSFDRGLREDLRLAGVELIEGRVLTVQSSASGHRIEIEGREALLADFLVEARGRQAPALGKGLRGPETVSLLNRWQGTPGSTASAVESLEDGWAWMARRADGQCYWQWTVDVASAELPGKAQLLDYCRQRRQGSALARAFFGAETEIDLQLHARSSTAILCPQVCGDHWIRVGDAAMAVDPLSGNGIFQSLSSALQAPTVINTLLRKPERAALAQRFHQQRVEQLFLRFARIGRDFYADEQRWVDQLFWQARRKWPDAEVAHAEADFSSLRIERAPVLRDGFVDEAEVVITADQPLGIWHVQGVELAPLVRRLRTEPAEQALAGLTVEQGRVVRSWLLSQGYRPLTLTLSPEGRGD

SEQ ID NO: 83287 - protein, 504 aa, Novosphingobium nitrogenifigens
  misc_feature (1)..(504): tr|F1ZAZ5|F1ZAZ5_9SPHN Tryptophan halogenase OS=Novosph ingobium nitrogenifigens DSM 19370 OX=983920 GN=Y88_027 9 PE=4 SV=1
MERHPHMLRAIAVIGGGSAGSMTAAALAEAVGRTIPITVVESDAIGTVGVGEATIPPIRSFNARLGIAEADFLRATRGSFKLGIEFVGWGTPESRYFHPFGTHGADFDRVPLHHWWLRERLAGDMRPFDDYAMCWALARENRFGPPVPDPRMVHSTHDYAYHFDAGLYARFLRDYAQARGVTRIEGKIVSAGRDGESGLLTHVDLSDGRRVEADFFVDCSGFRGILIEEVLGAGYEDWTHWLSCDRAVAMPSANAGPITPYTRSTAHRAGWQWRIPLQHRQGNGHVYCSAHLDDDEAVAVLRDNLESEPLGDPRFLRFTTGRRRRAWVGNCVSIGLSSGFLEPLESTSLHLIQMGIERLLRILPDRRHDPLGPEEFNRATAAEFERIRDFIILHYHANSRPEPFWRACAAMAIPDELAYKIRHFMGAARLVSPHDELFRNASWLAVYFGQGMIPDVYDHLADARSHVDGAGHLRNLRDMMRRAAATFPSHDSVLARFAPDVTMA

SEQ ID NO: 83288 - protein, 528 aa, Thalassomonas sp.
  misc_feature (1)..(528): tr|A0A553FEJ4|A0A553FEJ4_9GAMM Tryptophan 7-halogenase OS=Thalassomonas sp. M1454 OX=2594477 GN=FNN08_08540 PE =4 SV=1
MQASEQLNNSTQLIRNIVIVGGGTAGWLTANHLAKQLNAKHCDEISITLIESPNIPTIGVGEGTVPLIRKSLAELGISESEFIKECDVTFKQGIKFVDWLNNPIAGKPHHYHHIFDYPLINEFDHLTAYWLKGLAGENTSFVDATAFQGKICDFGLAPKDITQAEYQGHNSYAYHLDAAKFAKLLTKHACNNLGVKHILAQVDDVELHLNGDIKALHTDVAGIISADLFVDCSGFDSILLGKALNVKFIDKSDVLFADHAMAMQVPYEDPEQDIPSFTISTAKQAGWIWDIGLTKRRGTGYVYSSAHTTHDEAEQTIRDYIGPAADSLEARKIAMNIGYREKFWHKNCVAIGLSQGFVEPLEATGLLVFDVTAKMLAQQFPSNRGHMDILAKKFNERVSSSWEKVIDFIKLHYVLSKRDDSDFWLENRDITKCSQTLQERLQLWQHQVPSAYDFASGFEIFNLENYLYVLYGMDFNTNIESMDFRFQNTKQATEFFNKIKQHADMLTTKLPKHRELINKIHRFGLQKR

SEQ ID NO: 83289 - protein, 516 aa, Duganella sp.
  misc_feature (1)..(516): tr|A0A3E1SDC8|A0A3E1SDC8_9BURK Tryptophan 7-halogenase OS=Duganella sp. BJB480 OX=1871181 GN=D0T24_09935 PE=4 SV=1
MQHNQADRRIKQILIVGGGTAGWMTAAAMSKLLGGHYQVRLVESDEISTVGVGEATIPQIKLFNQALGIDEDDFLRETQGTFKLGIQFVNWGRLGENYIHTFGSIGQDMGLVEFHHYWLKLHQAGLAPDFGAYSLAAVAAPQNKFMRAVDAGNSPVSHIAHAFQFDAGLYARYLRKFAEARGVVRTEGKIADVIVREGDGHVAAVMMESGERIEADLFIDCSGFRGLLIEGALKTGYEDWTHWLPCDRALAVPCESHGPITPYTRATARTAGWQWRIPLQHRIGNGHVYSSKYISDDEATAQLLANLDGAPLAEPKPLRFTTGKRKKFWNKNVVAIGLSSGFMEPLESTSIHLIQSSIARLMSLFPDRDFEQHNIDEFNRQAHFEVDKIRDFLVLHYHATERDDTPFWNYCRTMEVPESLKQKMDLFKQHGRFYREKDEMFASVSWLQVMLGQGMRPQSYHPLVDLYPQEQIEAHLSTIKTVVENCAAKMPGHEDFINAHCASAAMRMKRPNYGMR

SEQ ID NO: 83290 - protein, 501 aa, Pseudoxanthomonas sp.
  misc_feature (1)..(501): tr|A0A543E6N5|A0A543E6N5_9GAMM Tryptophan halogenase OS =Pseudoxanthomonas sp. 3HH-4 OX=1690214 GN=FB548_0549 P E=4 SV=1
MQTSQPMAHPRTVKRVVIAGGGTAGWMAAAALSKTLGKTLDITLVESEEIGTVGVGEATIPTLVVFHRLLDIKEQDFMAAVQGTVKLGISFENWKDVGHRYIHSFGTSGKDHWSAGFQHFWLRGRAEGLASEYSDYCIELQAALQDRFSHLPRYHVNYAYHMDAALYARFLRGFSERHGCKRVEGKIVDVATDADGGISSIKLERGEVIEGDLFIDCTGFRALLIGKTLGVGYTDWSRWLFNDSALATQTTAVRDAVPYTRAIAGTAGWQWRIPLQHRVGNGIVYSSRHISDDEAREHFLSSVEGEVIKQPWPIRFKPGQRQQCWAKNCVALGLAGSFIEPLESTTIHLIQRGIVRLLQTFPHTITQPAIDEYNARLDEELQHVRDFVVMHYAISDRRDTPYWRDIAEMEIPATLRHRIELFRETGTVFHVPGELFGENSWIQVMLGQGVVPKGYHPTADVMSKEDLQRFLDDIRSNVLGTARQMPAHMDYLRSYCPAPKP

SEQ ID NO: 83291 - protein, 518 aa, Unknown
  misc_feature (1)..(518): tr|A0A0N1B1R9|A0A0N1B1R9_9PROT Tryptophan halogenase OS =beta proteobacterium AAP99 OX=1523428 GN=IP84_15910 PE =4 SV=1
MNSETSQHIKNIVIVGGGTAGWMAAAAFAKLLRGGFNITLVESDEISTVGVGEATIPPIQNYNKVLEIDEDEFVRETQGSFKLGIEFVNWGRIGERYTHGFGRFGQDLYTVPFEQYWHKLFAAGKAADIAEYSITRMAAAAGKFSRPQLELRNSPLSEIAYAFHFDAGLYARFLRRYAEARGVRRIEGKILEVQRSAATGHVSGVRLESGSVVAGEFFIDCSGFRGLLIEQTLQSGYEDWTHYLPCDRAIAVPTASVEPPIPYTRATAHAAGWQWRIPLQHRVGNGHVFCSQHMSEDEATAVLLANVQGEVLASPRTLKFVTGMRKTPWKHNVVAVGLSSGFMEPLESTSIHLIQTAIARIINFFPDREFSAADIDEYNRITRLEFESIRDFLILHYHANQRDDSAFWRACRAMDVPASLKMRMALYESRGRIFREGAELFSEVAWLQVMHGQGLRPASHHPLADLVPTEDAERYLASVRQVIANCVAGMPTHAQYIAAHCAARRAADPLHGMAQSAA

SEQ ID NO: 83292 - protein, 519 aa, Unknown
  misc_feature (1)..(519): tr|A0A0N0JVW2|A0A0N0JVW2_9PROT Tryptophan halogenase OS =beta proteobacterium AAP99 OX=1523428 GN=IP84_02970 PE =4 SV=1
MQHTQNHAGAQVAVKKVVIVGGGTAGWMCAAALARLAPPGTQVQLVESDEIGTVGVGEATIPMIRLFNETLGIDENEFVRATQGSFKLGIEFVNWRRLNHRYIHAFGVMGRGLGLIGFHQYWLKHALKHGFSDTAAFFPSGAAAYANKFVRGGPAESPLSGLNYAFHFDAGLYARFLRGFAEPRGVKRHEGKIARVEQSASGDIAAVHLENGTRIEGELFIDCSGFRGLLIEQTLKTGYEDWTHWLPCDRAVAVPCASADPLTPYTRSSAHTAGWQWRIPLQHRTGNGHVYCSQFMSEDEATAILLKNLDGEQLAEPRPLKFVTGRRNKFWNRNVVALGLASGFMEPLESTSIHLIQSGISRLLAFWPAAGLNEHEVDEFNRQSAWEFERIRDFLILHYHAVERTDSPFWQRCRSMEIPPGLRSRMALFRQHGRFFREGDELFTEAGWVQVMLGQGIEPAGYHPLADQLTDAQLEEFISSTRNDIARAVAPLPRHEDFLARFCPAPKVELKAMMPSVAA

SEQ ID NO: 83293 - protein, 491 aa, Altererythrobacter namhicola
  misc_feature (1)..(491): tr|A0A1C7D754|A0A1C7D754_9SPHN Flavin-dependent tryptop han halogenase RebH OS=Altererythrobacter namhicola OX= 645517 GN=rebH_1 PE=4 SV=1
MVVLGGGSAGWITAALLHKEWGPLGASVTVVESPEIGIIGVGEGSTPQLKALFDHLGIAEADWMAACDATYKLGIRFSGWSERDGHESYFHPFSGPVDLHTQPGFFHNCALARRGTDVPAHPDDWYLARLLADEGRGPQAADSFPFPPSYGYHFDAYKLGAFLRDWSVERGLVHREAKVASVERAEHGDIAALLTEDGDRIAGDIFVDCSGFRALLCQQELGVAFRDFGENLFNDRAVVMPTQHGGVFKPQTEAVAMRAGWRWSIPLTSRTGNGYVYSSRYLSDEEAEAELREAIGMTGDPQEARFLKMKVGRVEQTWHRNCLAAGLAQGFIEPLEATALHIVISTAMEFAQAYRQGGFTAQHRDIFNTRTAERYEGIRDYIVAHYRLNRRTDTQYWRENAGHDRLSDSLKAMMTAWFTHKDMSEALAGAYRDAPYPVMSWHALLAGYGTFPPADRMKAPEQGLPVADVKETRAMLQACAANFSPYPAISP

SEQ ID NO: 83294 - protein, 499 aa, Paraglaciecola agarilytica
  misc_feature (1)..(499): tr|K6X3Y3|K6X3Y3_9ALTE Tryptophan halogenase OS=Paragla ciecola agarilytica NO2 OX=1125747 GN=GAGA_3588 PE=4 SV =1
MKKTAITILGGGTAGWMTAAILAKGLPKDKFHICLVESPDISSVGVGEATIPPMTSLLAYLELDESSFLKRLNGTFKYGIQFENWSELGNQYMHAFGDIGTPLGTLSFTQAWLKCAAALNFTELGSYIPSAVAAKTGKFHPPVDIPQGANPTHFYPLSLLFYAYQFDATELASLLKEYAIDHSVEHIEGMVNRVNNKRNGDISSLSLRDGRNIAGDYFVDCSGMRGRLNKSHFGCEFDDWSNELPCNSAIAVQTKRDTPAAPHTKSIAMSAGWRWEIPLRDRTGNGYVFSSRFLTDEQALQELNEALAGEQFITEPKIIHFKTGCLTTPWHRNSIAIGLASGFTEPLESTSIHLIHKYALELKDALLCGQDLAHEAKRFNHMFYQEALSIKDFLLAHYHVSKRTDSPFWQHCKNMPITQTLQNYLAEFARNGYINLPESSLFPFQSWFQVLVGQGYLADYCAFSDKQFDAQQAKPFFNNVKLAIQSEVARLAPHQSYLQ

SEQ ID NO: 83295 - protein, 505 aa, Xanthomonas translucens
  misc_feature (1)..(505): tr|A0A0K3A240|A0A0K3A240_XANCT Tryptophan halogenase OS =Xanthomonas translucens pv. arrhenatheri LMG 727 OX=11 95923 GN=XTALMG727_2771 PE=4 SV=1
MAQIRKVVIAGGGTAGWIAACALAHQFRDLLDITLIESEQIGTVGVGESTVPPIRSFHRFLQIDEQEFLRAVAGTFKLSISFENWRRPGERYLHPFGLTGQSTLACAFHHFWLEAQRRGMLSELGDYCLETVASRMDRFALQQSPPVNYAYHLDAGLYARLLRRHAERYGLKRVEGRIQQVRQHAESGGVEALLLEDGTLIEGDLFIDCTGFRGLLIEQTLHTGYEDWQQWLPCDRAVAVQTEAVAAPVPYTRAIAHASGWRWHIPLQHRVGCGLVFSSAHLSDDEARAKLLHDAAAPPIKEPWLVPFCTGRRRKAWNKNVVALGLASGFIEPLESTSIHLTIAAVMRLITLFPSEGIAPSMVDLYNAVSRAEMEHVRDFIILHYHANQRDEPMWQACREMALPDSLQQRLRAWRERAHAWQGADELFRVDSWIHVLLGQGIVPAQHHPLARALPDQPLQQFLDAIRQPIDRAVAQMPSQQDFIARYCKAGPEVWAGRAPVAAPA

SEQ ID NO: 83296 - protein, 501 aa, Sphingorhabdus sp.
  misc_feature (1)..(501): tr|A0A371B1R9|A0A371B1R9_9SPHN Tryptophan 7-halogenase OS=Sphingorhabdus sp. GY_G OX=2292257 GN=DXH95_14250 PE =4 SV=1
MAIDKIVIVGGGTAGWMAAAALSRLRAGRDVAITLVESEMIGTVGVGEATIPPFLDFNKLLEVDEREMLSAVQGSFKLGIQFVNWGKIGDSYIHPFGNYGYQMGGMSFHHTWHKFKATGDKRPIQVFNLETMAAYFGRFARTEDYAREDLPPVNYAYHLDAGRYARFLRGYAEKRGVVRLEGKVNDVAIDGESGFVTSITLEDGTQIAGDLFIDCSGFRGLLIEQALKTGYEDWTNYLPCDRAVALPCEREDGSGPLPYTRATAHKAGWQWQVPLQHRNGNGHVYCSQFMSDDEALDILVNNIAGKPGADPNFLRFTTGRRKKFWNKNVVALGLSAGFMEPLESTSIHLINTGINKLIALLSLDGITQTQEDAFNRLTGKEYARIRDFLILHYNTTARNDSAFWNYCRTMAVPESLTEKTDLFRLNGQIFREDDELFTETSWAAVMMGQGIMMNGHNPMADCLNQPSTRQELDAIEQSIRYVVQHMPSHGDYLKKYCPAPA

SEQ ID NO: 83297 - protein, 501 aa, Alteromonas sp.
  misc_feature (1)..(501): tr|A0A2S9VGD0|A0A2S9VGD0_9ALTE Tryptophan halogenase OS =Alteromonas sp. 190 OX=2079529 GN=C6Y40_00825 PE=4 SV= 1
MQTQLKKIIILGGGSAGWMTAAALGKILSKHPCDIQVIESEEIGTVGVGEATIPQIQLFNDLIGLDEDTFLKRTQGTFKLGIQFQNWRKPGHSYYHAFGEVGKNMEGVHFYQYWLKMRQQGKAAPLDEYTLSSLACNEKRYMRPFEAGNSPLSNIAYAFHFDAGLYAKFLREVAESHGVQRTEGKVTEVRQHPDGSIQSLILENGNEHDADFFIDCSGFRALLIEQTLKTGYEDWRHWLPCDRAVTAPSSLTETPWPFTRAAAQQAGWQWRIPLQHRVGNGHVYCSEFMTDEEAENTLRLNIEGDLLADPRQIRFVTGKRNKFWHKNCLAVGLSGGFMEPLESTSLHLVQVAISKFFSYFPFQQPCQSDIDQYNAEMDFEFTRIRDFLILHYHVTEREDTEFWRYCKHMPIPDTLQEKIDHFKANGRISRFNNELFNDLSWFEVMYGQGLRPEGYHALADIFPEEELARRLEGIQRVVRKSVDYMPGHAEFIAKTCAANRD

SEQ ID NO: 83298 - protein, 499 aa, Sphingorhabdus contaminans
  misc_feature (1)..(499): tr|A0A553WK55|A0A553WK55_9SPHN Tryptophan 7-halogenase OS=Sphingorhabdus contaminans OX=1343899 GN=FOM92_06515 PE=4 SV=1
MSDHDIQKIVIVGGGTAGWMAAAALASLLKAGINICLIESDDIGTVGVGEATIPPLIAFNTMLGINEDMFLKATMGTFKLGIEFVNWGACGERYFHPFGPHGQDFQGINFHQLYLREAQSRNMPPIQNWSMSASAAALGKFARPGPDARLPLSQLAYAFHFDAGLYAAFLRQLAEGRGVSRIEGKIVDAGLADNGDIANVRLDDGRIVEGELFIDCSGFRGLLIEDKLGTGYDDWSQWLPCDRAVAVPSKLLGPADPFTRSTAHHAGWQWRIPLQHRMGNGLVYSSSFLDSKDAISLLLSAIEGDALATPRQLSFTAGRRRRAWNRNVVSLGLSSGFVEPLESTSIHLIQSGIAKLLALFPDRRFDPLERDEYNRQMQAVFEDVRDFVILHYKATRRDDSEFWNYCRTMDVPDSLSTKLDLWKSKGRLFREGFELFGTASWVAVLLGQGIVPAETEPAAFAIDPAMTSDALEKMRTSYTRMAEHLPRHEDFIAQVCAAG

SEQ ID NO: 83299 - protein, 496 aa, Sphingomonas gei
  misc_feature (1)..(496): tr|A0A4S1XGE9|A0A4S1XGE9_9SPHN Tryptophan 7-halogenase OS=Sphingomonas gei OX=1395960 GN=E5A73_00610 PE=4 SV=1
MSEQIVKRVVIAGGGTAGWVAAAALVKQLGPMLDITLVESDEIGTVGVGESTIPTSRRFHQLLTIDEAIFMRETQASFKLGISFENWSGEGSHYFHSFGQIGRPSTWMADFHHFWLEARDKGFGGELGDYCLELKAAAAGRFATGPDATVQHAYHLDATLYARFLRRLSEAAGVRRVEGKIAQVEQDPESGFLTALVLESGTRIEGDLFLDCTGFRALLIEQALGAGFDDWTHWISTDSAFAVQTRATEPAVPYTRAIAHQAGWRWKIPLQHRVGNGIVFCSDFLSPDEARQQLLDAVEGEVLTEPRLIRYKTGQRRKVWDKNCIALGLSSGFIEPLESTSIHLIQVAVAKLIQSFPFSGVGAAQAERFNAQARHEMERIRDFIILHYHLNSRDEPFWQRCRDMTIPDTLAERLALFGEAAHAYQAADDLFRVDSWVQVLLGQGLTPRGYHQLARMMPQDELRQALAGVRDNVAAAVQTMPRHADFLQSYCPAGEA

SEQ ID NO: 83300 - protein, 502 aa, Sphingorhabdus contaminans
  misc_feature (1)..(502): tr|A0A553WHT5|A0A553WHT5_9SPHN Tryptophan 7-halogenase OS=Sphingorhabdus contaminans OX=1343899 GN=FOM92_02195 PE=4 SV=1
MTSDRKHFVVLGGGTAGWMAACLLAHHWPHHRISVVESPDIGIIGVGEGSTPQLKAFFDTLGIAEAEWMPKCNATYKAGIRFFGWSERPGFESYFHPFHTQIDLFTEPQFAFHTRARRTGRNVWAHPDRFFLPASIAANGRAPLAPPNFPFAIGYGYHFDAVLVGKMLREHATSRLNVQHLEYTVTHVQLDNAGNVESLQTKDGAVISGDFFVDCSGFRGTIIQETFGEPFLPFAENLFNNAAVAMPSPNEEGDILSETRATALSTGWAWRIPLTNRVGNGYVYSSRYIDKDDAETELRAHLGMLDSEVEARHLKMNVGRVQRSWVRNCLAVGLSQGFIEPLEATALHIVQATVEGFIRAYENGGETESGATQFNRSLNERYDGIRDYIVAHYRMNQRSDTEYWRDNALNGNLSDNLKTIMTAWYSGGDLNEVIQNLNIAQFYTSLSWHCLLAGYGTFPLDEKLVASTDGLPLADMDDIDRYISGCLQNFPSHRAALKNLSS

SEQ ID NO: 83301 - protein, 515 aa, Sphingomonadaceae bacterium
  misc_feature (1)..(515): tr|A0A520X2D4|A0A520X2D4_9SPHN Tryptophan 7-halogenase OS=Sphingomonadaceae bacterium OX=1930536 GN=EX262_0247 0 PE=4 SV=1
MTRTEISPIIIAGGGTAGWMAAAALGRFAGRKVVLVESEAIGTVGVGEATIPQIRLFNAALGIDEAEFLRETRATFKLAIEFGGWSGDGTSYLHAFGHVGQGAGLLAFQHYWLRARAAGKAGPLADYCLNDRAAQAGKMQMWRPQSGQAAPDMPWAYHFDASLYAAYLRRYAEAHGVERIEGTIAAVEHDGESGDIGALLLDGDRRVEGEVFIDCTGFRSLLLGDALGVEFDDWSRWLPCDRAVAVPCEARGEFTPYTRATAHAAGWQWRIPLQHRIGNGHVFSSEFMDEDEASKILLDNLDGKPTSDPRVLRFTTGMRREPWHRNCLALGLSAGFMEPLESTSIHLIQASIARFLQMLPGAEVAPAMRDEFNRQATFEWSRIRDFLILHYWANGRHGEPFWDRCREMDVPDTLRSKVEAFRAEAYLHREHEELFTEPGWLQVLVGQGIIPESYNSIADAMSEAELESLLAGLVEGQRKIVDSMPDHAPFLRAYIDPRAANAQGGGGSTSQRMPA

SEQ ID NO: 83302 - protein, 232 aa, Asticcacaulis sp.
  misc_feature (1)..(232): tr|A0A258BHR7|A0A258BHR7_9CAUL Tryptophan halogenase (F ragment) OS=Asticcacaulis sp. 32-58-5 OX=1970317 GN=B7Z 26_02230 PE=4 SV=1
MPRPPVKKVVIAGGGTAGWCAAAALSKMIGPLIEVTLIESDEIGIIGVGEATVPTIRTFHHLLGIDERQFMRETNATIKLGISFDNWARKGDHYFHSFGVLGKSSWMAPFHHIWLEARANGVAGPLSDYCFELQAAENGKFETSPTSRINYAYHFDTGLYGPFLRRLSEAAGVTRIEGKIARIDQNPDTGDITALKLESGQTIAGDLFIDCTGLRGLLIEGALKSGYEDWNH

SEQ ID NO: 83303 - protein, 508 aa, Pseudoalteromonas sp.
  misc_feature (1)..(508): tr|G7EYT2|G7EYT2_9GAMM Uncharacterized protein OS=Pseud oalteromonas sp. BSi20429 OX=1097676 GN=P20429_0152 PE= 4 SV=1
MNKAIKTVAVVGGGTAGWLSAAIIASYHQGQNGDGLKVMLVESSDIPTIGVGEGTWPTMKNTLQQIGLREVDVFKACNATFKQGGKFVNWTHGNNDFYYHPFTVPLGYGRIDLAPYLDNVEDFAQQTNFQHDICEASLAPRGIAQGEYQGNCNYAYHLDAGAFAEMLKQHCKSKLGVEHIIGTVDQVKLDDGGAINELTLKDQTRTINADLFIDCTGFSSLLLGQALNVPFKKMDHVLFNDSALAMQVPYDENDNSLASHTIATAHNAGWIWDIGLTHRRGVGHVYSSKFLSDDEAEQNLRDYLGDAANGLTARKISFESGYREKFWHKNCVAIGMSAGFVEPLEATAIMLVEISARFVAEHMPADTRVMPIVAKRFNEQMDYRWQRIIDFLKLHYMLTKRSEPYWQAHVQPNTIPQTLQEDLLLWGSRGPLIQDFHGALELFPAASYQYVLYGMGFKPDFTKQAYLYSQHVQAKQIIERNSQLTQQMLQTLPPHRAFIEQWLAANPV

SEQ ID NO: 83304 - protein, 515 aa, Sphingomonadaceae bacterium
  misc_feature (1)..(515): tr|A0A431JUB9|A0A431JUB9_9SPHN Tryptophan 7-halogenase OS=Sphingomonadaceae bacterium OX=1930536 GN=EKK50_0088 5 PE=4 SV=1
MTLPVPDHAIRNIVIVGGGTAGWMAAAAFSRLLNTGYTRVTLIESEEIGTVGVGEATIPPLLNFNRMLGIDENEFLAATAGTFKLGIEFRDWGAIGDRYIHPFGTFGQDLQGISFHQLWLRERSRRAIPDITAWSMSAQAAARGRFGRAREDARSPVRELFYAYHFDASLYARYLRGYAERGGVTRIEGRIADVRLRGEDGYVEALTLADGRQVAGDLFIDCSGYRGLLIEEALHTGYESYAQWLPCDRAVAVPCALPNAREPDPYTRATARAAGWQWRIPLQHRMGNGYVYCSDDLSDEAAEFDLLASLEGEPLGDPRRLRFTAGRRRQSWNRNVIALGLSSGFIEPLESTSIHLVQAGIQRIVAMFPDTRFDPAERDEFNRQLHGLYEDIRDFIILHYAQTRRTDTPFWDRVRTMPLPDSLTRKLDLWRGKGRLFREGYDLFSVPSWVAVCLGQGLVPSTWEPAADALDETLVAEAMETMRRGYADTAERLPSHGDFLRMVAPSPLANWGQAR

SEQ ID NO: 83305 - protein, 494 aa, Sphingomonadaceae bacterium
  misc_feature (1)..(494): tr|A0A431JUP6|A0A431JUP6_9SPHN Tryptophan 7-halogenase OS=Sphingomonadaceae bacterium OX=1930536 GN=EKK50_0089 0 PE=4 SV=1
MPDGGGGVTQDRAIRSILVAGGGIVGWLAAAALKRRAPFLTVTLLDGARSPNALADRIACTLPSLAGFHADLGIGDEDAVVRTGAGYRLGTRFVRWGRDDADYVHAYDHYGQAFGATAFHLHWLRAAQEGAVPRFDAFAPAAALGRSGRYAPPTPGTIFARHQPALTLDLPRYMRMIRAFAAHVGIDVVAGEIADIERDERGGIAAVALAGGGRLAADLYVDATGPEARLRDTIDSARDDWSAWLPCDRVMLADGTTAEPPLLTPVTAHAAGWSWDGGTQRGVVYAADRLADDDAAALLGTANATPITIQPGTRREPWRANCVAIGDAATAIDPLEWCNLHLALSAIDRLIAMLPDRDMAPVEAADFNRQTLAEAERVRDMMALHYRATARPEPMWRAVAAVPPPDSLAHTMRQFEERGRLPFYEEETFTRDGWAAVLIGQGIRPRRIDPLADAIPLSDAHAAMHGVTDAIAAALPHAPTHAAWLAAQARRLAR

SEQ ID NO: 83306 - protein, 509 aa, Sphingomonadaceae bacterium
  misc_feature (1)..(509): tr|A0A431JCH4|A0A431JCH4_9SPHN Tryptophan 7-halogenase OS=Sphingomonadaceae bacterium OX=1930536 GN=EKK50_0968 5 PE=4 SV=1
MTDAHPNPPLKTITIVGGGTAGWMTAALLSRLLLGAYTIRLIESEEIGTIGVGEATIPAIRTFNGLAGIDEFEMVRATQATFKLGIEFRNWGAPGDSYIHGFGKIGQDLYWLHCHQFWLKERAGGRAKHLDHYALNTLAARMNRFAMPDPSNPQSPIADIDYAYHFDASLFARFLRTRAEGAGVERIEGRIVAANRRGSDGFLDHVVLADGRTVDGDLFIDCSGMRGLLIGDAMGVGYEDWSEWLLCDRALAVPSARGAGPLTPYTRATAHGAGWQWRIPLQHRTGNGHVYASRFVSDEAAAATLLEHLDTPALGDPRPVRFRPGKRHRAWEKNVVALGLAGGFLEPLESTSIHLIQTGILRLIALFPGRGFNAADTEEYNRQTDFEYRDVRDFIIAHYKVTAREDTEFWRYLKHMAVPDSLTERLELFRSSGRFFMHAKAELFREESWVQVLLGQGLQAHHDPMVDMIPAEQTTAFLKDVEEVVADVAAGLPTHEAFITRHCQAPKLS

SEQ ID NO: 83307 - protein, 507 aa, Arsukibacterium ikkense
  misc_feature (1)..(507): tr|A0A0M2V8M0|A0A0M2V8M0_9GAMM Tryptophan halogenase OS =Arsukibacterium ikkense OX=336831 GN=WG68_07815 PE=4 S V=1
MVVVGGGSAGWLTAALLAADHQANPLVKITLIESASVPTIGVGEGTWPSMRATLARIGISETEFLLSCDASFKQGSVFRQWRSAAPQDCYYHPFTAPVAADELDIADYWFSYQQQVEFAAAVSSQPAVIAAGLAPKRISTPEYAFLQNYGYHLDAGKFVALLSQHAKRLGVTHIMDDVVAVHSKVDGCIAALQTAQHGALTGDLFVDCSGLQSLLLGQHYQTPLVSVQHCLLNDSALAVQVAYDDERSPIASATLATAQTQGWVWDIGLPTRRGVGFVHHSGHTNEEQARATLAQYLQLSEQQFTERYQSRLIRFTPGYREQFWRHNCVAVGMAAGFVEPLEASALVMVELSAKFISEQLPRSMAQLVIVAERFNQTFSYRWQQIVEFLKLHYVLSTRDDSDYWLAQRADSSMPAALQQKLMMWQHFVPSRYDLPMAEELFPAASYQYILYGMQHLPGSARPLKASSEVRANHAFAEVQQKTQQLRAGLSSNRELLNQIRVHGLQKI

SEQ ID NO: 83308 - protein, 503 aa, Dyella thiooxydans
  misc_feature (1)..(503): tr|A0A160MX38|A0A160MX38_9GAMM Uncharacterized protein OS=Dyella thiooxydans OX=445710 GN=ATSB10_00600 PE=4 SV =1
MQANPIQRVVIVGGGTAGWMTAALLSRAIGPRLAITLVESDEIGTVGVGEATIPQIRHVNAFLGIDEDELMRAVKGTFKLAIQFNDWRRIGDSYLHAFGDIGLPLGLVPFQHYWLRDRQERGEAAPDLWSYSINAQACAQHRFGRLDRIGSSPMTGTRYAYHLDAGLYGQYLRQRCDPRQVRRVEGKVVDVKLREDNGFIESLQLQGGERVEGDLFIDCSGFRGLLIEGALKAGYDDWTHWLPCDRAVAVPSERVAPMRPYTQASARAAGWQWRIPLQHRNGNGHVFCSRFISDDEATATLLAHLDGEALAEPRVLRFTTGARRRFWIRNCVALGLASGFMEPLESTSIHMIQSGISRLISLFPDRHCDPALSDEYNRQTRFEYERIRDFLVLHYRATERDDTAFWRHCRSIALPEGLAERIELFRRSGQVFRHGEELFTEVGWLQVMLGQGIVPQAWHPAADGLPAAELEGFLGNMRTLIQRAVATFPEHGQFVATHCRAMG

SEQ ID NO: 83309 - protein, 516 aa, Pseudoalteromonas sp.
  misc_feature (1)..(516): tr|G7F3X6|G7F3X6_9GAMM Tryptophan halogenase OS=Pseudoa lteromonas sp. BSi20429 OX=1097676 GN=P20429_1968 PE=4 SV=1
MTKPITKIVVLGGGTAGWLSAGLLAAEHPHLNVTLVESANVPILGVGEGTWPSMRNTLQRIGIKESDFITQCDASFKQGSKFINWRNLSEGENYYHPFMNPQGYEHTNLHASWQRIAPNQKFADVVNMQSFVCQAALAPKQLQTPEYAAVTNYGYHLDAGKFAEFLKNHCVKNLNVTHITDDVTEVINDEHGYIASLKTNNNGDITGDFFIDCSGSRARLIGEHFNSEFIAQDHILFNNSAVAAQIPNAHTDQPIASATLSTAQSNGWIWDIALPTRRGTGYVFSSKYQSDESATNTLKSYIAKSTSEQQAEQLNYRVLKFSPGYRQKFWIKNCVAVGMSAGFLEPLEASALAMVELSISMISEQLPQNRTHMSQLETRFNERFSTRWQRVIEFLKLHYVLSERDDTPYWQDISNLNTAPERLQNLLKLWQFQPPSRFDFIENEEVFSSSSYQYVLYGMGFNTQTVSAQNTFNDPRAGDYYYQQNREKIAQCLNGLPSNRALLNHLLSNNGQPHND

SEQ ID NO: 83310 - protein, 518 aa, Pseudoalteromonas sp.
  misc_feature (1)..(518): tr|A0A2N1BBG2|A0A2N1BBG2_9GAMM Tryptophan 7-halogenase OS=Pseudoalteromonas sp. GutCa3 OX=888433 GN=CXF64_1282 5 PE=4 SV=1
MNQKNKKIKTVVVIGGGIAGWLTAGRLAAHHKSNTPDGLNVVLVESPNIPIIGVGEGTWPTMRSTLIALGISETDFIRECEASFKQGAKFAKWVDGSDDDFYYHPLVLPQGFSKTDMAGHWLNNTAESTSFSNAVCYQEAICEQGLAPKTICTPEYAAIANYAYHLDSVKFAVFLQKHCTQQLGVKHILADVTQVNSAKNGDIASVTTKQQGEISGDLFVDCTGFSSLLLGEHYKVPFKPCDDVLFIDTALAVQVPYEDEDESIASHTISTAQEAGWIWDIGLQHRRGVGYVYSSKYSTEAQAREKLKEYVGDKIDSLTIRKIPIKSGHRSHFWQNNCVAVGLSAGFLEPLEASALVLVEMSAQMISEQLPHTRDIMDITAKRFNETFSYRWEKIIDFLKLHYILSTRDDNAFWSDNRDPKTIPQSLQDLMKLWQYRAPADHDFTSNNEVFPAASYQYVLYGMGFKSDYSTTAYMLKDTVFAKSQFDKNKSMINQAVTNLPSNRELLNKIKNHGFSTI

SEQ ID NO: 83311 - protein, 491 aa, Sphingomonadaceae bacterium
  misc_feature (1)..(491): tr|A0A431JQY2|A0A431JQY2_9SPHN Tryptophan 7-halogenase OS=Sphingomonadaceae bacterium OX=1930536 GN=EKK50_0243 5 PE=4 SV=1
MTPPPPSIAILGGGTAGWMAACLMAKAWPQAPITVIESPDIGIVGVGEGSTPQLKSLFDTLGIAESDWMPAADATYKAGIAFHGWADDTPAYFHPFAGQIDLHTQGAFFASTRARRHGADVPAHPDHFFLNARLAAAGRAPIAPANFPFRIGYGYHFDAHKVGHVLRAAALARGVVHLPRRVRDVVVDATGRVATLTLDEGDAIHADLFVDASGFASVIAQQALGVPFRSFADTLFADRAVVMPTPRKDALPVQTKATALSAGWAWDIPLTSRTGNGYVYASRYLSPDAAETELRRHLGLLDTDVAARHLSMKVGRVETSWTANCLAIGLAQGFIEPLEATALHIVQATIEGFIGAYQAGSRDAFNASIARRYDGIRDYIVAHYRLNRRSGPFWRDVATNDALSDDLKAIMTAWFTGGDVAAVVEGRGLTGYYAPMSWEVLLAGYGTFPDATRLRTAAPVADLAAIDSLLSGCLLNFPDHQAALDGHRRMP

SEQ ID NO: 83312 - protein, 508 aa, Pseudoalteromonas sp.
  misc_feature (1)..(508): tr|A0A2N1BDM4|A0A2N1BDM4_9GAMM Tryptophan halogenase OS =Pseudoalteromonas sp. GutCa3 OX=888433 GN=CXF64_08870 PE=4 SV=1
MNKAIKTVAVVGGGTAGWLSAAIIASYHQGQNGDGLKVMLVESSDIPTIGVGEGTWPTMKNTLQQIGLREVDVFKACNATFKQGGKFVNWTHGNNDFYYHPFTVPLGYGRIDLAPYLDNVEDFAQQTNFQHDICEASLAPRGIAQGEYQGNCNYAYHLDAGAFAEMLKQHCKSKLGVEHIIGTVDQVKLDGGGAINTLTLKDQTRTINADLYIDCTGFSSLLLGQALNVPFKKMDHVLFNDSALAMQVPYDENEQLLASHTIATAQNAGWIWDIGLTHRRGVGHVYSSKFLSDDEAEQNLRDYLGDAANGLTARKISFESGYREKFWHKNCVAIGMSAGFVEPLEATAIMLVEISARFVAEHMPADTQVMSIVAKRFNEQMDYRWQRIIDFLKLHYMLTKRSEPYWQAHVQPNTIPQTLQEDLLLWGSRGPLIQDFHGALELFPAASYQYVLYGMGFKPDFTKQAYLYSQHVQAKQIIERNSQLTQQMLQTLPPHRAFIEQWLAANPV

SEQ ID NO: 83313 - protein, 521 aa, Sphingomonadaceae bacterium
  misc_feature (1)..(521): tr|A0A2D6KNL0|A0A2D6KNL0_9SPHN Tryptophan halogenase OS =Sphingomonadaceae bacterium OX=1930536 GN=CMN66_03915 PE=4 SV=1
  misc_feature (74)..(74): Xaa can be any naturally occurring amino acid
  misc_feature (174)..(174): Xaa can be any naturally occurring amino acid
  misc_feature (312)..(312): Xaa can be any naturally occurring amino acid
  misc_feature (343)..(343): Xaa can be any naturally occurring amino acid
  misc_feature (351)..(351): Xaa can be any naturally occurring amino acid
  misc_feature (362)..(362): Xaa can be any naturally occurring amino acid
  misc_feature (366)..(366): Xaa can be any naturally occurring amino acid
  misc_feature (370)..(370): Xaa can be any naturally occurring amino acid
  misc_feature (372)..(372): Xaa can be any naturally occurring amino acid
  misc_feature (376)..(377): Xaa can be any naturally occurring amino acid
  misc_feature (384)..(384): Xaa can be any naturally occurring amino acid
  misc_feature (387)..(387): Xaa can be any naturally occurring amino acid
  misc_feature (392)..(392): Xaa can be any naturally occurring amino acid
  misc_feature (397)..(399): Xaa can be any naturally occurring amino acid
  misc_feature (423)..(423): Xaa can be any naturally occurring amino acid
  misc_feature (437)..(438): Xaa can be any naturally occurring amino acid
  misc_feature (440)..(440): Xaa can be any naturally occurring amino acid
  misc_feature (442)..(442): Xaa can be any naturally occurring amino acid
MRPDDGQAQAIGSICIVGGGTAGWSAAALLSQVLRGSGCRITLVESSAIPTVGVGEATIPPIFDFLRNIGADEXEFIRRCQATFKLGIQFRDWLHHGHAYWHPFGNLGVTINQRPFHHYYCMNRAAGHGETLADLCPSVALAEDGKFAFPSPDGQWPGGAVAYALHFDAGLVAXFLRDHAVAAGVERLDRRIVGATRGEGERIAAVQFDDGESLEADFYIDCSGFRGLLIEETLGAGFEDWKHWLPCDSAVAAPTAAQEQRAPYTVATARSAGWQWRIPLQHRTGNGLVYASDFISDADAQAQLLAGLDGEXQADPRVLRFTAGLRKRAWVGNCLAIGLSAGXLEPLESTXIHLIHTGLNRXLDLXPDRXFXPALXXAYNRDVXREXAHIRXFLLLXXXPNRREGEPFWDHMRGLDLPDTLAXKIELFTRTGRIMSXXRXLXSDISWFYVMHGMGLTPAALDPLAEAAPFGEVRKVIDQLRGAMQAFRSAAPTHDAILDRLLDPAETRRPQFGTGGGWTTR

SEQ ID NO: 83314 - protein, 506 aa, Sphingomonadaceae bacterium
  misc_feature (1)..(506): tr|A0A2D6UKZ2|A0A2D6UKZ2_9SPHN Tryptophan halogenase OS =Sphingomonadaceae bacterium OX=1930536 GN=CMN65_03790 PE=4 SV=1
  misc_feature (274)..(274): Xaa can be any naturally occurring amino acid
  misc_feature (284)..(284): Xaa can be any naturally occurring amino acid
  misc_feature (312)..(312): Xaa can be any naturally occurring amino acid
  misc_feature (314)..(314): Xaa can be any naturally occurring amino acid
  misc_feature (325)..(325): Xaa can be any naturally occurring amino acid
  misc_feature (328)..(328): Xaa can be any naturally occurring amino acid
  misc_feature (368)..(368): Xaa can be any naturally occurring amino acid
  misc_feature (370)..(370): Xaa can be any naturally occurring amino acid
  misc_feature (382)..(382): Xaa can be any naturally occurring amino acid
  misc_feature (384)..(384): Xaa can be any naturally occurring amino acid
  misc_feature (393)..(393): Xaa can be any naturally occurring amino acid
  misc_feature (402)..(402): Xaa can be any naturally occurring amino acid
  misc_feature (405)..(405): Xaa can be any naturally occurring amino acid
  misc_feature (464)..(464): Xaa can be any naturally occurring amino acid
  misc_feature (469)..(469): Xaa can be any naturally occurring amino acid
  misc_feature (473)..(473): Xaa can be any naturally occurring amino acid
  misc_feature (475)..(475): Xaa can be any naturally occurring amino acid
  misc_feature (477)..(478): Xaa can be any naturally occurring amino acid
  misc_feature (482)..(482): Xaa can be any naturally occurring amino acid
  misc_feature (490)..(490): Xaa can be any naturally occurring amino acid
  misc_feature (500)..(500): Xaa can be any naturally occurring amino acid
  misc_feature (506)..(506): Xaa can be any naturally occurring amino acid
MTERAQAIRNVVIVGGGTAGWMTAAALARLLGGTGLAITLVESAAIGTVGVGEATLPQIRRFNSLLGIDEREMMARTAATIKLGIEFRDWGRVGDSYIHPFGRFGQEIGPASFVDYWARAHARGMVAPIGQYCLPIMAAMQGRFEPPHGNGTRQPYDYAFQFDAGLYAAWLSELAQSAGVVRREGRIVDVARNSESGAISAVRLEDGAAIRGDLFIDCSGFRALLIGETLETSFEDWSNWLPCNRAFAVPCANGGDYGPYTRATARAAGWQWRXPLQHRVGNGXVYCDAFWDDADAAEALMANLEGEPGAEXRXLRFTTGRRSAXWRXNCVAIGLAGGFLEPLESTSIDLIQSGILNLVELFPHTAIXEXDRREYNRLMDLXFXRIRDFLVLXYVANQREEXFWXAMRAMPMPDSLADRIEDFRERAILPDYADGLFQPVSWISVFLGQNVVPRRWDPRANAMXADELXKRLXAXHXXIADXAAAMPLHXDFLERSGARXIDEAGX

SEQ ID NO: 83315 - protein, 495 aa, Pseudoalteromonas sp.
  misc_feature (1)..(495): tr|G7F3X5|G7F3X5_9GAMM FADH2 O2-dependent halogenase I OS=Pseudoalteromonas sp. BSi20429 OX=1097676 GN=prnA PE =4 SV=1
MTKTNAVKNVVIAGGGTAGWMAAAALAKLVGNNINITLVESDDIGTVGVGEATIPPIRTFHKLLGINEQAFMKATQASFKLGISFENWGDENTHYIHSFGATGKECWAGEFHHFWLQGKTLGINNPFGDYCYELQAAKSGKFAFNQQNPINYAYHMDATRYAQFLREFSEPLGVKRIEGKIQKVVKNTKTGHIESLTLNNGEHINGDFFIDCTGFRGLLIEQALHTGYEDWSHLLPCNSAIAVQTKSTSDTVLPLTRSIAHKSGWQWRIPLQNRVGNGLVYCSQYMDDAQAKALLLNNIEGEALTEPRIIKFKTGRRLKGWNKNCLALGLASGFVEPLESTSIHLIMSGIIRFMRLFPFNGITNHAIDEYNKQLKSEIENIRDFIVLHYKVTNRDDSEFWQHCSAMEVPKTLQHKIDLFKQTGRVFLDDGDIFRVDSWVQVMLGQGIEPNQHHLIASMMSDEELTRFLHGIKQQIEQRVSQLPPHHEFLKQYCPA

SEQ ID NO: 83316 - protein, 505 aa, Dyella thiooxydans
  misc_feature (1)..(505): tr|A0A160N5N1|A0A160N5N1_9GAMM Uncharacterized protein OS=Dyella thiooxydans OX=445710 GN=ATSB10_36600 PE=4 SV =1
MNDHRIRNIVVVGGGSAGWMAAATLATYVGEGARIRLVESEEIGIVGVGEASVPHMQTFNRSVLGIDEREFVVRTQATFKLGIQFNDWGRVGESYIHGFGKIGRGLGPLPFHQFWLKLFLGGRAEPIGAYSLQTVAAPMGRFMASAPDAPPGSPLGDIAYAYHFDAAAYAGYLRGLAEARGVQRVEGKIVSVSRRADDGFVDAVVMEGGERIEGELFIDCSGFRGLLIEQALQAGYEDWTHWLPCDRAMAVACEITGPPLPYTRATARPAGWQWRIPLQHRVGNGYVYASNRISDDEAAATLLANLDGPALGDPRPLRFTTGRRKRFWDRNVVALGLAAGFMEPLESTSIYLIQSGLQRLLGLFPDRDFDPVLVERYNRETIFEYEKTRDFLILHYKATERDDTPFWDTCRTMEVPASLQENIDLFRASGRFFRDAEEFFALPSWIQVMLGQGIVPRSYHPVVDRMPEAELVQFVERVRLSMAEAAAAMPMHQAFIDRYCKAPAP

SEQ ID NO: 83317 - protein, 517 aa, Pseudoalteromonas sp.
  misc_feature (1)..(517): tr|G7F815|G7F815_9GAMM Tryptophan halogenase OS=Pseudoa lteromonas sp. BSi20429 OX=1097676 GN=P20429_3421 PE=4 SV=1
MNDDIKSIVIVGGGTAGWLSAGIIAAYLQKHHSKKINITLLESSDIPTVGVGEGTWPTMRRTLKDMGIRETEFIKKCNVSFKQGAKFAKWVTGENDDYYYHPLELPTGMFENNLATSWLNINNAQPPFAQYVSAQQLICESGLAPKQITTPEFSAIANYAYHLDAGLFATFLKNHCIDNLNVKHIVGTVVGVNNCTNGDIKSVSLNNKIEIAGDLFIDCSGFKSLLLGENLGVGFKSCKDVLFADSALAIHMPYKDDEPICSHTLSTAQTSGWIWDIGLQTRRGIGHVYSSKHISDEDAKQQLFDYLNINKDQQSEYKVKKLSFEPGHREKFWHKNCVAVGLSAGFLEPLEASALLLVEISANFVAQQFPANRHVMNITAQRFNRIFSYRWERIIDFLKLHYMLSKRTDSPFWQAHCHQNTIPQSLKDNLSLWEYHTPSDNHFDHSQEVFPAASYQYVMYGMGFTGSSELYDNSESYFKKAIALVNNNQQYTQKLLNKLPTNKALLAQINQFGMQQI

SEQ ID NO: 83318 - protein, 533 aa, Streptomyces sp.
  misc_feature (1)..(533): tr|A0A0F4ICY4|A0A0F4ICY4_9ACTN Tryptophan halogenase OS =Streptomyces sp. NRRL S-104 OX=1609135 GN=VR43_20970 P E=4 SV=1
MTSTDTRLQKVVILGGGTAGWMTAAYLGKALQGTVDITVLEAPTIPRIGVGEATVPNLQRSFFDYLGIAEDEWMRECNASFKMAVRFVNWRTDGQGESTARELPGGGPDHFYHPFGLLPDYDQTPLSHYWFKRKYEGRTTEPFDYACFREPPVMDAMKAPRWLDGRPATRYAWHFDAQLVADFLRRFATEKQGVNHVQDEMVRVEQDSRGHVTTLHTKGGLALDADLFVDCSGFRGLLINQALQEPFIDMSDHLLCDSAVATAVPHDDEANGVEPYTSAIAMSSGWAWKIPMLGRFGTGYVYSSKFTDQDTATREFADMWGLDVEETKFNHIRFRVGRNRRAWVKNVVSIGLSSCFLEPLESTGIYFITAAIYQLAKHFPDKTFNEGLIDSFNHEIEVMFDDTRDFIQAHFFYAPRNDTPFWQANKKLVLPDNIKQKISAYKAGLPINSPITDESTYYGNFEAEFRNFWTNGSYYCIFAGLGLEPDAPLPTLAHRPESVAGAEPLFDTVKRQQQNLLETLPSAYDYLRQLHGA

SEQ ID NO: 83319 - protein, 520 aa, Duganella sp.
  misc_feature (1)..(520): tr|A0A0Q8RTD7|A0A0Q8RTD7_9BURK Tryptophan halogenase OS =Duganella sp. Root198D2 OX=1736489 GN=ASE26_20360 PE=4 SV=1
MVPIPTRRILIVGGGSAGWLCAAYLAKMFGDSKEITLVEAPEIGAIGVGEGSFPSLRATLAALGIPEAEFVRESSATFKQGITFQNWLYGADHYFHPFSMPSQRPGAPELLPYWLQGLAGDTPFAEAVTMQKRVVDAQRAPKRPGDSDYNGPLNYAYHFDAARFAALLSKHARKSGVRHIQDHVEGVQLDLEGAIASIQTREHGALTADLYIDCSGFRALLIGGALGSRFHSVSDVLFCDTALAVQVPHPAPDTPIASATISTAHEAGWTWDIGLQERRGIGYVYSSRHTSDQRAEQVLRAYAGPASNGLNVRKIPMQVGYREQHWIKNCVAIGLAGGFLEPLEASGIGLVETAVQMLGALFPHNGEMAPLARHFNQFMSERYARIVDFIKLHFCLSQRREQFWIDNCDPATWTDSLRDKLAMWRCRPPQRMDFLTDFEMYPPSSWQYILYGMDFPKAMPPIPGLELMADAARQEFANIAEVSARAVADLPDHRAFVSQLCRHENAFRNDFHAIRATVNR

SEQ ID NO: 83320 - protein, 482 aa, Sphingomonadaceae bacterium
  misc_feature (1)..(482): tr|A0A2D4XZP8|A0A2D4XZP8_9SPHN Tryptophan halogenase OS =Sphingomonadaceae bacterium OX=1930536 GN=CMN67_00340 PE=4 SV=1
MAAALLARFLPPDYRVELVESEAIGKVGVGEATIPQIRHFNQALGIDEAEFLRETKGSFKLGIAFDGWRGEGHSYMHAFGPVGQSSGLIAFRHYWLRAKALGHAKDLAHYSPNEMAARNLRMPGPGSADLPYAYHFDASLYAAFLRHYAETRGVVRAEGIIERVERDSETGDIAALVLDGDRRLEADFFIDCTGFRALLIEGAMEAGFDDWSNLLPCDHALAVPCASGGDFTPYTRAMARKAGWQWRIPLQHRIGNGYVFSSQFCSEDEAADTLLANLDGSPDGTPRLLSFTTGKRRRQWIGNCLALGLAAGFMEPLESTSIHLVQSALARFLQLLPAGRSTPSTIDHFNTQADFEWSRVRDFLVLHYWANGREGEPFWEAMRALDLPATLQARIDQWRDTGHIHREHEELFTEVAWFQVFAGQGVSANHYNPLADAMAEQDLRDFLASQERALEQAAAAMPHHADTLGRLMARPAKRNTAA

SEQ ID NO: 83321 - protein, 516 aa, Pseudoalteromonas sp.
  misc_feature (1)..(516): tr|A0A2N1BF72|A0A2N1BF72_9GAMM Tryptophan halogenase OS =Pseudoalteromonas sp. GutCa3 OX=888433 GN=CXF64_06110 PE=4 SV=1
MTKPITKIVVLGGGTAGWLSAGLLAAEHPHLNVTLVESANVPILGVGEGTWPSMRNTLQRIGTKESDFITQCDASFKQGSKFINWRNLSEGENYYHPFMNPQGYEHTNLHASWQRIAPDQKFADVVNMQSFVCQAALAPKQLQTPEYAAVTNYGYHLDAGKFAEFLKNHCVKNLNVTHIIDDVTEVINDEHGYITSLKTNNNGDITGDLFIDCSGSRARLIGEHFNSEFIAQDHILFNNSAVAAQIPNAHINQPIASATLSTAQSNGWIWDIALPTRRGTGYVFSSKYQSDESATNTLKSYIAKSTSEQQAEQLTYRVLKFSPGYRQKFWIKNCVAVGMSAGFLEPLEASALAMVELSISMISEQLPQNRPHMSQLGTRFNDRFSTRWQRVIEFLKLHYVLSERDDTPYWQDISNLNTAPERLQNLLKLWQFQPPSRFDFIENEEVFSSSSYQYVLYGMGFNTQTVSAQNTFNDPRAGDYYYQQNREKIAQCLNGLPSNRALLNHLLLNNGQPHND

SEQ ID NO: 83322 - protein, 497 aa, Duganella sp.
  misc_feature (1)..(497): tr|A0A0Q8RH14|A0A0Q8RH14_9BURK Tryptophan halogenase OS =Duganella sp. Root198D2 OX=1736489 GN=ASE26_21970 PE=4 SV=1
MRRVVIAGGGTAGWMVAAAISRSLGKVLDIKLVESDEIGTVGVGEATIPSLLNFHRLLEIDEQEFMAATKATFKLGISFENWRNVNEDYIHSFGMTGTDHWTAGFNHFWHKGRERKLAGDYGDYCLELKAAQMNRFGHLPCEGINYAYHLDASAYARYLRRYSEGYGARRIEGRIAKVHTDAASGCITALQLDSGAMLEGDLFIDCTGFRALLAGETLGAEFEDWSQWLHNDSAIAVQTSSSGPAVPYTRAIAHEWGWQWRIPLQHRVGNGIVFSSKFVDDETARARLMSNITGEQLVQPRVIRFKPGQRRKVWNKNCIAIGLASGFLEPIESTSIHLIQRGIIRLLQMFPSNGIFQSEIDEYNTQAWSEIEHIRDFIILHYKVTNRRDAAFWRHCAAMEVPASLRHRIDMFRETGRVFRLSNELFAENSWVQVMLGQGITPMQHHPSADLMGDAELSCFLDSIRSNVARTVVQLPPHQQYLENYCAAYMEEYLAPK

SEQ ID NO: 83323 - protein, 508 aa, Dyella thiooxydans
  misc_feature (1)..(508): tr|A0A160MZV5|A0A160MZV5_9GAMM Uncharacterized protein OS=Dyella thiooxydans OX=445710 GN=ATSB10_14160 PE=4 SV =1
MRHIAIVGGGTAGWMTALLLANSSYGERIKVTVLESPQVGAIGVGEGSTPWMRGFFEEIGIEESEWMPACDATYKAGITFDGWSTRPGFERYFHAFASMLDNLTMTQFVDNVHRRLNREDVHAHPDHYFIAARLARECKAPRPRHEFPFDVWYGYHFDSVKLGQFLHRKALERGIRHLPRHVNAVQCDEHGDIAALQLEGDERFEADFFIDCTGFSGLLIEKTLKTPYTSYADALFNDAAVAMPTPLDGPIMSQTISTALRHGWAWKIPLTARYGNGYVYSTAHCTPEQAETELRRHLGLLDADVPARHLRMRTGRVDRHWHRNCLAVGLAQGFIEPLEATALMLVQRTASLFVKALEKGDLGEAAQAGFNAAMNTQFDGTRDYIVAHYKTNTRSDTDYWRANAANTHLSEPLVRLLRTWLASRPIADGIRRGTFGQGYPVMSWYSLLAGMGLFPDDVGSHVSGDAPHSLAAIDNLIERSARNFPDHRELLGAIPPRPREETLQVYFW

SEQ ID NO: 83324 - protein, 509 aa, Stenotrophomonas sp.
  misc_feature (1)..(509): tr|A0A1W1GVP6|A0A1W1GVP6_9GAMM Tryptophan halogenase OS =Stenotrophomonas sp. 92mfcol6.1 OX=1761901 GN=SAMN0448 8690_1020 PE=4 SV=1
MNAADTTQGPIRRVVIAGGGTAGWLAGCALAHQFRQQLNITLVESEQIGTVGVGESTVPPIRTFHRFLQIDEQEFLRAVAGTFKLSISFENWRRPGERFIHPFGTIGQGTWATPFHHFWLDSLRRGMPSELGDFCLESAASLADRFSLQTQPQVNYAYHFDAGLYARFLRGKAEANGLRRVEGKIREVRQHPHDGSVASLVLDDGQVIEGDLFIDCTGFRGLLTEQTLHTGYEDWNEWLPSDRAVAVQTDSPAPPVPYTRAIAHEAGWRWHIALQHRVGCGLVFSSRHMSDDEAQAKLLRDVDGQPLRDPWLVPFRSGRRLQAWNRNVVALGLASGFIEPLESTSIHLTISAVVRLIQLFPSDGITPSLVALYNDVSRQEMEHVRDFIILHYHANQRDEPMWKACREMALPESLQVRLRAWRERAHAWQDPGELFRVDSWTSVLMGQGIQPGPPHPLARAIGDADLRTLLHRIRQPVQHTVAKMPTQAEFIERYCKAAPDAWQRGRAVA

SEQ ID NO: 83325 - protein, 256 aa, Sphingomonadaceae bacterium
  misc_feature (1)..(256): tr|A0A431JUJ1|A0A431JUJ1_9SPHN Tryptophan halogenase (F ragment) OS=Sphingomonadaceae bacterium OX=1930536 GN=E KK50_00895 PE=4 SV=1
MPCRTETAVTPYTSAIAMPAGWRWRIPLQHRTGNGYVYASAFLSDDAAAAALRSVVEGEALADPRPLRFKAGRRRHSWSHNCIGIGLASGFLEPLESTSIYLVQQAITLLVELFPDGRTSAADRDEFNRVIDLEYDRIRDFLILHYHATTRSDSPFWDYVRTMPIPDSLAEKLELWRRRGRVVKYREGVFLDASWIAVYMGQGIVPAGWDPRADVPPEGDLRRGIGSLAEQIAADVARRPGHRAFIDGYCPMAEAA

SEQ ID NO: 83326 - protein, 501 aa, Sphingorhabdus contaminans
  misc_feature (1)..(501): tr|A0A553WB75|A0A553WB75_9SPHN Tryptophan 7-halogenase OS=Sphingorhabdus contaminans OX=1343899 GN=FOM92_12305 PE=4 SV=1
MMTDKRIESIVIVGGGSAGWMTAAALSNSLRQGCRITLIESDDIGTVGVGEATIPPIRTFNEMLGIDEREFVKATQGSFKLGIEFVDWGHLGNRYFHPFGPHGRAFDIVSLHHYWLKAREAGETAAFDEHSMAWALARAGRFTRPGQDPRNVLSTFDYAYHFDAGLYARYLRRYSEERGVKRVEGKIASVAQHGENGFVSSVQLEDGQVFGADLFIDCSGFRGLLIEGSLQTGYEDWSHWLPCDRAVAMPCAKAGEFTPYTRSTARTAGWQWRIPLQHRTGNGYVYCSQFISDDEAEETLRANLDGEALAGPNRLRFTTGRRRKFWNKNVIAIGLSSGFMEPLESTSLHLIQAGISKLLALFPDKDFNPLLADEYNHIAVTEFERIRDFLVLHYKLSTRDDGELWRYCAQMAIPDTLQFKIDHFKSYGRHIARDMDLFGPPSWLAVHIGQGNIPEAVDPLFDYRGIDGREWLGKLRGAMQFEAGRQPTHQQFIDQHCKAGI

SEQ ID NO: 83327 - protein, 520 aa, Rhodanobacteraceae bacterium
  misc_feature (1)..(520): tr|A0A522R7N7|A0A522R7N7_9GAMM Tryptophan 7-halogenase OS=Rhodanobacteraceae bacterium OX=2052182 GN=EPN40_078 40 PE=4 SV=1
MSESAIRRVVIVGGGTAGWLAAALLARALGPERQIRLVESAEIGTVGVGEATIPQILHINAFLGIDEDDLMRFTHGTYKLGVQLNDWGRLGDSYIHAFGDVGLPLGLLPFHHYWLRSRGRSGAHPLWAYSLNAAAAAANKFARLDTVPDSPIGGIRYAYQFDAARYARYLRERMPEGAVQRIEGKVVDVKLRGEDGFIESLRLENGEIVEGDFFIDCSGFRGLLIEGALKTGYENWQHWLPCDRALAVASTRAAPMRPYTQAFARTAGWQWRIALQHRTGNGHVYCSRCISDDEAAAQLLANLEGEPLEEPRPLRFTTGMRKLAWNRNCLALGLAAGFMEPLESTSIHLVQSGVARFLGMFPDRHCDPVLVDTYNRQTRFEYERVRDFLILHYKATERDDTPFWRQCGAMEVPPALAQRISLFRRTGLIFRDAEELFTETGWLQVMLGQRIEPERYHPLADELEEAKLQGFLSDIRTLVSRTAARLPSHDEFVARVATPPQETAVAPSATPTQVLERSAS

SEQ ID NO: 83328 - protein, 496 aa, Pseudoalteromonas sp.
  misc_feature (1)..(496): tr|G7F2X9|G7F2X9_9GAMM FADH2 O2-dependent halogenase I OS=Pseudoalteromonas sp. BSi20429 OX=1097676 GN=prnA PE =4 SV=1
MKPIKHVVIAGGGTAGWITAALLNKVLGKVINITLIESSAIGTVGVGEATIPPIIQLNNALGINEQDFINATNASIKLGIEFENWKTPGHSYMHAFGSFGKNFPFCDFYNFWLKGQITGCEDDLWDFSLNYQAAKQHKFAPLNTIPNTQLPGLSYAYHFDATLYAEYLKKLAISRGVKHIDAKISHVEQCDTGNVKSLALDNDSQISGDLFIDCTGLRALLIEQTLNTGFIDWSHYLPCDSAVAVQTKSTHELKPYTRSIAHSAGWQWQIPLQNRIGNGLVYCSRYLSDDDAKQLLLKSLPAEPITEPRIIKFKTGRRLKQWHKNVVSVGLSSVFLEPLESTSIHLIQTAVTRLIKLFPHNGISDALVTEFNKQSVIELEHIRDFIILHYKLTEREDSPFWRQCIQMDIPNSLTHKLNLFKHTGKVIREDDELFAEVAWQQVMIGQGLIPDDYNSIVDSLSDDQLSDLFSTLKTLISSTVTQLPTHQNFLASIKKV

SEQ ID NO: 83329 - protein, 517 aa, Sphingomonadaceae bacterium
  misc_feature (1)..(517): tr|A0A2D6UJB6|A0A2D6UJB6_9SPHN Tryptophan halogenase OS =Sphingomonadaceae bacterium OX=1930536 GN=CMN65_00775 PE=4 SV=1
MADHTQPNRARRPRPGRRIVIVGGGTAGWMTAAALSRFCGRDWGITLVESDAIGTVGVGEATIPMIRNFNAALGIDEAEFIAATNGTYKLGIEFVGWGAPDSRYLHAFGLVGRGLGLLPFQHYWLRARAEGFGGPIGDYVFNAIACREERFAHVERQPGSALPPLPFAYHFDAGLYAAFLRRYAETRGVLREEGRIDHVETRAEGGDITSVRIDGGRVVEGDLFIDCSGFRGLLIEDTLQTGWTDWSHWLPCDRAIAVPCEPSEPWLPYTRSTAREAGWQWRIPLQNRIGNGHVFSSAHMSEDTAQEALLANLDGEPTAEPRLLRFTTGMRKQAWNRNVVAIGLSSGFLEPLESTSIHLIQTGINRLLDYLPVSGFGPRDRENFNRRTAYEMERIRDFIILHYHANGREGQPFWDMLRTMAVPDTLAEKIEMFRAGGKIVRDQDELFDVPGWGQVMLGQGVEPQGWHPLADELPRDQLEQFLATVKSAYERDVARMPSHQDYVRRLARQGRSKLETA

SEQ ID NO: 83330 - protein, 537 aa, Rhodanobacteraceae bacterium
  misc_feature (1)..(537): tr|A0A522QWT0|A0A522QWT0_9GAMM Tryptophan 7-halogenase OS=Rhodanobacteraceae bacterium OX=2052182 GN=EPN40_131 35 PE=4 SV=1
MSEATATVYNRNVTARHPGVGTDAEPPVKRVVVVGGGTAGWMTALLLANSAYGLRLKVTVLESPQVGVIGVGEGSTPWLRGFFESLGIEESEWMPECHATYKAGITFDGWSTRPGFESYFHSFASMLDNMTMAPFIDNVHARLDRADVYAHPNRFFISARLARECKAPRPQASFPFDVWYGFHFDSVLLGRFLQKKAVERGVQHVAGHVVDVQLDDSGDIASLRLQDDATLAGDFYIDCTGFASLLMGKALGTPFVSFKDNLFNNAAVAIQAPHDGPIQPQTISTALRYGWVWKIPLSHRYGHGYVYSTDFCTPDAAEQELRRHLGLLDADVPARHLKFRPGRVAKPWNRNCVANGLAQSFIEPLEATTLLYVQRTAEMLVKVLEQGDLGEEARTRFNDSINAGVEGTRDYIVTHYKTNTRSDTDYWRANAANTHLSAPLQQLLRTWLASRPISAGIAKGTFGRGYPIMSWYSLLAGMGLFPDDREMRPPTQQEAKYDMAEIDTLLERSAINFPDHREFLRAIPPKPKPSSLQVYFW

SEQ ID NO: 83331 - protein, 268 aa, Sphingomonadaceae bacterium
  misc_feature (1)..(268): tr|A0A431J5E0|A0A431J5E0_9SPHN Tryptophan 7-halogenase (Fragment) OS=Sphingomonadaceae bacterium OX=1930536 GN =EKK50_15295 PE=4 SV=1
MAGERRQATRVVIVGGGTAGWMTAAAIARLLPHRAEVHLIESEAIGVVGVGEATLPHIRAFNERLGIPEAEFMARTRATFKLGIEFRDWGAIGDSYIHPFGTFGTGSGAVDFHHYYARLLREGAELPPLDRLSYACALAREGRFAMPETDRRSLAGTFGYAYQFDALLFAPYLRGLAEEMGARRSEGIVVDVARDGESGDIVAVTLADGTRIEGDLFVDCSGFRSLLLGEALGEPFEDWSRWLPADRAVAMPCRTETAVTPYTSAIAM

SEQ ID NO: 83332 - protein, 380 aa, Sphingomonadaceae bacterium
  misc_feature (1)..(380): tr|A0A431JUY3|A0A431JUY3_9SPHN Tryptophan 7-halogenase (Fragment) OS=Sphingomonadaceae bacterium OX=1930536 GN =EKK50_00605 PE=4 SV=1
MNAVTPRRIVVAGGGTAGWMTAAALTRTLGRTATVTLVESDAIGTVGVGESTIPPLITFNRLLGINEAEFMAATQATFKLGIQFDGWKGPDDSYFHAFGLTGKDHWAAGFQHFWLDGQARGHTESYDDYCLELVAAREGRFAHLPDDRMSYAYQLDSTLYGRFLRRMAEGDGATRIEGKIARVELDGESGDITALVLDSGVRVEGDLFLDCTGFRALLIEQALHVGYDDWTHWLPCDAAIAVQTESVRPPVPFTRAMAHDAGWQWRIPLQHRVGNGIVYCSRYLSQDAALDRLLGNVEGAVLTEPNRLRFVTGARRKQWHRNCIAIGLAGGFMEPLESTSIHLIQRAILRLIRLLPPAGAISAHDIAEFNDQQLTDMDQI

SEQ ID NO: 83333 - protein, 510 aa, Dyella thiooxydans
  misc_feature (1)..(510): tr|A0A160N594|A0A160N594_9GAMM Uncharacterized protein OS=Dyella thiooxydans OX=445710 GN=ATSB10_34900 PE=4 SV =1
MEPTDRRIRSIVIVGGGTAGWMTAAALAQALQGSCRIELVESEQIGTIGVGEATIPPIKLFNQTLGIDENTFLAATQGTFKLGIEFVGWGRAGHRYFHPFGQIGAEFDKVPLHHYWLRERSRGDTSALEDHSLAWVAARDGKFTLPSTDRRQVLSTLDYAYQFDAGLYAAFLRRYAEARGVRRTEGRIVGTDLRADDGFIERVRLDGGATIEGDLFIDCSGFRGLLIEEALHAGYEDWRHWLPCDRAVAVACEHDDTFAPYTRSTAHEAGWQWRIPLQHRVGNGHVYCSAFTDDDTATRVLLESLTGKPRGTPRPLRFATGRRRRFWHRNCVAIGLSAGFLEPLESTSIHLIQTAITRLLALFPDRDFDAVTTAEFNRLTGAEYERIRDFLILHYHANTRDEPMWRHVATMEIPEPLAYKLAHFRGHGRLVAESLELFQNPNWLAVMVGQEVWPERHDPLADLRTGVDAASRLASLRQVIAEVAAAMPTQREYINRHCRAPSVEAAAMAR

SEQ ID NO: 83334 - protein, 498 aa, Alteromonas sp.
  misc_feature (1)..(498): tr|A0A2S9V6M5|A0A2S9V6M5_9ALTE Tryptophan halogenase OS =Alteromonas sp. 190 OX=2079529 GN=C6Y40_18115 PE=4 SV= 1
MAQKKTRVVVAGGGTAGWLTAFSLVTRLGNVLDITLVESDQIGTVGVGEATIPTMCNFHQLMGINEQEFMAATNATFKLGIQFDNWANDGDSYIHSFGEIGQRSWMAEFHEFWMEAVANGQQDSLEDYCLELKAAKANKFATKIGNRPLNFAYHLDATAYAAYLRNKSEAAGVTRCEGKIQSVDTDPQSGNLTRLTLDTGITIEGDVFIDCTGFRGLLIGEHLGVGYEDWSHWLAADRAIAIQTQSTEAPKPYTIATAHKAGWQWRIPLQSRVGNGIVYSSRYLSDEDALATLKQNLDGEMLTEPRYLKFKTGRREKAWHKNCIAVGLASGFLEPLESTSIHLVTTALIRLMKLFPFSNDHELLAEQYNRETQKEMETIRDFIILHYNLTKRTDSDFWDHYRTMDIPEPLAHRMAIFAQNGYVWPDDVALFRVDSWVQVMMGQGLMPAQHHGASRMLPIDGLKQQLSAFKQSVNNALGQLPAHADFIARYCPAGEQVK

SEQ ID NO: 83335 - protein, 492 aa, Sphingomonadaceae bacterium
  misc_feature (1)..(492): tr|A0A431JEV5|A0A431JEV5_9SPHN Tryptophan 7-halogenase OS=Sphingomonadaceae bacterium OX=1930536 GN=EKK50_0813 5 PE=4 SV=1
MSDTRIRRIAILGGGTAGWMTAAALSRALAGQGVAITLVESDAIGTIGVGEATIPTIHWFNQIIGFDERQFMTETKATVKLGIEFVGWNGEGSRYFHPFGTFGPPGDGAMFLHRLIRARADGDTASTEAYSLTAQAARAGRFTRPVPDRRSLLSTLGYAYHFDAGLYARYLRGLAERAGVTRIEGMVASVERHADSGYVRSLTLADGQVVAGDLFIDCSGLRGLLIGETLGVGYDDWSHWLPCDRAWAAPSAAEVGRTPFTRATAAEAGWRWRIPLQHRVGNGYVFSSRFQDEEAARASLIAGMDGPPLADPRLIRFTPGMRREAWRANVVAIGLSSGFLEPLESTSIHLIQSGIAKLLSLFPAADCSPLLARQFNRVFGQEMLDVRDFLILHYHATAGRTEPMWQERQAMAIPDTLAEKIAHFRASGRIVLSSDELFRDASWFAVLDGQGERPGDHNPLIEAVGRDDNLRQLAALRADIAKVTATLPPIPA

SEQ ID NO: 83336 - protein, 510 aa, Pseudoxanthomonas spadix
  misc_feature (1)..(510): tr|G7UTF1|G7UTF1_PSEUP Tryptophan halogenase OS=Pseudox anthomonas spadix (strain BD-a59) OX=1045855 GN=DSC_137 65 PE=4 SV=1
MSVCSIRSIVIVGGGTAGWMAAAALARVLGPTYKVTLVESEQIGTVGVGEATVPHIKAFNNLLGLNEAEFVRQTQGTFKLGIEFVDWRRKGASYLHGFGTEIGHRLGLLPFHQYWIKAHRAGWAKPLGAYTLNTVAAPMNRFMTSARDVPAQSPLANIAYAYHFDAALYARLLRTYSEQRGVRRIEGIVEQVSQHPESGDVQSLRLQDGTVIAGDLFIDCSGFRGLLIEQTLHTGYHDYTHWLPCDRALAVPCEKVGPPTPYTRATARQAGWQWRIALQHRTGNGYVYSSAHISEDQAAATLLANLDGKALGDPRPLRFTTGRRKLCWNKNVVALGLASGFMEPLESTSIHLIQSGISKLLELFPREGISQVLVQRYNDRLAFEFERIRDFLVLHYHATERDDTGFWRQCRDMAIPAELQSTLELFGDSGRFYRNGDEMFAEISWVQVMVGQGIMPASYHPLVDQVPEADLKAFLASVEKTIDHCAQAMPGHQQFIDRYCAAPPLGTAAA

SEQ ID NO: 83337 - protein, 505 aa, Xanthomonas theicola
  misc_feature (1)..(505): tr|A0A2S6ZCY9|A0A2S6ZCY9_9XANT Tryptophan halogenase OS =Xanthomonas theicola OX=56464 GN=XthCFBP4691_14930 PE= 4 SV=1
MLAAPLRHLVIVGGGTAGWMAAAALARVLGPAYRITLIESEQIGIVGVGEATVPHIKAFNNLLGIDEAQFVRQTQGSFKLGIEFVDWHRPGASYVHGFGTEIGHPLGLLPFQQYWIKQALLGKAKPLGAYTLNTVAAKRGKFMTSASDAPPNSPLANIAYAYHFDASLYAAFLRRFAEQRGVARREGIVEEAQLHPESGDVVSVRLASGEVIAGDLFIDCSGFRGLLIEQALHTGYHDFSHWLPCDRALAVPCAKVGPPTPYTRATARAAGWQWRIPLQHRTGNGYVYSSAHLSDDEAAATLLANLDGPALADPRPLRFLTGRRKQAWNRNVVALGLASGFMEPLESTSIHLIQSGISKLLELFPREGISPVLVQRYNERIAFEFDRIRDFLVLHYNATEREDSDFWRQCRNMAITPELQATLDLFRDSGRFYRNGEEMFAEISWVQVMVGQGILPRAYHPLVDQVPAADIERFVASVEQTIGHCVDAMPPHQAFIDRYCAAAPA

SEQ ID NO: 83338 - protein, 503 aa, Opitutae bacterium
  misc_feature (1)..(503): tr|A0A351MTY8|A0A351MTY8_9BACT Uncharacterized protein OS=Opitutae bacterium OX=2026771 GN=DCY41_07115 PE=4 SV =1
MVKDIVILGGGTAGFMMAISLRTRLPDMRVRLVRSPTIGIIGVGEGSTTDLPAFFHGYLGIPPDEFYREVKPSLKLGIKFIWGSGDAYHYGFSGALRQHIQETALPVGFLCDQTLSGVDLSSALMEHGKVFLQHAEGRWPDVRHTVGYHIENAELVAWLEKHAARLGVEVIDGDLASVVRKGDSITSIHLADGQELAADFFVDASGFRSELLGKAMGVPFVSYADSLICDRAVVGGWTRTDEPILPYTTAETMDAGWAWQIEHPGRINRGYVYCSKFITDAAAEAEFRAKNPKVGPTRVVPFVPGRYAQQWIGNVYAVGNSSGFVEPLEATSLLVIAHECRFLCGALAESGGEVGPELRSSIDRTLGRLWDEIRDFLAVHYRFNRRLNTPFWKHCHKHVALHGAQRWVDFYGENGPTLIAETELLAPVQSVFHLEGVWTHLVGMQVPHARAERATAAERAAWANHTAANLNQAKMHGLTVEETLAVLQDPRWTWTPGFYALRR

SEQ ID NO: 83339 - protein, 500 aa, Sphingomonadaceae bacterium
  misc_feature (1)..(500): tr|A0A2D9X821|A0A2D9X821_9SPHN Tryptophan halogenase OS =Sphingomonadaceae bacterium OX=1930536 GN=CMN69_04425 PE=4 SV=1
  misc_feature (164)..(164): Xaa can be any naturally occurring amino acid
  misc_feature (333)..(333): Xaa can be any naturally occurring amino acid
  misc_feature (345)..(345): Xaa can be any naturally occurring amino acid
  misc_feature (370)..(371): Xaa can be any naturally occurring amino acid
  misc_feature (373)..(373): Xaa can be any naturally occurring amino acid
  misc_feature (427)..(427): Xaa can be any naturally occurring amino acid
  misc_feature (432)..(432): Xaa can be any naturally occurring amino acid
MSSDYTPRRIVVAGGGTAGWMTAAALAKTMGDAIDLTLVESDAIGTVGVGEATIPPLINFNRLLGINEAEFMRETQATFKLGIEFENWKRDGEKYFHSFGSTGRDHWSAGFQHFWGEGLLRGHNYSYDDYCLELCAAYAGKFAHLPDNRLNYAYHLNATAYAAXLRRIAEGAGASRVEGKIAHVELDGESGNIAAIGLENGQRLEGDIFVDCTGFRSLLIEGALHVGFDDWSHHLPCDSAIAVQTELSASPVPYTRAIAHDAGWQWRIPLQHRGGNGIVYCSRYLSKDAAHDRLMSTLEGKAISEPRAIPFTTGARRKQWHRNCIAIGLSSGXLEPLESTSIHLXQRAVIRLLRMMPAGEVSERDIAEFXXQXLTDMIQVRDFLILHYKATDRRDSAFWRQCATMDIPDSLTQKMELFRETGRVFRXNDELXVENSWVQVMLGQGILPQAFHPVAKKMSDEELSKFLEMLRTNVARTVQGLPAHHAYVAQFCGAKEVAAA

SEQ ID NO: 83340 - protein, 517 aa, Sphingomonadaceae bacterium
  misc_feature (1)..(517): tr|A0A2D9X7Z4|A0A2D9X7Z4_9SPHN Tryptophan halogenase OS =Sphingomonadaceae bacterium OX=1930536 GN=CMN69_04440 PE=4 SV=1
  misc_feature (7)..(7): Xaa can be any naturally occurring amino acid
  misc_feature (23)..(23): Xaa can be any naturally occurring amino acid
  misc_feature (61)..(61): Xaa can be any naturally occurring amino acid
  misc_feature (162)..(162): Xaa can be any naturally occurring amino acid
  misc_feature (165)..(165): Xaa can be any naturally occurring amino acid
  misc_feature (171)..(171): Xaa can be any naturally occurring amino acid
MSGEFTXLVIVGGGTAGWLSACXLAARRPELAITLIEAPDIPTVGVGEGSWPTLRETLAVXGIDETEFLTECDASFKQGSRFDGWVDGSERDCYYHPFSAPLSGAMPDILAAWKMQNDGQPYAEAVSPQAAICNRDLAPRQRTMPPFAGALNYGYHLDAGKXGAXLASHGXKKLGVRHVHGKVTRTERGVDGLFTRLLLDNGSAIEGDFFIDCTGMASKLMGEELGIGWVDRSNVSFNDRALAVQVPVVPDSAIASLTIGTAHRAGWLWDIGLPTRRGVGCVYSSGFLSDDEAQAILMNYIGSRIAGAEQTALTPRGLKFSTGYRDKFWAGNCLAIGLSAGFIEPLEASAIVLIELSLKALADGYPQSRAALPRLADRFNSLFRYRWERIVDFLKLHYVLSTRTEPYWQAHRDPATIPSSLAAHLDLWRDHAPSSGDFPQIDEIFSATSHQYVLYGMRFPQPADISSAPSSEVQRQFAKVAERSRALSAALPSNRAYFDALCSSMDKNSARGVPTRQ

SEQ ID NO: 83341 - protein, 561 aa, Phaeobacter inhibens
  misc_feature (1)..(561): tr|A0A135IFJ6|A0A135IFJ6_9RHOB Tryptophan halogenase OS =Phaeobacter inhibens OX=221822 GN=AT574_18520 PE=4 SV= 1
MNNRLRKITIVGGGTAGWMTALILETELSRTSAPKDRPKICLIESPNIATVGVGEATVPRMPKTLRQAGISERAFFRETNASFKLGVKFCNWNTDAKGNRIDYVNPFAHGQLLEGLEPAEYFLRFGNGDRDYTQSISPHDDLGRLCKGARPLGQPEFEQRFGYAYHLDAVKFAGMLTKVCTKHGVEHIQDEVTSVELDEQGNVSHLMLAQRGRHDIEMVIDCTGFRGLIINQALGEPFMDYSDYLPNDRAMALQIDHPDPEKIESLTRSTALGAGWTWRVPLYNRVGTGYVFSSAHRTDDQAADEYLEWLGDSGKGATPRIIPMRIGRVRNAWVKNCVAIGLAGGFIEPLESTAIHMIDHAVRWLTEHMPTRDIAPSLRTRYNRQMDKLYDEVLEFICLHYRLGNRTDDQYWIDARTEMKIPDRLAENLELWQHRLPMPHDIEFATLFDYRVYQTVLLGKQVYDTGYGPGIRDRLRPLKKPIWFQWWKGAKVDLANILKSMPDHKTLLRDIRGELDQPSFGMAAAMKPTVPMPGAAPMPWAIQNMPSFSEIESGQKDLQLF

SEQ ID NO: 83342 - protein, 498 aa, Sphingomonas sp.
  misc_feature (1)..(498): tr|A0A0Q4FRV7|A0A0Q4FRV7_9SPHN Uncharacterized protein OS=Sphingomonas sp. Leaf17 OX=1735683 GN=ASE75_12495 PE =4 SV=1
MPDAVRRVVIVGGGTTGWSAAAALATAPGMGHLHVTLVETPDIPTIGVGEATIPHIRGFNAAIGLDEARFVANTGATIKLGIRFDDWHRRGARYFHPFGETVRRIGGVDPHHHLVRGQMTADDLAALSPGAVAAATGRVVDASPPDPAMVERADYAYHFDAGRYAPLLRDHAVARGVVRVTGRVAGIRRAPADGMVEAVLCDDGRAIAGDLFLDCSGFRGLLIGDAPDNRFVDWSHWLPCDRAVAAPCARLGELVPFTRSTADVAGWRWRIPLQHRTGNGHVYCSAFLDDTAAADALLAAMDGPPLADPRVIPFRTGHRDRVWDGNVVALGLAAGFLEPLESTSIYLAQKGALLLLDLFPGRQGAGPLRDEYNRVMLDEFAQIRDFLVLHYSATTRDDSAFWRARRGMPPPDSLSARLALFENHGVLWQHQRFFNEVSWRAVLIGQGIVPRGHDPRLDAVPEDWARSAIAAARAATRDWVARYAGHAETVAAIVGAAR

SEQ ID NO: 83343 - protein, 339 aa, Pseudoalteromonas sp.
  misc_feature (1)..(339): tr|A0A4Q6JG04|A0A4Q6JG04_9GAMM Anthranilate phosphoribo syltransferase OS=Pseudoalteromonas sp. MEBiC 03485 OX= 2571103 GN=trpD PE=3 SV=1
MEATTQTQLNQLLAKQDLSFLQATALFDAIMNGQLNDIELTAALIALKLKGETSDEIAGAAASMRANAVPFKTSKTLLADSCGTGGDGSNTINISTTAAIVAAAAGINMVKHGNRSVSSNSGSADLLKALGINIDMSPEQAAICLENTGFTFLFAPHYHSGVRHAMGVRTALKSRTIFNILGPLANPAAPEVQLLGVYDASLCLPMAETLKTLGTKRAMVVHGAGTDEIALHGTTKVVELNNGELSEYTLTASDFGLANYSLEQLAGQGPEYNAKASLAILQGQGEMAHNAAIIANVAALLYLTDKTSDLKAAADQVSELLASGKAMDTLNAIIEVSHG

SEQ ID NO: 83344 - protein, 517 aa, Caulobacter sp.
  misc_feature (1)..(517): tr|A0A2G5QSQ5|A0A2G5QSQ5_9CAUL Tryptophan halogenase OS =Caulobacter sp. FWC2 OX=69664 GN=CSW62_19135 PE=4 SV=1
MQDNRIRKLVIVGGGTAGWMAAAALRRHFQGGPLEITLVESAEIGTIGVGEATIPTIRAFYNQLGLTDIEVMRATGATCKLGIRFNGWVREGQSFIHPFGHFGQDLRGVSFYHYWRKLAQAGEPTDIADYSLGASLAEAGKFMAPSRNPTSTLSIFDWALHFDAGLFAQLMRRVAEENGVRRIDAKVTKVNLRPGDSFVASLDLHTGETIEGDFFIDCSGFRGLLIEEALQTGYEHWNDVLFCDRAWAVQSEGMGDPMPYTDVTAHSAGWRWRIPLQHRYGNGYVYSSRHISDEDALAELKAAIPDPLLHEPRLIRFNPGRRKQVWNKNVIALGLASGFLEPLESTSIALIETGIEKIKTLFPDKDFAPEVVDEFNDWSRREMERVRDFIILHYWANKRGDTAFWRDCNQIVLPEPLRRKIDLFTQRGHFVRYRWEMFAPPSWMAIYAGFELLPEAVDPSLDGIDPKTLSAPLAEMRKAVREVVANAPPHAAFLDQYCRPAPPSPPSAQARSEVAAE

SEQ ID NO: 83345 - protein, 516 aa, Rhodanobacter sp.
  misc_feature (1)..(516): tr|A0A1M3NZ27|A0A1M3NZ27_9GAMM Tryptophan halogenase OS =Rhodanobacter sp. 68-29 OX=1895823 GN=BGP10_17670 PE=4 SV=1
MHRDDMLMNDQVRTILIVGGGTAGWMAAAALAKMLGPAYGIRLIESEQIGIVGVGEGTVPHLSFFNRMLGIDEAEFVKRTQGTFKLGVQFNDWGRLGDSYIHGFGSIGHDVGMQPFHQYWLKARQEGWAGELGDYSLNTLAAPRNKFMTSAADVPPTSPLASIAYAYHFDAGLYAGYLRGYAEKLGVRRTEGRIVQTLLRPDDGFVEAVVLESGERVEADLFVDCSGFVGLLIEQALHTGYEEWTHWLPCDRALAVSCEKVGPPTPYTRSTAHRAGWQWRIPLQFRTGNGHVYSSAHLSDDEAAAILLKHLDGRPLGDPRQLRFVTGRRKRAWNRNVVALGLASGFMEPLESTSIYLIQAGIVRLLTLFPRRDCSPVLQDRFNAQSTFEAERIRDFLILHYHATQRVDSAFWKQCREMSVPATLEDNIRLFRDTGSFFREGNEMFGAASWVQVMIGQGILPERCHALAGQMPEADLRQFMKGVRDVVESCVDAMPSHEAFIARHCAAVMPTATAAA

SEQ ID NO: 83346 - protein, 515 aa, Caulobacter sp.
  misc_feature (1)..(515): tr|A0A2G5QQY8|A0A2G5QQY8_9CAUL Tryptophan halogenase OS =Caulobacter sp. FWC2 OX=69664 GN=CSW62_15855 PE=4 SV=1
MQRRRSILIVGGGTAGWLTAAYLAKALRAADRGDLSITLLESPDIGIVGVGEATFPTIRNTLRFLGIDEARFIRETSATFKQGIRFVDWAEAPTDGRHESFFHPFEAPFSTEGTSLAPYWLLQSEATRAPFAEAVTIQARVADAARAPKRPHESDFSGPLNYAYHFDAAKLAQVLAERARELGVRHLRGAVSDTILDETGAIARITSPEHGELTADLYVDCSGFRAELIGKALGSPFKSVKPILFADRALACHTPYERPDGPIQSYTVATAHEAGWIWDIGLVGARGVGCVYSSDHMDDARAETVLRDHVGGAKIEARKISFDAGYREQQWIGNCVAVGLSAGFLEPLESTGVVLIEAAVAMIAELFPHNGPVSAPARRFNALMAARYDNIIVFLKLHYALSRRTEPFWRANRDPASIPERLAELLEQWRYRPPARFDFILDLETFAFFNYQYILYGMGFKTDLGDAAGEFPDVAAAAKLFAKIRGFADRATQDLPSHRDLIAQINRFGFAPEQV

SEQ ID NO: 83347 - protein, 500 aa, Streptomyces sp.
  misc_feature (1)..(500): tr|A0A2G9DSW2|A0A2G9DSW2_9ACTN Tryptophan halogenase OS =Streptomyces sp. JV178 OX=858632 GN=CTU88_16025 PE=4 S V=1
MTVTRSETPSEEFDVIVVGGGPAGSTVASAVALRGHRVLLLDQQTFPRYQIGESLLPSTVHGVCRILGVEDEVARAGFKLKRGGTFRWGRNRDPWQFSFALSPRLSDPTSFAYQVERNRFDAILLDNARRVGVDVREGCRVSDVVADEERVRGVRWTGPGGAIREARARYVVDASGNTSRIHPHVGGKRTYSDFFRNIAVFGYVAGGRRLPKPNDGNIFCATFDEGWIWYIPLRDELTSVGAVVSREHAAAVQGDPTAAWRRLIDSCPEIRDLVDGAPQAGEAPYDEVRVRKDWSYWKTRLWRPGMVLVGDAACFVDPVLSSGVHLATYGSLLAARAINSTLDGTLDEARCFGEFEARYRHEYGLFYEFLMSFYDLHQDERSYFWKARKVTHVGATELEAFVELVGGLASGDAALAAPAEAGARLTAASSDLDRVVGRLPDSDGHRNPLYESTAFRQTFHEGSVLQERGLLGGPLEEEAPLRPGGLVTSEDGLGWAVAAT

SEQ ID NO: 83348 - protein, 503 aa, Pseudoalteromonas profundi
  misc_feature (1)..(503): tr|A0A3A3ELQ9|A0A3A3ELQ9_9GAMM Tryptophan 7-halogenase OS=Pseudoalteromonas profundi OX=1774956 GN=D4741_13400 PE=4 SV=1
MIKKIAIVGGGTAGWLAANHLGHALLQSGIEITLIESPNIASIGVGEGTVPSMRNSLQKFGISESDFINECDVTFKQSIKFVNWLDKHKHGTNFYHHLFDHPHIFSEQLTQQWLAEGNGNDYAEFVSKQHVCCENNLAPKTIATPQYAGINGYAYHFDAKKFASFLGSHATQHFAVKHLFAEIKDVSFDEQGFITHLIDSEGNALEFDFIIDCSGFSAAFIGQKLGVGFVDKSASLLTDTAITLQVPTQSDEEIPPYTIATAHQAGWIWDIALTERRGVGFVYSSKYMSDEQAHAKLHHYLGNKFEHLTPRKIPMKVGHREKMWHKNCVAIGLSQGFVEPLEATAILIADFSAGLLAKRFPRTQDDINLVADDYNQQVNYVWQQTFDFIKLHYCISDRTDSAFWRDNKKTDQLSEKLKNNLARWQRFTPVREDFASKFDLFDLENYLYVLFGMHYVPAKQQSKQSDNQQVAEFKQQRVKQLLSELPKHRELLDKIKKFGLQKY

SEQ ID NO: 83349 - protein, 512 aa, Sphingomonadales bacterium
  misc_feature (1)..(512): tr|A0A258IDS6|A0A258IDS6_9SPHN Tryptophan halogenase OS =Sphingomonadales bacterium 32-64-17 OX=1970592 GN=B7Y8 8_01260 PE=4 SV=1
MKQVKHIVIVGGGTAGWLTAGVIAARHQARMKHGFTVTLVESPNVPIIGVGEGTWPTLRNTLRGIGFSETDFLRECDAAFKQGARFNRWTTGEPDEGYYHPLMLPQGFARLNLVPHWQADGTATFCDAVTPQGRICDAGLAPKTIATPEFESLANYAYHLDAGKFSQFLQRHCCEKLGVRHVLADVTSVDVTESGDVRAIQTQQAGEITGDLFVDCTGFKALLIEGAMQVPFRDCNDVLFCDTALAVQVPYADPDAPIASHTISTAQSAGWIWDIGLPTRRGVGHVFSSNHISAEEAERELRAYIGPAADSLTVRKIPIRSGHRETFWKRNVVAVGLAAGFLEPLEASAIVLIELSAKMIAEQMPPNRAVMDVIARRYNETTHYRWGRIIDFLKLHYALTKRTDTEFWRDNLRPETIPDRLLGLMELWRYQPPWLHDEFDRAEEVFPSASYQYVLYGMQWRTELPPGEDQRERDMAVRAMRENRQQTERLMQGLPRHRDLLNRIREHAMMPV

SEQ ID NO: 83350 - protein, 480 aa, Streptomyces olivaceus
  misc_feature (1)..(480): tr|A0A1D8SIJ7|A0A1D8SIJ7_STROV Tryptophan halogenase OS =Streptomyces olivaceus OX=47716 GN=BC342_00115 PE=4 SV =1
MTSTGDSASAESFDVIVVGGGPAGSSAATFVALQGHRVLLLEKESFPRHQIGESLLPSTVHGICALLGVSEELHSAGFVKKHGGTFRWGSNTEPWTFDFALSEKFAGPTSYAYQVERMKFDQLLLDNARRKGVVVRERCAVRDVLEDGGRVNGVRYTDEDGTERETRARFVVDASGNQSRLQGRVGGERRYSEFFQNIALYGYFEGGKRPPAPNSGNITCVAFDSGWFWYIPLSDTLTSVGAVVRKECADRIRGDRGEALAEMIADCPLVSDYLSEAERVTSGPYGEVRVRKDYSYLHDGFWRPGLTLVGDAVGFIDPLFSSGVHMATFSALLAARSINSVLRGDLEEEECFAEYEARYRKEYQTFHDFLVSFYDVTRDEQQYFDDARRVTRDSAPGAGAFVGLVGGGASDDTALTSDDYRDQRKKDLRQQSRDVHWEGHRIQMQAAFGEADDDVPAVKDGLVVAQDGMHWTKSADSAAV

SEQ ID NO: 83351 - protein, 509 aa, Caulobacter sp.
  misc_feature (1)..(509): tr|A0A2G5QTX2|A0A2G5QTX2_9CAUL Tryptophan halogenase OS =Caulobacter sp. FWC2 OX=69664 GN=CSW62_21615 PE=4 SV=1
MQPLKKILIAGGGSAGWMTAALCSRLFQGLYEIVLIESEQIGTVGVGEATIPAIKKFNELLGLDEDDFLRKTQGSFKLGIEFRNWFRKGEGYLHGFGVLGQDLGWLRVHQYWLRMRELGQAPDFEALSINNAMARQDRFMRARADMAESPIGHIAHAFHFDAGLYAKHLSTYAQARGVQRREGKIVDVTLRPDDGFVQSVTMDDGAVIAADFFVDCSGFRGLIIEQALKTGYDDWTRWLPADRAIAVPTERSAHFTPYTRSTAHDAGWQWRIPLQHRTGNGHVYSSQYIDDDEAERVLLSNLDGAQRADPLRIRFTTGKRKKIWNKNCVSVGLASGFMEPLESTSLHLIQSAVIRMVRLLPDGGFDQANVDEFNRQSDFEYERIRDFIILHYKATERDDTPFWRHCRDMEVPATLQRKMDLFRANGRVFREDDELFTEESWIQVFLGQGVIPRGYDPLVRVHSDEAIATHLGNIQTVIGKCLNVMPSHAEFVARACQAPPLPATPVPVP

SEQ ID NO: 83352 - protein, 516 aa, Sphingosinicella sp.
  misc_feature (1)..(516): tr|A0A2P7QKH7|A0A2P7QKH7_9SPHN Tryptophan halogenase OS =Sphingosinicella sp. GL-C-18 OX=2116704 GN=C7I55_18710 PE=4 SV=1
MPPTFVRIAQWPRRLEVPDSRPIRDVVVAGGGIVGWSAAAALRRHLPNVGVTVIADAPAPDALAERIGSTLPSIAAFHGDLGLSEMNAVARTASGYRVGTQFEGWAGNRPAYVHTYGEHGRPFGATSFHLYWHRVRQAGGTASFDTFSPAAELARMGRFVHPQGGPGSILASFEYGLQLNPARYLDLMRAFAVHLGAREHQAKIAQVDVRGEDGFVGGLRLDDGQVVTADLFVDCTGPAARIRSALDAKFEDWSCYLPCDRVILAEGTAPASLPVMDSVVAMSSGWRWQAASPARTSHGLVYASAHLSDSKAERALRVHSGAEPRGPAVAIRIGRRPDPWLRNCVAVGEAAVALEPLEWTNLHVAHSAIDRIVAMMPDRECAPIELAEFNRQSAAEAERIRDFLMLHYVTSDRREPFWRDAAAMRIPDGLAHTLRLFRERGRLPFQEEETFARDSWLSVLFGQGVLPHRADPLTDALPIARIEAAMGQMRDSIRAMASPLPTHADYLGNMMRRAVR

SEQ ID NO: 83353 - protein, 510 aa, Pseudoalteromonas porphyrae
  misc_feature (1)..(510): tr|A0A0N1EPZ0|A0A0N1EPZ0_9GAMM Uncharacterized protein OS=Pseudoalteromonas porphyrae OX=187330 GN=ADS77_07475 PE=4 SV=1
MAIINKLVILGGGSAGWMCAAYLSKQHPKLDITVVESSKIGSIGVGEGSTPHLKTFMDTLGVSEQQWMPQCDASYKAGIYFNNWNGDERRYFHPFYSQMDEKTAEVYCVNANARRRGNGDWQAPDDYFLTGHIAKHNLSPKVHTPMLKEQTYGYHFDATKLAAVLKAYAQEKAVKHIDGEFSQAQLSECGNIVGITLIDGRQVNGDFFIDASGFNALLIEQTLKTPFNSFANELLNDSAVAVATPVTTDGVISCATQSTALSAGWSWQIPLTSRTGNGYVYSSKHITGEQAQSELADQLNIDAQNSAFRHLKMKVGCMQSAWQKNVMAIGLAHSFIEPIEATSLMVTQHSIKLFSQALVKLQNNEQPLALTEHVNQQLHQLVYGIKDYVVAHYATSQRTNSSYWLAATQLTHSSNALKSLLIAWLNGDDFDVYLSKHAQQQVYFRPSWYCLLGGMDFKSERCQQVFDPASTAINNAAKAYLNELCDQHCEPHAKQLHTMKNQYSTSAKVG

SEQ ID NO: 83354 - protein, 561 aa, Rhodobacteraceae bacterium
  misc_feature (1)..(561): tr|A0A2D5IYN0|A0A2D5IYN0_9RHOB Tryptophan halogenase OS =Rhodobacteraceae bacterium OX=1904441 GN=CML66_09745 P E=4 SV=1
MNNRLRKITIVGGGTAGWMTALILDMVFSRTSGPKDRPNICLIESPNIATVGVGEATVPRMPVTMRQAGISERDFFRETNASFKLGVKFCNWNKDAKGNRIDYVNPFAHGQMLEGLEAAEYFLRFGNGDRDFTQSVAPHDDLGRLCKGARMLGQPEFEQRFGYAYHLDAVKFAGMLARVCTRRGVEHIQDEVQSVELDEQGNVSHLMLERAGRHDIEMVMDCTGFRGLIINQALGEPFMDYSDYLPNDRAMALQVKHADPDKIESLTRSTALGAGWTWRVPLYDRVGTGYVFSSAHRTDDQAADEYLEWLGDSGKGLTPRVIPMRIGRVRNAWVKNCVAIGLAGGFIEPLESTAIHMVDHAVRWFAENLPTRDIEPSLRVGYNQRMNGLYDEVLDFICLHYRLGNRTDDQYWIDARTEMKIPDRLAENLELWQHRLPMEHDIAFATLFDYRVYQTVLLGKQVYDTGYGAGIRDRLRPLKKPIWFQYWKGAKADLAQILKTMPDHKTLLRDIRGELDKPAFGVAAPMRPPVAKPDTTSAPGAIQNMPNHAEIRSGVKDLQLF

SEQ ID NO: 83355 - protein, 516 aa, Caulobacter sp.
  misc_feature (1)..(516): tr|A0A2G5QSN6|A0A2G5QSN6_9CAUL Tryptophan halogenase OS =Caulobacter sp. FWC2 OX=69664 GN=CSW62_19130 PE=4 SV=1
MTNTHPNAIRKIVIVGGGSAGWISAAMLAHYFKDGGCAVELIESEEIGTIGVGESTIPPFLQLIASLGIDEREFIQATQASFKLGIRFEDWKRKGQHYYHPFGAIGGPIGPHEFYQCWLRAKANGHPSELQDFAPGTVMADQGKFMLPFKAQRSLIAGASYALHIDARLIAKFLRDFAETRGVKRTEGIVTDVVTHSDGSVAKVVMKNGQEVEGDLFIDCSGFRALLIGKTLDVPFNDWSDMLLCDRAVVVQTQNIGEPHPYTLSKAEDAGWRWRIPLQHRAGNGYVFSSRHLSDDEARATLVRNVQGPMLMNPMFIAFKTGMRQRLWDKNVVAVGLAGGFIEPLESTALHLIYRGMDFLLRFFPDRDFSPALAAEYNRRMTADYEEIRDFIVLHYCTTQRDDTPFWRDVRQAPISETLKARMALFKAHGVLREGVDEMFRNPSWQSVMEGMGVRPQRYQQLADTAPYEVITQTLDQSKPMLAAQVAGLPSHGEFLAANCPAPPPEPVAAPFKTVA

SEQ ID NO: 83356 - protein, 513 aa, Sphingosinicella sp.
  misc_feature (1)..(513): tr|A0A2P7QYW5|A0A2P7QYW5_9SPHN Tryptophan halogenase OS =Sphingosinicella sp. GL-C-18 OX=2116704 GN=C7I55_01890 PE=4 SV=1
MTPVQNIVIVGGGTAGWLTAGLIAAKHQERRPHGFTVTLVESPNVPTIGVGEGTWPTLRNSLRRIGVSETELFRQCDAAFKQGARFSRWTTGAEDDGYYHPLMLPQSFGQVNLAQHWLADPEGESFCDTVTPQGRLCDDGLGPKTIATPEYEAVANYAYHLDAGKFSHFLQRHCRDVLGVRHVLADVAQVSMAENGDIESLGTDQGETIAGDLFVDCTGFSALLIGKALHVPFRSCAGTLFCDSALAVQIPYEEPADPIACHTISTAQSAGWIWDIGLPTRRGVGHVFSSAHISPEDAERELRAYLGPRGDDLAVRRLSIRSGHREQFWKGNCVAAGLAAGFLEPLEASAIVLIELSAKMIADQLPPCREVMDVVARRFNETTLYRWGRIIDFLKLHYALTRRTDSDFWRDNVRPETIPERLRDLMELWRFQVPWNIDEFDRAEEVFPSASYQYVLYGMGHRTVLMPGTGDADAEAARRAKRENRAQRQRLLAGLPRHRELIAKIVAHGLQPV

SEQ ID NO: 83357 - protein, 527 aa, Rhodanobacter glycinis
  misc_feature (1)..(527): tr|A0A502C3F1|A0A502C3F1_9GAMM Tryptophan 7-halogenase OS=Rhodanobacter glycinis OX=582702 GN=EAH88_12865 PE=4 SV=1
MARIQKILVVGGGTAGWLTACYLAKALNSTKPESIQVELVESPNIGLLGVGEATFPSIRGTLAAIGLDERRFLVGATATFKQGIQYVNWVRPPGTPGPDRFFHPFSLPSQRAGSPELLPYWLLGGAPEGMPFADAVTMQASLVKRGRAPKRATDPDYQAPMNHAYHFDAACFATVLAEHGQGLGVRRHLATVERAELDESGAIARIVTKEIGELTADLYVDCTGLRGALIGNAMQSPFHSRRDVLFADRAVALQVPYPRPDASILPFTRATAQEAGWIWDIGLQKRRGIGYVYSSQHSGATRAEEVIRGYVGDAATELDALHIKFETGYRPEHWRRNCVAVGLAGGFVEPLESTGIALVELAAYLITHLLPGDVDDMERTARQFNQMMVARYERIIDFIKMHYCLTQRRDSAFWIDNTDLASIPQTLQDRLALWRHRPPHRLDFVTDLEMFMPASWQYVLYGMEFSTDLEPMRSAYPQMEAAQREFAMIQQMATHAQNDLPDHRALVEQLCREHLQRKMGRLAGADG

SEQ ID NO: 83358 - protein, 513 aa, Sphingomonas panacis
  misc_feature (1)..(513): tr|A0A1B3Z9Q5|A0A1B3Z9Q5_9SPHN Tryptophan halogenase OS =Sphingomonas panacis OX=1560345 GN=AWL63_09435 PE=4 SV =1
MQPIRNIVIVGGGTAGWLAAGVIAAKHQGRMPADFTVTLVESPTTPIIGVGEGTWPTLRTTLSKMGVSETDFFRECHASFKQGARFARWTTGEVDEGYYHPLMLPQGFQRVNMAAHWLADGHDQSFCDAVTPQGLLCDDGLAPKTIATPEFDAVANYAYHLDAGKFAGFLQRHCTAKLGVRHVLADVTSVNQAENGDITSVVTEQAGEIAGDLFVDCTGFAALLIGKALGVPFKSCADVLFCDTALAIQVPYESEDSPIASHTISTAQSAGWIWDIGLPSRRGTGHVYSSSHISDEDAERELRAYLGPVGATADVRKIKIRSGHRETFWKNNVVAVGLAAGFLEPLEASAIVLIEMSAKLIAEQMPVCREVMDIIAARFNATTHYRWGRIIDFLKLHYVLTKRTDSDFWRDNVRADTIPDRLRDLLTLWKYQPPWFHDEFDRVDEVFPAASYQYVLYGMQFGTEVSREALSAEARIAEQTRREAAVQTQRLRAGLPRHRDLIRKIIDHGLPAI

SEQ ID NO: 83359 - protein, 496 aa, Sphingosinicella sp.
  misc_feature (1)..(496): tr|A0A2P7QHY7|A0A2P7QHY7_9SPHN Tryptophan halogenase OS =Sphingosinicella sp. GL-C-18 OX=2116704 GN=C7I55_21180 PE=4 SV=1
MDGQEVRKVVIAGGGTAGWIAAAALSRQLGRLLDITLVESDEIGTVGVGESTIPTARSFNALLGLDEREFMRATQATFKLGIAFEDWARLGDRYLHSFGQIGTSTWIADFHHFWLEARARRIAGGLGDYCFELQAAEAGKFATGPDAAINYAYHLDATLYGRYLRERSERQGVSRVEGKIGQVEQDPESGFIRALVLESGARIEGDLFIDCTGFRGLLIEQTLKAGYEDWGQWLATDSALAVQTGSVGPALPYTRAIAHEAGWQWRIPLQHRVGNGLVYSSAHMDDDAAQALLMAKLEGDALTEPRVIRYRTGRRRKTWEKNCVALGLASGFVEPLESTSIHLIMIAVTRLMQMFPFSGISEPVVRRFNDQAQNELERIRDFIILHYKLTERDDSAFWRQCRDMDVPATLADRIGLFREAGFAYQASDDLFRVDSWVQVMLGQRLEPLGNHQVSRLMPPERMQQSLADLKSKIAAAVQRMPTHQDFIEQYCAPIPA

SEQ ID NO: 83360 - protein, 561 aa, Rhodobacteraceae bacterium
  misc_feature (1)..(561): tr|A0A2E3PLD8|A0A2E3PLD8_9RHOB Tryptophan halogenase OS =Rhodobacteraceae bacterium OX=1904441 GN=CML68_23085 P E=4 SV=1
MNNRLRKITIVGGGTAGWMTALILEMVLSRTSGPKDRPSICLIESPNIGTVGVGEATVPRMPVTLRQAGISEREFFRETNASFKLGVKFCNWNTDAKGNRIDYVNPFAHGQMLEGLEAAEYFLRFGNGERDFTQSVAPHDDLGRLCKGARLLGQPEFEQRFGYAYHLDAVKFAGMLTKVCTKRGVTHIQDEVQSVELDESGNVSHLMLERNGRHDIEMVVDCTGFRGLIINQTLGEPFMDYSDYLPNNRALALQVKHTDPEKIESLTRSTALGAGWTWRVPLFDRVGTGYVFSSAHRTDDQAADEYLEWLGDAGKGATPRVIPMRIGRVRNAWVKNCLAIGLAGGFIEPLESTAIHMVDHAVRWFAEHLPTRDIEPSLRNRYNRQMNKLYDEVLDFICLHYRLGNRTDDPYWIDARTQMKIPDRLAENLELWQHRLPMEHDIEFATLFDFRVYQTVLLGKQVYDTGYGPGIRDRLRPLKKPIWFQYWKGAKSDLAQVLKTMPDHKTLLRDIRGELQPNAFALTAGKKPPATQPGMAPMAGPAQSMPNFAEIESGKKDLQLF

SEQ ID NO: 83361 - protein, 548 aa, Rhodospirillaceae bacterium
  misc_feature (1)..(548): tr|A0A545T0Y5|A0A545T0Y5_9PROT Tryptophan 7-halogenase OS=Rhodospirillaceae bacterium R148 OX=2591009 GN=FKG95 _27420 PE=4 SV=1
MSDRVENVTIVGGGTAGWLTAMIINTFINTFREGPAVKVTLIESPKIPTVGVGEATVAGMPSLMQQLGIDEAELFRRCNASFKVSVRFGDWAVDGRGKPFAFYHPFNFPGTVGGYNPAYHFNRFGPYGGDPSITDNMTANSALIHARKGPRALNGENYEKSIGYAYHLDAGLFGEFMRDVALSRGVQHIRDDVVEVFQDETGAVSGLQLEKGGRHPVEFVVDCTGFKSLIMKEVLKEPFISYGDYLLNDRAIPVQLPHRDPTKIEPCTRSTALGAGWVWRVPLYSRVGTGYVFSSAFRSDDEARDEFFRHLRAVGDLPTGAPDPDVKVIKMRIGRSQRFWVKNCVAIGLSNGFIEPLEATAIYSVEMAARWLVGHFPDKKGSPALANRYNGLMTSLYEEIRDFISTHYHTSNRPDPFWKAARYDCRLSESLQERLELWKARLPEITDTQDQKLFNFWNYLYVLHPKGFFKDRHFPLEGSIRHEHWQAFGRRLEERKAELLRTMPDHYQLLANIRGDEPLQQALNLDGLAKPVFESRASVRPTISVPTA

SEQ ID NO: 83362 - protein, 489 aa, Sphingosinicella sp.
  misc_feature (1)..(489): tr|A0A2P7QSX7|A0A2P7QSX7_9SPHN Tryptophan halogenase OS =Sphingosinicella sp. GL-C-18 OX=2116704 GN=C7I55_11385 PE=4 SV=1
MSAAAIARLLGRTVAVTLVESDAIGTVGVGEATIPTIRDFNRLLGIDEEAFVGKTQGSFKLGIEFVDWLRPGHRYIHPFGTLGRDTQTIRFSQLWLKLVQEKADAAEDALGAYSASAIAARLGRFGRPEANPNHPLSTLSYAFHFDAGLYARYLRTWSEARGVGRVEGRIVAVDRGGESGFVRGVRLEDGSTISGDLFLDCSGFRSLLLGETMGEPFVDWSHWLPCDRAIALPCASAGDLLPYTRSTADAAGWRWRIPLQHRTGNGYVYSSAHLGDDEAHRRLFDTLDGAPQGEPRQLRFRAGHRRNLWSGNVIGIGLAGGFLEPLESTSIHLIQTAISRLMLLFPDKSCAGPERVEFNRQSVLEYAQIRDFLILHYKATERRDTEFWQQCAAMTLPDSLRHKIDLFRSKGRLFRFQEELFSEDSWLAVLIGQGIMPAGHDAVADTLSAAELRAQMTGLRQALHRAVEALPRHADFIARCCAAPRSAVS

SEQ ID NO: 83363 - protein, 550 aa, Cercospora beticola
  misc_feature (1)..(550): tr|A0A2G5I4V2|A0A2G5I4V2_CERBT Tryptophan 2-halogenase OS=Cercospora beticola OX=122368 GN=CB0940_02475 PE=4 S V=1
MSVPTRCSVLVIGGGPAGSYAASVLARESVDVVLLEADVFPRYHIGESMIASMRYFLRFIGLEEDFDKHGFTKKFGATFKITDKRAAYTDFSVSLGPEGHTWNVVRSEADEMIFRHAGKSGAQIFDGTKVNDITFVPYEQDGFTSDARVANPGRPVSASWSRKDGSGGSIEFDYLIDASGRAGIISTKYLKNRKMNEALKNIANWAYWKGAAPYAKGERNENSPFFEALKDGSGWCWAIPLHDGTLSIGIVARQDIFNAKKKAAGLPSEEFYRRSLKELCPEISELVKDAQIVSGIKQAADWSYSASAYAGPHFRLAGDAGCFIDPYFSSGVHLAFVSGLSAALTVQAARKGQCSELAAAKWHSGKVTEGYTRFLLVVMTVLKQVRQQSRALLAKEEEEGFERAFNFIQPVIQGTADAESSDAAIQRKAAAGVEFALGVNEISAAQQKAVLDKVQDAGHDVNGLEKLTDDEVEILKGIAGKQQALTLHASNIEALAGDTINGLAAVIERGKIGLRSASVLPEAEALHVLGVEAEERERMMNLNRTLAVEA

SEQ ID NO: 83364 - protein, 514 aa, Sphingobium fuliginis
  misc_feature (1)..(514): tr|A0A292ZL59|A0A292ZL59_SPHSA Tryptophan halogenase, p utative OS=Sphingobium fuliginis (strain ATCC 27551) OX =336203 GN=SFOMI_4187 PE=4 SV=1
MVHPVRNIVIVGGGTAGWLTAGVIAARHRSRIGNGFTVTLVESPNTPIIGVGEGTWPTLRTTLSRMGISETDLFRECDAAFKQGARFARWTTGTPDDGYYHPLMLPQNFGQVNLAPHWLAGEGDESFCDSVCSQGRICDDGLAPKTIATAEYDALANYAYHLDAGKFAPFLQRHCCEKLGVRHVLADVEQVLMKEDGDIRAIRTTQAGEIEGDLFVDCTGFKALLIEGAMKVPFRDCNDVLFCDTALAMQVPYERPDSPMASHTISTAQSAGWIWDIGLPTRRGIGHVYSSNHISDEEAERELRAYIGPLAEGLGARKIAIRSGHRETFWKGNCVAVGLAAGFLEPLEASAIVLIELSAKIIAEQMPACREVMDIIASRFNATTHYRWGRIIDFLKLHYVLTKRTDSDFWRDNVREETIPDRLKELMLLWRYQSPWFLDEFDRVEEVFPAASYQYVLYGMGFRTEVDRPALARDAHLADRARRENTAMTAKLRAGLPRHRDLIDKIVAHGLQPV

SEQ ID NO: 83365 - protein, 514 aa, Sphingomonas faeni
  misc_feature (1)..(514): tr|A0A2T5U736|A0A2T5U736_9SPHN Tryptophan halogenase OS =Sphingomonas faeni OX=185950 GN=C8J25_10348 PE=4 SV=1
MTSDGAGRITKVVIVGGGTAGWMTAAALSRLVPSGVSVTLVESEEIGTVGVGEATIPSLLDYNRMLGIDEDAFVRATGATFKLGIEFRDWARLGDAYLHPFGTHGRDIGGVSFHQLWLRQAALDTATDGAGAGPIGDYCLSSVAARRGRFTRPSANPQSVLSTLSYAFHFDAGLYARFLRDLAEADGVVRVEGRVVDVERNAGTGFVEAVRLAGDRRIEGELFIDCSGFRSLLLGGALDVPFTSWREWLPCDRAWAVPSARRGALIPYTRATADVAGWRWRIPLQHRVGNGYVYSSAHVDDDAAKQALLAGLDGEAMGEPRQLRFEAGRRDRLWDRNCVAIGLSGGFLEPLESTSIHLIQSGITRLMSLFPDLGFSAVEIDEYNRVMLREYEQVRDFIILHYHATERSDSAFWEHCRTMALPASLEAKLALWSDKARVFREQGELFTPDSWIAVLLGQGIRPVSFDPLASALPADESARFLAHVRDMIDKTAAAMPTHEAFIAQNCAARTHQAA

SEQ ID NO: 83366 - protein, 522 aa, Alteromonas sp.
  misc_feature (1)..(522): tr|A0A4Q8TV87|A0A4Q8TV87_9ALTE Tryptophan 7-halogenase OS=Alteromonas sp. KUL42 OX=2480797 GN=EYR97_17995 PE=4 SV=1
MQQANSSIRRIVVVGGGAAGWLTASIIAVTHKHDDNISITLVESPDISILGVGEGTWPTMRSTLLKIGISEEVFLTQCNASFKQGTSFYNWQSDKGENQYYHPFSLPFRYFESDIAAWWQGHAAEQDFAHAVCSQAALCDNHLAPKQRQTPPYAGIANYGYHLDANKFATLLQQHATTKLGVQHIVDHVDNVVGSPSTPIASIVGRQYGAIEGDLFIDCTGFAARLIGQHYGVPLTPCSHVLANDSAVAIQAPYVDSSVDIASTTHSTAQDNGWIWDIGLPSRKGVGYVYSSAHCSEDEARATLDNYLKHDKKTTDVDVSEARKITFTPGYRKTLWVENCVAIGTSAGFLEPLEASALVMIELSATHIAKQLPRTLCECKAAGRQFNNAFEKKWERIVDFLKLHYVLSEREASAYWRDMRDQRGCSTQLQDWLTLWKSRSPISSDFELREELFPAASYLFVLYGMGFRSHYNDTYQANLHTAEQRQAYAKHVQSIQQQLNGLPTNRQFLNQLAQSNCTQMHF

SEQ ID NO: 83367 - protein, 500 aa, Alteromonas sp.
  misc_feature (1)..(500): tr|A0A4P6AFB3|A0A4P6AFB3_9ALTE Tryptophan 7-halogenase OS=Alteromonas sp. KUL42 OX=2480797 GN=EYR97_16460 PE=4 SV=1
MQAVNKVVILGGGSAGWMTAAALATVLKNNYAEIVLIESQNIGTVSVGEATIPQIALFNSILGIDENEFVRETQATFKLGIEFANWKQKGHTYMHPFGNFGADMDAIQFHHYWLKMFQKGQAEDLDAYSLAAVAAKQGRFMRPQNRGNSPLSKIAYAFHFDATLYAKYLRKIAVSRGVTRIEAKMEDVCIRDTDGFIDSLVLDNGQVINGDLFIDCSGFNGLLIDKTLKSGFEDWSHWLPCDSAIAMPCSAKHDVYPYTVSTAQEAGWTWRIPLQHRIGNGYVFPSQFVDTQKAIDVLTQQMENAPLNEPNILRWKTGMRKEFWVKNCIAIGLSAGFIEPLESTGLHLIQAGIAKLLGMFPYQGCEQVEIDAYNEQTRLEMERIRDFIILHYAVTEREDTEFWRYCKNMPVPDYLRQKIDLYKANGRIYRHGTELFNETSWLAVMNGQGIMPKGYHPLVDTLSEAEIYSRLVHIKQVIDNSVNVMPTQAAFIDRYCKAIS

SEQ ID NO: 83368 - protein, 517 aa, Pseudoalteromonas atlantica
  misc_feature (1)..(517): tr|Q15SS6|Q15SS6_PSEA6 Tryptophan halogenase OS=Pseudoa lteromonas atlantica (strain T6c / ATCC BAA-1087) OX=34 2610 GN=Patl_2546 PE=4 SV=1
MAQAIKSVVIVGGGTAGWITAGTIAAKLQSEYADGFSITLVESPDVKPIGVGEGTWPTMRRTLKAMGVRETDFIRQCNVSFKQGAKFAKWVTGAEDDFYYHPLVLPQDFDSTNLARHWMERPFEQSFSQAVSPQEAVCELGLAPKSIATAEYTSIINYAYHLDAGRFSAFLQQHCTEKLNVRHVLDNVTRINAAENNDIASVSTTANGDIEGDLFIDCTGFKSLLLKEHFKVGFKSCKDVLFVDQALAVHVPYESEDAPIASHTISTGQRAGWVWDIGLQNRRGVGHVYSSAHTNEAQASEELLNYIAQTGGHVNEADIRKIPLNPGHREKFWHQNCVAIGLSAGFLEPLEASSLLLVEISASMIADQFPATRDAMEIVAKRFNSTFLYRWERIIDFLKLHYMLSKRDDSSFWIDNRDPASIPQSLQDQLTLWQYQPPWHNDFEHAVEVFPAASYQYVLYGMGFNTQPNPLGMSDSYKQRATNFRQKNTQQIQQMLKTLPSNRALINKIYQYGLQKV

SEQ ID NO: 83369 - protein, 496 aa, Shewanella bicestrii
  misc_feature (1)..(496): tr|A0A220ULC5|A0A220ULC5_9GAMM Tryptophan halogenase OS =Shewanella bicestrii OX=2018305 GN=CF168_09255 PE=4 SV =1
MGQIKDIVIVGGGTSGWMTAALLAKLFKQTLNITLVESADIGTIGVGEATIPPLQLFNSVLGIPENEFIKATHATFKLGIQFEHWGSQGDSYMHAFGNFGKDIGFTQFHHYWLSTKPQTITAFWDYSLNYQAAINHKFQAIEHIPHSPLAGITHAYHFDAACYAQLLRQYSEKAGVKRIEGKVETVNRSENGHIASLSLISGVEVQGDFFIDCSGFAALLIGKTLNVGYESYQDWLLCDSAFAVPSEKVAEIPPYTRAIAHEAGWQWRIPLQHRTGNGIVYSSRYMSDDEAKAKLLSTLDGKPLCEPKKISFIPGRRLKQWQHNCVAIGLSSGFLEPLESTSIHLVQSAIIRLTKLFPHQGVEQANVDEFNRQSQLEFEQIRDFIILHYHLNQRSVSNQDSLWHACQRMQVPESLQQKITLFNQTGSIFRHKEELFTEMAWAQVMLGQGIIPQDFNPLAHTIEQQDLAEFFSNIRAIINNSVSKMPTHEQYLAQLV

SEQ ID NO: 83370 - protein, 517 aa, Sphingobium fuliginis
  misc_feature (1)..(517): tr|A0A292ZJH0|A0A292ZJH0_SPHSA Tryptophan halogenase, p utative OS=Sphingobium fuliginis (strain ATCC 27551) OX =336203 GN=SFOMI_4135 PE=4 SV=1
MTADIPSPGRIVIVGGGTAGWLSAATFSRTLGMRDVTLVESSEIGIIGVGEGTFPTIRSTLAGLGVGEGEFLRSADATFKQGVLFDGWATGADSYFHPFNMPIGGEDEALLPHWLAMEGQRASWADSVTVQERVIRAGRAPKRVQDPDFSGPMNYAYHFDAARFADYLRTISLAAGVRRIEGMVAHVEQREDGDIAALTLRDGRRVEGDIFIDCSGFRALLIGETLGSGFVGCGDTLFNDRALAMQVPHDRPDAPIRPYTLATAHEAGWTWDIGLPERRGIGYVYSSRHCSDDEAEAVLRRYVGPGGEALTPRQLRFATGYRERQWIGNCIAIGLSAGFFEPLESTGIMLIEAALRMVGDFLLPAGSASDTAARNAAARRFNRLMTARFERIVRFLKLHYCITRRTDTAYWRDNADPASIPADLQDLLAQWRHRPPSRFDFTVDLETFLPPSYHYILYGMGFETRLAGGIGRYPGGQEARAAFARVAGASGAAVSHLPDHRALLDHLRGRQPSARVS

SEQ ID NO: 83371 - protein, 538 aa, Burkholderia sp.
  misc_feature (1)..(538): tr|A0A1B4G442|A0A1B4G442_9BURK Tryptophan halogenase OS =Burkholderia sp. BDU8 OX=1385592 GN=WS71_26325 PE=4 SV =1
MSNPIKNIVIVGGGTAGWMAASYLVRALQQQANITLIESAAIPRIGVGEATIPSLQKVFFDFLGIPEREWIPQVNGAFKAAIKFVNWRKSPDRSRDDYFYHLFGSVPNCDGVPLTHYWLRKREQGFQQPMEYACYPQPGALDGKLAPCLPDGTRQMSHAWHFDAHLVADFLKRWAIERGVNRVVDEVVDVHLNDRGYISSLSTKEGRTLEADLFIDCSGMRGLLINQALKEPFIDMSDYLLCDSAVASAVPNADARVGIEPYTSAIAMNSGWTWKIPMLGRFGSGYVFSSKFTSRDQATADFLDLWGLSDKQPLNQIKFRVGRNGRAWVNNCVSIGLSSCFLEPLESTGIYFIYAALYQLVKHFPDTSFDPRLTDAFNAEIVHMFDDCRDFVQAHYFTTSREDTPFWRANRHDLRLSDAIKEKVQRYKAGLPLTTTSFDDSTYYETFDYEFKNFWLNGNYYCIFAGLGMLPDRSLPLLRHRPESIDKAEAMFARIRREAERLRTSLPTNYDYLRSLREGDAGLSRSQPGPTLAAPEIL

SEQ ID NO: 83372 - protein, 507 aa, Halioglobus sp.
  misc_feature (1)..(507): tr|A0A2E0YW51|A0A2E0YW51_9GAMM Uncharacterized protein OS=Halioglobus sp. OX=2024834 GN=CME59_07400 PE=4 SV=1
MTTQDVLVLGGGTAGFLAALALKKELPPHIGVRVLHSSKIGTIGVGEGSLRQLPEFLHSYLGIDARRFFAEVQPTWKLGIRFRWGAGADFDYSFTPQVCVTHPHPDLSRPLGFYCFDNLREHSVTSVLMDNEHAFLRAPDGSPLMEGNYGYHMDNRKLAAFLERYALEQGIELLDDEVREVSADADGVRTLALASGQSVRADLFVDCSGFRSLLLGDTLGEPFVSYRSSLFCDRAVIGGWQRTQEPVRPYTVSETMDCGWCWQIEHEDRINRGYVYASDFISDEDAEAEFRAKNPHITDTAMVRFRSGRYRRAWVKNVVAIGNSAGFVEPLEATAIAAICSAAKMLAQTLAQAGDCAVRDSNRDIFNRYNERSWDTIADFLAVHYRFNTRMDNAFWRSCVNEVDLRGAQPIVDYYRDNGPCNHWQLILEDPLCRFRLDGYYTLLLGQGVAHAQLDTPSARERDAFAQLQKATVQYAARGVGVTEALGAVRGEHWQWRPQHFGVNPGI

SEQ ID NO: 83373 - protein, 533 aa, Alteromonas sp.
  misc_feature (1)..(533): tr|A0A4P6AHN2|A0A4P6AHN2_9ALTE Tryptophan 7-halogenase OS=Alteromonas sp. KUL42 OX=2480797 GN=EYR97_18720 PE=4 SV=1
MTQLNEERSVKHIVVVGGGSAGWLAAGVLASKLKSTFQITLIESPSVSSIGVGEGSWPSLRDTLIDIGIEEKHFLTACKASFKQGSTFVNWRKPEQTNSLQQEHVYHHPFTVPVGYNELDIHSCWQAFASNEKYENAFSLQAAMCEANKAPKQVSTPDYAHVLNYGYHFDATALATLLHAHCTEKLNVVYKQAHITSVNNDSEGYIASVTTEDGIQINGDLFIDCSGSQGILIDKHYNVPWHSIEDIMLNNRAIAVQAPYANNDDVISSATIATAQSCGWTWDIGLQHRRGVGLVYSDHFTTQQQAEETLLAHVSKRLPKEHVRELDVRSIRFTPGYREQFWVKNCLSLGMSSGFIEPLEASAIAMVELGIRMLCDAFPQNFTHMKWVEERYNRRFHYRWQRVIDFLKLHYVLSNNNTPYWLAQRDSSTIPDSLAQLLDVWRFQSPSRLDLIENEEIFPSASYQYVLYGMEFQTLPSALQITRSSAQKAQDIRQKMQQTKTAYLQGLPTNRDLLSQIIASKNKEQTHDLIGFR

SEQ ID NO: 83374 - protein, 521 aa, Alteromonas sp.
  misc_feature (1)..(521): tr|A0A4P6AJR8|A0A4P6AJR8_9ALTE Tryptophan 7-halogenase OS=Alteromonas sp. KUL17 OX=2480796 GN=KUL49_02395 PE=4 SV=1
MESTHTSSEHNLRNIVILGGGTAGWITAGVIAATHRSNNSTNPSIKITLIEAPSIPIAGVGEGTWPSMRRTLKLLGVSETDFINQCNVTFKQGAKFRHWVTGRDDDEYYHPLVAPNHYNNINFAESFATQKFPFSFDKAVCTQGHICDLNLAPKNISHREYEGLLNYAYHLDANAFALFLKKHCTETLGVTHIEAEIERVEGEPDSPIKALVTNSSNRIEGDLFIDCSGFKSHLIGGHFNVEYQSCKDILFCDKAITTHLAYDNNAPLLPYTLSSATDAGWIWDIGLTNRRGVGHVYSSEFIDQKQAKSRLEQYAKRKLRDDEVRTFDIAPGHRKEFWKQNCVAVGLSAGFLEPLEASSLVLVEMAAKFIAEQLPRNTNVMGVIANRFNEVFRYRWSQIIDFLKLHYVLSERKEAFWQQHRNQETWTKSLSENLLLWRYHSPWHNDFTRTEEVFPSASYQYVLYGMQPNYSFINTAAQCQHKHYIELFAQDIELQLHQQKAQLYDQRTLLSNVRKFGFALG

SEQ ID NO: 83375 - protein, 540 aa, Streptomyces sp.
  misc_feature (1)..(540): tr|A0A255PWD3|A0A255PWD3_9ACTN Tryptophan halogenase OS =Streptomyces sp. FBKL.4005 OX=2015515 GN=CFC35_02005 P E=4 SV=1
MSDNIEHIVILGGGTAGWMSAAYLGKALQGAVRITVLEAPAIPKIGVGEATVPNLQRVFFDFLGIPEDEWMRECNASFKMAVKFINWRTPGEGSPTARTLNGRPDHFHHPFGILPQEDGVPITHHWSDRAARGETDLPFDYSCFVDPVLMDRNLAPRHPDGRPATRYAWHFDAHLVADYLRRWSVEKQQVQHVQDRMVDVQLDQNGFIRSLRTESGRTIEGDLFIDCSGFRGALINQVMEEPFLDQSDHLLCDSALACPVPHDDAAHGIEPYTSSIAMKSGWAWKTPLLGRFGTGYVYSSAFATEDEAVRDFTALWGLSADQEFNRIRFRVGRNRRSWVKNCVSIGLSSCFLEPLESTGLYFTYAAIYQLAKHFPDKSFSPIFADRFNKEIAAMFDESRDFLQAHFYFSPRTDTEFWRANKELTLGEEIREKAEMYRKGIPVNLPTADESTYYGNFEAEFRNFWTNGSYYCIFAGLGMLPERPIAPLAYGRDGRASAQRMFDGVAQRQRELVETLPTMYDYLRDFHGAPAGPDDRDRHGR

SEQ ID NO: 83376 - protein, 503 aa, Pseudoalteromonas sp.
  misc_feature (1)..(503): tr|A0A3D5EPK5|A0A3D5EPK5_PSEAS Tryptophan 7-halogenase OS=Pseudoalteromonas sp. OX=53249 GN=DG048_24665 PE=4 S V=1
MIKKIAIVGGGTAGWLAANHLGHALLHSGIEITLIESPNIASIGVGEGTVPSMRNSLQKFGISESDFINECDVTFKQSIKFVNWLDKHKHGANFYHHLFDHPHIFGEQLTQQWLADGNGNDYAEFVSKQHVCCETNLAPKTIATPQYAGINGYAYHFDAKKFASFLGSHATQHFSVKHLFAEIKDITCDQQGFITHLIDSEGNALEFDFIIDCSGFSAAFIGQKLGIGFVDKSDSLLTDTAITLQVPTQSDDEIPPYTIATAHQAGWIWDIALTERRGVGFVYSSKYMSDEQAHEKLHRYLGNKFEHLTPRKIPMKVGHREKMWHKNCVAIGLSQGFVEPLEATAILIADFSAGLLAKRFPRSRDDIKLVADDYNQHVNYVWQQTFDFIKMHYCISDRTDSAFWRDNKKTDQLSEKLKNNLARWQRFTPVREDFASKFDLFDLENYLYVLFGMHYVPVKQQSKQNDNQHVAEFKQQRVKQLLNELPKHRELLDKIKKFGLQKN

SEQ ID NO: 83377 - protein, 537 aa, Shewanella livingstonensis
  misc_feature (1)..(537): tr|A0A3G8LW96|A0A3G8LW96_9GAMM Tryptophan 7-halogenase OS=Shewanella livingstonensis OX=150120 GN=EGC82_14765 PE=4 SV=1
MQKPITQIVIVGGGTAGWITAGLLAAEHNVDKGVLAHAPKLNITLIESPDVATIGVGEGTWPSMRSTLSKIGIDENEFIRRCDASFKQGSRFIHWRNDPAKGNQADTIAQSDTIAQSNRYLHPFSLPHGHQELDLCPFWLPHADQVSFAEAVSSQEILSQLGLAPKSISSAQYHFQNNYGYHLDAGKFSQLLSEHCTQKLGVTHIRDHVCQIINNDQGDIDKLITTEHGEISGQLFIDCTGTKSLLLGEHLQVPFLCQKSVLFNDSALAVQVPYSNENSPIASCTHSTAQQNGWIWDIGLPTRKGVGYVYSSSHTNDIDAEQILINYLGVDAASADKLQPRKLSFNPGYRAKCWQNNCIAIGMAAGFIEPLEASALALIEWTASTIAQQLPPNRQTMDTIAARVNQRYQWHWQQIIDFLKLHYVISQREVDSYWRDHRESNSIPDSLQAMLELWRYQVPSQFDISYKEALFPAASFQYVLYGMGFNTQLPTHVKPSMQQAAQRLFNDNQQRTQALSKSLPSNRALLDKVAQYGFPKL

SEQ ID NO: 83378 - protein, 499 aa, Pseudoalteromonas atlantica
  misc_feature (1)..(499): tr|Q15XQ3|Q15XQ3_PSEA6 Tryptophan halogenase OS=Pseudoa lteromonas atlantica (strain T6c / ATCC BAA-1087) OX=34 2610 GN=Patl_0807 PE=4 SV=1
MKKTTITILGGGTAGWMSAAILAKGLPNDRFHIRLVESPDIPSVGVGEASIPPLTLLLKYLELDEHRFLMRLNGTYKYGIQFEDWSEIGNRYMHAFGDIGTPFNALSFPQAWLKYAGPLNLTDLGSYIPSAVAAKAGKFHPPLAIPKGANPQHFYPLSLLFYAYQFDASKLADLLKQYAQEHLVEHIEGTVSRVNNKRNGDISSLSLRDGRNVSGEYFVDCSGMYGRLNKVHYGCKFNDWSHELPCDAAIAVQTKRDTPAAAYTKSIAMNAGWRWEIPLRDRTGNGYVFSSRFLTDEQALQELKKALAGEQLITEPKILHFKTGCLTTPWHRNSIAIGLASGFLEPLESTSIHLIHKYALELKDALISGQDRAHEAKRFNRMFYHEAVSIKDFLLTHYHVSKRTDTPFWQHCKTMPIPQTLQHYLAEFNRTGYINLPESSLFPFQSWFQVLVGQGYLGDYSAFSDKQFDAQQAEPFFNNVKLAIQSEVARLAPHQSYLQ

SEQ ID NO: 83379 - protein, 557 aa, Shewanella livingstonensis
  misc_feature (1)..(557): tr|A0A3G8LV45|A0A3G8LV45_9GAMM Tryptophan 7-halogenase OS=Shewanella livingstonensis OX=150120 GN=EGC82_11095 PE=4 SV=1
MQTKAMQVVIVGGGTAGWLTAAIIAAHARQHSPKHESSVCVTLIESPDIPTIGVGEGTWPSMRETLRKIGIKETDFMTQCDASFKQASEFRQWRVAPSVSNDRYLHPFSLPSISGNSLLLSAYTTANNVNLMNSSFCDNFCYQQGLATHSLAPKQITTPQYQFISNYGYHLDAAKFSAMLKQHCCNELGVRFISANVVKVNNHANHDIASVVIDKASDSNDINAVTEVKGDLFIDCSGSKALLIGEHYGIELNSQKHILFNDSALAVQIPYEHADSPIYSSTVSTAQDVGWVWDIGLQSRRGVGFVYASDYLNHASALQRLQGYLRDNSTLNNQQIEQLSVKKLSFTPGYRQTFWHKNCVAIGMAAGFIEPLEASALALIEQSATMVAEKLPLNQTVMPIVAQQFNKRMQQHWQHIISFLKLHYVLSSRDDSEYWIHNRHPSSIPENLSALLLLWQHQPPSHYDIDYANPLFPIASYQYVLYGMQQSANVNRLHNSDPVHTCDSQTSINNIDEITKYLTPLAEHIDINKQKQQRLLSAMPTNRALLTKMAQYGLSPV

SEQ ID NO: 83380 - protein, 527 aa, Mastigocladus laminosus
  misc_feature (1)..(527): tr|A0A4D9CBM5|A0A4D9CBM5_MASLA Tryptophan 7-halogenase OS=Mastigocladus laminosus UU774 OX=1594576 GN=BLD44_02 7715 PE=4 SV=1
MNLENKIQSVIIVGGGTTGWMAAAYLAKALQGSVAITLIESDRIPTVGVGEATVPSIRPDLFDFLEIPESEWMPQCNATFKIGIKYVNWAYPPSVTKNNTFYHIFGESKECDGIPLTHYWLKKRLSGYECPMSFCCYSSAELCENYKSPKFFDGGIGTNYAYHFDASLVAQFLTKWSTKQGVVRVIDQVSDVVLDNTGAISCLKTQKGNIYKADLYLDCSGFQGLLINQVLKEPFISYSDNLLCDSAVATAIPTNDNDNNFRPYTTATALSCGWVWEIPLYGRIGTGYVYSQQFLSPEEAEKEFRAFHGSAAKDIRVKHLNMRVGRTQRAWVKNCISLGLASGFIEPLESTGIYFIYAALKQLLRYFPDKSMNSVLRDKYNERIAYMIDDVRDFIVLHYCTTSREDTLFWKTNKFDIKIPESLKTLLEIYKAGSPINIPYTDEHGYNQVFDAGFDRFWTNSNYLAILTGMNYLPNSVLPILHHKQHSLEKAEIIFKSVQTQTEILLKELPSHYSYIKNLHSAGLLCK

SEQ ID NO: 83381 - protein, 508 aa, Sphingomonas parapaucimobilis
  misc_feature (1)..(508): tr|A0A0A1W2K8|A0A0A1W2K8_9SPHN Putative tryptophan halo genase OS=Sphingomonas parapaucimobilis NBRC 15100 OX=1 219049 GN=SP5_008_00040 PE=4 SV=1
MDDRPTADHIAQRIVIVGGGTAGWMAAAALARFVPATTRITLIESDAIGTVGVGEATIPGIRLFNQMLGLDEAEFLRATNGSFKLGIRFEGWSGEGSGYLHAFGSIGRGLGLVPFHHYWLRGGGAANPASLWGHMASAQAAMAGRFAPDPGRPDLPSGLAWAYHFDASLYAALLRRHAEAAGVERVEGRIASVARDMAGRIDHVVLDGGEAHAGGLFIDCTGFRALLIGETLAEPFDDWSQLLPCDRALAVAGERTSPLPPYTRAIAHGAGWRWRIPLQHRTGNGLVYDSRHLSDDEAADRLLTALNGEAMGELRRLRFTTGRRARAWVGNCVALGLAAGFLEPLESTSIHLIQSGLARLLDYWPGQTLQPVEVDAYNRETAAEWLAIRDFLILHYHANARSEPFWAERRAVPLPDSLAARIALFRANGRFRREGDELFAEPAWVQVMIGQGIVPAGYQPLADTLSADELDDFLSLTRRHAAQVAARLPTHDAFLAAHCAAPAPEVFA

SEQ ID NO: 83382 - protein, 390 aa, Corallococcus sp.
  misc_feature (1)..(390): tr|A0A3A8GFB5|A0A3A8GFB5_9DELT Tryptophan halogenase OS =Corallococcus sp. AB011P OX=2316735 GN=D7X30_18390 PE= 4 SV=1
MSEDSCDVAVIGGGPAGAAMAVALRRKAPSLSVTLVERTTYDAPRLGETLPPDVRLALSRLGVWDGFLRDGHLASRGTSSCWGRAEPGFHDTMMSPWGSAWHLDRARFDERLSLEAFRQGARVQRATTLVDSESLGRNGYRLRLAHEAADPSTLRARFVVDATGGKATFASARGARRLVSDRCFAVYGAFQLPGDAAFPTHALVEACPEGWWYSALLPRGRVVVALVGDGDSLRGLRWATPASWMNLLRQAPATRARLDVCDFAGEALVAVPVLVGQLDRPRGEQWLAVGDAACTYDPLSSQGITKALDSALLAADALERCLRGDADALQDYESTLNTRFQDHQRTRAAYYRQEQRWPQAPFWKNRWEALPAPAAPPAQLLRPHSTEVNP

SEQ ID NO: 83383 - protein, 495 aa, Pseudoalteromonas sp.
  misc_feature (1)..(495): tr|A0A2E4CJS5|A0A2E4CJS5_PSEAS Tryptophan halogenase OS =Pseudoalteromonas sp. OX=53249 GN=CMK68_05430 PE=4 SV= 1
  misc_feature (23)..(23): Xaa can be any naturally occurring amino acid
  misc_feature (347)..(347): Xaa can be any naturally occurring amino acid
  misc_feature (417)..(417): Xaa can be any naturally occurring amino acid
MRHQSIKQVIIAGGGTAGWMTAXALAKLLNKDIKVSLVESDDIGTVGVGEATIPPIRTFHKLLGIDEKLFMKATQATFKLGISFEDWHKPQSDYIHSFGMTGKECWAGEFHHFWLHAKKMGNKDDFGDYCYELQAAKQGKFGISPHNPINYAFHMDASRYAAFLREFAENLGVKRFEGKIERVNKHADNGFIKSLLLDDGTEITGDFFIDCTGFKGLLIEQALHTGYEDWSHLLPCDSAVAVQTKGTPEIAPYTRSIAHQSGWQWQIPLQNRVGNGLVYCSRYLSDHDATQLLLNNLSSETLTEPKIIKFKTGRRRKGWNKNCLALGLASGFLEPLESTSIHLIMTXIIRFMRLFPFTGITQHAIDEYNKQLQSELESIRDFIVLHYKVTDRDDSEFWQHCKTMETPKSLAHKVALXKETGRVFLDDGDIFRVDSWVQVMLGQGIMPEQYHHVASLMNDQELSRFMQGIKQQIAQRLQQLPTHRAFIEQYCPVDT

SEQ ID NO: 83384 - protein, 513 aa, Sphingomonas faeni
  misc_feature (1)..(513): tr|A0A2T5UBI6|A0A2T5UBI6_9SPHN Tryptophan halogenase OS =Sphingomonas faeni OX=185950 GN=C8J25_101353 PE=4 SV=1
MHEIQNIVIVGGGTAGWLTAGVIAAKHQARRQHGFTVTLVESPNVPTIGVGEGTWPTLRSTLKKMGVSETELFRQCDASFKQGARFNRWTTGAPDDGYYHPLMLPQHFGQVNLAPHWLADEGSATFCDTVTPQGRICDEGLGPKTIATPEYDGHANYAYHLDAGKFSHFLQRHCCDTLGVRHVKADVTEVRLDESGDIASLDTEQGVSIAGDLFIDCTGFAALLIGGAMKVPFRSCTDILFCDTALAMQVPYDVPDAPIASHTISTAQSAGWIWDIGLPTRRGVGHVFSSSHISADAAEQELRDYIGPAARDLTSRRLAIRAGHREQFWVRNCVAVGLAAGFLEPLEASAIVLIELSAKMIAEQMPACREVMDVVAHRFNDTAHYRWGRIIDFLKLHYALTKRTDTAFWRDNVRPESIPDRLAGLMELWRFQSPWVHDEFDRAEEVFPSASYQYVLYGMGARTAVMPGSIDDDLALARRARHDNQVQTQRLVSSLPGHRELIDRIKRHGLQPI

SEQ ID NO: 83385 - protein, 499 aa, Pseudoalteromonas sp.; identical to SEQ ID NO: 82701
  misc_feature (1)..(499): tr|A0A3D4AWC3|A0A3D4AWC3_PSEAS Tryptophan 7-halogenase OS=Pseudoalteromonas sp. OX=53249 GN=DIT74_14230 PE=4 S V=1

SEQ ID NO: 83386 - protein, 510 aa, Sphingomonas faeni
  misc_feature (1)..(510): tr|A0A2T5U934|A0A2T5U934_9SPHN 2-polyprenyl-6-methoxyph enol hydroxylase-like FAD-dependent oxidoreductase OS=S phingomonas faeni OX=185950 GN=C8J25_102111 PE=4 SV=1
MIDGLGQHIVILGGGTAGWMTACLIAHRWRDRAVRVTLVESPEIGIVGVGEGSTPQLKHFFDTLGIAGADWMPACDATYKLGIGFEGWSDREGYDQYFHPFPTELDGHAAPQFFYNTRARRTGRDVEAHPDQFLLPARLAAQNRAPQPAANFPFEVSYGYHFDAYKVGAFLATHATEMLGVVHLQRRIASVERASTGEITALIDTDGERIAGDFFIDASGFRSTIFSALDVPFVSYADALFNDRAVVMPTAHPPGAPIPSQTRATALSAGWAWHIPLTSRNGNGYVYSSRHLTEAQAEAELRAHIGTDAGEARHLKMRVGRVRDSWSHNALAVGLAQGFLEPLEATALHLVIATVEAFLDMVDQGGATEAVRAAFNTRIAARYDGVRDYIVAHYRLNQRHDDPTGYWAEARRVEALSDDLKMLMSTWFTGGDMVAAIDRAGLGRYYSAISWHCLFAGYGTFPNAARLSPPGADIDPIDLPKIDNFLTRCASNFGSHASRLRDLADHKDTV

SEQ ID NO: 83387 - protein, 516 aa, Sphingomonas faeni
  misc_feature (1)..(516): tr|A0A2T5U735|A0A2T5U735_9SPHN Glycine/D-amino acid oxi dase-like deaminating enzyme OS=Sphingomonas faeni OX=1 85950 GN=C8J25_10347 PE=4 SV=1
MGKRILIVGGGTAGWLTAGYLAKRLGADLPGGVAITLVESQDIGILGVGEGTFPTIRRTLATIGIDEADLIRRCGATFKQGAKFVHWRHAPGQGATDHYSHPFQVADSSDGLDLLPYWLLGLGGTENWDEVSNPQKKASDRHRAPKLPTNPDYVGPLNYAFHFDAVALAGLLREQGVKNGVRHLTDTVSEVLLDAEGAIGGVRTEQNGVLDADLYIDCTGFRAELIGKAMKVPYRSCRDVLFCNRAIAAQLPYARPDDPIASYTISTAQKNGWIWDIGLDRRRGIGHVYSSDHGDDETAERVLRGYLGAAGEKADVRHFKFDAGYREVNWYKNCVAVGLSSGFFEPLEATGIAFAEVSAGMIANLFPWGGDYETSARQFNANMLRRYERALDFIKLHYCISERRDTAFWRDNVADASVPDSLLELLDRWRFRPPNELDIDGQVDIFTEASWQYVLYGMGWKTDLSAKAGALRYHEDARRAFAEVERQARYAIANLPSNRDLVAYAQTHSFGARAAA

SEQ ID NO: 83388 - protein, 499 aa, Sphingomonas haloaromaticamans
  misc_feature (1)..(499): tr|A0A1S1HCN9|A0A1S1HCN9_9SPHN Flavin-dependent tryptop han halogenase PrnA OS=Sphingomonas haloaromaticamans O X=653954 GN=prnA_1 PE=4 SV=1
MSAPIETVVIVGSDTTLWLAAAVLRNALRPAGLAVEAVELPATLRPADVHATLPPLEALHAQLRIDEKALLRSTGGAFSLGQNFTDTSGAATAFLHAYGSCGAPIEDREFFAYWLKARRLGLGVPLDDFSLTASAARHGRLMIPDDETDRYGRADYGYHLPALAYARSLKMLAIRDGVRAHETSALGIALDPDRGTIKAVELEGGRRIEGQLFIDATADARLIGRALGVRVESWRDHFPVDRVLAATGPRFASIPIYAEVRASEGGWTALHPTQAATHVVHAYASASASDEEAAVAAARAAGMPIADIAIRSPEPGRRESAWAGNCVAIGAAACTFDPVHGVDLHAAQLGLVHLLSFFPAGTDHAAERAEYNRIMRSGLCRLRDFQSAHYALNRYGDAPFWTTAREAVLPAELAQDIATFRARGLVAPREDESFSPDSWRALFVGHGTVPESYIPAVDTVPADMVKEHFRRMLGFVRDQVMRQPTHDQYLDGIGGASRG

SEQ ID NO: 83389 - protein, 498 aa, Pseudoalteromonas luteoviolacea
  misc_feature (1)..(498): tr|A0A167E3C6|A0A167E3C6_9GAMM Uncharacterized protein OS=Pseudoalteromonas luteoviolacea H33 OX=1365251 GN=N4 76_16725 PE=4 SV=1
MTERIQNVLIVGGGTAGWLSASLLKRVLKDLVNITLIESDDIGTVGVGEASIPPMVNFNAALGLDERTFIEQTQATYKLGIEFEGWGHQDSRYMHAFGEQGKSFPFCDFFQVWLKAKQQGLTDSLAEYSLNTQAAKANRFAHLQHIPNTQLQGLTYAYHFDAGLYAKLLSKQSQSQGVRRVEGRITEVKTDPNTGNIAAVILANGERYSADLYLDCSGLKSLLIDQTMNVGFEDWSHWLPCDSAWALPSEQLDGEIKPYTRAIAKQAGWQWQIPLQHRVGNGYVFSSKFISEQDAKEALLQSLPSRPLAEPKLIKFKTGMRRKQWQGNVFAVGLSSGFLEPLESTSIHLIQTSILRLIRHFPFDAIKDSAIENANMEFANEMEQVRDFIILHYKLTERDDSRFWQWCKNMSIPPSLHRKMALFEETGHFAAKTDDLFQNVAWQQVMVGQGLVPKTYHPLAEQFDGEHLKSLLDSLKVLLQTTVNKLPSHQAFIDKMTK

SEQ ID NO: 83390 - protein, 502 aa, Unknown
  misc_feature (1)..(502): tr|A0A2E5AV29|A0A2E5AV29_9BACT Uncharacterized protein OS=bacterium OX=1869227 GN=CL660_05620 PE=4 SV=1
MKIVIVGGGTSGLVAAALMNNFWKDKVDITLYYNPETQSIGVGEGTTPSFVDVFQETLGYNTEDVIRELDATIKLGVLFKDWIPDTEYYHGFVEVANDETDTRSEILTSNVSSFYSLVNDCYNGGINFNEATNTVPANSELHRHDFAFHITTDKLCSFLFKYLEGRVNIVEDIISEVKTDGKNIQSIICEKSGEVSADLFVDASGLNAMLLSKLDSAEWVDLSEHLPIDRAIPQKVKNNSGYIPSYTLANATKNGWIWQIPSQTEYGTGYLYSSKFTTDEEAKHDFNNWLQKNHSEKLNEEPKILKWKSGYWKKPWIGNCVAVGLAGGFIEPLEALTHQYLTFMIEVFLSVNSTLKMLDYNRDRFNMCQNKRLFDYTQFLNLHYCTNRTDSKFWKYMKDHKTDWVRTLEEKCKHEFLDVFDTDDMLDFWGNDNYIQIMKGINMINKDAIKEYMWSRKNPELLYDDARQQHDYIVDEKSKTVMVDHKEYLETIKKSSHLPYLV

SEQ ID NO: 83391 - protein, 614 aa, Mastigocladus laminosus
  misc_feature (1)..(614): tr|A0A4D9C9Z7|A0A4D9C9Z7_MASLA Tryptophan halogenase OS =Mastigocladus laminosus UU774 OX=1594576 GN=BLD44_0272 70 PE=4 SV=1
MYTTQSLKYDVVILGTSLAGLSQARHLMLNIPNIKVALVDLPAQELDNEPAINDSTIEIADLFFCKELGLHDYLIENHILRSTLSFHWPKRPDQTTTLDDYYHIWCNRQLSIASYQINRTKFEQDLLLMNEAMGATVYKGSVVDVELTEGDAVNTVKIQVADQQIALKADHVIDGAGRQFIIGRKTDNLLLGPQNLCGLNNGTAWLRVKNVNRTIFDDGYNPNETSTSRYYSTNHYFGYGHWSWMTPTDIPSRELSVGIVHYNEVLPAQGIDTQEKFVAFMQANHNLVYQLIESGEIIDFHYSPRIAYKSKKLFSEDNWYVIGNSASFFGGFYCIETTLLAFAVESVTEIIRAKIAGEADVDKKRSAYNEFNLYYHNLINHVYFDHGKQLGHASIMSWRIYLDWMWWFSIHVPTYAGKWHLNPEFTDMYLKLSYKNIGGFWIDLFKEFQQLVNQGTNIGLMDLYRADQLLGGYHTPKYFDNFLENTKFEPLRCNVFAGVKVNFFNAAIWYALFQWKSFGLAGCLNPRHLYHFFRLLSVSGQWAFLELIYRFQLKKGLSDNSSIEKMRQEFKNYQYRPELQPWISEESTQEKQLSQGELNSSLDEAKICTTSAKI

SEQ ID NO: 83392 - protein, 526 aa, Rhodanobacter sp.
  misc_feature (1)..(526): tr|I4WBG6|I4WBG6_9GAMM Tryptophan halogenase OS=Rhodano bacter sp. 115 OX=1162282 GN=UU5_06223 PE=4 SV=1
MARLQKILVVGGGTAGWLTACYLAKSLNSVAPGSIKVELVESPRIGLLGVGEATFPSIRGTLSAIGLDERRFLAGSTGTFKQGIRYRHWVRPQGAPGASDFFHPFSMPSQRTGGPELLPYWLLGAAPAGVPFADAVSMQKRLVDGNRAPKRAKDADFHGPMNYAYHFDAARVAEVLAEHGQTELGVVRHLATVERAELDAQGAIARIVTREAGELSADLYVDCTGLRGYLIDGAMKSPFRSRRDVLFVDRAVAMQVPYPQPDSPIPCYTMATAQEAGWIWDIGLQQRRGCGYVYSSQHSDATRAEAVFRQYLGAAAEGVTAQHIRFETGYRPEHWRKNCVAVGLAGGFVEPLESTGIALVELGAYLLTHLLPGDVDDMERTARYYNEMVVARYDRIIDFIKMHYCLSQRRDTAFWHDNANPDSIPDTLKDRLALWKHRPPHRLDFVGDLEMFLVSSWQYVLYGMEFKTDLEPMRSVYTRVDDARREFAMIQQMAGHALGDLPGHRELVEQMVREYRQRNEVAEAVA

SEQ ID NO: 83393 - protein, 498 aa, Shewanella livingstonensis
  misc_feature (1)..(498): tr|A0A3G8LUE5|A0A3G8LUE5_9GAMM Tryptophan 7-halogenase OS=Shewanella livingstonensis OX=150120 GN=EGC82_11105 PE=4 SV=1
MHNNNIKKVVIAGGGTAGWMAAAAFSKLFGHSLSVTIVESDLIPTVGVGEATIPTLHIFHDLLKINEAEFMAATNATFKLGISFENWRDVSQDYLHSFGYIGQGCWAAGFQHFWLKGMQQGIAKDIGEYCLEHLACRQGKFAVLPNQDRNYAYHTDAGLYAKFLRKLSEQHGAERIEGMIDKVNVNQQNGFIDSLTLADGTVIEGDLFIDCTGFKGLLIEQALHTGYENWNHILPCDSAIAVQTKQTKALVPYTRSIAHDSGWQWQIPLQNRMGNGLVFCSQYMSDDQAKALLLANIEGELINEPRVIKFQTGTRRKHWNKNCVAVGLASGFIEPLESTSIHLIQQSIVRLMQNLPTKAMDAGVVDNFNQKMRTEINNIRDFIVLHYHVTERTDSEFWRYCKNMEVPNSLQQRIDLFNQSGQVYKNDLELFGESSWLQVMIGQGLMPQSYHPIVDNMPDDQLAKFLDSIETGVKRRADNLPNHVDFINHYCRAPNSLV

SEQ ID NO: 83394 - protein, 495 aa, Pseudoalteromonas sp.
  misc_feature (1)..(495): tr|A0A2D5SXP2|A0A2D5SXP2_PSEAS Tryptophan halogenase OS =Pseudoalteromonas sp. OX=53249 GN=CMK64_00775 PE=4 SV= 1
MKLEKIVILGGGTAGWMTAAALSKHFANKVEITLVESEQIGTVGVGEATIPTIRRFYQQLGLSDKTVIAKTNATFKFGIEFVDWQKSGHSFIHPFGLFGQGTPSLDFHHYWLRARTHDSTIDLQDYSLGVQLAKNNKVLMPNKPQNQLEVFDWALHFDAALFARLMRETAETLGVNRVEAKVKSVQKSKEDIGALILESGELISGDLFIDCSGFKAELIGKALEVDYLDWSNYLLCDSAIAVQTEKTGEISNKTISKAKSAGWQWRIPLTTRMGNGYVYSSKHINDEDAELEFLSSLEGDMTTALRKFKFTPGRRANAWQSNCVSIGLSSGFLEPLESTSIALIETAIAKLIDLIPDNQISSDTAKKFNYATALEYERVRDFIIMHYVLSQRDDTQFWLDCRNVSIPETLKSKLQNYEQNAELKPLPWDIFGKDSWLALLDGLGMYPRKYNERANNMPIEYLQKHLAFMKQEIDNLVGKGVEHERFLREEINLNE

SEQ ID NO: 83395 - protein, 424 aa, Shewanella loihica
  misc_feature (1)..(424): tr|A3QIT9|A3QIT9_SHELP Tryptophan halogenase OS=Shewane lla loihica (strain ATCC BAA-1088 / PV-4) OX=323850 GN= Shew_3521 PE=4 SV=1
MTPFAQTAAQTDHYDVIVIGAGPSGSVAASLLHQQGKRVLVLEKQHFPRFSIGESLLPCCMQVIAEANMLDAVNQAGYQFKNGAAFNANGRSTYFDFTDKFTPGPGTTFQVERGDFDKLLADTAASQGVEIRYGQRVDAVDLSHNPRLTISDEQGASYELSADYLLDASGFGRVLPRLLDLERPSNLPSRTAIFTHIQDNIDSVDMGDYHFDRNKILISVHPDNRDIWYWLIPFSNGRCSLGVVGEPHLLGQDADLEATNLEATLIRLVREEPRLKQLLSRAEIIRKPAKLAGYSANVSTLASDKFALLGNAGEFLDPVFSSGVTIAMQSASIAAKCVVKQLNGESVDWQTEYAQPLMRGVDTFRTYVQAWYDGRFQDVIFYQDPNPKIKQMICSILAGYAWDESNPFVAESERRLNMVVELCR

SEQ ID NO: 83396 - protein, 520 aa, Pseudoalteromonas atlantica
  misc_feature (1)..(520): tr|Q15QQ6|Q15QQ6_PSEA6 Tryptophan halogenase OS=Pseudoa lteromonas atlantica (strain T6c / ATCC BAA-1087) OX=34 2610 GN=Patl_3276 PE=4 SV=1
MSNRSIKNIVVVGGGSAGWLTAGIIAAEHQCGSQQSKICVSLIESPDVDIIGVGEGTWPSMRNSLQRMGISETEFIRHCGAAFKQGSKFVGWKNGADNDFYYHPFVIPSGYGKANQYSAWKTYASEHPFADVVCAQSHICQAGLAPKQNATPEYAGVLNYGYHLDAGKFGQLIQQHCVAKLGVRHIQDHVEGVISHDDGDIKALQTRQSGELTGDLFIDCTGARSLLLGQHFNVPFIDKSDVLFNNSAMALHVPYTNDDDPIVSATVSTAQEAGWIWDIGLQDRRGVGYTYSSKHTDDEQAQRTLKAYVAQSIGPERANALKARKINFEPGHRSHFWHKNCVAVGLSAGFLEPLEASALALVELSATAIAENLPVTTDHMKVTQDNFNRRFLLHWENIVEFLKLHYVLSARSEPYWHQMRAPESISPRLSSLLTQWRFQPPSRNDFVQNEIMFPSASYQYVLYGMGFETLNDVSSREFDTPQSAVKHLQENQQHVRKLMAGLKSNRQLLSHVKQYGFQKV

SEQ ID NO: 83397 - protein, 530 aa, Umezawaea tangerina
  misc_feature (1)..(530): tr|A0A2T0SVJ0|A0A2T0SVJ0_9PSEU Tryptophan halogenase OS =Umezawaea tangerina OX=84725 GN=CLV43_110229 PE=4 SV=1
MEDRRIKNVVVLGGGTAGWMTASYLGKALGPAVKITVLEAPSVPRIGVGEATVPNLHKVFFDFLGLAEEDWMRECNASFKMGIKFTNWRTGGRGDANPRPYRDTTDHYYHLFGLLPNHENEPLSAYWSHKRLTGQTTEAFDYACYREPPILDAKLAPRFADGTKWTNYAWHFDAALVAEFLRKFATNKQGAIHIQDEFIDADVDTRGHVTALNTKGGRKIEGDFFVDCSGFRALLINGVMREPFLDMSDHLLNDRAVATQVPHDDEANGVEPFTGSIAMTNGWTWKIPMLGRFGTGHVYSSRFTTQDAATQEFCDMWGLDPSEQKLNHIKFRVGRNRRTWVRNVAAIGLSSCFLEPLESTGIYFITAALYQLAKHFPDKNFDPIFADRFNAEINTMFDDSRDFLQAHFSLAARNDTEFWRACKDLVLADDIKEKIRMYKAGLPINMPVTDESTYYGNFDAEFRNFWTNASYYCVFTGLGFDPQQTLTKLTHHPSMLDSAEHVFADIKRKQAELLKTLPTTYDYLKQLHAK

SEQ ID NO: 83398 - protein, 527 aa, Pseudoalteromonas atlantica
  misc_feature (1)..(527): tr|Q15PK1|Q15PK1_PSEA6 Tryptophan halogenase OS=Pseudoa lteromonas atlantica (strain T6c / ATCC BAA-1087) OX=34 2610 GN=Patl_3685 PE=4 SV=1
MLECNTQCSTLVTTRINSFMSKAVKKIVIVGGGTAGWLTAAIVAAQHRTDDNNGLQILLVESSDIPTVGVGEGTWPTMKNTLQQIGLKESEVFARCHAGFKQGGKFVDWVHGNGDFYYHPFTVPLGYGRIDLAPYVENIENYAVESNFQHHVCEAGLAPRSMAEAEYKGQCNYAYHLDAGEFAEVLKGHCKNALNVTQIIGTVDKVNLTEDGAIGSITLTNHKQIEGDLFVDCTGFASLLLGQALDVPFISADKVLFNDSALALHMPYEDPTSPIASHTIATGQNAGWIWDIGLTHRRGVGHVYSSQYLSDDEAEANLRRYLGPRSDDIPVRKISFKSGHRAQVWKKNCVAVGMAAGFVEPLEATAIMLVEISARFIADNIPPDTRLTPIIEKRFNQQMAYRWSRIIDFLKLHYMLTKRPEPYWQAHTDPDSIPESLQEDLALWKFRGPITADFDAAIELFPAASYQYVLYGMGFKPDFSRQPHLYNEQGNAQKIIHRNQQLTQQLLQTLPPHREYIERWLSTQSMR

SEQ ID NO: 83399 - protein, 510 aa, Pseudoxanthomonas sp.
  misc_feature (1)..(510): tr|A0A1H7RN05|A0A1H7RN05_9GAMM Tryptophan halogenase OS =Pseudoxanthomonas sp. GM95 OX=1881043 GN=SAMN05428989_ 2065 PE=4 SV=1
MSVSSLRNIVIVGGGTAGWMAAAALSRVLGPTYNVTLIESEQIGTVGVGEATVPHIKAFNNLLGLNEAEFVRQTQGTFKLGIEFVDWRRKGASYIHGFGTEIGHMLGLLPFHQYWIKAHHAGWAKPLGQYTLNTIAAPRGRFMTSASDVPPQSPLANIAYAYHFDAALYARFLRGYSEQRGVRRVEGIVESVQQHSESGDVLSVRLQDGIEITGDLFIDCSGFRGLLIEQTLHTGYHDYTRWLPCDRALAVPCEKVGPPMPYTRATAREAGWQWRIPLQHRTGNGYVYSSAHLSDDEAAATLLANLDGKALGDPRPLRFTTGRRKACWNKNVVALGLASGFMEPLESTSIHLIQSGISKLLELFPREGISPVLVQRYNDRLAFEFERIRDFLVLHYNATERDDTSFWRQCRDMAIPAELQDTLDLFRDSGRFYRNGDEMFAEISWVQVMIGQGIVPRGYHPLVDQVPEADLRGFMASVEKTLSHCADAMPGHQQFIDRYCAAAPMQMSAA

SEQ ID NO: 83400 - protein, 510 aa, Streptomyces rimosus
  misc_feature (1)..(510): tr|A0A0M9XEE8|A0A0M9XEE8_STRRM Tryptophan halogenase OS =Streptomyces rimosus subsp. rimosus OX=132474 GN=ADK43 _23050 PE=4 SV=1
MGERAVANSANAGNPANPETYDVVIVGGGPAGSTLGALVARQGHRVLILEKEFFPRYQIGESLLPSTVHGVCRLTGVADDLAAAGFTRKRGGTFRWGATPEPWTFSFSVSEHMAGPTSYAYQVERSKFDEILLRHAGRCGAEVREGCAAADVIADEERVRGVRYTDADGAEREAYGTFVIDASGNKSRLFQRVGGQRTYSEFFRSLALFGYFEGGKRLPEPNSGNILSVAFDSGWFWYIPLSPTLTSVGAVVRREMAEKIQGDQEEALRALIAECPLISEYLANARRVTTGQYGQLRVRKDYSYHQTTFSRPGMLLVGDAACFVDPVFSSGVHLATYSGLLAARSINSVLAGLVDEAVSLREFEARYRREYSVFYEFLLSFYEMHHSEQSYFWRAKKVTHHKRSEMEAFVDLVGGVSSGETALTDADAMAERLRADSAEFAGAVDQLAHSEDGSMLPLFKSSVVSQVTREGSQVQMRALLGADAEPETPLLPGGLVSSPDGMFWLPASSG

SEQ ID NO: 83401 - protein, 550 aa, Unknown
  misc_feature (1)..(550): tr|A0A2E5AS20|A0A2E5AS20_9BACT Uncharacterized protein OS=bacterium OX=1869227 GN=CL660_00195 PE=4 SV=1
MQVNNVVIVGGGTSGWMTCAALLKLCPWVNVVLVESAKSKPVGVGESTLGHFNKYLRALDLEDSDWMPYCNATYKNSIQFTDFADIGKTFQYPFGEYNFNHGNINGIEDWFDLKKKYPEEFTNDDEGISFAKYWNTVNTELALKNKESDAFGDFNPGSDRAYHLDAEKFGEWLRINICEPWAEVDRFTHVIGDVRGMVKDVKRGGSPAASNREIKQLAVRLSEDKKTVGVQGDLFIDCTGFKAALIEGIHNINFKPFKDILANDKAFFARVPYNNQEERVKLMHNVTDCTAAQNGWFWNIPLWNRIGVGYCWSSRFALETETRAEFERYIEEEFGADLEEVEIKLIDIKHGYREKAWELNCVAIGLSYGFVEPLESTGLLTTHENVLRLVDILNRRRGYITNIERQWFNYNVQREVIGFSKFVAMHYALSTRTDNPYWRWCTQRNDYMFDEFDGNIKVNDNFERMGSILDLVEPLSSNMNGMNYVAAGMGLNLGNRIQLNNQEPFDILDQVKADRKEWFAEVEKYVEGCPSHYQYLLDNVYGGVDDVQLP

SEQ ID NO: 83402 - protein, 492 aa, Alteromonadales bacterium
  misc_feature (1)..(492): tr|A0A2N0WQ54|A0A2N0WQ54_9GAMM Tryptophan halogenase OS =Alteromonadales bacterium alter-6D02 OX=2058087 GN=CW7 48_10045 PE=4 SV=1
MMSKKITIVGGGTAGWMSALIFNHLWQDKGFKIELIESSEISTVGVGEGSTPALKVFFDKLGIDEHEWMSQCSATYKCGITFKNWSTIPDFNSYHHPFPNELDNRYLSTFTQHCQRRLQGENVFAHPDEFFLATQLSQQSLSPIAQHSFPFEQTYGYHFDATLLGQFLAKKAQQRGIIHTKATIEHVSLNPTNGNIKTLHTSDGQAIDGDLFVDCSGFISLLMTKALGVDFHSYQELLFNDKAIAIPTSLEQPISSQTVSTALNNGWAWKIPLTNRQGNGYVYSSSYCDSDQAETELRAHLGILDCDIEARHLSMKVGRLTKHWHKNCLAVGLSQGFIEPLEATALLLIQQTAAIFAQYWEKSEWQDSQQQAFNQRINDLFDGVKDYIVAHYKTNTRNDTQYWRDNQLGLDKISPSLQHILQCWQQGGDLSKELKRQNIEQYYPNMSWYCLLAGMGIFPNQQSLRDARPNIELATIQDFFKRCALNFPTHQP

SEQ ID NO: 83403 - protein, 520 aa, Xanthomonas campestris
  misc_feature (1)..(520): tr|B0RXY9|B0RXY9_XANCB Putative tryptophan halogenase O S=Xanthomonas campestris pv. campestris (strain B100) O X=509169 GN=XCCB100_4156 PE=4 SV=1
MHAPAPSESQRLVRRVVIAGGGTAGWMAAAALSKLLGRQLQITLVESDEIGTVGVGEATIPSLVTFHRLLEIDEAQFMAATQATFKVGIAFEHWRDVDRHYIHSFGHTGTDHWSAGFQHFWLKAHARGVARDFGDYCLELRAAQEGRFAHLPNGGMNYAYHLDAGLYARFLRRFSEGFGVQRIEGRIGSVQTDAHSGDIAALVLDDGTRIEGDLFLDCTGFRALLIGQTLGVGSEDWSRWLFADSALAVQTESVGAPVTFTRARADRAGWMWRIPLQHRVGNGIVYSSRYTDQDSAAQVLEHNLQGRALTTPRALRFTPNQRHRVWEKNCVALGLASGFLEPIESTNIHLIQRGIVRLLQTFPQVIDPVDIAEYNRQAAEEIAHIRDFVILHYHATDRRDTAFWRDCASMEIPDSLRHRMELFRQSGRVFHQGNELFAENSWIQVMLGQGIVPRHHHPVADLMGDAELSQFLEGIRQRVEATLARLPPHAEFLRRYCPAPAPPAPMPQPAPGTPLAAPAA

SEQ ID NO: 83404 - protein, 497 aa, Pseudoalteromonas sp.
  misc_feature (1)..(497): tr|A0A2E2M0P0|A0A2E2M0P0_PSEAS Tryptophan 7-halogenase OS=Pseudoalteromonas sp. OX=53249 GN=CMK69_11940 PE=4 S V=1
MKPIKHVVIAGGGTAGWIAAALLNKVLGKVINITLIESTHIGTVGVGEATIPPIMQLNNALGINEQHFINATNATIKLGIEFENWKSSAHSYMHAFGTLGKNFPFCDFYNFWLKGQTQGCKDDFWDFSLNYQAAKNNKFAPLNTISNTSLPGLSYAYHFDASLYAEFLKHLATERGVKHLDAKINEVMQCPTSGNIQSLTLDDGSSISGDLFLDCTGLRALLIEQTLNTGYVDWSHYLPCDSAIAVQTASNDELKPYTRSIAHSAGWQWQIPLQHRMGNGLVYCSRHISDDDAKQLLLNNLPAEPITEPRLIKFKTGRRLKQWHKNVVAIGLSSGFLEPLESTSIHLIQSAVTRLIKLFPRHGVSDALVTEFNKQSITEIEHIRDFIILHYKLTEREDTPFWRQCKQMEIPQSLAHKMDLFKQTGKVVRENDELFAEVAWQQVMIGQGLLPDDYGALADSLTNEQLAELFSNLKTLINSTVEQLPSHTVFLSSLKPK

SEQ ID NO: 83405 - protein, 477 aa, Streptomyces sp.
  misc_feature (1)..(477): tr|A0A429C0A4|A0A429C0A4_9ACTN Tryptophan halogenase OS =Streptomyces sp. WAC 05977 OX=2203208 GN=DMC63_19745 P E=4 SV=1
MSSPQYDVIVVGGGPAGSTVSTLVSKAGHRVLLLEKEKFPRYQIGESLLPATVHGVIPILGVEKEVAEAGFTIKRGGTFKWGKRPEPWTFEFAVSSKMPGPTSFAYQVERMKFDDILLRNARKHGVEVREESSVVKAITDETGRVRGVHYKDSDGKVHEVFARYVVDSSGNTSRLFKASGAERHYSPFFRNLALFTYYEGAGRLPEPNAGNIFSVAFEHGWFWFIPLRPNLTSVGAVVHQDSAELVQGDPDEAMRRFIDACPRIKDILGDAKRITEGPYGSYRVRKDWSYCNSRFSGPGMVLVGDSACFVDPVFSSGVHLATYGGLLAARSINGCLAGTVDEDAAFAEFEKRYRREYGLFHEFLIGFYDMNKSEDSYFWQARKVSESASNDVEAFVELVGGVASNDLRLTADDLAATVESVEHKPGGAANGTVLTRMLKAGAGLQGRALLGSRSGEGAALEPGGLRASDDGLSWVRS

SEQ ID NO: 83406 - protein, 507 aa, Shewanella livingstonensis
  misc_feature (1)..(507): tr|A0A3G8LQE1|A0A3G8LQE1_9GAMM Tryptophan 7-halogenase OS=Shewanella livingstonensis OX=150120 GN=EGC82_00935 PE=4 SV=1
MAKAIKKIIIVGGGTAGWLTAAIIASHHKSHTSHDLKIILVESSDIPTVGVGEGTWPTMKNTLQQIGLSESEVFKACNATFKQGGKFVNWVHGNGDFYYHPFTVPLGYGRLDLAPYIDNIKDYAQQTNFQHAICESGLAPRSMAEGEYQGTCNYAYHLDAGAFADLLKQHCKSKLAVEHVIGTVEQAHVDNQGNISHISITNQNSIDGDLFVDCSGFASLLLGKTLNVPFVKLDHVLFNDRAIAMQVPYSNPHSPIASHTIATAQDSGWIWDIGLTHRRGVGHVYSSRFMTDEQAEANLRRYIGPQAEGLSVKKISYQSGHRERYWQNNCVAVGMAAGFVEPLEATAIMLVEISARYIADNLPVNDTIMALTAKRFNQQMTYRWGRIVDFLKLHYMLTKRPEPYWQAHCNPDSIPQSLQDDLSIWAYRGPTSKDFNGPNELFPAASYQYVLYGMEFSPDYSQHAHLYQQHAQASQILNRNVQLTQQMLNTLPPHRDFIEQWLTHSQQ

SEQ ID NO: 83407 - protein, 507 aa, Shewanella livingstonensis
  misc_feature (1)..(507): tr|A0A3G8LVY0|A0A3G8LVY0_9GAMM Tryptophan 7-halogenase OS=Shewanella livingstonensis OX=150120 GN=EGC82_12745 PE=4 SV=1
MDQTIIKNIVIVGGGTSGWMTAAMLAKLFKTQLNITLIESDTIGTIGVGEATIPPLQIFNSVLGISESDFIKATQATYKLGIKFENWHQQGDAYMHAFGNVGRDLGFTSFHHYWLSAQANCSQQNQSSFNANDFWQYSLNYQAAKHNKFQPIQSIAQAQMSGITHAYHFDASLYANLLRQYSIQRGVTRIEGTITSTQLTNDGSIDSVTFQNGRCISGDLFIDCSGFSALLIEKALGVEYQNWQHWLPCDSAYAVPCESTSPLTPYTKATAHDAGWQWRIPLQHRTGNGIVYSSKHMSDEQAKQHLLANLDGKPLAEPRKITFTTGRRVKQWHKNCVAIGLSSGFLEPLESTSLHLVQSAIIRLTKLFPRNGIQAQHIDEFNRQSQTEFEQIRDFIILHYHLNAKQSAGGEHGLWQQCRDMDIPASLQRKIDLFSTTATVFRHQDELFTEAAWIQVMLGQGIIPLDYHPLTQAVSQVDLTDYLSNIRKVIATTVNQMPTHEAYIKKC

SEQ ID NO: 83408 - protein, 510 aa, Massilia sp.
  misc_feature (1)..(510): tr|A0A0L6VY16|A0A0L6VY16_9BURK Tryptophan halogenase OS =Massilia sp. WF1 OX=1406431 GN=AB595_22500 PE=4 SV=1
MKNETLTPLKNIVIVGGGTAGWMTAASLSRLLQNRYAIRLIESDEISTVGVGESTIPMIRLFNTALGINEDEFMRETRATFKLGIEFEDWGRLGERYMHGFGTFGQPLWTLEFFQYWLRAWQMGKAPDLERYSLNRMAAKAGKFMRPSTDMPNSPLADIPYAFHLDAGLYARYLRNYAEHHGVVRTEGKVVDVRQRADGFIDSVVMENGETIAGDLFIDCSGFRALLIEQTLKTGFEDWSHWLPCDRAWAVPCELAGDLPPYTRASARPAGWQWRIGLQHRTGNGHVYASRFMSDDEAAAILMRNLDGKALADPKMLRFTAGKRKKTWNKNVVAIGLSSGFLEPLESTSIHLVQSTVSRLVGFFPDAGFNQADIDEFNAQCDFEVERIRDFIILHYHATERNDTPFWDHCRTMEIPETLRRKLELYKSHGRVVRENNELFAEVGWQQVLHGQGVRAQGHHPLAGLLDEKELQDFLGNIEQVIGKCVDVMPAHKDFIAAIVAAGRPGTARR

SEQ ID NO: 83409 - protein, 531 aa, Pseudoalteromonas atlantica
  misc_feature (1)..(531): tr|Q15UF6|Q15UF6_PSEA6 Tryptophan halogenase OS=Pseudoa lteromonas atlantica (strain T6c / ATCC BAA-1087) OX=34 2610 GN=Patl_1964 PE=4 SV=1
MQQSNPIKHVVIVGGGTAGWLTAGLLAARLSSRINNDELTITLCESPDMPTIGVGEGSWPTLRSTLHTIGISETDFIRQCNVSFKQGSRFMHWDNEIASQYDHPFDVPEQANQGAQAQHWLYTNKHVPFSHAYCLQSALANQHLAPKLITIAEYSGFANYGYHLDAGLFATLLRQHCVNHLQVKHIFAKVKHVIQESNGDISGLQVVEAEGETEAIPTNNGALSHLTGDLFIDCTGFSALLLGQTLGVENTSVEDVLFANNAIATHVPYATDQDPIESFTLSTAQDNGWIWDIGLPNRRGVGYVYSDRYCDDESAKDALLQYIRRRHKDTDSLTFKHIRFTPGYKQQFWKNNCVAIGLSAGFIEPLEASAIVLVEMSANMLAEQLPVTRQSMDIVAERFNQTFTYRWQRIIDFLKLHYVLSKRTSAFWQDNRAERSIPASLKKLLLMWRHKVPDFADFPARDEVFQAASYQFVLYGAGFKTKLLCTPDPRILEASEQLLSSIQGFTAQLSNKAISNRALINKIHQFGLQKF

SEQ ID NO: 83410 - protein, 511 aa, Shewanella bicestrii
  misc_feature (1)..(511): tr|A0A220UJQ0|A0A220UJQ0_9GAMM Tryptophan halogenase OS =Shewanella bicestrii OX=2018305 GN=CF168_05240 PE=4 SV =1
MKIKRIAIIGGGTAGWLAANHLGAELCHDPEIEITLIESLDVPTIGVGEGSVPYLAKGLKRFGISEAEMLLTCDATFKQGIKFVNWLDPERHGEYHYYHSFDTPYPAGVDVSNYWLANAADRPFDDVGIQARICELGLSPKRKGSGDYEGALSYAYHFNALKFAGLLANNAKSRFNVKHQFATIKGAEICQSGRITHLVTADDASLAFDFYVDCSGFASILIDKTLKVPFVSKANELLTDTVLVQQVALGGDEEINPYTTATAHKAGWIWDIPLTTRRGTGFVYSSRHMSDEEALGLYADYLSIDKAQFNPRKIPMKVGYRETFWHQNCVALGLAQGFVEPLEATSILVSDFSAELLARNFPRHLEDIDVLTPHYNQVTTYVWERVVDFIKLHYCVSDRTDSDFWLDNKKSETISEELHQRLARFALRPPHASDFFGRFELFDHKNFLYVLYGMKFNTVATVLSAQEVQHCDALMKGNDQLVVKAASMLLKHRDWLEGLKQAFEQARSTKV

SEQ ID NO: 83411 - protein, 506 aa, Alteromonas sp.
  misc_feature (1)..(506): tr|A0A4V2I415|A0A4V2I415_9ALTE Tryptophan 7-halogenase OS=Alteromonas sp. KUL17 OX=2480796 GN=KUL49_04345 PE=4 SV=1
MQDPHNNPVKRVVIAGGGTAGWLAASLMKKVLGKAVDITLVESEAIGTVGVGEATIPPIRLVNQVLGIDEAQFLHDTKATIKLAIRFENWKAKGESYYHTFGAPGKSMAFCHFHHYWVKARQQGLKDDLWDFDLNYHAAEAGRFAQINAKAPVVELPFAYHFDASLYAQYLRKLSENMGVVRKESKISRVQRFTHSGFIQALHLESGDVVEGDLFVDCTGFKGLLIEEALGAGYDDWSHLLPCDSAIAVPSERHEKTAPYTRSIAHDAGWQWRIPLQHRNGNGHVYSSRYISDDQACDTLLSNLDTKPLGDPKLIKFTTGRRRKQWYKNVVAVGLSSGFLEPLESTSIHLIQSAIVRLIQLFPHNGFAPSLETEYNKQSELEFEQIRDFLVLHYTVNERTDSVFFNDMRNITLPDSLAHKIALFKESGNLLREQNDLFLESSWLQVLYGQGITPKDYHGLVNSVPEVQLNQMLTRLLEIKKEPIAKLPTHDEYINGMVAKYKRAMS

SEQ ID NO: 83412 - protein, 388 aa, Nonomuraea sp.
  misc_feature (1)..(388): tr|A0A5D0QQD6|A0A5D0QQD6_9ACTN Tryptophan 7-halogenase OS=Nonomuraea sp. PA05 OX=2604466 GN=FXF51_00890 PE=4 S V=1
MTAQDAGVQEVDVIVVGGGPSGSTLASLVAMQDHRVLLLEKETFPRYQIGESLLPSTVHGVCRLIGVTDELARAGFTVKRGGTLRWGANPKPWTFLFSVSPKMAGSTSFAYQVERMKFDKILLDRARELGVRVREQCSVTDVLTAPDGRVHGVRYTGPDGAETEVHAKYVVDASGNRSRIHNKVGGTRKYSEFFRSLALFGYFEGGKRLPAPNSGNILSAAFESGWFWYIPLSDTLTSVGAVVARDMAHRIQGDPENALKTLIQECPEVSELLDGATRVTTGEYGQIRVRKDYSYHQTRFWRPGMVLVGDAACFVDPVFSSGVHLATYSALLAARSINSVLAGRIGEQAAFDEFERRYRRGYGPRAGAPGGNRPSEAAPPRLRRLEHS

SEQ ID NO: 83413 - protein, 521 aa, Xanthomonas arboricola
  misc_feature (1)..(521): tr|A0A2S7A4Q8|A0A2S7A4Q8_9XANT Tryptophan halogenase OS =Xanthomonas arboricola pv. guizotiae OX=487867 GN=Xarb CFBP7409_06920 PE=4 SV=1
MPDTTPSDPQQRPVRRVVIAGGGTAGWMAAAAVSKLLGRHLQITLVESDEIGTVGVGEATIPSLVTFHRLLEIDEAAFMAATQATIKLGIAFEHWRDVDRHYIHSFGHTGTDHWSAGFQHFWLKGRQRGIARDFGDYCLELRAAQEGRFAHLPNGGMNYAYHLDAGLYARFLRRFSEGFGVKRIEGRIGQVETDAESGFLTALTLQDGTRVEGDLFLDCTGFAGLLIGKTLGVGSDDWSRWLFADSALAVQTEAVGTPVPYTRSRADQAGWMWRIPLQHRVGNGIVYSSRYMDQDGAAQVLQRNLRGRALTQPRALRFTPNQRHRVWDKNCVALGLASGFLEPLESTNIHLIQRGIIRLMQTFPQVINAVDIAEYNHQAAAEITHIRDFVILHYHATDRRDTPFWRDCAAMDIPDTLRHRVELFRQSGRVFHQANELFAENSWVQVMLGQGITPKQHHPVADLMGDAELRHFLETIRTRVDAALARLPAHADFLRRYCPAPPLPEPATRLPADAALATGVR

SEQ ID NO: 83414 - protein, 532 aa, Streptomyces sp.
  misc_feature (1)..(532): tr|A0A429TFT1|A0A429TFT1_9ACTN Tryptophan 7-halogenase OS=Streptomyces sp. WAC07149 OX=2487425 GN=EF910_11435 PE=4 SV=1
MTGTDSRIQKVVILGGGTAGWMTAAYLGKALQGTVDITVLEAPAIPRIGVGEATVPNLHKVLFDYLGIAEEEWMRECNASFKMAVRFVNWRTGGQGQPDARELENGGPDHFYHPFGILPDSDNVPMSHYWAKRKLEGQTEEPFDYACFREPPVMDAKKSPKWLDGTPSTRYAWHFDAALVADFLRRFATEKQGVNHVQDEMTHAEKDERGFIKALHTKAGRVLDADLFVDCSGFRGLLINQALEEPFIDMSDHLLCDSAVATAVPHDDEANGIEPYTSAIAMSSGWTWKIPMLGRFGSGYVYSSKFTTKEEATKEFSALWGLDPETTKFNHVKFRVGRNRRAWVNNVVSIGLSSAFLEPLESTGIYFITAAIYQLAKHFPDRTFNPELANSFNHEIEVMFDDTRDFIQAHFYYAPRNDTPFWRANKELTLPKNIQEKISAYKAGLAINSPIADESTYYGNFEAEFRNFWTNGSYYCVFAGLGLEPDAPLPILAHKPDSVAGAEALFGKVKQEQNHLLDTLPSTYDYLRKLHG

SEQ ID NO: 83415 - protein, 516 aa, Streptomyces sedi
  misc_feature (1)..(516): tr|A0A5C4VBY7|A0A5C4VBY7_9ACTN Tryptophan 7-halogenase OS=Streptomyces sedi OX=555059 GN=FH715_03280 PE=4 SV=1
MVNKVVIVGGGTAGWMTASYLKAAFADRIDITLVESSRVSTIGVGEATFSDIRHFFAFLGLKESDWMPACNATYKLAVRFENWREPGHHFYHPFEQMRSVNGFPLTDWWLKEKPSARFDTDCFVMPSIIDAGLSPRHTDGRLIDQPFDEEAEEMQGLTMSEHQGKTQFPYAYQFEAALLAKFLTRYSTDRGVRHIVDDVNHVELDERGWISGVRTAEHGELTGDLYIDCTGFRALLLNKALDVPFVSFQDTLPNDSAVALQVPMDMERRGILPCTTSTAQDAGWIWTIPLTGRVGTGYVYAKDYLSPEEAERTLREFVGPAAADVEANHIRMRIGRSERSWERNCVAVGLSSGFVEPLESTGIFFIHHAIEQLVKNFPGDEWSDVHRDLYNRSVEHVMEGVREFLVLHYVAAKRNDTQYWKDTNTRVIPDALAERIENWKRVLPDSENVFPYYHGLPPYSYMCILLGMGGIDLHHSPGLDLSDTAAARREFAAIQDKAAGLTKVLPKAYDYFTRLD

SEQ ID NO: 83416 - protein, 502 aa, Pseudoxanthomonas sp.
  misc_feature (1)..(502): tr|A0A1H7W7X3|A0A1H7W7X3_9GAMM Tryptophan halogenase OS =Pseudoxanthomonas sp. GM95 OX=1881043 GN=SAMN05428989_ 3265 PE=4 SV=1
MDDTASVSKPVRRVVIAGGGTAGWMAAAALSRTLGKVLDITLVESEEIGTVGVGEATIPTMITFHRLLDINEQEFMAATGATIKLGIKFEGWRDVGQDYIHSFGTTGKDHWTAGFQHFWLKGRARGLARDYGDYCLELRAAEENRFAHLPRGGMNYAFHLDAGLYAKFLRRFSEGFGTKRVEGKIASVDTSADGDIAALVMEDGTRVEGDLFIDCTGFRSLLLGQTLGVEFEDWSHWLFADSALAVQTESVKPAIPYTRSMAGTAGWQWRIPLQHRVGNGIVYSSRFMEREAAREALVGGLEAPPLFEPRLLRFTPGQRKVTWKRNCVALGLASGFLEPLESTNIHLVSRNLTRLLQSFPHVIRQVDIDEYNAQTETEMTHIRDFVILHYYVTNRRDTPFWRACAEMEIPATLRHRIELFRQTGRVFRVPNELFAENSWIQVMLGQGITPQQHHPVADLMEDPELSRFLGGIHGHVEQTVAKLPLHADYLKTYCPQARPVAA

SEQ ID NO: 83417 - protein, 502 aa, Rhodococcus sp.
  misc_feature (1)..(502): tr|A0A554R6Z8|A0A554R6Z8_9NOCA Tryptophan 7-halogenase OS=Rhodococcus sp. KBS0724 OX=1179674 GN=FFI94_029650 P E=4 SV=1
MSSRVDEVDVVVVGGGPGGSSAATLLAKGGHRVVQLEMEQFPRYQIGESLLPATVHGVCRLLGVEKEMEDAGFMRKRGGSFRWGKNPVPWNFLFAITPEFAGPTSYAYQVERMKFDHILLKHAQKCGVDVRQQSTVTGPILDDNGRVVGVTYTDVDGDVCEVRAKYVVDASGNKTRLTKHAGAERVYSDFFRNVALFGYFNGGKRFPEPDSGNILCAAFDEGWMWYIPLTDELTSVGAVIAKEHAAKIQGDPEHALAKFVKRCAIVDDMLSDATRVTDGVYGQIRTRKDYSYANTKFWGNGMVLVGDAACFIDPVFSTGVHLATYSAVLAARSINSVLSGELSEERAFGEFEGRYRREYAVFYEFLSSFYDMEQSEDSYFWKARRVTNFDGQDMTAFVSLVAGAYSQEDVLTDADAVVKRFSASTKALTDATVKTGGMDTDSGQRMNHLFATPVVREVMEEMNSLQARGASSSIQTPPPLLEGGLVPSPDGLAWVEPALVTR

SEQ ID NO: 83418 - protein, 540 aa, Oceanicola litoreus
  misc_feature (1)..(540): tr|A0A1N6IF22|A0A1N6IF22_9RHOB Tryptophan halogenase OS =Oceanicola litoreus OX=1217970 GN=SAMN05444002_3796 PE =4 SV=1
MGEPIREVTIVGGGTAGWMTALLLQSMLKGGPEGGVRITLIESPNIPTVGVGEATVPGMPRTLKQGGIDERTFFKTCNASFKLGVVFGHWNVDAEGKRVDYINPFAHPPAIDGVSAAEYALQFGTGGLDFVQCFSPAVDLAAQAKGPRGRGEMPGPPVGFAYHLDAGKFAGLLKEHCVARGVRHVLDDLVEVELDERGYVAALMLERGGRHGVELVIDCTGFRGLIINQALGEPFESYGKYLANDRAMAVQVPHRDPVRLDSVTKSTALGAGWAWRVPLFNRIGTGYVFSSAHRTDEEARAEFLAHLGPDGEGAEPRVIPMRVGRNRNAWVKNCVAVGLSGGFIEPLESTAIHMIDTAVRWLVQYFPDRDFADPLRRRFNHLVDELYNEVRDFICLHYALGNRTDDQYWIDARESLEVPDTLAENLELWQYGLPAVNDIRFVSLFSPATYQAVLLGKQVYESGFGKGKFCSGRTLDGAKWAAYLKRARAGIGAQVQAAAGHRELLRALRGDVVAENGLLPGLGGGPGAAGAGVSEDAAIL

SEQ ID NO: 83419 - protein, 537 aa, Shewanella loihica
  misc_feature (1)..(537): tr|A3QFB1|A3QFB1_SHELP Tryptophan halogenase OS=Shewane lla loihica (strain ATCC BAA-1088 / PV-4) OX=323850 GN= Shew_2293 PE=4 SV=1
MSILSIAIVGGGASGWLAANHLGLALKGSSPKVSITLIESPDVPTIGVGEGTVPMIRKSLQAFGIEETALFRRCDASFKQSIKFINWRHRAPGSEMSAFHHLFDPPSPFGVDLSDFWLDGLAKGENPMGFDEALSPQRYSCEAQKAPKTLASAPYQGAHAYAYHFDAAKFAELLRENAIECFGVEHIQDHLLEVETGRLETGRRGTDSVETDMLTEGNESKNDKKIVALHLREGGRRCFDFYLDCSGFSGLLMEKALGVEFISLADKLWMNKALVTQVASAPNAPLPPYTQASAHQAGWIWDIALPKRRGVGLVYCDRYLSDDEARRKLKRYLGDELPSAGEFRSLTMRVGHLQKFWQGNCVALGLAQGFLEPLEATSILLTDFAASLLARKFPTDSETLPVLEARFNRIVGHAWQAVIDFVALHYQLSDRSDSAFWRDYRTHLSAQPASEELARRLALWQHFTPHPDDFFSQFEVFGVDNYLYLLYGMGFSTQPKALDDAARQQAWAQLDKIAHAKAFLAQKLPDHRAFIRALIQG

SEQ ID NO: 83420 - protein, 521 aa, Streptomyces sp.
  misc_feature (1)..(521): tr|A0A505DH06|A0A505DH06_9ACTN Tryptophan 7-halogenase OS=Streptomyces sp. NEAU-SSA 1 OX=2315329 GN=FGD71_0106 30 PE=4 SV=1
MSTQNPENVVIVGGGIAGSMTAAYLKAAFRERISVTLVEDESGSAAAENDETTLGDIRSFFDFLGLEEEDWMPACDATYKLAVRFQDWNRPEQHFYLPFEDTREVGGFPLTEWWLHNGPSGRFDRDCFVAAWLCDAGRSPRQLGGSPAGLGDASAGPDDAPAGWGGAAGPYGYHFEAGALARYLTGYAVGRGVRYLADEVLEVRLDARGWIEHVVTKEHGEIHGDLFVDCTGDRGLLLHKALKVPYVSYQDTLPNDSVVTLRVPTRMKARGIPPYTTVAARGAGWIWTIPLFSRIGTGYVYAREYCTPEEAERTLRESVGPEAAGVEADHAPLLVGRSLRAWQHNCVAVGAPGGRVEPLEATGASFVHHALEQLVRHFPAADWHPKLRDSYNASVSRVMDGAREFLALHYHGAARDHTQYWRDAKTRPVPDALAERIARWRVRPPGAELVPPYHQGLPPHAYASLLLGTGAIPLRPSTAITLVDDTAARREFAAVRDEAQGLVGTLPTPYEYITQMSLMSG

SEQ ID NO: 83421 - protein, 492 aa, Pseudoalteromonas atlantica
  misc_feature (1)..(492): tr|Q15MV0|Q15MV0_PSEA6 Tryptophan halogenase OS=Pseudoa lteromonas atlantica (strain T6c / ATCC BAA-1087) OX=34 2610 GN=Patl_4289 PE=4 SV=1
MQQDAIKKIVIAGGGTAGWMSAAALGKLFGKNIDVTLVESDAIPTVGVGEATIPTLHLFHDLLKIKESEFMAATNATFKLGIKFDDWYQKPQSYIHSFGRFNHGCWAAGFQHFWLRGKRLNIASEIGDYCPEHVACRMGKFATAPKQERNHAFHLDAGLYAKFLRNIAQQCGVERIEGKIDNVNLDHDSGFIQSLTLDNGHQIQGDLFIDCTGFRGLLIEQALNTGYEDWSHWLPCDSAVAVQTELNDETVPYTRSIAHQAGWQWQIPLQTRMGNGMVFCSKYISDDEAKTQLLSNIQGETLNTPRVLKFKTGVRRKLWNKNCVAIGLAGGFIEPLESTSIHLIQQSIIRLMQSLPTKKMEAALSARFNASMREEIDNIRDFIVLHYHATARKDSAFWRYCKDMPIPDSLQARMEQFAQSGHVYQGNGELFGEASWLQVMLGQGITPKAYHPIADLMPEQELAKFLASIKQQTERRVSQLPNHLDFIRYYCQ

SEQ ID NO: 83422 - protein, 502 aa, Sphingomonas parapaucimobilis
  misc_feature (1)..(502): tr|A0A0A1WAK1|A0A0A1WAK1_9SPHN Uncharacterized protein OS=Sphingomonas parapaucimobilis NBRC 15100 OX=1219049 GN=SP5_080_00170 PE=4 SV=1
MTNDVVRVVIVGGGTAGWMAGAALTRLLSGQCSVRLIESEAIGVVGVGEATLPHIRSFNERLGIPEAEFMARTRATFKLGIEFRDWSRIGDSYIHPFGTFGRGTGAIDFHHYWSRLVREGRDLPPLDQLSYACTLAREARFEHPDQGRGGLSSTFGYAYQFDALLFAPYLRSLAEEAGAIRTEGLVVDVERDSQNGLIRAVVLDSGERVEGDLFIDCSGFRSLLLGQTLDEPFEDWSKWLPTDRAVAMPCRTETAVTPYTSAIAMPAGWRWRIPLQHRTGNGYVYASDFVSDADAAHALEKAVEGEKLAEPRLLRFKAGRRRRSWVGNCVAIGLASGFLEPLESTSIYLVQQAITALIELFPGRRMEASDRDEFNRVIDLEYDRIRDFLILHYHATSRDDSPFWNYVRTMPIPDSLGEKLELWRRRGRVVKYREGVFLDASWIAVYLGQGIVPEGWDPRADVAGTGDLVQAVAALRSEIAAEVAIRPDHRAFLERYCPMVAA

SEQ ID NO: 83423 - protein, 486 aa, Unknown
  misc_feature (1)..(486): tr|A0A2E5AXC4|A0A2E5AXC4_9BACT Uncharacterized protein OS=bacterium OX=1869227 GN=CL660_09145 PE=4 SV=1
MKEVSKLVIVGGGSAGWITASWFSRRWGSKMDVTIIDKYQPERVGVGEATLLSFPGVMQQMGFKVEDWINRIDATFKAGILFPGWGREDNVIWHPFGFTSIGDKKVPMYDIWTNYQDKYDIKDISPLYRTAMENKIELDYIKDTYAYQIDCGKLVTFLHDNCNKICNYIQSDVKTVVKVEDNVEKIILEDGSEITADIFIDCTGWNQLLIGKDNNVDLSDRLFIDAALAGRVKYENPDKEMHPYTDCQAMEHGWRWRIPTRSRIGTGYCFNKNITSPDEVAQQFSEHWNGRIKPEDMRLLDWKPQMLDKFWKGNVVSIGLSAGFIEPLESTGLAMMIRGCQYLEESLYGCIYNPVFEPDIYNIRMKASFETAVDYVNMHYAYCERKGKFWDYVRLSHEKSGMQILMEDQIQDPNRDTLQTDKISSFFGGTNWHIWLLQLMPEINKKTYWYPDTVDILSRFDNYREILDTSVKEATPQKILLKEMYG

SEQ ID NO: 83424 - protein, 509 aa, Pseudoalteromonas sp.
  misc_feature (1)..(509): tr|A0A2D5SXT0|A0A2D5SXT0_PSEAS Tryptophan halogenase OS =Pseudoalteromonas sp. OX=53249 GN=CMK64_00770 PE=4 SV= 1
MNNKLEKIVIVGGGTAGWLAAAALSQFYKNTQTQITLVESAEIGTIGVGEATIPPILNMLEGCGINLSDFMAHTDASFKLGIEFDGWKSQNERYFHPFGKFGQSIDGAEFYQAWLKAEFEGNATDIEAYSLESVLAKKDHFFVPTSNPNDHINRTSFALHLDAGLAVDYLRAFATAQGVQHIEGTVVDVMQCQETQFIQGIKLSCGEEIVGDFFFDCSGFKSLLLGETLGSEYDDWSDYLPCDSAIAVQTRRDHSKPLRPYTISKAQEAGWSWHIPLQTRTGNGYVFSSKFMDDEKAKEILLSTVEGEAITEPRLIRFKTGTRKQPWKHNCIALGLAQGFIEPLESTAIHLVAESLAMFAKLNPSKRCESSLQAAFNEKMVDQYVQIRDFLVAHYCYTQRDDSAFWIWCQNEMPKPPTLKKREQLFKELGSVIVASEELFQPTSWYAVLTGMGVKPSRYNGTIDSIPSAKINEFLAGGSAYFEQLASKQPSHADVVQTHCRSVLLNNEQ

SEQ ID NO: 83425 - protein, 497 aa, Shewanella livingstonensis
  misc_feature (1)..(497): tr|A0A3G8LWC1|A0A3G8LWC1_9GAMM Tryptophan 7-halogenase OS=Shewanella livingstonensis OX=150120 GN=EGC82_14780 PE=4 SV=1
MNKSVKKVVIAGGGTAGWMAAAAFSKLLGKNLDIVLVESDEIGTVGVGEATIPTLHIFHRLLGLKEQDVMAATNATFKLGIQFENWQDVNKDYLHSFGFLGKDCWACGFQHFWLKGQQQNMVSEIGDYCTEHLAAREGRFAVLPNQDYNHAYHMDASLYAKFLRKFAEQHGITRIEGKIADVLQHEDTGNIKALQLENGELIEGDFFLDCTGFKALLIEQTLNTGFEDWSHWLPCDSAIAVQTEAVQKPIPYTRSIAHPSGWQWRIPLQTRTGNGLVFCSKYLSDADATELLLNNIEGQPINQPRVIKFKTGTRRLHWNKNCVAVGLSAGFLEPLESTSIHMIQRSIVRLLQLFPSHGVIQADVDEFNQQTKIEMDNIRDFIILHYKVTDREDSRFWRYCKNMPIPASLQHRIEMFSQSGKVYKYGNELFGESSWIQVMMGQGLLPKEYHPIVDMMEEAELQSFLNSIKATVKRKVDTLPAHHDFVQHYCQSTAMQG

SEQ ID NO: 83426 - protein, 513 aa, Brevundimonas sp.
  misc_feature (1)..(513): tr|A0A1S6ET57|A0A1S6ET57_9CAUL Tryptophan halogenase OS =Brevundimonas sp. LM2 OX=1938605 GN=BZG35_05160 PE=4 S V=1
MRPGSDPSPHTLKHVLIVGGGTAGWMAAAALSRLIGNGITRVSVVESEEIGTVGVGEATIPPILSFNGLLGIDEAEFMRATQASFKLGIEFVNWDRTGDRYMHPFGGFGVDMEGVQFHQHWLRRRAQGDATPLWDYSLSTVAARADRFVKPGRDAPSALQTLKYAYHFDAGLYAGFLRRYAETRGVVRHEGRIVDVALRASDGFVEAVTLADGRRMEADLFVDCSGFQGLIIEKALHAGYEDWSHWLPCDRALAVPTGRVEPLTPYTRATAGSAGWRWRIPLQHRTGNGHVYCSAHISDDDARAELMAGLDGPPLAEPRALRFVTGRRRSAWVRNCVSLGLASGFLEPLESTSIHLIQSGVSKLMTMFPDDRFDPLLSAEYNRLSQLQFEQVRDFIILHYKATRRDDTPFWRQVRDMPIPDSLARKIDLFRATGRLFRYEDELFSEASWVAVLLGQGIVPQAYEPLADAVDGPLTDRRMDAIARVIRDIAADMPEHQAFIARYCGAPSAALAS

SEQ ID NO: 83427 - protein, 504 aa, Brevundimonas sp.
  misc_feature (1)..(504): tr|A0A1S6ESU9|A0A1S6ESU9_9CAUL Tryptophan halogenase OS =Brevundimonas sp. LM2 OX=1938605 GN=BZG35_05515 PE=4 S V=1
MAEPIKSVLVVGGGTAGWMAAAALNRSLGPHCAVTLVESDDIGIVGVGEATVPPIRDFNNLIGLDEAEFMRETQATLKLGIEFVGWGRQDNRYLHPFGTFGPGPTLSEFQQSFLALRAKGRIADDLEAYSLCAQACKAGKAGLRDPDPRSPFNGLFSAYHFDAGLYARYLRKVCESRGVQRIEGEIVDVVQRAEDGFVDRVRLKDGRELAADLFIDCTGFRALLIEGALKTGFEDWSHWLPMNRAWAVPCERVGPTTPFTRSTARPAGWQWRIALQHRTGNGHVYCSDFIDDDEARQILLDTLDGPALADPRPLRFTTGRRKTFWSKNVVALGLSSGFIEPLESTSIHMVQSGIYRLLQHFPDSRFSPVNIESYNRRLGAEVALIRDFVILHYHATQRDDTAFWRHMATMPIPDTLSQRVEAFRDRGLLYQSGADEYFSQGSWLAVMYGQGIVPTGHNPLYDLQNLDQVEAGFAQIAARWRDAVARMPEHDAFLKAQTMWSGTA

SEQ ID NO: 83428 - protein, 533 aa, Streptomyces sp.
  misc_feature (1)..(533): tr|A0A3D9WAK1|A0A3D9WAK1_9ACTN Tryptophan halogenase OS =Streptomyces sp. Ag82_O1-9 OX=1938856 GN=BX279_3459 PE =4 SV=1
MTDTDSRIRKVVILGGGTAGWMTAAYLGKALQGTVDIQVLEAPAIPRIGVGEATVPNLHRVLFDYLGIPEEEWMRECNASFKMAVRFVNWRTPGQGEPEARTLEDGRPDHFYHPFGILPDHDNTPLSHYWFKNKHEGRTDLPFDYSCFREPPAMDAKLSPKWLDGTPSTRYAWHFDAALVADFLRRFATDKQGVEHVQDEMVSVEQDERGYVTALHCKSGRVLEADLFVDCSGFRGLLINKALGEPFLDMSDHLMCDSAVATAVPHDDEANGVEPYTSAIAMSSGWAWKIPMLGRFGSGYVYSSKFTSQEEATREFCELWNLDPAETKFNHVRFRVGRNRRAWVNNVVSIGLASCFLEPLESTGIYFITAAIYQLAKHFPDRTFNPALVDSFNHEIEVMFDDTRDFIQAHFYYAPRNDTPFWQAQKKLTLPENIQKKIAAYKAGLPINSPIADESTYYGNFEAEFRNFWTNGSYYCIFAGLGLEPDAPLPALAHKPESVAGAEPLFEQVRQQQEHLLQTLPSTYDYLRRLHGK

SEQ ID NO: 83429 - protein, 516 aa, Pseudoalteromonas sp.
  misc_feature (1)..(516): tr|A0A0W1KWZ6|A0A0W1KWZ6_9GAMM Tryptophan halogenase OS =Pseudoalteromonas sp. H103 OX=1761893 GN=ATS74_06965 P E=4 SV=1
MTKPIKKIVILGGGTAGWLSAGLLAAEHPHLSVTLIESANVPILGVGEGTWPSMRNTLQRIGIKEIDFITQCDASFKQGSKFINWRNLSEEENYYHPFMNPQGYEHTNLHASWQRIAPTQKFADVVNMQSFVCQAALAPKQLQTPEYAAVTNYGYHLDAGKFAEFLKNHSVKNLNVTHITDDVTEVINDEKDYIASLKTNNNGNITGDLFLDCSGSRARLIGEHFKSEFIAQDHILFNNSAVAAQISNSHPTQNIASATLSTAQSNGWIWDIALPTRRGTGYVFSSKYQSDESATNTLKSYIAKSTSEQQAEQLNYRVLKFSPGYRQKFWIKNCVAVGMSAGFLEPLEASALAMVELSISMLSEQLPQNRTHMSQLETRFNDRFSTRWQRVVEFLKLHYVLSERDDTPYWQNIRDLTTAPERLKNLLKLWQFQPPSRFDFIENEEVFSSSSYQYVLYGMGFNTQTPRAQNAFTSAQAGDYFYQQNREKIAQYLKGLPSNRELLNYLLSNNRQPHND

SEQ ID NO: 83430 - protein, 543 aa, Shewanella sp.
  misc_feature (1)..(543): tr|F7RR98|F7RR98_9GAMM Tryptophan halogenase, putative OS=Shewanella sp. HN-41 OX=327275 GN=SOHN41_02903 PE=4 SV=1
MQQATHTAINNIVIVGGGTAGWITAALLAAEHNVDKGQLAHSPKLNITLIESPDVATIGVGEGTWPSMRNTLDKIGISETEFIRQCDASFKQGSRFIHWQHDNTEPTKPFGSNQYLHPFSLPHGHQELDLCPFWLPHSDKVSFAHAVSNQDALTQLGLAPKTIATPEYHFQNNYGYHLDAGKFSQLLMQHCTEKLGVKYIRDHVTQVRSLANGDIEGLATKEHGVILGDMFVDCSGTKSLLLGEHFNVPFLCQKAVLFNDSALAIQVPYAEENSPIASCTLSTAQPNGWIWDIGLPTRKGVGYVYSSAHCSDDEAEQTLRAYLTNDKSTNPHYASSNALDSRKQEYRKLNINPGYHAKCWQNNCIAIGMAAGFIEPLEASALALVEWTANALAAQLPAHRGVMDTIAQRVNERYERHWQQIIDFLKLHYVVSRREVDDYWRDHRDSASIPERLQQQLDLWRYQAPSGHDISYKEPLFPAASFQYVLYGMGFNTALPTHIKPSQQQVAQRLFSENQQKINALSQSLPSNRDLLNKVRQFGFPKI

SEQ ID NO: 83431 - protein, 499 aa, Pseudoalteromonas sp.
  misc_feature (1)..(499): tr|A0A269PI02|A0A269PI02_9GAMM Tryptophan halogenase OS =Pseudoalteromonas sp. NBT06-2 OX=2025950 GN=CJF42_2329 5 PE=4 SV=1
MNTSKIQKVVIAGGGTAGWMSAVALSKLLGKNLEITLVESDEINTVGVGEATIPPIRTFHKLLGINEQELMKATQATFKLGIDFENWGQKDDTYIHSFGMTGKECWAGEFHHFWLHGKQKGIASDFGDYCLELQAAKAGKFALSQQAPLNFAYHLDATLYAKYLRSLCEKSKSNPTGVNRIEGKILHVNKHSTSGNISALTLETGLIIEGDLFIDCTGFIGLLIEKALHTGYEDWSHWLPCDSAVAVQTKSVSPALPYTRSIAHDSGWQWRIPLQHRVGNGLVFCSRYISDNEAIDTLLSNIEGETINEPRVIKFKTGRRRKGWNKNCIALGLASGFIEPLESTSIHLIMTGIIRLMRLFPFNGITQTYIDEYNSKLTSELNSIRDFIVLHYKVTNREDSLFWQHCKNMEIPESLQHKINLFTETGRVFLDDGDIFRVDSWTQVMLGQGLMPEQFHQIAQVMSDNEFKQFLSSLKSSVDNAVEQLPNHQEFIDKYCPAN

SEQ ID NO: 83432 - protein, 503 aa, Shewanella sp.
  misc_feature (1)..(503): tr|F7RRA1|F7RRA1_9GAMM Tryptophan halogenase OS=Shewane lla sp. HN-41 OX=327275 GN=SOHN41_02906 PE=4 SV=1
MTTAIKRVVIAGGGTAGWMAAAALTKLMGKHLDIVLVESDEIGTVGVGEATIPTLHIFHRLLGLKEQEVMAATNATFKLGISFENWQDINKNYLHSFGFLGKDCWACGFQHFWLKGKQLGMVSDIGDYCAEHLAARQGRFAVLPNQDYNHAYHMDASLYAKYLRKMAEQHGIHRIEGKIKQVLQHHDSGNIKALVLENDETIEGDLFIDCTGFRALLIEQTLNTGFEDWSHYLPCDSAIAVQTQSVGAPIPYTRSIARESGWQWRIPLQNRTGNGLVYCSKFISDEDATELLLANLEGEPLNKPRVIKFKTGTRRLHWHKNCVAVGLSGGFLEPLESTSIHLIQRSIIRLMQLFPSAGIVQSDIDEFNQQTKLEMDNIRDFIILHYKATEREDSRFWRYCKNMDIPASLKHRIEMFADSGKVYKYGSELFGESSWIQVMMGQGIMPKHYHPIVDVMEEPELEAFLNNIKSTVKRKVESLPIHIDFIQHYCPAEVLANTEPMAM

SEQ ID NO: 83433 - protein, 499 aa, Sphingomonas sp.
  misc_feature (1)..(499): tr|A0A0Q4L8K3|A0A0Q4L8K3_9SPHN Tryptophan halogenase OS =Sphingomonas sp. Leaf38 OX=1736217 GN=ASE88_10680 PE=4 SV=1
MNDASEPPRTRIVVAGGGTAGWIAAAAIVRQLGSLVAVTLVESDEIGTVGVGESTIPTARSFHAFLGIDEAAFMRATQATFKLGIAFENWRQIGDRYFHPFGSVGRSVAIADFQHFWLEARARGFGGAYGDYSLEQQAAGAGLFGHDEQHSLAYAYHLDATAYARFLRSLAEPWGVRRVEGRIERVERDGEGGDIAALVLASGERIAGDLFIDCTGFRALLTEATLGTGYEDWSEWLATDRALAVQTETVAPPVPYTRAIAHAAGWRWQIPLQTRTGNGLVYSSRHMSDDEAHATLIGALDGRPLFEPRPLRFRSGMRRQAWNRNCIALGLAAGFIEPLESTSIHLIMNAVIRLIQLFPFRGDDHNALAARYNVQSRHEWEHVRDFIILHYHVTQRDDSDFWRDCARMTVPDSLAERISLFTATAGAWQGQDDLFRIDSWVSVMLGQGVVPRAHHRIASIIKAHDLQTSFDDLSRGIAGTVRTLPRHHDFLAHYCPASG

SEQ ID NO: 83434 - protein, 515 aa, Novosphingobium sp.
  misc_feature (1)..(515): tr|A0A0N1AP93|A0A0N1AP93_9SPHN Tryptophan halogenase OS =Novosphingobium sp. AAP1 OX=1523413 GN=IP65_07565 PE=4 SV=1
MPHDTAPSHIRSIVIAGGGTAGWMVAAALSRTIAPHRCRITLVESETIGTIGVGEATIPPIQTFNQVIGLDEAAFLQATKGTFKLGIEFAGWRARGHSYFHPFGRQGNDFGGTQFHQHWLRAQALGDDTPLGAFSLNEQAAYAGKMRQPDGDPRSVYSTFSYAYHFDATLYGQHLRTLAEERGVERREGLIEEVVLDGESGRIASLRLDDGGMLDGDLFIDCTGLRSLLLGEALGVPFKDWTHFLPCNRALAVPTDCVDLMRPYTRSTAHEGGWQWRIPLQHRMGNGMVYSAEHWSDDQAHAALMANLDGQPLADPRLIRFTTGRRVQSWAKNCVAIGLSAGFLEPLESTSIHLVQIAVAKLLNWFPDMGFDPMTMAEFNRQIANEYDRIRDFLVLHYHANERDGEPFWDQCRTGAIPDSLAEKIAMFRRSGRLLSRETDLFQDASWLAVLLGQGAMPQAHDPLTESLRPLELDQMLRGMRELIGRAAQAMPSQADHLARIGGRIANAQREAALG

SEQ ID NO: 83435 - protein, 506 aa, Novosphingobium sp.
  misc_feature (1)..(506): tr|A0A0N1API5|A0A0N1API5_9SPHN Tryptophan halogenase OS =Novosphingobium sp. AAP1 OX=1523413 GN=IP65_01935 PE=4 SV=1
MDSQVARSITIVGGGTAGWMCAAALGHFLGENTRITLVESDAIGTIGVGEATIPQIRMFNQALGIDETEFIRATGATFKLGIEFAGWLRPGHSYLHAFGDVGRDIGLGAFRHFWSRAHRLGLARPLGDYSVNDLAARAGKMHDGAPLTNRNVPQMPHAFHFDAGLYAAYLRRYAQAKGVIREEGLIVAVDRDGASGDVTAVRLDDGRVIDGELFIDCSGLRALLIGDTLGVGFDDWSHLLPANRAVAVPCASAAPLTPYTRSTAHAVGWQWRIPLQHRTGNGRVYCDAFLSDDEATAGLLANLDGMPLADPRVIRFTTGCRQQAWSHNVIAMGLASGFLEPLESTSIHLIQSMIARIMTFGPTCRPAAAVRDTFNRQFADEMARIRDFIVLHYWANEREELFWQACRNLPLPASLAEKIALFQSAGHLFRDQSDLFSEVGWLQVLVGQGIVPATSHALAEAVSEADLAGWLDTLHALFSREVAAYPTHADYIARHCAAPSPKGLVA

SEQ ID NO: 83436 - protein, 506 aa, Fulvimonas soli
  misc_feature (1)..(506): tr|A0A316HW68|A0A316HW68_9GAMM Tryptophan halogenase OS =Fulvimonas soli OX=155197 GN=C7456_1102 PE=4 SV=1
MGNQTNELPVRRVVIVGGGTAGWMTAALLAKAFGPRLSIRLVESDEIGIVGVGEATIPQIRHVGRFLGIAEDELLRASRGTIKLAVQFNDWRRIGDSYVHAFSDVGLPLGLAAFQHYWLRSRREDPRAPDLWAYSICARACAANRFAPMENVGGSPLTGIRYAYHFDAARFGRLLRRNAEGNGVVRTEGKVVDVALRGDDGFIESIRLHSGEVIPGDLFVDCSGFRGLLIEGALKTGYESWQHWLPCDSAVVAPSEHGGTIRPYTQASAQQAGWQWRIPLQHLASNGHVYCSRFVSDDEAAATLVRNMEGPALAAPRQLRFHTGIRNKVWNRNCVALGLASGFIEPLESTSIHLMQSAAGRLLTMFPDRGFDPALVDEYNRQTRAEYEQTRDFIILHYKATERDDTPFWRRCATMDVPEGLARRIGLFRRTGHVFREGEELFTLMGWLQVFIGQGIVPERHHPLADALPKAQLDEFLANIRTLVDRAVAAMPTHAEYIDRHFKAAD

SEQ ID NO: 83437 - protein, 505 aa, Proteobacteria bacterium
  misc_feature (1)..(505): tr|A0A1W9H2C8|A0A1W9H2C8_9PROT Tryptophan halogenase OS =Proteobacteria bacterium SG_bin5 OX=1827382 GN=A4S12_0 8520 PE=4 SV=1
MPEAPLREIVIIGGGTAGWMAAAALARFLGAQARVTLIESEAIGTVGVGEATIPQIKLFNQGLGIAEPDFVRQTQASFKLGIQFVGWGAPDARYIHAFGAVGWPLGLLPFHHYWLRDRAQGGTSDLWDYSAGARAAARNAFQPPADRPGQPPAGYDYAFHFDAGLYAAFLRRHAEAAGVNRIEGRIGAVRLRDDGFVAGVTLDDGRAVEGELFIDCSGFRGLVIEEALHAGYEDWTHWLPCDRALAVPCARVAPLTPFTRASAKAAGWQWRIPLQHRIGNGIVYSSAHLSDDQAADILLAGLDGAPLGEPRPLRFTTGKRRAMWVKNCVALGLAAGFMEPLESTSIHLIQAGIARLLSLFPRAGFDAADIAEFNRQSDFEWRAIRDFLILHYHANGRSEPFWADCRAMALPDSLAHKLALFRANGRITREHEELFTELGWLQVLIGQGVMPVGYSPLADALPTRDLARFLADARGHAERVAAALPPHADFIARHCAAPPLETVAA

SEQ ID NO: 83438 - protein, 499 aa, Novosphingobium sp.
  misc_feature (1)..(499): tr|A0A0N0JJR6|A0A0N0JJR6_9SPHN Tryptophan halogenase OS =Novosphingobium sp. AAP1 OX=1523413 GN=IP65_03825 PE=4 SV=1
MTDRPLRIVVAGGGTAGWMTAAALARTLGPVATVTLVESEAIGTVGVGESTIPPLVAYNRLLGIAEADFMRATSATFKLGIAFENWKAPGESYFHSFGGTGRDHWSAGFQHFWLHGRARGHAAPYGDYCLELMAAQAGRFAHLPDGRMNYAYQLDSGRYAAFLRRLAEGDGATRIEGRIARVELDGDSGEIAALHLDGDRRVDGDLFVDCTGFRALLIEGALHAGFDDWTHWLPCDRAIAVQTASVRPPVPYTRAIAHDAGWQWRIPLQHRQGNGIVWCSRYLDEDQALDRLLSSVEGQVLTEPNRIRFTTGARRRQWVKNCVAVGLSGGFMEPLESTSIHLIQRAVLRLLRLLPVSARPDPADIAEFNEQQWADMVQIRDFLILHYKATERRDSPFWRHCAGMEVPESLSHRMDLFARTGRVFRKNEELFAENSWVQVMMGQGITPAAYHPVAAKLRDDELERLLAGLRREVADTVQGLPGHAAYVDHYCGARTGAAA

SEQ ID NO: 83439 - protein, 483 aa, Sphingomonas sp.
  misc_feature (1)..(483): tr|A0A0Q4F815|A0A0Q4F815_9SPHN Tryptophan halogenase OS =Sphingomonas sp. Leaf16 OX=1735681 GN=ASE65_12785 PE=4 SV=1
MTAAALSSLLDPKDVAITLVESDAIGTVGVGEATIPDILAFNQMLGVDEADFMAATQATFKLGIEFVDWGAKGTRYIHPFGQHGVDMQGIDFHQYWLRARQDGATDGIEAYSLCAVAAQAGRFALPDPNPRSVLSQIRYAYHFDATLYARFLRRYAEARGVVRVEGMVGVVRQDARGNIAGLTLSDGRMVEGDFFFDCTGFRALLTGQTLGVGFVDWSRWLPCDTALAVPSGHAGPPTPYTRSTARDAGWQWRIPTQRRVGNGHIFASAFQSEEAARDVLLANLDAPPLADPRRIAFTAGCRERFWQGSCIAIGLAAGFLEPLESTSIYLIQEGISRFISLFPRGDIPDILRTEYNRHMRTEFEQVRDFIILHYAATTRDDTPFWNYCRTMTLPDTLLHKIELFRETGRVFRYNDELFARPSWVAVMLGQGIVPVASDPIVATLPGSEVAHSLASMRNAMAAAVQRMPSHGEFLSRYCPTVAA

SEQ ID NO: 83440 - protein, 495 aa, Pseudoalteromonas sp.
  misc_feature (1)..(495): tr|A0A0W1KX20|A0A0W1KX20_9GAMM Tryptophan halogenase OS =Pseudoalteromonas sp. H103 OX=1761893 GN=ATS74_06960 P E=4 SV=1
MTKTNAVKNVVIAGGGTAGWMAAAALAKLIGKNIHVTLVESDDIGTVGVGEATIPPIRTFHKLLGINEQSFMKATQASFKLGISFENWGDENTRYIHSFGVTGKECWAGEFHHFWLQGKALGINDPFGNYCYELQAAKAGKFAFNQQNPINYAYHMDATRYAQFLREFSEPLGVKRVEGKIQKVVKNAKTGHIESLLLNSGEQINGDFFIDCTGFRGLLIEQALHTGYEDWSHLLPCNSAIAVQTKSTSDTVLPLTRSIAHKSGWQWRIPLQNRVGNGLVYCSQYMDDEQAKALLLNNIEGEALTEPRIIKFKTGRRLKGWNKNCLALGLASGFVEPLESTSIHLIMSGIIRFMRLFPFNGITNHAIDEYNKQLKSEIENIRDFIVLHYKVTNRDDSEFWLHCSAMEVPKTLKHKIDLFKQTGRVFLDDGDIFRVDSWVQVMLGQGIGPEQHHLIASMMNNEELTRFLHGIKQQIEQRVSQLPPHHEFLKQYCPA

SEQ ID NO: 83441 - protein, 502 aa, Alphaproteobacteria bacterium
  misc_feature (1)..(502): tr|A0A2A5CKH6|A0A2A5CKH6_9PROT Tryptophan halogenase OS =Alphaproteobacteria bacterium OX=1913988 GN=COA81_0194 0 PE=4 SV=1
  misc_feature (190)..(190): Xaa can be any naturally occurring amino acid
  misc_feature (469)..(469): Xaa can be any naturally occurring amino acid
  misc_feature (501)..(501): Xaa can be any naturally occurring amino acid
MQENQVENIIIVGGGTAGWMAAAMLAKTAGRHINITLVESDEIATIGVGEATIPPIQLFNNHLGLDENDFLRKTQGTFKLGIQFDNWGRQGDSYMHTFGRIGRDLGAIPFHHYWLRSMQEGQASSLWDYSFNHKAAYANKFSRIEKIDNSPLDGLTYAFHFDAILYAQYLRDYSEKLGVKRIEGKVVDTXLRGEDGFISHLMLENGTEIRGDFFIDCSGFRGVLIEEALETGYEDWSNWLPCDRAIAVPCASTEPLVPYTKSTALTAGWQWRIPLQHRTGNGHVYCSDYISDDEAADMLLKNLDGEILADPKFLKFNTGRRKKFWNKNCVVLGLASGFMEPLESTSIHLFQAGITRLIKIFPDKKCSQADVDEYNRQAIYEFEGIRDFIILHYHLTQRTDTAFWRDCGAMDIPETLKQKMALFKSNGRIFWDTVELFAENSWLQVMVGQGLMPDSYHALAHQVESDKAXEYMNNIRQIQDQALTPIPSQADFIARHCAAAXQ

SEQ ID NO: 83442 - protein, 217 aa, Xanthomonadaceae bacterium
  misc_feature (1)..(217): tr|A0A4Q2XRW1|A0A4Q2XRW1_9GAMM Tryptophan 7-halogenase (Fragment) OS=Xanthomonadaceae bacterium OX=1926873 GN= EOP89_05980 PE=4 SV=1
MRKRILIVGGGTAGWLTAGYLAKRLGADLAGGVSITLVESRDIGVLGVGEGTFPTIRRTLETIGIDEAELVRRCGATFKQGAKFAHWRHTPGQGATNHYSHPFQVADASDGLDLLPYWLLGLGGPENWDEVSNPQKKAADKHRAPKLPTNPDYVGPLNYAFHFDAIALAGLLREQGIRNGVRHLTDTVGEVLLAEDGSIAGVRTEQNGVLDADIYVD

SEQ ID NO: 83443 - protein, 176 aa, Shewanella sp.
  misc_feature (1)..(176): tr|F7RP78|F7RP78_9GAMM Tryptophan halogenase OS=Shewane lla sp. HN-41 OX=327275 GN=SOHN41_02076 PE=4 SV=1
MSYIKNIVIVGGGTSGWMTAAMLARLFKSTLNITLIESKEIGTIGVGEATIPPLQIFNSVLGINESDFIKATQATFKLGIQFENWGKQGDCYMHAFGNVGKDLGFTPFHHYWLSTSPTETNSFWHYSLNFQAAKKQKFQVIGQLPNAPLAGLTHAYHFDAALYAQLLRSYSERQKC

SEQ ID NO: 83444 - protein, 491 aa, Alteromonas sp.
  misc_feature (1)..(491): tr|A0A359JZ64|A0A359JZ64_ALTSX Tryptophan halogenase OS =Alteromonas sp. OX=232 GN=DEH24_00900 PE=4 SV=1
MNASPLNIVIVGGGTAGWMAANLLAKRWQHKAVSVTLVESPDIGIIGVGEGSTPTLKRFFEDMNIAESDWMAACNATYKVSIQFDGWSPESGVGSYAHPFISQLDTFSERPFYVNCLTRRMGLDVNVTPGDFLFNGWLAKHKRSPQTPANFPFRIEYGYHFDSGLLGAFLQRHAHTLGVTHKSRNIESVQCHPNGDIASLHTREGEIIEGDLFIDCSGFRSLLLQQTLKVPFRSFKDNLFNDAAVVCATDALEDRPVETRSTALSTGWAWQIPLTNRTGNGYVYSSAFISPEDAEKELRAHLGVNDDDAQTRHLTMKVGQVSEHWSHNCLALGLSQGFIEPLEATALHLVQTSVEIFMDHYEKGGFSDQYRAAYNQVIGERFERVRDYIVAHYKLNTRNDSEYWRANRNNDVLSESLLQLLDVWFRRGDLQQEIQRQKLDSHFGATSWHCLLAGYGAFPRLAAQQPNQGDLYKDNNLAQFFSGCLLNFSAQ

SEQ ID NO: 83445 - protein, 478 aa, Sphingomonas sp.
  misc_feature (1)..(478): tr|A0A0Q4FQ08|A0A0Q4FQ08_9SPHN Tryptophan halogenase (F ragment) OS=Sphingomonas sp. Leaf16 OX=1735681 GN=ASE65 _17285 PE=4 SV=1
MAYQGTIGSKGKPTMPHEPVRSIVIVGGGTAGWMAATYLARRLTHLNLSITVVDSAAIGTVGVGEATVPAIRDFLSAIELGEPDVLRETGGTIKYGIRFDGWGGDDHRFFHPFGLYGVGAGGVAFHQYWLKLNAAGRAGPIGDYCLATQLARGGLFLPPADHPANDLGVFNFALHFDAAKFAALLRRLALANRVAHVDGRIEQVTTDPARGHVTHVTLDDGRQIAGDLWIDASGFRSLLLGEALGVPYVDWRHWLPCDRAVAIPCRAAPGDPVPYTVATARTAGWQWRIPLRHRIGNGSVYCSDFQSDGDAEDALLASIEGEPLAGPNRLRFVTGHRERFWSGNVVGLGLASGFLEPLESTSISLIQSGLERFVALFPDRDCDPRLAATYNRQSVLEFERLRDFLFLHYLANGRTEPFWQAIRAVEPPEPLQIKLDAWRSGGEFVRNEWDTFQDPSWLSLYAGFGDLPHLRLYLERLG

SEQ ID NO: 83446 - protein, 498 aa, Streptomyces sp.
  misc_feature (1)..(498): tr|A0A0M8VYT6|A0A0M8VYT6_9ACTN Tryptophan halogenase OS =Streptomyces sp. NRRL WC-3723 OX=1519491 GN=ADL02_4323 5 PE=4 SV=1
MSATYLKAAFGDRIDVTLVESDRVSSIGVGEATFSTVRHFFDYLGLDEREWMPHCAASYKLAIRFENWREVGDHFYHPFERLRMSDGFTLADWWLHEGDRSLRFDQACFVTPALCEAQRSPRMLDGSLFAQGLDESLGRSTLDEQRAQFPYAYHFDAGLLARFLAKYGTDRGVRHVVDDVVEVRTDERGWLTEVMTKQNGALAGDLFIDCTGFRGLLINQTLEEKFVSFQDVLPNNRAVALRVPQPDQAERGMRPYTTATAMEAGWIWTIPLYGRNGNGYVYSDEFCTPEEAERTLRAFAAPGQDDLEANHIRMRIGRNERSWVKNCVAIGLSSAFVEPLESTGIFFIQHGIEQLVKHFPDERWDPSLADDYNRRVARVLDGVKEFLVLHYVAAGRDDTPYWKEAKLRGLPDGLAEKLDMARSHLLDERAIYPYYHGFEQYSWITMLLGLGHEPRAARPALAHVDPTAARAELARLRSDADRLVRTLPSCHEYLTSIH

SEQ ID NO: 83447 - protein, 496 aa, Pseudoalteromonas sp.
  misc_feature (1)..(496): tr|A0A269PT98|A0A269PT98_9GAMM Tryptophan halogenase OS =Pseudoalteromonas sp. NBT06-2 OX=2025950 GN=CJF42_0383 5 PE=4 SV=1
MHNNKIQKVVIVGGGTAGWITAALMAKTLGKTVDITLVESDEIGTIGVGEATIPPLIHLNNAIGLDEKIFIQETKATIKLGIEFDNWGKLGDSYMHAFGGIGKNFPFCDFHHFWLKAKQGGNTSNYWDYSVNYQAAKKNKFKKLSGIEGTNLPGVEYAYHFDAGLYAKLLSTFSQSMGVNRIEGIVNQVNLNDNSGFVKNIVLEAGRIIEGDLFVDCTGLKALLIEQTLSTGFEDYSHWLPCDRAIVVPCESVESLTPYTRSTAHESGWQWRIPLQHRIGNGLVYSSKYMTDEQAKDKLLSHLDGKPLAEPKVIPFKTGVRRKQWNKNVVAIGLSNGFFEPLESTNIHLIQTAAIRLVKLFPHSGIKSMEVTEFNRQSKIESKQMRDFIILHYKLNQRDDSDFWRACQRMEVPDTLTKKMALFAQSGKVFREQDELFTEIAWQQVMIGQNLIPQDYHPIANSLSDEQIFDLMKNLKILIDRTVDNLASHKIFLEAL

SEQ ID NO: 83448 - protein, 508 aa, Sphingomonas sp.
  misc_feature (1)..(508): tr|A0A0Q4FV96|A0A0Q4FV96_9SPHN Tryptophan halogenase OS =Sphingomonas sp. Leaf16 OX=1735681 GN=ASE65_14665 PE=4 SV=1
MSGRGDGPLRRIAIVGGGTAGWMAAAALSRLLGPHGPAITLIESEEIGTIGVGEATIPPLQAFNAMLGIDEDDFVRATQGTFKLGIDFHDWGQVGHRYFHPFGVYGIDAGAVPFEAMWRRLRAAGQAGPLADYSICTAAARAGRFQRPQPGNTPLAQIGYAFHFDAGLYARFLRTRAEAAGVVRREGRIVDVVRDGNSGFINAVVLADGGRIEADFFIDCSGFRGLLIEGALGAGFEDWSHWLPNDRAVAVPSANVGAPTPFTRSTARAAGWQWRIPLQHRTGNGYVYSSAHVSDDEAAATLLANLDGPALADPRPLRFRTGRRDRFWIGNCVALGLSGGFLEPLESTSIHLVQAGIARLLEMLPTRVCDPADTARYNRLMAAEFDQVRDFVILHFHASDRRDTAYWRDQAERPIPETLAERLAIYARTGRVYREGDELFTKTSWLAVMDGQGLLASTHDPLADAIPLDAAAQRLQRIGQVVAAAAAQMPAHDAFIARHCAAAGGPRG

SEQ ID NO: 83449 - protein, 175 aa, Alteromonas sp.
  misc_feature (1)..(175): tr|A0A3D0SB31|A0A3D0SB31_ALTSX Tryptophan halogenase (F ragment) OS=Alteromonas sp. OX=232 GN=DEO96_03400 PE=4 SV=1
MAQKKTRVVVAGGGTAGWLTAFSLVTRLGNVLDITLVESDQIGTVGVGEATIPTMCNFHQLMGINEQEFMAATNATFKLGIQFDNWANEGDSYIHSFGEIGQRSWMAEFHEFWMEAVANGQQDSLEDYCLELKAAKANKFATKIGNRPLNFAYHLDATAYAAYLRKKSEAAGVTR

SEQ ID NO: 83450 - protein, 501 aa, Alteromonas sp.
  misc_feature (1)..(501): tr|A0A2E9PJ34|A0A2E9PJ34_ALTSX Tryptophan halogenase OS =Alteromonas sp. OX=232 GN=CL602_10045 PE=4 SV=1
MSTFDSATLPPVKNVVIAGGGTAGWMAAIALVKLLGKSLNITLVESKDIGIIGVGEATIPPIRTFHKLLNIDEKAFMKATQATFKLGIEFEGWREENHSYIHSFGVTGRECWAGEFHHFWLRAQKLGLGGEFGDYCPELQAAKANKFFTNESMPLNFAYHFDAVAYGRYLRTLATEAGVHHIVGNITNVSKCSQTGNITSLEVDESQEVNGDFFIDCTGFKGLLIEQALHTGYDNWSHYLPCDSAVAMQTETVAAPVPYTKSSAHKAGWRWQIPLQHRVGNGLVYCSKYMSDDEAKSTLVQQVEGEPVNDARFIKFTPGKRRLGWNKNCVALGLASGFIEPLESTSIHLIMTGIVRLMRLFPFDGVTQSAIDEYNTKYDSEMAAILDFIVMHYKVTNREDSPFWQHCKNMPIPPSLTHKLNLFKDTGRVFLDDGDIFRVDSWTQVMLGQGLTPNQYHKVADEMSEAELERFMMGLKQQVDNQVSRLPSHEAFLDKYLAVNS

SEQ ID NO: 83451 - protein, 496 aa, Planctomycetes bacterium
  misc_feature (1)..(496): tr|A0A517M5G1|A0A517M5G1_9BACT Tryptophan halogenase OS =Planctomycetes bacterium EC9 OX=1930277 GN=EC9_43150 P E=4 SV=1
MEAAALNKEVDLLILGSGFGGSLLSLLLARQGLRVAVIDRAVHPRFTIGESSTPLADATLKELAQRYDLPELMPLTAFGPWRRRHPELMCGLKRGFSYFGHSPNAEFSPADQLLVAASSDDEHSDTHWLRSDVDAWLFERAADRGAMQFEGASYRLSREDSQWLVAGEASGVKFSLRAPMIVDATGAAGEVLRYLKIASQTHRLKTNSWAVYGHFENVTSVAEMLDRRQIDRRRHPFGCDDAAVHHVLDDGWMWQLRFCDDSVSAGFAIGQPADTPKPNADGIWRQRLDRFPFLRQQFAAARIVAPAGGLQMTSRMQRLTSLAAGPGWAALPNTAGFIDPLHSTGLAHTMFGVRRLAEILLQTGTSNQLLAELGNYSSTLIDELRLVDQLVEGCYAGLPSFRLWSAWCMLYFAAVTSMEQSPGGGVAAFLHADELRFLTVVGEARGELQRASDAGRGPAACDRFEDRLRQVIAPWNRGGLLDRECNGMYARTAKPV

SEQ ID NO: 83452 - protein, 489 aa, Sphingomonas sp.
  misc_feature (1)..(489): tr|A0A0Q4U1U0|A0A0Q4U1U0_9SPHN Tryptophan halogenase OS =Sphingomonas sp. Leaf257 OX=1736309 GN=ASF14_13240 PE= 4 SV=1
MSAPIRHVLVAGSGLTAWSAAAALKRRAPFLDVTLLATPAAHDALADRIACTLPSLPGFHADLGISEDDGVTRTGAGYRLGTRFFGWAEGLPDYVHAYGSYGHAIGPAAFHLHWVRATRDGRAAPFDAYCPAAQLARAGGFVPPSPGTPFAGHDYGLTLDLPRQVAMMRAFALHVGVREVTDSITQVQVDATGHVTAIAVQHGAPLTAHLYIDATGPAALLRGSIDDAWQDWRDWLPCDRVLLGTQVSGEGAPVLTPATAHAAGWRWSSGEQVGMAYGSAHLSDAEAAAMLARDGAVADAPIVIRSGTRARAWRGNCIAIGDAATQVEPLEWCNLHLALSAIDRLVTMLPDTAMAEVEAADFNRQTLAEAERVRDFLAVHYRTARRPEPMWQAVAQAELPASLAHTLGQFGERGRLPFYEEETFTRDSWAAILLGQGYLPRRIDPLVHGVPAPQVDAAMARMTDAIAAALPHVPAHAQWRAAQMRRLAR

SEQ ID NO: 83453 - protein, 512 aa, Pseudoalteromonas sp.
  misc_feature (1)..(512): tr|A0A269PTK3|A0A269PTK3_9GAMM Tryptophan halogenase OS =Pseudoalteromonas sp. NBT06-2 OX=2025950 GN=CJF42_0394 0 PE=4 SV=1
MNIKKIAIVGGGTAGWLVANHLGKALLERLNTSLTLIESPDIPSIGVGEGTVPMMRETLKSFGISETDFVQQCDVTFKQSIKFVNWLDKNNHGENNYYHHLFDYPFPLGDDLAPFWLSTDKKIPFADIASFQGAICDAGLGPKTISTPEYQGTTTYGYHLNAKKFAQLLAKNACEKFNVTHRLANVTDVNLKEDGSIKSLKLDSDNCKDDTEFDFYIDCSGFSSFLMRKNLDVKFIDKSNELLIDTAIVVQVPTNSEDDIPSYTIATAHQAGWIWDIALPKRRGVGFVFSSKYMNESLAKEKLAKYLDKDLSELPHRSIPMNIGYLEKFWHKNCVAIGLSQGFVEPLEATAILLADFCAKQLAQNFPDEQIQYEHLSKMYNKRITYCWDRVIDFIKLHYCISDRTDSQFWLDNKKEEGISEHLKQLLLHWQSFSPKASDFFSKFEIFDVENFLYVLYGMKYQTSINNLSKNYYTKAKSDAEQVKKHANALVNELPKHRELINKINQFGMQKI

SEQ ID NO: 83454 - protein, 509 aa, Alteromonas sp.
  misc_feature (1)..(509): tr|A0A2D5LKB6|A0A2D5LKB6_ALTSX Tryptophan halogenase OS =Alteromonas sp. OX=232 GN=CL592_07875 PE=4 SV=1
MNQAHSQNYQKTQNTQHIQKVVIVGGGSAGWMTAASLSNVMKGRCEICLIESDEIGIVGVGEATIPPIRVFNQTLGISEAEFLRKTNGTFKLGIEFVNWGKNGSRYFHPFGTYGRQFDTVSMHQYWTAAYQSGSAKELDDYAMAWHLAKNGKFIHPSGDPKNVLSTFEYAYHFDAGLYVKFLREFAEQRGVKRIEGKINQVNKDPQNGFVTSVDLDAGERVEGELFIDCSGFRGLLIEQALHTGYETWSEWLPCDRAWAVPTKGSNPIPYTRSTAHTAGWQWRIPLQNRVGNGHVFSSKFISEDEARQQLVDNLDSEMIAEPRLIKFVTGRRKRFWNKNVVAIGLSSGFIEPLESTSIHLIQAGIAKLLALFPDKSFNQNSIDEYNRIAISEVERIRDFVILHYKLMERRDTDMWRYCAEMDVPESLASRIEHFRDYGRIIKGEMDLFGNTSWLAVHIGQGNMPQRVDPLVNYSDVDYVSWLNKLNGVMSHYAAQATNHIDYINKMIGR

SEQ ID NO: 83455 - protein, 504 aa, Sphingomonas sp.
  misc_feature (1)..(504): tr|A0A0Q4KV48|A0A0Q4KV48_9SPHN Tryptophan halogenase OS =Sphingomonas sp. Leaf38 OX=1736217 GN=ASE88_11690 PE=4 SV=1
MANHPLRIVIAGGGTAGWMAAATFARFLETGYEIDLIESDAIGTVGVGEATIPQIHLFNDALGLDEDAFLRATGGTFKLGIEFVDWFKPGHRYMHAFGDVGRDVGLLPFHQYWLRARSLGLAGDLGAYSLNTHAAMAGRMQRGPARTSRALASMPYAYHFDAALYARYLRRYSETRGVNRIEGKIVRVTRDGDSGDVSGLVLENGTTVAADLYIDCTGFRGLLIKEALGTGYEDWTHWLPCDRAIAVPSARSEKFTPYTRSTAHGAGWQWRIPLQHRTGNGVVYSSAHLSEDEATATLLRGLDTSAMADPRTITFRTGRRKRMWNHNVVALGLAAGFMEPLESTSIHLIQSAVARLLKLLPGRVIAEVDRAEFNRQSDFEYERIRDFIVLHYKATTRDDTPFWRACRDMAVPDTLATKIELWRGNGHIVREHEELFTEVGWLQVLAGQGIVPDGHHPLADAISTADLGEFMDTIDKLNAREANQMQDHAAFVAQHCAAAASLAA

SEQ ID NO: 83456 - protein, 512 aa, Pseudoalteromonas sp.
  misc_feature (1)..(512): tr|A0A269PU05|A0A269PU05_9GAMM Uncharacterized protein OS=Pseudoalteromonas sp. NBT06-2 OX=2025950 GN=CJF42_03 935 PE=4 SV=1
MKKVKSVNVIGGGTSGWLSAAMLASSFKKTGLDITVHLIESENIPTIGVGEGTFPTIVNTLHDIGLSEKDFFSQCDASFKQGAQFCNWLHEPDKQKHSYYHPFDPTAMPKGIDLSAYWVRNKINNKTSNDFAHSVCLQAHLCDQNLAPKDLNTPEYAWMAKYAYHLDAAKLGKLVKKHAMTNLGVIHSFADITEVKLDDDGFIESVIADENTVFSADFFVDCTGFSSLLLSKALKVPFIEKSKYLSVNRAVTLQVPYENLETPIPTHTISTAQEAGWIWDISLQSRRGTGYVYSSEHTTPERAEELLLKYLNIPASDDIKLRHLSFDVGHREKSWEKNCVAIGFSSGFIEPLEATAIAMVEAGVRSLAARFPQSREAMKTRQKQYNAIFTQRWNNIIDFVKLHYCLTNRKDSQFWVDQTNPKTIPETLQDKLEAWKHYGATEGDFPNKYDIFNISSWQYIIYGMEYFPKYIECGTLPDEILDKAFESIQLMRKSAEIKLDTNRKLIELYSGK

SEQ ID NO: 83457 - protein, 530 aa, Pseudoalteromonas sp.
  misc_feature (1)..(530): tr|A0A269PI62|A0A269PI62_9GAMM Tryptophan halogenase OS =Pseudoalteromonas sp. NBT06-2 OX=2025950 GN=CJF42_2285 5 PE=4 SV=1
MHSTQTNINDNLSKNGAIETVVVVGGGIAGWLTAGRVAARHKSHTTEGINVVLVESPTIPAVGVGEGTWPTMRSTLIALGISETDFIRECDASFKQGAKFAKWVDGTDNDFYYHPLVLPQGFAKGDIAAYWLAKDQKSCGNSFSNDVCFQEAICEKGLAPKTIRTPEFDAIVNYAYHLDSVKFAIFLQKHCTEKLGITHILDNVEKINTAGNGDIASVSTKNNGDICGELFIDCTGFSSLLLGKHYQVPFKSCKDILFIDTALAIQVPYEDEESPIASHTISTGQEAGWIWDIGLQHRRGVGYVYSSKYSSEQQAREILAQYVGTKFDNAKVRKIPINSGHREKFWQKNCVAVGLSAGFLEPLEASALVLVELSAQMIAEQLPTTRRSMDIVAKRFNDTFLYRWDKIIDFLKLHYILSKRVDNRFWSDNRDPKSIPQSLKDLMELWQYRSPADHDFTSNNEVFPAASYQYILYGMGFKTDYSHAFHLLDDWQYAEQQFAQNEKMTQTMTSTLPSNRELLNKIKQYGFSRL

SEQ ID NO: 83458 - protein, 578 aa, Lentzea jiangxiensis
  misc_feature (1)..(578): tr|A0A1H0TT13|A0A1H0TT13_9PSEU Tryptophan halogenase OS =Lentzea jiangxiensis OX=641025 GN=SAMN05421507_110202 PE=4 SV=1
MKMNAGRPSALDELVQTFSDDESAAVREWLGGAADAPQLPGISLRSNHEPLVEMLPRPAVDDQKAIRRVAVVGGGTAGYLTAIALRTKRPWLEVSLIESPSIPIIGVGEATVPGIVIFLHHYLGIDVEDFYRQVRPTWKQGIRFEWGPRPDGFMAPFDWDSNSIGTAGAVDAGGGIDGYTLQSLLMSAERAPVFDVGDRHLSLMKYLPFAYHLDNARFVSYLADIAKQRGVQHVEAKIEDVALSGDDWVDHLHTTDGRKLSYDFYVDCSGFRSMLLGKAFRTPFHSYASSLFTDSAVTGNVGHGGNLKPYTSAITMNSGWCWDIPTPQDDHLGYVYSSNAISDDQAAAELAARFPGVSEPRFVRFRVGRHEKAWRGNVMAIGNSYAFVEPLESTGILMITSSVQALVASLPGSWADPQCRDMVNVGLANRWDALRWFLSIHYRFNTRRDTPFWREVRANTDISGAQPMLDMYATGAPLRYRNPLLRTFVQGNAPTFYGLAGVETILLGQQVPTRLLHRAEPPARWQARRNAADAFVRRALPQLEALSRFHDDPALNQQLLFDADSWASPLRAEPIGML

SEQ ID NO: 83459 - protein, 507 aa, Sphingomonas sp.
  misc_feature (1)..(507): tr|A0A4R2TWK3|A0A4R2TWK3_9SPHN Tryptophan halogenase OS =Sphingomonas sp. PP-CC-3A-396 OX=2135655 GN=C8J40_1043 22 PE=4 SV=1
MSSNPSPERPEPARGMTVVIVGGGTAGWMAAVAFGRLLVPAGGRVTLVESDAIATVGVGEATIPPIRTFHAMLGIDEDAFLAATGGSYKLGIRFEGWSHPTESYVHPFGQIGTDIAGQSFATQWLRARQAGEAEALGQYSLEARAAETGRFSKPIANGDSPLSRIGYAYHFDAARYAHFLRAQAEAHGVVRCEGMVVRVEQGPAGIAAVHLAGGTRIAGDLFIDCSGFRALLIEGALAAGWEDWSSWLPCDRAVAVPSSADAAPLPLTRAIAQPAGWRWRIPLRHRTGNGHVFSSRYMSEDEATACLLDGIEGEALADPRVIRFATGHRRRFWSGNCVALGLAAGFMEPLESTSIHLVQSGLQHLLRMLPGTGVASSVVIERYNRVMTAEFVRIRDFLVAHYHLNSRPEHFWRDRAAAPIPEGLAEKLAMFRDGGRIFREPDELFNETSWLALLTGQNAVVDGHDPLCAALPIARAAHRIAQIEQVVTASLAHMPPHADALARLERG

SEQ ID NO: 83460 - protein, 497 aa, Sphingomonas sp.
  misc_feature (1)..(497): tr|A0A0Q4FP08|A0A0Q4FP08_9SPHN Tryptophan halogenase OS =Sphingomonas sp. Leaf16 OX=1735681 GN=ASE65_16495 PE=4 SV=1
MTDRRIAQVVIVGGGTAGWMTAAAAGRFLDDGQRRITLVESDAIGTVGVGEATIPSILNFNKLLGIDEAEFLRETKGSFKLGIEFAGWHRPDSGYFHPFGSFGRDIEGINFHQLWLKLRGEAGIGPIADYSPSIVAARAAAFGPPVGDPRSPLSGMAYAYHIDATLYAAFLRRRAEANGVARVEGRIVAVERADNGHVAAVVLDDGRRVEGDLFIDCSGFRSLLLGDTMGVGFEDWSHWLPCDRAIAVPTQRTEPVLPYTRATAHQAGWQWRIPLQHRTGNGVVYCSRFLDDDAAEKLLLSRLDSVATAAPRRLSFKAGQRERMWEGNVVAIGLSGGFLEPLESTSIHLIQQGISKLFALFPDRDFSRVERDEYNRQMADNYRSIRDFIILHYHATARDDSPFWDHVRTMEVPDSLTRKLDLFRHKGRIFRYEDELFATPSWVAVLLGQGVDPVGYDPVADALDEARLAGALRQMRGATQAAVAELPPHGAVLARLG

SEQ ID NO: 83461 - protein, 492 aa, Streptomyces sp.
  misc_feature (1)..(492): tr|A0A1Q5GFL2|A0A1Q5GFL2_9ACTN Tryptophan halogenase OS =Streptomyces sp. CB02366 OX=1703935 GN=AMK24_28925 PE= 4 SV=1
MSAQYDVIVVGGGPAGSTVSTLVRKRGHRVLQLEKETFPRYQIGESLLPATVHGIAHLLDVSDELKKASFTIKHGGTFKWGANPEPWTFDFAVSRRMPGATGYAYQVERMKFDKILLDNARKHGVEVRENSDVLDVLKAEDGRVRGVRYRDAEGREHEVSARFVVDASGNTGGLYKKSGSKREYSPFFRNLALFGYFNGGKRLPKPNSGNIFTCAFEHGWFWYIPLTPDLTSVGAVVNRDSASLVQGDPEKAMESFIAACPLIAEKLSEATRVTEGPYGELRVRKDWSYSNTKFWAPGMALIGDAACFVDPVFSSGVHLATYSGLLAARSLNSCLDGTVDETTAFEEFEARYRLEYSRFYEFLVGFYDMHHSEDSYFWQARKISNTADSDLESFVELIGGVSSDEFADAARARQRFAEASDEMAGMTHTAADDTGGPHGAVPGKVVGRLMEQGAALQARALLGDEAGAERPVRQGGLAASTDGLGWVPHARS

SEQ ID NO: 83462 - protein, 497 aa, Pseudoalteromonas sp.
  misc_feature (1)..(497): tr|A0A0W1KXE5|A0A0W1KXE5_9GAMM Tryptophan halogenase OS =Pseudoalteromonas sp. H103 OX=1761893 GN=ATS74_07470 P E=4 SV=1
MKPIKHVVIAGGGTAGWIAAALLNKVLGKVIDITLIESSTIGTIGVGEATIPPIIQLNNALGINEQDFINATNASIKLGIEFENWKTPSHSYMHAFGSFGKDFPFCDFYNFWVKGKITGSEDSLWDFSLNYQAAQQLKFAPLNTIPNTQLPGLSYAYHFNATRYAEYLKTLATSRGVKHIDAKIEQVNQCPHSGNIKSITLDNDTQINGDLFIDCTGQRALLIEQTLNTGFVDWSHYLPCDSAVAVQSQGTDSLKPYTRSIAHSAGWQWQIPLQNRVGNGLVYCSRYLSDESATQLLLNNLPAEPITEPRVIKFKTGRRLKQWHKNVVSVGLASGFLEPLESTSIHLIQSAVTRLIKLFPHYGISDALVAEFNKQSVTEIEHIRDFIILHYKLTEREDSTFWRQCKQMEIPDSLAHKLNLFKHTGKVVRENDELFAEVAWQQVFIGQGLIPDDYNSIVDSLSSEQLNDLFSTLKTLITSTVEQLPTHKDFLAKIKKA

SEQ ID NO: 83463 - protein, 504 aa, Brevundimonas sp.
  misc_feature (1)..(504): tr|A0A1S6ESQ9|A0A1S6ESQ9_9CAUL Tryptophan halogenase OS =Brevundimonas sp. LM2 OX=1938605 GN=BZG35_05185 PE=4 S V=1
MSGTVIRRIVIVGGGTAGWMAAAALAALVKRPDLSIRLVESEEIGTVGVGEATIPHIRSFNQRLGLDEDVFMARTQATFKLGIEFRDWGRLGDSYIHPFGAYGRSIDRVGFHHHWLRLRRSGAAADIHDYSLPVVAARMGRFTRPETDPRSLLSTFSYAFQFDAGLYAAYLREYAEARGVVRTEGRVTEVEQHPDSGHIRAVTLDRGDRIEGDLFIDCSGFRGLLIEGALKAGYEDWTQWLPCDRAVAVPCDTVEASIPYTRATALEAGWSWRIPLQHRVGNGYVYSSAFLSDDQAVERLMGRLEGPARAEPRMLRFTTGRRRRQWLGNCVAIGLSSGFLEPLESTSIHLIQAAITNLVELFPDTGFDPADADEFNRVMDLEYDRIRDFLVLHYNATQRDDTPFWDHCRTMAVPDSLAEKMALFRERGVVARYRDGLFLEPSWLAVYFGQRMEPDAWDPLSDRAPDAALADTLETLRTSIQRAAAAMPSHEAFVRACCAAGGHA

SEQ ID NO: 83464 - protein, 493 aa, Sphingomonas sp.
  misc_feature (1)..(493): tr|A0A0Q4G078|A0A0Q4G078_9SPHN Tryptophan halogenase OS =Sphingomonas sp. Leaf16 OX=1735681 GN=ASE65_00705 PE=4 SV=1
MSVTRVVIAGGGTAGWMAAAAIARTMGRMVEVTLVESEAIGTVGVGESTIPPLVTYNRLLGINEAEFMAATAATFKLGILFDGWRTADSRYFHSFGTTGRDHWAAGFQHYWLNGRTRGHDQPYDDYCTELVAALQGRFAHLPGDATNYAYQLDSGRYAQFLRTMAERDGTRRIEGRIARVELDGETGDIAALLLDGDRRVEGDLFLDCTGFRALLIEGALHAGYDDWTHWLPCDAAIAVQTESVGPPLPYTRAMAHDAGWQWRIPLQHRVGNGIVYCSRYLERDAALDRLLGNVEGAIRTEPNFLRFTTGARRRQWHRNCVAIGLSGGFMEPLESTSIHLIQRAVLRLLRLFPQGGVRPADIAEFNDQQLQDMEQIRDFLILHYKVTDRRDSPFWWQCAAMDVPVSLQQKIDLFRQSGRVFRRNEELFGENSWVQVMMGQGIVPDGHHPIADKLGDGELDRLLSMIRRQVADTVATMPPHGDYVARYCPADRP

SEQ ID NO: 83465 - protein, 519 aa, Thalassotalea sp.
  misc_feature (1)..(519): tr|A0A1Y5GF48|A0A1Y5GF48_9GAMM Tryptophan halogenase OS =Thalassotalea sp. 42_200_T64 OX=1856287 GN=A9Q98_15360 PE=4 SV=1
MNQQNKTTKTVVVVGGGTAGWLTAGRLAAHHKSNTDTGLNVILVESPNVPIIGVGEGTWPTMRSTLIALGISETDFIRECNASFKQGARFAKWVDGSEDDFYYHPLVLPQGFTQGDIAAYWLNKADDNKNSFSQDVCFQEAICEQGLAPKTIRTAEFGAVANYAYHLDSGKFAVLLQKHCTENLGVTHILDDVVAVNTLPNEDIASVATKENGDIAGDLFVDCSGFSSLLLGKHYQVPFKSCDDVLFIDTALAVQVPYDNENSPIASHTISTGQEAGWIWDIGLQHRRGVGYVYSSKHSSEEQARAVLAQYVGEQFDSLTVRKIPFVSGHREKFWQHNCVAVGLSAGFLEPLEASALVLVELSAQMISEQLPATRDVMDIVAKRFNETFLYRWDRIIDFLKLHYILSKRSDNAFWTDNRDPKSIPESLQDLMQLWKYRSPADLDFTSNNEVFPAASYQYVLYGMGFESDYSHSAHVLNDWHYAEQQFAKNKKMVQQASALLPTNRELLDKIRQYGFNTI

SEQ ID NO: 83466 - protein, 315 aa, Xanthomonadaceae bacterium
  misc_feature (1)..(315): tr|A0A4Q2XFJ7|A0A4Q2XFJ7_9GAMM Tryptophan 7-halogenase (Fragment) OS=Xanthomonadaceae bacterium OX=1926873 GN= EOP89_12240 PE=4 SV=1
VLANGRSVGGDLFVDCSGMRGLLIGQTLGVGYEDWSRWLLCDSALAVPCESVSPLTPYTRSTARHSGWQWRIPLQHRIGNGHVYSSAHIGDQAAADTLLANLDGKPLADPRPVRFRPGKRERAWEKNVVAIGLASGFLEPLESTSIHLIHTGLLRLISLFPRQDFDARDIAEYNRQTDFEYRDIRDFIIAHYKVTDREDTDFWRYCKAMDVPDSLKERLDLFASSARFFVRNKAELFREESWVQVLLGQGMAMRYDPMVDMIPDDQVLGFLSDIEAVVADCAASMPDHASYIQRNCSATATPVTRPTSAGLTVRV

SEQ ID NO: 83467 - protein, 499 aa, Alteromonas sp.
  misc_feature (1)..(499): tr|A0A2D5LK03|A0A2D5LK03_ALTSX Tryptophan halogenase OS =Alteromonas sp. OX=232 GN=CL592_07355 PE=4 SV=1
  misc_feature (384)..(384): Xaa can be any naturally occurring amino acid
  misc_feature (401)..(401): Xaa can be any naturally occurring amino acid
  misc_feature (406)..(406): Xaa can be any naturally occurring amino acid
  misc_feature (432)..(432): Xaa can be any naturally occurring amino acid
  misc_feature (447)..(449): Xaa can be any naturally occurring amino acid
  misc_feature (461)..(461): Xaa can be any naturally occurring amino acid
  misc_feature (473)..(473): Xaa can be any naturally occurring amino acid
  misc_feature (497)..(497): Xaa can be any naturally occurring amino acid
  misc_feature (499)..(499): Xaa can be any naturally occurring amino acid
MTTPPKQIVIAGGGTAGWIAAAALARKMGPLVNIRLVESSTIGTIGVGEATIPPLRTFHKLLQIDEQAFMRATAATFKLGIRFENWGRIGEQYIHSFGMTGQQSWLAEFVHFYLSAKARGLEGDYGDYCFELEAARQHKFATSAQSNIQYAYHLDAGNYVAFLKRFCSNLGVTHCDGVISQVLQHDNGDIKALRLASGELIEGDFFIDCTGFKGLLIEETLHTGYEDWSHWLLCDSACAVQTTSTEPAAPFTRSAAHHAGWQWEIPLQHRTGNGNVYSSAFMDDNAASEQLMQNVKGEAITTPRTLRFKTGRRNKTWHRNCLALGLASGFVEPLESTSIHLVIMGITRFMQLFPHGGNDQALADEYNQQTQLELERIRDFIILXYHVTQRDDSPFWEHCKXMTVPXSLQTRIALFKEQAHAFQKQNELFRVXSWAQVMLGQGVTPDXXXPAAAMLSDAQLXQSMQQQRQRVLXAVAQLPAHEDFIRRYCATPQKAEXLX

SEQ ID NO: 83468 - protein, 516 aa, Pseudoxanthomonas sp.
  misc_feature (1)..(516): tr|A0A4Q9TFX5|A0A4Q9TFX5_9GAMM Tryptophan 7-halogenase OS=Pseudoxanthomonas sp. NML171590 OX=2527958 GN=EYC45_ 08360 PE=4 SV=1
MDEAIRHVVIVGGGSAGWLTAGLIAAEHRDRHGPTLRVSVLESPDVPAIGVGEGTWPTMRDTLRRIGVGEADFVRACDATFKQGSQFVGWVDGGAHDRYTHPFTLPKGYGETQLAVAWAAQGEVPYAHLACFQPHLCDAGRGPKQFATPEFAAVANYAYHLDATRLGAFLRQHCVERLGVQHVVGHMDAVLSHENGDIAALAVRDQPALQGDLFVDCTGLRALLLGAHYGIAPVGVEDILFNDRALALQVPYADPNAPIACQTLSTAQRAGWIWDIGLSARRGVGHVYSSAFTSDEEAEADLRAYIEASGGPAAATLPPARRIELQPGYRPTAWHRNCVAVGLASGFVEPLEASSLVLVELAAARLADEMPATRAQMDLLAARFNETFAYRWQRVIEFLKLHYVLSRRPTPYWQAHREDASLPPRLRELLQLWRHQSPSRSDFPRSEEIFPSASWQYILYGMGARPHSRPARRSEDLQAAQACFAESAALVQRMLPALPSHRALVEHIKAHGLPRL

SEQ ID NO: 83469 - protein, 497 aa, Sphingomonas sp.
  misc_feature (1)..(497): tr|A0A0Q4FR99|A0A0Q4FR99_9SPHN Tryptophan halogenase OS =Sphingomonas sp. Leaf16 OX=1735681 GN=ASE65_16485 PE=4 SV=1
MTEQAQGVRVVVVGGGTAGWMTAAGLVGLLPAACSVTLVESESIGIVGVGEATLPHLRLYLERLGIDEAAFMAATEATYKLGIEFRDFGAIGDRYIHPFGTYGRPLGGVAFHHYWLRRAAAGAMPPIGAFSAGVTAAEQRRFERPGSDPHDPTTSFGYAYQFDATRFAPFLRDWSEARGATRIEGRIVAVERAGDTVRSVTLDDGQRIEGDLFVDCSGFRSLLLGDSLGEPWEDWSHWLPCDRAVAVPCASPEGVIEPYTRATAMPAGWRWRIPLRHRVGNGYVYASGHVSDDEAAAALLAGLDGEALADPRFLRFRAGRRRRSWAGNVVAVGLASGFLEPLESTSIYLVQAAITALIEHFPDGRVADVDRDGFNAAIDAEYDRIRDFLILHYHATTRDDSPFWNHVRTMAIPETLADKLALWRGSAQVSKYSHGLFLEPSWVAVYLGQRVVPDGWDPRADLPDAAGLDRALGSLAWAIADRVAAMPTHDAALERLA

SEQ ID NO: 83470 - protein, 508 aa, Shewanella pealeana
  misc_feature (1)..(508): tr|A8H1I8|A8H1I8_SHEPA Tryptophan halogenase OS=Shewane lla pealeana (strain ATCC 700345 / ANG-SQ1) OX=398579 G N=Spea_1098 PE=4 SV=1
MDIKRIAIVGGGTAGWLAANHLGKALQENDQLSITLIESPDIPTIGVGEGTVPAIRQSLQSFGISETEFIRRCDVTFKQSIKFVNWLDKSQHGQDNFYHHLFDMPGSVLQDLTARWLANKNSCYAGSVSPQHEVCEAFRAPKNISDPEYVGKLGYAYHLNAAKFAKLLGENAKQRFRVEHLWANVQEVILGKDGEIVSLVTDSAGKLDFDFYIDCSGFASILIDKALKVPFLNKAEQLFVDKAVVVQVPTANDDVIPPFTISTAHQAGWIWDIALSNRRGIGLVYSSKYMDDETAISKLDTYLGGTLAEHQHRIIPMTVGYRERSWEKNCVALGLAQGFLEPLEATSILLTDFAAGFLAQRFPDTTSQLAAIQQRFNHVMGYAWERVVDFIKLHYCLSDREDSQFWIDNRDPETMSVELKNRLAQWQDFVPCREDFFSRFEVFDLENYLYVLYGMQHTPERRQRNLELGAESCALQHRLHTVAKQLTAELPQHRDLLEKIKRYGLQKV

SEQ ID NO: 83471 - protein, 167 aa, Alteromonas sp.
  misc_feature (1)..(167): tr|A0A3D0Q295|A0A3D0Q295_ALTSX Tryptophan halogenase (F ragment) OS=Alteromonas sp. OX=232 GN=DEP33_06210 PE=4 SV=1
MTIPPKQIVIAGGGTAGWIAAAALARKMGPLVNIRLVESSTIGTIGVGEATIPPLRTFHKLLQIDEQAFMRATAATFKLGIRFENWGRIGEQYIHSFGMTGQQSWLAEFVHFYLSAKARGLEGDYGDYCFELEAARQHKFATSAQSNIQYAYHLNAGNYVAFLKRFC

SEQ ID NO: 83472 - protein, 519 aa, Shewanella sp.
  misc_feature (1)..(519): tr|F7RRK4|F7RRK4_9GAMM Tryptophan halogenase OS=Shewane lla sp. HN-41 OX=327275 GN=SOHN41_02947 PE=4 SV=1
MGTHSIDQVVIIGGGTAGWLSAAILAKKLNSRDSASVQITLIESPTIPILGVGEGTWPTIRNTLQMIGVDESEFMRECDATFKQGAEFVNWRETPAPGTSHSYFHPLSAVFHSAYNFSLAPYWLLGQSNLPYDLATTTQSRISMLGLAPKKITTPSYGAIQNYSYHLNANKFAEFLKRHCIEKLGVKFISANVVDVHLGEQGHITAVSTDTAGEIVGDFFVDCSGFRALLLGQALGVGWHKIDDIIFNDTALAMQVPYADADAPIASHTIATAHEAGWTWDIGLHNRRGVGYVYSSRHTTDERAEQVLRDYVGEQAKGLEVRKIPLNLGYREQFWKGNCVAIGMSAAFIEPLEASAIFLVEAAANMLADAFPRARASLEYTERKFNATFKLRWDKSIDFIKLHYCISGRRDTQYWRDNVDPASIPATLKEKLAQWQYQAPTKYDFDYAFEPFVLDSYLFVLYGLGFNTSLKGNESAYAEGDVAQAKFDEINQLTERLKLELPTHRQLIDKVYQYGFQAI

SEQ ID NO: 83473 - protein, 517 aa, Alteromonas sp.
  misc_feature (1)..(517): tr|A0A3D5F7S4|A0A3D5F7S4_ALTSX Tryptophan halogenase OS =Alteromonas sp. OX=232 GN=DGF36_08130 PE=4 SV=1
MSHSANPVNTPEVKRVVIVGGGTSGWMCAAAIARIAPPDTRITLVESEDIGVIGVGEATIPTLMEFNDFLGIKEHDLLRECQGTYKLGIDFVDWYQKGQSYFHPFGFYGRDTPEFSFHQLWLRLNAMAAKGEIPADAPGIISDYNLCTVAAMQGRFAPPQGGADTILSTMRYAYHFDSARYGQMLRRYAEQRHVERIEGIVNSVEQDHSTGLLKSVTLNSGQVLQGDLFVDCSGFKALLIDGAMQSEFVDWHHYLPCDRAIAVQSKLAGAPDPFTRSTADDAGWRWRIPLQTRLGNGHVYSSDFMEHDEALQKLLAGVEGEPVTQPLPLKFRTGHRKAFWDKNCVAIGLAGGFIEPLESTSIHLTQMGIQRLVNLWPGRGCNRSEIAQYNALMTADYERLRDFIVLHYNATEREDTEFWRYVKHMAIPDSLAAKLEIFRSNGRLIPSPEDLFTPHSWLAVMLGQGLYPQNYDVLVDRVPAQALLKNMQMLRMSVAKTAGSMPTHEEFIRRYCQASAA

SEQ ID NO: 83474 - protein, 503 aa, Xanthomonadaceae bacterium
  misc_feature (1)..(503): tr|A0A4Q2XWH9|A0A4Q2XWH9_9GAMM Tryptophan 7-halogenase OS=Xanthomonadaceae bacterium OX=1926873 GN=EOP89_00075 PE=4 SV=1
MAEPRTRVVVVGGGTAGWMTAAALSRLLPTQCSVRLVESEAIGVVGVGEATLPHIRSFNERLGIDEADFMARTRATFKLGIEFRDWNRIGDSYIHPFGTFGRGSGRVDFQHYWARLAREGVSMPPLDSMSYACALARSNKFERPETDRRRLSGTYGYAYQFDATLFAPYLRELAEGMGVRRTEGVILSVERDHDSGDIAAIVLDGGERIEGDLFVDCSGFRALLLGEAMAEPFVDWSHWLPTDRAVAMPCRTRTPVTPYTSAIAMPSGWRWRIPLQHRTGNGYVYASDFVSDDDARRALEAAVEGEALAAPRVLRFKAGRRRRSWVGNCVAIGLASGFLEPLESTSIYLVQQAITTLIEVFPERRIGATDRDEFNRLIDLEYDRIRDFLILHYHATTRSDSPFWDYVRTMAIPDSLSEKLELWRRRGRVVKYREGVFLDPSWVAVYLGQGIVPEGWDGRADPVESNALIGSLDALRNDIADDVAGRPDHRSFIEHYCAMAHAA

SEQ ID NO: 83475 - protein, 499 aa, Thalassotalea sp.
  misc_feature (1)..(499): tr|A0A1Y5H4G0|A0A1Y5H4G0_9GAMM Tryptophan halogenase OS =Thalassotalea sp. 42_200_T64 OX=1856287 GN=A9Q98_02050 PE=4 SV=1
MNQDKIQNVVIVGGGTAGWVTAALLSRVLGKTLNITLVESEQIGTIGVGEATIPPIITINNALGISEQEFLQATNATIKLGIEFENWKQKGDSYMHAFGGIGKNFPFCDFYHYWLKAKQLGDKSDFWDFSLNYQAAKHHKFSKAAKIDGTNMPGLKYAYHFDAGMYAQFLRKFSEAKGVTRIEGMVCKVNLNDDNGFVDSIELKDGNVISGDLFIDCTGLAGLLIEKALNTGYVDCSHWLPCDRAMAVPCESVTPISPYTKSIAHDSGWQWRIPLQHRIGNGLVYSSKYLSDEQAKELLLNNLDGKPLAEPKIIPFRTGRRRKQWHKNVVSIGLSSGFLEPLESTSIPLIQTAAIRLIKLFPYQGIKTFEVAEFNRQAKIEIEQIRDFIILHYKVNERDDSQFWRACQRMDIPESLQRKIELFRTTGKLFREQDDLFTEIAWQQVLMGQGIMPEDHHALADALTDQQITELMQNLKILIDRSVNNMPSHDDFINRAKII

SEQ ID NO: 83476 - protein, 489 aa, Alteromonas sp.
  misc_feature (1)..(489): tr|A0A359K819|A0A359K819_ALTSX Tryptophan halogenase OS =Alteromonas sp. OX=232 GN=DEH24_16340 PE=4 SV=1
MTAAALANRLPHSHYRITLVESAQIGTVGVGESTIPHIRQFNSALGITEDEFIAATSATCKLGIEFTDWGKVGESYIHPFGELGKPLAGIEFHHLWQAASLQGLDVPIESFSVAAVAARQRKFSPPHASREHLLSTYTYAYHLDASAYARFLRDYAEQRQVIRVEAQIREVKRDHEGGPITALSLDNGEQISADWFIDCTGFRSLLIGDYSQAEFIDWSEWLKTNRAVVLPCEKDGPSRPYTKAMARDAGWQWQIPLQHRIGNGYVYCSDYISDEEAEHTLRSTLPGEALADVRFLDFKAGCRKQLWVQNCVAIGLSAGFLEPLESTSIFLIQMGIAKFLEHLPGTHNDAARNQYNRELTEQYQVIRDFIILHYYLTQRHDTPFWRDCQAMTLPDSLTELILAFRDSGLVDKKQYGLWPAVCIGQHLHPKQVDSRVAAIPPQQLIGILNQLKSDIAAQVATLPNMDDYLSSLVAQTPLQKSGMRAGGQV

SEQ ID NO: 83477 - protein, 532 aa, Alteromonas sp.
  misc_feature (1)..(532): tr|A0A2D7GVN7|A0A2D7GVN7_ALTSX Tryptophan halogenase OS =Alteromonas sp. OX=232 GN=CL600_10350 PE=4 SV=1
  misc_feature (328)..(329): Xaa can be any naturally occurring amino acid
MHDNFEDNETAIQSIVVAGGGAAGWLTAAVIAAEHNVKSNHNISVTLVESPDVKILGVGEGTWPTMRDTLRKIGVDENEFLVACDASFKQGTRFTDWRYAPSNQRTDVYDHPFSLPAGFFEGNIGAWWLLNQHNDSGAPSFSHVVSAQSFLCDSHKAPKQAQTPPFAAVANYGYHLDAHKFAEFLRNHCVNVLGVAHVRDHIKAVTVDGIGNISALECTNGNITGDLFVDCTGFAATLIGGYYHSEFTDVSCGLKNDSAVAIQATYKNENEDIASATLSTAHKNGWIWDIGLPHRKGVGCVYSSEFCSEEKAVETLLSYVSSCDKLSXXSGDAIRKISFNPGYRKKAWVNNCVAVGTSAGFVEPLEASALVMVELSAKFIAQNLPAHRDLLKAVAKQFNANFSQRWERIVDFLKLHYVLSERRDSEYWRYMSSLETASDQLQEWLMQWRYRPVSTSDFIYADELFPAASYMYVLYGMKPPSAFHLERLRYSTSLMSSTYNAVRQTQKYGQQQLSALPSNRTLINSIRSVNRA

SEQ ID NO: 83478 - protein, 505 aa, Sphingomonas sp.
  misc_feature (1)..(505): tr|A0A0Q4FVE5|A0A0Q4FVE5_9SPHN Tryptophan halogenase OS =Sphingomonas sp. Leaf16 OX=1735681 GN=ASE65_14775 PE=4 SV=1
MSDQGSAIRSVAIVGGGTAGWMTAAALSHALGSRCAITLVESEEIGTVGVGEATIPPIKLFNDTLGIREADFLRETKGTFKLGIEFVDWARRGHRYFHPFGTFGKPFDLVAVHQHWLAARAAGSTVPLDDLSMAWGAAKRGRFAGPMGDPRSVASTFDYAYHFDAGLYAAFLRRYAEARGVVRIEGKVADVPLDGETGNVAAVTLHDGRRIDADLFVDCTGFRGLLIEGALATGYEDWTHWLPCDRAVAVPCATGGDGMTPYTRSTAREAGWQWRIPLQHRTGNGYVYCSHHLSDDEAAATLMANLDGAALAEPRFLRFTTGRRRQFWNRNVVAIGLSSGFMEPLESTSIHLIQTGIAKLLAYFPTRAFDPLPIAEYNRVAITEYERIRDFLILHYKLTQRDDAPLWRDCAAMQIPETLALKIAHFRHGGRLVTRDMDLFGPPSWAAVHLGQLNDPLSLDPLLDTSDDAAASRSFVDRLAGAIGAMAQSMPAHAAYLQQIGAAAE

SEQ ID NO: 83479 - protein, 506 aa, Sphingomonas sp.
  misc_feature (1)..(506): tr|A0A0Q4G059|A0A0Q4G059_9SPHN Tryptophan halogenase OS =Sphingomonas sp. Leaf16 OX=1735681 GN=ASE65_01915 PE=4 SV=1
MAIDQEPVRQVAIIGGGSAGWMAAAAIARFLPAGTDVVLVESDAIGTVGVGEATIPQLRLFNQHLGIDEDDFVARTGGSFKLGIEFAGWNGADSRYLHAFGTIGRAVGLVPFQHYWLAAGGGERPQSLWSHSACAQAAAQDRFDRDPGNPQAPAGTAWAYHFDAARYAAYLRERAEAGGVVRVEGRVVDVAQHGDSGLIAAVMLDDGRRIEADFFVDCSGFAALLIGRMAGDRWDDWSALLPCDRALAVPCAAVAPVTPYTRATARAAGWQWRIPLQERTGNGLVYSSAHLSDDEAAATLLGNLDGAALGDPRPLRFTTGRRAAPWIGNCVALGLAAGFMEPLESTSIHLVQSGIARLLSLWPSATPRAADIAEFNRQSAREWLCIRDFLIAHYALNGRDEPFWQERRMAPLPDTLRERIALFQQSGRIVRDEHELFAEVAWLQLFVGQGVVAGGYHPLADALPAARRDQFLDISARHVAATVARMPTHDQYLRAHCPAPATKVAA

SEQ ID NO: 83480 - protein, 497 aa, Altererythrobacter sp.
  misc_feature (1)..(497): tr|A0A0T2QGY5|A0A0T2QGY5_9SPHN Tryptophan halogenase OS =Altererythrobacter sp. Root672 OX=1736584 GN=ASD76_081 20 PE=4 SV=1
MTDRPAPRRVVVAGGGTAGWVTATALARQLGSLVEVTLVESEEIGTIGVGESTIPTARAFHEFLKIDQQAFMKASRATFKLAISFENWARDGDRYLHSFGTMPMRTWMADFQHFWLEARARGEAGEIGEYYLEHEAARLHRMDLKGDPKLNYAYHLDASLYAKFLRRIAENDGVTRIEGKIANVERDGESGDIAVLVLEDGTRLTGDLFIDCTGFRSLLLGQTLETPFEDWGKWLPTNSAWATQSEGVGDAYPYTRAIAHGGGWQWRIPLQHRMGAGFVYASEHMEAQPALDQFLATLEGRPLRDPFPIRFRTGRHRQAWVGNCVGIGLAGGFVEPLESTTIHLIMIGITRLIQLFPFGPDSSAQRERFNELSQNEIERVRDFIILHYHLTERDDTSFWQYMRNLDVPDTLRERMESFAQGAQAWQSTNEIFRVDSWIQVLLGQRMTPQGWNRVGALMKDGRLKQTLEDAGQMVAARVAAMPSHQQFIDSYCGPAQS

SEQ ID NO: 83481 - protein, 500 aa, Streptomonospora alba
  misc_feature (1)..(500): tr|A0A0C2FMB0|A0A0C2FMB0_9ACTN Tryptophan halogenase OS =Streptomonospora alba OX=183763 GN=LP52_00645 PE=4 SV= 1
MNAPEEFDVIVVGGGPAGSTAATLIADQGHRVVLLEKERFPRYQIGESLLPATVHGVCRLLGADEEIRRAGFTTKRGGSFRWGTSPDPWNFLFALSPELSGPTSYAYQVDRMTFDDILLRNAARHGVEVREESAALEAVTTNGRVTGLVYSDPSGVRRELAAAHVVDASGSTGRLHGAAGGTRHYSDFFQNLAVFGYFAGGGRMPEPDAGNILCAAFDEGWLWYIPLREDLTSVGAVLNHDQAPRIQADREGTLRESIQRCGIVRDLLGDTERITEGTYGSVRVRRDYSYANTRFWAPGITLIGDAACFIDPVFSTGVHLATYSGLLAARSVNSVLAGELSEERAFGEFEGRYRREYAVFYEFLAAFYDMRQREETYFWTARKVTNMQAEDMQAFATLVAGASSAEAALVGADTLAQRFGSSSAELTGAVERTGAARTTSGERMTELFRAPVVADVMAEMNRIQRRGATGPAAGEAPLLDGGLVPSADGRHWVEPDAAPA

SEQ ID NO: 83482 - protein, 504 aa, Azambacteria bacterium
  misc_feature (1)..(504): tr|A0A350QDI4|A0A350QDI4_9BACT Tryptophan halogenase OS =Candidatus Azambacteria bacterium OX=2053511 GN=DCX24_ 01670 PE=4 SV=1
MINAVNDVVKSAVKKVVVLGGGTAGWMAAALLKKVLATAVDIELVESEDIGTVGVGEATIPPIRLFNNVMGINEAEFLRETKATIKLAIKFDNWRVPGEGYFHTFGAPGKSLAFCHFHHLWLRARQQGDKTDLWQYDLNYLCAMAGKFAPINAKDSILELPYAYHFDAGLYARYLRKLSEQMGVVRHEGKVQQVFQHPSGDIKCLVLDDGRELSGDLFIDCSGFRGLLIQDKLNAGYDDWSHFLPCDRAVAVPSERFEKTIPYTRAIAHSAGWQWRIPLQHRNGNGLVYSSAHYSDEQASDLLLANLERKALAEPKFLRFKTGRRRQQWQRNVIAVGLSSGFLEPLESTSIHLIQSAVVRLIQLFPHNGICQSAINEYNRQSELEYTQIRDFLILHYHVNQRNDSQFWRDMQQLAIPDSLHQKMAIFADNGQLFRDQNDLFLESSWLQVMLGQGIEPKDYHPIANNFSAEKLRDMLANIQAIKQEPLGKLPDHDTFIQTMISRS

SEQ ID NO: 83483 - protein, 501 aa, Alphaproteobacteria bacterium
  misc_feature (1)..(501): tr|A0A2A5CKT6|A0A2A5CKT6_9PROT Tryptophan halogenase OS =Alphaproteobacteria bacterium OX=1913988 GN=COA81_0193 5 PE=4 SV=1
  misc_feature (11)..(11): Xaa can be any naturally occurring amino acid
  misc_feature (26)..(26): Xaa can be any naturally occurring amino acid
  misc_feature (134)..(134): Xaa can be any naturally occurring amino acid
  misc_feature (148)..(148): Xaa can be any naturally occurring amino acid
  misc_feature (237)..(237): Xaa can be any naturally occurring amino acid
  misc_feature (266)..(266): Xaa can be any naturally occurring amino acid
  misc_feature (306)..(307): Xaa can be any naturally occurring amino acid
  misc_feature (311)..(311): Xaa can be any naturally occurring amino acid
  misc_feature (469)..(469): Xaa can be any naturally occurring amino acid
  misc_feature (472)..(472): Xaa can be any naturally occurring amino acid
  misc_feature (479)..(480): Xaa can be any naturally occurring amino acid
  misc_feature (486)..(487): Xaa can be any naturally occurring amino acid
  misc_feature (497)..(497): Xaa can be any naturally occurring amino acid
MNDRKIRHIAXVGGGTAGWMTAAALXNALRGNCRVSLIESEDIGVVGVGEATIPPIKLFNQSLGLDENDFLRHTQGTFKLGIQFVDWAKKGQHYFHPFGQYGADFDSVPLYHYWLQARAQGDETSLDEYSMAWXAARNGKFNKPTQDXKLVQSTFDYAYHFDAILYGKYLRGYAEQKGVERIEGKVVDTHLRPEDGFIDHILMEDGTKVKADLFIDCTGFRGLLIEGALKTGYENWXHWLPCDRAIAVPCVNDDTLAPYTRSTALXAGWQWRIPLQHRMGNGYVYCSDYISEDEATTVLLDNLSGXXLAGXRVLGFTTGHRKKFWNKNCIAIGLSSGFLEPLESTSIHLIQSAVTRLLALFPNRDFDPLAQQEYNRITLAEYEATRDFIILHYKATERRDAELWRYVANMDIPANLKYKMDHFRSGARIVASDYELFQNPSWLAVMVGQHVWPEHYAPLADLRGIDGAXMLXGLRRVMXXAVSVMXXHQDYIDHYCXAAAQ

SEQ ID NO: 83484 - protein, 507 aa, Altererythrobacter sp.
  misc_feature (1)..(507): tr|A0A0T2Q8M1|A0A0T2Q8M1_9SPHN Tryptophan halogenase OS =Altererythrobacter sp. Root672 OX=1736584 GN=ASD76_156 45 PE=4 SV=1
MSPAEKTPVRVVVLGGGTAGWMSAAALARLLGDLVEVELVESEDIGIVGVGEATLPHIRGFVERLGIDEAAFMKATHATYKLGIDFRDFGKIGESYIHPFGSFGEEVAGVGFHHYWLELQRQGMADPLGSYSLAVEAALANKFAPPAQDTSLASSYGYAYQFDATLFGPFMREFGLGIGVKRTEGKVIEVRQDAESGDVTTLVLEDGREISGDLFIDCSGFRSLMLGQTLGEEWEDWTPWLPCDRAAAMPCDHVTEEIEPYTRAIARPAGWQWRIPLQHRIGNGYVFSSAFISEDEACEFLLANVEGTPRAEPRLLRFKAGRRRHSWNRNVIAVGLASGFLEPLESTSIYLAQMAITYLIELFPLGGKADARDRAEFNRLVDMEYDRVRDFLILHYHATTRDDSEFWNHVRTMKVPDTLASKMELWRETARVEKYSDGLFYDASWIAVYLGQGVVPDRYDPRVGIPDPARVARAMGSLQGAIRSEVAAMPGHREYLTAARERLAEPL

SEQ ID NO: 83485 - protein, 489 aa, Brevundimonas sp.
  misc_feature (1)..(489): tr|A0A1S6ESP1|A0A1S6ESP1_9CAUL Uncharacterized protein OS=Brevundimonas sp. LM2 OX=1938605 GN=BZG35_05190 PE=4 SV=1
MRPPASLLIVGGGSAGWMTAAAVSRAFGPRLSVRLIEDPQAIGDSGTLAPFDATLPSLSGFNASLGLDETALIAGTGATFRLGTVFRDWSRRDRDYIHPLSEIGGTLEGVPFHHYWLRLKAAGKAPPLEDFALAAVAARAGRFSRPSDDPRSVTSTMAYGLHLPVAPYVAALRAVALRQGVEVVAGAFAEVERGAEPDTLAAVTTRDGRRFEADLFIDATGPAADLIGRLGATHVDWSRWLPCDRIVASTVPGPLGPPLTEARAVRNGWLWRVPLATGMGSARISASAFAGGTTEGTGFTNGRRSQTWIGNCVAIGLSAATLEPLEASGLHRVQSGVSRLLGLFPTGGPMTAGAAEYNRLMAAEADRLRDMLILHYHANARTGEPLWDAVSQTPPPEELAHKIRMFSSRGRISLYDEETFEDAAWVSVFLGQNVIPRRYHPLADHRPLDEVRGQLERMRAVIARAAEAMPTHAAALSGSPIAPALSRVS

SEQ ID NO: 83486 - protein, 505 aa, Sphingomonas sp.
  misc_feature (1)..(505): tr|A0A0Q4F7Z2|A0A0Q4F7Z2_9SPHN Tryptophan halogenase OS =Sphingomonas sp. Leaf16 OX=1735681 GN=ASE65_12795 PE=4 SV=1
MTDRRIASVCIVGGGTAGWMTAAALANRLAGLDVAVRLIESEEIGTVGVGEATLPHIRAFNTTLGIAEPELMRATEATYKLGIEFCDWGRIGDRYIHPFGNYGPVDDGIPFYHQWLRLRAMGDTSRLDEYSYPVIAAEQNRFRHPASEPGRVESSFGYAYQFDASLYAAFLRRYAEARGVERSEGKVVDVALDGGNGFVRNVTLADGRVIGADLFIDCSGFRGLLIEGALQSGYDDWSRWLPCNRAVAVPTESRGPLGPYTRATARTAGWQWRIPLQHRVGNGHVYCSDFISDDDAQQQLIDHLDAPMQAEPRRLRFTTGRRRDFWKRNVVAIGLAGGFLEPLESTSIHLIQDGITELLGLFPDRGFAAEDIDEYNQRMALHFERVRDFLLLHYVATQRDDSPMWRHFRALTLPDSLRHKIDTWRTRGYVVPYQFGLFLPPSWIAVMLGQGLVPGACDPRVAGMAAGALVKRAAALRAEVADAVRATPDHADYIRRSPAAAGLAA

SEQ ID NO: 83487 - protein, 524 aa, Sphingomonas sp.
  misc_feature (1)..(524): tr|A0A0Q4KT26|A0A0Q4KT26_9SPHN Tryptophan halogenase OS =Sphingomonas sp. Leaf38 OX=1736217 GN=ASE88_14170 PE=4 SV=1
MPDADNSPSAVQTVVVVGGGSAGWLAACRLAARSVQTGSRLTVRLVESTNVPSVGVGEGTWPTMRNTLRKIGIDETTFIRSCDAALKQGARFVGWTDGSADDAYYHPLNPPAGAGDIDLAPYWLGRPIAGASADAASFADWVDYQAALCDAGLAPKTITAPEYGGHANYAYHLDAGKFATLLRDHAVNSLGVEHVLGDVVRANQADNGDISDVELADGRRLAGDLFVDCSGFAALLIGGVYDVPFRSCRDILFADRALAMQIPYQTEHDPIACHTISTAQDAGWIWDIGLWTRRGVGHVYSSAHTSDDEAEAALRRYAGPAAEQLPVRRITFEGGHRERFWQNNCVAIGLSAGFIEPLEASALMLIETSLDALVDRLPQTRSTMDAVARQFNATFQHHWQRIIEFLKLHYVITQRRDTAFWRDNVAAASIPDGLQERLDLWTHHSPAPQDFAHAREVFSWPSYQYVLHGMRFGGSYRGQPATAEGSSAAALVARNARVRAELVSKMPRHRDLLRAVREHGLQRV

SEQ ID NO: 83488 - protein, 424 aa, Streptomyces sp.
  misc_feature (1)..(424): tr|A0A3N6GLD8|A0A3N6GLD8_9ACTN Flavin-dependent tryptop han halogenase RebH OS=Streptomyces sp. ADI97-07 OX=152 2762 GN=rebH PE=4 SV=1
MSSSIFGISAEYDVIVIGGGPAGATTAGLLAKRGHRVLVLDRERFPRYHVGESLIPAFMRPMEEMGLTERMDERGFERKYGGSLVWGNNQVPWKFGFLKGKYPYAFHTRRADLDAMILDRARELGAHIIEDATVKEPIEENGRVVGVRYALRGVDGVREVRAGLVVDASGQARVLSRRFTDVKWHEELRNVAVWTYYDNCERLEGDEYTNILIEGLDEGWFWAIPIDKGTISVGYVTRSATAGEGGQSLEDLFHSEVGRTTKLKHMLRNGRQSAGFRTARDWSYHSDRFYGDGWVLVGDSAAFVDPLFSTGVALASLAGSTLAQIVDQIIKHPEIETKALDRYATAYSGFFDEIREFVERFYDRTKYKEFYHSLAQEMIDPEHERKPADDFVTLISGLSGNHPMFHIGLDDLIADVSQPEITKS

SEQ ID NO: 83489 - protein, 499 aa, Brevundimonas sp.
  misc_feature (1)..(499): tr|A0A1S6ETY0|A0A1S6ETY0_9CAUL Tryptophan halogenase OS =Brevundimonas sp. LM2 OX=1938605 GN=BZG35_07310 PE=4 S V=1
MTEPRKTRVVIAGGGTAGWLAAAVLTRQLGSLLDITLVESEEIGTVGVGESTIPTVRSFHALMGVDEAEFMRTTGATFKLGISFEGWTRPGDRYIHSFGDVGKSTWMGDFQHFWLEAKDRGIAGDLGDYCFEHQAAAQGRFATGPESRINYAYHLDAGRYARYLRGRSEAAGLVRREGRIERVERDPETGLIAALILADQQRIDGDLFLDCTGFRSLLIGEAMGVGFEDWGHWLPTNRALAVQTTSTGPAVPYTRAITHDAGWRWRIPLQHRVGNGLVYASDFLSDDEARARLLASIEGDRLIEPGLIRFRTGRRLKAWEGNCVALSLASGFVEPLESTSIHLIMTALTRLMQAFPFDGISPAVVARYNDQSRAELEGIRDFIILHYHLNEREEPFWQRQREMEVPETLKARLALFAEGAQAYQAQDDLFRVASWLQVLVGQGMQPRQYHHMARLMPDAALAGALGDLKRNIDKAVAALPTHEAFLDRYCRERQPAQAA

SEQ ID NO: 83490 - protein, 504 aa, Alphaproteobacteria bacterium
  misc_feature (1)..(504): tr|A0A4Q3YPU1|A0A4Q3YPU1_9PROT Tryptophan 7-halogenase OS=Alphaproteobacteria bacterium OX=1913988 GN=EON58_05 145 PE=4 SV=1
MHNPDSAITPRQVKRVVIAGGGTAGWMAAAALSKTLGKALDIVLVESEEIGTVGVGEATIPTLVTFHRLLEIKEQEFMAATQATIKLGISFENWLEREHRYIHPFGVSGKDHWMAGFVHFWLRGREQGIAGDFGDYCVEHRAAREDKFAHLPRGAMNYAYHMDASLYAKFLRKFSEAHGAQRIEGKIVEVVTDEDSGYITSLKLDGGAEVEGDLFIDCTGFRALLIGKTLNVGFADWSHWLLNDSALAAQTTAVRDAVPYTRAIAGKSGWQWRIPLQHRVGNGIVYSSRHISDDEAKQEFLSSLEGEVIKEPWPVRFRPGQRLQCWSKNCIALGLAGSFIEPLESTTIHLIQRGITRLLQTFPDVITQAGIDEYNARLDSEIQHVRDFVVMHYHLTNRRDTPYWRTVGSMDIPPSLRHRIELFRETGSVFHVPLELFAENSWIEVMLGQGVMPRRHHPVADVMSDAELVRFLGDIRANVDNTVRQMPAHMDYLRGYCPGQPPTR

SEQ ID NO: 83491 - protein, 521 aa, Alteromonas sp.
  misc_feature (1)..(521): tr|A0A359K845|A0A359K845_ALTSX Tryptophan halogenase OS =Alteromonas sp. OX=232 GN=DEH24_16000 PE=4 SV=1
MQQSNAITQVIVVGGGAAGWLTAGILAATAAQPCAVTLVESPDVGILGVGEGTWPTMRGTLQTLGIDEAAFLAQCDGAFKQGTLFKQWQHNQASDQYYHPFSLPVGYGDGDLHAWLRSLGEGPSFAHEVSTQPWLCDNHLAPKQIQTPAFAGVTNYGYHLDAYKFAALLKQHATTRLGVKHIVDHVESVDGAPGEAIRAIVGKQYGAIHGDLFVDCSGFSARLIGQHYNQPLISCGEQLVNNRAVAIQARYKSPDTPIASVTRSTAQKNGWIWDIALPERKGTGYVFCSDYCDDDTALDTLLKYLNDDPIVADVDKASARFFSFKPGYRESPWQANCVAIGTSMGFLEPLEASALVMVELAASHLARHMPFTTEQLGPAARQFNRIFSQRWSRVVDFLKLHYVLSKRDDSAYWRYMRNPDSGSEQLQDWLSMWRNRSPDPLDFNLREEVFPTASYLYVLQGMGFTPALSARKKNAAGDSSKVRQRLQQHQQNVHMQLNGLPTNRALLNHLTGAHNINKEYS

SEQ ID NO: 83492 - protein, 507 aa, Sphingomonas sp.
  misc_feature (1)..(507): tr|A0A0Q4TYJ6|A0A0Q4TYJ6_9SPHN Tryptophan halogenase OS =Sphingomonas sp. Leaf257 OX=1736309 GN=ASF14_14155 PE= 4 SV=1
MSVVEGQARSILIVGGGTAGWLTAAYLARFLGPATRITVLEDPAIGAIGVGEGAFPTMRSTLRFLGIDEAHFIRTAGATFKQGIRFDDWRHAPDGGRRHRYVHPFEPPFQADGVDLVAHWLAQDPAARAPFAEAVTIQHRVAAAGRGPKQAGEGAFDGPLSYAYHFDAHRLVALLADHAMSLGVRHLEGRLTSAEVGADGLIAHVVTDRQGMLTADLYIDCTGQRAELISGALGEPLLPVRDQLFTNRALACRLPYDAERSHALPTMTIATAHRAGWTWDIGLAEGRGIGTVYSDAHMDDEAAIATLAAYLGQDPHRLEPRLLTFEPGYRQRPWIGNCVAIGLAGGFLEPLESTGIVLIEAAVAMLAELFPHRGPIAAPAARFNTLMTARYRTIVDFLKLHYCLSSRDEPFWCDNGAAGTISDRLRDLLEQWRYRPPGRFDFTLDVESFAHFNYQYILYGMGFADGEGRPTGASGEAERLFRKLQMFGDRAVADLPSHGELVAAMRG

SEQ ID NO: 83493 - protein, 537 aa, Sphingomonas sp.
  misc_feature (1)..(537): tr|A0A0Q4U166|A0A0Q4U166_9SPHN Tryptophan halogenase OS =Sphingomonas sp. Leaf257 OX=1736309 GN=ASF14_13235 PE= 4 SV=1
MTPHSDHLIRRVVIVGGGTAGWMAAAAFARLLNNGYTHVTLIESEEIGTVGVGEATIPPIITFNQMLGLDENDFLAKTAGTFKLGIEFVDWGEKGERYIHPFGRHAQDLQGVHFHQLYLRERSRRALPDIAEWSMSAVAAKAGKFGRAKPDARSPIRELFYAFHFDASLYARYLRGYAERGGVTRIEGRIDAVNLRPEDGYVEAVTLADGRRIEGDLFIDCSGFRGLLIEEALGTGYESYAQWLPCDRAVAAPCALPNPAEPDPFTRATARDAGWQWRIPLQHRMGNGLVYCSDYLDSEAAEAQLLGSLEGELLGDHRHLRFTAGRRRQSWNRNVVALGLSSGFLEPLESTSIHLVQAAIQRLVALFPDTRFDPAERDEFNRQMHDLYEDVRDFIILHYKATRRDDTPFWNRVRTMEVPESLARKMALWSGKGRLFREGYDLFSNPSWVAVCLGQGLVPQSWEPAADALDEDLVAQALEQMRAGYADTAARMPSHGDFLRMTAPSPLAPAMTAVRGGQDGFDFARTSSTVQAKGPLL

SEQ ID NO: 83494 - protein, 506 aa, Sphingomonas sp.
  misc_feature (1)..(506): tr|A0A0Q4KPF2|A0A0Q4KPF2_9SPHN Tryptophan halogenase OS =Sphingomonas sp. Leaf38 OX=1736217 GN=ASE88_07385 PE=4 SV=1
MNEHSIREVVIVGGGTAGWMAAAALSKFLGSRQGGAGQPRIRLIESEEIGTVGVGEATIPTIATFNQMLGIDEDDFVAKTQGTFKLGIEFVDWRRIGERYFHPFGQFGHDIEGLSFHQFFLKLAKQGQCADIWHYAPCAVAAAAGRFARQSPDPRSPFGTLPYAFHFDAGLYARYLRAYAEARGVERIEGRIVDVGLRSEDGFVESLTLDGGRRVEGELFVDCSGFRGLLIEGALKTGYEDWRHWLPCDRAVAVPTANIGDPAPFTRSTARNAGWQWRIPLQHRTGNGYVYSSAHISDEDAEATLLSTVEGPPIADPRRLAFVTGRRKRFWNRNVVALGLSGGFLEPLESTSIHLIQTGIAKLLALFPDRRFLQVEAGEYDRLMGSAYDGVRDFIILHYHATTRDDSPFWNHVRTMTVPDSLRRKTELFRAKGRFFRYDDELFSLASWVAVMLGQGITPEGYDPIVDGLDESKLVEAVERMRLGIRQTIAQMPSQSDYIRANCAAI

SEQ ID NO: 83495 - protein, 528 aa, Fulvimonas soli
  misc_feature (1)..(528): tr|A0A316IGU8|A0A316IGU8_9GAMM Tryptophan halogenase OS =Fulvimonas soli OX=155197 GN=C7456_10189 PE=4 SV=1
MARLRKILIVGGGAAGWLVACYLAKAVNAAAPDAIRVELVESPGIGLLGVGEATFPSIRGTLSAIGLDERRFLAGATATYKQGIHYRHWVRPPGAPGADHFFHPFNAPSQRPGGPELLPYWLLGEAPAGLSFAEAVSMQTLLVGHNRAPKRLRDPDYQGPLNHAYHFDAALFARVLAEHGERTLGVRRHLATIGRVELDEGGAIAGVVTAELGTFSADLYVDCTGLRSLLSGGAMRSPFRSRRDVLFADRAVAMQVPYPSPDAPIPSCTIATAQEAGWIWDIGLQRRRGTGYVYSSRHTSQERAEEVFRRYLGPAAEGVEPLHIRFETGYRPQHWRRNCVAVGLAGGFVEPLESTGIALVELGAYLLTHLLPGDTGDMERAARHYNEMMVARYERIIDFIKMHYCLSQRRDAPFWADNADPAGIPDALRDKLAQWRHRPPHRLDFVGDLEMFLVSSWQYVLYGMEFRTDLEPMRSAYPRAEEARREFAMIQLAARQALGDLPGHRELVEGLCREHAQRGRDAAAAAAG

SEQ ID NO: 83496 - protein, 547 aa, Sphingomonas sp.
  misc_feature (1)..(547): tr|A0A3M0FRC0|A0A3M0FRC0_9SPHN Tryptophan halogenase OS =Sphingomonas sp. PP-CE-3A-406 OX=2135659 GN=C8J44_3322 PE=4 SV=1
MNEHSIRRVVIVGGGTAGWMAAAAFARFLNNGYTEITLVESEEIGTVGVGEATIPPLINFNQMLGLDENAFLAATSGTFKLGIEFVDWGALGERYFHPFGNYGHDLQGVHFHQLWLREKARRPIDDISAWSMSAMAAANGKFGRATGDARSPVRELFYAFHFDASLYARYLRDYAERAGIVRIEGKIAEVNQRPEDGYVAAVTLEDGRRIEGDLFIDCSGFRGLLIEETLHTGYESYAQWLPCDRAVAVPCALPNPGEPDAFTRSTAHKAGWRWRIPLQHRMGNGLVYCSKYLGDDEAEAQLVASLEGEQLAEPRRLQFTAGRRRDCWNRNVVALGLSSGFIEPLESTSIHLVQAGIQRLIALFPDKRFDPVERDEFNRQMHDLYEDIRDFIVLHYKATRRDDSPFWNQVRTMDVPESLQHKIDLFAGKGRLFREGYDLFSNPSWVAVCLGQGITPQGWEPAADALDEQKVASALEQMRRGYLDTAQRLPTHGEFLRRTALSPLAAQAAPSSSAPASAPAPTSSDDVPFFAFTAESPFDVGGGGSPL

SEQ ID NO: 83497 - protein, 479 aa, Sphingomonas sp.
  misc_feature (1)..(479): tr|A0A0Q4L2S9|A0A0Q4L2S9_9SPHN Tryptophan halogenase OS =Sphingomonas sp. Leaf38 OX=1736217 GN=ASE88_07375 PE=4 SV=1
MTAAALAAVAGPTVADVHLVESEEIGIVGVGEATLPHIRAFNTRLGIDEAEFMRATGATFKLGIEFCDWARIGDSYIHPFGAFGHDVDGVGFHHYLSRAGQIATLPDYSLPVVAARHAKFAPPLDDPRSLLSTFGYAYQFDATRYAPFLRARAERQGVTRTEGRVVDVERSSTGDVVAVVLGDGRRMTGDLFVDCSGFRSLLLGQAMGEPFEDWSHWLPCDRAVAVPCADAGTLKPYTTATAMPAGWRWRIPLQHRVGNGYVYSSAHIDDGAAQDALLRSIESTSLADPRMLRFKAGRRARSWVGNVVGVGLAGGFLEPLESTSIYLIQLAITQLLELFPATPISPVDRDTFNRVVDLEYDRIRDFLILHYHATARDDSPFWDHVRTMAVPDTLAEKLALFRKRGRVMTYREGVFLEPSWIAVYLGQGVVPAGYDQRADRPSDAALAQALARLRTETRDAVMTMPDHAAYIAQSGAAAA

SEQ ID NO: 83498 - protein, 513 aa, Sphingomonas sp.
  misc_feature (1)..(513): tr|A0A3M0G383|A0A3M0G383_9SPHN Tryptophan halogenase OS =Sphingomonas sp. PP-CE-3A-406 OX=2135659 GN=C8J44_0831 PE=4 SV=1
MHQIRNIVIVGGGTAGWLTAGVIAARHKGQREHGFTVTLVESPNIPTIGVGEGTWPTLRATLRKMGVSETELFRHCNAAFKQGARFNRWTTGAVDDGYYHPLMLPQQFGSLNLAPHWLAEDGADSFCDAVTPQGRICDEGLAPKTMATPEFDGVANYAYHLDAGKFSHFLQRHCCDTLGVRHVLADVTDVILDETGDIARVETAQGVSIEGDLFVDCTGFAAKLIGEAMGVPFRSCADTLFCDTALAVQLPYERPDDPIASHTISTAQSAGWIWDIGLPHRRGVGHVFSSSHIDVDAAEQELRAYIGPAGKDLPVRKLSIRAGHRETFWKGNCVAVGLAAGFLEPLEASAIVLIELSAKMIAEQMPVCREVMDVVANRFNATTQYRWGRIIDFLKLHYTLTKRTDTDFWRDNVRPESIPDRLRGLMELWQYQSPWIHDEFDRAEEVFPSASYQYVLYGMGARTAVMPGTIEADAELARRARRENNVQTQRMMSSLPGHRDLIDRIVKHGLQPI

SEQ ID NO: 83499 - protein, 445 aa, Alphaproteobacteria bacterium
  misc_feature (1)..(445): tr|A0A3M1G7E2|A0A3M1G7E2_9PROT Tryptophan 7-halogenase OS=Alphaproteobacteria bacterium OX=1913988 GN=D6782_05 805 PE=4 SV=1
MKAFFRALGVAETAWMAQCNATYKNGISFHGWSQKPGCASYFHPFPSPIDAHTTPAFNYNAHARRRGIDLVARPDRFFLSAKLAEKRLAPIANRNFPFELAHGYHFDALLVGRFLRDLAISRGVRHIEQTVVGVDCGETGDVKQIVFDDGRTLGADFFIDSTGFRGLLLQETLKTPFVSYDDNLFNDSAVVLPTAPDAAGLRSETRSIAMRHGWRWEIPLTNRTGNGYVYASAFCSADEAETELRAALGLLDSAIAARHLKMKVGRLERHWVRNCLGVGLSQGFIEPLEATALHLVQATVESFMENFESGGFTNAQERAFNDEINARFEGVRDYIVCHYRMSQRSDTDYWRANAANQALSLSLRAVLDCWFSGGDMREEIRRQDIGRYYTDMSWQAMLGGYGHFPKTLRAPAAHERRFDMAVIDDFIERCALNFRPHRDVLEGAA

SEQ ID NO: 83500 - protein, 513 aa, Proteobacteria bacterium
  misc_feature (1)..(513): tr|A0A1W9H8I4|A0A1W9H8I4_9PROT Tryptophan halogenase OS =Proteobacteria bacterium SG_bin5 OX=1827382 GN=A4S12_0 4190 PE=4 SV=1
MHDGKRGRRIERVVILGGGTAGWMTATALAKSFGPRLAITLLESAEIGTVGVGEATIPTIHWFNELIGLDEAEFLRATKASFKLGIEFVDWTRPGHRYFHPFGSYGVALPGVAFHHRWLKAAREGLELPLDAFSLATRLAADNRFAKPQGDARSILSTLGYAYHFDAALYAQHLRGLAEAAGVTRIEGKLQQVERDGESGHVTALTTERGERLAGELFIDCSGFRALLIEGAMGAGYEDWSHWLPCDRAVAVPCARVAETTPYTRSTARAAGWQWRIPLQHRTGNGYVYASAFLPDDEAAATLLANLDGEALAEPRFLRFTAGRRRRCWLGNVVAIGLSSGFLEPLESTSIHLIQSGIAKLLTLFPDADIDPRLAARFDRLFADDMDDIKDFLVLHYHATHDKPEPLWTHCRHMALPESLIEKEAQYRRSGRVMLGPDALFREASWLAVLNGQEVLAEDYSPLADALDPAVNRAQLEQIAAVVARAAPSLPKHDAALAAQIGETRAAPAAALV

SEQ ID NO: 83501 - protein, 503 aa, Alphaproteobacteria bacterium
  misc_feature (1)..(503): tr|A0A539DKV9|A0A539DKV9_9PROT FADH2 O2-dependent halog enase I OS=Alphaproteobacteria bacterium OX=1913988 GN= FD124_459 PE=4 SV=1
MQKQLKTILIVGGGSAGWMTAALFAHLFQGLYQIQLIESEEIGAIGVGEATIPAIKKYNELLKLDEAEFMRTTQGTFKLGIQFNDWLRQGSGYIHGFGVIGQDWEWLRCHHYWLKLRQLGEASDFANYSINTAAALKNRFLPSQPNMPDSPLSHIAHAFHFDAGLYAKYLRRYSESRGVTRIEGKIVDVTLRSGDGFIESVTMENGNVVAADFFIDCSGFRGLLIEQALKTGYEDWSHWLPCDRALAVPCVRSQDFTPYTRSTARSAGWQWRIPLQHRTGNGHVYSSAFMEEAEAEKILLANLDGAQMAEPNRIRFTAGKRKKLWNKNCVAIGLSSGFLEPLESTSLHLIQSTAIRLVRLFPDGDIDPANVAEFNRQSDFEYERIRDFIILHYKATERDDSPFWRYCRTMDIPDTLQRKMDLFRANGRIFREDDELFSEESWIQVMLGQGVIPRSFDPLVELKSGPQIVQFMGNIENVIEKCVERMPTHEAYVEKFCDAKAPS

SEQ ID NO: 83502 - protein, 501 aa, Sphingomonas sp.
  misc_feature (1)..(501): tr|A0A3M0FQD3|A0A3M0FQD3_9SPHN Tryptophan halogenase OS =Sphingomonas sp. PP-CE-3A-406 OX=2135659 GN=C8J44_0137 PE=4 SV=1
MVEQRIRKVVIAGGGTAGWLAAAALTRQLGQLLDITLVESEEIGTIGVGEATIPTMRAFHTILGLDEREFMRATQATFKLGISFENWARDGDRYIHSFGDIGKSTWMGDFHHFWLAAKAAGDPSEIGDYCLELQAAKAERFALPSEGQINYAYHLDAGLYARFLRARSEANGLKRIEGRIASVDRDGETGFIRALVLDSGARVEGDLFLDCTGFRGLLIEGTYGAGYEDWSHWLPTNSALAVQSAATGPAHPYTRAIAHDAGWRWRIPLQHRVGNGLVYASDHLSDDEAHARLLSTIGGAPLTEPRLIRFRTGRRRQVWMGNCVALSLASGFVEPLESTSIHLVMTGLMRLMQTFPFGGIAPSLVTRFNDQAQAELERVRDFIILHYHLNQRPEPFWAARRDMPIPDTLVERIALFTEGAQAYQGGEDLFRVASWVQVMLGQRLTPRDHHRLGNIMGGPQLASVLTNIRSTIADAVAGMPTHQQFLDRYLVTPTAAASGIR

SEQ ID NO: 83503 - protein, 521 aa, Xanthomonas sp.
  misc_feature (1)..(521): tr|A0A0Q5J9A9|A0A0Q5J9A9_9XANT Tryptophan halogenase OS =Xanthomonas sp. Leaf148 OX=1736275 GN=ASF90_05150 PE=4 SV=1
MSYTAPLDPQQRPVRRVVIAGGGTAGWMAAAALSKLLGRQLQITLVESDEIGTVGVGEATIPSLVTFHRLLEIDEAAFMAATQATFKLGIGFEHWRDVDKHYIHSFGHTGTDHWSAGFHHFWLKGRQRGVARDFGDYCLELRAAQEGRFAHLPNGGMNYAYHLDAGLYARFLRRFSEGFGVQRIEGRIGEVQTDPDSGYLTALTLQDGTRVEGDLFIDCTGFAGLLIGKTLGVGSDDWSRWLFADSALAVQTESVGPPVTYTRSRADQSGWMWRIPLQHRVGNGIVYSSRYTDQDSARAVLERNLQGRALTEPRALRFTPNQRHRVWEKNCVALGLASGFLEPIESTNIHLIQRGIVRLLQTFPQTINAVDIAEYNRQAADEIAHIRDFVILHYHATDRRDTPFWRDCAAMDIPDSLRHRMELFRQSGRVFHQGNELFAENSWVQVMLGQGITPQQHHPVADLMGDAELRHFLESIRQRVDATVATLPPHADFLRHHCPAPPLPDPAARAPSDAALAAPAG

SEQ ID NO: 83504 - protein, 504 aa, Xanthomonas sp.
  misc_feature (1)..(504): tr|A0A0Q5J0R9|A0A0Q5J0R9_9XANT Tryptophan halogenase OS =Xanthomonas sp. Leaf148 OX=1736275 GN=ASF90_19990 PE=4 SV=1
MIPAPLRNIVIVGGGTAGWMAAAAFARVLGPTFNVQLIESEQLGTVGVGEATVPHIKAFNNLLGIDEAEFVRQTQGSFKLGIEFVDWQRPGSAYIHGFGTQIGHPLGLLPFHQYWIRQQLRGKAQPLGAYTLNTVAAARGKFMTSAGDVPATSPLANIAYAYHFDASLYARFLRGFAEARGVRRIEGMVEQVQLHPESGHVVSLQLASGQVIAGDLFIDCSGFRGLLIEDALHTGYHDFTHWLPCDRALAVPCEKIGPPTPYTRCTARAAGWQWRIPLQHRTGNGYVYSSAHISDDEAAASLLANLDGTPLGDPRPLRFTTGRRKQCWNRNVVALGLASGFLEPLESTSIHLIQSGISKLLELFPRQGISPVLVQRYNDRLAFEFDRIRDFLLLHYHATERDDSAFWRHCRTMPITPELQATLDLFRDSGRFYRNAEEMFAEISWVQVMVGQGILPTGYHPLVDQVPDTDAEGFLASVAQTISHCVDVMPTHQQFIDRYCKAVS

SEQ ID NO: 83505 - protein, 429 aa, Shewanella pealeana
  misc_feature (1)..(429): tr|A8H9H1|A8H9H1_SHEPA Tryptophan halogenase OS=Shewane lla pealeana (strain ATCC 700345 / ANG-SQ1) OX=398579 G N=Spea_3898 PE=4 SV=1
MPTDKAVQNEFETDACESIDVAIIGAGPSGSIAASLLQAQGKKVVVLEKQYFPRFSIGESLLPCCMTVIEEANMLEAVNQAGFQFKNGAAFKYQDSYTSFDFTDKFTAGPGTTFQVERAQFDKLLADEAVKQGVDIRYGHSVESIDLAAEPMLNIIDDKGGSQSLKAKFVLDASGFGRVLPRLLDLEKPSSLPTRSAVFNHVRDNISDPNFDRNKILISVHPDNQDIWYWLIPFSDGRCSVGVVGEPHQLEGLHDGVDCDIDGDLNSILKTMLNQEPGLKKLLANAELINESGLLKGYSANVTTLATDKFALLGNAGEFLDPVFSSGVTIAMQSASMAAKTLIKQLDGESVDWQQDYAAPLMRGVDTFRTYVEAWYDCRFQDAIFFKDPDPKIKQMICSILAGYAWDEKNPFVSESKRRLNMVVELCRS

SEQ ID NO: 83506 - protein, 507 aa, Alphaproteobacteria bacterium
  misc_feature (1)..(507): tr|A0A2W4T9K3|A0A2W4T9K3_9PROT Tryptophan halogenase OS =Alphaproteobacteria bacterium OX=1913988 GN=DCF28_0370 0 PE=4 SV=1
MAEPIKSILIVGGGTAGWMAAAAIQRSVGPNATVTLVESADIGIVGVGEATVPTIKDFNALIDLDEAEFMRETQATIKLGIEFNGWGKADSAYFHPFGTYGPGATIGDFPQSYFTLREQGRAGSLEAYSICAHAARRGKAGARSGDARSPYNGLHTAYHFDAVLYGKYLRRVCEGRGVTRVEGEIVDVVLKPETGFVDHVVLKDGRTLIADLFIDCTGFRGLLIEGALKAGYEDWSEWLPMNRALAVPCAKVGPVTPYTTSTARDAGWQWRIALQHRTGNGYVYCSDYIDDNAARETLLANLDGEALAEPRPLKFVTGRRKKLWDKNVVSLGLSSGFIEPLESTSIHLVQVGLIRLLQHWPDTEFSPINIAGYNRRLGREIELIRDFVILHYHATDRDDTPFWRHVRDMAIPDSLSERVEMFRDRGLLFQVGADEYFSQGSWLAVMYGQGIEPAAHNPLYDYQDLDRVADGFEQVKRTWAAAAEALPSHEDFLKRGGMWAGDAPAAA

SEQ ID NO: 83507 - protein, 501 aa, Brevundimonas sp.
  misc_feature (1)..(501): tr|A0A1S6ESP8|A0A1S6ESP8_9CAUL Tryptophan halogenase OS =Brevundimonas sp. LM2 OX=1938605 GN=BZG35_05195 PE=4 S V=1
MTTDTRIRKIAIVGGGTAGWMTAAALAKILGPGYADITLIESEEIGTVGVGEATIPQIRTFNTMLGLDEDEFVRRTQGTFKLGIEFRDWGRIGDSYFHPFGPFGVDMEGVSFHAFWLRLNQLNDPARITDYSLQAMAAERGKFMRPIAAGRSPLSKIAYAFHFDAGLYAKYLREYSEAKGVVRMEGRIVDVALRGTDGFVEAVTLDDGRRVEADLFVDCSGFRGLLIEGALKTGYEDWSHWLPCDRAVAVPCERVADPVPYTRSTARAGGWQWRIPLQHRTGNGYVFSSRFIDEAAATEDLLGQLDGKPLADPRTLRFVTGRRKQSWNRNVVALGLASGFIEPLESTSIHMVQSGIANLLAMFPTTEFDPAETRRYNRVVSHEAERIRDFIVLHYNATQRTDSALWDYVRTMPLPDSLMEKYEIFRSRGRVFRENEELFNDTSWFAVMIGQNLKPAAYDPVADVLSVEETRRRLLQTAEAIRNSADYMPSHMAFVAEHCAA

SEQ ID NO: 83508 - protein, 516 aa, Alphaproteobacteria bacterium
  misc_feature (1)..(516): tr|A0A3M1FYW5|A0A3M1FYW5_9PROT Tryptophan 7-halogenase OS=Alphaproteobacteria bacterium OX=1913988 GN=D6782_12 015 PE=4 SV=1
MAKTINSVVIVGGGTAGWITAGTLAAKLQADSDAGVSVTLVESPNVPIIGVGEGTWPTMRKTLRHMGIRETALIRQCNASFKQGAKFAKWATGADGDFYYHPLVLPQGYHEINLAPHWLENGDGKSFSEAVCPQQYLCERGLAPKQITTPEYASIANYAYHLDAGTFSRFLTSHCVDKLGVRHVLDDVICVNAAENGDIASLSTKAHGDIMGDLFIDCTGFKSLLLGEHFGVPFRSCKAILFPDTALAIQVPYASEDSPIVSHTVSTAQDAGWIWDIGLSTRRGVGHVYSSAYMTDEQAAARLRDYLRPTMPDVESAVFRKISINPGHRTKFWERNCVAVGLSAGFLEPLEASALLLIEISAAMIAERFPVTRESMDIIAKRFNDTFLYRWDRVIDFLKLHYVLSSRTDTRFWVDNRDPRTVPESLQELLTLWQYQHPWHDDFDRAVEVFPAASYQYVLYGMGFKTGRYRHMSETSKKIAQKHFRQNEEQAKNLAATLPTTRALIDKIRQYGLQRV

SEQ ID NO: 83509 - protein, 509 aa, Alphaproteobacteria bacterium
  misc_feature (1)..(509): tr|A0A2A4UFB1|A0A2A4UFB1_9PROT Tryptophan halogenase OS =Alphaproteobacteria bacterium OX=1913988 GN=COB49_1148 5 PE=4 SV=1
MTLKHVTIVGGGSAGWITAAYMNAVLNNDTQKTVEFTVIESPTRPRISVGEATVPTISHLLQTLKIDENDFMGGTGATFKQGIKFVNWLKQDDHTYYHPFDRRETGATGYRATRDWLKSDRSIPFAETVSVQPRLCDMNYSPKLAESGRYESPLTYAYHLDAERFADYLCTYAKSNGVRHIEEDVVEVTMAEDDRISAVITSSGKAIKADLFIDCTGFSSLLIGKKLGVGFKDYSQWLLCDRAVTMQIPYEHHYPGQIRPYTLSTALSAGWVWDIGLQDRRGVGYVYASAFLDDTSAEQALREYEGKHSADISCRTLKFSVGRREQFWVSNCVAIGLSAAFVEPLESTGINMIEFAAITLAEHFPYNNDFKPLAARYNKIMSNRFNDALSFINLHYCLSQRSDSAFWKEVQCQEHIMETVQERLDLWQLKRPSEADFDNHFILFNHINYEYILNGMNFMMSETGDHNIRPATVVPEVVLKNIELGATHLIPHDTWLQQNLGMKQYPTGK

SEQ ID NO: 83510 - protein, 544 aa, Azambacteria bacterium
  misc_feature (1)..(544): tr|A0A350QF16|A0A350QF16_9BACT Tryptophan 7-halogenase OS=Candidatus Azambacteria bacterium OX=2053511 GN=DCX2 4_04810 PE=4 SV=1
MQQRKVVIVGGGSAGWMTAAYLNGALNKQGTEQNVLIELLESPDIPRISVGEATIPSMRHLLAVVGVDEREFMQATDATFKQSIKYCNWVHNDSSFYHHPFSSMRVQPIDRAGRDWLKSDRSIPFMETCSAQPIICEMGLAPLMLGKWDMGSRLNYAYHMNAQKFADYLRDFSTARGVVHTLANLTGVDMQGPDKIVAVTTDQQQRLTADLFVDCTGFKAKLIEEKMNVGFEDCSQWLLCDRAITMHLPYDKFYPGMIRPYTTATALSAGWIWDIPMQNQRSVGYVHASQFISIEQAEQELRAYQGPGTEQLKARVVDFKVGRRQGNWRGNCVAIGLSGGFIEPLESTGLYLSDLGAVLLAEHFPYDDQDMDILAGRYNRLMANRFYEILDFINMHYCMTKRTDTAFWREVQKPERITERLKAKLAFWRIKPPSAHDFQDQWYPGMVTTGADTPSSLSADSRAAIDTGGLWNHESYECILYGMGFLDDECRQRYGPDLPPTSVHPAIIQRLQMARQKLPPHAIWLNRVLGMPEYPTAYQPKGWL

SEQ ID NO: 83511 - protein, 326 aa, Shewanella sp.
  misc_feature (1)..(326): tr|F7RP79|F7RP79_9GAMM Tryptophan halogenase OS=Shewane lla sp. HN-41 OX=327275 GN=SOHN41_02077 PE=4 SV=1
MNGKNVKRIEGKITSVDLAPCGKIDAVKLQTGQVIAADFFIDCSGFAALLIEKALNVGFESYQHWLPCDSAYAVPCEKVPESTPYTRAIAHSMGWQWRIPLQHRTGNGLVYCSRFISDDEAQQFLLNNLDGKPLAEPIKISFTPGRRLKQWHKNCVAIGLSSGFLEPLESTSLHLVQSAIIRLSKLFPHHGITSNAIDEFNHQSQNEFEQIRDFIILHYHLNQREHAEEMRLWQQCQTMDIPESLQQKIDLFRETGAVFRHQEELFTETAWVQVMLGQGIMPQDFNPLANTIPAPDLTVFLQNMRTIIDNAVDNMPTHNQYLASLG

SEQ ID NO: 83512 - protein, 506 aa, Shewanella sp.
  misc_feature (1)..(506): tr|F7RLS9|F7RLS9_9GAMM Tryptophan halogenase OS=Shewane lla sp. HN-41 OX=327275 GN=SOHN41_01318 PE=4 SV=1
MKKHKKNIQQILILGGGTAGWMAAAALVNNPLFAAIKICLVESANIGTIGVGEGSTPHLKRFMDKLGICEADWMEKCHASYKTGIDFINWNGDGQQYFHPFYFQLDVKPAEVFFVNANARRRGQGDAVQPDDFFSSGVLAKHNLSPRPQRELPFTNEYGYHFDATQLANYLKEYACKRGVLHIIGDVISVSQHNNHDINSLTLASGQRLDADFFIDASGFNAQLMHKNLNVPFQSFAEALLNDSAVTVPVDLNSTPDALFAKYHTRATALGAGWLWQIPLAHRIGNGYVYSSRHICAQTATKTLLHHLNLSESTPVRHLKMRVGVSEKAWHNNVLAIGLAQSFIEPLEATSIMVTQFTLERFMALFERYQLNKQAETLSRQTLNQSVMQLVLGVKDYIQAHYVTSKRSDSNYWQDARNVVISLRLKQLLQAWHRGEDFDFQLYKYDQQLAYFRPSWYSLLAGMDFRDPQLKLPFKPISAEITAQAKSYCAAIVNHYFGPYNTTQNT

SEQ ID NO: 83513 - protein, 503 aa, Alphaproteobacteria bacterium
  misc_feature (1)..(503): tr|A0A3M1GBK3|A0A3M1GBK3_9PROT Tryptophan 7-halogenase OS=Alphaproteobacteria bacterium OX=1913988 GN=D6782_05 795 PE=4 SV=1
MLESAIRKVVVVGGGTAGWMTAAVLSKIFAPKVSITVIESDEIGIVGVGEATIPQIRHINNFLGLDENDFLRNVQGTFKLGIQFNGWRRPGDSYIHAFGDIGMLIGLTPFHHYWLRARAAGARDSIWDYSLNAQAAAGDRFERLERVGTSRLAGIKYAFHFDAALYARYLRRAAESRGTVRVEGKIVAADRDEATGFVRSVRLENGQAHDADFFVDCSGFRGLLIEQTLHAGYEDWTRWLPCDRAVAVACRHGEKLRPYTQATARRAGWQWRIPLQHRVGNGHVYSSAHVGDDEAVRVLLDNLEGAPLAEPRLLRFTTGMRKRHWVKNCVAIGLASGFMEPLESTSIHLIQSSIARLVSMFPDRNFNAALIDEFNRQARFEFESIRDFLILHYHANERDDSDFWRACREMEVPPSVQAKIELFRASGRIYREHEELFTETGWLQVLLGQGIVPARYHPMADMLDESTCRRFLADIRILIGRAVSAMPSHRAFIDTHCRGSETD

SEQ ID NO: 83514 - protein, 490 aa, Sphingomonas sp.
  misc_feature (1)..(490): tr|A0A3M0FHW0|A0A3M0FHW0_9SPHN Tryptophan halogenase OS =Sphingomonas sp. PP-CE-3A-406 OX=2135659 GN=C8J44_3323 PE=4 SV=1
MPGERLRSVLVAGGGITAWCAAAALKRRAPFLEVTILRCTPSREALADRIACTLPSLLGFHDDLGIGAADGIARTASGYRLGTLFRGWATRLPDYVHAYGRYGRSLGPTAFHLHWVRSVLEGARAAPFDSHSPAAALARAGRFAPPMPDTPFADHEYGLTLDLSRYRTMMRAFALHVGVREIAGEIADVVRDTGDRIAAVELAGGSRIVADLFVDATGPDATLRGALDDVRDDWSAWLPCDRVLIADGSAEPLVLTTAVAHPAGWRWSSGAQSGFAYASGAISDAKAARVLRNPAGTAPGEPIRVRPGTRPHPWRGNCIAIGDAATEVEPLEWCNLHLALSAIDRLIAMLPGRVSTPGEAAEFNRQTLAEAERVRDFLALHYRVARRDDPLWQAVASAVPPSSLAHTLAQFAERGRLPFYEEETFARDSWAAVLIGQGVLPRRIDPLVAAVPAAAAQTAMARLTTEIAAALPHIPTHAAYCAAQTRHLLP

SEQ ID NO: 83515 - protein, 504 aa, Alphaproteobacteria bacterium
  misc_feature (1)..(504): tr|A0A3M1KJB4|A0A3M1KJB4_9PROT Tryptophan 7-halogenase OS=Alphaproteobacteria bacterium OX=1913988 GN=D6757_00 605 PE=4 SV=1
MKAGADSGRMRDIVILGGGTAGWMAAAVLARGLGNAVRITLVESAAIGTVGVGEATIPQIQHLNRFLGLDEGEFLKASEGTIKLGIRFEGWWRADAGYIHAFSDIGVAAGLIGFHHYWLRARKELGPETAGDLWDHSLNAVAAARARFAPMDRVGETPVPGTRHAYHFDASLYARLLRSHAESMEVRRIEGRVVAVERVAESGEIAALLLDDERRVAGDFFIDCSGFRALLIESEMQAGFEDWSHWLPCDRAVAVGCAPVRPYPPFTQAFARPAGWQWRIPLRHRTGNGHVYASALIDDDEATRTLLDHLDGAPVGEPRVIRFRAGRRRAAWVGNCLALGLAGGFLEPLESTSIHLVQSGLQRFLEMWPARPASPALVAEYNHRTAKEWEAIRDFLILHYHRNARTDGELWRACREMTIPDRLAQRLALFAESARIYPEPDELFTEMAWLQVMIGQGLYPNDHHPIADLMPADELADFLARIREIIARAVSAMPSHDEFLARIS

SEQ ID NO: 83516 - protein, 508 aa, Massilia armeniaca
  misc_feature (1)..(508): tr|A0A2R4C4L3|A0A2R4C4L3_9BURK Tryptophan halogenase OS =Massilia armeniaca OX=2072590 GN=C9I28_01565 PE=4 SV=1
MSHPIRHIVIVGGGSAGWLTAGVIAADHRAHAPDGLRVTLIESPDVAPIGVGEGTWPTMRDTLARIGVSETAFFRECDAAFKQGSRFDGWRGSDGADYYFHPFVLPQGYGETDLVGPWQREFAHVPFADLVSFQPHLCAQGRAPKQATTPEFAAVANYGYHLDAGKFGIFLRKHCLERLGVHYVPDHVTGIASHENGDIAALQTRAHGALAGDLFIDCTGMQSLLLGQHYGIGLVDQRHVLFNDSALAVQIPYPGEDSPIASQTTSTAQRAGWIWDIGLPTRRGIGHVYSSAHTSDDEAAADLCAYLGADASPRKLTFQPGYRREFWHRNCVAIGLSAGFIEPLEASALALVELSAALVSDDLPATRASIDIVARRFNDAFTYRWERVIEFLKLHYVLSRRPGAYWDDHRDERSVPPRLRELLALWRHRPPSRLDFHRIEEVFPSASWQYVLYGMGFTPEPGGTRRADPTVAAQYYREAADLTRRMLGALPSNRALIDHIRRHGLQKI

SEQ ID NO: 83517 - protein, 507 aa, Sphingomonas sp.
  misc_feature (1)..(507): tr|A0A3M0FRI2|A0A3M0FRI2_9SPHN Tryptophan halogenase OS =Sphingomonas sp. PP-CE-3A-406 OX=2135659 GN=C8J44_0258 PE=4 SV=1
MSDRALRSIAIIGGGTAGWMAAAALARVLGTHNVAITLVESEEIGTVGVGEATIPPIQAFNALLGIDEDAFVKATMGSFKLGIEFVDWLRPGTRYFHPFGVYGTDIGAVPFEGLWHRLRTQGLADPLEAYSICAQAAKDGRFMRPLTDGGNTPLHRIGYAFHFDASLYARFLRTHAEAAGVVRREGRVVDVALRAADGFIEAVTLASGERIEADLFVDCSGFRSLLLGVTLGTGFEDWSHWLPNDRAIAVPTVSNGPPTPFTRSTARAAGWQWRIPLQHRTGNGYVFSSAHLSEDEATATLLANLDGEPLADPRTLRFRTGRRDAFWVKNCVGLGLSSGFLEPLESTSIHLIQAGIARLLEMLPTRDFEAADIRRYNRLMTAEYDSIRDFIILHFHATERADTPYWDHVRTMTVPETLAERIRIYQATGRVFRESDDLFSKTSWLAVMDGQGLRAKEFDPLAASLSVDDAQARLARIAAVTAAAAARMPPHAEFIARHCAGAIASRT

SEQ ID NO: 83518 - protein, 139 aa, Alphaproteobacteria bacterium
  misc_feature (1)..(139): tr|A0A4Q3XD30|A0A4Q3XD30_9PROT Tryptophan halogenase (F ragment) OS=Alphaproteobacteria bacterium OX=1913988 GN =EON59_18495 PE=4 SV=1
MKTSEQMASNDKAIRRILIVGGGTAGWMAAAALSRFSATAHATVTVIESDEIGTVGVGEATIPPIASFNALLGIDEADFMRRTQGTFKLGIQFVNWGRLGDRYIHPFGDFGVDMEALKFHQFWLARHQAGDTAPLGDYS

SEQ ID NO: 83519 - protein, 492 aa, Proteobacteria bacterium
  misc_feature (1)..(492): tr|A0A1W9H2B0|A0A1W9H2B0_9PROT Tryptophan halogenase OS =Proteobacteria bacterium SG_bin5 OX=1827382 GN=A4S12_0 8545 PE=4 SV=1
MMRIVVLGGGTAGWMAANLFAAAWPHARVSVIESPEIGIIGVGEGSTPQLKDFFDRLGLAERDWMPRANATYKTGIAFHGWSERAGCESYFHPFPSDLDVHTNDAFFTHCAARRGGVDFAAHPDLFYLPARLAAEARGPHPAEDFPFETSYGYHFDAFLVGAVLRDHAVAKGVAHLPLKVTEVRVSPEGQVTALVTEDGQAIAADLFVDSSGFRSVIAQEALGVKFLPFADNLFNDSAVVMPTPRAGQAIAPQTRATALSAGWCWAIPLQNRTGNGYVYSSRYLSAEAAEAELRAHLGLGPDDPPARHLKMKVGRVENSWTANCLTVGLSQGFIEPLEATALHIVQATVEGFIAAYEAGGFTPQHRDDFNRRINARYEGIRDYIVCHYRVNRRTDSDYWRDNARNQALSDTLRRLLHIWYSGGDLVAEVDRLGISGYYSAISWHCLLAGYGIFPERIEPRGRGHDMARIATLLAKSARHFAPHHEQLAALQG

SEQ ID NO: 83520 - protein, 558 aa, Massilia armeniaca
  misc_feature (1)..(558): tr|A0A2R4CFE2|A0A2R4CFE2_9BURK Tryptophan halogenase OS =Massilia armeniaca OX=2072590 GN=C9I28_23500 PE=4 SV=1
MSVGWRQQPSPCPTAGSGTKTGHEPDNRTWRRQTLQPVRNILIVGGGTAGWLAAGFLAKTLGTQGGGIAITLVESKDIGIIGVGEGTFPSIRGTLSVLGIDEGRFIRECSATFKQGVRFNHWVRAPGTQGADHYFHPFSQPSQRPGGPELLPYWLLGAAGADVPFAAAVTMQKHVADMSHGPKRIGDADFMGPLNYAYHFDAGAFATLLASHAQTLGVRRVEGTVDQVKLDDAGAIASVVTREAGELTAALFIDCTGFRARLIGEALGSPFRNINDTLFVDRALAMQVPYQRPDAPIPSYTISTAHEAGWTWDIGLHERRGIGYVYSSRHTSDDRADQLLRQYIGPASDGREPRLLKLNVGYRETQWVKNCVAIGLAGGFLEPLESSGIGLIEAATYLVSYLFPYDGNLAPAAKLFNAQMKARYERIVDFVKMHYCLTQRTDNAFWIENAHASTIPESLREQLAMWRARAPHRLDFVTDIEMYPPSSWQYVLYGMEFPTRQMAHRAALPEVAAARREFQTIAQLSQHALADLPTHRALVEYYRQGGAKAAAPVRRLYV

SEQ ID NO: 83521 - protein, 244 aa, Alphaproteobacteria bacterium
  misc_feature (1)..(244): tr|A0A4Q5QXW9|A0A4Q5QXW9_9PROT Tryptophan halogenase (F ragment) OS=Alphaproteobacteria bacterium OX=1913988 GN =EON55_11015 PE=4 SV=1
PYTRAIAHDAGWRWKIPLQHRVGNGLVYCADYLDDDAARERLLASVEGEHLIEPRLIRFRTGRRKAAWHRNCIALSLASGFVEPLESTSIHLIMIALTRFLQLLPAGRPSAAAIARFNDQAAREIEGVRDFVILHYHMNDRQEPFWRDRREMKVPDSLAERIALFRDSGNAFQADHELFRVASWLQVMLGQRLTPDSHHPVVKLMPPDQLKAVMKSMSDTIATTVRQLPPHQAFIDRYCAGSAG

SEQ ID NO: 83522 - protein, 503 aa, Alphaproteobacteria bacterium
  misc_feature (1)..(503): tr|A0A2W4T7I8|A0A2W4T7I8_9PROT Tryptophan halogenase OS =Alphaproteobacteria bacterium OX=1913988 GN=DCF29_0880 0 PE=4 SV=1
MAEPISSVLIVGGGTAGWMAAAALQRTLCPHARVTLLESEDIGIVGVGEATVPPIRDFNAMIGLDEAEFMRETKATLKVAIVFQDWGHLGNRYVHPFGTFGRGPTLADFQQTYFSLKAKGLADDLGDCSVCWRAANAGKVGDRNPDPNSPLNSLFTAYHFDAVLYAKYLRKVCEGRGVERVEGKVVDVVQRGEDGFVKGVTLEDGRTLEADLFIDCTGFRGLLIEGALKAGYEDWSHWLPVNRAMAVPCASVKPLTPYTLSTAREAGWQWRIALQHRTGNGYVYCSDHITDDAARETLLANLDGEALAEPRPLRFVTGRRKKYWEKNVVSLGLSSGFIEPLESTSIHLVQAGIYRLLQHFPDKDFSPVNIDGYNRRLGREVELIRDFVILHYHASQRDDTPFWRQVRDMPIPDSLAERVEAFRDRALLYQVGADEYFSQASWLAVMYGQGIAPRSANPLYSLNDAERPAAGLRQLSDVLARTVAALPDHETYLKAKGMWSGAD

SEQ ID NO: 83523 - protein, 507 aa, Alphaproteobacteria bacterium
  misc_feature (1)..(507): tr|A0A2W4VDV4|A0A2W4VDV4_9PROT Tryptophan halogenase OS =Alphaproteobacteria bacterium OX=1913988 GN=DCF29_0848 0 PE=4 SV=1
MKKICIVGGGTAGWVAAALMAEHFKGRMAEIELVESDDIGTIGVGESTVPPFLEMLKRLGIDERDFIQKTQASFKLGIQFEDWTQKGESYFHPFGAIGAPVDVSDFYPVWLKARMNGYDRPLMDFAAAARMADQGRFMLPFKAQRTPIGGASYAVHVDAKRVARYLRDFAEARGVKRTEGIVEDVATRPDGFVSSLKLKSGQTVEADFFIDCTGFRALLIGKTLGVGYTDWSEWLMCDRAIAVQTENVGPPKPYTLAQAQDCGWRWRIPLQHRTGNGHVFCSRYMSDDEATARLLEQVEGRPVVNPMVVPFKTGVREKIWDKNVLSLGLASGFIEPLESTAIHLIYRGMDFLFRLMPDLDCDPNLIAEYNRRMTVDYEEIRDFIILHYALTRRDDTAFWRACRDMVLPEGLQHKLEVFRANGSLVEALDPLFRNVSWYAVMDGMGVRPRSYPPLVDRIDFNGLTDEMDRAANILNAFVADLPTHQAFIDTHCQAPPVEAPAPLVMPA

SEQ ID NO: 83524 - protein, 521 aa, Altererythrobacter sp.
  misc_feature (1)..(521): tr|A0A0T2Q8P5|A0A0T2Q8P5_9SPHN Tryptophan halogenase OS =Altererythrobacter sp. Root672 OX=1736584 GN=ASD76_156 75 PE=4 SV=1
MTVSDSTTSEGREVERVVIVGGGTAGWMAAAALSRFLDNGRRQFHLVESEAIGTVGVGEATIPPILNFNRMLDINENEFLRETQGTIKLGIEFVNWGRIGDRYTHPFGFFGQELHGIAFHQLWLREQGRGNPGYISDYCMSAVAAANGRFGRPSQNTKPPVSEMLYAFHFDASLYARYLRGRAEKQGVRRHEGRIVQVHRDSELGDVRSVELESGERIEGDLFIDCSGFRALLIGETLGVGYEDWSQWLPVDRAIPVPTTNIATPDPFTRATAHSAGWQWRIPLQHRTGNGHVYCSAFMDDDEAERILMANLEGEPFADRRVIRFTTGRRKQSWSHNVIALGLSSGFLEPLESTSIHLIQNGIQRLLALFPDRQISSIERDEYNRGMQDLYEDIRDFIILHYKATQRDDTPFWRHVRDMAVPETLTRKLELWRLHGRVFREGAELFGLTSWVAVLLGQNIWPDTYEPIVDTLDEAKVAVAFKEMRERYYAAAMALPSQEEFLRMAGAWAAQDVRPQVAAAQ

SEQ ID NO: 83525 - protein, 509 aa, Alphaproteobacteria bacterium
  misc_feature (1)..(509): tr|A0A2A4UWS4|A0A2A4UWS4_9PROT Tryptophan halogenase OS =Alphaproteobacteria bacterium OX=1913988 GN=COB49_0473 0 PE=4 SV=1
MYKKKIVIVGGGTAGWLTAAYLSRQLAGADHAELKITVIESSDIPPIGVGEATVPTIRDTLAGIGIGEYDFIRECDATFKNGIKFVQWNNPPETHPGEYYFHPFEKPLIIGTEPMAGHWLKGEDPLQRIFGDAVGIQHQVAVRNLAPKRFEDHAFSGPLPYAYHLDAGKLAVMLGKNAIAKGVEHIIATVKSVTSKPDGDIAALELEDGTMVSGDIFIDCTGFLGLLIEKHYKTDYTNMGHILLCDKALAFQIPCDEDDYKINPYTTATAQTAGWVWDIGLKNRRGTGYVYSSAHQSADEAEALYRKYIGPKVDNMSIRSLDMNIGYRKKQWVKNCIAVGLSSGFLEPLESTGIHMIEIALPMLVQMLPRYFKGGQPQDRYNEIMKNQYELVIDFIKLHYFLSSRKDSQFWLDNTSDHTATKDLIEKVRSWEEGYPNIYDLKYIHSIFDHLSYQYVFFGMGRKPKTNIALGDCNVDMAIKTFNNVHQALLKAETILPEHKTLINRIHMS

SEQ ID NO: 83526 - protein, 503 aa, Sphingomonas sp.
  misc_feature (1)..(503): tr|A0A3M0FI07|A0A3M0FI07_9SPHN Tryptophan halogenase OS =Sphingomonas sp. PP-CE-3A-406 OX=2135659 GN=C8J44_3324 PE=4 SV=1
MAKPKTRVVVVGGGTAGWMTAAALSRLLPGQCSVHLIESEAIGVVGVGEATLPHIRAFNERLGIDEADFMARTRATFKLGIEFRDWNRLGDSYIHPFGTFGRGTGGVDFQHYWARLLREGAPLPSLDTVSYACALARAGKFDRPETDPNRLAGTFGYAYQFDALLFAPYLREIAEGMGARRTEGIVVRVERDGDNGDIAAIVLDTGERIEGDLFVDCSGFRALLLGEAMAEPFVDWSHWLPTDRAVAMPCRTRTAVTPYTSAIAMPAGWRWRIPLQHRTGNGYVYASGFVSDDDACRALEDAVEGEALAAPRVLRFKAGRRRRSWVGNCVAIGLASGFLEPLESTSIYLVQQAITTLIELFPEPRIAATDRDEFNRVIDLEYDRIRDFLILHYHATTRSDSPFWDYVRTMPIPDTLSEKLDLWRTRARIVKYREGVFLDPSWVAVYLGQGIVPEGWDPRADPVASDALARSLDALRGEIASDVARRPDHRSFIERYCAMAQAA

SEQ ID NO: 83527 - protein, 519 aa, Xanthomonadaceae bacterium
  misc_feature (1)..(519): tr|A0A1E4KV78|A0A1E4KV78_9GAMM Tryptophan halogenase OS =Xanthomonadaceae bacterium SCN 69-123 OX=1660170 GN=AB S96_09825 PE=4 SV=1
MADEARRVRRVVIAGGGTAGWVAACALSHQFRDLLDITLVESEQIGTIGVGESTIPTIRTFHRLLQIDEREFMRATAACFKLSIKFSDWGREGETYIHPFGRTGLGTWACEFHHFWLDSLRRGQRSDLADYCLEAVASRADRFALTGAAQGNAASWSTRWESAQSGPGQGELSYAYHLDAAQYAAFLRRRAERQGLVRVEGKIREVRQHASSGDVAALVLDSGQVIEGDLFIDCTGFRGLLIEQTLKTGYEDWTHWLPCDRAVAMQTESVGPAVPYTQASAHGAGWRWQIPLQHRVGNGWVFCSRYMSDDEAGARLRAATQGAALRPPMVVPFVTGRRRQVWNRNVVALGLSSGFIEPLESTSIHLALSGVARLIHMFPFAGIEDSLVRRYNEASRAEAEHVRDFIILHYHANQRDEPMWHECRAMGLPDSLAHRIALFRDRAHAWQGEDELFRVDSWTHVMLGQGIVPRAHHPLARALPDADLAQLLAAIRQPIQRRVDSMPSHQAFLERYCPAERLR

SEQ ID NO: 83528 - protein, 505 aa, Burkholderiales bacterium
  misc_feature (1)..(505): tr|A0A257CVZ5|A0A257CVZ5_9BURK Tryptophan halogenase OS =Burkholderiales bacterium PBB3 OX=2015565 GN=CFE43_052 60 PE=4 SV=1
MEQDKKFDVVIVGGGTSGWMTAAALSKVLKGQYNIKLVESDEISTIGVGEATIPMINLFNRLLDLDEDQFMRETQASFKLGIEFVNWGRLGDRYVHGFGVIGQDNWTCDFHQYWLKQYLAGKAKDLDHYSINTAACHDNKFMRALPDMPNSPLSQIAHAYHFDAGLYAKFLRKFSEARGVTRIEGKINNVIVRDADGHIEAVVLENGQKIEGSLFIDCSGFRALLIEGALKTGFEDWSHWLPCDRAIAIPCASAKVLTPYTRSTARSAGWQWRIPLQHRIGNGHVFSSKFMSEDEATAILLSNLDGAPLADPRTVKFVTGKRKKAWNKNCIAIGLASGFVEPLESTSIHLVQMGIAHLLTFFPSAGFEAADTTAYNRIMNQEYDWVRDFIILHYKATERSDSPFWNYCREMEVPASLTERMDLYRSNGRVYREGNELFTKVSWLQVMHGQRIKPQSYHPLADLLSETEIQTYLNEVEGVIGACVNVMPTHADFIAQHCAAPPVMA

SEQ ID NO: 83529 - protein, 496 aa, Erythrobacter zhengii
  misc_feature (1)..(496): tr|A0A418NNU3|A0A418NNU3_9SPHN Tryptophan 7-halogenase OS=Erythrobacter zhengii OX=2307003 GN=D2V07_16075 PE=4 SV=1
MTDTPLPRIVIAGGGTAGWMAAAALSKLTPCHVTLVESEAIGTVGVGEATIPQIRLFNQALGLDENELLRETRATFKLGIAFDGWLREGHDYMHAFGQVGRAHGVLPFQHFWLRAKQAGFAKPLSHYSLNEIAARDLRMQREAMPHAYHLDAGLYAAYLRRFAEGQGAARIEGMIEGAERHGETGDIAALVLTGGQRIGGDFFIDCTGFRALLIEGALESGFDDWTRYLPCDRAVAVPCATKGEFTPYTRAIARKAGWQWRIPLQHRIGNGLVYSSAHMSDDEATQTLLANLDGVPHADPRLLRFTTGKRRRQWIGNCLAVGLSAGFMEPLESTSIHLIQSAISRFIQILPKGRAPAATIDWFNDQADFEWQRMRDFLVLHYWANGREGEPFWDAMRHMDLPDTLTAKLEQWRASGFIHREHEELFTEVGWFQVLAGQGVEAEGYNPVADAIAEPELRAMLDNVEASLNRQAAAMPRHLDYLQSCARGNARVEITA

SEQ ID NO: 83530 - protein, 507 aa, Duganella sp.
  misc_feature (1)..(507): tr|A0A4Y9SI85|A0A4Y9SI85_9BURK Tryptophan 7-halogenase OS=Duganella sp. DN04 OX=2561932 GN=E4L98_10320 PE=4 SV =1
MVRRIVIVGGGSAGWLTAGLMAAEQRAGVQVTLIESPDVPPIGVGEGTWPSMRDTLRRIGVSESDFFRECDAAFKQGSRFNRWVDGGAQDYYFHPFSMPQGYSEVDLPAQWQAQHPHIPFADLVSYQPHLCVQGRAPKQPATPEYASVANYGYHLDAGKFGVFLRKHCLEKLGVQYVPDHVLAIRSHDNGDIAALQTREHGALEGDLFIDCTGMQALLLGQHYGVPLISQKHVLYNDSALAVQVPYPAADYPIASQTSSTAQSAGWIWDIGLPTRRGVGHVYASGYISDDQAEAELRAYIAQTSGQTDIPQPRKLSFSPGYRARFWHRNCVAIGLSAGFIEPLEASALALVEMSASMVCDELPADRAAMDIVARRFNEAFTYRWERVIDFLKLHYTLSRRRDSAYWRDNTAETPERLAELLTLWRHRAPSRNDFNRIEEVFPWASYQYILYGMGFRSEFSRASRPRDAAIADGYFREAASLTRKMLGALPDNRTLIHHIKQHGLQKI

SEQ ID NO: 83531 - protein, 493 aa, Erythrobacter zhengii
  misc_feature (1)..(493): tr|A0A418NP24|A0A418NP24_9SPHN Tryptophan 7-halogenase OS=Erythrobacter zhengii OX=2307003 GN=D2V07_16095 PE=4 SV=1
MSETRPPHVVVLGGGSAGWITACLLHHRWGERGGKVTVVESPEIGIIGVGEGSTPQLKAMFDHLGIAEGEWMAACDATYKLGIRFTGWSERKGFGSYFHPFPGPVDLHTEPGFVQNCALARRGFEVPVLPDGWFLAARLAEDGKGPHPRESFPFPPSYGYHFDAYKLGAFLRDWATARGVDHRPLKVAEVELSAEGDVVALLCEGAERIEGDLFVDCSGFRSLIAQGALGGTFLPFAENLFADRAVVMPTPRAEQFRPQTEAIAMTAGWRWRIPLTTRTGNGYVYSSKYIADEDAEAELRRAIGTQDSEEPARVLHMKVGRVENSWSRNCLAAGLAQGFIEPLEATALHIVIATALEFAEAFEQGGFTAQHRDTFNRNIAARYESIRDYIVAHYRLNERNDSAFWRDNAANHNLSDQLKAMMTAWFTHQDMAAANRQNYPVPAYAPMSWHCLFAGYGTFPPPEKMQPLPDGVKAADARAVSAMLEACAQNFPP

SEQ ID NO: 83532 - protein, 493 aa, Sphingomonas taxi
  misc_feature (1)..(493): tr|A0A2W5PFQ9|A0A2W5PFQ9_9SPHN Tryptophan halogenase OS =Sphingomonas taxi OX=1549858 GN=DI544_01575 PE=4 SV=1
MRIAILGGGSAGWITANLLVRAWPDAAITLVESPDIAPIGVGEGSTPTLRRFFELIGVAERAWMPRCQATYKVGIRFAGWSPTAPWPDYRHPFTTQVDVHTEGAFVLNCRNRRLGHGVPVRPDDFLLNGVLAAQERAPIAPAHFPFRIEYGYHFDAGLLGAFLRDLAVARGVAHRQERVVSATRADDGDLAALVTDRGEAIAADLFVDCSGFAGLLMERTLGVPWRSFAANLFNDAAVVMPTAATGAPPVETVSTALSNGWCWTIPLRHRVGNGYVYARDFLSPDAAEAELRAVLNVGDTGEARHLTFRVGQLARHWERNCVAVGLAQGFIEPLEATALHLVLGTVEQFIGHYTRGGLTARHRDAFNDMMAARIEGVRDYIVAHYKLNTRTDSDYWRANAANMALSDPLRHVLDTWFRCGDLGEELQRQGQLSHFGTASWHCLLAGYGAFPPVSEPPRADVDFHAERGVAAFLEGCSRNFPPQAEWLAAQEDG

SEQ ID NO: 83533 - protein, 496 aa, Duganella sp.
  misc_feature (1)..(496): tr|A0A4Y9SBN8|A0A4Y9SBN8_9BURK Tryptophan 7-halogenase OS=Duganella sp. DN04 OX=2561932 GN=E4L98_20110 PE=4 SV =1
MGDKTIRKIVIVGGGTAGWMTAAPLAQRLDRRCEIVLIESPEIGTVGVGEATLPTIRYYNAALGVDEADFLRKTQASFKLGIEFRDWGQLGSRFFHGFGDFGPRIDNRSPHLHWLHLARADPTIPSYENWSMATLMARNNRFAAPGDNAPYSYAYHFDAGLYAAYLRDYAVQRGVRRVEATIDQVELRPEDGHIRALKLKDGRRIEGELFIDCSGFRGLLIDGALQAGYEDWSAQLPCNSALAVPCEKVASITPYTTSTARAAGWQWRIPLRHRTGNGHVYSNAFTSDAEAQRVLLAGLDGAPLDQPRQLRFVTGRRRQSWRKNCVAIGLSAGFVEPLESTSINLIENAVGQLITYFPDLDFKPELAYEFNRYMGRRYESVRDFIILHYKLTRRSDSEFWRYCANMAIPDSLRHQIELFRESGRVVVYDTEGFSEPSFVSMLLGLGVVPHSDDPFVRALERAPLQAQMARVRALMIEKVGAMPDHTDYLNAACASR

SEQ ID NO: 83534 - protein, 504 aa, Pseudoalteromonas amylolytica
  misc_feature (1)..(504): tr|A0A1S1MR68|A0A1S1MR68_9GAMM Tryptophan halogenase OS =Pseudoalteromonas amylolytica OX=1859457 GN=BET10_0956 0 PE=4 SV=1
MQKTQTPIKKFVIVGGGTAGWLAGATLGNIFKHCDVEVELIESEDVNIIGVGEATIPPLIDTLESLGIDLKDFISETQASFKWGIKFEDWYKKGHSYFHPFGELGQRIDGHEFYQCWLTLKANGDNTPLMAYSPEAVLSQHNRFFVPHQAMNTPLAGARFALHLDAVLAGRYLRNFAQKIGVKRTVGHIELVDKTVDGCISSVTLTSGQTIAGDFFIDCSGFNSLLIGKALNTNYLDWSEYLPCNRAVAVQTTLTEDIAPYTVSKAQGAGWSWHIPLQHRMGHGYVYSDKYISDEQATATLMNNVSGKVLTPPRIIPFKTGLREQVWNKNCLALGLAQGFLEPLESTAIHLVSKSLALFVRMFPTKQHNAVLQAEFNRQIHQDYAEIRDFLVLHYCTSQRSDSPFWRDWQHRAIPQTLEQRLTFFAQQGGLLQEVEALFQATSWYAVLDGMGVRPKGYNPTLDALDIDALRKSLMMGRTALEQCVLKQPSHAQFLHKYCPAKNL

SEQ ID NO: 83535 - protein, 430 aa, Pseudomonas putida
  misc_feature (1)..(430): tr|A0A2J7YG12|A0A2J7YG12_PSEPU Tryptophan halogenase OS =Pseudomonas putida OX=303 GN=CBL13_00814 PE=4 SV=1
MAELRIVVLGAGPAGAATAIGLRRLGYTVTVVSEWRRFAAVEGVSQRVLEGLRHAGLGGALSQAAMPATRQVLWNGQHLHMNQEFLLDRQRFDQALREDLQRAGVSVVEGRVREVVQGVGHHVRLDDGQVLTADFLVEARGRQAPLAADRLRGPETVSLLNVWQGSPGAPASAVESLEDGWAWMARLEDGRCYWQVTQDAAGLPGKAGLAAYCVALRGRSALVAELFNDQALIPAQVHARSSSAILAGECVGQDWIRVGDAAMAVDPLSGNGIFQSLSSALQAPVVINTLLRRPERAELARQFHQQRVEQLFLRFARIGRDFYAQEQSRVGQPFWARRQGWPDAQPLHQAADWQAVRVERRPVLRDGLVDEAEVVVTADQPLGVWHLQGVELAPIVRGLQAGLALSAVLEGQQVEHQKMVRRWLTEQGYT

SEQ ID NO: 83536 - protein, 515 aa, Gordonia sp.
  misc_feature (1)..(515): tr|A0A0M9CCN8|A0A0M9CCN8_9ACTN Tryptophan halogenase OS =Gordonia sp. NB4-1Y OX=1241906 GN=ISGA_07845 PE=4 SV=1
MSGVDGGTAATGTGPATAEEADVVVIGGGPGGSTTATLLAKSGRRVIQLEKESFPRYQIGESLLPSTIHGVCKLLGCYEKVRDAGFMHKRGGSFRWGTNPVPWNFLFAISPEFAGEGSYAYQVERMKFDKILLDNAAENGVDVRQECRVNGVDTDDSGRVVGVRYVDADRTEHDIRASYVVDASGNSTRLTRHAGAERVYSDFFQNVAVFGYFEGGRRLPAPDSGNILCAAFDEGWIWYIPLSDTLTSVGVVIAKDKAKDVINAQEETLLQYIDRCTIVRDMLVDATRVTEGTCGEIRLRKDYSYANTRFWGNGMVLVGDAACFIDPVFSTGVHLATYSGVLAARSINSVLDGTMTEERAFTEFEGRYRREYAVFYEFLSAFYDMEQSEDSSFWKARKVTNFDRTDMAAFVSLVAGGYSGEDVLTDAAQVIERFRSSSDALTAAAAKTGGMDTDSGQRMGHMFSAPVVREVMEEMNALQARGAVTEGATEPPLLDGGLVPSADGLAWAEPADVHV

SEQ ID NO: 83537 - protein, 526 aa, Sphingomonas taxi
  misc_feature (1)..(526): tr|A0A2W4Z1J1|A0A2W4Z1J1_9SPHN Tryptophan halogenase OS =Sphingomonas taxi OX=1549858 GN=DI640_03925 PE=4 SV=1
MSKADGAQGAVRTVVVVGGGSAGWLTACRLAAQSVRSGSNLDVVLVESATVPSVGVGEGTWPTMRNTLRKIGIDETTFIRSCDASLKQGARFVGWTDGSAGDAYYHPLNPPAGVGEIDLAPYWLGLPGSDAQGGAEGISFADWVDYQSTLCDAGLAPKTITAPEYGGHANYAYHLDAGKFATLLREHAVGSLGVEHVVGDVVRANLADNGDIRDVELVDGRILAGDLFVDCSGFSALLIGGVYDVPFRSCRDILFADRALAMQVPYQGEDDPIACHTISTAQDAGWIWDIGLWTRRGVGHVYSSAYTSDDEAEAALRRYVGPAADALPVRRIAFEPGHRERFWQNNCVAIGLSAGFLEPLEASALMLIETSLDALVDRLPQTRSAMDAIARQFNETFRHHWQRIIEFLKLHYVITQRRDTDFWRDNAAAASIPEGLQERLDLWTHHSPAAQDFAHAREVFSWPSYQYVLHGMRFGSRYRGEPETAEGATVAALVARNDRVRAELIRKLPRHRDLLRAVREHGLQRV

SEQ ID NO: 83538 - protein, 513 aa, Devosia riboflavina
  misc_feature (1)..(513): tr|A0A087M525|A0A087M525_9RHIZ Uncharacterized protein OS=Devosia riboflavina OX=46914 GN=JP75_06170 PE=4 SV=1
MTKPAHFVIVGGGTAGWIAAFIIQDEARRRGFDFKISVVESSRIPTVGVGEATTAAFRVLLKHFGIDEFEFFRKTDASFKLGIRHEDWRRKGYTYYGPIDDPHQVIQAPPGAPSDYLNVYAVAAGRAVQEMHLFQPLLEQKKAPYALKPDGSLIPLGPFHHAFHFDQALVGKFFASKSKGVDKVDAMAAGVERNGETGDISALVLDDNSRLEGDFFIDATGFRKQIIVKALEAPWKSYAHELPVNRALPFWIDLKEGEELATYTRAWAQSSGWMWQIPTRQRYGCGYVYSDEFLTPEQAKEEVERVLGHEIEVRSDIRFQIGRLEKAWIGNCVAVGLSSSFLEPLESTSIHGTIVQMMLFAQRYMDEPGKITEKARDDYNARVGRQVDDFRTFVNTHYMTERDDTPFWREVRANRIHSETKERLARWKREMPRNEHFPNYLGGLPHIETQLHYPVLNGLGLLDQNLARKEMEADPKLRRFAQQAFDGLVQEYRAAANQALGHREFLEIVQGMT

SEQ ID NO: 83539 - protein, 456 aa, Novosphingobium sp.
  misc_feature (1)..(456): tr|A0A0S6WXC9|A0A0S6WXC9_9SPHN Tryptophan halogenase OS =Novosphingobium sp. MBES04 OX=1206458 GN=MBENS4_0718 P E=4 SV=1
MGEATVPLIGELNRFLGIHEPEFVAATNGTFKLGIEFADWGEIGNRHFHGFGDYGADIAGLPVHQHWLRLAREGQVPALGDFAMAEVLASQDRFVPHEALSGEAAQFRHAFHFDAALYAAYLRRLAEGMGVTRIEGRIKNVALDAQSGHVRALQLDGDRRVEGDVFLDCTGFASLLLGQAQGVGFEDWSQWLPCDRAAAVPCARAGRFTPFTSSSAKEAGWQWRIPLQNRTGNGHVYSSAHISDDEAVAQLLAGLDGEALAEPRLLRFTPGRRSRFWEGNVIAIGLAAGFLEPLESTAIQLIQTGVTRLVEFLPGKVPDPALAAEYNRQTALEYERIRDFIIAHYCRTRRTEPLWRQVAAMDLPGTLRAKLDAWEACGRVPMYDLESHQEPSWVAILLGQGVLPRAVNPRTHLLPEGDLRALLDQRRTTLARAAERLPDHATFIARTCAAKPAPAA

SEQ ID NO: 83540 - protein, 511 aa, Erythrobacter zhengii
  misc_feature (1)..(511): tr|A0A418NTH6|A0A418NTH6_9SPHN Tryptophan 7-halogenase OS=Erythrobacter zhengii OX=2307003 GN=D2V07_08485 PE=4 SV=1
MNGEPIRKIVIVGGGTAGWMAAAAIAKILGEFPGLSIQLVESDAIGTVGVGEATIPQILSFHKLLEIDENEFVRETHATYKLGIEFVDWLRPGHSYVHPFGTYGLDMLGIEFHHFWLRGQEAGETVPLDPYSIGAAAGRAGKFFWPQLNNPRSPLSKLAYAFQFDARLYAAFLRRRAEAHGVIRLEGKVIQVHQDGETGFVESVELEDGSRIEGELFIDCSGFRSLLLGQALQVPFEDWSKWLPCDRAVAVPCTLGGDRQPLTRSTARPAGWQWRIPLQHRIGNGHVYSSAHMEQDKATDLLLANLDGEPLAEPNHLRFTAGHRAQFWEKNVVALGLAGGFLEPLESTAIHLVQSSIARFMAFFPTTAFGEQERLRFNRDTRREYVDIRDFLVLHYKSTERDDSEFWRYCRNLPPPDGLAEKMAIFEGSGRVVREHDEFFTEPSWLAVMAGQGITPKGYHPVAGMLDEAETKKRLEHIRQVIAQAVSQMPTQEDFLQQQGSAIPVGERASA

SEQ ID NO: 83541 - protein, 503 aa, Hephaestia caeni
  misc_feature (1)..(503): tr|A0A397PHN4|A0A397PHN4_9SPHN Tryptophan halogenase OS =Hephaestia caeni OX=645617 GN=DFR49_1215 PE=4 SV=1
MEKPPYTIVIAGGGTAGWMTAAALARFLERGYRIRLVESEAIGTVGVGEATIPQLRLYLDALGIDEDHFVRTTHGTFKLGIELENWLGDGHRYMHAFGNVGRDVGLIAFQHYWLRARQMGIAAGLDRYALNELAARAGRMHRGGPITAPAIPSMPYAFHFDASLFAGLLRCFAEERRVERTEGRITEVMRDGDSGDVAAIRLDSGERIAGDLFIDCTGFRAMLIGQTLGIDYEDWTHWLPCDRAIAVATAPLADPPLFTRASARKAGWQWRIPLQHRTGNGLVYCSSAISDDDAADLLMHHLDGAATGDPRLLRFAAGRRREGWHRNVIAIGLSSGFLEPLESTSIHLIQSAISRLLKLLPGHASGAADRAEYNRQTDFEIERIRDFLILHYHANTRPEPLWQACRAMTLPDSLGAKIALFAENGQIVREHEELFTEVGWLQVLIGQGISPKGYHPLADQIGDDDLAEFMETIPLLYEREVAQMPSHADFIARHCAGAMARKG

SEQ ID NO: 83542 - protein, 510 aa, Sphingomonas sp.
  misc_feature (1)..(510): tr|A0A4R2SUS0|A0A4R2SUS0_9SPHN Tryptophan halogenase OS =Sphingomonas sp. PP-CE-1A-559 OX=2135657 GN=C8J42_1029 71 PE=4 SV=1
MIDGLGQHIVILGGGTAGWMTACLIAHRWLDRGVRVTSVESPEIGIVGVGEGSTPQLKHFFDTLDIEEAEWMSACDATYKLGIGFDGWSDREGHERYFHPFPTALDGHTAPQFFYNSRARRTGRNVDAHPDQFLLPARLAAAHRAPQPAANFPFEVSYGYHFDAYKVGAFLAAHATETLGVVHLQRRIASVERALTGEITALIDTDGGRIAGDFFIDASGFRSTIFGALDVPFVSYADALFNDRAVVMPTAHNTGAPIPSQTRATALSAGWAWHIPLTSRNGNGYVYSSRHLTEAQAEAELRAHIGAEAGGARHLKMRVGRVRDSWSHNALAVGLAQGFLEPLEATALHLVIATVEAFLDMVDHGGATDAVRTAFNTRIAARYDGVRDYIVAHYRLNQRHDDPTGYWAEARGVDVLSDDLKMLMSTWFTGADIVAAIDRAGLGRYYSATSWHCLFAGYGTFPDAARLISPGADIDPIDLPKIDDFLTRCASNFRSHASRLRAAADHKDHV

SEQ ID NO: 83543 - protein, 534 aa, Gammaproteobacteria bacterium
  misc_feature (1)..(534): tr|A0A1G0GQL8|A0A1G0GQL8_9GAMM Uncharacterized protein OS=Gammaproteobacteria bacterium RIFCSPHIGHO2_12_FULL_3 6_30 OX=1798275 GN=A3E81_02025 PE=4 SV=1
MQNNIKNIVVIGGGTAGWMTATYIAKSLNFTVNIIVIESATHAPIGVGEATIPTIKTEFFDRLGIPESEWMPKLGGTFKLGIKYANWKKSIEEGGDYYYHVFGEIPLIDEVPLSSVWIKNYLEGKTKKSFASSCFASHVAFDHHLSPKLLDGTKIQPYAYHFDALLVAQFLKEWAIKHHIHHVIDKLISAKQDEQGNITCVIGESGKEYHGDLFIDCSGFAGFLIDKVYQEPIVPFSDFLLTDRAIAINLPENPEENGIRSYTTATALKAGWVWEIPLYARSGNGYVYSSQFTNDDDAQKELILHFGKRAENIATRPIKFQSRRHQRSWIKNCVAIGLSSSFLEPLESSTIYFIYAALYQLIKCFPQKNIDPILRDKFNQKINYMIDDNKDFIAMHFKTAQREDTPFWKVNKYETKIPESLNIILKKHKSGLPIKRPTVDNNNLYPTFKSLFQNFWTETNYQCILCGVGYYPNNAYPLLQYRDDIIKAGNILFDNIHKRAEELKKILPTHYQYLKNQMKDCDTMKSTEYDAVET

SEQ ID NO: 83544 - protein, 496 aa, Hephaestia caeni
  misc_feature (1)..(496): tr|A0A397NMT7|A0A397NMT7_9SPHN Tryptophan halogenase OS =Hephaestia caeni OX=645617 GN=DFR49_3585 PE=4 SV=1
MSDGAIRGIAILGGGIVGLSAACAFARALPATRVTLIATPPDPASLADRALATWPGIARFHEAIGLDEPGLLRHAGATHRLGIAFTGWSADGTGWLACFGAHGPRDQAGFHQHWLIARRAGDTTPFHAYAPAAALAAAGRMAPPSDDPASPLADIDHALRFDPAAYTAQLAGLARHLRVETVAGVPGDIERRADGGVAALVLDDGRRIEADLFVDAGGPAAPLLSMLDDAFEDWRDTLPCDRLLIAEPQPPALGLVDERHATDCGWWWLAPGRARTDVGLAYCAALTTDDAAARVLEAEAHARPQARLTLRPGRRPRSWIGNVVAIGDAAAVLDPLAGASLTLAHEAILRAIDLLPDRSMPPALIAEFNRRTADHHARARDFTAAHYVASGRRSGDFWRAIEGRARPESLAITLDQFAGRGHLPHFEEELATADDWRALLLGLGMNPAHGDPAAQAMPADRRTAMLRAARDRAASAPGLALPYREFYARTIDARPG

SEQ ID NO: 83545 - protein, 506 aa, Erythrobacter zhengii
  misc_feature (1)..(506): tr|A0A418NSV2|A0A418NSV2_9SPHN Tryptophan 7-halogenase OS=Erythrobacter zhengii OX=2307003 GN=D2V07_08470 PE=4 SV=1
MIGSGAKPVRVVVLGGGTAGWMTAAGLARMLGERVTVDLVESEDIGIVGVGEATLPHIRGFVEKLGISEAEFMRATHATYKLGIDFRDFGRIGESYIHPFGSFGEELGGVGFHHYWLELQRRGLAGPLGDYSFCVAAALANKFAPPADDMSLASSYGYAYQFDATLFGPFMREFGLSIGVTRHEGLVTQVERDGESGNVTALTLEDGRQLEGDLFVDCSGFRSRILGQELGEEWEDWTHWLPCDRAAAMPCKHATDEIRPYTTATAMPAGWRWQIPLQHRMGNGYVFSSAFIDEDEACETIRKASEGEPLADPRILRFRPGRRRQSWSHNVIAVGLASGFLEPLESTSIYLAQMAITYLIELFPDGAIDPADRDEFNRLVDMEYDRVRDFLILHYHATTRDDSEFWNHVRTMTVPDSLAGKMELWRQAGRIEKYSDGLFYDASWIAVYLGQGLMPERHDPRTGLVDPERLKSATDRLRSEIASSVSQMPDHAEYLRRNNARLAEPA

SEQ ID NO: 83546 - protein, 514 aa, Sphingomonas sp.
  misc_feature (1)..(514): tr|A0A4R2TEJ1|A0A4R2TEJ1_9SPHN Tryptophan halogenase OS =Sphingomonas sp. PP-CE-1A-559 OX=2135657 GN=C8J42_1028 93 PE=4 SV=1
MAEQRIRKVVIAGGGTAGWLAAAALSRQLDQLLDITLVESEEIGTIGVGEATIPTMRAFHTILGLDEREFMRATQATFKLGISFENWARDGDRYIHSFGDIGKSTWMGDFHHFWLAAKADGDTSEIGDYCLELQAAKAERFALPSEGQINYAYHLDAGLYARFLRTRSEANGLKRIEGRIANVDRDGETGFIRALVLESGERVEGDLFIDCTGFRGLLIEGTYAAGYEDWSHWLPTNSALAVQTAATGPAHPYTRAIAHDAGWRWRIPLQHRVGNGLVYASEHLSDDEAHARLLAAIDGAPLIEPRLIRFRTGRRRQVWMGNCVALSLASGFVEPLESTSIHLIMTGITRLMQTFPFGGIAPALVRRYNDQAQAELERVRDFIILHYHLNERPEPFWAARRDMPIPDTLVERIALFTEGAQAYQGGDDLFRVASWVQVMLGQRLTPRDHHRLGSIMGGPQLAGVLTNIRSTIADAVAGMPTHQQFLDRYLAAPITASHGMHHRVERHDDASGKR

SEQ ID NO: 83547 - protein, 513 aa, Sphingomonas sp.
  misc_feature (1)..(513): tr|A0A4R2STS8|A0A4R2STS8_9SPHN Tryptophan halogenase OS =Sphingomonas sp. PP-CE-1A-559 OX=2135657 GN=C8J42_1012 30 PE=4 SV=1
MHEIQNIVIVGGGTAGWLTAGVIAAKHQARRQHGFTVTLVESPNVPTIGVGEGTWPTLRSTLKKMGVSETELFRQCDASFKQGARFNRWTTGAPDDGYYHPLMLPQHFGQVNLAPHWLADEGSATFCDTVTPQGRICDEGLGPKTIATPEYDGHANYAYHLDAGKFSHFLQRHCCDTLGVRHVKADVTEVHLDESGDIATLDTEQGVSIAGDLFIDCTGFAALLIGGAMKVPFRSCTDILFCDTALAMQVPYDVPDAPIASHTISTAQSAGWIWDIGLPTRRGVGHVFSSSHISADAAEQELRDYIGPAARDLTARRLAIRAGHREQFWVRNCVAVGLAAGFLEPLEASAIVLIELSAKMIAEQMPACREVMDVVAHRFNDTAHYRWGRIIDFLKLHYALTKRTDTAFWRDNVRPESIPDRLAGLMELWRFQSPWVHDEFDRAEEVFPSASYQYVLYGMGARTAVMPGSIDDDVALARRARHDNQVQTQRLVSSLPGHRDLIDRIKRHGLQPI

SEQ ID NO: 83548 - protein, 505 aa, Duganella sp.
  misc_feature (1)..(505): tr|A0A4Y9SLI5|A0A4Y9SLI5_9BURK Tryptophan 7-halogenase OS=Duganella sp. DN04 OX=2561932 GN=E4L98_10335 PE=4 SV =1
MRDPNNRQPVRRVVICGGGTAGWMAAAGISKVLSKVLEITLIESEEIGTVGVGEATIPTLMNFHNVLEINEQEFMAETQATFKLGISFEGWRNVREDYIHSFGVTGTDHWTAGFQHFWHKGVQRGLAGDYGDYCLELKASLENRFAHLPNNGMNYAYHLDAGRYAKYLRRLSEARNVRRIEGKIVRYTRQDATGDVRSVVLESGQEIEGDLFIDCTGFRGMLIGEAMGVPMDDWSEWLFCDRAIAVQTESVGDAVPLTRSIAHQAGWQWRIPLQHRVGNGIVFSSRHLDEDAARQQLLRNVQGRTLIEPRLIKFKPCQRQQTWKGNVIAIGLASGFLEPIESTSIHLIQRAVIRLMQMFPSDGIQQADIDEFNTQCNHEIEHIRDFIILHYHVNNRTDSQFWIDSREMSIPESLQHRIDLFRETGRVFRVPNELFAENSWIQVMLGQGIMPKSHHPTADLMGDEELKGFLGSIKGRIDRIVVQLPTHQAYVERYCGRPDAGAKAA

SEQ ID NO: 83549 - protein, 503 aa, Sphingomonas sp.
  misc_feature (1)..(503): tr|A0A0Q6KK15|A0A0Q6KK15_9SPHN Tryptophan halogenase OS =Sphingomonas sp. Leaf339 OX=1736343 GN=ASG67_07445 PE= 4 SV=1
MTGAPISRVVIVGGGTAGWMVAAAAARFLDDGQRTITLVESDAIGTVGVGEATIPPILNFNRLLGIDEAEFLRATNGSFKLGIEFVGWQTGEDRYFHPFGMHGRAFEGLNFHQVWLKLRNRPGIGDIGDYSMSTVAAAAHRFGAPVDDPRSPLSGIAHAYHFDAGLYAAFLRQRAEAEGVTRIEGRIATVDRDGESGHVRAVVLDDDRRIEGDLFIDCSGFRSLLLGEAMGVGFTDWSHWLPCDRAIAVPTVRTEPILPFTRSTARPAGWQWRIPLQHRTGNGHVYASAFMDDDAAEALLLANLEAAPAAEPRRLSFKAGVRAKLWEGNVVALGLAGGFLEPLESTSIHLIQEGISKLFALFPDRRFTPVERDEYNRLMGDAYAGIRDFVILHYHATKRDDSPFWRHVRTMELPDTLRAKIALFREKGRIFRYDDELFAVPSWVAVMLGQGIVPDGYDPVVDALDAERLTAAVVRMRGAMAAAAQALPTHGAVLDRLKGMTTA

SEQ ID NO: 83550 - protein, 497 aa, Sphingomonas sp.
  misc_feature (1)..(497): tr|A0A0Q6LD65|A0A0Q6LD65_9SPHN Tryptophan halogenase OS =Sphingomonas sp. Leaf339 OX=1736343 GN=ASG67_16455 PE= 4 SV=1
MPPRRIVILGGGTAGWITANLMAKAWLAPGSGCTITLVEAPDIATIGVGEGSTPSLKRFFEVIGVAERDWMPRCQATYKVGIRFDGWSPQAPGRDYSHPFTTQVDVHTEEAFILNCRNRRLGHDVPVRPDDFLLGGILAAEGKAPVTPPHFPFRMEYGYHFDAGLLGDFLREIAVGRGVVHRPAHVVGARRAENGDIAALVTDTGGEIAADIFVDCSGFAGLLMERALGVPFHSYASMLFNDAAVVMPTAMDRPPPVETVSTALSTGWCWTIPLRHRFGNGYVYSRDFLSADAAEAELRGHLGVGDMGEARHLTFRVGQLARHWERNCLAVGLSQGFIEPLEATALHLVLNTVELFINHYEQGDFTDRHRPAFNDAITARIDGVRDYIVAHYKLNTRTDTDYWRRNAANMTLPDSLLHLLDTWFRKGNLGAELARQGHASQFGNLSWHCLLAGYGAFPPVSEAARDDVDFFAERRIAAFLEGCALNFKSQAEILAGG

SEQ ID NO: 83551 - protein, 416 aa, Flavobacterium johnsoniae
  misc_feature (1)..(416): tr|A5FKY4|A5FKY4_FLAJ1 Tryptophan halogenase OS=Flavoba cterium johnsoniae (strain ATCC 17061 / DSM 2064 / UW10 1) OX=376686 GN=Fjoh_1110 PE=4 SV=1
MTKEFVDVLVIGAGPSGCVSASYLHKNNVKVKVVEKQKFPRLVVGESLIPRVMDHFAEAELFEALDAMNFEKKLGARFIRGEEICVFDFSKKFGEGWDWTWQVPRADFDNTMAQEVVRKGVDLEFETEVLEVSFEGKKSKTIVKDKDGNLKEIHANFIIDSSGYGRVLPRLLDLDTPSKLDPHSSIFTHVKDINREEGEEGTQISFDILETEVWLWVIPFSNGNTSLGVVGPTDFINSLSENKDNAEALKNAIQKSDYYIKRFAGTEFLFEPVKLENYSRAVKRMYGDGFALTGNSSEFLDPVFSSGVAFATESGMLAAKLYLKESQGIPVDWEVEFTQYMKRGIAVFTTYVQEWYTGNLQTLFFHQPENPDVKEKICAVLAGYVWNEENSFVKKHDHVIANMAYLLNMQKEQSPE

SEQ ID NO: 83552 - protein, 503 aa, Porphyrobacter sanguineus
  misc_feature (1)..(503): tr|A0A1M7S2J1|A0A1M7S2J1_9SPHN Tryptophan halogenase OS =Porphyrobacter sanguineus OX=198312 GN=SAMN02745193_00 792 PE=4 SV=1
MVIQRIIIVGGGTAGWMAAAALSRLKAGRPVEITLIESESIGTVGVGEATIPPFVGFNQLIGVDEREMLAAVGGTFKLGIQFENWGKLGDSYIHPFGAYGYTMGGISFHHVWHRMADAGDKRPIQVFNLETMAAYFGKFARTEDFARDDLPPINYAYHLDAGRYAAFLRRLAESRGVVRQEGKVADVALNGETGFVTGVTLDDGRQFAGDLFIDCSGFRGLLIEQALQTGYDDWSHYLPCNRAVALPCLREDGSPPPPFTRATAHKAGWQWQVPLQHRNGNGHVYCSSYMEDHEALDILLGNIAGKPQAEPNFLRFVTGRRKKFWNRNVVALGLAAGFMEPLESTSIHLINTGLDKLLSLLSLDGITQAQEDAFNRLTGREYARIRDFLILHYNATQRDDSDFWNYVRTMEVPDTLTEKVEIFKANGQIFREEDELFTETSWAAVMMGQGIGMDGHNAMADALDPGKTRSEIDEMEKSIRYLVQHMPGHGDYLARYCPAPVAA

SEQ ID NO: 83553 - protein, 516 aa, Sphingomonas sp.
  misc_feature (1)..(516): tr|A0A4R2SST0|A0A4R2SST0_9SPHN Glycine/D-amino acid oxi dase-like deaminating enzyme OS=Sphingomonas sp. PP-CE- 1A-559 OX=2135657 GN=C8J42_1027 PE=4 SV=1
MGKRILIVGGGTAGWLTAGYLAKRLGADLPGGVAITLVESRDIGILGVGEGTFPTIRRTLATIGIDEADLIRRCGATFKQGAKFVHWRHAPGQGATDHYSHPFQVADSSDGLDLLPYWLLGHGGPENWDEVSNPQKKASDQHRAPKLPTNPDYVGPLNYAFHFDAVALAGLLREQGVKNGVRHLTDTVSEVLLDAEGAIGGVRTERNGVLDADLYIDCTGFRAELIGKAMKVPYRSCRDVLFCDRAIAAQLPYARPDDPIASYTISTAQKNGWIWDIGLDRRRGIGHVYSSDHGDDETAERVLRDYLGAAGEKADVRHFKFDAGYREVNWYKNCVAVGLSSGFFEPLEATGIAFAEVSAGMIANLFPWGGDYETSARQFNANMLRRYERARDFIKLHYCISERRDTAFWRDNVADASVPDSLLALLDRWRFRPPNELDIDGQVDIFTEASWQYVLYGMGWKTDLSAKAGALRYHEDARRAFAEVQRQARYAIANLPSNRDLVAYAQTHSFGARAAA

SEQ ID NO: 83554 - protein, 502 aa, Hephaestia caeni
  misc_feature (1)..(502): tr|A0A397NR86|A0A397NR86_9SPHN Tryptophan halogenase OS =Hephaestia caeni OX=645617 GN=DFR49_3584 PE=4 SV=1
MTERATRVVILGGGTAGWMTAAAIARLLPQVELRLIESADIGIVGVGEATLPHLRAFVETLGIDEAEFMRTTSATYKLGIAFEGFGRIGATYTHPFGGFGSDLAGVGFHHYWRRMHAAGRARDIGAYSYPVVLAAARKFARPTPDGDPITSTYGYAYQFDATRFAPYLRDYAIARGAVRTEGKVVRVEQHPETGDVTALHLESGEAVTGDLFIDCSGFRSLLLGDTLKTPWEDWSHWLPCDRAAALPCESPEGDIEPLTRAIAMPFGWRWRIPLQHRVGNGYVYSSAHLSDDDACAAIVGAVEGKPIASPRVLRFRAGRRRLGWVKNVVAIGLSSGFLEPLESTSLYLAQAAITQLIELFPEDGRSTDADRDEFNRVIDLEHDRIRDFLILHYHATTRDDSDFWNHVRTMRVPYSLHEKIAMFRASGRVARYTKGLFLEPSWVAVYLGQGIIPERWDQRADLADEAQLDRALAGLDRALGAAAARTPGHREALAAHHAGAPA

SEQ ID NO: 83555 - protein, 537 aa, Hephaestia caeni
  misc_feature (1)..(537): tr|A0A397P978|A0A397P978_9SPHN Tryptophan halogenase OS =Hephaestia caeni OX=645617 GN=DFR49_1933 PE=4 SV=1
MGMGGNTGSGATAPGGTAPGRATDQDTGGARAPIERLVIVGGGTAGWMAAAAFSRYLNNGRTKVTLIESAEIGTIGVGEATIPPILSFNKMLGINENEFIAATQGTFKAGIEFVDWGAIGERYVHPFGYHGHEIHGVAFHQLYLRARAQRQMPPISDWSMSAAAIRHGRFARPGTGASFPLDQLYYAYQFDAALYARYLRGYAERGGVERIEGKVVDVALDGESGFVTDLTMADGRIIAGDLFLDCSGFRGLLIEQALKTGYDDWSRWLPCNRAVAVATENVVPPEPLTRATARARGWQWRIPLQHRMGNGLVYSSAYLSDDEARDTLMANLEGPALADPRTLSFTTGRRRLSWNRNVVTLGLSSGFVEPLESTSIHLVQAGIAKLIALFPDKRCTAVERDEYNRAMKDLAEDIRDFVILHFHATRRDDSPFWDYCRTMEPPDSLARKIALFREKGRVFRDNFELFATPSWVAVMFGQGIWPEGYDPIADALDESRVDQAMAQMRRDYEDAALRLPSQAEFIARCCAAPAMPMAAAS

SEQ ID NO: 83556 - protein, 505 aa, Burkholderiales bacterium
  misc_feature (1)..(505): tr|A0A257FIC3|A0A257FIC3_9BURK Tryptophan halogenase OS =Burkholderiales bacterium PBB2 OX=2015564 GN=CFE41_232 45 PE=4 SV=1
MTAALLAAEHGGLEPGALDICLIESPDTPAIGVGEGTWPSMRETLQRIGLREVDLVRECDAAFKQGSRFDGWVNGSSEDRYYHPFSLPQGYGDADLVGGWLQGHADRPFAECVSPQPHLCNAHLAPKQVSTPEFAAVANYGYHFDAVKIGVLLRKHAVATLGVRHILDHVTLVRSHDNGDIAALQTRTHGDIAGDLFIDCSGMPSLLLGQHYGIALQSQQHVLFNDSALALQAPYADGHVPLASATISTAHAQGWTWDIGLPTRRGVGLVYSSAHTSLDAATTALHQHIQRSGWAAELPTPRHIRFTPGYRERFWHRNCVAVGLSAGFIEPLEASALALVELSVAMIRDELPANRADMDLVAKRFNDAFSYRWARIIDFLKLHYALSQRQDSDYWREHRLPQSQPERLQELLQLWKHRAPYRNDLFRIEEVFPAASYQYVLYGMGFKPDLAHAQPAQRMRSERLAQAQASLHSAAIITKRQLGGLPRHRDLIEHIRMHGMHGMPP

SEQ ID NO: 83557 - protein, 503 aa, Limnohabitans sp.
  misc_feature (1)..(503): tr|A0A315CDX1|A0A315CDX1_9BURK Tryptophan halogenase OS =Limnohabitans sp. Hippo4 OX=1826167 GN=B9Z46_14635 PE= 4 SV=1
MQNPLIQNIVIVGGGTAGWMTATALASVLRGKYNIRLVESDEIGIVGVGEATIPMIQRFNKVAGIDENEFLKATYGTFKLAIEFVNWGQVGDRYMHGFGPIGQDLWTVPFEQYWHKMRTAGKAADLGSYSITRAAARANKFMRPDLSVPNSPLGDITYAYHFDANLYAKYLRKLCEARGVVRTEGKITQVSQRASDGHVDAVVLASGERVEGDLFIDCSGFRGLLIEETLKTGYEDWTHWLPCDRALAVPCESAPQLLPFTRSTAHKAGWQWRIPLQHRIGNGHVFCSQHISEDEAAATLLSNLDGKPLADPRLIKFNTGMRKKAWNKNVIAVGLSSGFLEPLESTSIHLIQAAVAQLVEFFPDQGFSQIDIDTYNAQSRFQYERIRDFIILHYHANQRTDSEFWKACAYMAVPDSLKEKIALYQTHGRIFRFNEELFSQVGWLQVMEGQNLKPAHYNPLVDLQDEGSIQEYLESVRNVIAKCVDFMPDHAEYIAKHCAAPAM

SEQ ID NO: 83558 - protein, 502 aa, Idiomarina insulisalsae
  misc_feature (1)..(502): tr|A0A432YPN1|A0A432YPN1_9GAMM Tryptophan halogenase OS =Idiomarina insulisalsae OX=575789 GN=CWI71_02285 PE=4 SV=1
MTQPYHIVILGGGSAGWMTAAALAKVLDQKHYKLTLVESSAIGTVSVGEATIPGIREFNQLLQIDEDEFLRETQGSFKLGIAFENWQNIGDAYMHPFGPYGVTLNGVPFHHYYLRHEREQGQGAAMPLHELNLEWSMANGNKFSRPIADKRSPLGHIKYAYHFDAHAYARYLKKYATQRGVVALEDRMLEAKQAQKHGALQALILEQHGELQADFFIDCSGFKALLIGEALGVEYHDWRKWMPCDSAVALPGQHDADTILPYTRSIAHHEGWRWKIPLQHRTGEGWVYSSRFTDSDKAEREFRETIGNFDSKANHLRWMNGRRDEAWKHNVCAIGLSAGFIEPLESTGLQLTQSGIMRLISLLPGAGSMTERAHAFNRYTAEEITNIRDFVMCHYKLTARDDSAFWRYCRDMAIPDSLQERLELYRENASIFRNSNNELFNEISWFSMFHGQGLTPKNVHPLAEQMPAANLQQHLKTIQGIFKQSVAQLPSHAAFIRKHCQA

SEQ ID NO: 83559 - protein, 499 aa, Sphingomonas sp.
  misc_feature (1)..(499): tr|A0A0Q6LB53|A0A0Q6LB53_9SPHN Tryptophan halogenase OS =Sphingomonas sp. Leaf339 OX=1736343 GN=ASG67_03795 PE= 4 SV=1
MRRIERVVILGGGTAGWMTAAALNATFGHTLSINLLESDAIGTVGVGEATIPTIRWFNELIGVDEADFVRATTASFKLGIEFVDWAQPAHRYFHPFGRYGVDLDRVPFHQHWLRAQQDGSDRPLSTYSLATQLAAAGRFAKPASEHRSILSTLGYAYHFDAGLYARHLRGIAEGRGVTRQEGVLGQIERDPDTGFITALKTERGDRLAGDLFIDCSGFRSLLIGETMGANFEDWSHWLPCDRAVAVPCARVAETTPYTRSTLRPAGWQWRIPLQHRTGNGYVYASDHVSDDEAAATLLTHLDGKALADPRFLRFKTGFRREAWRGNVVAIGLASGFLEPLESTSIHLIQSGIAKLITLFPDADCDPGLARQFNTLFSRDMDGIRDFLILHYHATEGHDAPLWRHTRTMALPDTLVDKMEQYTRTGRLMLGPDELFREASWLAVLNGQGIYAAGTAPIADTLDGAMNQRQLDQIEAAIARAVPTLPRHDEAIAALIGGPR

SEQ ID NO: 83560 - protein, 497 aa, Sphingomonas naasensis
  misc_feature (1)..(497): tr|A0A4S1WS64|A0A4S1WS64_9SPHN Tryptophan 7-halogenase OS=Sphingomonas naasensis OX=1344951 GN=E5A74_03585 PE= 4 SV=1
MTEPAVKRVVIAGGGTAGWVAAAALVKHLGPLLDITLVESDEIGTVGVGESTIPTSRSFHELLTINEPAFMRATQATFKLGIVFENWGRAGDRYVHSFGEIGKRSTWMADFHHFWLEAQRQGFGGSLADYCFELQAAEAGKFFKGDNFPINYAYHLDATLYARFLRGLAEPAGVRRVEGKIARVEQDPESGFLTALALESGQRVEGDLFLDCTGFRAMLIEQTLQTGYEDWTRYLATNSAFAVQTRATGPAAPYTRAIAHEGGWRWRIPLQHRVGNGIVFSSDLMSDEQARLKLLNDIDGEALTEPRLIRYRTGARRKVWNKNCVALGLASGFIEPLESTSIHLVKVAVTRLIQEFPFGGCQPALAERFNQQSRHEIEGIRDFITLHYHLTERDDSPFWRRCREMEIPDSLAQRMASFREAAHAWQEGNDLFRVDSWVQVLLGQGLRPGSYHRLARMMDPGALRAALATLKGNIDAAVARMPSHEQFLASYRAASDG

SEQ ID NO: 83561 - protein, 505 aa, Sphingomonas taxi
  misc_feature (1)..(505): tr|A0A097ECK0|A0A097ECK0_9SPHN Tryptophan halogenase OS =Sphingomonas taxi OX=1549858 GN=MC45_01225 PE=4 SV=1
MDDTNAAIRSVLIVGGGTAGWMTAAALSHALGERCQITLVESDEIGTVGVGEATIPPIRLFNDTLGIAEADFLRETKGSFKLGIEFVDWAKLGHRYFHPFGTFGKPFDLVAVHQHWLAARAAGSTIPLDDLSMAWAAASRGRFAAPMTDPRSVASTFDYAYHFDAGLYAAFLRRYAEARGVSRVEGRVGDVALHGETGHVAHVGLRDGRRIDADFFVDCSGFRGLLIEGALATGYEDWAHWLPCDRAVAVPCATGGDGMTPYTRSTARAAGWQWRIPLQHRTGNGYVYCSRHISDDEATATLMANLDGEALSEPRLLRFTTGRRRTFWNRNVIAIGLASGFMEPLESTSIHLIQTGIAKLLAYFPTRDFSPLLIDEYNRVAITEYERIRDFLILHYKLTSRDDAPLWRDCAAMTIPDTLALKIAHFRQGGRLIARDMDLFGPASWLAVHIGQLNHPLGSDPLLDSSKAAAASTTFIGRLSEAMATMARSMPTHESYLQRLTRSMA

SEQ ID NO: 83562 - protein, 506 aa, Sphingopyxis sp.
  misc_feature (1)..(506): tr|A0A1P8WWU7|A0A1P8WWU7_9SPHN Tryptophan halogenase OS =Sphingopyxis sp. QXT-31 OX=1357916 GN=BWQ93_08555 PE=4 SV=1
MTSEMERVVIVGGGTAGWLAAARIAAARPALSVTLIEAPDIPTIGVGEGTWPTMRAALAAIGIDEGEFLAACDGSFKQGSRFDRWVSGADDDRYLHPFTPPPPLATRELLAAWQAGEPGQSFAAAMTAQAAVCHHDLAPRQRAMPGYQGAANYAYHLDAGKFAALLMAHAKQRLGVRHVADHVTGVRRGEGDLIAAVVTREHGEVAGDLFLDCTGHAALLIGGELGVEWIDRSDTLFNDRALAAQVPTDPDSAIASQTVSTAHRAGWIWDIALPTRRGIGCVYASRFLSDDEAEAVLRAYIAEQLPHAPEVPVRRLGFPTGHRARFWQGNCLAVGLSAGFIEPLEASAIVMIELSLNALVDNFPASAAVLPIHAQRFNALFRYRWNRIVDFLKLHYVLSRRPEPYWRAQRDPQHIPATLAAMLTLWQDQPPSVWDFPQVDEIFSAESHQYILYGMGFAPPPGLAPSDRAVAALAEQQKRARALVSALPTNRDYLDALGAAAATAAE

SEQ ID NO: 83563 - protein, 504 aa, Erythrobacter zhengii
  misc_feature (1)..(504): tr|A0A418NS29|A0A418NS29_9SPHN Tryptophan 7-halogenase OS=Erythrobacter zhengii OX=2307003 GN=D2V07_11395 PE=4 SV=1
MAIEKIVIVGGGTAGWMAAAPLSRMLQGDRELSVTLVESEAIGTVGVGEATIPPFRDFNQALEISDREMLSNVQGTFKLGIQFENWGAKDDRYIHPFGNYGYTIGGLSFHQVWHHMKKLGDNRPIQAFNVETMAAYFGRFMRSEDTQRDDLPPVNYAFHLDAGQYAKFLRRYAEARGVVRKEGKVCDVSLDGESGDVTSITLEDGSVIEGDLFIDCSGFRGLLIEQTLETGYEDWTHWLPCNRAVALPCNRDDGSPPPPFTRAIAHDAGWQWQVPLQHRNGNGHVYCDAFMSADEATDILVNNLAGKPTADPNHLRFVTGRRKKFWNRNVVALGLSAGFMEPLESTSIHLINTGINKLIAMLSLDGITEATRNTFNRLTGKEYARIRDFLILHYNATKRDDTEFWNYCRTMSVPDSLSEKVELFRTSGQIFREEDELFTETSWAAVMMGQGIPMQGNIAMTNTLERGKTKSELDEIEKSIRYFVQHMPPHAEYIAKYCPAPPIS

SEQ ID NO: 83564 - protein, 504 aa, Novosphingobium sp.
  misc_feature (1)..(504): tr|A0A257G887|A0A257G887_9SPHN Tryptophan halogenase OS =Novosphingobium sp. PASSN1 OX=2015561 GN=CFE35_17045 P E=4 SV=1
MNQGDRRIRSVLVVGGGSAGWMSAAMLGTMLKRDCKVTLVESDEIGIVGVGEATIPPIRLFNETLGISEADFIRETRGTFKLGIEFVDWGSVGSRYFHPFGPHGRNFDMVPLHQYWLKTREEPGAFPLEELSMAWQIARAGRMARPVPDQRSLLSTFDYAYHFDASLYAAFLRRHAEARGVTRVEGKIEGVSLNGETGFVESVTLEGGRKLEADLFIDCSGLRALLIEGALKTGFEDWSHWLPCDRAVAMPCASAGPPTPYTRSTAREAGWQWRIPLQHRIGNGYVYSSQFMEDDKAAELLASRLDGAALGDPRFVRFRTGRRKQHWNRNVIAVGLSSGFLEPLESTSIHLIQANISKLIGLFPDRDFGPATIDEFNRIAHAETDRIRDFLILHYKLTQRQDHELWRYVSAMEVPETLALKMEHFRRNGRLIAREMDLFAPPSWLAVHIGQHHYPEGLDPLIEHRGIDAREYLAKLRAGMAAEAARLPSHEAYIAGLTGAAAAA

SEQ ID NO: 83565 - protein, 509 aa, Sphingopyxis sp.
  misc_feature (1)..(509): tr|A0A0M8JHF4|A0A0M8JHF4_9SPHN Tryptophan halogenase, p utative OS=Sphingopyxis sp. C-1 OX=262667 GN=SC1_02500 PE=4 SV=1
MNSAIERVVIVGGGTAGWLAACRLASARRSAKIEVTLIEAPDIPTIGVGEGTWPTMRATLSAIGIGEAEFLAACDGSFKQGSRFDRWVTGAEGDSYLHPFTSPPAAPVAELLAAWQAGAPDLPFAAAMTAQAHVCDLHLAPRQRAMPDYQGAANYAYHLDAGKFAALLAAHAVQRLGVRHISDHVVDVARDDDGGIASVATRQNGDIAGDLFIDCSGHAALLIGGHLGVEWIDRGDTLFNDRALAAQVPVAAGSPIASQTVSTAHAAGWIWDIGLPGRRGVGCVYSSRFMTDDAAEATLRAYIARVLPDAPAVPARRLSFPTGHRARFWEGNCIAVGLSAGFIEPLEASAIVMIELSLNALIDNFPVRRGAMPIHAERFNELFCYRWDRIVEFLKLHYALSRREEPYWLAQRDPAHMPPSLSAMLELWRDQPPSLWDFPRVDEIFSAESHQYILYGMGYPVPPGVPMSERAVALLAENRQRARALVAALPANRDYLDALATSAHNAAVR

SEQ ID NO: 83566 - protein, 561 aa, Ruegeria profundi
  misc_feature (1)..(561): tr|A0A0X3TSG1|A0A0X3TSG1_9RHOB Tryptophan halogenase OS =Ruegeria profundi OX=1685378 GN=AVO44_13310 PE=4 SV=1
MNNRLRKITIVGGGTAGWMTALILDMVFSRTSAPKDRPSICLIESPNISTVGVGEATVPRMPVTLRQAGISERDFFRETNASFKLGVKFCNWNKDAKGNRIDYVNPFAHGQMVEGLDAAEYFLRFGNGDRDFTQSISPHDHLGRLCKGARQLGQPEFEQRFGYAYHLDAVKFAGMLTKVCTQRGVEHIRDEVQTVELDENGNVSHLMLERAGRHDIEMVVDCTGFRGLIINQALGEPFMDYSDYLPNDRAMALQIEHPNPRKIESLTRSTALGAGWTWRVPLYNRVGTGYVYSSAHRTDDQAADEYLEWLGDSGKGATPRVIPMRVGRVRNAWVKNCVAIGLSGGFIEPLESTAIHMIDHAVRWFAEHLPTRDIEPSLRARYNRQMDKLYNEVLEFICLHYKLGNRKDDPYWIDARTEMKVPDRLAENLELWQHRLPMQHDVEFATLFDHRVYQTVLLGKQSYDTGYGTGIRDRVRPLKKQIWEQGMRRAKADLAQIINTMPDHKTLLRDIRGELKQPAFVMANAAKPTVAVPGTAPEPITIQNMPNLAEIQSGKKDLQLF

SEQ ID NO: 83567 - protein, 409 aa, Corallococcus coralloides
  misc_feature (1)..(409): tr|A0A410RZ74|A0A410RZ74_CORCK Tryptophan halogenase OS =Corallococcus coralloides OX=184914 GN=cmdE PE=4 SV=1
MKTESADILIIGAGPAGSVAAGLLRKQGRDVLVLEREQFPRFSIGESLLPQSMEYLQEAGFLQDVVEAGFQFKNGAAFERGGRYTDFDFRDKFSPGWGTTYQVQRARFDQLLAQAAQKKGATVRFRHEVLTVDFSSGQPVVTARSPEGETYQVKARFILDASGFGRVLPRMLNLETPSNFPVRGAIFTHVVDNVPLGTFDRNKIRVTTHPEHVHVWYWTIPFSDGRCSLGVVAKKEFLDQYTGTDTERLQAIVKEAPSLRNLLKDAVWDTPARKLTGYAANVKSLWGPGFALLGNAGEFLDPVFSSGVTIAFKSASLASACIAREFAGEQVDWENDYAKPLKAGVDTFRTFVESWYEGGFQNVIFHPNPSEDVRRMISAILAGYAWDKNNPYVADSKRRLGVLEALCAA

SEQ ID NO: 83568 - protein, 514 aa, Streptomyces sp.
  misc_feature (1)..(514): tr|A0A2U8V9U3|A0A2U8V9U3_9ACTN Tryptophan 7-halogenase OS=Streptomyces sp. NEAU-S7GS2 OX=2202000 GN=DKG71_2339 5 PE=4 SV=1
MINSVVIVGGGTAGWMSASYLKAAYGDRINVTLVESDRVATIGVGEATFSTVRHFFDYLGLDEREWMPECSGSYKLGIRFENWREPGHHFYHPFERLRTSDGYTLADWWLQEGDRSQPFDRSCFITPALCEAKRSPRLLDGSLFAGGLDGSLGRSTLEEQRAQFPYAYHFDAALLAKFLTKYGTDRGVRHVVDDVTQVGRDERGWISHVATREHGDLTGDLFIDCTGFKGMLINETLDEPFESFQDVLPNNRAVALRVPQADQATTGMNPYTTATAMDAGWIWNIPLFGRNGNGYVYSDEFCTPEEAERTLREHVAPGQDDLEANHIRMRIGRNRRSWVNNCVAIGLSSAFVEPLESTGIFFIQHGIEQLVKNFPDENWDPALVDDYNNRVAEVLDGVKEFLVLHYKAAQREDTPYWKEAKTRALPDGLAERLATGASHLLDERTIYQPYHGFEQYSWITMMLGLGHEPKRPRPSLAHIDPTNARAELARLKADADELVAALPSCYEYIASLNS

SEQ ID NO: 83569 - protein, 498 aa, Pseudoalteromonas lipolytica
  misc_feature (1)..(498): tr|A0A0P7E9H0|A0A0P7E9H0_9GAMM Tryptophan halogenase OS =Pseudoalteromonas lipolytica OX=570156 GN=AOG27_02590 PE=4 SV=1
METKKITKVVIAGGGTAGWITAALLNKVLGKVLDITLIESAEIGTVGVGEASIPPILHLNGALGISEKEFIKATGATIKLGIEFENWRSQDHSYMHAFGEIGKDFPFCEFYHFWLKANQTQNAPDFWDFSLNYQAAKAHKFAHLKHIPNTQLAGLHYAYHFDATRYGEFLKELAQSRGVKRIEGKIESVNQCHQSGHVRSLLLKNGEQLDGDLFIDCTGLRALLIEQTLNTGFEDWSHWLPCDSAIAVQSESASDAIPYTRSIARDSGWQWQIPLQHRVGNGLVYSSRFLSDEAAKQQLLDYLPAKPLTEPRVIKFKTGRRLKQWHKNVVSVGLSSGFLEPLESTSIHLIQSAAIRLIKFFPHQGIKQSLVDEFNQQSKTEFERIRDFIILHYKLTERDDSAFWRFCKGMDIPCSLRKKIELFKTSGKLIREDDELFAEIAWQQVMIGQGLIAEDHHPLTDALSDEQLNELFSNLKTLINSTVEQLPTHNQFLEKVQN

SEQ ID NO: 83570 - protein, 502 aa, Sphingopyxis sp.
  misc_feature (1)..(502): tr|A0A0M9TX21|A0A0M9TX21_9SPHN Tryptophan halogenase OS =Sphingopyxis sp. C-1 OX=262667 GN=SC1_00514 PE=4 SV=1
MGDSRITKVVIVGGGTAGWMAAAALSRTIDNLSIRLVESDEIGTVGVGEATIPAIRLFNALVGIDENEFIRETGGTFKLGIQFHDWGRLGDVYMHAFGQIGRSLGMLPFQQYWLRGRNEGVAGRLGDYSLNETAGRQSRFARLPQIPNTSLDGIAYAFHFDAALYAAYLRKLAEAAGVRRTEGKIARVRKDGDSGHVQAVVLEDGTAIEGELFIDCSGFRALLIEGALETGFEDWTHWLPCDRAIAVPSENPGPARPYTQAIAHKSGWQWRIPLQHRTGNGHVFCSDFVSEDEATAILLANVEGRPLAEPRTLRFRTGMRKQAWNRNVVALGLASGFLEPLESTSIHLIQNGIAKLLAHFPDRDFDAANIDAYNRRVRFDYERIRDFVILHYHANQRTDSPFWIRCREMAIPETLARKIELFRSQGQIVREGDELFVEIGWFQVLTGQNIMPESYHPMADQLTRDELAGFFADIETIVARAASQLPRHDDFIAQHCAAGVPA

SEQ ID NO: 83571 - protein, 48 aa, Verrucomicrobia bacterium
  misc_feature (1)..(48): tr|A0A2V6MG76|A0A2V6MG76_9BACT Tryptophan halogenase (F ragment) OS=Verrucomicrobia bacterium OX=2026799 GN=DMF 16_10805 PE=4 SV=1
MAVESYDVAIIGGGPAGSTAATLLSKAGRRVIVLERDKFPRFHIGESL

SEQ ID NO: 83572 - protein, 503 aa, Sphingobium yanoikuyae
  misc_feature (1)..(503): tr|A0A177K0X9|A0A177K0X9_SPHYA Tryptophan halogenase OS =Sphingobium yanoikuyae OX=13690 GN=AX777_08155 PE=4 SV =1
MHADFPTSDRVVKRVVVAGGGTAGWVTATALVRHLGPLIDITLIESDAIGTIGVGESTVPTFRGFHQLMKIREDRFMAEAQATVKLGIEFKNWGQVGDRYIHPFGTIGLQWSWMADFHHFWLHARAQGFGGELGEYCLEWVAGEANRMSLSSSVAPSYAYHIDAARYARFLRSLAEPAGVKRVEGKIRNVELAPESGHIAALVLESGTRIEGDLFIDCTGFRSLLLGEALGVGFEDWGQWIRTDRAVAVQSTSDGPAQPYTSAIAHEAGWRWRIPLQHRDGNGFVFASDFMSDDEAHARLLAEIEGEPIVDPWLVRFKTGTRTRAWHKNCVGLGLAGGFIEPLESTSIHLMMAAVTRLIEDFPFHGFDDALLDHFNRKSRLEFENIRDFIILHYHVTQRDDSPFWDHCRTMEIPDSLKERLALWQENGRAYQLGHELFRVDSWSSVLLGQGMHPRGYHHVAAMMPEPQLREELARMRKDIAGVVAEMPSHREFLRRYCPAELV

SEQ ID NO: 83573 - protein, 541 aa, Shewanella sp.
  misc_feature (1)..(541): tr|A0A2N7DV59|A0A2N7DV59_9GAMM Uncharacterized protein OS=Shewanella sp. 10N.286.48.B5 OX=1880834 GN=BCU57_002 85 PE=4 SV=1
MNNKITEVVIVGGGTAGWLTAGILAAQFKKKSLAFNITLVESADIPTIGVGEGTWPSMRETLKHIGIRESDFLTHCDASFKQASKFVNWNNPTTSHSYYYHPFTQPVAADFQQITDNAVTNHSAYHYDGAASFAQLFCYQSSLCQLNLAPKLTHTADYDYIGNYGYHLDAGKFALLLKNHCIDTLNIKHISANVIGLNADATDFITCLQTDSLTSPLVNGDLFIDCSGQQGLLIKQHYKIPFICKKSILFNDRAVAAQVPYSSKNHPINSSTLATAQAAGWIWDIGLQSRRGVGYVYSSEFISDEETKIALTQYIGGEVDSVSVKHLSFNPGHLSKFWHNNCVAIGMSAGFIEPLEASALALVEQSAMFIAEQFPHHVQVLPLIEERFNQRMLNHWQQIIDFLKLHYVLSNRKDSEYWRKHKDDTTTPTSLLKLLALWQHQAPSKYDITQAYPLFPAASYQYVYYGMKQHELSDKLDLSQYSAQIQKVAQQQQQLKQVAICNRSLLNSIQQSIIQTSRNKDLTIKKKPFITAPTIIMTRLN

SEQ ID NO: 83574 - protein, 541 aa, Shewanella sp.
  misc_feature (1)..(541): tr|A0A2N7DMI3|A0A2N7DMI3_9GAMM Tryptophan halogenase OS =Shewanella sp. 10N.286.48.B5 OX=1880834 GN=BCU57_13830 PE=4 SV=1
MEQAINHIVIVGGGTAGWITAGILAAEHNADNGKLSPSPKLNITLVESPDVATIGVGEGTWPSMRTTLKKIGISETEFLISCDASFKQGSRFINWTHSLTENHSNNPSNSPSNSPSNKSSDHYLHPFSLPMGTNEIDLCPYWLPHRDQVSFADAIGQQNQLSQLFLAPKQITTAEYQFQNNYGYHLNAGKFSQLLQKHCTEKLGVSHLRDHVTAIHKKDNGDIGYLATKHSGEIAADLFVDCTGVKSLLLGEQLEVPFICQKAVLFNDSALAVQVPYPEPETDIASCTHSTAQTNGWIWDIGLPTRRGVGHVYSSSHTTQAEAEQQLIDYLKPTAGLDVDNLNIRALSIAPGHRQVCWKNNCMAIGMASGFIEPLEASALALVEWSANTLAQQLPANRHVMDIVSARVNKRFQQHWQQIIEFLKLHYVLSKRSDSDYWHDHRESSTIPDSLQEQLQLWQTQPPSRHDIQHTDVLFPAASFQFVLYGMGFETQMPNQLKPSLQNRAQQLFADNIKRTQGLKQVLPSNRELLNKIQQYGLSRI

SEQ ID NO: 83575 - protein, 514 aa, Colwellia sp.
  misc_feature (1)..(514): tr|A0A2N1HG65|A0A2N1HG65_9GAMM Tryptophan halogenase OS =Colwellia sp. Bg11-28 OX=2058305 GN=CXF79_07950 PE=4 S V=1
MGKAIKKIVIVGGGSAGWITAGSLAAEHCVNAASSIEVILIESPEVNSIGVGEGTWPSMRNTLEKIGIDEKEFLQQCDASFKQGSKFIGWTTGDDTDSYYHPFMTPDGYGHIDLHAAWQANHSEQAFADAVNIQSHVCQAGLAPKQLATPSYAAVTNYGYHLDAKKFASLLHKHCTQKLNVQHIVDHMDGIISADNGDINAISTKEHGHIAGDLFIDCTGSASLLLGKHFNIGFINKQHILFNDSALAVQVPYPDQVNPINSATLSTAQSAGWIWDIGLQTRRGVGYTYSSQYISDAEAEKSLRQYLVNSVGEEQANLLKPKKLIFEPGHREKFWHKNCVAIGMSAGFLEPLEASALAMVELSSTMVSEELPVTRAHMDIIAKRFNERFNYRWQRIIDFLKLHYILSKRTDSHYWRDNQQPNSISEELQELIKLWQYQPPSRYDFVQNEEVFPSASYQYVLYGMGFETEQRANPRKFEANPLAEKTIAETQKKIDKYLTGLPTNRELLNKLKEK

SEQ ID NO: 83576 - protein, 497 aa, Sphingomonas melonis
  misc_feature (1)..(497): tr|A0A0D1MID8|A0A0D1MID8_9SPHN Tryptophan halogenase OS =Sphingomonas melonis OX=152682 GN=SR41_01495 PE=4 SV=1
MNAVTPRRIVIAGGGTAGWMAAAALTRTLGRTATVTLVESDAIGTVGVGESTIPPLITFNRLLGINEAEFMAATQATFKLGIQFDGWKGPDDSYFHAFGLTGKDHWAAGFQHFWLDGQARGIAEPYDDYCLELMAARAGKFAHLPDDRMSYAYQLDSTLYGRFLRRMAEGDGATRIEGKIARVDLDGESGDIAALVLDGGTRVEGDLFLDCTGFRALLIEQALHVGYDDWTHWLPCDAAIAVQTTSMRAPVPFTRAMAHDAGWQWRIPLQHRVGNGIVYCSRYLSQDAALDRLLGNVEGAVLTEPNRLRFVTGARRKQWHRNCIAIGLAGGFMEPLESTSIHLIQRAILRLIRLLPPAGAISAHDIAEFNDQQLTDMDQIRDFLILHYKVTERRDSPFWRQCAAMDIPDSLAQKIGLFRETGRVFRRNDELFAENSWIQVMLGQGIVPQTHHPIAAKLPDDELARFLGGLRQGVATTVRGLPAHADYVARYCGAAPA

SEQ ID NO: 83577 - protein, 508 aa, Pseudoalteromonas lipolytica
  misc_feature (1)..(508): tr|A0A1I7BDH1|A0A1I7BDH1_9GAMM Tryptophan halogenase OS =Pseudoalteromonas lipolytica OX=570156 GN=SAMN04487854 _11215 PE=4 SV=1
MNTHINNIVIVGGGAAGWLTAGLLASEHPDKIITLIESVNIGISGVGEGTWPSMRNTLQRIGIKETDFLRHCDASFKQGSKFINWQTELEGDNYYHPFMVPQGYTECDIHAAWQYLSPEHKYADTVNMQSFVCQAALAPKQAQTPDYAAVTNYGYHLDAHKFAHFLAHHCVNKLNVKHIVDDVLNANNDSHGYIQSVNTLSNAAISGDLFIDCSGSAGLLIAKHYQIEYLNQNHILFNNCAVTTHLPYQDPHDNIASATLSTAQQAGWIWDIGLPTRRGIGYTFSDKYCDEATAIKTLKHYAEQSIGSKLAEQLDTRTLRFTPGYRKEFWHKNCVAVGMSQGFIEPLEASALAMVELSISMLSEQMPSNRQHMTLLSARFNERFNYRWQKVIEFLKLHYVLSKRNDSPYWLDNRQTNTIPTALQKLLELWCYQPPSRFDLIENEEVFPSASYQYVLYGMGFHTPLPAHMSTKQQEFAQQLCKLNRERIGHYLKNLPSNRLLLQQLLAK

SEQ ID NO: 83578 - protein, 508 aa, Marinimicrobium koreense
  misc_feature (1)..(508): tr|A0A3N1P249|A0A3N1P249_9GAMM Flavin-dependent dehydro genase OS=Marinimicrobium koreense OX=306545 GN=EDC38_2 304 PE=4 SV=1
MTTTGKPEKILIVGGGTAGWMAACLLNSRWPDIEVCVLESRDIGVVGVGEGSTPHLKVFFDAVGIEESEWMPKCNATYKNGISFHGWSSIPGFESYFHPFPAQTDDLLTVPLFLRNVQARLRGDYAHAHPDSYFLETYLAQNNLGPLADECFPFGAAYGYHFDSKLLGQFLSEKAVARGVKRIIGTVTEVLLSTDGAISSVRLAGNDTLEADFFVDCSGFRSLLMQGALKTRFLGFEDNLFNDAAVVLPSETSTTIPPETRSTALSNGWAWKIPLTNRYGNGYVYSSSHIDADRAETELRQNLGLLESDTPARHLNMKVGRVASHWTKNCLAVGLSQGFIEPLEATAIALSFETVRRFMLHFERGGFTNQGADDFNREINTKFEGIRDYIVCHYKVNQRRDTAYWRDNAENTKLSEHLSRILYLWQHSENFAQEMQANHLGGSYQPKSWACLLAGYGVFPPLRSSTGSPTAEASQEQDQLADFIRRCALNFRPHNELLAPAVAEQSVV

SEQ ID NO: 83579 - protein, 520 aa, Erythrobacter longus
  misc_feature (1)..(520): tr|A0A074MW71|A0A074MW71_ERYLO Tryptophan halogenase OS =Erythrobacter longus OX=1044 GN=EH31_11940 PE=4 SV=1
MTYGVASNEGTPSGAAKRINHVVVVGGGTAGWMTAAGLAHMLGASGLGQAGLKVTLIESEAIGVVGVGEATLPHIKAFNDTIGINEAEFMAATSATFKLGIEFVDWGRKGDSYIHPFGEFGLPNEGVAFHHYWRKFADVAGPLDDYSLPVVACRNAKFQPPSEDPRSVLSTYRYAYQFDTLQYAPFMRSHAEKKGVTRIEGKVVDVALDPDDGRVTELTLENGQSVAGDLFIDCTGFFGLLIEKQLETGYDDWSEWLPADRAVAVPCESAGPLLPYTRATAHEAGWSWRIPLQHRTGNGHVYSSQFLSDDAACDTLLGGLEGGRLADPRFLRFVTGKRRKLWNKNVVAIGLSGGFLEPLESTSIYLIQEGISKLVELFPQDQDCAVETREYNYWMDLQFERIRDFLILHYHATQRDDSDFWNHMRNLKVPDSLQERLELFRAHGHVSAYEHGLFLVPSWIAVLIGQRVIPQGFDARVAGTPEAHVKQHLAGLRDHMSKAAGSMEDHATFLRRYAQMSDAA

SEQ ID NO: 83580 - protein, 505 aa, Erythrobacter longus
  misc_feature (1)..(505): tr|A0A074M8V8|A0A074M8V8_ERYLO Tryptophan halogenase OS =Erythrobacter longus OX=1044 GN=EH31_11925 PE=4 SV=1
MNPHLLEHCVIVGGGTAGWMAAATLGHLLEGSPTKVTLIESEQIGTVGVGEATIPPIITFNTMLGIDEDEFVRETNATFKLGIEFVDWFERGQSYIHPFGDFGRDFDAIPFYQYWLHRNLAGTKDDLFSYSLMVEACRREKFMRPLTNRPQSALSGINYAFQFDASLYAAFLRRFAEGKGVTRVEGKIQDVTQASENGHVQSLKLESGETIEGDFFVDCSGFRGLLIEQTLETGYEDWRQWLPCDRAVAMPCAKVGDPLPYTRATARDAGWQWRIPLQHRTGNGHVYCSEFMEDDTAEQILRDNLDGEPLADANRLRFVTGRRKKFWDGNVLALGLAAGFMEPLESTSIHLIQTSLARLLTHFPDKRFKSADIDAFNHRTTKEYERIRDFLVLHYTATRRDDTPFWRHCQAIEQPDSLKSRIEQFRDCGRIFSEPNDIFGTASWLAVLYGQGVRPTAANPLIAKIPSDKIDNIIRQIGATIDHAATSMPFHQDFINENCSTFSEP

SEQ ID NO: 83581 - protein, 492 aa, Sphingomonas melonis
  misc_feature (1)..(492): tr|A0A0D1MS39|A0A0D1MS39_9SPHN Tryptophan halogenase OS =Sphingomonas melonis OX=152682 GN=SR41_01530 PE=4 SV=1
MSDTRIRRIVILGGGTAGWMTAAALSRALAGQGVAITLVESDAIGTIGVGEATIPTIHWFNQIIGMDERQFMAETKATVKLGIEFVGWNGEGSRYFHPFGTFGPPGDGAMFLHRLIRARADGDTASTEAYSLTAQAARAGRFTRPVPDRRSLLSTLGYAYHFDAGLYARYLRGLAERAGVTRIEGMVASVERHDDSGYVRSLTLADGQVVAGDLFIDCSGLRGLLIGETLGVGYDDWSHWLPCDRAWAAPSAAEVGRTPFTRAAAAEAGWRWRIPLQHRVGNGYVFASRFQDEEAARASLIAGMDGPPLADPRLIRFTPGMRREAWRANVVAIGLSSGFLEPLESTSIHLIQSGIAKLLSLFPAADCSPLLARQFNRVFGQEMLDVRDFLILHYHATTGRTEPMWQERQAMAIPDTLAEKIAHFRASGRIVLSSDELFRDASWFAVLDGQGVRPGDHNPLIEAVGRDDNLRQLAALRADIAKVTATLPPLPA

SEQ ID NO: 83582 - protein, 510 aa, Erythrobacter longus
  misc_feature (1)..(510): tr|A0A074MAS0|A0A074MAS0_ERYLO Tryptophan halogenase OS =Erythrobacter longus OX=1044 GN=EH31_11930 PE=4 SV=1
MSEGSIKRVVIAGGGTAGWMTAAALSKIMGPAGIKVTLIESEAIGTVGVGEATIPAIMKFNAQLGIDEHEFVRATQATYKLGIEFKNWGDLGESYFHPFGRIGFDLDGIDFHQFWSRLKQEGGEHGLGDYSLNTVAAYAGKFVRPEPDHGQVINQMGYAFHFDASLYAAFLRAFAEGEGTTRIEGRIEHVEQDAQSGLLTALKLDHDREIEGDLFIDCTGFRGLLIGQALGSQYVDWSHWLPCNRAVAVACEKQGDPVPYTRSTARDAGWQWRIPLQHRTGNGYVYCDKFLSAEDAEEALLGSLDGAPVSSPNHLRFQTGHRDQFWAGNCVAIGLSSGFLEPLESTSIHLIQMGIAKLIALFPDAIEAPIERAEYNRLMTDDFTHVRDFLILHYKATRRSGAPFWDYVRTMSIPDTLQQKMDLLRSRGRFFKYDAELFDLTSWLVVAEGQGWGPQGYSPAASRITSANLTQSLANMRDVYARTAKAMPEHQAYIDRFCKAAGDKMRADAA

SEQ ID NO: 83583 - protein, 503 aa, Sphingobium yanoikuyae
  misc_feature (1)..(503): tr|A0A291N7V5|A0A291N7V5_SPHYA Tryptophan halogenase OS =Sphingobium yanoikuyae OX=13690 GN=A6768_22480 PE=4 SV =1
MHADFPTSDRVVKRVVVAGGGTAGWVTATALVRHLGPLIDITLIESDAIGTIGVGESTVPTFRGFHQLMKIREDRFMAEAQATVKLGIEFKNWGQVGDRYIHPFGTIGLQWSWMADFHHFWLHARAQGFGGELGEYCLEWVAGEANRMSLSSSVAPSYAYHIDAARYARFLRSLAEPAGVKRVEGKIRNVELAPESGHIAALVLESGTRIEGDLFIDCTGFRSLLLGEALGVGFEDWGQWIRTDRAVAVQSTSDGPAQPYTSAIAHEAGWRWRIPLQHRDGNGFVFASDFMSDDEAHARLLAEIEGEPIVDPWLVRFKTGTRTRAWHKNCVGLGLAGGFIEPLESTSIHLMMAAVTRLIEDFPFHGFDDALLDHFNRKSRLEFENIRDFIILHYHVTQRDDSPFWDHCRTMEIPDSLKERLALWQENGRAYQLGHELFRVESWSSVLLGQGMHPRGYHHVAAMMPEPQLRAELARMRKDIVWVVAEMPSHREFLRRYCPAELV

SEQ ID NO: 83584 - protein, 493 aa, Verrucomicrobia bacterium
  misc_feature (1)..(493): tr|A0A2V5TNP4|A0A2V5TNP4_9BACT Uncharacterized protein OS=Verrucomicrobia bacterium OX=2026799 GN=DME24_19950 PE=4 SV=1
MKISSIVVLGAGSAGLMAALTLKRKVAQLAVRVVRSPDIGIIGVGEGTTVVFPRHFFEYLKMKPRDFYAEAEPTWKMGLRFLWGPRKEFYYTFSFEFEKRLHELSRNNGFYYSDECPWLGHASAFMAHNKVFPRRPDGLPQFHNNHAFHIENKKLVAWLENRCRDHGVGILDATVRAEKGGDGIGSLVTENGEHITADLFVDASGFRSELLSRALGEPFRSYQDALFCDRAVIGGWPRTEEPILPYTTAETMDAGWCWQIEHEHFINRGYVYSSGYISDDAALAEFMRKNPKLATAPRVVKFRSGRYERSWVGNVVGIGNAVGFVEPLEATALQVISVEASTLADSLLDSLCEPTPSLIRLYNRYNGDQWDDIRNFLAIHYKFNTRIDTPFWRACRADTALHGAQDIVDWYRENGPSVLAGVALVHPSNSFRMDGYLALLAGQKVPHNRPYHPPPAERNFWRQHCRNLAAEAQRGLDVKEALQAIRSPGLKWS

SEQ ID NO: 83585 - protein, 104 aa, Verrucomicrobia bacterium
  misc_feature (1)..(104): tr|A0A2N9NSD3|A0A2N9NSD3_9BACT Tryptophan halogenase OS =Verrucomicrobia bacterium OX=2026799 GN=SBV1_2950015 P E=4 SV=1
MESLAAGDDGRRRFWSYEKRVFRSMQFYWDMVEAFYTTPFMELFMQPRPKYNLPDAIVAILAGELEGGWKLDWRRRVFFWLVKLQGRRPFMPRISFAETGEPTV

SEQ ID NO: 83586 - protein, 499 aa, Verrucomicrobia bacterium
  misc_feature (1)..(499): tr|A0A2V5YUY3|A0A2V5YUY3_9BACT Tryptophan halogenase OS =Verrucomicrobia bacterium OX=2026799 GN=DME56_09395 PE =4 SV=1
MGIANHNAIVVGGGPGGSTAATLLAKAGARVLLVEKEKFPRYQIGESLLPATVHGVCRLLGVSDDLHAAGFIKKRGGTFRWGKHPTPWTFDFGSAEVNQILEFNFAYQVERAKFDELLLNNARRQGVEVREETSVTDVIQEGGRCSGVTLLDRSGRSTEARATFIIDASGNQSRLHALAGKRVFSKFFQNLALFGYFEGGGRLPAPHSGNIFSCAFPFGWFWYIPLSQTLTSVGAVVAKEHAAKLRSGPDYAMGQFIDACPEIKQLLANATRIENGMYGGYRVRKDYSYINSRFWVPGLVLVGDSACFVDPIFSSGVHLATYSGMLAARSIATILKRGMPEAVGLDIYERRYRLEYSVFYDFLVSFYDMHQDEQSYFWKARKVLGSDQAANHAFLQLVAGAGTTVAEFLRLRERSGELFQLRVDGTVDPNKRSGLLRELMKERDMAQVHLRAVGRSAQMGRQDGLDAPLDFNPGGDPATNDGYRVSPDGLCWERLAESG

SEQ ID NO: 83587 - protein, 326 aa, Verrucomicrobia bacterium
  misc_feature (1)..(326): tr|A0A2N9NSK4|A0A2N9NSK4_9BACT Tryptophan halogenase OS =Verrucomicrobia bacterium OX=2026799 GN=SBV1_2950014 P E=4 SV=1
  misc_feature (290)..(290): Xaa can be any naturally occurring amino acid
MAYDAIIVGGGPGGSSAGTLLARAGKRVLVLEKEQFPRFHIGESLLPYNRRLFEEMGVLPSLEAAGLIKKFGAQFHLGNASSSLKMVFRNGCFTREGQAFQVERSAFDHLLLNHTRASGAEVREGCTVTKFWNEPGQVAVEARSKEGPNETLRASFLIDASGRGNFTGNQEGLRVVHPHLKKLAVFGHFEGVRLDEGAPGGDTVIVRLEDKWFWIIPVSPQKVSVGCVLDQEQFARAKQAPAELFTRLWQSSTAMRSRMENAKLVNTIQTTSDFSYYNRRLVGPRLLRVXFFGGCLFGHVFGETGLAGHRGVTGRRRRWPAPILVL

SEQ ID NO: 83588 - protein, 499 aa, Verrucomicrobia bacterium
  misc_feature (1)..(499): tr|A0A2V6ASH3|A0A2V6ASH3_9BACT Tryptophan halogenase OS =Verrucomicrobia bacterium OX=2026799 GN=DME53_09555 PE =4 SV=1
MGIANHNAIVVGGGPGGSTAATLLAKAGARVLLVEKEKFPRYQIGESLLPATIHGVCRLLGVSDDLHAAGFIKKRGGTFRWGKHPTPWTFDFGSAEVNQILEFNFAYQVERAKFDELLLNNARRQGVEVREETSVTDVIQEGGRCSGVTLLDRSGRSTEARATFIIDASGNQSRLHAIAGKRVFSKFFQNLALFGYFEGGGRLPAPHSGNIFSCAFPFGWFWYIPLSQTLTSVGAVVAKEHAAKLRSGPDYAMGQFIDACPEIKQLLANATRIENGMYGGYRVRKDYSYINSRFWVPGLVLVGDSACFVDPIFSSGVHLATYSGMLAARSIATILKRGMPEAVGLDIYERRYRLEYSVFYDFLVSFYDMHQDEQSYFWKARKVLGSDQAANHAFLQLVAGAGTTVAEFLRLRERSGELFQLRVDGTVDPNKRSGLLRELMKERDMAQVHLRAVGRSAQMGRQDGLDAPLDFNPGGDPATNDGYRVSPDGLCWERLAESG

SEQ ID NO: 83589 - protein, 494 aa, Sphingopyxis sp.
  misc_feature (1)..(494): tr|A0A0M8JHI9|A0A0M8JHI9_9SPHN Tryptophan halogenase OS =Sphingopyxis sp. C-1 OX=262667 GN=SC1_02735 PE=4 SV=1
MSAVRDITLLGRDAPLWLAAAALRRALAPAGVKVRAVALPDENGPADLYATLPAIEALHNQIGIDEAALLRGVRGAFTLGQNFVDASGAGRAPFLHSYGAFGTGINGGDFFPHWVKARRHGLGVGLDDFSLTATAAHNGRLFLPDEVSEIYGRSDYGYHLPAAAYAKSLKAIARHLGVEIFETTGVMVERGDDGIVALLLDDGGRVESALFADLTREGLLREATGSAFEAWTMPGDRMLTALAPRFAALPVYAEIRAGVDGWTGLFPSLTHMHVAHVFSGAATSDDAALQAAATTSGLTLDAVTFRTFTSGMAREPWAGNVIGLGEAACSFDPSHGLALHGLQLSVVHLLGVYPAEGYSYAARRAEYNRVMRSHFARVADFQAAHLTLQDYAGPFWDTARTLPISAELAHMIDFFRARGELAPQEDESLPPDSWRALFIGHGIAPESWRPAVDRVPPHEVNVHFRKMLGFVREQVLRQPTHDAYLARIMQRAHG

SEQ ID NO: 83590 - protein, 536 aa, Yersinia intermedia
  misc_feature (1)..(536): tr|A0A208ZSE5|A0A208ZSE5_YERIN Tryptophan halogenase OS =Yersinia intermedia OX=631 GN=CBW57_18930 PE=4 SV=1
MSKPIKNIVIVGGGTAGWMSASYLVRALQQQANITLIESAEIPRIGVGEATIPSLQKVFFDFLGIPEREWMPQVNGAFKAGIKFVNWRKSPDPSRNDYFYHLFGSVPNCDGVPLTHYWLRKREQGFQQSMEYACYPQPEALDGNLAPCLHDGSRQMSHAWHFDAHLVADFLTRWAVDRGVNRVVDEVVEVKLNDRGFISSLFTKEGRKLEADLFIDCSGMRGLLINQALKEPFIDMSDYLLCDSAVATAVPTDDAQVGIEPYTTSIAMNSGWTWKIPMLGRFGSGYVFSSKFTSRDQATADFLNLWGLSDNQPLNQIKFRVGRNKRSWVNNCVAIGLSSCFLEPLESTGIYFIYAALYQLVKHFPDTSFDLRLTDAFNAEIIYMFDDSRDFVQAHYFTTPREDTPFWLTNRHDLRLSDAIKEKVERYKAGLPLTTTSFDDSTYYETFDYEFKNFWLNGNYYCIFAGLGMLPDRSLPLLRLRPESNDKAEAMFARIQREAERLRANLPTNYDYLRSLHEGDSGLFRPGPTPASLEIP

SEQ ID NO: 83591 - protein, 497 aa, Mycobacteroides chelonae
  misc_feature (1)..(497): tr|A0A1S1L0I7|A0A1S1L0I7_MYCCH Tryptophan halogenase OS =Mycobacteroides chelonae OX=1774 GN=BKG75_04245 PE=4 S V=1
MTASYLKVAFGDRITVTVVESARIGAIGVGEATFSTIRHFFDYLGLEEHEWMPSCCATYKLGIRFQDWRKPGHHFYHPFERQRVVDGFGLTDWWLDNPRSDSFDRDCFLIGTLCDNDKSPRRLDGSLFMDTDGEHTAYRTTLSEQDTQFPYAYHFDASLLADFLRDFAVRRGVRHVVDDVVDVLQDDRGWISEARTRAHGSIEGDLFIDCTGFSGLLLGRAMGEPFESYQGSLLNDRAVALRVPTDQNGGHLPPYTTATAQDAGWIWSIPLFDRIGTGYVYAEDYCSPEDAERALRDFVGPAAEGLEANHIRMRIGRSRRSWVGNCVAIGLASGFVEPLESTGIFFIQHGIEQLVKHFPDENWEESLRDSYNRVINRCMDGVREFLVLHYYLAARVDTQYWRDTKSVQLPTALAERIEHWRSKLPDAGSVYPHYHGFEPYSYVCMFVGLGGIPARPAAVVRYLDATRAQREFDLIAQQASRLRHSLPTHREYLAQMY

SEQ ID NO: 83592 - protein, 498 aa, Sphingopyxis sp.
  misc_feature (1)..(498): tr|A0A0M8JH89|A0A0M8JH89_9SPHN Tryptophan halogenase OS =Sphingopyxis sp. C-1 OX=262667 GN=SC1_02497 PE=4 SV=1
MSDKKPVRVVIAGGGTAGWMMAAAIARTMGQTVDLTLVESEQIGTIGVGESTIPPLVNFNRILGIPETEFMRATQATFKLGILFDNWKHDGDSYFHSFGLSGKDHWSAGFQHFWLNARERGHEQPYSDYCLELVAGMEGKFAHLPEERMNYAYHVDATLYGRFLRKLAETDGCKRVEGKIARVELDGESGDIAALHLDGDRRIEGDMFVDCTGFRGLLIDGALHAGFEDWSHWLPNDSAIAVQSKHLGPPQPYTQAIAHDAGWQWRIPLQHRMGAGIVYSSGYLSRDEAYDRLMGSVGEPLIEPFDIKFKGGVRRKQWFRNCVAVGLAGGFVEPLEATTVHLIQRAVLRFIRLMPNGRVSERDAQEFNDQQRLDIEQIRDFVVLHYKATNRRDSPFWRHVANMPIPDSLQQKIELFRETGRVFRKYEELFAENSWVQVMMGQGIEPQSYHPIADKLRDDEVERLFQSIRDNIAQTVATLPEHHAYVARYCGAEEPKAA

SEQ ID NO: 83593 - protein, 497 aa, Pseudoalteromonas sp.
  misc_feature (1)..(497): tr|A0A3R8TGD4|A0A3R8TGD4_9GAMM Tryptophan 7-halogenase OS=Pseudoalteromonas sp. J010 OX=998465 GN=EAG18_18855 PE=4 SV=1
MNEKISNSVPKSIAIIGGGTAGWMSAILLKSNWVNSKVILIESPDVPVIGVGEGSTPALKYFFQSLNIDEKEWMKRCNATYKVGIQFPNWSTVPGYESYFHPFFSALDSQTSTAFVKQAKKWRQGERVNVLPDNFFVAASLAKKHKAIITKKSLPIELDYGYHFDSALLGDYLKEKSIERGVIYQEATVDSVIHSDKNIDSLVLDTKQTVTAELFVDCTGFSGVLVNKALKRDFHSYSDMLFNDAAVAIQTPKVTEQLESKTISAAMSCGWRWQIPLRNRDGNGYVYSSKYLSSDEAEQELRSVLPEQGKGCHARHIKMRVGRLNEHFLGNCLAVGLSQGFIEPLEATALMLVQYTVMSYINGVENEYSAEKLNKKINDQFDSVRDYVVCHYKINSKEGKYWQDCRENNSISANLNAILQAWTSSDDFESSYKELLGDSAYAKASWYSILCGMGLSDLDIEARTTLDSLATKALAYCEDTAELFIDQAELFASDTTR

SEQ ID NO: 83594 - protein, 511 aa, Massilia sp.
  misc_feature (1)..(511): tr|A0A4R3UX76|A0A4R3UX76_9BURK Tryptophan halogenase OS =Massilia sp. GV097 OX=2135674 GN=C8K02_103557 PE=4 SV= 1
MDQGRGRAIRKIVIVGGGTAGWMTAAPLALRLGKACEIVLVESPEIGTVGVGEATLPTIAYYNRALGLDPADFARKTKATFKLGIEFKDWGHVGNRFFHGFGDFGPAIENRSPYMYWLRLARAFKDMPSYEGWSAATAMGRANRFVEPYGDQPSVTNAFSYAYHFDAGLYAAYLRDYAMQRGVARIEGMITAVEQHPETGFITAVRLRDGSRVEGDLFIDCSGFRGLLIEGVFQTGYDDWSAMLPCNSAQAVPCARVEPLTPYTRSTAQSAGWTWRIPLQHRTGNGYVYCNGFTSDEEALRVLLAGLDGRALDEPRQLRFTTGRRRKSWIKNCVAIGLSSGFLEPLESTSINIIENSVGWLLQHFPDRDFQPALADEFNRLVSQRYESVRDFIVMHYKITQRDDSEFWRYCAAMPVPDTLRHQIELFRETGRVAIYDPEGFQVSSHISIMAGLGLTPKTYDPLIDLMDLQALRTHFDRVRDTISRAVQAMPDHGAYVSQLAAEPTLSGLAA

SEQ ID NO: 83595 - protein, 498 aa, Xanthomonas campestris
  misc_feature (1)..(498): tr|Q8P6Z0|Q8P6Z0_XANCP Tryptophan halogenase OS=Xanthom onas campestris pv. campestris (strain ATCC 33913 / DSM 3586 / NCPPB 528 / LMG 568 / P 25) OX=190485 GN=prnA P E=4 SV=1
MTQARIRKVVIAGGGTAGWVAAAALAHQFRGLLEIVLVESEQIGTIGVGESTVPPIRAFHRFLQIDEQEFLRAVAGTFKLAISFEDWQGQGDRYIHPFGSTGQGTLVCAFHHFWLEAQRRGMHSGFDEYCLEAQAARADRFAVLQQPAVNYAYHLDAGLYARFLRTHAQRYGATRIEGKIQQVRQHADSGFVEALVLEDGQVVEGDLFIDCTGFRGLLIEQTLHTGYEDWSHWLPCDRAVAVQTESVEPPVPYTRAIAHAAGWRWQIPLQHRVGNGLVYARAHLSDDEASAMLLAAVQGTPRRDPMLVPFVTGRRLQTWNKNVVALGLASGFVEPLESTSIHLAIVAVMRLITLFPADGIAQPQVDLFNRISRAEAEHVRDFVILHYHATQREEALWRQCRAMELPESLQLRLRAWREGAHAWQDGDELFRVDSWTHVLLGQRVAPAQHHPLTRALPDQHLQQLLDGIRQPLQHVVTQLPTQQAFIDSYCKVDQSTWG

SEQ ID NO: 83596 - protein, 502 aa, Verrucomicrobia bacterium
  misc_feature (1)..(502): tr|A0A3E1ECG3|A0A3E1ECG3_9BACT Tryptophan halogenase OS =Verrucomicrobia bacterium OX=2026799 GN=DVB22_003187 P E=4 SV=1
MKEASKITRVLVLGGGTAGLLAALTLKRKLPQLEVEVVRSVEMGVIGVGEGTTAAFPRHLFEYLKLPPGEFYAGAEPTWKLGIHFVWGPYPQGYYYTFQNEFKSRWPELKRNTGFYYEPETRWLGIVSACMAHGKAFPRKPDGSLHMHNNHAFHIENKKLVGWLESTCERNGVRLTEGTVERVETGAEGVEALHLAGGRRVTADLYVDASGFRSELLGRALGEPFLGYEKSLFCDRAVIAGWPRTDEEIKPYTVAETMDAGWCWQIEHENWINRGYVYSSRFISDEEALAEFRRKNPKIANEPRVVKFRSGRYARPWVGNVVAVGNSMGFVEPLEATAIQVICVECSTLADTLVDSLQEPTQTLKDLYNTYNVRQWDDIRDFLAVHYAFNTRVDTPFWRACREETDLGGAVAMVRYYKENGPSVLPEPVLFDPNNSFGLEGYLAMLVGMGVPHGKPWKASDPEKKIWRERLAGFGQHGQRGFSVKEVLGMIRAGGVKQAGSG

SEQ ID NO: 83597 - protein, 503 aa, Pseudoalteromonas lipolytica
  misc_feature (1)..(503): tr|A0A0P7E6G4|A0A0P7E6G4_9GAMM Tryptophan halogenase OS =Pseudoalteromonas lipolytica OX=570156 GN=AOG27_14560 PE=4 SV=1
MIKKIAIVGGGTAGWLAANHLGHALLQSGIEITLIESPNIASIGVGEGTVPSMRYSLQKFGISESDFINECDVTFKQSIKFVNWLDKHKHGANFYHHLFDHPHIFGEDLTQQWLADGHGNDYADFVSKQHACCENNLAPKTIATPQYAGINGYAYHFDAKKFAAFLGSHATQHFAVKHLFAEIKDVSCDEQGFITHLIDSDGNALEFDFIIDCSGFSAAFIGQKLGVGFVDKSASLLTDTAITLQVPTQSDDEIPPYTIATAHQAGWIWDIALTERRGVGFVYSSKYMSDEQAHAKLHHYLGNKFEHLTPRKIPMKVGHREKMWHKNCVAIGLSQGFVEPLEATAILIADFSAGLLAKRFPRTREDINLVADEYNQQVNYVWQQTFDFIKMHYCISDRTDSAFWRDNKKTDQLSEKLKNNLARWQRFSPVREDFASKFDLFDLENYLYVLFGMHYVPAKQQTKQSDNQQVAKLKQQRVNQLLSELPKHRELLDKIKKFGLQKY

SEQ ID NO: 83598 - protein, 513 aa, Pseudoalteromonas lipolytica
  misc_feature (1)..(513): tr|A0A1I6ZL82|A0A1I6ZL82_9GAMM Tryptophan halogenase OS =Pseudoalteromonas lipolytica OX=570156 GN=SAMN04487854 _10645 PE=4 SV=1
MQQNNVKKVVILGGGTAGWLTAGLIAAQPHLTHNAQITLIESPDIATIGVGEGTWPTMRQTLKTIGISESDFIQTCDASFKQGSRFDGWCEDDGSTHYYHPFSLPVAYQQLNIAPYWFANKEAVSFSHAVASQTYLCDHHKAPKNHLHSAYQGEANYGYHLDAGKFAMLLQTHCTTQLNVEHIVSHVESINNDDEGYISSLETRDHGIITGDLFIDCSGTHAKLLHQHYGVELIEQQDVLFNDRAVAVQVPYASPQQDILSYTKATAQDAGWIWDIGLQSRRGLGMVYSSRFANSDDAKQALGRYIESTQPGTDQSQLTFREIRFTPGYRRTFWHKNCLAIGMSAGFIEPLEASALVMVELGLNNLLANFPTHRAAMLTLAKRFDDQCHYRWQRIIEFLKLHYVLSKRTSPYWQAHKEAASVPAQLQENLALWQYQSPWLNDFDRAQEVFSAASYQYVLYGMKQLPKFPSMAMPAAIVEHFTANQQHAKHALQQLPTNRELLNHIQQFGIQPI

SEQ ID NO: 83599 - protein, 501 aa, Verrucomicrobia bacterium
  misc_feature (1)..(501): tr|A0A388PCH1|A0A388PCH1_9BACT Flavin-dependent tryptop han halogenase RebH OS=Verrucomicrobia bacterium OX=202 6799 GN=EMGBS8_05900 PE=4 SV=1
MIQDVLILGGGTAGFFMAASLKTHHPCLRVRVVRSPTLGIIGVGEGSTTDLLRFIHGFLRVPPSEFYRAVKPSLKLGIKFLWGKEDYHYTFTGALRQKFEPSGVPIGFACDETLADVDIHTSLMAAGKVFPRSPDGPWPLVNPTVGYHIENAELVAWLESHAAKLGIEVIDGDLAAVEQAEGEIQALHLKDGQRLAADFFVDASGFRAELIGKALGTPFISYADSLFCDKAVVGGWARTSEPILPYTTAETMAAGWAWQIEHPGRINRGYVYCSKFISDADAEAEFRAKNPKVGPTRIVPFVPGRYAHQWVGNVFAVGNAAGFVEPLEATSLLCIAHECRFLTIALAEGGLKKNYSMRETTDHLCGRLWDEIRDFLAVHYRFNQRADTPFWRHCRAHVALHGAQRMVDFYRENGPTFCLEVELLAPAQSIFQLEGFWLHLVAMGVPHERMDRLTPAERQWWASQRASNRGRAATGLTVEESLKVLHDPRWSWRPDFYKDVH

SEQ ID NO: 83600 - protein, 520 aa, Sphingopyxis sp.
  misc_feature (1)..(520): tr|A0A0W1G454|A0A0W1G454_9SPHN Tryptophan halogenase OS =Sphingopyxis sp. H071 OX=1759078 GN=ATE69_19935 PE=4 S V=1
MTQKVERVVIVGGGTAGWLAASLIATSRRAKAAPLSVTVVEAPDVPIVGVGEGTWPTMRTTLQTIGLDEAEFLAACDGAFKQASRFDGWVDGSAGDSYLHPFTTPPPLPIGELLAAWQATAPDQPFAAAMSAQAAVCDLHLAPRQRAMPGYQGATNYAYHFATEKFGALLGAHAKRNPLITHILDHVTGVRHAENGDIAALTTRSGREVEGDLFIDCSGFKGLLIDGALGVEWVDRSDHAFNDRAIASQVPVPPGSPIASQTIATAHEAGWIWDIGLPSRRGIGCVYSSRFMDAERAEAILRNYIARELPGAVPDSNVFGVPFRHIGFKTGHRERFWERNCLSVGLAAGFVEPLEASAIVLIELSLRALIDNFPADRAAMDIHAGRFNKLFRYRWDRIIEFLKLHYVLSRREEPYWRAHRDPDHIPPHLADLLTLWRDQPPSSSDFPYIDEIFSAQSHQYILYGMGFPPPAGWPASDGAVAALAEMRQRARTLAAGLPTNRAYLDALAGERPGAAEAAAE

SEQ ID NO: 83601 - protein, 498 aa, Sphingopyxis sp.
  misc_feature (1)..(498): tr|A0A0W1G654|A0A0W1G654_9SPHN Tryptophan halogenase OS =Sphingopyxis sp. H071 OX=1759078 GN=ATE69_18340 PE=4 S V=1
MRLMIIGGGTAGWMAAACLRRFLPRDWSVRLVESDEIGTVGVGEATIPQIRLFNDALGIDEDEFLAATQGTIKLGIEFRDWTRVGHRYMHAFGAIGRGLGLVDFHHYWLRARAAGLAESLDHYSLNERAARARRMQRGAPRTSRYLLEMPYAYHFDAALYAAFLRRRAEAGGVERIEGRIGEVRLDPQRGDVAGVTLDDGRRFDGDFFIDCSGFRGLLIEGALASGYEDWSRWLLNDRAVAVPCAHGTVPQLPWTGATARDAGWQWRIPLQHRIGNGYVYCSAHIGDDAALDTLLSDLDGAAQAEPNQLRFVSGKRRRMWNRNVVALGLASGFMEPLESTSIHLVQAGISRLVKMLPSGAADPAVAAEFNRQSDFEWERIRDFIILHFKATERQDTPYWRDRAEMDVPDTLAAKIDLFRAQGLIFREHEELFTESGWLQVLVGQAVEPLRWHPLADSLEPAELAQFIAGISLTIEREVAQMENYDAFLAAARPAGVAA

SEQ ID NO: 83602 - protein, 786 aa, Methylobacterium sp.
  misc_feature (1)..(786): tr|A0A5C8WTW7|A0A5C8WTW7_9RHIZ Tryptophan 7-halogenase OS=Methylobacterium sp. WL8 OX=2603899 GN=FV234_11025 P E=4 SV=1
MTRRIVIAGGGLAGWMTAAHLRRVLRRAGWSVTLVAPRRRPSGPSALATGPDLTRALRASDIDETIFMRRSGATYRLASRFTDWFQPGAGHWLPFGPCGPRPNGFDLFHFWLKHHLAGTTATAYADHALQARMAALRLGPTRADGASSVIEAGDYGYHVDREGMIGFLRDLALSEGVRAVEGRIEGVRRDFGGDVAGLAVAGGRSIEGDLFLDCTGSAALLIGDALGEPWEEASPAHHSVSLALPIDPARTPATEYRGVADGWIETIPLARSTVATFHYDARDTSGEAALARLHPAGEAGVPVSHRAIVAGRRARSWRRNVLAIGDSARAGEPLLGLDLHRILRAVESLVDFLPYGVGETHLRHAFNARMAELDAGLRDATALHYRLGRRPEPFWTRARDDAPGGALPERLDLYEMAGRIEAPQGIGFDETAYYHTLAGAGLLPRRAYAPADLVDARESARFLAAVQARTEALATAFAPHARALERIHGGALPASPAISASLRPPAPAHDPLANLRRSEHGTRLIDAVLALGQPFGHEHSVKASAGVLQADRYLLSLHRTALGLDPSHTLDRVAAGLGLSAGARAEAAAAIAGADIVHLGFEDGPSGPLYKLYVEWSSEADRVWREGAAAQGGASILVHRAYKWRPLDDAPPVVTLYRWPRVRTPDEIAARLACLGEAAGGAFTRRLADAILDVVRRQGTGLPHYLEAAEEPGPRLSYDLNLYAAGLKLGAVAPILRDAFVAVGVPVGEAERMLAARQEEDLGHVASGLGRDGRPFVTVYSGVRAA

SEQ ID NO: 83603 - protein, 503 aa, Sphingomonas sp.
  misc_feature (1)..(503): tr|A0A0Q4IQ79|A0A0Q4IQ79_9SPHN Tryptophan halogenase OS =Sphingomonas sp. Leaf230 OX=1735694 GN=ASE82_18335 PE= 4 SV=1
MTEHPIRRVVIAGGGTAGWMAAAAIARTMGSTIELTLVESDAIGTVGVGESTIPPMITFNRLLGINEAEFMRETQATFKLGILFDDWKDRGESYFHSFGITGKDHWSAGFQHFWLHGLTKGHAQPYDDYCLELRAALQGKFAHLPDDRMNYAYQLDSTRYAKFLRKMAEADGTRRLEGRIAQVELNGESGDIAALVLESGARIEGDLFLDCTGFRALLIEGALHAGFDDWTHYLPCDSAIAIQTESVRPALPYTRAMAHDAGWQWRIPLQHRTGNGIVYCSRYLDRDAALDRLLAHIEGKTLTEPNVIRFVTGARRQQWHRNCIAIGLSGGFMEPLESTSIHLIQRAVLRLLRLFPSGPVSPREVAEFNDQQHTDMLQIRDFLILHYKATNRRDSAFWRQCTAMPIPASLEQKIELFRETGRVFRKNEELFAENSWVQVMLGQGIVPRSYHPIATKLRDDELARLLGGLRDGTNATVAGLPEHAEYVARYCGAAPAPSPVLAA

SEQ ID NO: 83604 - protein, 536 aa, Ideonella sp.
  misc_feature (1)..(536): tr|A0A437RSG2|A0A437RSG2_9BURK Tryptophan 7-halogenase OS=Ideonella sp. KYPY4 OX=1862385 GN=EOE66_03840 PE=4 S V=1
MPTQPTHIQHIVIAGGGTAGWMAAAALAKLLGTAWRITLIESEEIGTVGVGEATIPLINIYNNALELDENLFMRETAATFKLGIEFVNWGRQGDRYIHGFGPLGPDIGLTKFHHYWLKMRALGQADDLDAYSINNAAAKANKFIRAQRDMGNSPLAEIAHAYHFDAGLYAAFLRRYAEKLGVVRLEGKISGATTRPEDGFVDAVVMEGGRRIEGDLFIDCTGFRGLLIEQALHTGYDDWSHWLPADRAWAVPCESVNPLTPYTRSTARTAGWQWRIPLQHRTGNGHVFSSKFIGEQDAADVLMQNLDGAPLADPRMLKFVTGKRKQLWNKNVVAVGLASGFMEPLESTSIHLIQNTIARLTTFFPYRKFDAADIAEFNRQSDFEFERIRDFIILHYKATERDDTAFWNYVRTMPIPDTLQHKFDLFRSNGRVFRENGELFSEISWVEVFLGQRVMPEAYHPLVDTLPEAKIADFLKSVRHTIARCVDAMPTHAEFVAQHCATDIPKRKAEAEAAAMAMKKMQAAAGAGPKPAVQTA

SEQ ID NO: 83605 - protein, 390 aa, Corallococcus coralloides
  misc_feature (1)..(390): tr|A0A410RQQ0|A0A410RQQ0_CORCK Tryptophan halogenase OS =Corallococcus coralloides OX=184914 GN=EJ065_2647 PE=4 SV=1
MSEDSCDVAVIGGGPAGAALAVALRRRAPSLSVTLVERTTYDAPRLGETLPPDVRLPLSRLGVWEGFLRDGHLASRGTSSCWGRAEPGFHDTMMSPWGSAWHLDRARFDERLSLEAFHQGAQVLRAATLVDSESLGRSGYRLRLAHGAADPSTLRARFVVDATGGKATFASARGARRLVSDRCFAVYGAFQLQGDAAFPSHALVEACPEGWWYSALLPRGRVVVALVGDGDSLRGLRWATPASWMNLLRQAPATRARLDVCDFTGEALVAVPVLVGQLDRPRGEQWLAVGDAACTYDPLSSQGITKALDSALLAADALERCLRGDADALQDYESTLNTRFQDHQRTRAAYYRQEQRWPQAPFWKNRWEALPAPAAPPAQLLRPHSTEVNP

SEQ ID NO: 83606 - protein, 513 aa, Sphingomonas sp.
  misc_feature (1)..(513): tr|A0A0Q4IXM0|A0A0Q4IXM0_9SPHN Tryptophan halogenase OS =Sphingomonas sp. Leaf230 OX=1735694 GN=ASE82_06425 PE= 4 SV=1
MHEIQNIVIVGGGTAGWLTAGVIAAKHQARRQHGFTVTLVESPNVPTIGVGEGTWPTLRSTLKKMGVSETELFRQCDASFKQGARFNRWTTGAPDDGYYHPLMLPQHFGQVNLAPHWLADEGSATFCDTVTPQGRICDEGLGPKTIATPEYDGHANYAYHLDAGKFSHFLQRHCCDTLGVRHVKADVTEVHLDESGDIATLDTEQGVSIAGDLFIDCTGFAALLIGGAMKVPFRSCTDILFCDTALAMQVPYDVPDAPIASHTISTAQSAGWIWDIGLPTRRGVGHVFSSSHISADAAEQELRDYIGPAARDLTARRLAIRAGHREQFWVRNCVAVGLAAGFLEPLEASAIVLIELSAKMIAEQMPACREVMDVVAHRFNDTAHYRWGRIIDFLKLHYALTKRTDTAFWRDNVRPESIPNRLARLMELWRFQPPWVHDEFDRAEEVFPSASYQYVLYGMGARTAVMPGSIDDDVALARRARHDNQVQTQRLVSSLPGHRDLIDKIKRHGLQSI

SEQ ID NO: 83607 - protein, 505 aa, Xanthomonas citri
  misc_feature (1)..(505): tr|A0A2H1SMM5|A0A2H1SMM5_XANCI Tryptophan halogenase OS =Xanthomonas citri pv. fuscans OX=366649 GN=prnA PE=4 S V=1
MTQAQIRKVVIAGGGTAGWIAACALSHQFRNLLDITLVESEQIGTVGVGESTVPPIRTFHRFLQIDEQEFLRAVAGTFKLSISFEHWRRQGERYIHPFGITGQSTLVCAFHHLWLESQRRGMPGSFGDYCLETVASRVDRFALHGEPAVNYAYHLDAALYARFLRARSEACGVKRVEGRIQQVTVQPHSGDVASLVLEDGQTIEGDLFIDCSGFRGLLIEQTLHTGYEDWSHWLPCDRAVAVQTEALGPPVPYTRAIAHEAGWRWHIPLQHRVGNGLVFSSKHLSDDEAHAKLLRDVAAPAVKEPWMVPFRTGRRLKAWNKNVVSLGLASGFIEPLESTSIHLTISAVVRLLALFPAGGIAPSQVQLFNDISRAEMEHVRDFVILHYHATQREEPLWQQCRQMELPESLALRLRAWRERAHAWQGADELFRVDSWTHVLMGQGIAPEQHHPLPRAFSDHDLRRLLDGIAQPIQHAVQQMPSQQDFIERYCKAGEQVWGMRSPVPA

SEQ ID NO: 83608 - protein, 521 aa, Xanthomonas axonopodis
  misc_feature (1)..(521): tr|A0A1T1NT12|A0A1T1NT12_9XANT Tryptophan halogenase OS =Xanthomonas axonopodis pv. melhusii OX=487834 GN=Xmlh_ 19860 PE=4 SV=1
MPDTTPSDPQQRPVRRVVIAGGGTAGWMAAAALSKLLGRHLQITLVESDEIGTVGVGEATIPSLVTFHRLLEIDEAAFMAATQATIKLGIAFEHWRDVDQHYIHSFGHAGTDHWSAGFQHFWLKGRQRGVARDFGDYCLELRAAQEGRFAHLPNGGMNYAYHLDAGLYARFLRRFSEGFGVSRVEGRIGQVETDAQSGFLAALTLQDGTRLEGDLFLDCTGFAGLLIGKTLGVGSDDWSRWLFADSALAVQTESVGPPVTYTRSRADQAGWMWRIPLQHRVGNGIVYSSRYMDQDGARAVLERNLTGRALTEPRPLRFTPNQRHRVWEKNCVALGLASGFLEPLESTNIHLIQRGIIRLLQTFPQVINAVDIAEYNRQAAQEITHIRDFVILHYHATDRRDTPFWRDCAAMDIPDSLRHRVELFRQSGRVFHQANELFAENSWVQVMLGQGVVPQQHHPVADLMGDAELSRFLETIRTRVEAALVRLPAHADFLQRYCPAPPLPEAAARVPAPPVMATPAG

SEQ ID NO: 83609 - protein, 510 aa, Ideonella sp.
  misc_feature (1)..(510): tr|A0A437RRP2|A0A437RRP2_9BURK Tryptophan 7-halogenase OS=Ideonella sp. KYPY4 OX=1862385 GN=EOE66_01925 PE=4 S V=1
MHTPEDRRIRHVVIVGGGSAGWMSAAALSRAVGTACRITLVESEEIGTVGVGEATIPPIRLFNQMLGIDEAEFLRRTQGSCKLGIEFVNWGAEGHRYFHPFGPHGLAFDLAPLHQHWLRHRHTPGVAGLDEHSMAWNLARRARFERPSGDPRSVMSTFDYAYHFDAGLYARFLRELSESRGVQRLEGRITGTRLRGHDGFVEAVQLADGRSVEGDLFIDCSGFRGLLIEEALHTGYEDWRHWLPCDRAMAMPCASAGPLLPYTRSTARAAGWQWRIPLQHRTGNGYVYCSQYISDDEAAATLKSHLDGEALGEPRPLRFVTGRRKQLWHRNVVAVGLASGFMEPLESTSLHLVQSGLSRLLALWPDRDFDPLVTAEYNRIGVQEFERIRDFLVLHYKLNAQRSGLNQPLWRYCAEMAIPETLQYKMAHFRRYGRLVSDGPDLFGAASWLAVHIGQLHWPERHDPMVDLRPLDGASVLQRQRAAMAQAAEAQPTHAAFLQRHAPAAPVARV

SEQ ID NO: 83610 - protein, 508 aa, Brevundimonas sp.
  misc_feature (1)..(508): tr|A0A4P8QJC1|A0A4P8QJC1_9CAUL Tryptophan 7-halogenase OS=Brevundimonas sp. SGAir0440 OX=2579977 GN=E7T10_1303 5 PE=4 SV=1
MMTQTDAGPIRKVVILGGGTAGWMTAAALSHRLAGSPVSIELVESDEIGIVGVGEATLPHIRAFNTAMGIDEQTLIDQTQATFKLGIQFVDWGRPGDSYIHPFGAYGEPIEGIDFHHVWAARRAMGDAADISDYSYPVRAAEANRFQRPVSAPGSMLSTFSYAFQFDASLYAAFLRRVSCGRGVLRTEGKVVDHVLNGATGDVDAIVLSDGRRITGDLFVDCSGFRGRLINQALETTFEDWSHWLPCDSAFAVPCQTTAPVGPYTRATARVAGWQWRIPLQHRTGNGHVFSSAHTSDEDAVATLMSNLEGPALAEPRRLSFKTGRRHKLWNRNVVAIGLSGGFLEPLESTSIYLIQLGITTFLDLFPDRVGMAADAEEYNRIMALEFDRIRDFLVLHYVANQRDEPFWREMRTMAWPDSLSAKVEAFKSRGLLPDYDIGVFLPPSWLAVLVGQNIVPNGWDPRVDRLEPHVLSDKLAALRDDVRSTVDRTPDHMTFISDAAARAGSLR

SEQ ID NO: 83611 - protein, 505 aa, Sphingomonas sp.; identical to SEQ ID NO: 83486
  misc_feature (1)..(505): tr|A0A0Q4K8T4|A0A0Q4K8T4_9SPHN Tryptophan halogenase OS =Sphingomonas sp. Leaf32 OX=1736214 GN=ASE83_12770 PE=4 SV=1

SEQ ID NO: 83612 - protein, 512 aa, Caulobacter sp.
  misc_feature (1)..(512): tr|A0A0Q7W5I0|A0A0Q7W5I0_9CAUL Tryptophan halogenase OS =Caulobacter sp. Root1472 OX=1736470 GN=ASD47_15460 PE= 4 SV=1
MQDSASDRRIRDIVIVGGGTAGWMAAASLKHHFGAAPVTITLIESSEIGTIGVGEATIPTIRRFYQALGLSDIDVLRATGGTCKLGIRFNDWTTPGASFIHPFGLYGQDLKGVAFHHYWMRLRALGEAAPIGDYSLGASLAAGGKFTTPSRNPPSTLSVFDWALHFDAGLFARLMRQVAEQNGVRRLDAKIVKTNLRGEDGFIESVTLDSGATVAGDLFIDCSGFRGLLIEEALHTGYEDWSRWLLCDGAMAVQSEGKGDPPPYTDVTARPAGWQWRIPLQHRWGNGYVYSSRHTTDEAARMVLTGSLDERLLHEPRKIGFHPGRRLKAWNKNCIALGLASGFLEPLESTSIALIETGIEKIKSLFPNRDFDPAVIDEFNEMSRLEMERVRDFIILHYKLNQRPEDPTGFWTHCREMAIPDTLRKKIDLWRAQGHFVRYRWEMFSPPSWLAIYAGFGLLPETYDLSVDGFDAGQLSAALAEMRKAVADTVASTRAHGDFIEQYARPRSVAAE

SEQ ID NO: 83613 - protein, 522 aa, Unknown
  misc_feature (1)..(522): tr|A0A061QFG6|A0A061QFG6_9PROT Flavin-dependent tryptop han halogenase PrnA OS=alpha proteobacterium Q-1 OX=149 2281 GN=prnA PE=4 SV=1
MNSSDRPAPPPHHHPGTDHAIRTIAIIGGGTAGWMAAAVLAKALGQQIRIRLVESDAIGTIGVGEATIPQIRNLNHYLGLDEHEMIRQTKGSFKLGIEFSDWGRIGDRYMHAFGDIGQSLGLSPFHHYWLRATQSGHPHSLWAYSLNQQAAIQNRFGPLERLGDSRLTGLRYAFHLDAGLYAAMLRSYSEARGVERLEGRVVDVKQHSGDGFIQSVLLENGTEIEADLFIDCSGFRGLLIEDALKTGYEDWSHWLPCNRAAAVPSETPTDASGKPLMRPYTQSMARPAGWQWRIPLQHRVGNGHVYCSAHLSDDEACALLLANLEGPALTEPRLLQFKTGRRKKAWNRNCVALGLAGGFMEPLESTSIHMIQTGISRLVSMFPDKNCDPALAAHYNEATRFEYERIRDFLILHYKATQRQDTAFWRACAEMPIPQSLQQKIELFEASARLYREADELFTEIGWLQVLLGQSITPRAYHPLADAISDAQLAEFLDHIRLLINRGVASLPNHHSFISRISANFN

SEQ ID NO: 83614 - protein, 503 aa, Verrucomicrobiales bacterium
  misc_feature (1)..(503): tr|A0A352XMS3|A0A352XMS3_9BACT Uncharacterized protein OS=Verrucomicrobiales bacterium OX=2026801 GN=DDW21_077 90 PE=4 SV=1
MVSQTSTNEDKYISSVLILGGGSAGLLAALTVKCMLPQYRVVLVHSQEIGVIGVGEGTTAVFPAHLFGTLGIPKERFYREAQPTWKQGIRFLWGERGDYFYDFGFQYDLQYPGMSKATGFYCDQECTDLNDVCAMMQDGKAFASGPLNKPLIKGEYAFHIENEKLVRCLTNIAIEQGVIIEEDTLQHAEQDDLGITALHFTSGRIHHADLYIDASGFRSELIGKALGVTRNSFSKALFCDRAVIGGWTREEEPLQAYTTAETMDAGWCWKIEHENFINRGYVYSSKFISDEDALAEFKKANPKINATRVVKYLSGRMERNWEKNVVAIGNSSGFVEPLEATSLAQIIFASRWLVELLKQQQHRATAAGRERYNREMGRAWDEIRDFLAFHYKFNTLRDTAFWKHCQEHTHLGEFQEFFEMYQKIGPAPELVNALPFKPNIYGIEGYLAHLIGMKVPFHARHEPTAEEKTLWQKHRRKSRLIASAALTSEEALAAIRKPEWSWK

SEQ ID NO: 83615 - protein, 502 aa, Caulobacter sp.
  misc_feature (1)..(502): tr|A0A0Q7WIG0|A0A0Q7WIG0_9CAUL Tryptophan halogenase OS =Caulobacter sp. Root1472 OX=1736470 GN=ASD47_14940 PE= 4 SV=1
MDRVRRLVILGGGTAGWMAAAALAKTFGPQLKIDLLESEAIGTVGVGEATIPTIQWFNELIGLDEAEFVRATKATYKLGIEFVDWARPGHRYFHPFGRYGVDLGPVPFHQRWLKACAEGLDRPLSAFSLATQLAAANRFAKPTNEARSILSTLGYAYQFDAMLYAKYLRGLAEAGGVTRREGKLETVERAPDTGFVTALTTDRGERLEGDLFLDCSGFRALLIDGVMEAGFEDWSHWLPCDRAVAVPCARVAETTPYTRATLRPAGWQWRIPLQHRTGNGYVYSSAFLSDDEAAATLLGGLDGAALDAPRFLRFKAGFRRETWRKNVVAIGLSSGFLEPLESTSIHLIQSGIAKLITLFPDRDCDPGLARQFNTLFGRDMDGIKDFLILHYHATEGHETPLWRHTRHMALPDSLVDKEEQYRRAGRLMLTSDELFREASWLAVLEGQGVRAQGYSPLADTLDPTLNRQQLEQIEAVIARATPTLPRHDDAVAALIGALATAV

SEQ ID NO: 83616 - protein, 497 aa, Streptomyces vitaminophilus
  misc_feature (1)..(497): tr|A0A0T6LSS8|A0A0T6LSS8_9ACTN Tryptophan halogenase OS =Streptomyces vitaminophilus OX=76728 GN=AQ490_21395 PE =4 SV=1
MTATYLKAAFGDRIQVTLVESEQVTRIGVGEATFSTVRHFFDFLGLDEADWLPKCAGGYKLGIRFQNWSKPGEHFYHPFERLRVVDGFSLADWWLELGDRSQPFDRQCFITTALCDAKRSPRMLGGSLFASGLDGSLGRSTLQEQRDQFPYAYHFDADAVAQYLAEYGVKRGVRHVVDDVLAVEQDERGWIDHVRTRGHGDLRGDLFIDCTGFRGMLINQTLGVEFESFADVLPNNRAVALRVPREEATEMDPYTSATAMSSGWMWTIPLFRRNGTGYVYSDEYISADEAEAELRAAVGPGAEDAEANHIRMRIGRNKQGWSGNCVAIGLAYAFVEPLESTGIFFIQYAIEQLVRHFPDENWDPQLRLDYNERMHRVVEGVREFLVLHYKAARREDTPYWKEAKARKAPDSLLQRLEMASSHLLDDETIFPFYHGFENYSWNAMNLGLGIIPPTSRPAIRHIAPDNAKREFARLKAEADELVAALPSCYEYLASIND

SEQ ID NO: 83617 - protein, 508 aa, Verrucomicrobiales bacterium
  misc_feature (1)..(508): tr|A0A2D4ZBG2|A0A2D4ZBG2_9BACT Uncharacterized protein OS=Verrucomicrobiales bacterium OX=2026801 GN=CMO46_069 60 PE=4 SV=1
MEFKNIVIVGGGSAGWMTAATMAKAFPNKKITIVESPTKPVIGVGESTTQLMRRWQEYLEIPDIDFITKCNATNKLSIRFENFHKNDKVGFHYPFGRLDQRFFNVAEWFQHQYLTKVPFENLVSDMSPISKCLDSNKVPVTMFGDGIWSLQKDAAWHFDTHKFYAYLRDEYCLPKGVVHIVTDVYGAQTDEHGYITSLNTDNGPITGDIFFDCTGFKRALIEDVLEEPWGEFNNKTYTDCAWAAARPYKDKEKELRLYTNSVALGYGWVWEIPTWERIGTGYNYASKYISKEEALQEFKNYLGPVAEEMEFKHIQMRNGMSKRLWVKNCISIGLSGAFIEPLESNGLMSVHEFLLNFVNIAEGKDVLNNFDAQSFNHTCREQFLYFADFITLHYAMTNRNDTQYWQDIQQQDFNDSPLLKEIYELRGSQFFNVEERLSFNTLGANIYMLAGHKINPYTSFKHSNMHFWNVDFDNKVKDLQQIIDNNNKEKQQITDTFPTSLEYYSQFH

SEQ ID NO: 83618 - protein, 309 aa, Chitinophagaceae bacterium
  misc_feature (1)..(309): tr|A0A4Q3SRS1|A0A4Q3SRS1_9BACT Tryptophan 7-halogenase (Fragment) OS=Chitinophagaceae bacterium OX=1869212 GN= EOO07_33750 PE=4 SV=1
ESGVIEADFFIDCTGFSSLLIEKTLDVSFVSFNDNLFNDRAIAIPTPIDNNQEIPTETVSGAMKYGWAWKIPLVNRYGNGYVYSSEFVTPEDAESELRASLGVDSDNMPARHLKMRVGRREVHWKNNCLAVGLSQGFIEPLEATALMLVQFTIEIFADNYSFADSIDIAQSVVNKKINKMFDGVRDYIVAHYHLNNRVDTAYWIANREHKNHSDSLIAILDAWDRGLDFEARLTELRETQVYMRPSWYCLLAGMGRFPTPEKLSKNIGNINDSIGIRKNCDTLAYSLFPSHREYLKEIYGFAWNNSPTH

SEQ ID NO: 83619 - protein, 500 aa, Novosphingobium sp.
  misc_feature (1)..(500): tr|A0A102DDQ5|A0A102DDQ5_9SPHN Tryptophan halogenase OS =Novosphingobium sp. Fuku2-ISO-50 OX=1739114 GN=AQZ50_0 3960 PE=4 SV=1
MDDTRIRKVLIVGGGSAGWMTAAMLAQILRHECQVTLVESDDIGIVGVGEATIPPIRTFNETLGIAEKDFLRATQGTFKLGIEFVGWGARDGRYFHPFGPHGRNFDVVSLHHYWLRARAMGDTSSFDEHAMAWALARAGRMAKPATDPRSVMSTFDYAYHFDAAGYARFLRGYAEARGVTRVEGTIAAVDQHGETGFVEAVRLDDGRRLEADLFIDCSGFRGLLIDGAMHEPFEDWSHWLPCDRAVAMPCAHPAGSTNPTPYTRSTAQEAGWQWRIPLQHRIGNGYVYCSAFLDDDRAATLLAGRLDGEALADPRFIRFKAGRRRRHWVRNVIAIGLSSGFLEPLESTSIHLIQANISKLIAFFPDKRFDPLVIDEFNCVACGETERIRDFIILHYKLMQRDDAELWRHTAAMDVPETLALKIAHFRRHGRLIARELDLFGPDSWLAVHLGQGNVPEDCDPLIDYRGIDARDWLAKLRAAMAQEAARAPDHARHIAQVMA

SEQ ID NO: 83620 - protein, 503 aa, Verrucomicrobiales bacterium
  misc_feature (1)..(503): tr|A0A352XPF6|A0A352XPF6_9BACT Uncharacterized protein OS=Verrucomicrobiales bacterium OX=2026801 GN=DDW21_108 65 PE=4 SV=1
MIQSILVLGSGSAGLIAALTIKRKIPQVRVTIVRSPEIGIIGVGEGTTPNFPRHLFDYLGISRKEFYAIAKPTWKLGIRFLWGERKEFYYGFSQQLDAQWSALPKPNGYYCDDDFSAVDLPVAMMEQGKVFARQANGAPDVQPWHAFHIENVNLVECLQRYARAIGVEIIDGKVVGAERGPKGISAVFTEDGRKFEADFYVDSSGFHSELLGKTLEKPFVSFDKSLFCDRAVVGGWERGADEPILPYTTAETMDSGWAWQIEHEHHVNRGYVYSSHFISDDQAAEEFTRKNPKAPKSPRVVKFRSGCYKRMWVENVVAIGNAGGFVEPLEATALMIVCSESQTLVEFLLHSNLKPTDTFRNLFNKALWNTWEEIRNFLALHYYANTRMDTPYWKACREETDISGLQELLAFYRENGPTGFGRHTLPHTGTDFGMEGYLVMMVGNKVPYQNRSTPTEAEWNIWRSAQAQNRAIASQAMTVKEALYFVHHPGWQWTSDAQPLISK

SEQ ID NO: 83621 - protein, 210 aa, Betaproteobacteria bacterium
  misc_feature (1)..(210): tr|A0A2N2QZ80|A0A2N2QZ80_9PROT Tryptophan halogenase (F ragment) OS=Betaproteobacteria bacterium HGW-Betaproteo bacteria-6 OX=2013718 GN=CVU33_20725 PE=4 SV=1
QAEQELREHLGLLDDPVGARHLQMRVGRVEQVWSHNCLAVGLSQGFIEPLEATALHLVQTTLESFIEHVERDGDLDMRRQSFNEGIARDFDGVRDYIVCHYRMNRRTDTEYWRANASHDQLSDSLKAILTCWFTGQSLEQELARQNIADIYPAMSWHCLLAGYGQFPDAAKLRAPEPGIGKADMAAIDDFRSRCALNFRDHAKVLSEMAA

SEQ ID NO: 83622 - protein, 496 aa, Stenotrophomonas rhizophila
  misc_feature (1)..(496): tr|A0A1B2N4Q0|A0A1B2N4Q0_9GAMM Tryptophan halogenase OS =Stenotrophomonas rhizophila OX=216778 GN=BAY15_2027 PE =4 SV=1
MVIAGGGTAGWLAGCALSHQFREQLDITLVESEQIGTVGVGESTVPPIRTFHRYLQIDEQEFLKAVAGTFKLSISFENWRRPGERFIHPFGSIGQSTWATPFHHFWLDSLRRGMPSDLGDFCLESVASRGDRFSLQSQPQVNYAYHFDAGLYAKFLRRRAEAQGLRRVEGKIREVRQHAHDGSVAALVLEDGQVIEGDLFIDCTGFRGLLTEQTLHSGYEDWNQWLPSDRAVAVQTESVKPPVPYTRAIAHEAGWRWHIALQHRVGCGLVFSSRHMSDDEAQAKLLRDIEGQPLRDPWLVPFRSGRRLKAWNKNVVALGLASGFIEPLESTSIHLTISAVVRLIQLFPFDGITPTLTALYNDVSRQEMEHVRDFIILHYHATQRDEPMWKACREMELPESLAVRLRAWRERAHAWQDPGELFRVDSWTSVLMGQGILPGPPHPLARALSDADLRTLLARIQQPIQQAAASMPSQAEFIERYCKASAEVWPRSLATA

SEQ ID NO: 83623 - protein, 519 aa, Caulobacter sp.
  misc_feature (1)..(519): tr|A0A0Q7W6Y3|A0A0Q7W6Y3_9CAUL Tryptophan halogenase OS =Caulobacter sp. Root1472 OX=1736470 GN=ASD47_22540 PE= 4 SV=1
MERRRRILIVGGGAAGWLTAAYLAKSLRVAEQAHLEITLLESPEVGIIGVGEATFPTIRTTLQFLGVDEARFIRETSATFKQGIRFNDWAWAPRQDGERHQYFHPFEAPFSTDGASLAPYWLLQNEATRAPFAEAMTIQARVADAQRAPKRPHEGNFSGPLNYAYHFDAAKLAQVLAERARELGVRHLQGRLTEVELDATGAIDHVVCAEHGRLEAELYIDCTGFHAELIGKALKAPFKSARPILFADRALACKAPYDRPDAPIQSFTIATAHEAGWIWDIGLKDARGVGCVYSSDHMDDDRAEAILRGYVGQDVEIAPRALAFEAGYRTKQWVKNCVAVGLSAGFLEPLESTGVVLIEAAVAIIAELFPHNGPISAPALRFNELMTARFDNIITFLKLHYCLSRRTEPFWRQNADPASMPERLVDLLEQWRWRPPTRYDFILDLETFAFFNYQYILYGMGFKTDLSPGRSEFPDVAGAEKLFAKIRNFGERATHDLPSHRDLIAQINRFGFDRSLEPA

SEQ ID NO: 83624 - protein, 493 aa, Sphingomonas sp.; identical to SEQ ID NO: 83464
  misc_feature (1)..(493): tr|A0A0Q4KGC8|A0A0Q4KGC8_9SPHN Tryptophan halogenase OS =Sphingomonas sp. Leaf32 OX=1736214 GN=ASE83_02965 PE=4 SV=1

SEQ ID NO: 83625 - protein, 509 aa, Stenotrophomonas rhizophila
  misc_feature (1)..(509): tr|A0A498CPW6|A0A498CPW6_9GAMM Tryptophan halogenase OS =Stenotrophomonas rhizophila OX=216778 GN=BCL79_0307 PE =4 SV=1
MNVANTTQGRIRKIVIAGGGTAGWLAGCALAHQFRDQLDITLVESEQIGTVGVGESTVPPIRTFHRFLQIDEQEFLQAVAGTFKLSISFENWRRPGERFIHPFGTIGQGTWATPFHHFWLDSLRRGMPSDLGDFCLESAASRQDRFSLQSQPQVNYAYHFDAGLYAKFLRRKAEGHGLRRVEGKIREVRQHAHDGAVQSLVLEDGQVIEGDLFIDCTGFRGLLTEQTLHTGYEDWHEWLPSDRAVAVQTASVGSPVPYTRAIAHEAGWRWHIALQHRVGCGLVFSSRHMSDDEAHAKLLRDVDGPPLRDPWLVPFRSGRRLKAWNKNVVALGLASGFIEPLESTSIHLTISAVVRLIQLFPSDGISPALVDLYNEVSRQEMEHVRDFIILHYHANQRDEPMWKACREMELPESLAVRLRAWRERAHAWQDPGELFRVDSWTSVLMGQGIQPGPAHPLAAAIGDADLRTLLMRIRQPVEQALATMPSQAAFIERYCKAAQDVWPRASALA

SEQ ID NO: 83626 - protein, 511 aa, Caulobacter sp.
  misc_feature (1)..(511): tr|A0A0Q7VBH2|A0A0Q7VBH2_9CAUL Tryptophan halogenase OS =Caulobacter sp. Root1472 OX=1736470 GN=ASD47_07935 PE= 4 SV=1
MLTETSRENGPLRRIAIIGGGAAGWMAAAALARVLGPRGPAITLVESEEIGIVGVGEATIPPIRAFNAMIGLDEDVFVRETKGTFKLGIEFVDWRQRGHRYFHPFGVYGPDFGPTPFEGAWRRLRQAGLGQPLETYSICAQAAAAGRFARPQPGAGPLSQLAYAFHFDATLYAKLLRAHAEAAGVVRREGKVAAVNLRSGDGFVESVTMEDGERIAADLFLDCTGFRALLIGQALESPFEDWARWLPNDRAVAVPSANAGPPAPYTRSTAREAGWQWRIPLQHRTGNGYVFSSRHVSEDEATATLLAHLDGEPLAEPRVLRFQAGRRPAGWVKNVVALGLASGFLEPLESTSIHLIQVGIARLLEMLPTRAFEPADARRYNRLMATEFNGVRDFLILHFHATERRDTPYWEQLAGMSVPDTLLERLRIYRATGRVFRESDELFTKTSWLAVLDGQGPEVEGVEPLAEGLPLDQVEARLARIAEATAQAVRRMPAQADFIRAHGQAGAPVAV

SEQ ID NO: 83627 - protein, 518 aa, Pseudoalteromonas espejiana
  misc_feature (1)..(518): tr|A0A510XX06|A0A510XX06_9GAMM Tryptophan halogenase OS =Pseudoalteromonas espejiana OX=28107 GN=PES01_24280 PE =4 SV=1
MNQQDKKIKTVVVVGGGIAGWLTAGRLAAHHKSNTPDGLNVVLVESPNVPIIGVGEGTWPTMRSTLIALGISETDFIRECEASFKQGAKFAKWVDGSNDDFYYHPLVLPQGFSKTDMAGHWLNNTAESASFSNAVCYQEAICEQGLAPKTIRTPEYAAIANYAYHLDSAKFAVFLQKHCTQQLGVKHILADVTQVNSAKSGDISSVTTKQQGEISGDLFVDCTGFSSLLLGEHYKVPFKPCDDVLFIDTALAVQVPYDNEDESIASHTISTAQEAGWIWDIGLQHRRGVGYVYSSKYSSEAQAREKLKAYVGDKIESLTVRKIPIKSGHRSHFWQNNCVAVGLSAGFLEPLEASALVLVEMSAQMISEQLPHTRDIMDITAKRFNETFTYRWEKIIDFLKLHYILSNRDDNAFWRDNRDPKTIPQSLQDLMKLWQYRAPADHDFTSNNEVFPAASYQYVLYGMGFKSDYSTTAYMLKDTVFAKSQFDKNKSMINQAVTNLPSNRELLNKIKHHGFSAI

SEQ ID NO: 83628 - protein, 509 aa, Stenotrophomonas rhizophila
  misc_feature (1)..(509): tr|A0A3N1KQB3|A0A3N1KQB3_9GAMM Tryptophan halogenase OS =Stenotrophomonas rhizophila OX=216778 GN=EDF74_1306 PE =4 SV=1
MNVANASQGRIRKVVIAGGGTAGWLAGCALSHQFRDQLDITLVESEQIGTVGVGESTVPPIRAFHRFLQIDEQEFLQAVAGTFKLSISFENWRRPGDRFIHPFGTIGQGTWATPFHHFWLDSLRRGMPSDLGDFCLESVASRADRFSLQTQPQVNYAYHFDAGLYAKFLRRKAEAHGLRRVEGKIREVRQHAHDGAVAALVLEDGQVIEGDLFIDCTGFRGVLTEQTLHTGYEDWNEWLPSDRAVAVQTEAVGPPVPYTRAIAHEAGWRWHIALQHRVGCGLVFSSRHMSDDEAQAKLLRDVDGPPLRDPWLVPFRSGRRLKAWNKNVVALGLASGFIEPLESTSIHLTISAVVRLIQLFPSDGISSTLVDLYNEVSRQEMEHVRDFIILHYHANQRDEPMWKACREMALPESLAVRLRAWRERAHVWQDPGELFRVDSWTSVLMGQGIQPGPPHPLAAAINDADLRTLLTRLRQPIEQAVATMPSQAAFIEQYCKAAQQVWSRGAVVA

SEQ ID NO: 83629 - protein, 487 aa, Caulobacter sp.
  misc_feature (1)..(487): tr|A0A0Q7VD63|A0A0Q7VD63_9CAUL Tryptophan halogenase OS =Caulobacter sp. Root1472 OX=1736470 GN=ASD47_12425 PE= 4 SV=1
MAAAAFSKLLGKDFVETVLIESDQIATVGVGEATIPPIRHFNERLGLDEVDFVRQTQATFKLGIEFQDWGTIGHRFFHAFGDFGADIEAIGAHHYWRKLQEQGERFALEDLSMPTQAAYRNKFVPPNPDPRSVMHDYAYAFQFDAALYARYLRGYAQERGVTRIEGRIVDVQLRGTDGFIEAVVLESGARVEGDLFIDCSGFRGLLIEGALETGYEDWSHWLPCDRAIAAGCGSGGDGLTPYTRTTARPAGWRWRIPLQHRTGNGYVHCSQFVSEDEAVADLLSSLDGPLIGQPQTIRFTPGRRLKAWSRNCVAMGLASGFIEPLESTSINLIQTAIGRLLDFFPNKDFDPVLIDEFNRLSQQEMEHVRDFIILHYKLTERTDSGLWDYCRAMAIPDELAHRLAVFQRTGRLVTHDDDGFAPPSWLAIFHGLKVVPDRYDPLVDRMSVEEIRAVLDARRAAILRAAEAMPGQQAFIDKFCRAELPAA

SEQ ID NO: 83630 - protein, 483 aa, Sphingomonas sp.; identical to SEQ ID NO: 83439
  misc_feature (1)..(483): tr|A0A0Q4JWE1|A0A0Q4JWE1_9SPHN Tryptophan halogenase OS =Sphingomonas sp. Leaf32 OX=1736214 GN=ASE83_12760 PE=4 SV=1

SEQ ID NO: 83631 - protein, 537 aa, Streptomyces sp.
  misc_feature (1)..(537): tr|A0A3N6FFU2|A0A3N6FFU2_9ACTN Flavin-dependent tryptop han halogenase RebH OS=Streptomyces sp. ADI95-17 OX=152 2759 GN=rebH PE=4 SV=1
MTGTSTATDKAIKKVVILGGGTAGWMTAAYLGKALHSTVDVTVLEAPSIPRIGVGEATVPNLHRVLFDFLGIEEEEWMRECNASYKMAVRFINWRTPGKGQSGPRELDKGGPDHFYHPFGISPEHDNIPMSHYWFKNKFEGKTDEPYDYACFREAPLMDANKAPRHLDGTSPTRYAWHFDAALVADFLRRFATEKQGVNHVQDEMTRVEKDERGFVKALHTKEGRVLDADLFVDCSGFRSLLMNQAMEEPFVDMSDQLLCDRAVATAVPHDDEANGVEPYTSAIAMSSGWTWKIPMPGRFGTGYVYSSRFTTQEEATAEFCELWGLDPETTKFNHVKFRVGRNRRAWVKNVIGIGLSSAFLEPLESTGIYFITAAAYQLAKHFPDKTFNQTLVDNFNKEIEVMFDDTRDFIQTHFYFAPRTDSPFWRANKELKLPASIREKIDAYKAGLPVNPAATDDTTYYGNFEAEFRNFWTNERYYCIFAGLGLEPDAPLPILYHKPESVAAAQAMFTQVKKEQQELLNSLPSTHEALLRLHAK

SEQ ID NO: 83632 - protein, 496 aa, Chitinophagaceae bacterium
  misc_feature (1)..(496): tr|A0A4Q3TA61|A0A4Q3TA61_9BACT Tryptophan 7-halogenase OS=Chitinophagaceae bacterium OX=1869212 GN=EOO07_24560 PE=4 SV=1
MHKPIKKVVIVGGGTAGWMSAALLKKIMGTVIDIELVESEDIGRIGVGEATIPPIRYFNQVLGINEAEFLQATKASIKLAIKFEHWRTQGESYFHTFGGAGKNIAFCPFHHFWLRAKSLGDTSSLWDYDLNYLCATSNKFAPINSKDSALDMPYAYHFDASLYAAFLRTLSESLGVKRVEGLIEQVLVNPDSGYVEKLFLKSGEIIQGDLFIDCSGMRGLLIQQNLNTGYEDWSHWLPCDRAIAIPSERLEQTLPYTRSIAHSAGWQWRIPLQHRNGNGIVYSSNYYSQDEAATILLNNLDSKAIGEPNFISFKTGRCLKQWNKNVIAVGLSSGFLEPLESTSIHLIQSAIVRLIKIFPHLGIDECNVAEYNKQSKLEFEQIRDFIILHYHVNERTDSQFWCDLRNMEIPETLAHKINLFRSTGKIFREQDDLFLESSWLQVMLGQGVFPKDYHPLANGPSNEELIDLLGNLKKIKNSPLEHIPHHDEFLKQVCAP

SEQ ID NO: 83633 - protein, 502 aa, Betaproteobacteria bacterium; identical to SEQ ID NO: 83213
  misc_feature (1)..(502): tr|A0A2N2QZ68|A0A2N2QZ68_9PROT Tryptophan halogenase OS =Betaproteobacteria bacterium HGW-Betaproteobacteria-6 OX=2013718 GN=CVU33_20720 PE=4 SV=1

SEQ ID NO: 83634 - protein, 515 aa, Massilia violaceinigra
  misc_feature (1)..(515): tr|A0A2D2DHE6|A0A2D2DHE6_9BURK Tryptophan halogenase OS =Massilia violaceinigra OX=2045208 GN=CR152_07710 PE=4 SV=1
MKAFHNVLIVGGGTAGWLTACYLARTLGTAGAGAAGVSITLVESPEIGIIGVGEGTFPSIRATLAAIGIDEARFVRECQATFKQGVRFNHWVRPAGAPGADHYFHPFSQPSQRQGGPELLPHWLQGTAGAGIPFAEAATMQKRVADAAHGPKRLADADYTGPMNYAYHFDAGRFAALLAEHGRFLGVRHVQATVERVELDAGGAIACVHTREHGALGADLFVDCTGFRAALIGDALGSPFRKMDDVLFVDRALAMQVPYPSPDTPIPSYTVSTAHEAGWTWDIGLQQRRGIGYVYSSRHTTDERAEEVLRQYIGPAADGLTPRQLKLNIGYRDVQWVKNCVAVGLSGGFLEPLESSGIGLIETAAYLIGHLFPFNGDTAPVAAQFNRLMRERYERVVDFIKLHYCLSQRTDSAFWTDNTDPRSIPASLRDKLAMWRCRPPHRLDFVADVEMYPTSSWQYVLYGMEFATGLHPSACQPERRDEAAAEFAMIAKLAGHALADLPPHRALVEHLCQRR

SEQ ID NO: 83635 - protein, 496 aa, Caulobacter sp.
  misc_feature (1)..(496): tr|A0A0Q7W891|A0A0Q7W891_9CAUL Tryptophan halogenase OS =Caulobacter sp. Root1472 OX=1736470 GN=ASD47_13200 PE= 4 SV=1
MQDQVVKKVVVAGGGTAGWMAAAALARQLGPLLDISLVESDEIGTVGVGESTIPTARTFNALLGIDEPAFMRATQATFKLGISFEDWGRVGDRYIHSFGQVGKSNWMGSFHHFWLQARAAGFGGELGDYCFELQAALADRFSVGEGPELNYAYHLDATLYGGFLRQMSEGLGVRRIEGKIGQVERHPETGFIRALVLENGDRVEGDLFIDCTGFRGLLIEQTLKAGYEDWSHWLPTNSALAVQTRSTGPAVPYTRAIAHQAGWRWKIPLQHRVGNGLVYCDDYMSDDQARETLLGALDGERLIEPRVIRYRTGRRRKTWSKNCIALGLASGFVEPLESTSIHLIMIGVTRLMQLFPFGGVSDAVVARYNQQAVDELEKIRDFIILHYKLTERTDSPFWDRCRTMDIPDSLAQRIALFHESAQAFQAPGELFQVDSWLQVMLGQRLEPVAHHQMGRLMPPEQLRAALADLSGNIARAVGSLPNHQAFLDRYCGVAAA

SEQ ID NO: 83636 - protein, 513 aa, Caulobacter sp.
  misc_feature (1)..(513): tr|A0A0Q7W5G5|A0A0Q7W5G5_9CAUL Tryptophan halogenase OS =Caulobacter sp. Root1472 OX=1736470 GN=ASD47_06865 PE= 4 SV=1
MRPIKNIVIVGGGTAGWLTAGVIAAKHKARAGTGFTVTLVESPNTPIIGVGEGTWPTLRTTLATIGVSETDFFRECDAAFKQGAKFARWTTGAADDAYYHPLMLPQGFSQVNLAAHWLANPGEQSFCDAVTPQGRICDAGLGPKTITAAPYQGAANYAYHLDAGKFAPFLQRHCCGKLGVRHILADVRGVAMTDDGDIRGVVTEQAGEIQGDLFVDCTGFRALLLGEALGVPFKDCGDVLFCDTALAIQVPHEHENAPIASHTISTAQSAGWIWDIGLPTRRGTGHVYSSRHISDEDAERELRAYIGPAARDLPARKIPIRSGHRETFWKRNCVAVGLAAGFLEPLEASAIVLIELSAKIIASQMPACREVMDVVAARFNATTHYRWGRIIDFLKLHYVLSKRSDTAFWRDNRDPATVPERLADLLRLWRHQPPWLHDEFDRVEEVFPTASYQYVLYGMGFRTEIEPEALADERVLAERAMRENAVQTERLSASLPRHRDLIRKIVEHGLQPV

SEQ ID NO: 83637 - protein, 504 aa, Alteromonas sp.
  misc_feature (1)..(504): tr|A0A433F4G2|A0A433F4G2_9ALTE Tryptophan halogenase OS =Alteromonas sp. KS69 OX=2109917 GN=C7Y69_01145 PE=4 SV =1
MMSSDSDNSNTSGAKTSPVKRVVIAGGGTAGWMAATALSKLLGKSLSITLVESKDIGIVGVGEATIPPIRTFHKLLGIDEKAFMRATNATFKLGIEFENWREQNHSYIHSFGVTGRECWAGEFHHFWLRAKDLGFGGDFGDYCTELKAAKEGKFAYGERMPMNFAYHFDAVAYGRFLKGLALEAGVTHIEDDIQHVSKRSQTGCITSIKLSDDKEIAGDLFIDCTGFKGLLIEKALHTGYENWSHWLPCDSALAVQTASTGAPIPYTKSVAHTAGWRWKIPLQNRVGNGLVYCSNYMSDDEAKDTLLSAIEGETLNEPRIIRFTPGKRRLGWNKNCVALGLASGFIEPLESTSIHLIMTGIVRLMRLFPFDGITQSTVDEYNNKYNSEMAAILDFIVMHYKVTNRKDSPFWEHCNSMDIPPSLTHKINLFKQTGRVFLDDGDIFRVDSWTQVMMGQGVVPEQYHRVADEMSETELERFLAGLKQQVDKQVSALPYHQDFLKKYL

SEQ ID NO: 83638 - protein, 511 aa, Caulobacter sp.
  misc_feature (1)..(511): tr|A0A0Q7VAY6|A0A0Q7VAY6_9CAUL Tryptophan halogenase OS =Caulobacter sp. Root1472 OX=1736470 GN=ASD47_12420 PE= 4 SV=1
MTDNRIRKIVIVGGGTAGWMAAAGLSRVLREHQPQPLKVEIQLIESEEIGTVGVGEATIPPLILFNQFLGVNEDEFVRATQATFKLGIEFVDWTRLNHRYLHPFGRYGADLASSAFHHYWLKLRSLGDPSDFGDYSLPTLAAGLRRFDRPTANSASIMSTYSYAFHFDAGLYARFLRGYAEARGVQRVEGKIVDVALRGGDGFIQSVTLADGRVVDGDLFIDCSGFRGLLIEQALKSGYDDWSNWLPCDRAVAVQSESVEDLTPFTRATAHPAGWQWRIPLQHRVGNGYVYSSPFISDDEAAATLLRGLDGEPCVDPRFLRFTAGRRRRYWNKNCVALGLASGFMEPLESTSIHLIQTGITKLIQLFPDRSFSPVLLDEYNRLTDQEYEKIRDFLVLHYHANERTDSPLWRQVREMPIPDGLAHKMELFRETGRLASMGQDLFQEPSWLAVLIGQNVMPRAYDPLVDLMDAGVVEKNLRAMRIAMRQAAEAMPSHRDFIGAHCAAPDLSPR

SEQ ID NO: 83639 - protein, 496 aa, Caulobacter sp.
  misc_feature (1)..(496): tr|A0A0Q7W5D2|A0A0Q7W5D2_9CAUL Tryptophan halogenase OS =Caulobacter sp. Root1472 OX=1736470 GN=ASD47_06905 PE= 4 SV=1
MNSGHQQDIVILGGGAAGWIAAALLAKKTGRHQTRITLVESEEIGIIGVGEATVPVLAQCNALLGIDESDFVRRTQGTFKLGIEFCDWGVAGNRHFHAFSDYGHQVEGVAPHHYWLRLRQSGDDHPIDDYSFAYAVAKNNKFAPTDPQNPRYHHAYHFDAALYARYLRDVATELGVQRIEGKMTHVDLDGETGDIAAIHLANGVTVAGDLFLDCTGFASELLGKALNTPFVDWSRWLLCDRAMAAPSKRPDEPTPFTRSTAHAGGWRWTIPLQHRSGNGMVYSSEFWSDDAARDALLGNLDGEPLAEPRLFRFTSGHRKQFWNRNCVGIGFASSFLEPLESTGLQLIVMGMLKLLRYFPERTIDPVLRDEYNQLSTREIERIRDFIIAHYYLSRRPEPLWAACRDIEIPDSLRHKLDVWNATGQIALGDSESYMEPSWLAILLGNGVIPARYNISADLYPLDQIRKGMDLRREEIIRSAQSVPSHQDFIDRHCKAP

SEQ ID NO: 83640 - protein, 504 aa, Caulobacter sp.
  misc_feature (1)..(504): tr|A0A0Q7W5J8|A0A0Q7W5J8_9CAUL Tryptophan halogenase OS =Caulobacter sp. Root1472 OX=1736470 GN=ASD47_15465 PE= 4 SV=1
MAHLNKIVIVGGGSAGWICAAMLSHYFQNGPTQVELVESEEIGTIGVGESTIPPFLQLIRTLGINEQEFIQETQAAFKLGIRFENWLEKGDVYYHPFGQIGGPLEVNEFYQCWLRAKQNGHPSKLQDFAPASVMAEAGKFMLPAAAQKTMIANANYALHVDARLVALYLRRFAEARGVKRTEGIVTEVATRPDGGVAKVILKDGREVAGDFFIDCSGFRALLIGKTLGEPFRDWGDVLLCDRAVVAQTENVGPPHPYTLVQAQDFGWRWRIPLQHRAGNGYVFASKYLSDDEATATLMRQVQGEVVLGPNIIPFKTGVRERPWVKNVVSIGLSCGFIEPLESTALHLIYKGMDYLLRFMPDMDADPVLAAEYNRRMVADYEEIRDFIVLHYVTTRRDDTPFWRDYQQVVPPESLRERIALFKAAGVLRDGVDDMFRAPSWQSVMEGMGVRPERYQQLVDRIPLSVIMNLMDKSAPMLADFVATLPSHEEFLRTHCPAAPLRRSA

SEQ ID NO: 83641 - protein, 524 aa, Limimonas halophila
  misc_feature (1)..(524): tr|A0A1G7P938|A0A1G7P938_9PROT Tryptophan halogenase OS =Limimonas halophila OX=1082479 GN=SAMN05216241_102481 PE=4 SV=1
MADRIDAVTIVGGGIAGWLSAVMLDRFLNTGSDAPVRITVIESPSPDAPMAGEATLPSLPNLLRQLGISESEVFRRCHATFKLGVRYTGWDTDHRGKPLRYLVAHTAEPLCAGRPAALYHLAFGGGGPDFAQAALPASALIGMSRGPRTPADGEYGARAGYGYHLDPEAFAHLLWETAVQRGIEHVLADVAEVERDDAGNAAALRLADGGAVPVQLVFDTTGRIHRELGGAEVEAAPTPNDRVIAARMPAPRGAKKRPSMDVTALSAGWAWDFPLRNRIGAGYVFSAQHLSDEQARDELLALLGRGASEAGVQVRTLPARFGWLRRRWVGNCIALGPAAAAHEPLEATAVAGINRAVRWLMYYWPDRGDPGALRERYNGLMRQLDQEIADYTATHYRLSNRADTAYWQAVSGRVPVSAAHRANLDLWQTSLPGKDDVTRNALFQAGTYTMMLFGKGFYRGRALPKSRDLAERDWAEHRRKVEAAKAQMGRNLPDHDALLAATRGDRGQQVAGLTTLAGEQPAMP

SEQ ID NO: 83642 - protein, 513 aa, Rhodanobacter sp.
  misc_feature (1)..(513): tr|A0A1E4NLY0|A0A1E4NLY0_9GAMM Tryptophan halogenase OS =Rhodanobacter sp. SCN 66-43 OX=1660135 GN=ABT18_06530 PE=4 SV=1
MSESAIRRVVIVGGGTAGWMAAALLARGLGAACEIRLVESAEIGTVGVGEATIPQILHINAFLGIDEDELMRFTHGTYKLGVQLNDWGRIGDSYLHAFGDVGLPLGLLPFHHYWLRSRAQGDPHSLWAYSLNAAAAALNKFARLDKVGNSPLGGIRYAYQFDAARYAQYLRERIPEGAVKRIEGKVVEVELRGEDGFIESLRLEGGELVEGDFFIDCSGFRGLLIEGALKTGYENWQHWLPCDRALAVASARSTPMLPYTQAFARSSGWQWRIALQHRTGNGHVYCSRFISDDEAAAQLLANLASEPLEDPRPLRFVTGMRKLAWNRNCLALGLAAGFMEPLESTSIHLVQSGIARFLGMFPDRHCDPLLVDQYNRQTRFEYERVRDFLILHYKATERDDTPFWQQCGAMDVPEELARRIVLFRRTGLIFREADELFTETGWLQVMLGQRIEPRQYHPLADELEASKLQAFLSDIRTLVNRTVERLPAHDAFVARTCTPVASGPTSKVARSAT

SEQ ID NO: 83643 - protein, 515 aa, Flammeovirgaceae bacterium
  misc_feature (1)..(515): tr|A0A2D7NTF0|A0A2D7NTF0_9BACT Tryptophan halogenase OS =Flammeovirgaceae bacterium OX=2026740 GN=CMB82_01090 P E=4 SV=1
MNASPHHIVILGGGTAGWLVAGVLGAEFDTSSIKVTLIESPTTPAIGVGEGTWPSMKSTLLKIGLSERMFLEECSAALKQGTHFKNWLHGKGETYYHPFTLPHGFGEINLADHWIRGHLGDQSFASSVTPQFAVCEAGLAPKQLSVPEYAYTLNYGYHLDAGKFAAMLSAHAVNNLGVEHVLADVTAVTSRENGDIEALVTDKGPIAGDLFIDCSGFRSVLLGEHYNVPFVSQRHVLFNDSALAVQVPYGSDSKIATTTKSTAHEAGWIWDIGLQHRRGVGAVFSSAHASAEAIEPQLDTYLKESGSASGLSEFEPRLIRFDPGYRASFWHKNCVAVGLSAGFIEPLEASALVLVELSARSIAQQFPKTRQQMGTVAQRFNAEFLQRWEQIIEFLKLHYVLSQRDDSAYWIEHRQAASVPTALTEKLADWCHRCPWHLDERRVDEMFPSASYQYVLYGMNFKSELGKDSRRHSEASLARAHALKAEVDAQSSRYLQHLPCHRSLLDKAIAHGFAG

SEQ ID NO: 83644 - protein, 518 aa, Colwellia chukchiensis
  misc_feature (1)..(518): tr|A0A1H7JQ29|A0A1H7JQ29_9GAMM Dehydrogenase (Flavoprot ein) OS=Colwellia chukchiensis OX=641665 GN=SAMN0521626 2_102319 PE=4 SV=1
MSKPLKHVVIVGGGSAGWIAAGSIAAMHNTQSAQGLKVTLIESPDVKSIGVGEGTWPTMRTTLQKMGISETDFIRECDVSFKQGAKFAKWVTGADDDFYYHPLVLPQGYFDIDLFKYWQKDQQGKSFSEAVCFQEQVCENGLAPKLITSPEYAAVANYAYHLNAGKFAEFLKAHCINKLGVNYISDHVGKINSTETGDIASLSTKKHGDITGDLFVDCTGFSALLIGQHYQVPFISKKDILFIDTALAVQVPYEDGADEIASHTISTAQDAGWIWDIGLPSRRGVGHVYSSRHTTQAEAEKALRRYLKDSIGEKSESLSLRKIDINPGIREKFWVNNCVAVGISAGFLEPLEASALVMIELAVATIAEQLPANRECMDIVAQSFNERFNYNWDRIIDFLKLHYIASKREDTAFWRDNRDPATIPDSLKSLMTLWQHRSPSEYDFHHKREVFSAASYQYVLYGMDFDFTPNDRGATETEEKMAQRMFTENKQITQKYVSALPKNRDLIDKIHEFGFSKI

SEQ ID NO: 83645 - protein, 516 aa, Kitasatospora xanthocidica
  misc_feature (1)..(516): tr|A0A372ZRJ5|A0A372ZRJ5_9ACTN Tryptophan 7-halogenase OS=Kitasatospora xanthocidica OX=83382 GN=DR950_12690 P E=4 SV=1
MLDRVVIVGGGTAGWMTASYLKAAFEDRVDITLVESGNISTVGVGEATFSDIRHFFEFLGLKEKDWMPACNATYKLAVRFEDWREPGHYFYHPFEQMRSVNGFPLTDWWLKQGPTSRFDKDCFVMASVIDAGLSPRHLDGALIDQPFDEGADEMQGLTMSEHQGKTQFPYAYQFEAALLAKYLTQYATDRGVKRIVDDVQDVRLDDRGWISGLRTAEHGELTGDLFIDCTGFRGLLLNKALEEPFISYQDTLPNDSAVALQVPMDMAKRGVLPCTTATAQDAGWIWTIPLMGRVGTGYVYAKDYLSPEEAERTLRAFVGPAAADVEANHIRMRIGRSRNSWSRNCVAVGLASGFVEPLESTGIFFIHHAIEQLVKYFPAQDWNPVRRDLYNRAVAHVMDGVREFLVLHYVAAKRTDTQYWRDTKTRKIPDSLAERLELWKAQLPDSETVFPYYHGLPPYSYMSVLLGMGGIEVAHSPALDLSDGAAAEREFAQIREKTERLVATLPKAYDYFARMR

SEQ ID NO: 83646 - protein, 497 aa, Pseudoalteromonas espejiana
  misc_feature (1)..(497): tr|A0A510XT14|A0A510XT14_9GAMM Tryptophan halogenase OS =Pseudoalteromonas espejiana OX=28107 GN=PES01_10140 PE =4 SV=1
MKPIKHVVIAGGGTAGWIAAALLNKVLGKVINITLIESSTIGTIGVGEATIPPIIQLNNALGINEQDFINATNASIKLGIEFENWKTPSHSYMHAFGSFGKDFPFCDFYNFWVKGKITGSEDSLWDFSLNYQAAKQHKFSPLNTIPNTQLPGLSYAYHFDATRYAEYLKTLATSRGVKHIDAKIEQVNQCLHSGNITSLTLDNDTEINGDLFIDCTGQRALLIEQTLNTGFVDWSHYLPCDSAVAVQSQGTDSLKPYTRSIAHSAGWQWQIPLQNRVGNGLVYCSRYLSDESATQLLLNNLPAEPITAPRVIKFKTGRRLKQWYKNVVSVGLASGFLEPLESTSIHLIQSAVTRLIKLFPHNGISDALVGEFNNQSVIEIEHIRDFIILHYKLTEREDSAFWRQCKQMDIPESLAHKLNLFKHTGKVVRENDELFAEVAWQQVFIGQGIIPDDYNSIVDSLSSEQLNDLFSTLKTLITSTVEQLPTHKDFLAKIKKA

SEQ ID NO: 83647 - protein, 512 aa, Caulobacter sp.
  misc_feature (1)..(512): tr|A0A0Q7W245|A0A0Q7W245_9CAUL Tryptophan halogenase OS =Caulobacter sp. Root1472 OX=1736470 GN=ASD47_17970 PE= 4 SV=1
MTAAYLARRLGSTRPDGVRITLIESSEIGIIGVGEGTFPTIQNTMRTLGVDEARFLREAGAAFKQGIKFIDWKTAPKDGVHSHYYHPFAQPRLLNGGLDLAPYWLMGEAGDIPFSDAVTLQDKVCEAMRGPKRRDDPQYGGPMAYAYHFDAGKLATLLRDVGKATGVRHLLGNVLVVNKADDGAIASVTTREHGDLVADLYVDCTGFAGALIGEAMGSAWIDKSDTLFVDRALALQVPYDRPDAPVATTTISTAHEAGWTWDIGLPDRRGTGYVYSSRHTTDDRAEQILRGYVGQAGDGLTPRLLKLKVGHRQAHWIRNCVAVGLSGGFLEPLESTGIVLIEAAAYMLARNLPRRGGMEAAARQFNAAMTDRYLRAIDFIKLHYCLSQRTDNRFWTDNADPASIPETLRDHLAMWKYRPPNVFDFPNLHESFKYFNYQYILYGMGFETRVDPAAHVHGDLARADFARVREAGLRAAAGLPDHRALLTEIHAHGFSTAAPGLATAEAGEAPRR

SEQ ID NO: 83648 - protein, 516 aa, Massilia sp.
  misc_feature (1)..(516): tr|A0A1M5L3D3|A0A1M5L3D3_9BURK Tryptophan halogenase OS =Massilia sp. CF038 OX=1881045 GN=SAMN05428948_1183 PE= 4 SV=1
MKTFQNVLIVGGGTAGWLTACFLAKTLGAARPGGVRITLVESPQIGIIGVGEGTFPSIRGTLSAIGVDEARFVRECHATFKQGVKFANWVRPAGSFGSDHYFHPFSHPSQRQGSAELLPYWLRGLAGEGVPFAQAATMQKRVADAARAPKRTSDGDYLGPMNYAYHFDAGRFAKLLAEHGVTLGVQHVLGNVGQVELNDDGAIARVHTEEHGALEADLYIDCTGFRASLIGQALGSPLRKLDDVLFVDHALAMQVPYPAADTPIPSYTISTAHEAGWTWDIGLQERRGIGYVYSSRHTSDERAEEVLRAYVGPAAAGLTPRKLELQLGYREVQWVKNCVAVGLSGGFLEPLESSGIGLIETAAYLIGFLFPFNGQTEPVARTFNDLMRQRYERVVDFIKLHYCLTQRTDSAFWRENADAASIPASLQAKLAMWQGRPPHRLDFVTDLEMYPPSSWQYVLYGMEFHSALHASAANAALDGQARDEFKTIAMLAERALADLPPHRDLVDHMCARASAR

SEQ ID NO: 83649 - protein, 493 aa, Citromicrobium sp.
  misc_feature (1)..(493): tr|A0A2P0AZJ6|A0A2P0AZJ6_9SPHN Tryptophan halogenase OS =Citromicrobium sp. RCC1897 OX=1812182 GN=A0U43_11735 P E=4 SV=1
MAAAALARLTPCAVTLVESEAIGKVGVGEATIPQIRLFNEALGIDEAEFLRETKATFKLGIEFAGWSRAGASYMHAFGEIGAGAGLLPFHQLWLRGLELGMAKDLATYSLNERAARALKMQMWRGDAGHSVPDMPWAYHFDASLYAAYLRRLAEARGASRIEGKVASVERDGANGDIAAVALEDGRRIAGDFFIDCSGFRSLLLGQELATAFEDWSHWLPCDRAVAVPCTTKGEFTPYTRSTAHSAGWQWRIPLQHRIGNGLVYCSDYLSDDEAEAQLLANLDGAPQATPNRLRFTTGMRAQQWSHNCLALGLAAGFMEPLESTSIHLIQSSIARFINMLPGKQPAPAMRAEFNRQAEFEWTRIRDFLILHYWANGRVGEAFWDRCREMALPDTLTAKIEQFKASGFIHREHEELFTIPGWAQVLIGQEVMPQSLHPLTASTDPAALERMLGEIEAGIGQLVDAMPSHVEFLRAYCMPRATNPSPTPVSETAR

SEQ ID NO: 83650 - protein, 487 aa, Planctomycetes bacterium
  misc_feature (1)..(487): tr|A0A5B9MJA1|A0A5B9MJA1_9BACT Tryptophan halogenase OS =Planctomycetes bacterium OX=2026780 GN=Mal15_37510 PE= 4 SV=1
MDGRFDVAIIGSGFSGSILARILASRGRRVALLDAATHPRFAIGESSTPIADLLLRRLGRQYGFPDLEALSAYGNWQQSLPELACGMKRGFSYFDHRTGIVESRLGERSMIVAASPSDWKSDTHWYRSDVDAFLFAKAVEAGAVAQEGVAVTSLELSTAGDARIGFASGDQVAAAMVVDASGPAAVSARLLGVAPLTDRLQTKTCAAFAHFRGVDSYSSVFNSIHGDGRGCDPFDADAAAQHHLIDQGWAWMLRLDNGITSVGITSPLPADAATRHDTVDRAVQILADRFSAYPTLHQIMRNCEIVAPHSTIHTIGRLQRLYDPVVAENCVMMPTTAVAIDPLHSTGIAHALAGVERLAGLILTPDRGDGVQRYREVILGEAFHLDQIVALGYRAMPSFRRFAASCMVYFAAAIACEERIGRGDVPTKLWQADQERFVAAVGRCAEWVDSDADDNEVVRRMRELIEPWNTAGLFDSVGNRYAYTATK

SEQ ID NO: 83651 - protein, 506 aa, Sphingomonas sp.
  misc_feature (1)..(506): tr|A0A0W1QJW7|A0A0W1QJW7_9SPHN Tryptophan halogenase OS =Sphingomonas sp. WG OX=1592629 GN=ATB93_12075 PE=4 SV= 1
MDRAISHVVIVGGGTAGWLSACRIAAATAGAIAVTLIESPDVATIGVGEGTWPTIRRTLERIGISETELLLACDGSFKQGTRFDGWATGAADERYYHPFVPPLELDPADLPGGRPYAVAACPQPQVCAADLAPRQRAMPDYAGALNYAYHLDAAKLAVLLTRQATTRLGVRHVRDHVLSVERAEHGSIAAVQTRETGRIAGDLFLDCTGQSALLIGDTLAVDVVDASATLFNDRALAVQLPVAPDSPIASQTVATAHAAGWIWDIGLPSRRGIGCVYASAFMDEAAATAVLADYCRAFLPEMPAPRALRFRSSYRARPWEANCLAIGQSAGFMEPLEASAIVMIELSLDALLEDFPVDPALMPIQARRFNALACYRWERIVEFLKLHYVLSRREEPYWRAHRAAATMPERLVEALQLWRYRAPSALDLPMQDELFPAASYRYILWGMGFPFPQPSPVQRPVRPDLPNQLRQLDQRSRALAASLPTNRAYLDALRGERPPFLERCAS

SEQ ID NO: 83652 - protein, 214 aa, Chitinophagaceae bacterium
  misc_feature (1)..(214): tr|A0A4Q3T4N6|A0A4Q3T4N6_9BACT Tryptophan halogenase (F ragment) OS=Chitinophagaceae bacterium OX=1869212 GN=EO O07_28420 PE=4 SV=1
MSHIKRIIIVGGGTAGWMAAAGLSQYLRQRDIRIHLVESAEIGTIGVGEATLPGIRDFNASLGIDEIDFIKRTQATFKLGIEFNDWKSLGSQFFHPFASYGLPIDDVEFYAVWQRLFKQHKAKDLMHYCLPSMMAKQNKFAQPNPTTTSPLARYHYAFHFDASLYAAYLRRYSEAMGVIRHEDKITQVKLLDNGFIGSVCLEKSDELTGDLFID

SEQ ID NO: 83653 - protein, 529 aa, Luteibacter pinisoli
  misc_feature (1)..(529): tr|A0A4Y5Z2G4|A0A4Y5Z2G4_9GAMM Tryptophan 7-halogenase OS=Luteibacter pinisoli OX=2589080 GN=FIV34_10005 PE=4 SV=1
MAQLKKVLVVGGGTAGWLAACYLAKAVNAVDPRSVQVHLVESPDIGLLGVGEATFPSIRGTLAAIGLDERRFLAGATATYKQGIHYRHWVRPPGAPGATHFFHPFNAPSQRPGGPELLPYWLLGAAPEGMAFADAVSMQSTLVNHSRAPRRAKDPDYQGPVNHAFHFDAACFARVLAEHGQETLGVIRHVATVERTELDEQGAIARVVTKEEGDLTADLYVDCTGLRGMLIGNVMQSPFRSRADVLFADRAVAMQVPYEAPDTPIPSYTISTAQEAGWIWDIGLQKRRGVGYVYSSRHSTDDRAEAVFRRYLGKAGEGAKAMHIKFETGYRPEHWRKNCVAVGLAGGFVEPLESTGIALIELATYLITHLLPTDTDDMEGAAQHFNAMMVARYDRIIDFIKMHYCLSQRRDSAFWTDNCDPASIPLTLQEKLAKWRQRPPHRLDFISDLEMFMTSSWQYVLYGMEFKTDLEPMRSAYPHMEAARQEFAMIQQAASRALDDLPGHRELVEQLCREHAKSLPVAARTGTID

SEQ ID NO: 83654 - protein, 500 aa, Sphingomonas sp.
  misc_feature (1)..(500): tr|A0A0W1QJ09|A0A0W1QJ09_9SPHN Tryptophan halogenase OS =Sphingomonas sp. WG OX=1592629 GN=ATB93_13560 PE=4 SV= 1
MNVPLRRIVIAGGGSAGWMAAAALSQALAGTGIAITLVESEAIGTVGVGEATIPPIHGFNQMIGVDEAAFVKATGGTFKLGIEFVDWWRRGEGYFHPFGRYGDDFGMVPFHQHWLAARAEGDTTPLGAYSLSTLAAMNGRFGLPQGDARSVFATYGYAYHFDAGRYAAFLRQLSESRGVVRHEGRIGDVEQDPETGFVRTLTLEDGRTISGDLFLDCTGFRALLIGDALSVPYQDWSHWLPCDRAIAVPTAAVAPPTPFTRATARGAGWQWRIPLQHRTGNGHVFCSSFCSEAEAEALLLANLDAPTVGELRHLRFTTGRRTTPWAANVVAIGLASGFLEPLESTSLHLIQSAITALLSWFPDQQFDPVVRAEYNRRVTREWDAIRDFLILHYTATERDDTSFWRHCRAITVPETLIEKVALFARTGRLLGREGDLFMDASWLAVLLGQGVIPRGHDSLANSMTPELRSKILAAMRKTIAGAAAALPPHASTIAQYLHAC

SEQ ID NO: 83655 - protein, 509 aa, Streptomyces puniciscabiei
  misc_feature (1)..(509): tr|A0A1D7YND1|A0A1D7YND1_9ACTN Tryptophan halogenase OS =Streptomyces puniciscabiei OX=164348 GN=BFF78_15620 PE =4 SV=1
MTATYLKASFGERLKVTLVESKKVPTIGVGEATFSTVRHFFARLGLAEHEWMPECHASYKLAIRFENWRAEGHHFYHPFERPRVVDGFPLADWWLHKRPSDRYDHDTSVLAALCDAQRSPRHVGGGLFEQDLEGVPGQDGGTDRAGATPDGRTTQFPYAYHFDAALLARFLTRYGTERGVRHVLDDVLDVRLDDTGAISGVLTKEHGELTADLYVDCTGFRGLLLNKALEEPFRSYQDSLPNDSAVALRVPVDVTRRGMRPCTTATAQDAGWIWTIPLYGRLGTGYVYASDYCTPEQAERTLREFVGPEAADLPANHIRMRIGRSERSWVKNCVAIGLSSGFVEPLESTGIFFIQNGVEQLVRHLPDGGDGEALRRAYNRQVAGVMDGVREFLVLHYYAAARDDTAYWRDTKTRPLPDALAARIEDWRHKLPDEDSVHPYFHGFEPYSYTAMILGLGGLPVRPRPVLARMDDTAALREFDRVRRQAAALIERLPSQADYLAWQRSCRNP

SEQ ID NO: 83656 - protein, 496 aa, Porticoccaceae bacterium
  misc_feature (1)..(496): tr|A0A2E1SRH1|A0A2E1SRH1_9GAMM Tryptophan halogenase OS =Porticoccaceae bacterium OX=2026782 GN=CMK31_03115 PE= 4 SV=1
MSNQPVKKVVIVGGGTAGWMAAAAISKLIGKNIEVTLIESDAIGTVGVGEATIPTMITLHRLLKIDERDFMKSVQGTFKLGISFENWKNVNENYIHSFGFTGKDCWAAGFQHFWLKGKEQGISSDFGDYCNELQAAKQNKFAVIPQNGLNYAFHMDAGLYANYLRKIAEKNNCKRIEGMITEVVTDPQTGNISQVNLESGQTIEGDLFIDCSGFMGLLIDKALHTGYDDWSHYLPCDSAVAVQTQSVAEPIPYTRSIAREAGWQWRIPLQHRVGNGLVFCSKYLTDEQATQTLLNNIEGEPLTKPRIIKFRTGQRHQHWNKNCVALGLAAGVLEPLESTSIHLIQRGIIRLLQLFPTQGISQTDVDEFNAQMKEEFLNVRDFIVLHYHVTEREDTPFWRHCKSMKIPETLAHRVELFKQSGRIFQKDNDVFAENSWSQVMLGQGILPEQYHPIVNMMSDEELVRFLNGIKGSVNNVVDQLPTHQQFIDSYCKAPSM

SEQ ID NO: 83657 - protein, 496 aa, Cellvibrionales bacterium
  misc_feature (1)..(496): tr|A0A1Z8YMF4|A0A1Z8YMF4_9GAMM Tryptophan halogenase OS =Cellvibrionales bacterium TMED79 OX=1986768 GN=CBC39_0 9705 PE=4 SV=1
MKQRTVNNVVIAGGGTAGWMAAAALSRLVGRKINVTLVESEEIGTVGVGEATIPTILTINRLLQIPEPDFIKLTSGTFKLGIRFENWRKQGEDYIHSFGDTGKGSWAAGFHHFWLRAKEMGLAEEYGEYCTELKAAEAERFAITSQNKLNYAYHLDATKYGMYLRKLAESSGATRIEGKIKRVETSSEDGFIEALHLEDGQRIEGDLFVDCTGFRALLSEGALATGFDDWSHWLPANRAWAVQSELNEHPKPYTRAIAHKVGWQWRIPLQHRAGNGLVYSNEFMDDDTARERLLSNVPDKPLTEPRPIKFVTGQRKQYWNKNCIAIGLSSGFIEPLESTSIHFIQNGIMWLLLMFPDACIEPSTVNEYNRTMRSEAEHIRDFIVLHYTLNQRHGDPFWDYCRNMDLPDSLKHRMELFERSARVFKPQDDVFAENSWVQVMMGQGMEPQGYHNIAQAMSESQMTAFLKGIQHEVAQTVAKLPEHGAFVKTLVQHAKL

SEQ ID NO: 83658 - protein, 500 aa, Arsukibacterium sp.
  misc_feature (1)..(500): tr|A0A0M2VCM2|A0A0M2VCM2_9GAMM Tryptophan halogenase OS =Arsukibacterium sp. MJ3 OX=1632859 GN=VT06_12405 PE=4 SV=1
MNNVVKNAVKKVVVLGGGTAGWMAAALLKKVLAGAVEITLVESEDIGTVGVGEATIPPIRLFNNVMGINEAEFLRETKATIKLAIKFDNWRVPGEGYFHTFGAPGKSLAFCHFHHLWLRARQQGDTTSLWQYDLNYLCATTGKFAPINAKDSILELPYAYHFDAGLYARYLRKLSEQMGVLRHEGKVQQVFQHPNGDIKCLVLENGHELAGDLFIDCSGFRGLLIQEQLNAGYDDWGHFLPCDRAVAVPSERFEKTVPYTRSIAHSAGWQWRIPLQHRNGNGLVYSSAHYSDEQASDLLLANLERKALADPKFIRFRTGRRRQQWQRNVVAVGLASGFLEPLESTSIHLIQSAVVRLIQLFPHNGICQSAIKEYNQQSQLEYEQIRDFLILHYHANQRSDSPFWRDMQQMAIPDSLRQKMAIFADNGQLFREQNDLFLESSWLQVMLGQGIEPKDYHPIANNFSAEKLREMLANIQAIKQEPLAKLPDHDTYIQTMINRG

SEQ ID NO: 83659 - protein, 520 aa, Porticoccaceae bacterium
  misc_feature (1)..(520): tr|A0A2E6G9N1|A0A2E6G9N1_9GAMM Tryptophan halogenase OS =Porticoccaceae bacterium OX=2026782 GN=CMK42_05070 PE= 4 SV=1
MQRQVNNIVILGGGTAGWLTASIIAAKHKITPTNSAFNVTLIESPDVNSIGVGEGTWPSMRVSLRRIGIRETDFFRKCNASFKQGTQFFDWTCKDKRSYIHPFTLPNNYAETNLVESWQKLSHEVTFAEAVCPQSEVFDKHLAPKQISTPEYVGQLNYGYHLDAGKFAELLRKHATETLGVCHLIDHVITVNNNEVGDIKSLTTTSREIEGELFVDCSGMQSILLGEHFKIPITKKHKYLFNDSALAAQVPYEDQNYKIESCTLSTAQKAGWIWDIGLQSRRGIGYVYSSAHTTDEAAHDALLAYINGSSKPNNPSPISPRKITFEPGHRTAFWHRNCVAVGMAAGFIEPLEASALVLVELAASTITDQLPYDRAHMEIVAKRFNKDFSRRWDSIVDFLKLHYVLTDRQDSAYWRDNKDAETIPESLADSLAHWKYHPPWHHDNIYASEMFPSASYQYVLYGMGFKTHLEQSRESFKLNSWDIAKQCFENNLKQSKQLCATLPTNRELINKINTYGFQAV

SEQ ID NO: 83660 - protein, 526 aa, Porticoccaceae bacterium
  misc_feature (1)..(526): tr|A0A2E0EVK4|A0A2E0EVK4_9GAMM Tryptophan halogenase OS =Porticoccaceae bacterium OX=2026782 GN=CMK34_05590 PE= 4 SV=1
  misc_feature (196)..(196): Xaa can be any naturally occurring amino acid
  misc_feature (216)..(216): Xaa can be any naturally occurring amino acid
  misc_feature (221)..(221): Xaa can be any naturally occurring amino acid
  misc_feature (240)..(240): Xaa can be any naturally occurring amino acid
  misc_feature (244)..(244): Xaa can be any naturally occurring amino acid
  misc_feature (260)..(260): Xaa can be any naturally occurring amino acid
  misc_feature (313)..(314): Xaa can be any naturally occurring amino acid
  misc_feature (318)..(318): Xaa can be any naturally occurring amino acid
  misc_feature (325)..(325): Xaa can be any naturally occurring amino acid
  misc_feature (344)..(344): Xaa can be any naturally occurring amino acid
  misc_feature (347)..(347): Xaa can be any naturally occurring amino acid
  misc_feature (370)..(370): Xaa can be any naturally occurring amino acid
  misc_feature (381)..(381): Xaa can be any naturally occurring amino acid
  misc_feature (444)..(444): Xaa can be any naturally occurring amino acid
  misc_feature (447)..(447): Xaa can be any naturally occurring amino acid
  misc_feature (476)..(476): Xaa can be any naturally occurring amino acid
  misc_feature (520)..(520): Xaa can be any naturally occurring amino acid
MTQTKNINRIVILGGGSAGWLTAGVVAAEHCAGGDSAGLTDTTITLVESSTISTIGVGEGTWPSMRSTLQKIGISETDLITKCDASFKQGTLFHGWKTGKGDSYTHPFTVPYGYNDTNLADQWRRFRHQIPFAEAVSSQNSLMFSDLAPKQITTPEYAFNTNYGYHLDAAKFAELLKMHCVENLNVNHVVADVVGXNSNSTGDISSLIIDAGEDVXGDLFXDCSGSRALLLGEFYEVPFXSKKXFLFNDSALASQVPYSXSEDPIASSTISSAQTEGWVWDIGLPTRRGIGHVFSSAHSDEDQVGESLLKYIXXTVSXEAASKTXIRKISFSPGHRAKFWHRNXVAXGMSAGFIEPLEASALVLVELSAXMIAEELPANRXVMDIVAKRFNDKFLYRWDRIIDFLKMHYVLSERKDSDYWRDSVSSESIPDSLAEKMELWRWQXPWXRDTMHVDEMFPSASFQYILYGMDFKTRAXTANRRSDFDAQNSAERLFQENAQRTKKLVAAMPTNRELINKIHXYGLQKI

SEQ ID NO: 83661 - protein, 498 aa, Porticoccaceae bacterium
  misc_feature (1)..(498): tr|A0A2D8GMG2|A0A2D8GMG2_9GAMM Tryptophan halogenase OS =Porticoccaceae bacterium OX=2026782 GN=CMK27_06085 PE= 4 SV=1
MKANKKSINQIVIVGGGTAGWMTAASISALIGKGLSVTLIESDQIGTVGVGEATIPTFFALHQLLKIDESEFLSAVQGTIKLGISFENWHTLGESYIHAFGHTGKSCWAAGFHHFWLKGKENGFSEDYGCYSPELTAAKSEKFGFLKQNPLNYAYHLNAGLYAKFLRKIAEQNGVIRKEGKIVQVSKTDDENISNVALESGEIIGGDLFVDCSGFAGLLIDKALETPYTDWSNWLPCDRAVALQTQSTGAPVPYTRSIAHQSGWQWRIPLQSRVGNGLVYSSKYMEDKEALDLLMANVDGEIISKPNFIKFKTGQRVQHWSKNCVAIGLSAGFLEPLESTSIHLIQRAIIRLMQMFPSSGFTDSDRDEFNKQMSDEYEYIRDFIIMHYHVTKRDDSAFWRYCRTMDIPATLQHKLDLFLEAGRVFHGEGDVFAENSWTQVMLGQGLTPEQYHPIVNMMSNKELESFLANLKAMVDHSVGQLPSHDVFLSKYCPAPNIA

SEQ ID NO: 83662 - protein, 522 aa, Porticoccaceae bacterium
  misc_feature (1)..(522): tr|A0A2D8GMU1|A0A2D8GMU1_9GAMM Tryptophan halogenase OS =Porticoccaceae bacterium OX=2026782 GN=CMK27_06070 PE= 4 SV=1
  misc_feature (83)..(84): Xaa can be any naturally occurring amino acid
  misc_feature (301)..(301): Xaa can be any naturally occurring amino acid
  misc_feature (502)..(502): Xaa can be any naturally occurring amino acid
MNDPQITDLVIVGGGSAGWLTAGIIAAEHLKTEQSSSRVKVTLVEAPNINTIGVGEGTWPSMRSTLKRIGISETDFIRDCDVXXKQGTLFSGWTDGKDIYTHPFTVPHAYSQHNLSRDWQNKFSDLPFAEAVCPQSKLMLKNQAPKKISTPEYSFNVNYGYHLDAGKFAEKLRSHCTLELGVVHKKAEVIQVNSAENGDIRSLRLDTGESLTGDLFIDCSGSRCLLLGEHYGIPFKSIRDILFNDSAIASQVPYLSAGDSIASSTISTAQKHGWIWDIGLPSRRGIGHVYSSRYTDADNAXVTLFKHIEKLVGSKIAKKVKMRRISFSPGHRQKFWHHNCVAIGMAAGFIEPLEASALVLVELSASMIAEQLPQNRKVMDIVSKRFNEKFLYRWDTIIDFLKLHYVLTKREDSDYWRDNANKNSIPESLSEKVELWRWQGPYHKDTMHVDEMFPSASYQYILYGMGFKTNIGLSTKQSEVQTSKVAQELFDENLKYTNLLIXSMPSNRDFIEKVHQHGLQKI

SEQ ID NO: 83663 - protein, 525 aa, Porticoccaceae bacterium
  misc_feature (1)..(525): tr|A0A2D6ZDZ4|A0A2D6ZDZ4_9GAMM Uncharacterized protein OS=Porticoccaceae bacterium OX=2026782 GN=CMK29_06030 P E=4 SV=1
MKKIKNIVIVGGGTAGWTAACYLRDTTPPYIKITVIASEEIPIIGVGESTTGLFNHFLKQVGIPEGVFMKETGATHKIGIQHRDWYKKGEHFNSPIGEFLNTPNSYPSDDYDAMKMYAVAENLKNSSLQGFCMKHNKLPFVRADHPANNPYKKLMGYGGYKDLRKNNTALHLDTYKTGKFLKKFVLSKHNIEYIDDEVLGYEKNEDETIKSVWCKKRGHDKPISGDLFVDCSGFKRILLKSYNNYFKRYDDQLLNNRALAFHLPYTDKTIIRNYTHAWAQKYGWLWMIPLQERYGAGYCFNDSFTTADEAKLEIEKVLKTKIEVQKDIKFHSGRFTKLWIKNVISTGLSSAFIEPLEATSIHATLFQLKHWIQYYFTETTDFNNEALQTSYNDDMTNMWDAIKDFIVYHYITPRNDTEYWKEASSHKRWSPQLMEKLAMWQTRTPRLVDFARGNRNDFYHIDDNLWLNISQGMNILDRDMVKRELKEYNLYESSKHQTKHALEFFNYAQKNCVKTNDYYKHYVGQ

SEQ ID NO: 83664 - protein, 527 aa, Porticoccaceae bacterium
  misc_feature (1)..(527): tr|A0A2D5R6U5|A0A2D5R6U5_9GAMM Tryptophan halogenase OS =Porticoccaceae bacterium OX=2026782 GN=CMK24_05525 PE= 4 SV=1
  misc_feature (309)..(309): Xaa can be any naturally occurring amino acid
  misc_feature (314)..(314): Xaa can be any naturally occurring amino acid
  misc_feature (319)..(319): Xaa can be any naturally occurring amino acid
  misc_feature (344)..(344): Xaa can be any naturally occurring amino acid
  misc_feature (386)..(386): Xaa can be any naturally occurring amino acid
  misc_feature (393)..(393): Xaa can be any naturally occurring amino acid
  misc_feature (395)..(395): Xaa can be any naturally occurring amino acid
  misc_feature (407)..(407): Xaa can be any naturally occurring amino acid
  misc_feature (506)..(506): Xaa can be any naturally occurring amino acid
  misc_feature (514)..(514): Xaa can be any naturally occurring amino acid
  misc_feature (517)..(517): Xaa can be any naturally occurring amino acid
  misc_feature (519)..(519): Xaa can be any naturally occurring amino acid
  misc_feature (524)..(524): Xaa can be any naturally occurring amino acid
MAPSENLKSIVIVGGGTAGWLTAGIIAAEHCANGSESDGLIDIKVTLVESPDISTIGVGEGTWPSMRSTLQKMGISETDLIRDCDASFKQGTLFKSWKTGGNDAYTHPFTPPHSYASTNLAPQWQKFSNEVSFAEAVSSQNALMFKDLAPKQISTPEYAFHTNYGYHLDAGKFAELLRKHCVGKLGVTHLKANVVSVKSTADGDIASLKTDSHGDISGDLFVDCSGSRALLLGEHFGVPFCSKGQFLFNDTALASQIPYVNADDPIASSTLSTAQTAGWIWDIGLPTRRGIGHVYSSGHTTEDRAAQEXLAYIXATVSXEAAASASIRKVPFSPGHRAKFWHKXCVAVGMSAGFIEPLEASALVLVELSAAMIAEQLPANRQIMDXVAKRFNXKXLYRWDRIIDFLXLHYILSQRQDSDYWKDNISSSSVPDNLSELVKLWRWQAPWHRDTGHIDEMFPSASYQYVLYGMGFVTQDSTTARRSDREAHSVAEGLFRENAERTKKLXASMPTNRXLIXKXTNYGXQKI

SEQ ID NO: 83665 - protein, 513 aa, Porticoccaceae bacterium
  misc_feature (1)..(513): tr|A0A351Q5T6|A0A351Q5T6_9GAMM Tryptophan halogenase OS =Porticoccaceae bacterium OX=2026782 GN=DCW94_05620 PE= 4 SV=1
MTKTVVIVGGGSAGWLTAGIIAARHNPQNDAGQGTKVILLESPDVANLGVGEGTWPTMRDTLRQIGISEVDFLRSCDVGFKQGSQFINWQRGEGESYYHPFVPPAGYGSVNLAAHWLDRSTDSTFADAVSPQGKVCDLGLAPKTAQTPEYAFGLNYGYHLNAGKFVELLKRHCVDKLGVDYQLGHVDQVLSAENGDITALSLTKGENISGDLFVDCTGFSALLIGKHYQVPFVSQRDCLFNDTALAVQADHAGEDTPIASCTKSTAQSSGWIWDIALPTRRGIGHVFSSQHVSLETAEDELQRYLAADPALAKKQHSPRKITFQPGHRARFWHKNCVAVGVSAGFVEPLEASALVLIEKSAEFISNNLPQDRAAMKVVAKRFNDIIGKYWVDIIDFLKLHYVLTERTDSEYWRDHVRAESIPDSLQDALELWRAQVPWVSDSNNRAELFSAASVQYVLYGMGFATQINSSRLRGWDKDAVLADRLMRDNLGKTEIFMASQPTNRDLLNLVRRG

SEQ ID NO: 83666 - protein, 527 aa, Porticoccaceae bacterium
  misc_feature (1)..(527): tr|A0A351NZ12|A0A351NZ12_9GAMM Tryptophan halogenase OS =Porticoccaceae bacterium OX=2026782 GN=DCX08_11415 PE= 4 SV=1
MSTSQTIRSVVIVGGGTAGWLTAAIVAAEHRGNSDQRKDTESLISVTLIESPEISTIGVGEGTWPSMRTTLKKIGISETELFRECDASFKQGTLFRRWRNGKDDIYTHPFTVPHGYENTNLAPHWQLFREKVDFAQAVSSQNSLMLAGLAPKQIVTPEYGFHVNYGYHLDAVKFAKLLQKHCVEKLGVIHHSAKVVQVNSDSDNYIVSLDTDVDTTVSGDLFVDASGSRSLLLGKHYGIAFHSKKQFLFNDTGLASQVPYVNEDDPIASSTLSTAQKNGWIWDIGLPSRRGIGHVYSSSHTTEERATEELLNYIADTISPQTAAKTSVRKVNFEPGHRAEFWHKNCVAVGMSAGFIEPLEASALVLVELSAAMISEQLPENRHVMKIIAKRFNQKFLYRWERIIDFLKLHYILTQRNDSDYWKDNQMTDSIPFSIAEALDLWKWQSPWHQDTMRADEMFPSASYQYILYGMNFETKQCTERSSSRNGSLASKRLFLENIQRTEMLVSSMPTNRILIDKIKAYGLQKI

SEQ ID NO: 83667 - protein, 493 aa, Porticoccaceae bacterium
  misc_feature (1)..(493): tr|A0A2D5U938|A0A2D5U938_9GAMM Tryptophan halogenase OS =Porticoccaceae bacterium OX=2026782 GN=CMK25_09405 PE= 4 SV=1
MVKVVIAGGGTAGWMAACGLSTRLANLLDITLLESDAIGTVGVGEATIPPMRNFHRIMGIDEQEFMRETQATFKLGIEFNNWGDIGDSYIHSFGEIGQRSWMAEFHEFWMEAQAQGFGGSLEDYCLELKAAKAGKFATHLDDTRLNFAFHLDATRYAKYLRQKSEKAGVRRVEGLIKEIQKDDQSGDITALLLDSGELIEGDLFIDCTGFRSLLLGDALGVELDDWSHWLFSDSAIAVQTMSTEEPVPYTRATAHASGWQWRIPLQSRVGNGIVYSSRFMSDDEAKQTLLNNITGELITEPRQLKYRTGSRQKSWQNNCVALGLSSGFIEPLESTSIHLVMTAIIRLIRLFPFGASKQALADRFNQETRTEIETVRDFVILHYKQTNRTDSEFWNAYRTMDIPDTLAHRLEIFKNNAYVWPDDVALFRVDSWVQVMMGQGLMPANYHSAGKLTPTQSLQQSMTKIKSSIEQTVQKLPTHQQFIDHYCPAPQED

SEQ ID NO: 83668 - protein, 510 aa, Porticoccaceae bacterium
  misc_feature (1)..(510): tr|A0A2D6ZDY8|A0A2D6ZDY8_9GAMM Uncharacterized protein OS=Porticoccaceae bacterium OX=2026782 GN=CMK29_06025 P E=4 SV=1
MLKQTITTNIMSVNKITVLGGGTAGLVSALVLKARFEKLNIEVVKSDNIGIIGVGEGSTEHWKDFMEFIGVPLKELLLETDATFKYGIMFEDWTKEPYFHNITNELHKVALGQYYAGYAYATINKLKPDEYTSGHCFNNEVLPNYIPSQFHFNTHKLNTFLLKKCKDFGIEVHTDDITDVETDNHGIKRIRGDKGWYESDFYIDCTGFKKYLISKLGAKWVSYKDYLPMNEAIAFPTPDTDEYTPYTLAKAMSSGWMWRIPTYGRWGNGYVFDNRYINAEQAQKECEDYLGFKVNVAKNIKFDAGALDRPWIGNCVAMGLCASFIEPLEASSIGTSIQQSFLLMHTLINYKQTDIDQYNTKVGHIVENIRDFVLLHYIVKRNDSKFWKELKVNLPDSLKHNLDKWSDRMPIKEDFKTDYVLFNAQNFAVLLKELELANIDSLKREYDMLVEHNKNVVKKEVDHHIKTFKTDPMNKQCPIMGHKQYLMKLRSGKETLNQQIDYLQNENSNT

SEQ ID NO: 83669 - protein, 538 aa, Burkholderia cepacia
  misc_feature (1)..(538): tr|A0A103ZZW5|A0A103ZZW5_BURCE Tryptophan halogenase OS =Burkholderia cepacia OX=292 GN=WS90_36700 PE=4 SV=1
MSNPIKNIVIVGGGTAGWMAASYLIRALQQHTSITLVESAAIPRIGVGEATIPSLQKVFFDFLGIPEREWMPQVNGAFKAAIKFVNWRKSPERSRDDHFYHLFGTVPNCDGVPLTHYWLRKREQGFQQPMEYACYPQAGALDAKLAPCLSDGTRQMSHAWHFDAHLVADFLKRWAIERGVKQVIDEVEQVHLNERGYIASLSTKEGRTLEADLFIDCSGMRGLLINQALKEPFIDMSDYLLCDSAVASAVPNADARVGVEPYTSAIAMNSGWTWKIPMLGRFGSGYVFSSKFTSRDQATADFLNLWGLSDKQPLNQIKFRVGRNGRAWVNNCVAIGLSSCFLEPLESTGIYFIYAALYQLVKHFPDTSFDPRLADAFNAEIVHMFDDCRDFVQAHYFTSSRDDTPFWLANRHDLRLSDAIKEKVQRYKAGLPLTTTSFDDSTYYETFDYEFRNFWLNGNYYCIFAGLGLLPDRSLPLLQHRPESIDKAEAMFARIRREAERLRTSLPTNYDYLRSLRDGGAGLSRSQPGPTLAAPEIL

SEQ ID NO: 83670 - protein, 538 aa, Burkholderia cepacia
  misc_feature (1)..(538): tr|A0A5E9QA06|A0A5E9QA06_BURCE Tryptophan 7-halogenase OS=Burkholderia cepacia OX=292 GN=E3D37_27770 PE=4 SV=1
MSNPIKNIVIVGGGTAGWMAASYLVRALQQHTSITLVESAAIPRIGVGEATIPSLQKVFFDFLGIPEREWMPQVNGAFKAAIKFVNWRKSPERSRDDHFYHLFGTVPNCDGVPLTHYWMRKREQGFQQPMEYACYPQPGALDAKLAPCLSDGTRQMSHAWHFDAHLVADFLKRWAIERGVKQVIDEVEQVHLNERGYIASLSTKEGRTLEADLFIDCSGMRGLLINQALKEPFIDMSDYLLCDSAVASAVPNADARVGVEPYTSAIAMNSGWTWKIPMLGRFGSGYVFSSKFTSRDQATADFLNLWGLSDKQPLNQIKFRVGRNGRAWVNNCVAIGLSSCFLEPLESTGIYFIYAALYQLVKHFPDTSFDPRLADAFNAEIVHMFDDCRDFVQAHYFTSSRDDTPFWLANRHDLRLSDAIKEKVQRYKAGLPLTTTSFDDSTYYETFDYEFRNFWLNGNYYCIFAGLGLLPDRSLPLLQHRPESIDKAEAMFARIRREAERLRTSLPTNYDYLRSLRDGGAGLSRSQPGSTLAAPEIL

SEQ ID NO: 83671 - protein, 511 aa, Caulobacter rhizosphaerae
  misc_feature (1)..(511): tr|A0A561NPL7|A0A561NPL7_9CAUL Tryptophan halogenase OS =Caulobacter rhizosphaerae OX=2010972 GN=FHW61_103216 P E=4 SV=1
MTPPPLGAPIRKVLVLGGGTAGWMTAAALSKVLGGQVEVTLIESEQIGTVGVGEATIPPILTFNAMLGIDERAFMRATRATFKLGIEFRDWTRPGDRYMHPFGSFGLDIEAIKFHQVWRKVRDQVGPLEDFNLAAVAARRNRFALPDPDPAKVLSSLKYAFHFDAGLYARFLRGFAEARGATRIEGKVADVTLRGEDGFIQSVTLEDGRILEADLFIDCSGFRALLIGEALGGRYVDWSHWLPNDRAVAIPCDTGGDGLTPYTRATADKAGWRWRIPLQHRTGNGYVYSSAHLGDDEALAALTAGLDGPARADPNFLGFQAGRRDRAWIKNCVAIGLSSGFLEPLESTSIHLIQAGITKLLALFPDKSFDPLEIDEYNRLTAQQVELVRDFIILHFKATERSDTPYWNHVRTMEIPESLQRKIDLFAGRGRLFSSDYDLFAEPSWIAVLMGQGIVPRQYDALVDSLPEAALVQRLQRMSALIGQTAQAMPDHAAFIARYCAAEAVAAQSPA

SEQ ID NO: 83672 - protein, 513 aa, Porticoccaceae bacterium
  misc_feature (1)..(513): tr|A0A2D5U928|A0A2D5U928_9GAMM Tryptophan halogenase OS =Porticoccaceae bacterium OX=2026782 GN=CMK25_09400 PE= 4 SV=1
MTKTVVIVGGGSAGWLTAGIIAARHNPLSDDGQGIKVILLESPDVANLGVGEGTWPTMRDTLRQIGLSEVDFLRSCDVSFKQGSQFINWQRGEGESYYHPFIAPGGYGSVNLAAHWLHRGTNSTFADVVCPQGKVCDLGLAPKTPQTPEYAFSLNYGYHLNAGKFVELLQRHCVEKLGVEYQLGHVDQVLSAENGDIAALSLTDGKKIHADLFVDCTGFAALLIGKHYNVPFVSQRDCLFNDTALAVQTNHASEDTPIASCTKSTAQSSGWVWDIALPTRRGIGHVFSSQHVSIGKAEDELQRYLDADPALAKDQPSPRKITFQPGHRESFWHKNCVAVGVSAGFVEPLEASALVLIEKSAEFISNNLPQDRSAMTVVAKRFNDIIGRYWIDIIDFLKLHYVLSERTDSEYWREHRESQTMPDSLRDSLDLWRSHVPWVSDSNNRVELFSAASIQYVLYGMGFVTDINSSRYRSWNKDAALADRLMQDNLGKTEALMASQPTNRDLLNLVRGG

SEQ ID NO: 83673 - protein, 515 aa, Rhizobiales bacterium
  misc_feature (1)..(515): tr|A0A4V1T8H0|A0A4V1T8H0_9RHIZ Tryptophan 7-halogenase OS=Rhizobiales bacterium OX=1909294 GN=EOP24_00420 PE=4 SV=1
MAEQPHFVIVGGGTAGWIAAFIIQDSIKRLKLDAKLSVVESSKIPTVGVGEATTAAFHVFLTHFGIDIFEFFRKTEATYKLGIRHEDWRRKGFTYYGPIDDPHAVVRPPPGAPSDYLNVYAVSVNEPVQDMHLFGPLLKQKKAPWAKKADGSLIPLGPFLPAYHFDQSLVGKFLKEKSQGVGVVDNVLTGVERHGETGDVTALVFEDGQKLEGDFFIDATGFRKRLIVGEMQAPWISYQHELPVNRALPFWLPVEPGEEIANYTRAWAQEAGWMWQIPTQYRYGCGYVYSDEFRTPDEAHAEVERVLGRKIEVRGDIQFKIGRLEKAWINNVVAVGLSSSFLEPLESTSIHGTIVQMMMFAGQYLRDPAQMGQPLRDDYNRRVGRQVDDFRTFVNTHYMTERDDTPFWREVRAHRIHPETRQRLERWKTEMPRREHFADYLFGLPHVETQLHYPVLDGLGLLDPAVAKAEMARDPKLRKFARETHAGLVKEYKQAASKALGHAEFLELVRGMDGA

SEQ ID NO: 83674 - protein, 511 aa, Caulobacter rhizosphaerae
  misc_feature (1)..(511): tr|A0A561MSL4|A0A561MSL4_9CAUL Tryptophan halogenase OS =Caulobacter rhizosphaerae OX=2010972 GN=FHW61_11869 PE =4 SV=1
MQDSARDRRIRDIVIVGGGTAGWMAAASLRRHFGAAPVTITLIESSEIGTIGVGEATIPTIRRFYQALGLSDIDVLRATGGTCKLGIRFNDWSGPGSSFIHPFGLYGQDLKGVAFHHYWMCLRALGEAAPIGDYSLGANLAAAGKFTTPSRNPPSTLSVFDWALHFDAGLFARLMRQVAEQNGVRRIDAKIVKVNLRGEDGFIESVSLDTGATVAGDLFIDCSGFRGLLIEEALHTGYEDWSQWLLCDSALAVQSEGQGSPPPYTDVTAHEAGWRWRIPLQHRWGNGYVYSSRHTTDEAARAVLTASLDERLLHEPRKIGFHPGRRLKAWNKNCIALGLASGFLEPLESTSIALIETGIEKIKALFPSRDFDPVVIDEFNAMSRLEMERVRDFIILHYKLNQRPDTTGFWTHCREMTVPETLQKKIDLWRAQGHFVRYRWEMFSPPSWLAIYAGLGLLPETYDLSVDGFDAGQLSAALGEMRKAVADTVAAARPHGDFIEQYARPRPVAAE

SEQ ID NO: 83675 - protein, 458 aa, Sphingomonas sp.
  misc_feature (1)..(458): tr|A0A0Q4JL69|A0A0Q4JL69_9SPHN Tryptophan halogenase (F ragment) OS=Sphingomonas sp. Leaf29 OX=1736212 GN=ASE81 _17300 PE=4 SV=1
MAYQGTIGSKGKPTMPHEPVRSIVIVGGGTAGWMAATYLARRLTHLNLSITVVDSAAIGTVGVGEATVPAIRDFLSAIELGEPDVLRETGGTIKYGIRFDGWGGDDHRFFHPFGLYGVGAGGVAFHQYWLKLNAAGRAGPIGDYCLATQLARGGLFLPPADHPANDLGVFNFALHFDAAKFAALLRRLALANRVAHVDGRIEQVTTDPARGHVTHVTLDDGRQIAGDLWIDASGFRSLLLGEALGVPYVDWRHWLPCDRAVAIPCRAAPGDPVPYTVATARTAGWQWRIPLRHRIGNGSVYCSDFQSDGDAEDALLASIEGEPLAGPNRLRFVTGHRERFWSGNVVGLGLASGFLEPLESTSISLIQSGLERFVALFPDRDCDPRLAATYNRQSVLEFERLRDFLFLHYLANGRTEPFWQAIRAVEPPEPLQIKLDAWRSGGEFVRNEWDTFQDPSWL

SEQ ID NO: 83676 - protein, 511 aa, Caulobacter rhizosphaerae
  misc_feature (1)..(511): tr|A0A561NPL5|A0A561NPL5_9CAUL Tryptophan halogenase OS =Caulobacter rhizosphaerae OX=2010972 GN=FHW61_103214 P E=4 SV=1
MTDHAVRNILIVGGGTAGWMTAAALSAKLAGLPIAIRLVESAEIGTVGVGEATVPHIRHFNAALGLDEADFMRSTQATYKLGIEFRGWSKPGDSYIHPFGAYGAAIAGVGFHHHWLRARQGGDATPLEAYSLPVMAARQGRFAPPSPDPRALASTYAYAYQFDAGLYAAYLRAYAEARGVVRTEGKVADVALRGEDGFIAAVTMENGERIEADLFIDCSGFRGLLIEQALKAGYEDWTRWLPCDRAAAVPCETVEASTPYTRCTADAAGWRWRIPLQHRVGNGYVYSSQHIGDDAAAAALLAGLEGKAQADPRFLRFVAGHRRKQWSKNCVAVGLASGFLEPLESTSIHLIQVAVTTLLELFPDRGCDQADQDEYNRVMTLEFERIRDFLVLHYHANQRTGEPFWDDRRNLPIPDSLAYKMELFRDRGVVVKYKDGFFLEPSWLAVYLGQNIVPRIYDPVSDSVPDAVLAQRLTAIRGSIAETVRAMPTHDDWIARFCAAGSGTPAQTVTA

SEQ ID NO: 83677 - protein, 510 aa, Duganella sp.
  misc_feature (1)..(510): tr|A0A3D9KNY1|A0A3D9KNY1_9BURK Tryptophan halogenase OS =Duganella sp. GV023 OX=2135490 GN=C7506_10273 PE=4 SV= 1
MLQRIVIVGGGSAGWLTAGLLAAEHRAAHGGLHITLIESPDVPPIGVGEGTWPSMRDTLRRIGVSESDFFRECDAAFKQGSRFNRWTTGSDDDAYFHPFSLPQGHGEVNLPEQWLAQHPHIPFADLVSFQPHLCVAGRAPKQVVTPEYASVANYGYHLDAGKFGVFLRKHCLEKLGVHYVPDHVTAVNAHENGDIASLQTVQHGAVEGELFIDCTGMQSLLLGQHYGIPLISQKHVLYNDSALAVQIPYPTEDYPIASQTSSTAQSAGWIWDIGLPTRRGVGHVYASGYISDDQAEAELRAYIVQTGGPQDIPQPRKLSFNPGYRERFWHRNCVAIGLSAGFIEPLEASALAIVEMSAAMVSDDLPATREAMDIVASRFNEAFRYRWERVIDFLKLHYVLSQRRDWAYWRDNTAEVPQRLAELLTLWRHRAPSRSDFNRIEEVFPAASYQYILYGMGFRSDFSRAPKPHEAAQSDAYFQEAATLTKKMLHGLPDNRSLINHIKLHGLQKI

SEQ ID NO: 83678 - protein, 503 aa, Sphingopyxis alaskensis
  misc_feature (1)..(503): tr|Q1GUN6|Q1GUN6_SPHAL Tryptophan halogenase OS=Sphingo pyxis alaskensis (strain DSM 13593 / LMG 18877 / RB2256 ) OX=317655 GN=Sala_0918 PE=4 SV=1
MTGMDSSTARLKIVIAGGGTAGWMAAAALSGTLGAAIDLTLIESDAIGTIGVGESTIPPIVLFNRLMGINEAAFMRATQATFKLGIQFENWKHVGESYFHSFGTTGKDHWSAGFQHFWLHGLTCGHSRSYDDYCLELKAAHEGKFAHLPDDRMNYAYQLDSSLYAAFLRERAEGDGTRRIEGRIAAVELDGASGNIAALMLDGERRIEGDLFIDCTGFRALLIEGALHAGFDDWTHYLPCDSAIAVQTASVAPPVPYTRAIAHDAGWQWRIPLQHRQGNGIVYCSRYLAKDDALDRLLGSIEGDVLTEPNFIGYRTGARRKQWYRNCVAVGLSGGFMEPLESTSIHLIQRAVLRLIRMLPSGPVSERDIAEFNDQQFADMEQIRDFLILHYKVTERRDSPFWRQCAAMPIPASLEQKIELFRETGRVFRRNEELFVENSWVQVMMGQGIMPQRYHPIAAKLRPDELEAFLSMLRDGVERTVASLPAHGAYIARYCAVGGRNDA

SEQ ID NO: 83679 - protein, 539 aa, Porticoccaceae bacterium
  misc_feature (1)..(539): tr|A0A2D7RTP2|A0A2D7RTP2_9GAMM Tryptophan halogenase OS =Porticoccaceae bacterium OX=2026782 GN=CMK28_03380 PE= 4 SV=1
MRKVVIVGGGSAGWMAAAYLNGALNKQGQDQKVKITLIESPNIPRISVGEATIPSMRHLLAVVGVDENDFMRATDATFKQSIKYVNWVSKNNSFYHHPFSRYTNYPLDNSGADWIKSDRSIPYMETVSAQPILCELGRSPLLLSNWDRETPLTYAYHMNAQKFADYLTSFSIARGVEHIQENLLNVNQRENGFISSVVTDGDSVINGDLFIDCTGFRAKLIGEAMEIGVEDCSEWLLCDRAVTMHIPYEENYPGTVRPYTTATALSNGWIWDIPMQSQRSIGYVHSSHFISEDEAESEMRAYQGHDSARLSSRQIKFSVERRQKLWEKNCIAIGLSGGFIEPLESTGLYLSDLGAVALAEHFPSEDRDIEAMSYRYNRVLSNRFYEILDFINMHYCLTKRTDTKFWRTIQRPEHVNDRLKAKLEYWRSKSPTAMDFEDQCFANLSTTSSNNLTFSHAPVDTAALWNHESYLCILLGMDFMATEFQQSENTFRPPPVVYDAVIDKLRKGHQQLPPHELWLQKNAGMSNYDFGTKPVGWVA

SEQ ID NO: 83680 - protein, 520 aa, Porticoccaceae bacterium
  misc_feature (1)..(520): tr|A0A2D6ZEH0|A0A2D6ZEH0_9GAMM Tryptophan halogenase OS =Porticoccaceae bacterium OX=2026782 GN=CMK29_06880 PE= 4 SV=1
MQTEIRKIIILGGGTAGWLTASIIASEHMLDQESMVVNVTLIESPNVSTIGVGEGTWPSMRTTLKRIGVKETDFFRKCSASFKQGTQFFSWTNKHEQSYAHPFTLPNNFAKTNLVRPWQDLKTDIPFAEAVCPQLPIFARHLAPKQISTPEYAGHLNYGYHLDAGKFADLLRHHATEALGVVHISEHVISVNNKENGDIKSLTTSTNEITGDLFIDCSGMQSMLLGNHFGIPLLDKHQYLFNDSALAAQVSYEDENHPIESCTRSTAQKAGWIWDIGLQTRRGAGYVYSSSHTSDEKAYDELLEYIGETSTNINLDSISPKKITFQPGHRTVFWHRNCVAIGMSAGFIEPLEASALVLVELSASVIADQLPNDRNHMDIVAKRFNKNFRRRWDSIIDFLKLHYVLTDREDSIYWRENKDASTIPESLADSLAHWKFHPPWHEDNIYANEMFPAASYQYVLYGMGFNTQSLRSTKTAKQRWSGVASQCFENNNQQSRKLCSILPTNRELINKIYSQGMHTI

SEQ ID NO: 83681 - protein, 498 aa, Porticoccaceae bacterium
  misc_feature (1)..(498): tr|A0A2E8UG16|A0A2E8UG16_9GAMM Tryptophan halogenase OS =Porticoccaceae bacterium OX=2026782 GN=CMK38_02235 PE= 4 SV=1
  misc_feature (341)..(341): Xaa can be any naturally occurring amino acid
  misc_feature (384)..(384): Xaa can be any naturally occurring amino acid
MKANKKSINQIVIVGGGTAGWMTAASISALIGKGLSVTLIESDQIGTVGVGEATIPTFFALHQLLKIDESEFLSAVQGTIKLGISFENWHTLGESYIHAFGHTGKSCWAAGFHHFWLKGKENGFSEDYGCYSPELTAAKSEKFGFLKQNPLNYAYHLNAGLYAKFLRKIAEQNGVIRKEGKIVQVSKTDDENISNVAIESGEIIGGDLFVDCSGFAGLLIDKALETPYTDWSNWLPCDRAVALQTQSTGAPVPYTRSIAHQSGWQWRIPLQSRVGNGLVYSSKYMEDKEALDVLMANVDGEIISKPNFIKFKTGQRVKHWSKNCVAIGLSAGFLEPLESTXIHLIQRAIIRLMQMFPSNGFTDSDRDEFNKQMSDEYEYIRDFXIMHYHVTERDDSAFWRYCRTMDIPATLQHKLDLFLEAGRVFHGEGDVFAENSWTQVMLGQGLTPEQYHPIVNMMSNKELESFLANLKAMVDHSVGQLPSHDVFLSKYCPAPNIA

SEQ ID NO: 83682 - protein, 500 aa, Streptomyces sp.
  misc_feature (1)..(500): tr|A0A0Q6YAH6|A0A0Q6YAH6_9ACTN Tryptophan halogenase OS =Streptomyces sp. Root369 OX=1736523 GN=ASD08_03910 PE= 4 SV=1
MDPEYDLIVVGGGPAGSTAAAAVAMRGHRVLLLERETFPRYQIGESLLPATVHGLCGILGVAEEVAEAGFTLKRGGTLRWGRDPKPWQFSFSMTPRLPEPTATAFQVERSRFDEILLRNAARVGAEVREGSTVRRVVADDERVRGVEYTDGDGNARTVYGRYVIDASGNTSRVHSGVGGRRVYSDFFRNLAVFGYFAGGRRLPEPNRGNIFCAAFDAGWLWYIPLRDDLTSVGAVISPEHTAAVQRDPRAAWQDMIRACPEVAELLDGVPAATEPPYDQVRVRKDWSYWKTFFWTPGMALVGDAACFVDPVLSSGVHLATYGALLAARAVNSALDGSVPEERGFAEFEARYRREYGVFYEFLIAFYDMERNDASYFWSAKKVTKVDSTEVAAFAELAGGLVSGDSAVLRPDRLGDHWSAAAAELDGAVGRLATADDRVNPLLSTRVVGETFRTGNDLQEQALYGGPLDDTGPAGPGHLVASADGLGWDTARGTAAQPGGE

SEQ ID NO: 83683 - protein, 505 aa, Caulobacter rhizosphaerae
  misc_feature (1)..(505): tr|A0A561N2Q6|A0A561N2Q6_9CAUL Tryptophan halogenase OS =Caulobacter rhizosphaerae OX=2010972 GN=FHW61_110118 P E=4 SV=1
MDNRIRKIVIVGGGTAGWMAAAAFSKLLGKDFVETVLIESDQIATVGVGEATIPPIRYFNERLGLDEADFVRQTQATFKLGIDFQDWGTIGHRFFHGFGDFGADIQAIGAHHYWRRLQDQGERFSLEDLSMPTQAAYRNKFVPPNPDPRSVMHDYSYAFHFDASLYARYLRGYAQARGVTRIEGRIVDIQLRGTDGFIEAVVLEGGVRVEGDLFIDCSGFRGLLIEGALKTGYEDWSHWLPCDRAIAAGCGSGGDGLTPYTRTTARAAGWRWRIPLQHRTGNGYVHCSQFVSEDEAVSDLLSNLDGPLIGQPQTIRFTPGRRLKAWNRNCVAVGLASGFIEPLESTSINLIQTAVGRLLDFFPNKDFDPVLIDEFNRLSRQEMEHVRDFIILHYKLTDRTDSGLWDYCRAMAIPDALAHRLEVFQRAGRLVTHDDDGFAPPSWLAIFNGLKVVPQRYDPLVDRMGVEEIRALLAGRRAAILRAAEAMPDQRTFIDKVCRAEPPAA

SEQ ID NO: 83684 - protein, 525 aa, Porticoccaceae bacterium
  misc_feature (1)..(525): tr|A0A2E1SRI8|A0A2E1SRI8_9GAMM Tryptophan halogenase OS =Porticoccaceae bacterium OX=2026782 GN=CMK31_03105 PE= 4 SV=1
  misc_feature (11)..(11): Xaa can be any naturally occurring amino acid
  misc_feature (22)..(22): Xaa can be any naturally occurring amino acid
  misc_feature (66)..(66): Xaa can be any naturally occurring amino acid
  misc_feature (81)..(81): Xaa can be any naturally occurring amino acid
  misc_feature (91)..(91): Xaa can be any naturally occurring amino acid
  misc_feature (99)..(99): Xaa can be any naturally occurring amino acid
  misc_feature (105)..(105): Xaa can be any naturally occurring amino acid
  misc_feature (109)..(109): Xaa can be any naturally occurring amino acid
  misc_feature (120)..(120): Xaa can be any naturally occurring amino acid
  misc_feature (136)..(136): Xaa can be any naturally occurring amino acid
  misc_feature (173)..(173): Xaa can be any naturally occurring amino acid
  misc_feature (175)..(175): Xaa can be any naturally occurring amino acid
  misc_feature (179)..(180): Xaa can be any naturally occurring amino acid
  misc_feature (184)..(185): Xaa can be any naturally occurring amino acid
  misc_feature (484)..(484): Xaa can be any naturally occurring amino acid
MKNTINRIVIXGGGTAGWLSAXIIAAEHYIDKNLSSGEHNFHLVLIESPDIPTIGVGEGTWPSMRXTLKKIGISETDFFRXCSASFKQGTXFHNWTYGXDDTYTXPFTXPHNFNETNLAXHWQQLREKINFANAVXPQSALFNNQLAPKNIATPEYAFHVNYGYHLDAGKFAXLXRQHXXDNLXXEYVSANMTAINSAENGDIASISTDTHGDITGDLFIDCSGSRALLLGEHYGIPLVSKSQYLFNNSALAAQVSYQNPEAPIQSATLSTAQTAGWIWDIGLPTRRGIGHIYSSDYTTEESARTELLNYIATTASEDAAANASIRKITFDPGHREKFWHKNCVAIGMSSGFIEPLEASALVLVELSAAMIAEQLPANRTIMDIVAKRFNDKFLYRWDRIVDFLKLHYVLTQRTDSKYWVDNCHPSSIPESLQELMEIWQYQPPWHQDTKHADEMFPSASFQYILYGMDFKTMLDPSLKRSDRXAGAKAMGLFTENAKRTEQLLSSMPSNRELINKIYKYGFQKI

SEQ ID NO: 83685 - protein, 506 aa, Xanthomonas hortorum
  misc_feature (1)..(506): tr|V7Z7P5|V7Z7P5_9XANT Tryptophan halogenase OS=Xanthom onas hortorum pv. carotae str. M081 OX=863365 GN=XHC_43 21 PE=4 SV=1
MIPAPLRNIVIVGGGTAGWMAAAAFARVLGPGFDVQLIESEQLGTVGVGEATVPHIKAFNNLLGIDEAEFVRQTQGSFKLGIEFVDWQRPGTSYIHGFGTQIGHPLGLLPFHQYWIKQHLRGKAQPLGAYTLNTVAAVRGKFMTSAGDVPANSPLANIAYAYHFDATQYARFLRGYAEQRGVTRIEGLVEQVQLHADTGHVQSLQLASGQVVSGDLFIDCSGFRGLLIEEALHTGYHDFTHWLPCDRALAVPSENVGPPNPYTRSTARAAGWQWRIPLQHRTGNGYVYSSAHISDDEAAATLLANLDGKALGDPRPLRFTTGRRKQFWNRNVVALGLASGFLEPLESTSIHLIQAGISRLLELFPREGISPVLVQRYNDRLAFEFDRIRDFLVLHYHATERDDSAFWRHCRTMPITPELQFTLDLFRDSGRFYRNAEEMFAEISWVQVMVGQGVLPQGYHPLVDQVPDHDAERFLASIAQTIGHCVDVMPTHQQFIDRYCKAAAPR

SEQ ID NO: 83686 - protein, 519 aa, Pleionea mediterranea
  misc_feature (1)..(519): tr|A0A316FZ11|A0A316FZ11_9GAMM Glycine/D-amino acid oxi dase-like deaminating enzyme OS=Pleionea mediterranea O X=523701 GN=C8D97_111122 PE=4 SV=1
MTNSINRVLIVGGGTAGWLTAGILANQLNSNDPQAVQVTLVESPNIPILGVGEGTWPNLRATLQKLGVDETEFMRQCDATFKQGSEFINWMQPKEDKTHRYFHPLNAVYHAAYDINLAPYWLQGQAGDGVGYDQAVATQAAVCRAGLAPKKITTPAYEAIQNYAYHLNANKFASFLAEHCTSRLGVKHILANVTQVSVSETGWIESVSTDKDEVIHADFFIDCSGSKGLLIEQALQVSWHSISDCIFNDTAMAIQVPNESDNCPIATHTMATATDSGWIWDIGLQHRRGIGHVYSSHHCSDDMAETALRNYIGDKADELSVRKIKMKTGYRDTFWKNNCVAIGMSAAFIEPLEASAIFLTDAAATMLAEQFPRNIESVPLVCKKFNQTFQLRWEKTLDFIKLHYCISDRRDSRYWIDNCQQASIPESLQQKLAHWRYHPPSKYDFEYAFEPFVLDSYLFVLYGMNFPTDIRHNLSSYPDTESAKQHFSNIQTMGERLKRELPSQRELVSKVYQFGFQSL

SEQ ID NO: 83687 - protein, 503 aa, Caulobacter rhizosphaerae
  misc_feature (1)..(503): tr|A0A561NPK8|A0A561NPK8_9CAUL Tryptophan halogenase OS =Caulobacter rhizosphaerae OX=2010972 GN=FHW61_103208 P E=4 SV=1
MNRIERLVILGGGTAGWMTAVALAKAFGPRLTIELLESEAIGTVGVGEATIPTIHWFNELIGLDEAEFVRATKATFKLGIEFVDWARPGERYFHPFGRHGVDLDAVPFHQHWLKARSDGFDRPLSAFSLASRLAAANRFAKPVDDPRSILSTLGYAYHFDATLYAKYLRGLAEAAGVTRREGKLEAVERAPDTGFVTALTTDRGERIEGDLLVDCSGFRALLIDDVMQAGFEDWSHWLPCDRAVAAPCARIAETTPYTRSTLRPAGWQWRIPLQHRTGNGYVYSSAFLSDDEAAGTLLGGLDGEALDEPRFLRFKAGFRREAWRKNVVAIGLSSGFLEPLESTSIHLIQSGIVKLITLFPDRDCDPGLARQFNTLFGRDMDGIRDFLILHYHATQGHEAPLWRHTRHMALPDSLIDREAQYRRAGRLMLTSDDLFREASWLAVLEGQGVRAEGCSPLADTLDPAANRRQLEQIEAAIARAAPTLPKHDDAVAAMVGGAAPVRG

SEQ ID NO: 83688 - protein, 505 aa, Sphingomonas sp.; identical to SEQ ID NO: 83478
  misc_feature (1)..(505): tr|A0A0Q4J6K1|A0A0Q4J6K1_9SPHN Tryptophan halogenase OS =Sphingomonas sp. Leaf29 OX=1736212 GN=ASE81_14820 PE=4 SV=1

SEQ ID NO: 83689 - protein, 505 aa, Sphingomonas sp.
  misc_feature (1)..(505): tr|A0A0T0PYE7|A0A0T0PYE7_9SPHN Tryptophan halogenase OS =Sphingomonas sp. Leaf412 OX=1736370 GN=ASG29_00895 PE= 4 SV=1
MQDLSAPRTIVIAGGGSAGWMTAAACAHLLPAHLYRVALIESDAIGTVGVGEATIPQIRNFNQALGLDEDAFLRATGGTFKLGIEFVGWGAPGERYLHAFGDVGRDSALHAFHHLWLRARAGGDVRPLGDYALNDLAARAARMQRGAARTARILPEMPYAFHFDAALYARMLRRFVEARGVMRHEGRIVRVERAGESGDVTALLLEGERRIAGDLFVDATGFRSLLLGETLGVGFEEWTRWLPCDRALAVPSARTGPLLPYTRATAHDAGWQWRIPLQHRTGNGVVYSSAHWSDDAAADHLLANLDGAAEADPRPIRFTTGKRARMWAHNVVALGLAAGFMEPLESTSLHLVQSTIARLLKLLPGAAAGDAVRDAFNAQADEEWTRIRDFLILHYHANARDGDFWRACRDAALPDTLAAKLALWREEAGVVRAGEELFTDVAWIQVLIGQGVIPRRWHPLADAPSQAEMAEYLDLIHQLSAREVAQMPDHAAFVAAHCAARAGAR

SEQ ID NO: 83690 - protein, 495 aa, Porticoccaceae bacterium
  misc_feature (1)..(495): tr|A0A2D5R6Y7|A0A2D5R6Y7_9GAMM Tryptophan halogenase OS =Porticoccaceae bacterium OX=2026782 GN=CMK24_05535 PE= 4 SV=1
  misc_feature (122)..(122): Xaa can be any naturally occurring amino acid
  misc_feature (151)..(151): Xaa can be any naturally occurring amino acid
  misc_feature (160)..(160): Xaa can be any naturally occurring amino acid
  misc_feature (167)..(167): Xaa can be any naturally occurring amino acid
  misc_feature (244)..(244): Xaa can be any naturally occurring amino acid
  misc_feature (440)..(440): Xaa can be any naturally occurring amino acid
  misc_feature (447)..(447): Xaa can be any naturally occurring amino acid
  misc_feature (488)..(488): Xaa can be any naturally occurring amino acid
MAQQKIKKVVIVGGGTAGWMAAASLSKLIGRDLDISLIESDQIGTVGVGEATIPTFFALHQLLKINEAEFLSEVQGTIKLGISFENWKNKGEDYIHAFGYTGQSCWAAGFQHFWLKGKTLGXSEEYSCYSPELMAAKANKFGLLKQNALNXAYHIDASLXAKFLRRXAEKNNVTRIEGKIIAVNQADDGDIKSVQLESGLTIDGDLFIDCSGFAALLIDKTLGTEYEDWSHWLPCDRAVAVQTXSVSPPIPYTRSIARECGWQWRIPLQSRVGNGLVFSSEYMSEDEATSALLNNVEGETLTTPRVIKFRTGQRTVQWNKNCVALGLSGGFLEPLESTSIHLIQRGIIRLMQMFPLSGITEADRDEFNRQMSDEYNFIRDFIIMHYHVTERTDTEFWRHCKNMDIPDSLDHRLRLFKDSGRVFQGEGDVFGENSWTQVMXGQGLTPXQYHPIVNMMSDNELERFLKGNRASVDNTLKQLPTHQQFIAXYCPAKPI

SEQ ID NO: 83691 - protein, 505 aa, Xanthomonas hortorum
  misc_feature (1)..(505): tr|V7ZBV9|V7ZBV9_9XANT Tryptophan halogenase OS=Xanthom onas hortorum pv. carotae str. M081 OX=863365 GN=XHC_30 96 PE=4 SV=1
MTQAPIRKVVIVGGGTAGWIAACALSHQFRELLEITLVESEQIGTVGVGESTVPPIRTFHRFLQIDEQEFLRAVAGTFKLSISFEHWRRQGERYIHPFGITGQSTLVCAFHHLWLESQRRGMPGTFGDYCLETVASRVDRFALLREPAVNYAYHLDAALYAKFLRARSEAFGVKRIEGKVQQVTLQPDSGDVATLVLEDGQVLDGDLFIDCSGFRGLLIEQALHTGYEDWSHWLPCDRAVAVQTEAAGPPVPYTRAIAHEAGWRWHIPLQHRVGNGLVFSSRHLSDDEAYAKLLRDAAAPALKDPWLVPFRTGRRLKAWNKNVVSLGLASGFIEPLESTSIHLTIAAVVRLITLFPADGIAPSQVQLFNDISRAEMEHVRDFIILHYHATQRDEPLWRQCREMELPESLALRLRAWRERAHAWQGADELFRVDSWTHVLMGQGIIPAQHHPLARAVSDRDLHRLLDGIAQPIQRAVEQMPSQQAFIDAYCKAGASAWGLRSPVIA

SEQ ID NO: 83692 - protein, 501 aa, Duganella sp.
  misc_feature (1)..(501): tr|A0A3D9KQI6|A0A3D9KQI6_9BURK Tryptophan halogenase OS =Duganella sp. GV023 OX=2135490 GN=C7506_102970 PE=4 SV =1
METIKKVVIVGGGTAGWMSAAALSRILGDKVQVTLIESEDIGTVGVGESTIPMIKLFNAVLGIDENEFVRETQATFKLAIEFRDWGRIGDSYMHGFGIFGQDLATLPFYQYWLRMHQQGKAPDLENYSINRMAANAGKFMRADRSHGNSPLGDIVSAFHFDAGLYARYLRRYAEQRGVRRIEGKVVDALTRASDGHVDAVRMENGDLIGGELFIDCSGFRGLLIEQALHTGFEDWSHWLPCDRAWAVPCELGGGLLPYTRATARPAGWQWRIGLQHRTGNGHVYASKFMGDDEARAQLMASLDGRPLAEPKLLRFTAGKRKQVWNKNVVAVGLSSGFLEPLESTSIHMIQSTIARLISFFPDKGFSQPDIAEFNRQCNFEIERIRDFIILHYHATERNDTPFWDYVRTMEIPDTLREKMDLWRTRGRIVRVDNELFAEVGWLQVLHGQRVPVAGHHPLADLMDEKEVADYLGDIASVISNCVDQMPSHAAFIAANCAARQL

SEQ ID NO: 83693 - protein, 521 aa, Acinetobacter lwoffii
  misc_feature (1)..(521): tr|A0A2K8UTE4|A0A2K8UTE4_ACILW Tryptophan 7-halogenase OS=Acinetobacter lwoffii OX=28090 GN=BVG18_16860 PE=4 S V=1
MDQSLIKNILIVGGGSAGWMTASYLSKAFGNKVNISLVESPEIPKIGVGEATIPNLQKVFFDFLGLKEEEWMPECNASFKAAIKFVNWNDPNDKNDYFYHMFGQVKNIDDIPLTHYWNYFRENNLTQLPMAYDCYDKARLLDKNLSPKTLTHEKVMSHAWHFDAHLVAKFLKKLSISWGVKHIEDEVINVSLNENGYVKSVTTNKNGEIEADLFIDCSGFKGLIINQALKEPFIGMSDQLFCNSAVAASIKHDDEENGIEPYTSAIAMKNGWTWKIPMLGRFGSGYVYSDEFSTREQATDEFLKLWNVKEDSISLNHIKFRTGRNKRAWVKNCVAIGLSSCFLEPLESTGLYFIYAAIYQLVKHFPKKEIDEKLVKAFNENIEKMFDDSRDFVQTHYFTTSRTDTAFWKANKNDLKLSDSLKSKLDIYKSGLVVCPPITTNEEDYYGDFDIEFSNFWTNSNYYCMFTGFKSYPNSVYPKILYDNKYDKAREYMQELKKREDNLLESLPSTYEYLKHLHSRK

SEQ ID NO: 83694 - protein, 538 aa, Burkholderia cepacia
  misc_feature (1)..(538): tr|A0A2X2PCP4|A0A2X2PCP4_BURCE Tryptophan halogenase OS =Burkholderia cepacia OX=292 GN=NCTC10661_05117 PE=4 SV =1
MSNPIKNIVIVGGGTAGWMAASYLVRALQQHTSITLVESAAIPRIGVGEATIPSLQKVFFDFLGIPEREWMPQVNGAFKAAIKFVNWRKSPEHARDDHFYHLFGTVPNCDGVPLTHYWMRKREQGFQQPMEYACYPQPGALDAKLAPCLSDGTRQMSHAWHFDAHLVADFLKRWAIERGVKQVIDEVEQVHLNERGYIASLSTKEGRTLEADLFIDCSGMRGLLINQALKEPFIDMSDYLLCDSAVASAVPNADARVGVEPYTSAIAMNSGWTWKIPMLGRFGSGYVFSSKFTSRDQATADFLNLWGLSDKQPLNQIKFRVGRNGRAWVNNCVAIGLSSCFLEPLESTGIYFIYAALYQLVKHFPDTSFDPRLADAFNAEIVHMFDDCRDFVQAHYFTSSRDDTPFWLANRHDLRLSDAIKEKVQRYKAGLPLTTTSFDDSTYYETFDYEFRNFWLNGNYYCIFAGLGLLPDRSLPLLQHRPESIDKAEAMFARIRREAERLRTSLPTNYDYLRSLRDGGAGLSRSQPGPTLAAPEIL

SEQ ID NO: 83695 - protein, 538 aa, Burkholderia cepacia
  misc_feature (1)..(538): tr|A0A1B4PKT9|A0A1B4PKT9_BURCE Tryptophan halogenase OS =Burkholderia cepacia OX=292 GN=WT26_00265 PE=4 SV=1
MSNPIKNIVIVGGGTAGWMAASYLVRALQQHTSITLVESAAIPRIGVGEATIPSLQKVFFDFLGIPEREWMPQVNGAFKAAIKFVNWRKSPERSRDDHFYHLFGTVPNCDGVPLTHYWLRKREQGFQQPMEYACYPQPGALDAKLAPCLSDGTRQMSHAWHFDAHLVADFLKRWAIERGVKQVIDEVEQVHLNERGYIASLSTKEGRTLEADLFIDCSGMRGLLINQALKEPFIDMSDYLLCDSAVASAVPNDDARVGVEPYTSAIAMNSGWTWKIPMLGRFGSGYVFSSKFTSRDQATADFLDLWGLSDKQPLNQIKFRVGRNGRAWVNNCVAIGLSSCFLEPLESTGIYFIYAALYQLVKHFPDTAFDPRLADAFNAEIVHMFDDCRDFVQAHYFTASRDDTPFWLANRHDLRLSDAIKEKVQRYKAGLPLTTTSFDDSTYYETFDYEFRNFWLNGNYYCIFAGLGLLPDRSLPLLRHRPESIDKAEAMFARIRREAERLRTSLPTNYDYLRSLRDGVAGLSRSRPGSTLAAPEVL

SEQ ID NO: 83696 - protein, 521 aa, Xanthomonas hortorum
  misc_feature (1)..(521): tr|V7Z8B5|V7Z8B5_9XANT Tryptophan halogenase OS=Xanthom onas hortorum pv. carotae str. M081 OX=863365 GN=XHC_41 37 PE=4 SV=1
MSDTHASDPRQRPVRRVVIAGGGTAGWMAAAALSKVLGKQLQITVVESDEIGTVGVGEATIPSLVTFHRLLEIDEAAFMAATQATIKLGIGFEHWRDVDRHYIHSFGHTGTDHWSAGFQHFWLKGRQRGVARDFGDYCLELRAAQEGRFAHLPNGGMNYAYHLDAGLYARFLRRFSEGFGVQRIEGRIGHVETDAHSGYLTALTLKNGTRVEGDLFLDCTGFAGLLIGKTLGVGADDWSHWLFADSALAVQTESVGAPVPYTRSRADLAGWMWRIPLQHRVGNGIVYSSRYMDQDSAAQVLQRNLTGRALTEPRALRFTPNQRHRVWEKNCVALGLASGFLEPLESTNIHLIQRGIIRLMQTFPQVINDSDIAEYNRQAAEEITHIRDFVILHYHVTDRRDTPFWRDCAAMEIPDTLRHRVELFRQSGRVFHQANELFAENSWVQVMLGQGITPKQHHPVADLMGDAELNHFLENIRTRVDAALVRLPAHADFLRRYCPAPPLPEPATRLPATPVLATPAA

SEQ ID NO: 83697 - protein, 506 aa, Sphingomonas sp.; identical to SEQ ID NO: 83479
  misc_feature (1)..(506): tr|A0A0Q4JVA3|A0A0Q4JVA3_9SPHN Tryptophan halogenase OS =Sphingomonas sp. Leaf29 OX=1736212 GN=ASE81_01295 PE=4 SV=1

SEQ ID NO: 83698 - protein, 519 aa, Colwellia sp.
  misc_feature (1)..(519): tr|A0A0S2JHN8|A0A0S2JHN8_9GAMM Tryptophan halogenase OS =Colwellia sp. MT41 OX=58049 GN=CMT41_12895 PE=4 SV=1
MSKVIKNIVIVGGGTAGWLTAGVIAAEHNSKSASGLQVTLIESPEVNTVGVGEGTWPTMRETLDKIGISETELFRECEASFKQGAKFSKWVTGAEDDYYYHPLVLPQGYTKTDLVFPWQKHRGEISFADAVSYQGHLCEQGRAPKLISTPEYAGIANYAYHLNAVKLAQLLQKHCIEKLGVKHVVDHVTAINSADNGDIASVATKEHGDIAGDLFIDCSGFSSILLGKHFNVPFISKKHILFNDTALAVQVPYPDENSAIASHTISTAQSSGWIWDIGLPSRRGVGYVYSSEHTNDKDAESELRAYIESSIGKAETDKLKVRKISFNPGHREKFWHKNCVAIGMASGFLEPLEASALVLVELAAAKISREMPATRETMDIVAKRYNKQFLYRWQRIIEFLKLHYILTKRTDSAYWRDNCNAETIPESLQELLTLWKHQPPGPQDFHHVEEVFPSSSWQYVLYGMGFETQENEVSRKFVNEEMAHQFFSENVQLTKKYLSALPSNRELIDKIKQYGLQKI

SEQ ID NO: 83699 - protein, 502 aa, Porticoccaceae bacterium
  misc_feature (1)..(502): tr|A0A2E8HTE9|A0A2E8HTE9_9GAMM Tryptophan halogenase OS =Porticoccaceae bacterium OX=2026782 GN=CMK37_05940 PE= 4 SV=1
MTKQNVKKVVIVGGGTAGWMTAASLTKLIGKDLDVTLVESDEIGTVGVGEATIPTFFALHQLLKIDEAEFLSEVQGTIKLGISFENWKDKGEDYIHAFGYTGKSCWAAGFQHFWLKGKELGFSDQYSSYSPELMAAKANKFGLLKQNPLNYAYHIDASLYAKFLRRIAEKSGVTRQEGKIIAVNQSSDGSIKSVDLESGITVRGDLFIDCSGFAGLLIDKTLGTEFEDWSHWLPCDSAVAVQTASVAPPIPYTRSIARDFGWQWRIPLQSRVGNGFVFSSQYLSDENAKKVLLDNVEGKILTEPRVIKFRTGQRVKQWNKNCVSLGLAAGFLEPLESTSIHLIQRGIIRLMQMFPLAGITDADRDEFNRQMSDEYYFIRDFIIMHYHVTERRDTEFWKHCGEMEIPDSLDHRLRLFKQSGRVFQGEGDVFGENSWTQVMLGQGLMPEQYHPIVNMMSDSELQGFLQSNRALVDHVINQLPSHQQFLSQYCPSKLVSISTEIP

SEQ ID NO: 83700 - protein, 894 aa, Nostoc sp.
  misc_feature (1)..(894): tr|A0A2L2N166|A0A2L2N166_9NOSO Tryptophan halogenase OS =Nostoc sp. 'Peltigera membranacea cyanobiont' N6 OX=12 61031 GN=NPM_0701 PE=4 SV=1
MADFIDPIPQVPRINPNAHLILNEADEVCSWVGGEAFVLEGIQPSIIRKLLALIDGVRPLERIYAELADSGDRNYLNEIVLALSKLDIIEEVVTEAAPQNHRWDLPIVSKQVGQKAIALLGNHQLLNTLAKTFAAAGFDNRRTFYLKNFASCQTPEFRALGQERILVNGTSKYLSSLAPTVYQDSLDSVSISGLSQLFKEFDFVVCALEGVPFQALLDVNKSALASGTPCLFVTASQETALIGPTVIRGATACFGCRVITLEGLPPVFEDIWPQLSTPIVAKADSGILSSVAQACLEEAISLLGPTLTPIRATSVLKITEEGDAYGGLCLRTIKRLLPSSECQECTPRLDEPLGVIERSAIAAAAEEIGRIWPNSPKAAIPPASDAYQTVGILGGGTAGYLAALAFRAFRPDIKVTLLESSAIPVIGVGEATTPELVKFLHSPRFLGLDIVDFYERVRPTWKLGIKFQWGLPDDYEFTFPFQRGRLLESLLYDSTLNNQSLGAMLMSADRAPIFDRGDGTPLSLLHQIRWAYHLDNRRFVRYLREEAIAAGIEHIDVKISDAQISADGETITHLITEDGRQLTYDLYIDCSGFRSLLLEQKLGSKFVSYQDTLSTDRAIAATVPHNGTVKPYTLAETMNNGWCWNIPFEDADHRGYVFSSAFCSDDQALEEMRAKNPGMGDPWVVKFRSGRHEDFWKGNVVAIGNSYAFVEPLESTAIHTIVLELELLLTNFPASKRDEGVKSVLNRKMSDRWDALRWFLGIHYKFNHRLSTPFWQAANRDTDISGAIERLALFTERAPLSYRNSLFYPLHPPDFFSDDHSYDTLLAGQQVPARFMEPVEDPATWQRQMAILKGLASTAMPQHEALSCLREKRQDLLYDFANRRDSWLHTWLPA

SEQ ID NO: 83701 - protein, 504 aa, Pseudoalteromonas piscicida
  misc_feature (1)..(504): tr|A0A2A5JRZ4|A0A2A5JRZ4_PSEO7 Tryptophan halogenase OS =Pseudoalteromonas piscicida OX=43662 GN=CEX98_08435 PE =4 SV=1
MKNQKIVILGGGTAGWMAATMMAKSWADKAIEITVVESSSIGIIGVGEGSTPQFKGFMDYLGISESEWMPACNATYKNGIRFIDWSTKPGFSSYFHPFPAQPDDYSAPAFFHNSFVRRKAIDVEGHPDHFFLATHLANANKSPIAAENFPFEINYGYHFDSTLLGELLARKAAKLNVKRIDATISDVRKQVNGDIAALITSEGLEITGDIFVDCSGFKSLLLQQALGVGFESFGDNLFNDAAVVLPTEQVDIISSETKSVARKYGWSWHIPLTNRIGNGYVYSQRYCDQDQAETELRAALGLLDSDVEARHIKMKVGQVKTHWQNNCIAIGLSQGFIEPLEATALHIVQETVQSFIECYQEAGFTDGKRDKHNHSINARYQAIRDYIVAHYRVNSRTDTKYWLDNANNNNLSRSLFQVLQTWVAGNNLSDELARQNIDQYYPSVSWHCLLAGYGIYPDQAQLKPGNARALQHDVGKIENYLSRCGLNFKTHRAELDALASTMNK

SEQ ID NO: 83702 - protein, 551 aa, Chloroflexi bacterium
  misc_feature (1)..(551): tr|A0A2E5NWC8|A0A2E5NWC8_9CHLR Tryptophan halogenase OS =Chloroflexi bacterium OX=2026724 GN=CL783_02260 PE=4 S V=1
MSLPNSSGRLDVIVIGGGPAGSTAATMLAKHGCSVLLLERSEFPRDHVGESLLPASIPVLEELGVIDEVQQAGFLPKWGATMIWGIDKEPWSWYFRETNEQYPHSYQVWRPQFDKILLDNSRKHGVDVREKHRVVHVVFEGSKAVGVKYVDDFGNSKIANAEYIVDASGQQNVLGSQLNTKKEDRFFRNLAVYGYYTGVPKLPEPAHNNIFIESYENGWCWNIPLHNGHNSIGIVVDGTSNQNSIQELGAETFYIGELSKASYISRLLETAELQSVPSVIKDWSYSCSPMVGDGYILVGDAACFIDPLFSSGVHLALMSGVLSSTYINTSKRDETLGLASRSVYEDLYMKEYGHFRELARLFYSSNRSVESYFWEARRVLDADISLSPRNAFIQAVAGQSARGYERVVLQHGDLPKNFLGSVNQIESEVQRRSEEFTQLSVDGGSSFLKSLSVIPKLSEGVVLERKPVLGEGIFNWGYVLNTKNRNNGLECSELVAVLISKMDGQSTLSELLDLFKELTPEGDWPNLRQALMNSLRLLYIDGVIERFSSEA

SEQ ID NO: 83703 - protein, 505 aa, Sphingopyxis alaskensis
  misc_feature (1)..(505): tr|Q1GV62|Q1GV62_SPHAL Tryptophan halogenase OS=Sphingo pyxis alaskensis (strain DSM 13593 / LMG 18877 / RB2256 ) OX=317655 GN=Sala_0740 PE=4 SV=1
MSDHAIRKIVIVGGGTAGWMAASAFSALLERSIEIILVESDEIGTVGVGEATIPPLIAFNSMLGINEDEFLSATRDTFKLGIEFVDWGAVGERYFHPFGPHGQDFRGVAFHQLYLRETARQPLPDIRHWSMSATAAELGRFARPGPTARPPLSQLAYAFHFDAGLYARFLRSYAEKNGVIRIEGKLVDASLNPESGHVRSVKLANGNDIAGDLFIDCSGFRGLLIEEQLGTGYEDWSHWLPCDRAVAVPCGLASPPEPFTRSTARSAGWQWRIPLQHRMGNGLVYSSAHLERRAAEDLLVANLEGKGLADPKHLSFTAGRRRKAWNANVVSLGLSSGFVEPLESTSIHFIQSGIAKLLALFPDRRFDPVERNEYNRQMADVFEDARDFIILHYKATRRDDSDFWNDCRTMDVPDGLAAKFGLWQSKGRLFREGRELFGTASWVAVLLGQGIRPAETDPAVNAIDPDIARDMLDKMRSSYRQMAEHMPPHWDFISRACLAPEAISG

SEQ ID NO: 83704 - protein, 504 aa, Hyphomonas sp.
  misc_feature (1)..(504): tr|A0A350ZUD7|A0A350ZUD7_9RHOB Tryptophan halogenase OS =Hyphomonas sp. OX=87 GN=DCY26_12205 PE=4 SV=1
  misc_feature (212)..(212): Xaa can be any naturally occurring amino acid
MQGHNAPIERIVILGGGSAGWMAAAALANGSQGSCKITLIESEEIGTIGVGEATIPPVRHFNARLGIDEATFLRETSGTFKLGIEFINWTREGHAYFHPFGQYGAEFDDLPFYQYWIREKVAGRAGPPDEFSMAWAVAKAGRFEHPSKDRRQIQSTFDYAYHFDAGLYAKYLRGYSEARGVSRVEGRVVSATQDPATGFIRSVALSDGYTFXGDLFIDCTGFFGFLIEKTLQTGYEDWSHWLPCNRAVAAPCKSDQPLHPYTKSTAKAAGWQWRIPLQHRVGNGYVYCSSFLSAEDAEAELRRSLDNEPLAEPRHIHFVTGRRKKFWNKNCVAIGLSAGFMEPLESTSLHLIQYGILRLLALFPDKQMSPLLIDEYNALTAAEYERIRDFLILHYKATERRSDEFWRYCATMEIPDRLQYKIDHFRSHGIIVSDERELFSNPSWIAVLIGQGIIPERAPALSGLRKDVPVAERMAQIRAAMTEAVAAMPGHRDFLNAYSRSDLQ

SEQ ID NO: 83705 - protein, 522 aa, Cellvibrionales bacterium
  misc_feature (1)..(522): tr|A0A1Z8YMW5|A0A1Z8YMW5_9GAMM Tryptophan halogenase OS =Cellvibrionales bacterium TMED79 OX=1986768 GN=CBC39_0 9690 PE=4 SV=1
MAQHDIKDIVIVGGGTAGWLTANIIAARFCPEKGRGLHVTLVESPNVPTVGVGEGTWPSMRTTLKDIGIAEADFIRSCDASLKQGTWFKDWITTGDTPYYHPFSLPEGFDSVNLAEHWLAGAAGNVPFAEAVTPQYAVCELGRAPKQIGIPNYAYTVNYGYHLDAGKFAALLTKNATEKLGVKHLHADVVSVNTDENGYITGVVTEQVGEICGDLFIDCSGFQSLLLGQHYGTEQVSVESILFNNAAVAVQVPYPDETTPIATTTHSTAQKNGWVWDIGLQHRRGVGHVFSKAFQSHEETLQVLDQYLKETGRSKGLEDLNPRLLSFDPGYRKKFWVKNCLGIGLSAGFIEPLEASALVLVELSATALANQMPRDLSDMTVIADRFNREFEARWSQIIDFLKLHYVLSKRDDSAYWTHNRAASSIPDTLQENLIVWANRAPWYHDDLRRDEMFPAASYQYVLYGMGFESRLTFDALRSSEDKQSMAKQLFAETQKKAQKYGQFLPPTRFLMNQIREQDFARI

SEQ ID NO: 83706 - protein, 491 aa, Massilia phosphatilytica
  misc_feature (1)..(491): tr|A0A2S8HBB1|A0A2S8HBB1_9BURK Tryptophan halogenase OS =Massilia phosphatilytica OX=2026176 GN=C5614_06825 PE= 4 SV=1
MTYERIVVLGGGTAGWMAATALATGMKGATVELVESEDIGTVGVGEATFPSIRNYHQILGIPEADFLRATNGTYKLGIRFRDWRVKGEDYYHTFGDFGMLNGPESLWGQYRRHPRANLPKFGEQCLPTVMAMNDRFCAPGKDAANFNYAYHFDAILYARFLRDVALKRGVRRTEGKVVDVARRPDGGVASLKLDDGRTVAADLFVDCSGFASLLLGRTLGEPFVDFSRWLPVDRAWAVPSARVGDNLTPYTRATALDAGWAWRIPLQDRTGNGHVFSTRFIDEDKAREQLLQQLDGEALAEPRMLRFTTGHRAKFWSHNVVGVGLATGFLEPLESTSIYLVQVGVGRLMTLLQRGGPVAPDLVDAYNTGLTRQFERIRDFILMHYCLTARRDTPFWQHMAAVELPETLAYKLHAWRQTGVLHQYDEEGFDGHSWLAIHAGMHNWPERSDPTLKLIPEEQSLEWVRERATQLAAAVATVPTHQEFLDRVLGR

SEQ ID NO: 83707 - protein, 535 aa, Chloroflexi bacterium
  misc_feature (1)..(535): tr|A0A2E5F3G6|A0A2E5F3G6_9CHLR Tryptophan halogenase OS =Chloroflexi bacterium OX=2026724 GN=CL792_05935 PE=4 S V=1
MENFDAIVIGGGPAGSTAATLIARQGKSVVLIEKEYFPRHHIGESLLPASLPILESLGVNEEIQSAGFLKKYGATMVWGTSPDPWSWYFAETNRKYTHSYQVVRSTFDHILLNNSIKSGVDVRQGHQVTKIHHREDYVSGVEIHTPDNKIIDLEAPITIDASGQSAILARNMNLLEWDDFFQNLAVYGYFENAEKLEAPDENNIFIEAHPEGWNWLIPLHNGTVSVGVVVDSNIASKQLHSSDLEEFLCHYISYSSHISNLLGNATLTSPPQAVRDWSYAANSFVGDGYILVGDAACFIDPLFSSGVHLAMNAGLLASAYVNTLFTDSTLALESRVIYTKLYKQQYEHFRELAKLFYSSNHTSDSYFWETRKLTPDAFDLPARTAFINAVAGQPAQGYERVVIEQGEAPSFIIDAIKNVEDTREQRKIKIDTSTEYFPDSIPKLAANVELKNEPILENNEFVRSYVIYKENRMVGYPVSNLIAASLPFINGKASIASISQEISNEYGIDANTILPIIINAFKIMYIDGIIETFIL

SEQ ID NO: 83708 - protein, 529 aa, Streptomyces sp.
  misc_feature (1)..(529): tr|A0A4Q6INX1|A0A4Q6INX1_9ACTN Tryptophan 7-halogenase OS=Streptomyces sp. F001 OX=1510026 GN=StrepF001_11575 PE=4 SV=1
MTHTALPGHGGTSAVRDVVIVGGGTAGWMTAAYLAAAFGDRVAVTLVESADVGTIGVGEATFSDIRHFFEFLGLAERDWMPACNATYKLAVRFENWREPGHHFYHPFEQLRSVKGFPLTDWWLRHPTTDRFDVDCFVMASLCDAGRSPRHLDGALLKQDFVEADELPSTIAEYQGAQFPYAYHFEAHLLAKYLTQYATSRGVRHIVDTVEDVGLDERGWVSHVQTAEHGRLEGGLFVDCTGFRALLLGKALGEPFVSYRDTLPNDSAVALQVPMDMDKDPIRPCTTATAQDAGWIWTIPLIRRIGTGYVYARDYLEPEEAERTLREFVGPAAADVPANHIRMRIGRSNRAWVNNCVAVGLSSGFVEPLESTGIFFIHYAIEQLVKYYPAADWDASLRDRYNSSMANVMDGVREFLVLHYRGAKRADNQYWRDTKTRTVPDALAERLELWRSKVPDADTVHPRYHGLPPYSYNCILLGTGGIEPRPSPALDLVDEKDALAEFQAIRDKARILVGSLPTQNEYFKKMREGL

SEQ ID NO: 83709 - protein, 499 aa, Sphingomonas desiccabilis
  misc_feature (1)..(499): tr|A0A4Q2IV00|A0A4Q2IV00_9SPHN Tryptophan 7-halogenase OS=Sphingomonas desiccabilis OX=429134 GN=EO081_09665 P E=4 SV=1
MEGRRMRRIVVAGGGTAGWMAAAALARTMGRAVEVTLVESDAIGTVGVGESTIPPLINFNRLLGVDEAEFMAATQATFKLGIQFENWKMPGHRYFHSFGYTGKDHWSAGFQHFWLYGRTKGHLASYDAYCIELLAALEGKFGHLPGDRANYAYQLDATLYARFLRRMAEGDGTRRVEGKIAQVELDGQTGNIAALVLESGTRVEGDLFLDCTGFRALLVEQTLHAGFDDWSHYLPCDSAIAIQTESIAPAVPYTRAIAHDAGWQWRIPLQHRTGNGLVFCSRYLERDAALERLLGNLEGPTRTEPNHLRFTTGVRRQQWVRNCVAIGLAGGFAEPLESTSIHLIQRAVLRLIRMLPLSEVSPRDVAEFNEQQLQDMTHVRDFLILHYKATERRDSAFWRHCADMAIPDSLAQKIELFRETGRVFRKNEELFAENSWVQVMMGQGIEPRAWHPIAEKLRDEELARLLTTLRENVARTVAAMPRHADYVASYCEAAREQAA

SEQ ID NO: 83710 - protein, 286 aa, Planctomycetes bacterium
  misc_feature (1)..(286): tr|A0A5C5ZYA3|A0A5C5ZYA3_9BACT Flavin-dependent tryptop han halogenase RebH OS=Planctomycetes bacterium Pla52n OX=2528005 GN=rebH_2 PE=4 SV=1
MTSYTGTFEPIDRIVIVGGGTAGWLSAAYLNQALKGSVHITVVESDAIGPIGVGEATIPSLRLTMGFLGFRDSDWMPEVGATYKSAIKFVNWCTCGPGGATHEYWHPFISRPEPSVLPYHCPFAMGIGQRVSLLHYALKHRLDGESRAIQQMLLPTQSLCEQHKAPINPLMPELSQEYAYHLDVTRLGEFLRQVATKRGVKRVVGHVTNVEHGGNGFITAVETKQENRLSADLFIDCTGFRGLLLNDALGEGIPIFGMQLLTRPTSQIHSIANSSSSRATFRFLTT

SEQ ID NO: 83711 - protein, 501 aa, Sphingomonas desiccabilis
  misc_feature (1)..(501): tr|A0A4Q2IQW7|A0A4Q2IQW7_9SPHN Tryptophan 7-halogenase OS=Sphingomonas desiccabilis OX=429134 GN=EO081_15120 P E=4 SV=1
MASIDVPQRRRVVIAGGGTSGWLAAAALAQQLGALLDITLVESEEIGTIGVGESTIPTARAFHRLIGLDEQRFMSETGATFKLGIAFENWARDGDRYIHAFGETGQSTWMGAFHHFWLQAREQGFGGDFGAYCLELQAADAGRFAIGDKVPELSYAYHLDAGRYARHLRGIAEQAGARRIEGMIERVEQQGDGGDITALVLRSGQRVEGDLFLDCTGFRALLIGQTLGSPFEDWGHWLPTDRAVAVQTRAVEPARPYTRAIAHGAGWRWRIPLQHRVGNGLVYDSRHLSDDEARDRLLGEVEGGTVTEPRLIRFRAGRRAEAWRGNCVALGLAGGFVEPLESTAIHLVMIAITRLLQLFPFAGDCAAAARRFNAQAAVELDGIRDFIILHYVLTERDDTQFWRDMRAIEIPQSLRERIASFRDGAIAYQDGADLFRVDSWAQVMIGQRLLPHQHHRMGEIMGAPRLRQVLADMKARVAQQVSLLPTHAAFLRDYCPAQEAG

SEQ ID NO: 83712 - protein, 522 aa, Porticoccaceae bacterium
  misc_feature (1)..(522): tr|A0A2D5YGJ7|A0A2D5YGJ7_9GAMM Tryptophan halogenase OS =Porticoccaceae bacterium OX=2026782 GN=CMK23_08665 PE= 4 SV=1
MNDPQITDLVIVGGGSAGWLTAGIIAAEHLKTEQSSSRVKVTLVEAPNINTIGVGEGTWPSMRSTLKRIGLSETDFIRDCDVSLKQGTLFSGWTDGKDIYTHPFTVPHAYSQHNLSRDWQNKFSDLPFAEAVCPQSKLMLKNQAPKKISTPEYSFNVNYGYHLDAGKFAEKLRSHCTLELGVVHKKAEVIQVNSAENGDIRSLRLDTGESLTGDLFIDCSGSRCLLLGEHYGIPFKSIRDILFNDSAIASQVPYLSAGDSIASSTISTAQKHGWIWDIGLPSRRGIGHVYSSRYTDADNAEVTLFKHIEKLVGSKIAKKVKMRRISFSPGHRQKFWHHNCVAIGMAAGFIEPLEASALVLVELSASMIAEQLPQNRKVMDIVSKRFNEKFLYRWDTIIDFLKLHYVLTKREDSDYWRDNANKNSIPESLSEKVELWRWQGPYHKDTMHVDEMFPSASYQYILYGMGFKTNIGLSTKQSEVQTSKVAQELFDENLKYTNLLLNSMPSNRDFIEKVHQHGLQKI

SEQ ID NO: 83713 - protein, 322 aa, Nitrosomonas marina
  misc_feature (1)..(322): tr|A0A1I0B634|A0A1I0B634_9PROT Tryptophan halogenase OS =Nitrosomonas marina OX=917 GN=SAMN05216326_10980 PE=4 SV=1
MPLLQQLGISENFVARCDLVALGTRSIWGSEQINEYPFWYSSYGHGWHIDRASFDDWLVRQAENAGATTLFGVTVSGTPEYHHGWHLTANHATAPAFTIQSSLVVDASGSSSSFCRRMGIRADKLDQLTGSFCFFQAEANDTVHGVDSFTLVESTEIGWWYSAPLPQGLWVAALMTDSDLARDENVFDEAGWSKALAHTRLTRTRFDNKKPSMPLRVKPARSQRQQQFCGQGWYAVGDAASVFDPLSSLGIFKALRHGLLVSYAIRDELQDKPNATQKYQWLLESEFRRYQHMHQQYYQLEKRFMQAPFWLRRQRQEFARHA

SEQ ID NO: 83714 - protein, 240 aa, Chitinophagaceae bacterium
  misc_feature (1)..(240): tr|A0A4Q3SLD4|A0A4Q3SLD4_9BACT Tryptophan 7-halogenase (Fragment) OS=Chitinophagaceae bacterium OX=1869212 GN= EOO07_36480 PE=4 SV=1
MDTPIKKVVIAGGGTAGWMAAATISHHLGSVLDIRLIESEEIGTVGVGEATVPPIQSFHKLLNIDEQEFLRATQGTFKLGINFENWARKGDQYIHSFGITGKVFWMADWVQFWTKARGMGLQNDYGDFCLELQAAKMGKFAITENPRINYAYHFNASLYAKFLRKYSEARGVKRTEGKIVEVTTHSDNGFIKSITLASGEVVEGDLFIDCTGFRGLLIEQTLHTGYEDWSQWLLNDSAIA

SEQ ID NO: 83715 - protein, 526 aa, Sphingomonas sp.
  misc_feature (1)..(526): tr|A0A0Q4JVV9|A0A0Q4JVV9_9SPHN Tryptophan halogenase OS =Sphingomonas sp. Leaf32 OX=1736214 GN=ASE83_12755 PE=4 SV=1
MKDGNIRSITIVGGGTAGWMAAAAFSRVLSGSGMAIRVVESEAIGTVGVGEATIPHIQYFNRLLGIDEDEFVRRTCATFKLGIEFVDWGAIGERYIHPFGSYGQEMEGLHFHHFWYRQAQMGGALPLDRFSIGVGAARAGKFQRPDHSRPGSPLGGISYAFQFDAALYARYLRERAEAAGVERIEGRIVDVALNGANGHVDHVVLDDGRSVDGDLFIDCSGFRGLLIEGALQAGYDDWRAWLPCDRAVARPCARVADPTPYTRATATSVGWRWRIPLQSRTGNGHVYCSDYADDATALAMLDAGLDGEALAGPNFLRFTAGVRRKAWDRNVVALGLASGFLEPLESTSIHLIQSGIARLLTNFPDRSFNQPDIDYYNRRTRAEYEQIRDFLILHYKATVRDDSPFWRRCRDMAIPDSLAERIAIFRENARLYRHDNELFSETSWLAVLHGQNIAPKRYHPIADLLSDAELDHRMTRIAAAMDSGVRAMPDHMAFIDRFGRSPDDGTLRQGGSSMAGLVDDRITQKQ

SEQ ID NO: 83716 - protein, 505 aa, Sphingomonas sp.
  misc_feature (1)..(505): tr|A0A0Q4K864|A0A0Q4K864_9SPHN Tryptophan halogenase OS =Sphingomonas sp. Leaf32 OX=1736214 GN=ASE83_17620 PE=4 SV=1
MTPLKRILIAGGGSAGWMTAAMFARLFKGRYAITLVESDAIGTVGVGEATIPAIKKFNDLLGLDEDEFLRRTQGSFKLGIRFDDWSRIGSSYVHGFGVIGRDLEWLRCHQYWTKLHREGRGGPLDDYSINTVAAVADRFMRPRADMPDSPIGQIAYAFHFDAGLYAAYLADYARTRGVERREGEIVAVGQDADSGFLRSVTLADGSVIEADLFVDCSGFRGLLIEQALAAGYEAWSHWLPCDRAVAVPSARAADFPPYTRSTARPAGWQWRIPLQHRTGNGHVYASRHMDDATAEALLLDHLEEPAIGTPRRLSFVPGKRRRAWVRNCVAIGLSAGFLEPLESTGLHLIQSAILRLVRLMPDAAFDPATIAEYNRQTDFEMERIRDFIILHYKATQRDDTPFWRHVRTMDVPDTLARKMALFAANGRIFREDDELFAEESWIQVLIGQGIVPMAPDPLVDVTPAAEIDRHLADVRGVIAKCVARMPAHDAFVAHHCAAPPPDAAR

SEQ ID NO: 83717 - protein, 516 aa, Brevundimonas sp.
  misc_feature (1)..(516): tr|A0A0P0CUH2|A0A0P0CUH2_9CAUL Tryptophan halogenase OS =Brevundimonas sp. DS20 OX=1532555 GN=JL11_06740 PE=4 S V=1
MDQPRRPLKKICIVGGGTAGWIAAALMAEHFKGRMAQVELVESDDIGTIGVGESTVPPFLEMLKKLGINEQDFIQQTQASFKLGIQFDDWTEKGESYFHPFGAIGVPVDVSDFYPVWLKARMNGYQRPLMDFASAARMAAHERFMLPFKAQRSPIGGASYAVHVDAKRVARYLRDFAEARGVKRTEGIVEDVMTRPDGFVTGVKLKSGQTVEADFFIDCTGFRALLIGKTLGVGYTDWSEWLMCDRAIAVQTENVGAPKPYTLAQAQDCGWRWRIPLQHRTGNGHVFCSRYMSDDEATARLLAQVEGRPVVNPMVVPFKTGVREKIWDRNVLSLGLASGFIEPLESTAIHLIYRGMDFFFRLMPDLDCDPKLAAEYNRRMTVDYEEIRDFIILHYALTRRDDTPFWRACRDMALPEGLQHKLDVFRANGSLVEALDPLFRNVSWYAVMDGMGVTPRSYPPLVDRIDFAGLTAEMDRAADILNAFVKDLPSHQQFLQDNCPAPPVDLAPVAPAAVPA

SEQ ID NO: 83718 - protein, 425 aa, Planctomycetes bacterium
  misc_feature (1)..(425): tr|A0A5C9BAK6|A0A5C9BAK6_9BACT Tryptophan halogenase OS =Planctomycetes bacterium OX=2026780 GN=FD138_3373 PE=4 SV=1
MSVTETDVIVIGGGPAGATASTLIAQKGYRVQLFEREKFPRFHIGESLIPETYWVLERLNMLPKMRASQFVHKHSVQFVNAAGKLSAPFYFWDNKPHECSQTWQVVRSEFDLMMLNNAREHGVEAHEGVRVLDVIFEGDRAVGVKIQEADGTQREVRAKVVVDASGQSGLLQNKFKLRVWDPILNKGAIWTYWEGAYRDTGRDEGATIVIQTPNKQGWFWNIPLHDNRLSLGVVGPFDYLFKGRESHEQTYHEEVEKCPDVQRRIANAKRITGYFATKDYSYRATQGAGDGWVTIGDAFGFLDPLYSSGVLLALKSGEMAADAIVEGLPLGDTSAAQLGKWTPLLNQGIDRMRRLVCEYYDGFSFGNFVKNYPRPADRRLVHRQGRCRLGADGVAVLVREDRSEELGFGNTSGDCGDEAQRTLPA

SEQ ID NO: 83719 - protein, 497 aa, Sphingomonas sp.; identical to SEQ ID NO: 83460
  misc_feature (1)..(497): tr|A0A0Q4KH58|A0A0Q4KH58_9SPHN Tryptophan halogenase OS =Sphingomonas sp. Leaf32 OX=1736214 GN=ASE83_16475 PE=4 SV=1

SEQ ID NO: 83720 - protein, 508 aa, Sphingomonas sp.; identical to SEQ ID NO: 83448
  misc_feature (1)..(508): tr|A0A0Q4JT65|A0A0Q4JT65_9SPHN Tryptophan halogenase OS =Sphingomonas sp. Leaf32 OX=1736214 GN=ASE83_14645 PE=4 SV=1

SEQ ID NO: 83721 - protein, 562 aa, Alteromonas sp.
  misc_feature (1)..(562): tr|A0A433F4K0|A0A433F4K0_9ALTE Tryptophan halogenase OS =Alteromonas sp. KS69 OX=2109917 GN=C7Y69_01150 PE=4 SV =1
MSNQPIKHVVIVGGGTAGWLCAGVLAARLGKRISNRTNTNSNNPNHAQHIREESAIHITLVESPNVPSIGVGEGSWPSLRDTLQEIGIKEADFLTCCHASFKQGSTFAGWRNGHQGDKYQHPFTTPTGYTELDIHRCWQQFFSNESFEQSFCLQPDICDAGLAPKQSTTPEYAYVLNYGYHFDASALATLLTNHCKTSLGVKHTQAHIANVVTQDNGDIESLVTENGDTIKGDLFIDCSGQQGLLIDKHYHVPWHSVSSVLLNNRAVAVQVPYGSSDLSASADTIASTTIATAQTCGWTWDIGLQHRRGVGLVYASEYASEEDAESILREHLAKQLPKTEIENLNYRHLQFDPGYRKQFWVNNCIGMGMSSGFIEPLEASAIAMVELGIRMLCDQFPQNRKHMSHVATRYNQRFTYRWERVIDFLKLHYVLSERTEPYWKAQRSENSIPDSLNALLDLWQYQAPSRYDLIENEEIFPSASYQYILYGMGFHTNGRQLDKNSDMVNKAFAVKQSLQQGKRQLLAGLPTNRDLLTAISHCVEKETTTNDNDKKEGPRHDVIGFR

SEQ ID NO: 83722 - protein, 322 aa, Nitrosomonas marina
  misc_feature (1)..(322): tr|A0A1H8F759|A0A1H8F759_9PROT Tryptophan halogenase OS =Nitrosomonas marina OX=917 GN=SAMN05216325_11216 PE=4 SV=1
MPLLQQLGISENFLARGDLVALGTRSIWGSEQINEYPFWYSSYGHGWHIDRASFDDWLVRQAENAGATALFGVTVSGTPKYRHGWHLTANHATASAFTIQSSLVVDASGSSSSFSRRMGISTDKLDQLTGSFCFFQVQANDTVHGVDSFTLVESSDIGWWYSAPLPQGLWVAALMTDSDLARDVNVFDETGWFKALAHTRLTRTRFDIKKPLTPLRVKPARSQRQQQFCGRGWYAVGDAASVFDPLSSLGIFKALRHGLLVSYAIRDELQDKPNAAQKFQWLLESEFRHYLHMHRQYYQLEKRFMQAPFWLRRQRPAFARNV

SEQ ID NO: 83723 - protein, 205 aa, Comamonadaceae bacterium
  misc_feature (1)..(205): tr|A0A4Q3PTP0|A0A4Q3PTP0_9BURK Tryptophan halogenase (F ragment) OS=Comamonadaceae bacterium OX=1871071 GN=EOO2 2_28200 PE=4 SV=1
MNHALRSIVIVGGGTAGWMTAAALSKVMGQSDCTITLVESEQIGTVGVGEATIPQILTFNRLLGIDEDDFVRSTQATFKLGIRFDDWARVGDSYLHPFGVFGVPIDAIPFHHYFLKLRGLGRLERIDEFSLACLAAPQNRFTRPLDIPNSPLAQIAYAFQFDASLYARFLRSYAEARRVQRIEGRITHVHQHAESGFVESVELDN

SEQ ID NO: 83724 - protein, 516 aa, Verrucomicrobiales bacterium
  misc_feature (1)..(516): tr|A0A2E0QVV6|A0A2E0QVV6_9BACT Uncharacterized protein OS=Verrucomicrobiales bacterium OX=2026801 GN=CMO55_141 50 PE=4 SV=1
MSEKESGKRKGIWLNNSVIVVGGGSAGFLAALTVKSQMPRFNVTVVHSSDIPIIGVGEGTTVSMPTFLHGHIGVDPKRFHREVKPTYKRGIRFLWGPREQFFYTFTFQLDRFLEGMPRPNGFYAFEDFEYGDLSGALAAHEKGFVKGANGFPRVGIDLAYHVENVPFVDFLSRYAQEIGIDVRDEKILSVEHDESGVTGLMLASGETITGDLYVDCSGFESLLLGKTLGEPLESFCSSLFCDRALIGGWDRGLDEPIPAYTTAETMDSGWAWQIEHDDLVNRGYVYCSDFISDEEADAEFRRKNPKLGETRVVNFASGARRRTWVKNVVALGNAAGFVEPLEATALALICEHAAKLVHCLGDSYFEVEEKSKEYYNQFCHRGWEGVRRFLALHYKFNTRLDTDFWKTCQNETDLAGAKEIVEYYRECGPSVLWGEAVVGLNDPFSWEGYLIMMVGQKVPFRRHSEPSAAEMEVWRQHLSDISIAAKGGMTMREGLDMIRSDEWRWKPNFYSGASRW

SEQ ID NO: 83725 - protein, 527 aa, Limimonas halophila
  misc_feature (1)..(527): tr|A0A1G7PB32|A0A1G7PB32_9PROT Tryptophan halogenase OS =Limimonas halophila OX=1082479 GN=SAMN05216241_102480 PE=4 SV=1
MTEPIRDITIVGGGTAGWLAAAMLNRYLNRNASAPVRVSLIESGKLPPIGVGEATVPPMRQVLHDLGVDENEFFKRCNATIKLGVRFTNWDVDDEGRPVEYLNSLTEGPVVNGHNPGAPFMAFAPESWDFPRTVLPTDHLIDQGRAPRGIGDPQYDAKLGYAYHFEAGLFAEFMRDHATGQGVHHIIDDVEHVEMGSDGNVAALHLSENGRRPVQLVIDCTGFKGLIINKAMGEPFEPYSDTMMNDRAVVGQIPRGAEDTIYPYTGAWALSSGWVWRIPLYSRISSGYVFSSAHLSDDEARAELLNHWGVDEETFQPRVVPMRVGKTRRTWVNNCVSIGLASGFIEPLESTGIYMTDRAIRFLIDYFPDQGYDQRLQDRYNELMGQVFDEVRDFIVLHYYQSNRDDTPYWRAARHETAVPQSLLDNLEVWKRAMPSPLDLPEHRLFSAWTYQHVLFGKGFYKGANVAESRHVSRADWEHFRQIVENAKTQLAQNLPDQRAFLASLRGSNTSAGEPDAARRVSADVTT

SEQ ID NO: 83726 - protein, 458 aa, Sphingomonas sp.; identical to SEQ ID NO: 83675
  misc_feature (1)..(458): tr|A0A0Q4KD50|A0A0Q4KD50_9SPHN Tryptophan halogenase (F ragment) OS=Sphingomonas sp. Leaf32 OX=1736214 GN=ASE83 _17270 PE=4 SV=1

SEQ ID NO: 83727 - protein, 513 aa, Alteromonas sp.
  misc_feature (1)..(513): tr|A0A433EXG4|A0A433EXG4_9ALTE Tryptophan halogenase OS =Alteromonas sp. KS69 OX=2109917 GN=C7Y69_09765 PE=4 SV =1
MTPVNSVVIVGGGTAGWLTAGLLAATHSKQGSTGARLSVKVIESDSIHPIGVGEGTWPTMRSTLAKIGIEEAALVQQASATFKQASKFVHWHTEGQRTGYYHPFSAPQGSASVDITPYWLHNDSLNEYASDVCFQPSLCEQGLAPKLKADSKQSFSANYGYHLDAGKFINVIREHCKKVLGVEHIIDDVTDVATDDAGIKHVVTKNNDHIRGDIFVDCTGFSARLIEKALDVPMEDASSVLFSDSALVHQIAYSDEHQPIACHTLSTAQEAGWIWDIGLQNRRGTGYVYSSEFQSDDEATQTFMAYLKSINPNEELPSTFRKINYKTGYRKRFWEKNCVAIGLSSGFLEPLEASSLMLIEQSAIQLAEQLPAYTQVMPHVASRFNRALTNKWQSTIEFLKLHYVLSNRNEDFWLANRSPQSIPQRLASLLEEWQYRPILDSDFTDTDEVFSAQSYRYILYGMSHKTNLSQYVRSMSKYEGADKQLQLNKALIAQLKARLPSHRGLIDTMLNKH

SEQ ID NO: 83728 - protein, 511 aa, Sphingomonas sp.
  misc_feature (1)..(511): tr|A0A0Q4K8P3|A0A0Q4K8P3_9SPHN Tryptophan halogenase OS =Sphingomonas sp. Leaf32 OX=1736214 GN=ASE83_02950 PE=4 SV=1
MTQRVRRIVVVGGGTAGWLAACRIAAAADPNADTPLSVTLVESPDVATIGVGEGTWPTMRGTLARIGIDEATFLRAADASFKQGSRFDGWRSGAPDDRYYHPFTAPADLPAADLVRAWQDGRFAEQVCAQPAVCAEDLAPRQPAMPPYAGALNYGYHLDAGKFAALLRATACNRLGVTHVRDHVTAVEAAENGDIAAVVTRQAGRIAGDLFLDCTGHAALLIGGHYGVETIDRTPILFNDRALAVQVPVASDSPIASQTNATAHDAGWIWDIGLPSRRGIGCVYASDFLSDDAAAAALRDYLSRTAPGVDPDSLSFRQLRFRSAHRERFWQGNCVAIGLSAGFLEPLEASAIVLIELSIDALLDGFPAERGAMPLLARRFNALFRYRWDRIVDFLKVHYVLSERDTPYWRAHRDPGSWTGSLHDQLELWRTQPPSPADFAQANEIFPAASHQYVLYGMGMTPPPPGPLRADPGAAAALHQVRQRARTLGASLPTNRAYLRALAPPAGIAHV

SEQ ID NO: 83729 - protein, 503 aa, Pseudoalteromonas espejiana
  misc_feature (1)..(503): tr|A0A510XSJ8|A0A510XSJ8_9GAMM Tryptophan halogenase OS =Pseudoalteromonas espejiana OX=28107 GN=PES01_08510 PE =4 SV=1
MSDSRIKSIVIVGGGSAGWMSASALAKVIGCDNYSITLVESSEIGTVSVGEATIPQIQLFNTILDIDESEFIRSTNATFKLGIEFIDWKEKGHRYFHPFGNYGTNMEALPFHHFWLKMQGDPKFKKTSNLSNYSLASVGAYANKFMHPSTQQNTPLAGINYAYHFDATLYAKFLSKYAINKGVKRIEGQVDEVKTNPVTGMIESLVLNDNTVLSGDLFIDCSGFKGLLIEQALKTGYEDWTHLLPCNKAVAAPCLSTKSLNPYTQSTAQSVGWTWRIPLQNRVGNGFVYSSEFMDDDKAQSLLLNTLESSPLNDINGLQWVTGMRKKSWNKNCIAIGLSAGFVEPLESTGLHLIQSAIAKLMTLFPSKAFTQCDIDLFNQQTETEYHRIRDFIILHYKLTNRDDSEFWRYCKNIEMPDSLKQKIDMFSENGRIFRHDNELFNETSWLAVMHGQGIKPKSYHPLVDRLSHDEIERRLKNIELVISRSANVMPDHQAYILKNYTP

SEQ ID NO: 83730 - protein, 495 aa, Pseudoalteromonas espejiana
  misc_feature (1)..(495): tr|A0A510XS85|A0A510XS85_9GAMM Tryptophan halogenase OS =Pseudoalteromonas espejiana OX=28107 GN=PES01_07390 PE =4 SV=1
MTKTNAVKNVVIAGGGTAGWMAAAALTKLIGKNIHVTLVESDDIGTVGVGEATIPPIRTFHKLLGINEQSFMKATQASFKLGISFENWGDENTRYIHSFGVTGKECWAGEFHHFWLQGKNLGINNPFGDYCYELQAAKAGKFAFNQQNPINYAYHMDATRYAQFLRDFSEPLGVKRVEGKIQKVVKNAKTGHIESLLLNSGEQINGDFFIDCTGFRGLLIEQALHTGYEDWSHLLPCNSAIAVQTKSTSDTVLPLTRSIAHKSGWQWRIPLQNRVGNGLVYCSQYMDDEQAKALLLNNIEGEAVTEPRVIKFKTGRRLKGWNKNCLALGLASGFVEPLESTSIHLIMSGIIRFMRLFPFNGITNPAIDEYNKQLKSEIENIRDFIVLHYKVTNRYDSEFWQHCSAMEVPKTLKHKIDLFKQTGRVFLDDGDIFRVDSWVQVMLGQGIGPEQHHLIASMMNNEELTRFLHGIKQQIEQRVSQLPPHHEFLKQYCPA

SEQ ID NO: 83731 - protein, 511 aa, Planctomycetes bacterium
  misc_feature (1)..(511): tr|A0A3L7RIT6|A0A3L7RIT6_9BACT Tryptophan 7-halogenase OS=Planctomycetes bacterium OX=2026780 GN=DWI00_16430 P E=4 SV=1
MSSKVAESNKRIVIVGGGTSGWMTAALMSQVMRSSGQSITVIEPPGPRGIGVGEASVISMVQLLKKLGADEVEMMQRCEATYKLGIRFCDWYEKGHDNWHPFGVCGARIDGRDLFPFWLADSKRFGTPEPYEAYSLQWAASNAGKAPHAFHCPSPIAQTQSYAFHFNAEALAGWLRDIALRNGVKEIVGAVQDAEFADSGDVTAVTLFAGERVEGDFFVDCSGFQSVLMHKALGDPFESWNSQLLCDRAVAFKISAEGSVPPYTKSHALSAGWAWHIPLASHLGLGYVYSSQFISDEAAWEELRQHAKLNPGAGQEPRFLKMRVGRQQSFWKQNVVAIGLSAGFLEPLESSGIHLSQVGIELLLKNFPSGRNVDSLRDYYNQRMALIYDEVRDFVQMHYRLSRRTDSAFWIAAREAEISGDLKRRLNLYDEVGMLDNLQAEAFTETSYFHLLTGNKRLPRRAPALAASADPHMVHSILASIKAQNDQALSDLPPHEELLGRIHRIHLARAS

SEQ ID NO: 83732 - protein, 503 aa, Planctomycetes bacterium
  misc_feature (1)..(503): tr|A0A3A0D780|A0A3A0D780_9BACT Uncharacterized protein OS=Planctomycetes bacterium OX=2026780 GN=DCC68_24725 P E=4 SV=1
MPFALSRTVVLGSGTAGCLSALKLRRDFPTMTVELVRSKKVPIIGVGESTTAGVPRFLHNQLGLDRGEFWRRVRPSWKLGIRFDWGDPDVSHFHYPFDVSLDGQHRALARSNAFYCLGDLTDSSLFRTLMDRGKSPCFLDLAAGHVVDERGGYHIENKAFVAYLESKIREPGVEIIDGDVADVRRRENGDIAELCLEDGRCIAGDFFVDCSGFASILLDKVLGEPFVSYGDRLFCDRAVIGRWTRTTEPIYPYTTCETMDHGWCWRIEFADEIARGYVFASAFCSDDEARAEFKRTNPYVEDERRIIRFRSGRHENFWVKNVAAIGNAAAFVEPLESTAIHNMAEQLRFLAWALRDSDGRPTDAMRRLENRRYRQLWDDTRDFITIHYKFNRWRDTPFWRHCRETIDLGGAAEAVAYYQEAGPSILVKSLLSPGSPFGYEGYYNLLLGQRVPTRYRGECSEEDRQTWNALRATNRERAAAALPMPDALDLIHSENWTWPEQGW

SEQ ID NO: 83733 - protein, 506 aa, Massilia violaceinigra
  misc_feature (1)..(506): tr|A0A2D2DNK1|A0A2D2DNK1_9BURK Tryptophan halogenase OS =Massilia violaceinigra OX=2045208 GN=CR152_20130 PE=4 SV=1
MTDQRIKQIVIVGGGTAGWMSAAALSQLLPVGHHYRLIESDQISTIGVGEATIPSIRNFNLHLGIDENDFIRATQGTFKLGIEFVNWGQQGSNYIHGFGSVGRDQPTANFFHYWLKMHQAGQADSLEPYSINTMAARLGKFSRGRPDLPNSPLADLSYAFHFDAGLYARYLRSYSEARGVQRTEGRIVETVLHPDGSIAALMMENGERIAGDFFIDCSGMVGLLIEQALHTGYEDWSHWLPCDRAIAVPCESHGPMAALTRSTAHTAGWQWRIPLQHRTGNGHVFSSKFMSADEAQAILMNNLDGQPLAEPRLLKFTTGKRKRAWNKNCVAIGLSGGFMEPLESTSIHMVKTALMRLISFFPDRGFDQVDIDTFNRLCDKEYEQIRDFLILHYKVSTRDDSPFWRYCRDMEVPASLRRRLDLYASHGRILRENEELFPEDSWLQVMHGQGLRARGYNPVVDQRAPDEIADFLQGTQAVIRKCVDAMTSHEAFIKANCQAAALRRAA

SEQ ID NO: 83734 - protein, 508 aa, Pseudoalteromonas espejiana
  misc_feature (1)..(508): tr|A0A510XWQ0|A0A510XWQ0_9GAMM Tryptophan halogenase OS =Pseudoalteromonas espejiana OX=28107 GN=PES01_23190 PE =4 SV=1
MNKAVKTIAVIGGGTAGWLSAAIIASYHQGKNGDGLKVMLVESSDIPTIGVGEGTWPTMKNTLQQIGLREVDVFKACNATFKQGGKFVNWTHGNKDFYYHPFTVPLGYGRIDLAPYLNNVEDFAQQTNFQHDICEASLAPRGIAQGEYQGNCNYAYHLDAGAFAELLKQHCKSKLGIEHVIGTVEQVKLDDTGAIDSLTLKEQTRTINADLYIDCTGFSSLLLGQTLNVPFKKMDHVLFNDSALAMQVPYDESDDSLASHTIATAQNAGWIWDIGLTHRRGVGHVYSSKFLSDEEAEQNLRNYLGDAAKGLTARKISFESGYREKLWHKNCVAVGMSAGFVEPLEATAIMLVEISSRFVAEHMPADTQVMPIVAKRFNEQMDYRWQRIIDFLKLHYMLTKRPEPYWQAHVQPESIPQSLQEDLLLWGTRGPLIQDFHGALELFPAASYQYVLYGMGFKPDFTKQAYLYSQDAQANQIIERNSQLTQQMLQTLPPHRAYIEQWLAANPV

SEQ ID NO: 83735 - protein, 528 aa, Alteromonas sp.
  misc_feature (1)..(528): tr|A0A433EZ08|A0A433EZ08_9ALTE Tryptophan halogenase OS =Alteromonas sp. KS69 OX=2109917 GN=C7Y69_07880 PE=4 SV =1
MAIANKTPASQQATDQQTTDHHEAKQAPVKRVVVAGGGTAGWLTAALLKKVIGDAVNITLVESEAIGTVGVGEATIPPIRLVNQVLGIDEATFLRDTKATIKLAIRFENWKQQGQQYYHTFGAPGKSMAFCHFHHFWLKARQQGLKHDLWEYDLNYLAAEAGKFARINAKDPVLELPFAYHFDASLYAKYLRKLSEGLGVKRVEGKISYVSRHKHSGNVKALHLENGHAIEGDLFIDCTGFRGLLINETLGAGYDDWSHLLPCDSAIAVPSERHENTAPFTRSIAHSAGWQWRIPLQHRNGNGHVYSSRYISDSQAHDTLMANLDTKPLGDPKLIKFTTGRRRQQWCKNVVAVGLSSGFLEPLESTSIHLIQSAIVRLIKLFPHQGISDSAVEEYNAQSKVEFEQIRDFLVLHYCLNEREDSDFWRDMRHLTLPDSLTHKMALFKQNGNLVREQNDLFLESSWLQVMYGQGLVPEDYHGLANSLSDEKTQAMLSSLYNIKREPIASLPTHDAYIQSMIDSANKTSVSF

SEQ ID NO: 83736 - protein, 505 aa, Sphingomonas sp.; identical to SEQ ID NO: 83478
  misc_feature (1)..(505): tr|A0A0Q4JT80|A0A0Q4JT80_9SPHN Tryptophan halogenase OS =Sphingomonas sp. Leaf32 OX=1736214 GN=ASE83_14755 PE=4 SV=1

SEQ ID NO: 83737 - protein, 506 aa, Sphingomonas sp.; identical to SEQ ID NO: 83479
  misc_feature (1)..(506): tr|A0A0Q4KPR3|A0A0Q4KPR3_9SPHN Tryptophan halogenase OS =Sphingomonas sp. Leaf32 OX=1736214 GN=ASE83_04175 PE=4 SV=1

SEQ ID NO: 83738 - protein, 506 aa, Luteibacter pinisoli
  misc_feature (1)..(506): tr|A0A4Y5Z7F0|A0A4Y5Z7F0_9GAMM Tryptophan 7-halogenase OS=Luteibacter pinisoli OX=2589080 GN=FIV34_20610 PE=4 SV=1
MSNGTTKIVIVGGGTAGWMAASAFSRTLGQHASIRLVESEEIGIVGVGEATVPHIKAFNQLLGLNEAQFVARTQGTFKLGIEFRDWRRKGDTYVHGFGSMGHDIGLVPFHQYWIKGRLRGEAADLLDYSVNTVAAMRGKFMPAPVDVPPSNPLGSIAYAYHFDAALYARFLRQFAEERGVRRTEGKVREVETNPENGYVTAVRLENGDRVEGDLFIDCTGFRGLLIEGTCQSGYEDWSHWLPCDRAMAVPCAKVGPPTPYTRSTAREAGWQWRIPLQHRTGNGYVYSSQYLSDDEAAATVLGNLDGVALADPKPLRFTTGIRRKAWMRNVVALGLSSGFMEPLESTSIHMIQSGISRLLQLFPATGDIDPVLVDRYNEQSRFEAERIRDFLILHYKATERDDSAFWNHCRTMPIPESLQANIDLFRHSGRFFRNAEEMFGLVSWVQVMVGQGIMPTGYHPLVDQMPDADLVKFLASVREVVSKNVDLMPAHEQFIARECPAPQVAA

SEQ ID NO: 83739 - protein, 509 aa, Stenotrophomonas rhizophila
  misc_feature (1)..(509): tr|A0A023Y3Q4|A0A023Y3Q4_9GAMM Tryptophan halogenase OS =Stenotrophomonas rhizophila OX=216778 GN=DX03_09920 PE =4 SV=1
MNVADTTQARIRKVVIAGGGTAGWLAGCALSHQFRDQLDITLVESEQIGTVGVGESTVPPIRTFHRFLQIDEQEFLRAVAGTFKLSISFENWRRPGDRFIHPFGTIGQGTWATPFHHFWLDSLRRGMPSDLGDFCLESVASRGDQFSLETQPALNYAYHFDAGLYARFLRRKAEGHGLRRVEGKIREVRQHAHDGSVAALVLEDGQVIEGDLFIDCTGFRGLLTEQTLHTGYEDWHEWLPSDRAVAVQTEAVAPPVPYTRAIAHEAGWRWHIALQHRVGCGLVFSSRHMSDDEAQAKLLRDVDGPPLRDPWLVPFRSGRRLKAWNKNVVALGLASGFIEPLESTSIHLTISAVVRLIQLFPIDGISPALVALYNDVSRQEMEHVRDFIILHYHATQRDEPMWKACREMALPESLAVRLRAWRERAHAWQDPGELFRVDSWTSVLMGQGIQPGPPHPLAAAINDADLRTLLARIRQPVQQAVATMPSQAAFIERYCKAAADVWPRRSAVA

SEQ ID NO: 83740 - protein, 498 aa, Verrucomicrobiales bacterium
  misc_feature (1)..(498): tr|A0A3C1HAP8|A0A3C1HAP8_9BACT Uncharacterized protein OS=Verrucomicrobiales bacterium OX=2026801 GN=DCM86_084 75 PE=4 SV=1
MSTSPHPIRSVIVLGGGSAGFMAALTLKRKLPDLRVTVLRSPDIGVIGVGEGTTPAFSKHFFDYLRLKPQQFYAEAEPTWKLGIRFLWGPGREFFYSFAFEFEKRQPELSRNNGFFFNPERPACGPVSWFMAQEKAFPRKPDGSPLLHDRHAFHIENVKLVGWLERRARDFEIQVVDATVRPELGEEGVRALVAEDGTRHTADLYVDASGFRSELLGKGLQVPFRSYADSLFCDRAVIGGWSRGEEPIHPYTTAETMDSGWCWQIEHENWINRGYVYSSAWISDEEALAEFLRKNPRVSNTPRVVRFRAGRHERLWVGNVVGIGNAAGFVEPLEATALQVICIEASTLADSLVDSQCMPTPTLIELYNRYNAQAWDDIRDFLAIHYKFNTRLDTPFWRACRNETRLHDAEFLVDFYRENGPSVVAGAQLLHPSNAFGMDGYLALLAGQQVPHQKPHLASAPEQKLWRDRQSTWETQARHGLSVKECLQAIRKPGWRWS

SEQ ID NO: 83741 - protein, 510 aa, Sphingomonas sp.
  misc_feature (1)..(510): tr|A0A0W1QJ10|A0A0W1QJ10_9SPHN Tryptophan halogenase OS =Sphingomonas sp. WG OX=1592629 GN=ATB93_13440 PE=4 SV= 1
MRQDLIQRVVIVGGGTAGWMAAAALGKLLGRMPEMRIELVESAEIGTIGVGEATIPHIALFNTMLGIDEAEFVRATQATYKLGIEFVDWRRIGHRYVHPFGVYGLDMLGVEFHHFWLKARSLGATVPLDAYSIGASAGMRGRFTHPRPELPNSPLAKLGYAFQFDAALYATYLRNLAETLGVIRTEGRIVNVLRDANTGHVSAVRLEDGTDIAGDLFIDCSGFRGLLIEQAMGATFQDWTDWLPCDRAVAVPCALGGDRMPLTRSIARAAGWQWRIPLQHRIGNGYVYAGAFLSDDEAAATLLAHLDGPPLAEPRQLAFRAGHRDRAWIGNVVAIGLAGGFLEPLESTSIHLVQSGIGRLMALFPSKNFDAAEIDRFNRETAREYADIRDFLILHYKATERDDSAFWRRCRDLTPPDGLREKIAMFRANGRIFRDQHELFPEASWLAVMNGQGIEPQGYHPIADLLSDEETLKRLNHIAQVIDETANTMPLQDAYLRELGCQPAPLRRVS

SEQ ID NO: 83742 - protein, 504 aa, Caulobacter sp.
  misc_feature (1)..(504): tr|A0A258IJQ7|A0A258IJQ7_9CAUL Tryptophan halogenase OS =Caulobacter sp. 32-67-35 OX=1970330 GN=B7Y81_14225 PE= 4 SV=1
MTRVNRLRKVVIVGGGTAGWMTAAALGRFLTKDGQTSVTLVESDSIGTVGVGESTIPQINIFNRMLGVDENDFIRKTRATFKLGIDFVDWKQIGHSYHHPFGPYGVDMEAVSFHAYWLKAHAMGEDDDLSAYSLNALAARQHKFMRPNGQPNSPLGSIAYAFQFDAGLYAKFLRDYAEARGIVRQEGKIASVQQNGETGFVTSVTLESGQVVEGDLFIDCSGFRGLLIEGTLQTGYEDWSQWLLNDRAVAVPCALGGSMAPVTRATARPAGWQWRIPLQHRLGNGYAYSSAHISEDEATAYLLAHLDGEPLAAPNHIRFTAGRRKKSWNRNVVAIGLAAGFMEPLESQSIHLIQVGIARLLAMFPDREFRQPDIDRYNRVMAFEYEKIRDFIILHFKATQRSDTPYWDYLREMSVPDYLADKMAVFESYGRIFRENEELFNDTSWFAVMVGQGIVPKGYDPMVDVMSDDELRRRMAEIRSVIAKSAEVMPGHMAFIRANCDAMA

SEQ ID NO: 83743 - protein, 530 aa, Sphingomonas sp.
  misc_feature (1)..(530): tr|A0A0W1QJ45|A0A0W1QJ45_9SPHN Tryptophan halogenase OS =Sphingomonas sp. WG OX=1592629 GN=ATB93_13445 PE=4 SV= 1
MNEHSIREVVIVGGGTAGWMAAAAFSRFLNNGYTRVTVVESEEIGTVGVGEATIPPILNFNAMIGLDENTFIAETKGTFKLGIEFVDWGALGDSYFHPFGNYAQDLQGVHFHQLYLRERARRPIADIAAWSMSAVAASLGKFGRPAANAQTPVRELFYAFHFDAGLYAQLLRRLSEARGIHRIEGRITDVTLRPEDGFVQSLTLADGRSVAGDLFIDCSGFRGLLIEQALETGYDDWRHWLPCDRAVAVPCANVREPTPFTRSTARDAGWQWRIPLQHRVGNGLVYSSDFLDDDTAEQQLLASLEGAPLAEPRRISFVTGRRREMWRKNVVALGLSGGFIEPLESTSIHFIQSGIARLIALFPDKRFAAIERDEYNRQMRELYEDVRDFIVLHYKATHRNDTPFWDRCRTMDVPDSLNRKIELFRTKGRLFREGMELFANPSWIAVCLGQHIVPEEHEPAADALDENLVAQALEQMRQGYWETAQKMPSHAEFLAAIAPKQSASPAAQAESLPVFSFAQESPFASPGSPV

SEQ ID NO: 83744 - protein, 513 aa, Pseudoalteromonas rubra
  misc_feature (1)..(513): tr|A0A4Q7ELC7|A0A4Q7ELC7_9GAMM Tryptophan 7-halogenase OS=Pseudoalteromonas rubra OX=43658 GN=C3B51_05330 PE=4 SV=1
MHNAEAKIKRIVIVGGGTAGWLAANHLAADAPEDVVITLVESPNIPTIGVGEGTVPFIVDSLKKFGIKESDVFRLCDATFKNGIHFVGWNKPVNGQPHCYFHPFDDPNVNGVNLLPYWLHQLPEARARFDQSVSIQTHIALENRAPKLITNAEYERLINYAFHLDAGKFSALLAKHAIDNRQVKHIHDDVESVELALDGSISGLQLKQGPLLEGDLFIDCSGFQSLLLGKALNTPFIDKSDVLFANHAVVTQVPYEREQEVPPYTISTAQQAGWIWDIGLQTRKGVGHVYSDQFTSHEQAHRDLSAYLGKSEDVVESRLIKMQVGYRAQAWVKNCIGIGLSQGFVEPLEATGLLVFDLAARMLSKRLPEQRQDMPAIALQFNQHMSHAWQSIVDFIKLHYCISNRDDSEFWRMNRAPETIPDSLQHKLALWRSDIPNEYDFVSSLDVFRLENHLYVLYGMNYPSRCKYPSPQKVSQQEAMLKLVSQQQQKAVAMLETHSKLVAKAARYGFQRI

SEQ ID NO: 83745 - protein, 476 aa, Sphingomonas sp.
  misc_feature (1)..(476): tr|A0A0W1QJ16|A0A0W1QJ16_9SPHN Tryptophan halogenase OS =Sphingomonas sp. WG OX=1592629 GN=ATB93_13450 PE=4 SV= 1
MSAPRRVLVVGGGVTGWSAAAALKRHVPLLDVAILPLDPPAHALADRIACTLPSILGFHEDLGIGVDDAVLRTRSFYRLGTRFLGWSGPDGDFIHSYARHGEAMGSAPFHLLWARAAMRGDVPPFEAFSPAAVMARAGRMMLPTGDDVLADHGFGLALDLQRYSKMIVAFARHVGVRIHAGGLKAVIPGADGGITALTLDDGSLLAADLFVDCTGPDALLHGTLGATREDWRRWLPCDRLVLSDAPTAEPAPNDTIIAEEAGWRWTSPTQTGRVFASSHTEDDALAIRLEAGATLEPWRGNVIAVGDAAVVIEPLVWANLHLAHSAIDRLIAMLPAGAPHPLETAEYNRQALAEARRVRDFVLLHYCTSRRDELFWRDIASAALPESLAHSLRLFRARGRLPFYEEETFDRDSWLAVLFGQGVLPRSVDPLADAVSSIEAERAMQAFRARIDRAIQPLPTPAALLAAQSRHLHERA

SEQ ID NO: 83746 - protein, 494 aa, Pseudoalteromonas espejiana
  misc_feature (1)..(494): tr|A0A510XSH2|A0A510XSH2_9GAMM Tryptophan halogenase OS =Pseudoalteromonas espejiana OX=28107 GN=PES01_08230 PE =4 SV=1
MNQNAIKKIVIAGGGTAGWMCSAAIAKLLGKNIEVCLVESDLIPTVGVGESTIPTLHIFHDLLKISEPEFMAATNATFKLGISFEGWKQNQQSYFHSFGYIGQGCWAAGFQHFWLKGIQQGVAADIGDYCTEHVASRLGKFAVVPNQDRNHAYQLDAGLYAKFLRNFAQQNGAKRIEGMISKVNLEPTNGFIKSLTLGDGQIIEGDLFIDCTGFKGLLIEQALHTGYEDWNHWLPCDSAVAVQTELVSPIVPYTRAMAHKWGWQWQIPLQSRRGNGLVFCSKYMSDDEAKAALLNNVEGKPINEPRVIKYRTGTRRKHWNKNCVAIGLASGFIEPLESTSIHLIQQSIIRLMQNMPTKAIESCYQDDFNNKMRFEAENIRDFIVLHYYVTQRTDSDFWRYCKNMPIPASLAKRIELFKQSGHVYKAEQELFGEASWLQVMLGQGLIPQNYHPIVDSMSDDELKRFLDSIKNHVAKKANSLPSHIDFINHYCKAN

SEQ ID NO: 83747 - protein, 519 aa, Caulobacter sp.
  misc_feature (1)..(519): tr|A0A258IM29|A0A258IM29_9CAUL Tryptophan halogenase OS =Caulobacter sp. 32-67-35 OX=1970330 GN=B7Y81_13635 PE= 4 SV=1
MDHRRRILIVGGGAAGWLTAAYLARSLRIAEQTHLEITLLESPDVGIIGVGEATFPTIRATLQFLGIDEGRFIRETSATFKQGIRFNDWAWAPRADGQRHRYFHPFEAPFSTDGTSLTPYWLLQDEATRAPFAEAMTIQARVAEAQRAPKRPHEGNFSGPLNYAYHFDAAKLANVLAERARELGVRHLQGLLTGVALDETGAIASVSCQQHGTLEADLYIDCTGFRAELIGQALNSPFKSVRSTLFADRALACKIVQDGPETPIQSFTVATAHQAGWIWDIGLNGARGVGCVYSSDHMADDQAEAALRGYVGDGVEITPRSLAFDAGYRQKPWIKNCVAVGLSAGFLEPLESTGVVLIEAAVAIIAELFPHNGPIAAPARRFNELMTARYDNIITFLKLHYCLSQRTEPFWRDNVDEASIPERLIDLLEQWRYRPPTRYDFTLDLETFAFFNYQYILYGMGFKTDLSPGRAEFPDVAGAEKLFAKIRGFGERATHDLPSHRDLIAQINQFGFDRSLEPA

SEQ ID NO: 83748 - protein, 510 aa, Pseudoalteromonas rubra
  misc_feature (1)..(510): tr|A0A0F4QYT9|A0A0F4QYT9_9GAMM Tryptophan halogenase OS =Pseudoalteromonas rubra OX=43658 GN=TW77_04205 PE=4 SV =1
MKEIKKYVVVGGGTAGWLSANLLAAQLKDMPTHSVTLIESPTIPIIGVGEGTVPSIRKTLQKIGLPETTLFQECDATFKQSIKFVNWLDKHRHGQNNAYHHLFDYPFPFGENLADYWLAEGKGEHFADMVSFQGMCCDEHKAPKLITHPEYQGVSDYAYHFDAHKFAGVLAKHAKETFGVEHIRANVTNLKQSVCGNIEQLVLDNGAVVDLDMVIDCSGFSSYILGQQLAVPFISKSDQLFINRALTVQVPYTSEVSLPPYTISTAHQYGWIWDIGLTTRRGVGLVYDDSLINKEIAYAKLARYLGCDPEQYTVRDIPMPVGVREKVWVNNCVAIGLSQGFVEPLEATAILLADFSANLLCNKLPRFADELPAIATQFNERVAHAWLRVLDFVKLHYCISDRQDSEFWRKNRSADSIPDSLKQRLELWRYAPPGGDDFMTKFEVFDVENYLYVLYGMKYGTRSKALSEAEIMRLSQQVAQVREVALQQCQSLPSHNQLLALIQRHGMHKV

SEQ ID NO: 83749 - protein, 538 aa, Verrucomicrobiales bacterium
  misc_feature (1)..(538): tr|A0A2D4ZBI6|A0A2D4ZBI6_9BACT Uncharacterized protein OS=Verrucomicrobiales bacterium OX=2026801 GN=CMO46_069 65 PE=4 SV=1
MKYKTVTIVGGGSSGWMTAAALAKCCPHLEVTLIESKAIGTVGVGESTLGHINRFMQLLDLKDEDWMAACNATYKNSIQFTNFRENKGEVFQYPFSNGLDFTDKPSGEDNWKHLAALKPEEYGPEEYARFFCTGNTLLAEYNKETKNEQGLLRHFNWTYDTAYHMDAQLFGQYLKDNIAIPLGVKHIYGEVHSHMKDPTNNYITQVLCHDGTILNSDLYIDCTGFASVLLEQWMGSHFRSFEQTLANDRAWACRLPYTDREKQMHNVTDCHALGNGWVWNIPLWNRIGTGYVYSTRFTTPEAAQAEFRKHLAEAHTPEIAEAAEMFEVKIRHGRRHRAWKGNVVGVGLSYGFVEPLESTGLLTTHENIIKLVDTLNRREGFVTRSEREGFNFSAEYDVNKFRDFVAAHYAMSMREDTPYWRWCSELNEYDPTMHSDEMQKQGQWPNLFGNLAGAHSYTADLVGHNFIAAGMGLRPTGTPALLYKTDVQQAQLEEEVGSVDRMYKQYKNFVIDHIKDLPSHYQYLLDNIYGGVDEHKLD

SEQ ID NO: 83750 - protein, 507 aa, Ideonella sp.
  misc_feature (1)..(507): tr|A0A523Q5P9|A0A523Q5P9_9BURK Tryptophan halogenase OS =Ideonella sp. MAG2 OX=2083017 GN=C4K60_12880 PE=4 SV=1
MPEIKNIVIAGGGTAGWMAAAAFSKVLGERWNVVLVESEEIDTVGVGEATIPVINVYNQALEIDENEFMRETSASFKLGIEFVNWGRQGDSYVHGFGPLGPDIGITRFHHYWLKMRARGKASSLEDYSVNIAAARANKFLRARKDLSPSPMAEIAHAYHFDAGLYAAYLRRYAEKRGVRRIEGKIRSVSTRVQDGFIDALTLEDGQRIEGDLFIDCTGFRGLLIEQTLKTGYEDWSHWLPCDRAWAVPCTSVEPLTPYTRSTAHGAGWQWRIPLQHRTGNGHVFCSSHISEQAALDVLMGKLDGEVLADPRLLKFVTGKRKKIWNKNCIAVGLSSGFLEPLESTSIHLIQSTISRLTDLFPSQGIDEADVAEFNRQADFEFERIRDFIILHYKATERDDTAFWRYCRDMSIPDTLARKIDLFKSNGRVFRENAELFSEISWVEVLLGQHITPRHYHPLVDALPEQKIIDFLDNVRSTIRRCVEVMPTHAQYIASECATHIPPMKPRR

SEQ ID NO: 83751 - protein, 494 aa, Colwellia marinimaniae
  misc_feature (1)..(494): tr|A0A1Z5I0W0|A0A1Z5I0W0_9GAMM Tryptophan halogenase OS =Colwellia marinimaniae OX=1513592 GN=MTCD1_01031 PE=4 SV=1
MNNHKITKIVIAGGGTAGWMAAASLSKLLGKSFDITLVESDEIGTVGVGEAAIPTLTAFHRLLGINEQAFMKATHATFKLGISFENWKKGDDEYMHGFGRVGKECWAGEFQHFWLHGKQNNIDFGFEHYSPEIQAAKAEKFALAKGGLNYSYHLDASLYAKFLRTFAEAHGVKRIEGKIIDVAKDSKTGDIKSLQLANGNVIEGQLFIDCTGFVGLLIEKALHTGYEDWSHWLPCDSAVAVQTKSVSAPLPYTRSIARESGWQWRIPLQHRVGNGLVFCSKYLADDDAKTLLMNNIEGEPIKQPRVIKFKTGRRRKGWNKNCVALGLSSGFLEPLESTSIHLIMSGILRLIRLFPFEGISPSAVNEYNQQLTTELEHIRDFIILHYHATERADTPFWQYCKNMEIPDSLKQRLALFKETGRIFTSEGELFRVDSWAQVMLGQGVYPEQYHQIAAIMKPHELDKFLSDIRQTIDKAVANLPSHQSFLEQYCRSSR

SEQ ID NO: 83752 - protein, 505 aa, Caulobacter sp.
  misc_feature (1)..(505): tr|A0A258IKI9|A0A258IKI9_9CAUL Tryptophan halogenase OS =Caulobacter sp. 32-67-35 OX=1970330 GN=B7Y81_14220 PE= 4 SV=1
MNTNPVRKVLIVGGGTAGWMTAAALSKVLKGVEITLIESDQIATVGVGEATIPPINTFNQILGIDEADFMRSTKASFKLAIEFVDWTAPGSRYLHPFGGFGLDIEAIKFHQFWLKAQSQGSTQPLDDFNLSATAAKLGKFMLPSKDPGQVLSSLKYAFHFDAGLYARYLRDYAEKRGVIRREGKVVDVCLRGEDGFIASVTTDGGEVIEADLFIDCSGFRGLLIEQALDTGFEDWGHWLPNDRAVAMPCDTGGDGLTPYTRATADKAGWRWRIPLQHRTGNGYVYSSQHLSDEDAVARLRATLDGPARAEPNFIKFRAGRRKQIWVKNCVAIGLASGFLEPLESTSIHMIQAGITKLLALFPDKGFDPIEIAEYNRLTILQTELIRDFIILHFKANERPEPYWQRAREMAIPESLQRKIDLFAARGRLFQSDYDLFAEPSWIAVMLGQNIRPRNYDPLVDTLDETLVRGQMQRLAALVRQTADALPSHEAFIARYCAAPEFEKTR

SEQ ID NO: 83753 - protein, 530 aa, Sphingomonas elodea
  misc_feature (1)..(530): tr|A0A495ER79|A0A495ER79_SPHEL Tryptophan halogenase OS =Sphingomonas elodea OX=179878 GN=C8E52_4339 PE=4 SV=1
MNEHSIRDVVIVGGGTAGWMAAAAFSRFLNNGYTRITLIESDEIGTVGVGEATIPPILRFNQMVGLDENEFLAATGGTFKLGIEFVDWGGLGERYFHPFGNYAQDLQGVHFHQLYLRERARRAVPDIAEWSMSAVAASMGKFGRPSPTAQTPVRELFYAFHFDAGLYAQLLRRLSESRGITRIEGKITDVTLRPDDGFVQSVTLEDGRTVAGDLFIDCSGFRGLLIEEALQAGYEDWQHWLPCDRAVAVPCANVRDPDPFTRSTARAAGWQWRIPLQHRMGNGHVYCSEFIDDDTAERQLMASLEGPALADPRRLRFTTGRRRESWSRNVVALGLSSGFLEPLESTSIHLIQSGIARLIALFPDKRFDPIERQEYNRQMRDLYEDIRDFIILHYKATTRTDTPFWNRVRTMDIPESLANRIALFQSKGRLFREGTELFTNTSWVAVCLGQHIVPREHEPAADALDENLVAKALEQMRQGYWETAQKMPTHAAFLARIAPQPASQPPPAAEPLPVFSFAQDAPFAAPGSPV

SEQ ID NO: 83754 - protein, 493 aa, Sphingomonas sp.
  misc_feature (1)..(493): tr|A0A0W1QJV8|A0A0W1QJV8_9SPHN Tryptophan halogenase OS =Sphingomonas sp. WG OX=1592629 GN=ATB93_12090 PE=4 SV= 1
MRAPRRIVIAGGGTAGWMAAAALARTLGRAVSVTLVESDAIGTIGVGESTIPPIITFNRLLGINEAEFMAATQATFKLGIQFDGWKGPQDSYFHSFGLTGKDHWAAGFQHFWLDGRTRGNDAPYDDYCLELVAAREGRFAHLPDDRMNYAYQLDSTLYGRFLRRMAEGDGAVRIEGRIERVELDGKSGDIAALVLDDGQRIEGDLFIDCTGFRALLIERALHVGFDDWSHYLPCDAAVAVQTESVRPPVPFTRAIAHESGWQWRIPLQHRAGNGIVYCSRYLDHDVARERLLANVEGTVLTEPNMLRFTTGARRKQWHRNCIAIGLSGGFLEPLESTSIHLIQRAILRLIRLLPGDPVSPHDIAEFNDQQMTDMLQIRDFLILHYKVTERRDTPFWRQCADMEIPESLAHKIALFRETARVFRRNDELFAENSWVQVMLGQGIVPESYHPITARLSDGELAQLLSSVRQNVATTVRGLPPHADYVARFCGAVA

SEQ ID NO: 83755 - protein, 519 aa, Caulobacter vibrioides
  misc_feature (1)..(519): tr|A0A290MP10|A0A290MP10_CAUVI Tryptophan 7-halogenase OS=Caulobacter vibrioides OX=155892 GN=CA606_03710 PE=4 SV=1
MQRRRSILIVGGGTAGWLTAAYLAKALRVAEQSHLEITLLESPDIGIVGVGEATFPTIRNTLRFLGIEEAHFIRETSATFKQGIRFVDWAEAPRDGRRHSYFHPFEAPFATEGTSLAPYWLLQSEQTRAPFAEAVTIQARVADAARAPKRPHESDFAGPLNYAYHFDAAKLAQVLADRARALGVRHLQGAVSEVALDESGAIAHVASPGHGALSADLFIDCTGFRAELIGKALGSPFKSAKPVLFADRAVACRAPYERPDAPIQSYTVATAHEAGWIWDIALAGGRGVGCVYASDYMDDDRAEAVLRDYLGKAAGEIETRKIAFDAGYREQQWIKNCVAVGLAAGFLEPLESTGVVLIEAAVAMIAELFPHSGPVSAPARRFNDLMAARFDNIIVFLKLHYALSRRTEPFWRDNVDPASIPERLTELLEQWRHRPPARFDFILDLETFAFFNYQYILYGMGFETDLADGAGEFPDVAGAAKLFAKIRGFADRATQDLPSHRDLITQINRFGFDKALEGV

SEQ ID NO: 83756 - protein, 444 aa, Caulobacter vibrioides
  misc_feature (1)..(444): tr|A0A258CU58|A0A258CU58_CAUVI Tryptophan halogenase (F ragment) OS=Caulobacter vibrioides OX=155892 GN=B7Z12_1 8555 PE=4 SV=1
MKPLKKILIAGGGSAGWMTAALCSRLFQGLYEIVLVESEEIGTVGVGEATIPAIKKFNELLGLEEDDFLRKTQGSFKLGIQFRNWWRQGESYLHGFGVIGQDLGWLRCHQYWLRMRALGRAGDFDNLSINNAMALSNKFMRARADMADSPIGHIAHAFHFDAGLYAKHLSTYAQARGVKRREGKIVDVILRAEDGFVQSVTMHDGEVIAADLFVDCSGFRGLIIEQALKTGYEDWTQWLPCDRAVAVPCDRSEHFTPYTRSTAHSAGWQWRIPLQHRTGNGHVYSSQYIDDDEAERVLLANLDGAQRADPLRIRFKTGKRKKIWNKNCVAIGLASGFLEPLESTSLHLIQSAVIRMVRLLPDAGFDQATIDEFNRQSDFEYERIRDFIILHYKATERDDSPFWRYCRDMEIPATLQRKMDLFRANGRVFREDDELFTEESWIQV

SEQ ID NO: 83757 - protein, 514 aa, Brevundimonas sp.
  misc_feature (1)..(514): tr|A0A258JIY8|A0A258JIY8_9CAUL Tryptophan halogenase OS =Brevundimonas sp. 32-68-21 OX=1970328 GN=B7Y85_02740 P E=4 SV=1
MDQPRRPLKKICIVGGGTAGWVAAALMAEHFKGRMAEIELVESDDIGTIGVGESTVPPFLEMLKRLGIDERDFIQKTQASFKLGIQFEDWTQKGESYFHPFGAVGVPVDISDFYPVWLKARMNGYDRPLMDFAAAARMASQGRFMLPFKAQRTPIGGASYAVHVDAKRVARYLRDFAEARGVKRTEGIVEDVMTRPDGFVSGLKLKSGQTVEADFFIDCTGFRALLIGKTLGVGYTDWSEWLMCDRAIAVQTENVGPPTPYTLAQAQDCGWRWRIPLQHRTGNGHVFCSRYMSDDEATARLLAQVEGRPVVNPMVVPFKTGVREKIWDKNVLSLGLASGFIEPLESTAIHLIYRGMDFLFRLMPDLDCDPNLAAEYNRRMTVDYEEIRDFIILHYALTRRDDTAFWRQCRDMVLPEGLQHKLEVFRANGSLVEALDPLFRNVSWYAVMDGMGVRPRSYPPLVDRIDSTGLTDEMDRAANILNAFVADLPTHQAFIDTHCPAPSVDLPAPLAVPA

SEQ ID NO: 83758 - protein, 504 aa, Caulobacter vibrioides
  misc_feature (1)..(504): tr|A0A0V2F6H1|A0A0V2F6H1_CAUVI Tryptophan halogenase OS =Caulobacter vibrioides OX=155892 GN=AS593_00740 PE=4 S V=1
MTNDRIRHVVIVGGGTAGWMTAAALGRFLKDGVTKVTVIESEAIGTVGVGESTIPQINIFNRMLGLDEDEFLRKTKATYKLAIEFRDWKQIGHTYHHPFGPYGVDMEGVSFHAYWLRYQAMGEAADLCEYSLQSLAAAQAKFQRPTGQKNSPLGDIAYAFHFDAGLYARFLRDYAEARNVTRIEGRIIDVIQRGTDGFIEAVTLENGTRVEGDLFIDCSGFRGLLIEQTLKSGFEDWSHWLLNDRAVAVPCASGGSTDPVTRATARPAGWQWRIPLQHRIGNGYAFSSEHISEDEATAYLLANLDGEALATPWTLKFKAGRRKKSWNKNVVAIGLAAGFMEPLESQSIHLIQVGISRLLAMFPDRRFQQPDIDRYNRVMTFEYEKIRDFLILHYKATQRSDTPYWDYLREMPIPDYLADKIAVFESHGRIFRENEELFNDTSWFAVMIGQGLKPKGWDPMADVMSEDLLRARMNEIRAVIARSAEAMPDHMTFVADRVAGARAA

SEQ ID NO: 83759 - protein, 503 aa, Alphaproteobacteria bacterium
  misc_feature (1)..(503): tr|A0A257EMN3|A0A257EMN3_9PROT Tryptophan halogenase OS =Alphaproteobacteria bacterium PA4 OX=2015572 GN=CFE37_ 07550 PE=4 SV=1
MTGKPLRVVVAGGGTAGWMTAAALAHALGPVIDLTLVESDAIGTIGVGESTIPPIVLFNRLLGINEAEFMRATQATFKLGILFENWKDVGTRYFHSFGATGKDHWTAGFQHFWMHGQTQGHTHPYDDYALELQAALQGKFAHLPEDRLNYAYQLDSALYAAFLRKRAEAGGATRIEGRITAVELNGESGDIAALTLDGDRRIEGDLFIDCTGFRALLIEGALHAGFDDWSHWLPCDSAIAIQTASVRPAVPYTRAIAHDAGWQWRIPLQHRQGNGIVYCSRYLDKDAALDRLFGSIEGEKLVQPNFIRFTTGVRRRQWHRNCVAVGLSGGFMEPLESTSIHLIQRAVLRIARMLPAGRISARDIAEFNDQQFTDMEQIRDFLILHYKVTQRRDSPFWRQCAAMAIPDSLAHKIELFRETGRVFRKNEELFIENSWVQVMLGQGIVPESYHPVAARLRPEELSALLGGLRESVAKTVASLPEHHAYVARYCGASDAAAAVHRAA

SEQ ID NO: 83760 - protein, 493 aa, Colwellia sp.
  misc_feature (1)..(493): tr|A0A2N1C985|A0A2N1C985_9GAMM Tryptophan halogenase OS =Colwellia sp. 75C3 OX=888425 GN=CXF85_03735 PE=4 SV=1
MNTNKVKKVVIAGGGTAGWMAAAAISKLLGKNLDITLVESDDIATIGVGEATIPTLQYFHQLLNINEAEFLKETHGTFKLGISFEGWRDVNQDYLHAFGLTGKDCWAAGFQHFWTKGRQQGIASEFGDYCLEKVTASNEKFAHLPNNGLNYAYHIDATRYGQFLRKMSEKHGTKRIEGKINQVNIDQNSGDISSLTLESGLVIEGDLFLDCTGQRALLIEGALHTGFEDWSHWLPCDSAIAVQTKSTEAAKPYTRSIAHDFGWQWRIPLQNRVGNGMVFCSKYVSDEKALAVLESNLVGEKITEPRVIKYRTGTRRKHWNKNCIAIGLSSGFLEPLESTSIHLIQQSIVRLLRMFPQDGIKQTDIDEFNLQTKFDTATTRDFIILHYSVTNRNDSEFWRHCRNMPIPEGLAHRIKLFKETGRVFRKNNELFDDSWMQVMIGQGLIPESYHPIVDNMSDDELQRFLDHIKTNVNNTVKQLPPHNAFIDRFCKAQ

SEQ ID NO: 83761 - protein, 503 aa, Caulobacter vibrioides
  misc_feature (1)..(503): tr|A0A290MRF8|A0A290MRF8_CAUVI Tryptophan 7-halogenase OS=Caulobacter vibrioides OX=155892 GN=CA606_19450 PE=4 SV=1
MNDRRIRKVVIVGGGTAGWMTAAALARFLEHQPAAIELVESEAIGTVGVGEATIPPIRNFNAVLGIDEIDFIKATQATFKLGIAFEDWRVQGSRWFHGFGDYGPKIDGVSPHHHWRRLRAAGDPTSHEAYSLTTQMAALNRFRPPVPDPRSVYSNYAYAFQFDAGLYARYLRGYAEARGVTRTEGKIAKVELRGGDGFVEAVVLEDGRRLEGDLFIDCSGFRGLLIEEALGTGYEDWSHWLPVNRALAVPSSRVGELTPYTTASADAAGWRWRIPLQHRTGNGYVFCDAFTSEDEAAATLLSKLDGKALDTPRPLRFVTGRRRKIWNRNVVAVGLSSGFIEPLESTSIHLIQNAIGRLIEHFPDRDFDPRRAEVFNALSAAEIDHIRDFIVLHYVTAQRDDTPFWRHVRSIDPPDALKEQLQRFRRTGEALLKTDESFLEPSWLAIYLGQDIVPEAHDPRADAISLAELADGMRRRREAVRQAAEALPSHAAFIDRFCRAPPP

SEQ ID NO: 83762 - protein, 512 aa, Caulobacter vibrioides
  misc_feature (1)..(512): tr|A0A0V2FCP0|A0A0V2FCP0_CAUVI Tryptophan halogenase OS =Caulobacter vibrioides OX=155892 GN=AS593_22395 PE=4 S V=1
MEQDVRNGRIRSIVIVGGGTAGWMAAASLRRHFGKAPIDITLVESSEIGTIGVGEATIPTIRNFYQSLGLDDLEVLRATQGTCKLGIRFKDWMAPGSAFIHPFSLYGQDLNGVPFQHYWLKARSAADVGELGEYSLGASLAAAGKFTVPAANPPSSLSVFDWALHFDAALFAQLMRRVAEANGVRRIDAKVVKVNLRAEDGFVASLGLHTGASIEGDLFIDCSGFRGLLIEEALQTGYEDWSQWLFCDRALAVQSQPPEGAEPPPYTDVTAHSAGWRWRIPLQHRYGNGYVYSSRHIDDEAAKAELVAAVPDRLLHEPRLIRFTPGRRKKVWNRNVVALGLSSGFLEPLESTSIALIETGIEKLKALFPDRGFDPAVIDEFNDWSRREMERVRDFVVLHYKAAQRGDTPFWRTTRDADIPETLARKVELFRARGHIARYRWEMFQPPSWLAIFAGFDILPDSWDPALDGIDGQALAASLNQMRAGVARAVAQAPTHGEFLRRYVGQAPAAAE

SEQ ID NO: 83763 - protein, 566 aa, Burkholderia pseudomallei
  misc_feature (1)..(566): tr|A0A0E1TVP0|A0A0E1TVP0_BURPE Tryptophan halogenase fa mily protein OS=Burkholderia pseudomallei 576 OX=557724 GN=BUC_7020 PE=4 SV=1
MTQKSPANGRDSHHFDVIILGSGMSGTQMGAILAKQQFRVLIIEESSHPRFTIGESSIPETSLMNRIIADRYGIPELDHITSFYATQRYVASSTGIKRNFGFVFHKPGQEHDPKEFTQCVIPELPWGPESHYYRQDVDAYLLQAAIKYGCTVRQKTNVTEYHADKNGVAVTTAQGERFTGRYMIDCGGPRAPLAIQFKLREEPCRFKTHSRSLYTHMLGVKPFDDIFKVKGQRWRWHEGTLHHMFAGGWLWVIPFNNHPRSTNNLVSVGLQLDTRVHPKTDIPAQQEFDEFLARFPSIGAQFRDAVPVRDWVKTDRLQFSSRACVGDRYCLMLHANGFIDPLFSRGLENTAVTIHALAARLIRALRDDDFSPERFEYIERLQQKLLDHNDDFVSCCYTAFTDFRLWDAFHRLWAVGTILGQFRLVQAHARFRASRDESALDHLDNNPPYLGYLCADMEEYYQLFNDAKAEVEAVSAGRKPAEEAAARIHALIDERDFARPMFSFGYCITGAKPQLNNSKYSLLPAMKLLHWTQTSAPAEVKKYFDYNPMFALLKAYVTTRIGLALK

SEQ ID NO: 83764 - protein, 530 aa, Chloroflexi bacterium
  misc_feature (1)..(530): tr|A0A2W1AHC3|A0A2W1AHC3_9CHLR Tryptophan halogenase OS =Chloroflexi bacterium OX=2026724 GN=DK306_002102 PE=4 SV=1
MTEPIRSIVVVGGGSAGFLAALTLRRMLPAIPLTVVHSPDIPVIGVGESTTSAIAVHLHQHLGIDQSEFHREVRPSWKLGLRFEWGAADVPHFNYTFDRYLDKNAPGLSKWLGYYCLTDTKDASTFYALMDRDKAPATLKGSKFSLDPRTTYHLPNKRFIAYMQRKSEDAGATVIADEVLEVVQDESGNVANLKLKSGREIAGDLFVDCSGFRSLLLGETLEEPSVSYGDALFCDRAVVGSWERDDAVKPYTTISTMEHGWAWRIEFAEAVTRGYVYSSQFVSDEDAAQELKEKNPELGEDPDLRVLRFPSGRRERSVVRNVVAVGNASGFVEPLEATALHLIVEQLHNLVLGLIDTNHRLTPSLRTLLNAHFVGQWDDVRDFLALHYKYNFQSDSPFWRHCREETPLGRGEDLVAMYRELGPSRLLGRVMHPGGIFGLGGYLAMLVGMQLPTDARVGLTPAEAKAWRAVQDGHRKEAAQTLAMRPALERAYGISAGGGAAAASVPVVGRNEACPCGSGKKYKFCHAAVR

SEQ ID NO: 83765 - protein, 498 aa, Xanthomonas campestris
  misc_feature (1)..(498): tr|G0CAP1|G0CAP1_XANCA Tryptophan halogenase OS=Xanthom onas campestris pv. raphani 756C OX=990315 GN=XCR_3200 PE=4 SV=1
MTQARIRKVVIAGGGTAGWVAAAALAHQFRGLLEIVLVESEQIGTIGVGESTVPPIRAFHRFLQIDEQEFLRAVAGTFKLAISFEDWQGQGDRYIHPFGSTGQGTLVCAFHHFWLEAQRRGMHSGFDEYCLEAQAARAGRFAVLQQPAVNYAYHLDAGLYARFLRTHAQRYGATRIEGKIQQVRQHADSGFVEALVLQDGQVVEGDLFIDCTGFRGLLIEQTLHTGYEDWSHWLPCDRAVAVQTESVEPPVPYTRAIAHAAGWRWQIPLQHRAGNGLVYARAHLSDDEASAMLLAAVQGTPRRDPMLVPFVTGRRLQTWNKNVVALGLASGFVEPLESTSIHLAIVAVMRLITLFPADGIAQPQVDLFNRISRAEAEHVRDFVILHYHATQREEALWRQCRAMELPESLQLRLRAWREGAHAWQDGDELFRVDSWTHVLLGQRVAPAQHHPLTRALPDQHLQQLLDGIRQPLQHVVTQLPTQQAFIDSYCKVDQSTWG

SEQ ID NO: 83766 - protein, 494 aa, Chloroflexi bacterium
  misc_feature (1)..(494): tr|A0A3D5E3R4|A0A3D5E3R4_9CHLR Uncharacterized protein OS=Chloroflexi bacterium OX=2026724 GN=DGM69_05045 PE=4 SV=1
MKVVKRLIIAGGGTAGWIAASWFSRRWGNRMEVVVIDKSEPERVGVGEATLLSFPKVMRDMGYQEKEWMNEIDATFKAGILFPGWGKEDNSIWHPFGYAILGDEDDPSIVRVPIWDAWSNYQDELEIKKISALYSTAMLNKIEPDEIGSSYAYQIDCGKLVQFLQKNTSELVKYIKSGIKSIVKVDDNIEKIILDDGSEVTGDLYFDCTGWKQLLMGSDNNIDLSDRLFIDSALAGRVTYVDKDKEMHPYTDCQAMEHGWRWRIPTQSRMGTGYCFNRSITSPDTVAKDFVKHWDNRISEDDLKLLDWKPQRCKQFWKGNVVSIGLSGGFIEPLESTGLALMIRGCEYLEESMYNCVYNPETDIDIYNVRMISSFENAVDYVNMHYCYSERKGKFWDYVRLSHEKSGMQKYMEDQINDPTMNTDQSGRSGGFFGGANWHVWLAQLMPYGVPKKTYWYEQVKEVVPALNSYLNRLDNNVKNSIPQKIILKEWYGN

SEQ ID NO: 83767 - protein, 516 aa, Porticoccaceae bacterium
  misc_feature (1)..(516): tr|A0A2E9XK11|A0A2E9XK11_9GAMM Tryptophan halogenase OS =Porticoccaceae bacterium OX=2026782 GN=CMK36_03840 PE= 4 SV=1
MTISTSANESQISSIMIVGGGSAGWLTAGILAARYGQTMSVTLVESPDVKIIGVGEGTWPTMKGTLKEMGISETDFFRECDASFKHGAKFAKWVSGDEADYYYHPLMLPQDFTKTNLAPCWLKNNGDRSFSESVCFQEALCERALAPKTVTMPEYNSAANYAYHLNAGKFTKFLTRHCTSKLNVKHKLATISEVLKSEDGGIRYVKTTDGQELVADLFVDCTGMASLLLGKTLGVEFIDKNDSLFIDRALAAQKPYESEEEPILPYTVSTAQKAGWIWDIGLTSRRGIGHVYSSKHTSEAEAEKALSDYIGPVFKGLSVKKISIRSGHREIFWKHNCVAIGLSAGFLEPLEASALMLIEISAKFVRDQLPETRNTMPIIARRFNKTMTYHWERIIDFLKLHYVLSKRDDSDFWIDNRCPNTIPDSLAELLELWKYHTPYRQDFSHKEEVFPAASYQYVLYGMGFQTEVSNRHVESTDDAYRAAVAENERMVSKAVELLPDNRQLLQKINRFGMTAF

SEQ ID NO: 83768 - protein, 524 aa, Porticoccaceae bacterium
  misc_feature (1)..(524): tr|A0A2D5U7Z3|A0A2D5U7Z3_9GAMM Tryptophan halogenase OS =Porticoccaceae bacterium OX=2026782 GN=CMK25_07300 PE= 4 SV=1
  misc_feature (67)..(67): Xaa can be any naturally occurring amino acid
  misc_feature (219)..(219): Xaa can be any naturally occurring amino acid
  misc_feature (235)..(235): Xaa can be any naturally occurring amino acid
  misc_feature (240)..(240): Xaa can be any naturally occurring amino acid
  misc_feature (316)..(316): Xaa can be any naturally occurring amino acid
  misc_feature (323)..(323): Xaa can be any naturally occurring amino acid
  misc_feature (477)..(477): Xaa can be any naturally occurring amino acid
MNNAINKIVIVGGGTAGWLSAGIIAAEHACASREEQSNFQLCLIESPDIATIGVGEGTWPSMRSTLXKMGISETDFFRECSASFKQGTQFNGWQTGAGDDIYTHPFTVPHAYAETNLAPHWQAHRDNINFADAVSPQSALFSSKLAPKQISTPEYAFHVNYGYHLDAAKFAEFLRKHCVEKLGIEHIKANVTGINSADNGDIASIDTDSHGTIAGDLFXDCSGSRALLLGQHFGXAICDXNDILFNNTALAAQIAYNDDNDPIESCTLSTAQSAGWIWDIGLPTRRGIGHVYSSDHNTEEHASEELLNYIAATVGXKAAASAXLRKVQFSPGHRSKFWHKNCVAIGMSAGFIEPLEASALVLVELSAAMVAEQLPASREMMDLVAKRFNRKFLYRWDRIIDFLKLHYILTQRRDSDYWRDNCRQQSIPESLQELITLWRYQSPWHRDSHHVDEMFPSASFQYVLYGMGFETQASQTXRRSDREAQKVAGRLFQENAARTKQLTAAMPTNRDLINKVYRHGFQNI

SEQ ID NO: 83769 - protein, 508 aa, Sphingomonas desiccabilis
  misc_feature (1)..(508): tr|A0A4Q2INZ3|A0A4Q2INZ3_9SPHN Tryptophan 7-halogenase OS=Sphingomonas desiccabilis OX=429134 GN=EO081_16465 P E=4 SV=1
MDPIRSIVIVGGGTAGWMAAAYLARRLDHLRLSITVVESSGIGTVGVGEATVPAIRDFFAAVGLSNAEVLRETEGTIKYGIRFDGWKAPGHRFFHPFGLYGAPARGVAFHHYWLKLRQSGDPTPLGAYSLATQLAEQGRFLMPAQNPANDLGVFDFAVHFDASKFAGLLRRRATAAGVVHVDGRIDRIERDGEAGHVAAVLLEDGRRLAGDLWIDCSGFRSLLLGEALEVPYVDWRRWLPVDRAIAIPCRPRDAAPEPLTVATARRAGWQWRIPLRHRIGNGHVYCSDFLDDASAETMLLEQLEGEPLGQPNHLRFTTGHRARFWERNVVGLGLASGFLEPLESTSISLIQTGLERLVRFFPDRACDPRLAAIYNYQSVLEFERLRDFLLLHYFANGRHGEPFWDHMRTMSPTEGLQLKLDTWRVSGEFVRREWETFQDPSWLSLYAGFEDLPEHPSPLADRFSIAELTDTFARMRAAIAATVAQAEPHAAFLARTVGDGGAKRAATR

SEQ ID NO: 83770 - protein, 502 aa, Hyphomonas sp.
  misc_feature (1)..(502): tr|A0A350ZUD6|A0A350ZUD6_9RHOB Tryptophan halogenase OS =Hyphomonas sp. OX=87 GN=DCY26_12200 PE=4 SV=1
MQHEQIRSIVIVGGGTAGWIASAALSKFLPKTIRITLVESEAIGTVGVGEATIPQIRRLNASLGLDEDAFIRATQASFKLGVEFVNWGRVGDRYIHTFGDPGINLANLHFHHYWLRARAEGSTASLWDYSLHHKVAYANKFGRLDRVGNSSMTGLAYAFHFDAGLYAAFLRKFAEAGGVTRIEGKIEKVSLNSETGFVESISLDRGDVIAGDLFIDCSGFRGMLIGEALGVGYQDWSKWLPCNRALAVACERVEPLLPYTRATARDAGWQWRIPLQHRTGNGHVFCDSFLSEEAAQRTLVENLDGAMIGELRPLRFTTGRREKFWHKNCVSIGLASGFLEPLESTSIHLIQSNISRLIELFPTRAFERTAIAEYNRRVGHEFELIRDFLILHYHQTSREDSEFWRYCANMDIPDSLSAKMELFCGNGLLHKDAEDLFRESSWVQVMVGQELEPAGYHAMADRLSAEQLTSFLKDVRRLIDRAEASLPGHSEFIEAHCRSDRL

SEQ ID NO: 83771 - protein, 557 aa, Alteromonas sp.
  misc_feature (1)..(557): tr|A0A4U0ZHT8|A0A4U0ZHT8_9ALTE Tryptophan 7-halogenase OS=Alteromonas sp. HB161718 OX=2565549 GN=E5672_12075 P E=4 SV=1
MSINENHGSMHKVVIVGGGTAGWLAAGVLGAKLSTKHSVTLVESPTVSSIGVGEGSWPSLRDTLLDIGISESEFLTLCQGAFKQGSSFVNWRKNAHSYYHPFTVPAAYNELDIHTCWKALAPNTPYQDAFSLQAAMCVAGKAPKQIATPDYAHVLNYGYHFDATKLADLLKQHCVDKLDVDYVSGHIGSIKSSSDGYIEKLVTECGKEIIGDLFIDCSGSSGLLIDKHFSVPWMPVKRTMLNDRAVALQVPYSGTDTEIKSTTVATAQTCGWTWDIALQHRRGTGLVYSSQFTNEEQAKQVLIDYVCERYPGAKEHELAFRTLSFEPGYRSQFWVKNCLSLGISSGFVEPLEASAIAMVELGLRMLCEAFPHNKEHMEIVSKRYNRRFAYRWQRVIDFLKLHYALSDREEPYWIAQRDKASIPDSLTELLELWKYQSPSRLDLIENEEIFPSASYQYVLYGMGYSTSVPPLRLSEANKRKALHILENLQQTKSAYLQGLPSNRVLLNDIAKRYNNEKQHVPLHAQREKNEHASASSCSDIKNTSDKKDTSYDRIGFR

SEQ ID NO: 83772 - protein, 474 aa, Caulobacter vibrioides
  misc_feature (1)..(474): tr|A0A258D8V1|A0A258D8V1_CAUVI Tryptophan halogenase OS =Caulobacter vibrioides OX=155892 GN=B7Z12_09210 PE=4 S V=1
MQDHRIRKLVIVGGGTAGWMAAAALRRHFHGGPLEITLVESEAIGTVGVGEATIPTIRGFYQQLGLSDIEVMRATQATCKLGIRFNGWLREGQSFIHPFGHFGQDLRGVPFHHYWRKLAQAGEPTDIADYSLGASLAAAGKFMAPPRNPTSTLSIFDWALHFDAGLFAQLMRRVAEDNGVRRIEGKITKVKLRPEDGFVAGLDLESGETVEGDLFIDCSGFRGLLIEEALHTGYESWSDLLFCDRAWAVQSEGLDNPPPYTDVTAHSAGWRWRIPLQHRYGNGYVFSSRHIRDEDALAELKAAVPDPLLHEPRLIHFNPGRRKQVWNKNVIALGLASGFLEPLESTSIALIETGIEKIKALFPDRDFAPELADEFNDWSRREMERVRDFIILHHFVRYRWEMFAPPSWMAIYAGFEMLPEAVDPSLDGVDPKALSAPLAEMRKAVREVVASAPPHQAFLDQYCRPAAAASSAAE

SEQ ID NO: 83773 - protein, 506 aa, Massilia phosphatilytica
  misc_feature (1)..(506): tr|A0A2S8H7C3|A0A2S8H7C3_9BURK Tryptophan halogenase OS =Massilia phosphatilytica OX=2026176 GN=C5614_13170 PE= 4 SV=1
MVKDRWIAKVVILGGGTAGWMTAAALTHTFGRAVEVVLVESDAIGTVGVGEATIPPIRTFHQMIGIDEAEFIRATGATFKLGIEFRGWLNERSTYFHPFGAYGVERDIGYFFQYWLRLKEKGQVSDFSEFSLCTLAARSNVFAPASERPGDPLQHLQSAYHFDAGRYVKFLKGVCIARGVSHKIGDMLAAERDPENGFITGLKLKSGEVVSGDLFIDCSGMRAMLLGQELGVEYEDWSRWLPMNRACAVPCEQKLALTPYTISTARPFGWQWRIPLQHRVGNGVVYSSEFATDEAAERCLLESLEGEPLAPVNRIRFTAGRRRTPWTRNVVAIGLASGFLEPLESTSIHFIQSSIQRLIRYFPDAGFSPVCAQAFNKEAIREIENVRDFLILHYHATEREDSALWCYVKAMRIPDSLQERIELFRERGQLNLAAEELFQSTSWHAVLLGQGIRPKTYMPTMALQDDAMLANAYSNLERNFKKIVSRLPDHAAYIKEHKLTSAMENR

SEQ ID NO: 83774 - protein, 552 aa, Chloroflexi bacterium
  misc_feature (1)..(552): tr|A0A2D6F9R9|A0A2D6F9R9_9CHLR Tryptophan halogenase OS =Chloroflexi bacterium OX=2026724 GN=CL696_11235 PE=4 S V=1
MTTDSNADPNLDLSADVVVIGGGPAGSAAATMLARKGWQVTVLEREQFPRDHVGESLLPASIPILEELGALPAVETASFLPKHGATMVWGSGDAPWSWYFKETSQRYPHSYQVWRPQFDQILLDNAKAQGVTVLEGHQVTEVIFDGDEAIGVEFTNAQGESGEAQCRFVVDASGQSTLLARHLGSKQWDPFFRNLAVYAYFKGAKLLPEPDQNNIFIESYRYGWLWSIPLHTGSTSVGAVVDSTIGQEGIQQNGAKAFLEAQLAQSGHTRAMLENAEMDSEPTVVMDWSYTAEKLYGPGYILAGDAACFVDPLFSSGVHLALMSGVLAAAYVTTALNNASMADEAGQVYQELYLKEYNQFREMARLFYSSNLSAESYFWEARRITDAGAYSPRQSFIQAVAGQPPRGYERVVLDRGQAPEEFVKSVRAVESARQSRTQWLAALASDPQRNQILNAVPRLAEGIQVQRKPVLAEGEFVEGYVLNTVSQPEGTPCSPLVAAVIEEIDGQKSVSDIVDGMGAHLDQAGHAQLEEAVSRTIEILYVDGTVARLITD

SEQ ID NO: 83775 - protein, 493 aa, Sphingomonas sp.
  misc_feature (1)..(493): tr|A0A196N7F3|A0A196N7F3_9SPHN Tryptophan halogenase OS =Sphingomonas sp. TDK1 OX=453247 GN=A7X12_01360 PE=4 SV =1
MTDNRIRRIVILGGGTAGWMSAAALSRALAGQRVAITLVESDTIGTIGVGEATIPTIHWFNQIIGLDERQFMAETKATVKLGIEFVGWNGEGSRYFHPFGTFGPPGDGTMFLHRLIRGRADGDTAPTEAYSLTAQAARSGRFARPVPDRRSLLSTLGYAYHFDAGLYARYLRGLAERAGVTRMEGMVGSVQQDGEGGFVRSLTLDDGRVVEGELFLDCSGMRGLLIEETLGVGYDDWSHWLPCDCAWAAPSAAETRLTPFTRATAAEAGWRWRIPLQHRVGNGYVFASRFQDEAAARASLLAALEGPPLADPRLIRFTPGMRREAWRANVVAIGLSSGFLEPLESTSIHLIQSGIAKLLSLFPAADCSPLLARQFNRIFGQEMLDIRDFLIFHYHATAGREEPMWRERQAMAIPQTLTERLAHFRNSGRIVLSSDELFRDASWFAVLDGQGECPGDYNPLIEGVHVQDNLRQLGALRSDIGRAVEALPALSRP

SEQ ID NO: 83776 - protein, 502 aa, Thalassotalea sp.
  misc_feature (1)..(502): tr|A0A099LB97|A0A099LB97_9GAMM Uncharacterized protein OS=Thalassotalea sp. ND16A OX=1535422 GN=ND16A_3631 PE= 4 SV=1
MSTEHRPLKSYVIVGGGTAGWISAAVLSHTLQNTGVSITLVESPDIPTVGVGEATIPSFVDLLSFLNISKQDFITKTNATFKLAIKFVDWHQQGQDYWHPFGKIGSKIDGKEFYQHWLKSNIHGGKFALTDFSPAIAMAKENRFFIPDPKNPNNLSSSAYALHFDAGLAAKFLAEYAQAKGVKLIKAHVHDVEQHEDGRIKSLNLNNVQQITSDFFIDCSGQRSLLMQKTLRVGFDDWQHYLPVNSAAVMQTEKMSILAPYTESTAHENGWRWRIPLQNRTGNGFVFSQDFCSDQQAIDLLTSTVTEKPINDPKIMRFTTGKSKRFWYKNCLSVGLSSGFLEPLESTGIHLIMKGILNFVQMLPDHNLADVTQNEYNRLMDAEYDSIRDFIVLHYCVSKRNDSAFWKMWQHTAIPDSLQNKLALFKSQGRLMRNDLDLFASDSWYAVLEGMGVTPNSYDPTVDASNFKLIQKILTESETALRNNVQQLMTHDEYITRLLTST

SEQ ID NO: 83777 - protein, 496 aa, Hyphomonas sp.
  misc_feature (1)..(496): tr|A0A2D8W0W4|A0A2D8W0W4_9RHOB Tryptophan halogenase OS =Hyphomonas sp. OX=87 GN=CMF04_01495 PE=4 SV=1
MQKVRKVVIAGGGTAGWITAAALSRMLGPLLDITLVESDDIGTVGVGEATIPTHRTFHHLMGIDEREFMRATKATFKLGIAFENWGGIGDAYIHSFGQVGKPSWMGEFYNIWMAAREKGIGEELDAYCFELQAAKHNKFYTDEKFNINYAYHLDASLYAKFLRTFSEGKGVKRVEGLIGEVEQDGESGFITALKLKSGERIEGDFFVDCTGFRGLLIEQTLKSGFEDWGHWLPTDSALAVQTRSVGPALPYTRSIAHQSGWQWHIPLQHRVGNGLVFCSQYMQPDEAEQVLRNNLQGELLGEPRLIRYKTGRRQKVWSKNCVALGLSSGFLEPLESTSIHLIQIGASRLVQQFPFSGVSEAIANHYNEQSTRELERIRDFIILHYKVTERDDSAFWRDRRDMDIPDSLAQRLDVFRENGLAYQATDDLFRVDSWLQVMMGQRLMPKGYHHMGHMMTEDQMQRALGGLSSGIANTVAKMPTHQEFIDRYCAIEAEPA

SEQ ID NO: 83778 - protein, 526 aa, Thalassotalea sp.
  misc_feature (1)..(526): tr|A0A099KPL3|A0A099KPL3_9GAMM Uncharacterized protein OS=Thalassotalea sp. ND16A OX=1535422 GN=ND16A_1751 PE= 4 SV=1
MTDIHKDDLVKEVVIIGGGTAGWLTACHLAKKHGSNTPQGLRVTLIESPNIPTIGVGEGTVPSILESLRYFGISETDIIRECDATFKQSIKFVNWMKPKGNSHNNYYHHPFDYIDSNQFDLTPYWLNGQFEGHSYTDTIGIQSYVSDLHLAPKLMTHEEYAGINGYAYHLDAAKFSQLLTRHAVEKLGVKHVLAEVKDIRLTDCGAIDSVVTDNQGEFFADLFVDCTGFSSLLLGQTLGVNFISKNDVLFADHALAIQVPYTDPNQTIPSYTISTAQEAGWIWDIGLSERRGTGYVYSEKYSSHARAEQVFRDYLRQSIGDKVDELPCRRIEMNVGYREKFWVKNCVAIGLSQGFVEPLEATGLLIFDDTAKMLAELLPSKMSTMPIIAERFNKSGRYQWDRVIDFIKLHYYLSDRDDTPFWRDNRSQESTPQKLLDNLALWRERPPSDYDFITKQEVFYRTNYLYVLYGMAFNTDISAIAYRYTEQGKAEQKHSLILQQKAKVQGMLLPHRELLQRIKQYGLQKI

SEQ ID NO: 83779 - protein, 498 aa, Alteromonas sp.
  misc_feature (1)..(498): tr|A0A4V6WLX7|A0A4V6WLX7_9ALTE Tryptophan 7-halogenase OS=Alteromonas sp. HB161718 OX=2565549 GN=E5672_06670 P E=4 SV=1
MNSPIHIVIAGGGTAGWMAANYFAHKWPSGKVNITLVESSDIGIIGVGEGSTPTLKRFFDELNIQENDWMPKCNATYKVSIQFKDWSPGSGINQYRHPFISQTDTFTQRAFEVNCRTRRLGLDTHVTPEDFLINGVLAQQNKAPLTPDNFPFRMEYGYHFDSALLGNYLREVAVGKGVTHINAIISNVALYPRGDISHLVTDKGIIKGDFFVDCTGFSSTLLQQSLGVKFNSYSENLFNDSAVVLPTRVQENIKVETQSTALSNGWCWTIPLQNRTGNGYVYSAAHLSKDQAEEELRRHLGLESTDVEARHLKMKVGQVGQHWHKNCLALGLSQGFIEPLEATALHLVQICIEYFSDMFEKSGFSTKESSNYNSFAKERFDRVRDYIVAHYKLNTRDDSDYWRDNRNNMVMSDSLKSIISTWFSREDLATEIKRQNIGMHWDSVSWHCLFAGYGAFPPLEKNQPGRGDLYKEQNIERFIQGCALNFKHNNSVLEELMR

SEQ ID NO: 83780 - protein, 483 aa, Sphingomonas sp.
  misc_feature (1)..(483): tr|A0A196MSH8|A0A196MSH8_9SPHN Tryptophan halogenase OS =Sphingomonas sp. TDK1 OX=453247 GN=A7X12_04750 PE=4 SV =1
MRDGGGRMSLRRILVVGGGMVGWSAAAALKRRLPHLDITILPIAPPADALADRIASTLPSILGFHSDLGIGLGDAVLRTGGQYRLGTLFRDWVAGAPDYVHAYGRTGTPIGGAPFHQLWARAALASAAPPFDTLSVAAMMARSGSFVTPQADGLLSEHSFGLTLDIPRYTAMLMAFARHVGVQGHLGEVAHVEQDVRGDIAAVVLEDGARITADLYCDCTGPAARLHGAIAVPREDWQAWLPCDRVVLEEVAGEDEAAPMERVTATDHGWRWVGTRQRGTVYCAAFGATDASAVAFRSGATLAPWRGNVVAIGDAAVSVEPLEWSNLHLAHSAIDRLIAMLPAGRPHPLEAAEYNRQALAEARRVRDFLVLHYATARRDTPFWQARAQTGLPDSLAHTLRLFRERGRLPYYEEETFDRESWLAVLFGQHVLPRRIDPLTDAVPPAEAAAAMTSLQQRIAQEIERVPAAARFRALQLERLHERA

SEQ ID NO: 83781 - protein, 507 aa, Hyphomonas sp.
  misc_feature (1)..(507): tr|A0A350ZRD0|A0A350ZRD0_9RHOB Tryptophan halogenase OS =Hyphomonas sp. OX=87 GN=DCY26_06800 PE=4 SV=1
MTDKRVRKILIVGGGTAGWMTAAVLAKLLKNDYADIHLVESEEIGTVGVGEATIPQIGTFNRTLGIDETDFVKATQGSFKLGIEFVNWGALGERYIHPFGAYGLDMDGVSFHAFFLKHHAARYGPETMDQYNLQALAARQNRFMRPVNAGNSPLSKIAYAFHFDASLYARYLRKYSEARGVTRHEGKITSVSLHPETGYVQHVQLTDGRILDADLFVDCTGFRGLLIEQALKAGYNDWSHWLPCDRAVAVPCENAERLTPYTRSTAREAGWQWRIPLQHRIGNGHVWSSAFTTEERATEILMSNLDGKALDAPRHLRFLAGHRKKFWEKNCVAIGLSAGFIEPLESTSIHLIQSGVAKLMQMFPSGGFNQPDIDRYNRVTTFEYERIRDFIILHYHLNRRDDSELWKYTQNMPVPDYLTDKMALFESHGRIFRENEELFNDTSWFAVMIGQGLKPRDYDPVADVQSAEETAARLTNIRDTIATSATYMPTHEQFIEENCDARTYVPA

SEQ ID NO: 83782 - protein, 509 aa, Caulobacter vibrioides
  misc_feature (1)..(509): tr|A0A290MGA8|A0A290MGA8_CAUVI Tryptophan 7-halogenase OS=Caulobacter vibrioides OX=155892 GN=CA606_01210 PE=4 SV=1
MTPSPIRNVLIVGGGTAGWMTAAALAKALPKTIAVTLVESETIGTVGVGEATIPPINTFNQILGLDEAAFMRATKGSFKLAIEFVDWMGPGHRYLHPFGGFGLDIEAVKFHQVWLRAHHEGWAPPIDAFNLSAQAAHLNRFAPPSKDPGQVLSSLKYAFHFDAGLYAKFLRDYAEPRGVTRVEGKIASVQQHGETGFVTGVTLEDGRALEADLFVDCSGFRGLLIEQTLQAGYDDWSHWLPNDRAVAMPCVTGGDGLTPYTRATADAAGWRWRIPLQHRTGNGYVYSSRDISDEDAVARLRATLDGEPLAEPNFLRFQAGRRKAAWVKNVVAIGLSSGFLEPLESTSIHLIQAGITKLLALFPDQGFDPVEIAEYNRLTALQVELIRDFIILHFKANARSEPYWVRAREMEIPETLQRKIDLFAASGRLFPSDLDLFAEPSWIAVLLGQGVTPRRHDPLVDAFDEAFLKNQLSRLAGLIRQTAEALPTHEQFIARYCAAPHASRPEFRA

SEQ ID NO: 83783 - protein, 504 aa, Sinorhizobium saheli
  misc_feature (1)..(504): tr|A0A178XWY0|A0A178XWY0_SINSA Uncharacterized protein OS=Sinorhizobium saheli OX=36856 GN=ATB98_04815 PE=4 SV =1
MIDLTNAKRVGIIGGGIVGWLAAITLARVFGSDVDVTVIEAPAVFPLGLGEGGSPNLIDTLCRNDLDLDVFIGEAGANYKHGVLYDNWLGRGVPDRYYHLFGGRGIPGLEYRVNGFFPRLSARIAMGQDLHTCIPGFKAIARNASQQEIDELVATGESGLYLSYHFDDADFERYLKRVGLARGVTSYAAKECWIRLDDRGHVCALQLQGEQFKVDFAVDASGLARMGLGSAFKPGWRSFASVLPTDRAITFDLQPKESSLRSLTRSTAMTAGWTWEVPLNRTTSAGCVFSSRHADDSMVMAEVQHRFGYGVQRKHELSFDQGYFETVWVNNLVALGTATGFVEPLGAALAAHTFEQLRNLERTLTNGGGIVPAHAIEAFNSANAKSWTGVRDFLRLHYDSKRNDTPFWRDLSEADLPKSYAELRACFQKRTPRHIDIEPYVGSGWQSLFHQIDWISVAAPLGVVPAAAARAELSQLPLEWQCEDHPDLLEGAMSTIRPRSGWVH

SEQ ID NO: 83784 - protein, 795 aa, Methylobacterium sp.
  misc_feature (1)..(795): tr|A0A2U8HTD1|A0A2U8HTD1_9RHIZ Tryptophan halogenase OS =Methylobacterium sp. DM1 OX=2067957 GN=C0214_13460 PE= 4 SV=1
MFRSERSAPPRLVVAGGGPAGWMAAFYLKRVLRRAGWSVTLVGAAPAAGTPVALATRPSFTRFLNGFDIDEAIFMRRCAATYRLASRYDDWFAEGEGHWHPFGACGPSIAGRDLFHYWMKLRGAGAEDEAGSYSDYAPQALMAAAGRGPRPEAERSSLTESGEYGYHLDRAALVRFLRELALAEGVRAVSGRVSGIERDLYGDVAALVLDAGQTVEGDIFLDCTGAASQLIGTALGEAWNAGSGPGDRLVRLSRPRLPEAPPFTAYRGRAEGWTASLPLADRTEHHFVYDSRVTSPDAATEILQRAFDGKGGLAHAELRYGRRAAPWQRNVVALGAAAGAVEPLVGFDLDLVLAGLEAFLAYLPRQGEGGDVLRRAYNARANRFHDDAAEAMAAHYVLGRRPDRFWANARAMTIPDRLADRLDLYELAGHVAPGEDTLFGEGDHYLLFSGAEFLPRRPFAPVDVTDGREVARLLASIRAQSGRVAQAMAPHARLIEALHGPAPAAAAAIHVMAAEAPAGPASLRGTPAGARLADLVAGLGQPFGYERSVKATPAGLQTERFLVSLHRTSLGLAPGKTLDDLVMRLGMPEQERAEAADLIADADILHLGYEDGPSGALYKLYVEWSSRTDAAWSGADETGVEPMLVHRAYKWRPEGGHPPIVTLYHWPQVRSPEDIEARLSRIADAWGAAGTPVLDTARAILRLARERGRGSVHYLEAREEPGQRLSYDLNLYACGLSVAEAEPLLGQAFVDLGIPPQAAAAVLGERLQETLGHVAGGVGRDGQPFLTVYSGKAGA

SEQ ID NO: 83785 - protein, 496 aa, Colwellia sp.
  misc_feature (1)..(496): tr|A0A2N1BZK2|A0A2N1BZK2_9GAMM Tryptophan halogenase OS =Colwellia sp. 75C3 OX=888425 GN=CXF85_13460 PE=4 SV=1
MNNLSEVKNVVIAGGGTAGWMAATALAKLIGNNLNITLVESDAISTVGVGEATIPPLLTFHKMLKIDEAEFMSSVNATFKLGINFENWKDTSSEYFHSFGTTGRDCWATTFLQFYHRSKKEGYQAKYEEYCLELQAGLNEKFAHLPNSGLKYAYHMDATLYAKFLRNISEKHGVNRVEGKIEQVNIDENSGFIKSLTLLSGQTIAGDLFIDCTGFRGVLIEQALHTGYDDWSHWLPCDRAVAVQTESTEEPKPYTRSIAHESGWQWKIPLQNRTGNGLVYCSKYLNDENAEKLLLENVEGKLLKKPLFIKFTPGQRRKHWNKNCVALGLSSGFIEPLESTSIHLIQRGIIRLMQMFPKTGITDSVINEYNYQSEEEIRYIRDFIILHYHVTNRNDSNFWRYCSKMDVPSSLSHRIELFKEHGYVFKAPWDLFAENSWIQVMLGQGLSPQSHHPIADMLSVDEQELFLGGIKNSIEKTVKSLPTHKQYLDQYCKSKI

SEQ ID NO: 83786 - protein, 538 aa, Burkholderia pseudomallei; identical to SEQ ID NO: 82926
  misc_feature (1)..(538): tr|A0A0E1TX10|A0A0E1TX10_BURPE Tryptophan halogenase Pr nA OS=Burkholderia pseudomallei 576 OX=557724 GN=BUC_70 18 PE=4 SV=1

SEQ ID NO: 83787 - protein, 520 aa, Pseudoalteromonas piscicida
  misc_feature (1)..(520): tr|A0A0F4NRU8|A0A0F4NRU8_PSEO7 Uncharacterized protein OS=Pseudoalteromonas piscicida OX=43662 GN=TW75_18895 P E=4 SV=1
MNLKEISKVVIVGGGTAGWIAACHIAKKLNPNENDNISITLLDSPDIPTIGVGEGTVPVIKDTLKYFGIKESDFISQCDVTFKHSIKFVNWCHNPSAVEEDFYHHLFDFPNIRPFDVTPHWLLNKDLASKKYADLVSVQSYICAKALPPKRLSDKEFSGLFNYAYHLDAGKFTELLRQHAIHKLGVKNLKCNVTKANLNEEHFIESLELGNGERMKGDFFVDCSGFQSLLIEQSLGGKFIDKGSELLADTALAVQVDYDTPNATIKPYTTSTAQKYGWIWDIGLTTRRGIGYVYSSKYQTEESARSTLLNYIDDSKMLSQVRKLPMKVGYQQTPWINNCVAMGLSQGFVEPLEATGLLMFDVTARMFAEAFPSDVENITLRQKRFNEDVTQMWESTTDFIKLHYYLSKRDDSAFWIDNRNENSLSNELKEKLQLWRAKIPSQFDFRSNLDLFRVSNYLYVLYGMNYYTHLSIQPPSGEASALSKLLEDIQKGVSYCSNNLRGHRETLEHIKRSVAHVGQK

SEQ ID NO: 83788 - protein, 552 aa, Chloroflexi bacterium
  misc_feature (1)..(552): tr|A0A2E6PJN8|A0A2E6PJN8_9CHLR Tryptophan halogenase OS =Chloroflexi bacterium OX=2026724 GN=CL767_00750 PE=4 S V=1
MTTDSNADPNLDLSADVVVIGGGPAGSAAATMLARKGWQVTVLEREQFPRDHVGESLLPASIPILEELGALPAVETASFLPKHGATMVWGSGDAPWSWYFKETSQRYPHSYQVWRPQFDQILLDNAKAQGVTVLEGHQVTEVIFDGDEAIGVEFTNTQGESGEAQCRFVVDASGQSTLLARHLGSKQWDPFFRNLAVYAYFTGAKLLPEPDQNNIFIESYRYGWLWSIPLHTGRTSVGAVVDSAIGQEGIQQNGAKAFLEAQLAQSGHTRAMLENAEMDSEPTVVMDWSYTAEKLYGPGYILAGDAACFVDPLFSSGVHLALMSGVLAAAYVTTALNNASMADEAGQVYQELYLKEYNQFREMARLFYSSNLSAESYFWEARRITDAGAYSPRQSFIQAVAGQPPRGYERVVLDRGQAPEEFVKSVRAVESERQSRTQWLAALASDPQRNQILNAVPRLAEGIQVQRKPVLAEGEFVEGYVLNTVSQPEGTPCSPLVAAVIEEIDGQKSVSDIVDGMGAHLDQAGHAQLEEAVSRTIEILYVDGTVARLITD

SEQ ID NO: 83789 - protein, 503 aa, Massilia phosphatilytica
  misc_feature (1)..(503): tr|A0A2S8HF84|A0A2S8HF84_9BURK Tryptophan halogenase OS =Massilia phosphatilytica OX=2026176 GN=C5614_04655 PE= 4 SV=1
MQVPHLNTIVIVGGGTAGWMTATALATALRGRYRIRLVESDEIGIVGVGEATIPMIQRFNTVAGIDEAEFLKATNGTFKLGVEFVNWGRVGDRYTHGFGRLGQDLWMVGFEQYWHKMRAQGQARDLADYSITRAAARANKFMLPRTDLGNSPLGEITYAYHFDAGLYARHLRKLSESRGVERTEGKIVRVTQRAHDGHVDAVVMENGERIEGDLFIDCSGFRGLLIEQTLEAGFEDWSHWLPCDRALAVPCESVAPLTPYTRATAHKSGWQWRIPLQNRIGNGHVYCSRYISDDEAAHVLLSNLDGKPLADPRPIRFTTGMRKKAWDKNVVAIGLSSGFLEPIESTSIHMIQDAIQRLLDYFPDQGFSATDVDAFNRLSRFHYERIRDFIILHYHANQRDDAAFWQECARMEIPATLREKIDLFRTHGRLRRVDSELFTEVGWLQVLVGQNIHPHAYHPLVDVQSEEGIRDYMEGVADVIRQCVDFMPDHARFIAEYCKAPPM

SEQ ID NO: 83790 - protein, 504 aa, Pseudoalteromonas piscicida
  misc_feature (1)..(504): tr|A0A3B6Y2I2|A0A3B6Y2I2_PSEO7 Tryptophan 7-halogenase OS=Pseudoalteromonas piscicida OX=43662 GN=D0N37_11165 PE=4 SV=1
MKSQKIVILGGGTAGWMAANMMAKSWADKAIEITVVESSSIGTIGVGEGSTPQFKGFMDYLGISEAEWMPACNATYKNGIRFIDWSTKPGFSRYFHPFPAQPDDYSAPAFFHNSFVRRKAIDVEGHPDHFFLATHLADLNKSPIAAESFPFEINYGYHFDSALLGQLLARKAAEFNVKHIDATITDVRKHVDGDIAALITSDGTEISGDIFIDCSGFKSLLLQHTLGVGFESFESNLFNDAAVVIPTKQLDTIRSETQSVARQFGWSWHIPLTNRIGNGYVYSQRYCDADQAETELRAALGLLESEVEARHIKMKVGQVKAHWSKNCIAIGLSQGFIEPLEATALHIVQETVQSFIECYQNADFTDADRDKHNRALSERYQAIRDYIVAHYRVNSRTDTNYWLDNAHNNNLSRSLYQILQTWVSGNNLSDELVRQNVEQYYPSVSWHCLLAGYGIYPDQAQLKSGNALANQHSIEKVNDFIRRCGLNFRDHRMELESFAANVHK

SEQ ID NO: 83791 - protein, 503 aa, Alphaproteobacteria bacterium
  misc_feature (1)..(503): tr|A0A257EQ99|A0A257EQ99_9PROT Tryptophan halogenase OS =Alphaproteobacteria bacterium PA4 OX=2015572 GN=CFE37_ 02680 PE=4 SV=1
MTAPAGDRAIRTIAIVGGGSAGWMAAAALSRALGAAIRIDLIESDEIGTVGVGEATIPPIKLFNQQLGIDEAEFMRATQASFKLGIEFVNWGQQGQRYFHPFGTYGAEFDTVPLHQHWLRQRALGQAPPLDDLSMAWAAARRNRFAPPARDPRLVQSTFDYAYHFDAGLYAAFLRRQSEARGVVRHEGRIASVSRHPETGHVAGVTLGDGRTLAADFWVDCSGFRGLLIAGALGTPDEDWSHWLPCDRALAVPSERGDFTPYTRSTAHSAGWQWRIPLQHRTGNGYVYCSRHISDDEAAATLLANLDGRPLADPRPLRFVTGRRAQAWRGNVVAIGLAAGFMEPLESTSLHLVQSGLQRLIALFPDRDCDPLVSAEFNSLTRTEWERIRDFLILHYHLNSRTDAALWRDCAAMPIPDTLAHKIAHFGAWGRLVSDGPELFLNPSWLAVHIGQGHVPRAHAPIVDTRDGVDAARHLAGLARVMAEAAEAMPTHADFVATHCAAG

SEQ ID NO: 83792 - protein, 498 aa, Sphingomonas sp.
  misc_feature (1)..(498): tr|A0A196MT03|A0A196MT03_9SPHN Tryptophan halogenase OS =Sphingomonas sp. TDK1 OX=453247 GN=A7X12_04755 PE=4 SV =1
MNEHSIRDVVIVGGGTAGWMAAAAFSRVLNNGYTRITLVESDEIGTVGVGEATIPPILRFNQMIGLAENQFLAETGGTFKLGIEFVDWGALGDRYFHPFGNYGQDLEGIPFHQLYLRERARRPLPEIAAWSMSAVAASLGRFGRPAATAQSPIRDLFYAFHFDAGLYAQLLRRLAESRGVSRVEGKVVTVAQRSEDGFVQSVALADGRVVAGDLFIDCSGFRGLLIEDALQTGYEDWRRWLPCDRAIAAPCANVGEPTPFTRATAREAGWQWRIPLQHRTGNGLVYCSDYLEDDAAERQLLGSLEGSPLAAPRRLRFTTGRRRALWSHNVVALGLAGGFLEPLESTSIHLIQSGISRLIALFPDKRFDPIEREEYNRQMGTLYDDVRDFIILHYKATSRTDSPFWDRCRTMDIPDSLAQRIALFESKGRLFREGHELFSSPSWVAVCMGQHIVPSDHEPIADALDEDLVAQALDQMQRGYRETAERLPTHGEFLRRCT

SEQ ID NO: 83793 - protein, 499 aa, Hyphomonas sp.
  misc_feature (1)..(499): tr|A0A2D8EJG6|A0A2D8EJG6_9RHOB Tryptophan halogenase OS =Hyphomonas sp. OX=87 GN=CME98_03530 PE=4 SV=1
METQNIRRVVIAGGGTAGWIAAASLSRLLGPLLDITLVESDAIGTVGVGEATIPTHRTFHHLMGIDERDFMRATKATFKLGIAFEEWGGLGDRYIHSFGQVGKSNWMGEFYNIWMYAQERGIGAELDAYCFELQAAEAGRFFTSDKANINYAYHLDASLYAKFLRTFSEAKGVKRVEGLIEEVEQDGESGFITALKLQSGERIEGDLFIDCTGFRGMLIEQTLKTGYEDWTHWLPTDSALAVQTRSIGPAQPYTRAIAHHAGWRWRIPLQHRVGNGLVFCSENMQPDEAKEYLLGHVDGEPLTEPRLIRYKTGRRKKVWSKNCVALGLSSGFVEPLESTSIHLIQVGATRLVQQFPFAGISEAIANHYNEQAERELEKIRDFIVLHYKLTERDDSDFWRARRDMPVPDSLAQRISLFRENGLAYQATDDLFRVDSWLQVMLGQRLKPKGYHHMGHLMTDDQLMTALGGLEANISKAVSQMPSHQDFIDQYCAVPESEAV

SEQ ID NO: 83794 - protein, 507 aa, Pseudoxanthomonas sp.
  misc_feature (1)..(507): tr|A0A0Q8EAA2|A0A0Q8EAA2_9GAMM Tryptophan halogenase OS =Pseudoxanthomonas sp. Root630 OX=1736574 GN=ASD72_1441 0 PE=4 SV=1
MTDHPNRIRSVVVVGGGSAGWMTAAALATYLGKQASIRLVESEEIGIVGVGEASVPYMKQFNSGLLGIDEFEFVARTQGTFKLGIQFNDWGSIGESYVHGFGKIGQGIGPLPFHQFWLKLFLAGRARPIGEYSLPTLAAPLGKFMASPANAPPDSPLADIAYAYHFDAALYAGFLREVSERRGVQRIEGKITGVQQRSEDGFIEAVVLDSGEQVTGDLFIDCSGFRGLLIEQTLKTGYVDWTHWLPCNRAMAVPCATVEPPTPYTRSTARAAGWQWRIPLQSRVGNGYVYSSEYISDDEAAATLLANLDGRALADPRPLRFTTGMRRKLWNKNVVALGLASGFMEPLESTSIYLVQSGIQRLLGLFPDRDFDPMLERQFNEESAFEYESTRDFLILHYCATRRSDSAFWDYCRTMPIPDTLQRKIEMFRHGGRYFRTGDEFFALPSWVQVMLGQGIVPTGYHPIVDDMPEQALIEHVARVHQSIANSVGAMPPHQAFIDRHCRASAM

SEQ ID NO: 83795 - protein, 520 aa, Streptomyces sp.
  misc_feature (1)..(520): tr|A0A429I0N9|A0A429I0N9_9ACTN Tryptophan halogenase OS =Streptomyces sp. WAC 06783 OX=2203211 GN=DMH18_26900 P E=4 SV=1
MLTNVVIVGGGTSGWMSASYLKAAFGDRLSVTVLESKRIKTIGVGEATFSTVRHFFDYLGLPEHVWMPKCNATYKLGIRFENWHRKGSYFYHPFERLRVVDGFPLTDWWLHRKPGNSERFDQDVFLMSAICDAERSPRYMDGTLFEQDFKEQTDPKDRKPERSTLTEQDTQFPYAYQFDASLLADYLCAYSTERGVRHIEDDVVEVARDDRGWIGHLRTREHGDVTADLFIDCTGFKGLLLNEALEEPVISFQDTLPNDRAVALRVPVDMEKRGLRPCTTATAQDAGWIWTIPLFGRIGTGYVYASDYTTPEEAERTLREFVGPDAKDVEANHIRMRIGRSRNAWVNNCVAVGLSSGFVEPLESTGIFFIQQGIEQLVKHFPGADWNPQLRDSYNRAIGNTIDGVREFLVMHYRGAGRNDNQYWKDAKTRALPDGLAERLDMWRSKLPTTETIFPNYHGFEPYSYHSMLLGLGGVDLKAPPALALMDDSAAQAEFKLLRAQSQELAKRLPSQYEYLAQMH

SEQ ID NO: 83796 - protein, 501 aa, Streptomyces albus
  misc_feature (1)..(501): tr|A0A0X7JFZ2|A0A0X7JFZ2_9ACTN Tryptophan halogenase OS =Streptomyces albus subsp. albus OX=67257 GN=ADL21_2684 0 PE=4 SV=1
MPAPSEEFDAVVVGGGPGGSTAAALIAMAGHRVLLLERERFPRYQIGESLLPSTVHGIGRLLGVEEELHEAGFMRKRGGTFRWGSAPGTWTFSFADAPGLGETGGYAYQVERMRFDALLLDHARRVGADVREECAVRAIHHHDGRVTGLTYRSPEGTEAEVRARYVIDASGNTGRLHTAAGGRRVYSPLFRNIAVFGYFEGGRRLPPPNQGNILCAAFDTGWFWYIPLTDRLTSVGAVVNREHADQVQGNPEQALAKLVNQCALVRDHLADARRVTEGTYGRVRVRKDYSYCNTRFWAPGVALVGDAACFIDPVFSSGVHLATYSAMLTARSVNSVLGAGMDEGRAFGEFEARYRREYTVFHDFLAAFYSMQAPKDTYFWQAHKVTGGQAGALASFINLVGGLASGDRVLIDADQLTGRLATASRVLDETADGYQADPAGDPWDESPMLAETFAQSDALAGQGVARGDFAEKTPQFPGGLVATADGLHWAEPAGEPPGGTP

SEQ ID NO: 83797 - protein, 503 aa, Caulobacter vibrioides
  misc_feature (1)..(503): tr|A0A258D7W7|A0A258D7W7_CAUVI Tryptophan halogenase OS =Caulobacter vibrioides OX=155892 GN=B7Z12_10110 PE=4 S V=1
MTNDHRLRRIVIVGGGTSGWMTAAALGRFLKDGYTKVTLVESEAIGTVGVGESTIPQINIFNRMLGLEENEFVKKTKATFKLGIDFVDWKEIGHSYHHPFGPYGVDMEGVSFHAYWLKLRAMGLDDDLGAYSLQTVGARQSKFMRPNGQANSPLGQIAYAFQFDAGLYAKFLREYSEARGVTRQEGKIASVQQDGQSGHVTSVTLESGQVIEGDLFIDCSGFRGLLIEQTLKTGYEDWSQWLLNDRAVAMPCTLGGSMAPVTRATARPHGWQWRIPLQHRLGNGYAYSSQHVSDDEALADLLSQLDGEPLADPNLIRFTPGRRKKSWNGNVVAIGLSAGFMEPLESQSIYLIQVGISRLLAHFPDRHFRQADIDRYNRTMAFEYEKIRDFIILHFKATARSDTPYWDYLREMPIPDYLADKIDLFKGSGRVFRENDELFNDTSWFAVFIGQGIYPEGYDPMVDNMDEGLFKARMAEIKSVIAKSAEVMPGHMEFIRENCAAEG

SEQ ID NO: 83798 - protein, 424 aa, Gammaproteobacteria bacterium
  misc_feature (1)..(424): tr|A0A2N1XHW4|A0A2N1XHW4_9GAMM Tryptophan halogenase (F ragment) OS=Gammaproteobacteria bacterium HGW-Gammaprot eobacteria-7 OX=2013803 GN=CVV17_01220 PE=4 SV=1
MSDNRIRTLVIVGGGTAGWMAAAVLAKAFGPSLSIRLVESEEIGIVGVGEATIPQIRLINQFLGLDEDAFLRASQGTFKLGIQFNDWSRLGDSYLHAFGETGLPVGVLGFHHYWLRGLHAGRPERYWDYSLNTRAALANRFGRLDAIGQTPLAGIRYAFHFDAGLYARHLRSYAEQRGVQRTEGRIVDVALRDPDGFIDAVVLDGGERVAGDFFLDCSGFRGLLIEGALKAGYAQWTDWLPCDRAMAVPSARVEPMRSYTQANAQVAGWQWRIPLQHRTGNGHVYCSRYLSDDEAASILLANLDGEALDDPRPLRFTTGMRKRFWHRNCLAIGLSSGFMEPLESTSIHLIQTAISRLLALFPDRDFDPLVIAEYNRISALEYERIRDFLILHYHAVQRSDAPLWRQTAHMAIPDSLQRKLDHFR

SEQ ID NO: 83799 - protein, 510 aa, Streptomyces sp.
  misc_feature (1)..(510): tr|A0A429IEN3|A0A429IEN3_9ACTN Tryptophan halogenase OS =Streptomyces sp. WAC 06783 OX=2203211 GN=DMH18_08065 P E=4 SV=1
MGERAVANSANAGNPANPETYDVVIVGGGPAGSTLGALVARQGHRVLILEKEFFPRYQIGESLLPSTVHGVCRLTGVADDLAAAGFTRKRGGTFRWGATPEPWTFSFSVSEHMAGPTSYAYQVERSKFDEILLRHAGRCGAEVREGCAAADVIADEERVRGVRYTDADGAEREAYGTFVIDASGNKSRLFQRVGGQRTYSEFFRSLALFGYFEGGKRLPEPNSGNILSVAFDSGWFWYIPLSPTLTSVGAVVRREMAEKIQGDQEEALRALIAECPLISEYLANARRVTTGQYGQLRVRKDYSYHQTTFSRPGMLLVGDAACFVDPVFSSGVHLATYSGLLAARSINSVLAGLVDEAVALREFEARYRREYSVFYEFLLSFYEMHHSEQSYFWQAKKVTHHKRSEMEAFVDLVGGVSSGETALTDADAMAERLRADSAEFAGAVDQLAHSEDGSMLPLFKSSVVSQVTREGSQVQMRALLGADAEPETPLLPGGLVSSPDGMFWLPASSG

SEQ ID NO: 83800 - protein, 505 aa, Unknown
  misc_feature (1)..(505): tr|A0A0N1LMC9|A0A0N1LMC9_9PROT Tryptophan halogenase OS =alpha proteobacterium AAP38 OX=1523418 GN=IP70_12795 P E=4 SV=1
MMQAKALDITIVGGGTAGWMTAALLAKATKGRLGRITLIESAEIGTVGVGEATIPPIQFFNQLLGIEERDFVARTQASFKLGIEFRNWTRTGHSYIHPFGSYGANIDAVSFHHYWLRARALGDGTDIGDYCPAIVAARQGRFAPEIPQGPASAPLLSYAYHFDAALYAAYLRDFATGLGVTRIEGRITGIRQRAEDGYITALDLADGGSVGGDLFIDCSGFRSLLLGQTLGVGFKDWSRWLPCDRALAVPCEGGRDITPYTRSTAHTAGWQWRIPLQHRIGNGHVYSSAFMSDEEAEGLLLGHLDGRPLADARPLRFTAGRRDKAWVRNVLGVGLAGGFLEPLESTSIHLIQTALFRLLALMPTDIRDQATRDEFNRLSEIEYEQIRDFLILHYNATERDDSDFWNYCRTMPIPDSLRHKIDLFRARGRVARFDGQLFAEASWLAVFLGQGVDPVGYDPMADIMPAGELQQRLSRHRDYVQRAVATMPAHRDFIDRHCKAPATAA

SEQ ID NO: 83801 - protein, 547 aa, Chloroflexi bacterium
  misc_feature (1)..(547): tr|A0A2D8PIN0|A0A2D8PIN0_9CHLR Tryptophan halogenase OS =Chloroflexi bacterium OX=2026724 GN=CL702_02950 PE=4 S V=1
  misc_feature (10)..(10): Xaa can be any naturally occurring amino acid
  misc_feature (33)..(33): Xaa can be any naturally occurring amino acid
  misc_feature (72)..(72): Xaa can be any naturally occurring amino acid
  misc_feature (239)..(239): Xaa can be any naturally occurring amino acid
  misc_feature (250)..(250): Xaa can be any naturally occurring amino acid
  misc_feature (341)..(341): Xaa can be any naturally occurring amino acid
  misc_feature (476)..(476): Xaa can be any naturally occurring amino acid
MTAHEQSPDXVVIGGGPAGSTAATMLARQGVSXLLLERERFPREHIGESLLPASIPILEELGVLPAVEAAGXLTKWGATMVWGSDPTPWSWYFRETNQRNPHSYQVWRPQFDQLLLENSRAHGVDVREGHRVLEVLWQDGKATGVRYQSDDGETGTIQCRYVVDASGQTGLLARDLNLRQWDPFFQNLAVYGYFRGAHPLPEPDETNIFIEAHPHGWLWSIPLHTGWTSVGAVVDSATXQNEISTGSLDXFLQAQIDQAPHTSKMLRDAHLESGPFIVKDWSYVCERVAGDGYVLAGDAACFVDPLFSSGVHLALMSGIMAAAYVTSALKDPEIVEAAAAXYHELYLKEYGHFREMARLFYSSNLTSDSYFWEARRLLEDAGNFTPRQAFIQAVAGQPPRGYERAVLEQGQAPLEFASSVRQVESERERRRVRWEAALSGTDNGDPIMAAVPRLAPETQIQRKPVLGAGEFVWGTXLTTVSQPEGIPCSGLISAMVSQIDGARTVAQLLDELASLGEPSQADQIRQTALAALGILYVDGTVEELGGL

SEQ ID NO: 83802 - protein, 510 aa, Streptomyces albus
  misc_feature (1)..(510): tr|A0A0X7JQ09|A0A0X7JQ09_9ACTN Tryptophan halogenase OS =Streptomyces albus subsp. albus OX=67257 GN=ADL21_0915 0 PE=4 SV=1
MGERAVANSANAGNPANPETYDVVIVGGGPAGSTLGALVARQGHRVLILEKEFFPRYQIGESLLPSTVHGVCRLTGVADDLAAAGFTRKRGGTFRWGATPEPWTFSFSVSAHMAGPTSYAYQVERSKFDEILLRHAGRCGAEVREGCAAADVIADEERVRGVRYTDADGAEREAYGTFVVDASGNKSRLFQRVGGQRTYSEFFRSLALFGYFEGGKRLPEPNSGNILSVAFDSGWFWYIPLSPTLTSVGAVVRREMAEKIQGDQEEALRALIAECPLISEYLANARRVTTGQYGQLRVRKDYSYHQTTFSRPGMMLVGDAACFVDPVFSSGVHLATYSGLLAARSINSVLAGLVDEAVALREFEARYRREYSVFYEFLLSFYEMHHSEQSYFWRAKKVTHHRRSEMEAFVDLVGGVSSGEAALIDADAMAERLRADSAEFAGAVDQLAHSEDGSMLPLFKSSVVSQVTREGSQVQMRALLGADAEPETPLLPGGLVSSPDGMFWLPAGSG

SEQ ID NO: 83803 - protein, 504 aa, Unknown
  misc_feature (1)..(504): tr|A0A0N0K865|A0A0N0K865_9PROT Tryptophan halogenase OS =alpha proteobacterium AAP38 OX=1523418 GN=IP70_18640 P E=4 SV=1
MKPLNKIVIAGGGTAGWITAAMLSFMTKGTGTTVELVESDEIGTIGVGESTIPPFVVLLRSLGIDEQDFIKSTNASFKLAIRFEDWFKKNQHYYHPFGTLGGLIDNHEFYQCWLRAKAAGHTSELQDFAAATVMADQMKFLLPFKAPRTMIASASYALHVDAKRVAQYLRRYAEERGVTRTEGRINRVRTRPDGAIAGLDLANGKVVDGDFFIDCTGFRALLIGQTLGVGYVSWADELLCDRAVAVQTENTDDDADVHPYTLSQAQDCGWRWRIPLQHRAGNGYVYSSRFLSDDEAVATLMRQVKGRPLIEPNIIPFKTGMRAKMWEKNCVALGLAAGFIEPLESTAIHLVYRAVDYLFRFFPDGDIDPSLQAEFNRRVAAEYEEVRDFIVLHYCTTQRDDTPFWRAAQRTPIPASLRARMDLFKATGILRQGLEELFGAASWQSVYEGMGVRPARYQPFVDKVPMSVITETLDRSAPLLKAQVAGLPHHAQFLRDHCRAERDF

SEQ ID NO: 83804 - protein, 526 aa, Sphingomonas sp.
  misc_feature (1)..(526): tr|A0A4R2TAR8|A0A4R2TAR8_9SPHN Tryptophan halogenase OS =Sphingomonas sp. PP-F2F-A104-K0414 OX=2135661 GN=C8J46 _104513 PE=4 SV=1
MATNTGPEATSDHPITNIVVVGGGTAGWLAACLIAARTDRGAGHPLEVTLIESPDVATIGVGEGTWPTMRRTLERIGITETDFLLACDASFKQGSRFDGWRTGAPDDSYLHPFTAPVDGDPRDIVAAWAEHGGQFANSVGAQGEICHRDLAPRQRAMPDYAGTLNYAYHLDAGKLAALLTRHATERLGVRHVRDHVVGIDSTEHGDIAAVRTRASGAIVGDLFLDCTGHAALLIGGHYGIATIDRGGELFNDRALAVQMPVAPDSAIASQTNATAHAAGWIWDIGLPTRRGIGCVYSSAHLSDDAAAETLERYIRTTSPGVAPPIFRQLKFQSRHRERFWERNCLAVGLSAGFLEPLEASAIVLIELSLDALLDNFPATRRAMDIHATRFNTLFRYRWDRIVEFLKLHYVLSERDEPYWLDHRDAASIPPRLAELLTLWRHQPPSRADFPMIDEIFPAASYQYVLYGMGFPVPTRGPIATTDRARTETLLAQVDQRKRMLAAGLPTNRAYLDALRHATAPAMELSA

SEQ ID NO: 83805 - protein, 512 aa, Xanthomonas translucens
  misc_feature (1)..(512): tr|A0A1C3TU86|A0A1C3TU86_XANCT Uncharacterized protein OS=Xanthomonas translucens pv. translucens DSM 18974 OX =1261556 GN=BN444_01661 PE=4 SV=1
MIAAPLRNLVIVGGGTAGWMAAAALARVLGPDYRITLIESEQIGIVGVGEATVPHIKAFNNLLGINEAEFVRQTQGSFKLGIEFVDWQRPGTSYIHGFGTEIGHSLGLLPFQQYWFKQALAGKAKPLGAYTLNTVASRRGKFMTSASDAPPNSPLGNIAYAYHFDASLYAAFLRHFSEQRGVTRHEGIVEQVQLHPESGDVLSVRLASGDTIAGDLFIDCSGFRGLLIEQALHTGYHDFTHWLPCDRALAVPCAKVGPPTPYTRATARAAGWQWRIPLQHRTGNGYVYSSAHISDDEAAATLLANLDGAALADPRPLRFVTGRRKQVWNRNVVALGLASGFMEPLESTSIHLIQSGISKLLELFPREGISPVLVQRYNDRIAFEFDRIRDFLVLHYTATERDDSDFWRQCRTMAITPELQATLDLFGDSGRFYRNGDEMFAEISWVQVMVGQGILPRGAGRPAARRAKKRGHAHQGAGLFKIRPKPENGLWRISGKAGRCACYRQCEANAMV

SEQ ID NO: 83806 - protein, 503 aa, Rubrivivax sp.
  misc_feature (1)..(503): tr|A0A3S3S8U4|A0A3S3S8U4_9BURK Tryptophan 7-halogenase OS=Rubrivivax sp. ICH-3 OX=2499835 GN=ENE75_22465 PE=4 SV=1
MGDTRLKKVLIVGGGTAGWMSAAVLVHSLGRQYEVQLIESDEISTVGVGEATIPSIIRFNDLIGIDENEFMRRTQATFKLGIQFRNWGAQGDAYIHGFGSMGRKTGLVDFHHYWLKAFQAGRVDRLDDYSINLLACETNRFSRADPSNPNSPLADIRHAFHFDAGLYARYLRGYCEQRGVTRTEGRIDSVQVHPETGFVTSVTMANGDVHAADLFIDCSGFRGLLIEQTLRTGYDDWSHWLPCDSALAVPCESVEPLLPYTRATAHGAGWQWRIPLQHRIGNGHVFCSRFMSQDEATAILLGNLDGKALAEPRLIRFTTGKRKKFWHKNVVAIGLASGFIEPLESTSIHLIQQGIVRLVELFPSQGFLQADIDEYNQQSTTEFEQVRDFIVLHYHATQRRDTPFWEYCATMDVPDTLRRKIDLFRANGRFFRQNDELFNETSWVQVMFGQGIRPQGYHPLADNTADEPTWRMLDNVRTVMHRVVERMPTHAQYIAQHCKAAAG

SEQ ID NO: 83807 - protein, 516 aa, Novosphingobium sediminis
  misc_feature (1)..(516): tr|A0A512APH7|A0A512APH7_9SPHN Tryptophan halogenase OS =Novosphingobium sediminis OX=707214 GN=NSE01_34380 PE= 4 SV=1
MNDRVRQIVIVGGGSAGWIAAARIAAAHRPDGDNGVSVTLIESETIGTIGVGEGTWPTMRNTLRKIGISETEFFRSCDAAFKQGARFTGWVTGKPGDSYYHPLNPPQAATQINLSAHWLRRQDGAGTDFAHAVDFQSALCDAGLAPKSISTAEYVGLANYAYHLDAVKFAALLKKHCIEKLGVRHVIDDVTGVKLDDAGFVTGVEARETGLLSGDFFIDCTGFAALLIGQTYGVPFVDCGDVLLADNAVALQVPYEHEDDPVASQTNSTAQDAGWIWDIGLPTRRGTGYVYSSRHTSHDEAEATLRAYLGPVAEGLNTRRIPIRSGHRQRFWEKNCVAVGLANGFLEPLEASALMLIETAVDFIVDRLPQSRAVMAPLARQFNAAFEHHWARIIDFLKLHYVLTKREDTAFWRDNRDPATVPDRLLEQLELWRHLPPGPQDFPHQPEVFSWPSYQYVLHGMGFECNLAAGSQVTAEAALAQRCFMATQRQQEQALAALPSHRALLDAVRVHGFQAV

SEQ ID NO: 83808 - protein, 498 aa, Pseudoalteromonas haloplanktis
  misc_feature (1)..(498): tr|Q3IL46|Q3IL46_PSEHT Uncharacterized protein OS=Pseud oalteromonas haloplanktis (strain TAC 125) OX=326442 GN =PSHAa1353 PE=4 SV=1
MNNKITNVVIAGGGTAGWITAALLNKVLGNVINITLVESDQIGTIGVGEASIPPISHLNGALGINEHEFINATQATIKLGIEFENWREQNHKYMHAFGSIGKDFPFCEFHHFWLKAKQQNHAPDLWDFSVNYQAAKAGKFAHLRNLPNTQLPGLHYAYHFDATLYAKLLKKLAQQRGVKRVEGKIKSVQQCQQSGDIQALTLESGSVIKGDLFIDCTGLSALLIEKTLNTGFEDWSHWLPCDSAVAVQSESANEPVPYTRSIAQNAGWQWQIPLQHRVGNGLVFSSRYLTDDEAKQQLLANLPGKAITEPRVIRFKTGRRRLQWHKNVVAIGLSSGFLEPLESTSIHLIQTAAIRLIKLFPHNGIKHSQVTTYNLQSKTEIERIRDFIILHYKLTTRTDSAFWRQCQQMSIPETLQQKITLFKQTGKLIREDDELFAEPAWQQVMIGQGLEADDYHPLANALTDEQLLALFSDLKALINHTVEQLPSHSEFLSRMKNN

SEQ ID NO: 83809 - protein, 498 aa, Sphingomonas koreensis
  misc_feature (1)..(498): tr|A0A1L6JDI8|A0A1L6JDI8_9SPHN Tryptophan halogenase OS =Sphingomonas koreensis OX=93064 GN=BRX40_17105 PE=4 SV =1
MTEKRPTRVVIAGGGTSGWMAAAAISRTMGRTVDLTLVESEQIGTIGVGESTIPPLVNFNRILGIGEAEFMAAAQATFKLGILFDNWKHDGHSYFHSFGLSGKDHWSAGFQHFWLYARSRGFPEPYDDYCLELAAAMQGKFAHLPQDRMNYAYHVDATLYGRYLRKLAEESGTKRVEGKIQRVELNGETGDIAALHLDGERRIEGDVFVDCTGFRGLLIEGALHAGFEDWGHWLPNDSAIAVQARHLGPPQPYTQAIAHDAGWQWRIPLQHRMGAGIVYSSGYLSRDEAHHRLISAVGEPLIEPFDIKFRGGVRRKQWYRNCVAIGLSGGFVEPLEATTVHLIQRAVLRFVRLMPNGRVSERDAAEFNEQQRQDIEQIRDFVILHYKATDRRDSAFWRHVAAMPVPDSLSQKIELFRETGRTFRKNEELFAENSWVQVMMGQGIDPQSWHPIAEKLSDEELMRLMSTLREDVTRTVATLPEHHTYVAQYCGAADPLAA

SEQ ID NO: 83810 - protein, 503 aa, Sphingomonas koreensis
  misc_feature (1)..(503): tr|A0A430G3X0|A0A430G3X0_9SPHN Tryptophan 7-halogenase OS=Sphingomonas koreensis OX=93064 GN=DAH66_09195 PE=4 SV=1
MTMGRPFELVIVGGGTAGWMCAAACAAKLVPTGVRVRLVESEEIGTVGVGEATLPQMKDFNDFLGLDEVEFMKATQASFKLGIEFVNWGHEGHRYIHPFGTYGRPVGEADFFSYWIRARRAGIASRLDDYCFPIVAAWQNRFMLPNGDPNDARNAFAYAYHLDAFLYARYLRGWAEARGIERVEGRIVDVERDGGSGAIAAVKLASGEPVAGDFFIDCSGFRSLLLGSMLGVELENWSHWLPCDSAQAVPCARSRDFTPYTRSTRRKAGWQWRIPLQHRTGNGYVYSSAHVSDDEAAATLLANLDGEALAEPRVLRFKAGKRRLAWSHNCIGMGLAGGFLEPLESTSIYLVQMAIMHMLTLLPSTEGIDPALPAEFNRVMDVEYDRIRDFLILHYIANEADAPLWAHVTAVDLPDTLQDKIDRFRHRGHVQAYRDGLFGPPSWQAVFVGQGIEPLAADRLADVLPAEALAQRLEMLASTIARGAGSAPSHADFIARYCPAPAL

SEQ ID NO: 83811 - protein, 503 aa, Amphiplicatus metriothermophilus
  misc_feature (1)..(503): tr|A0A239PWF1|A0A239PWF1_9PROT Tryptophan halogenase OS =Amphiplicatus metriothermophilus OX=1519374 GN=SAMN062 97382_2183 PE=4 SV=1
MNDDPIRSVLIAGGGTAGWMAAAVLARAFGASLSIRLVESEEIGTVGVGEATIPQIRHINNFLGLDENAFLRETRGTFKLGIQFNNWARLGDSYIHAFGDIGLPLGLSPFHHYWLRAQAEGKRAPLWDYSLNAEAAKNNRFSRLERVGDSPLAGIKYAFHFDASLYARYLRRYAEARGVERLEGRIADAARRGENGFIEAVVLENGKRLEADFFIDCTGFRGLLIEGALEAGYEDWTRWLPCDRAVAVACRHGGAMRPYTQATAQRAGWQWRIPLQHRVGNGHVYCSAHIGDDEAAAVLLSNLEGEPLDEPRFLRFTTGMRRKMWVKNCVALGLASGFMEPLESTSIHLIQSGLGRLVSMFPDRRFNPALIAEYNRQSRFEFERIRDFLILHYHANQRTDSAFWRECAAMSVPDALAAKIELFRGAGRIYREHEELFTEVGWLQVMLGQHVRPERYHPAADGLAPQKLDGFLGDIRILIERAVEAMPRHEDFIARHCAAPAPA

SEQ ID NO: 83812 - protein, 505 aa, Pseudoalteromonas sp.
  misc_feature (1)..(505): tr|A0A0W1KP97|A0A0W1KP97_9GAMM Tryptophan halogenase OS =Pseudoalteromonas sp. 10-33 OX=1761890 GN=ATS76_12185 PE=4 SV=1
MNDVNNIKSIVIVGGGSAGWMTASALAKVIGCDNCQITLVESEDIGTVSVGEATIPQIQLFNTILDIDESEFIRFTNATFKLGIEFIDWKEKGHRYFHPFGNYGTNMEALPFHHFWLKMQDEPAFSNLSNFSLASVGAYANKFMHPSTQQNSPLAGINYAYHFDATLYAKFLRNYSTSRGVSRIEGKVDEVMLNPVSGMIESLILNDNTVLNGDLFIDCSGFKGLLIEQALKTGYEDWTHLLPCNKAIAMPCLSKKTLNPYTQSTAQSVGWTWRIPLQNRVGNGYVYSSEFMSDDKAHALLFNKLESDPLADINQLQWVTGMRKKSWNKNCIAIGLSAGFVEPLESTGLHLIQSAIAKLMTLFPSKDFAQCDIDLFNQQTETEYHRIRDFIILHYKLTNRDDSEFWRYCKNIDMPDSLKQKIAMFSENGRIFRHDNELFNETSWLAVMHGQGIKPKSYHPLVDRLNPDEIKRRLKNIESVISRSADVMPDHEAYILKNYTPNDTF

SEQ ID NO: 83813 - protein, 415 aa, Pseudomonas fluorescens
  misc_feature (1)..(415): tr|A0A379J1V8|A0A379J1V8_PSEFL Tryptophan halogenase OS =Pseudomonas fluorescens OX=294 GN=kmo PE=4 SV=1
MPTVEMERRQVVVIGAGPSGAIAAALLKRNGHDVLIIEREHFPRFSIGESLLSHCIDFIEEAGMLEAVNAAGFQLKTGAAFAWGERYSAFDFGDTFSDGKPTTFQVQRADFDKLLADQAALQGVEIRYGQTLVGVDFAAGHRYLHVRRENGREYHIKAGFVLDASGYGRVLPRLLNLEAPSNFPLRQAVFTHVQDRIEHPGFDRSKILITTHPTQRDIWFWTIPFSNGRCSVGVVAAKEHFAGCDGDLDACLRRFIAQTPSLSSVLANAVWDTPARTIGGYSANVTTLHGPGFALLGNAAEFLDPVFSSGVTIAMRSASMAAGLLHRQLKGESVDWQTEFAVPLKRGVDTFRCYVEGWYAGTFQDVIYHPGSSPEIRRMISSILAGYAWDERNPFVSEPKRRLRMLSEICTAENL

SEQ ID NO: 83814 - protein, 518 aa, Pseudoalteromonas sp.
  misc_feature (1)..(518): tr|A0A0W1KQZ7|A0A0W1KQZ7_9GAMM Tryptophan halogenase OS =Pseudoalteromonas sp. 10-33 OX=1761890 GN=ATS76_10460 PE=4 SV=1
MNQQNKKIKTVVVVGGGIAGWLTAGRLAAHHKSNTPDGLNVVLVESPNVPIIGVGEGTWPTMRSTLIALGISETDFIRECEASFKQGAKFAKWVDGSDDDFYYHPLVLPQGFSKTDMAGHWLNNTAESTSFSSAVCYQEAICEQGLAPKTIRTPEYAAIANYAYHLDSAKFAVFLQKHCTQQLGVKHFLADVTQVNSAKNGDIASVTTNQQGEISGDLFVDCTGFSSLLLGEHYKVPFKPCDDVLFIDTALAVQVPYENDDESIASHTISTAQEAGWIWDIGLQHRRGVGYVYSSKYSSEAQAREKLKAYVGDKIESLTVRKIPIKSGHRSHFWQNNCVAVGLSAGFLEPLEASALVLVEMSAQMISEQLPHTRDIMDITAKRFNETFTYRWEKIIDFLKLHYILSNRDDNAFWRDNRDPKTIPQSLQDLMKLWQYRAPADHDFTSNNEVFPAASYQYVLYGMGFKSDYSTTAYMLKDTVFAKSQFDKNKSMINQAVTNLPSNRELLNKIKLHGFSAI

SEQ ID NO: 83815 - protein, 510 aa, Sphingomonas koreensis
  misc_feature (1)..(510): tr|A0A2M8WBJ6|A0A2M8WBJ6_9SPHN Tryptophan halogenase OS =Sphingomonas koreensis OX=93064 GN=BDW16_1582 PE=4 SV= 1
MADPMSQRSIVIAGGGTAGWMTAAALARFCGSGWTITLVESDAIGTVGVGEATIPMIRLFNQALGIDEAEFLRETHGTWKLGIEFDGWGVPGERYMHAFGQVGRGLGLLPFHHYWLRARAAGRAGPLGNYVLNDIAAKANRFGHVERAADSVLPAMPYAFHFDAGLYAAYLRRYAEARGVARIEGRVERVERDGENGDVTTLVLAGGVRVAGDLFVDCSGFRGLLIEGALETGFEDWGHWLPCDRALAVPCERADPLIPYTRATARKAGWQWRIPLQHRTGNGYVFSSAHISEDEAASVLLANLDGAPQAEPRVLKFRAGKRRKAWNRNVVAIGLSSGFLEPLESTSIHLIQSGITRLLDFLPNGRVADADRDAYNRMTDFEIERIRDFVILHYFANRREGEPMWDALRYMDLPEPLADRIAMFRACGRIVREHDELFDVPGWIQVLAGQGIVPERWHPLADELSAEQLDQFLSTVADAYARDAARLPGHADYLTRFCGAPSTLSQSSIA

SEQ ID NO: 83816 - protein, 501 aa, Marinimicrobia bacterium
  misc_feature (1)..(501): tr|A0A2E7VYC2|A0A2E7VYC2_9BACT Uncharacterized protein OS=Candidatus Marinimicrobia bacterium OX=2026760 GN=CM G34_04045 PE=4 SV=1
MRPVNRVVIVGGGSAGWLTAAYLVENMHSATEILLVDKKVSDPIGVGEATILNFKQFMYDCGFKPEQWIPEIDATFKCGILFKDWQEEGVNLWHPFAFPMFKNLDTDLLTLWTMFKEKDFFTHACALYHPGVTENKVDPENIGTYAYHIDCGKLVNWIRNQLLKKIQLVEHEVVSVDRNDRGGINHITIDTGEDIPSDIFIDCTGFKRLIGPEPDSVDCQDRLFCDTAIAGRFDYRNKAIEQNPYTTCAAVEHGWIWKTPTQERVGSGLVFNKSVSDVDEVKESFCKYWDGRVTSDELRVLDWTPYYHKNFWTDNVVTIGLSAGFIEPIESTGIALISSGAMEFVESCRGSFYDELIIKGYNHQMTSFYESCIDFVNMHYAYNKRKTGKFWKYVQDTFKPSDKLLHYENEVLNNPVRLPSNGNYMFAGDNWSMFLCQMLDKDQIVSKQTKKVPPWDADALIRDFAWNEQQKHVNSILHAKFIDQCLVKIRKGESLNIPYNG

SEQ ID NO: 83817 - protein, 505 aa, Streptomyces rimosus
  misc_feature (1)..(505): tr|A0A0N0S938|A0A0N0S938_STRRM Tryptophan halogenase OS =Streptomyces rimosus subsp. pseudoverticillatus OX=146 4079 GN=ADK70_27345 PE=4 SV=1
MSASYLKAAFGDRLSVTVLESKRIKTIGVGEATFSTVRHFFDYLGLPEHVWMPKCNATYKLGIRFENWHRKGSYFYHPFERLRVVDGFPLTDWWLHRKPGNSERFDQDVFLMSAICDAERSPRYMDGTLFEQDFKEQGDPKGRKPERSTLTEQDTQFPYAYQFDASLLADYLCAYSTERGVRHIEDDVVEVARDDRGWIGHLRTREHGDVTADLFIDCTGFKGLLLNEALEEPVISFQDTLPNDRAVALRVPVDMEKRGLRPCTTATAQDAGWIWTIPLFGRIGTGYVYASDYTTPEEAERTLREFVGPDAEDVEANHIRMRIGRSRNAWVNNCVAVGLSSGFVEPLESTGIFFIQQGIEQLVKHFPGADWNPQLRDSYNRAIGNTIDGVREFLVMHYRGAGRNDNQYWKDAKTRALPDGLAERLDMWRSKLPTTETIFPNYHGFEPYSYHSMLLGLGGVDLKAPPALALMDDSAAQAEFKLLRAQSQELAKRLPSQYEYLAQMH

SEQ ID NO: 83818 - protein, 496 aa, Sphingomonas koreensis
  misc_feature (1)..(496): tr|A0A1L6JG05|A0A1L6JG05_9SPHN Tryptophan halogenase OS =Sphingomonas koreensis OX=93064 GN=BRX40_06925 PE=4 SV =1
MALSARPVRRIVIVGGGSAGWMTAAALGRALAGQSYSITLVESEAIGTVGVGEATVPPILDFNRYLRIDPDEFLRETNGSIKLGIEFEDWGGAGHRYFHPFGFFGVEMSGIHFHHFWLRHVAEVGPLDHSEYHLEAMALREGRFARMTRTGPVHHAVHFDASLYARFLRGRAEASGVVRVEGKVVHVRLDPENGYIDALALDDGRTIEGDLFIDCSGFRGLLIEGALETGYESWNHWLPCDSAVAVPAANAGDPLPFTRSTAREAGWQWRIPLQHRDGNGYVYSSAHLPHAEAARLLSERLPGPAQADPNFLRFTAGHRRKIWNRNCVAIGLAGGFLEPLESTSIHLIQTTIIRLLALLPRDGIDPNVVARFNRESLHEYRTIRDFVIAHYALAGRDDTPFWRDVAATGVPDTLAERIEAFRATGNILFEPGDLFGPTNWYWVMTGQGVWPRSWHPIADGLSSAELTARLAVLRGRVAEQLAELPPHVEFLRRLSA

SEQ ID NO: 83819 - protein, 512 aa, Sphingomonas koreensis
  misc_feature (1)..(512): tr|A0A1L6J706|A0A1L6J706_9SPHN Tryptophan halogenase OS =Sphingomonas koreensis OX=93064 GN=BRX40_04120 PE=4 SV =1
MEAGQTGTGNPPIRRIVIVGGGTAGWMTAALLSKLLFRGYDITLVESDEIGIIGVGEATIPGIKDYNHLAGIDLTEMIRATQATFKLGIEFVNWREPGFRYIHGFGKIGTDLMWLHPHQLWLKLAAMGQAKHFDLYSLNTLAARQNKFCFPDPRNPGSPMGHLDYAYHFDASLYARFLRGRSEAQGVTRTEGRIVEVRQRPEDGFVESVVLADGQTVSGDLFVDCSGMRSLLLGQTLGVGYEDWSHWLPCDRALAVPCESVSPLTPYTRSTAHGAGWQWRIPLQHRIGNGHVYSSAHVSDDEAADVLLANLDGKALADPRPVRFAPGKRHKAWEKNVVAIGLSSGFLEPLESTSIHLIQTGILKLVALFPGQGFNAADIAEYNRQHNFEFDDVRDFIIAHYKVTNREDTPFWAHVRHMEVPDSLAERLELFRASARFFVHGKAELFREESWVQVLLGQGMAMTYDPVVDMIPDEDVIAFMRDIEEVNADVAAAMPTHQAFIDRHCKAPSLLS

SEQ ID NO: 83820 - protein, 493 aa, Sphingomonas sp.
  misc_feature (1)..(493): tr|A0A1Q4EB14|A0A1Q4EB14_9SPHN Tryptophan halogenase OS =Sphingomonas sp. 67-41 OX=1895850 GN=BGP17_07120 PE=4 SV=1
MDQAPIRRVVIAGGGTAGWIAAAALAKLIGPLLEITLIESDEIGTIGVGESTIPTARTFHQLLGIDERAFLRDTRSTFKLGIAFEDWAREGDRYFHSFGQIGKSTWMGDFHHFWLEARAEGWGGELGDYCFELQAARAGRFAIPEQGHINYAYHLDAGLYARFLRDFAEPLGVNRIEGRIERVEQHPETGFVTALRLASGQRIEGDLFLDCTGFRGLLIEQALRAGYEEWGHWLPTDSAIAVQTESVGPAMPYTRAAAHRAGWQWRIPLQHRVGNGLVYARDFLDDDSARALLDARIEGEKLIEPRIIRFKAGRRRTLWDRNVIALGLASGFVEPLESTSIHLIMIAVTRLVQLFPFGGIGEGVAARFNALGRTEIERIRDFIILHYHLNQRADGGFWDRCRTMAIPDSLAERIAAFRDGAVAWQASDDLFRVDSWVQVMLGQRLEPRSHHHMGRMIVDGELRTALGALRSGIARTVAQMPAHQQFLERYTAA

SEQ ID NO: 83821 - protein, 503 aa, Sphingomonas koreensis
  misc_feature (1)..(503): tr|A0A1L6J8D7|A0A1L6J8D7_9SPHN Tryptophan halogenase OS =Sphingomonas koreensis OX=93064 GN=BRX40_06915 PE=4 SV =1
MTMGRPFELVIVGGGTAGWMCAAACAAKLVPTGVRVRLVESEEIGTVGVGEATLPQMKDFNDFLGLDEVEFMKATQASFKLGIEFVNWGHEGHRYIHPFGTYGRPVGEADFFSYWIRARRAGIASRLDDYCFPIVAAWQNRFMLPNGDPNDVRNAFAYAYHLDAFLYARYLRRWAEARGIERVEGRIVDVERDGGSGAIAAVKLASGEPVAGDFFIDCSGFRSLLLGSMLGVELEDWSHWLPCDSAQAVPCARSQDFTPYTRSTRRKAGWQWRIPLQHRTGNGYVYSSAHVSDDEAAATLLANLDGEALAEPRVLRFKAGKRRLAWSHNCIGMGLAGGFLEPLESTSIYLVQMAIMHMLTLLPSTEGIDPALPAEFNRVMDVEYDRIRDFLILHYIANEADAPLWAHVTAVDLPDTLQDKIDRFRHRGHVQAYRDGLFGPPSWQAVFVGQGIEPLAADRLADVLPAEALAQRLEMLASTIARGAGSAPSHADFIARYCPAPAL

SEQ ID NO: 83822 - protein, 516 aa, Pseudoalteromonas sp.
  misc_feature (1)..(516): tr|A0A0W1L526|A0A0W1L526_9GAMM Tryptophan halogenase OS =Pseudoalteromonas sp. 10-33 OX=1761890 GN=ATS76_04025 PE=4 SV=1
MTKPIKKIVILGGGTAGWLSAGLLAAEHPHLSVTLIESANVPILGVGEGTWPSMRNTLQRIGIKEIDFITQCDATFKQGSKFINWRNLNKGENYYHPFMDPQGYEQTNLHASWQRIAPNQKFADVVNMQSFVCQAALAPKQLQTPEYAAVTNYGYHLDAGKFAEFLKNHGVKNLNVTHITDDVTHVINDEHGYIASLKTNKNGDITGDLFLDCSGSRARLIGEHFNSEFIAQDHILFNNSAVAAQVPNAHINQPIASATLSTAQSNGWIWDIALPTRRGTGYVFSSKYQSDESATDTLKSYIAESTSEQQAEQLNYRVLKFSPGYRQKFWIKNCVAVGMSAGFLEPLEASALAMVELSISMLSEQLPQNRTHMSQLANRFNDRFSTRWQRVVEFLKLHYVLSERDDTPYWQNIRDLTTAPERLQNLLKLWQFQPPSRFDFIENEEVFSSSSYQYVLYGMGFNTQTVSAQNAFNDPRAGDYYYQQNREKIAQYLKGLPSNRALLNDLLSNNRQPHND

SEQ ID NO: 83823 - protein, 505 aa, Massilia oculi
  misc_feature (1)..(505): tr|A0A2S2DIR4|A0A2S2DIR4_9BURK Tryptophan halogenase OS =Massilia oculi OX=945844 GN=DIR46_12900 PE=4 SV=1
MEQKSNGEGGLKGRPIRRVVIAGGGTAGWMAAACISKVLGKRLDIKLIESDEIGTVGVGEATIPTLINFHNLLEINEQEFMAATKATFKLGIGFEGWRNVNEDYIHSFGMTGTDHWTAGFQHFWHKGRERGLATDYGDYCLELRAALENRFAHLPRGGMNYAYHLDATAYAKYLRAFSERFGVQRIEGKIVDVTTSALTGHIRSLTLDSGADIEGDLFIDCTGFRALLIGQALGVAYQDWSQWLFNDSAAALQTMSVGDAVPYTRSIAHGFGWQWRIPLQHRVGNGIVFSSRHVEQEQAIGALLANVEGEALMKPRVLRFTPGQRQQVWKGNCIAVGLASGFLEPIESTSIHLIQRSIVRLMQMFPTAGIAPSDVEEYNRQAALEVEHIRDFIILHYKVTNRGDTPYWREARDMTVPASLQHRIDLFRETGRVFRVPNELFAENSWIQVMLGQGITPLQHHQSADLMGDEELAHFLGSIKATVDKTVSQLPSHQQYVARYCATPK

SEQ ID NO: 83824 - protein, 505 aa, Xanthomonas translucens
  misc_feature (1)..(505): tr|A0A1C3TI37|A0A1C3TI37_XANCT Conserved hypothetical m embrane protein OS=Xanthomonas translucens pv. transluc ens DSM 18974 OX=1261556 GN=BN444_01818 PE=4 SV=1
MAQIRKVVIAGGGTAGWIAACALAHQFRDLLDITLIESEQIGTVGVGESTVPPIRSFHRFLQIDEQEFLRAVAGTFKLSISFENWRRPGERYIHPFGLTGHSTLVCAFHHFWLEAQRRGMLSELGDYCLETVASRLDRFALQQSPPVNYAYHLDAGLYARLLRGHAERHGLKRVEGKIQQVRQHAESGCVEALLLEDGTLVEGDLFIDCTGFRGLLIEQTLHTGYEDWTQWLPCDRAVAVQTEAVAAPVPYTRAIAHAAGWRWHIPLQHRVGCGLVFSSAHLSDDEARAKLLHDAAAPPIKEPWLVPFRTGRRRKAWNKNVVALGLASGFIEPLESTSIHLTIAAVMRLLTLFPSEGIAPAMVDLYNAVSRAEMEHVRDFIILHYHANQRDEPMWQACREMALPDSLQQRLRAWRERAHAWQGADELFRVDSWIHVLLGQGIVPAQHHPLARALPDQQLQQFLDAIRQPIDRAVAQMPSQQDFIARYCKAGPEVWAGRAPVAAPA

SEQ ID NO: 83825 - protein, 501 aa, Sphingomonas sp.
  misc_feature (1)..(501): tr|A0A1Q4E5M9|A0A1Q4E5M9_9SPHN Tryptophan halogenase OS =Sphingomonas sp. 67-41 OX=1895850 GN=BGP17_12930 PE=4 SV=1
MTDDRNIRSILIVGGGTAGWMTAATFARILGPDYAKITLVESDEIGIIGVGEATIPQMATFNRMLGLDEDQFVRETKGSFKLGIQFVNWGRIGHRYFHPFGRYGLDMKGVSFHAYYLRLRQLGEAPDVDAWSLQAMAARDDKFMRGIDAGNSPLSDIAYAYHFDAGLYARFLRRYAEERGVVRREGRIVDVKLRGEDGFVQSVTMQDGSEIAADLFVDCSGFRGLIIEQALKAGYTDWSQWLPCNRAIAVPCASVDAWTPYTRSTAHAAGWQWRIPLQHRIGNGHVFSSNHMSDDEATAILMANLDGEPLADPRTVPFTTGHRNRMWVKNCVALGLAGGFLEPLESTSIWLIQSGLSRFLTMFPDRDFNQADIDRYNRIMQTDYEEIRDFLVLHYHATERTDSPFWDYCRTMEIPERLAEKMRVFRSHGRAFRENEELFNDTSWFAVMLGQLIEPASHDPVADVMPLDETRARLAHIREAVANSADYMPKHRDFIREHCAA

SEQ ID NO: 83826 - protein, 504 aa, Sphingomonas sp.
  misc_feature (1)..(504): tr|A0A4R2T685|A0A4R2T685_9SPHN Tryptophan halogenase OS =Sphingomonas sp. PP-F2F-A104-K0414 OX=2135661 GN=C8J46 _107146 PE=4 SV=1
MADQPLRIAIAGGGTAGWMAAATFARFLEMGYEIDLIESDDIGTVGVGEATIPQIHLFNDALGLDEDAFLRATGGTFKLGIEFVDWFKPGHRYMHAFGDVGRDVGLLPFHQYWLRARSLGLAGDLGAYSLNTHAALAERMQRGPARTSRVLPSMPYAYHFDAGLYARYLRRYSETRGVNRIEGKIVRVTRDGESGDVSGLMLENGTTVAADLYIDCTGFRGLLIEEALGTGYEDWTHWLPCDRAIAVPSARSKAFTPYTRSTAHAAGWQWRIPLQHRTGNGVVFSSAHMSEDEATATLLSGLDTPAMADPRTITFRTGRRKQMWNRNVVALGLAAGFMEPLESTSIHLIQSAIARLLKLLPGRVIADADRTEFNRQSDFEYERIRDFIILHYKATTRDDTPFWRECRDMAVPDTLAAKIELWRGSGHIVREHEELFTEVGWLQVLAGQGIVPRGHHPLADAISTADLAEFMDTIDKLNAREAGQMQDHAAFVAQHCAAAAGLAA

SEQ ID NO: 83827 - protein, 510 aa, Stenotrophomonas sp.
  misc_feature (1)..(510): tr|A0A149QMM7|A0A149QMM7_9GAMM Tryptophan halogenase OS =Stenotrophomonas sp. DDT-1 OX=1609637 GN=AB839_03490 P E=4 SV=1
MLDTQSTPSGRIRKVVIAGGGTAGWLAGCALAHQFRDQLQITLVESEQIGTVGVGESTVPPIRTFHRFLQIDEQEFLRAVAGTFKLSISFENWRLPGDRFFHPFGTIGHGTWAAPFHHFWLDSLRRGMPSDLGDFCLESIASRGDRFSLHTQPQASYAYHFDAGLYARFLRGRAEAHGLRRIEGRIAQVRQHAHDGSVQALVLDDGQVIEGDLFIDCTGFRGLLIEQALGTGYEDWHEWLPCDRAVAVQTEAVAPPVPYTRAIAHEAGWRWHIALQHRVGCGLVYDSRHLSDDEAAAKLLRDAGAPPLRDPWKVPFRSGRRLKAWNRNVVSLGLASGFIEPLESTSIHLTISAVVRLIQLFPFDGISASLVQLYNDVSRQEMEHVRDFIILHYHATQRSEPMWKACREMRVPESLQQRLQAWRERAHAWQDPGELFRVESWTSVLLGQGIAPGPAHPLARAVSDADLRTLLKGIQRPVQQAAAQMPAQAEFIAQYCRSGVDVWRSTAASA

SEQ ID NO: 83828 - protein, 362 aa, Advenella kashmirensis
  misc_feature (1)..(362): tr|I3UHR7|I3UHR7_ADVKW Tryptophan halogenase OS=Advenel la kashmirensis (strain DSM 17095 / LMG 22695 / WT001) OX=1036672 GN=TKWG_25050 PE=4 SV=1
MEILKEADLLQAVNDGGFQIKNGAAFTWGDRESVIDFRDKFTAGPGTTFQVERAKFDQILIQEAQKKGVQVWFGHTVTHMTSTPEHATLSVSTDQDESYTLQARFVLDASGYGRVLPRLLDLEQPSTFPMREAWFTHIQDNISDPAFDREKIVIATHPQDRAIWMWLIPFSHGRCSIGVVGEPSHLAMNGRQPLPFLQAMTNEIPRLRQLLADAQWDTPVNPLRGYSANVTSLYGQRFALLGNAAEFLDPVFSSGVTIAMHSAKLATALIDKTLRGQTADWQTDFADALRVGIDTFRTYVAGWYDCSFQDVIYSRQINQDIRRMIAAILAGYAWDTRNPYVEKSKRRLKALAEICGEAQLDT

SEQ ID NO: 83829 - protein, 480 aa, Burkholderia pseudomallei
  misc_feature (1)..(480): tr|A3NVJ7|A3NVJ7_BURP0 Putative tryptophan halogenase O S=Burkholderia pseudomallei (strain 1106a) OX=357348 GN =BURPS1106A_2103 PE=4 SV=1
MHLPNRTQVLVIGGGPAGATGAAFLAREGVEVTLVDKEVFPRYHIGESLLPSCLEILTLMGARDTFDRHGFQRKPGAYFNWKGETWKLDFGELGGTYRYSYQVRREEFDHLLLQHARAVGAQVHEGVSVREILFDDGRPCAALCVAQGAEEATTVEFDYLVDASGRNGLMSTRYLDNRKFHEIFRNVAAWGYWEGLSWPDDCAPGSILVSSIPDGWWWAIPLADRPTSVGVVMHRDAFVAARRTGTLEQVYAQALALSPVMANLTEHARLVTPLKTEQDYSYTCDSFAGNGYFLSGDAACFLDPLLSTGVHLAMYSGMLAAASLASILRAEVTEREAAAYYRDSYRQAYLRFLVFVQTFYEAHGKLGYYSKADELSHYMIEAGDIRRAFLNLVSGLEDIADAEQATSHLMGEMSRRIDQNLALRKDKRALSSTIGSTQVEDNARFFDAIEGLPCLSANMALDGLYVSTRPRLGLQRVAAM

SEQ ID NO: 83830 - protein, 503 aa, Sphingomonas koreensis
  misc_feature (1)..(503): tr|A0A1L6JG24|A0A1L6JG24_9SPHN Tryptophan halogenase OS =Sphingomonas koreensis OX=93064 GN=BRX40_06800 PE=4 SV =1
MTEEHGEDAIRTIAIVGGGTAGWMAASYLARTLAHTNIAITLIDSSEIGTVGVGEATVPAIRDFLAVVGLADADVLAATEGTIKYGIHFADWAEPGHRFYHPFGLYGVSARGVPFHQYWLKLRAAGHDLSLEDYCLCTQLAEQGRFLPPPEQPGSELGVFDFALHFDASMFATLLRDLSLSLGVTHIDARIDGVEQAPEDGQVRAVRLADGRSVAADLWIDCSGFRGLLIGEAMGVPFVDWRNWLPCDRAIALGCEPSGAYRPVTTSTARAAGWQWHIPLRHRIGNGYVYCSDYIGDDEAEAVLRANIEGPALGEARRIRFTPGHRASFWKGNVVAIGLAGGFLEPLESTSITLIQSGLERLVRLFPDRRFDPALAALFDRQSQLEFERIRDFLLVHYCLNRREGEPLWDRMRTMELPGHLQGKIDAWRAQGELVRYEWETFQDPSWLSMYAGFGIEPRRYNVRADQFDGAELLATFGRMRTAIDDTVKLGVPAAQFAAALRR

SEQ ID NO: 83831 - protein, 513 aa, Pseudoalteromonas sp.
  misc_feature (1)..(513): tr|A0A0W1LGD5|A0A0W1LGD5_9GAMM Tryptophan halogenase OS =Pseudoalteromonas sp. 10-33 OX=1761890 GN=ATS76_15115 PE=4 SV=1
MSGVINRIIVLGGGTAGWITAGILAKKHASNLSNQGIKVTLIESPEISVVGVGEGTWPTMRKTLAQLGISETQFMRECGATFKQASKFVNWVNAKGDVYYHPFTEPQGFNKVDPAPYWQSVVEPTCSFSEAVSFQQYLCEQGLAPKTIANKEYEVIANYGYHLDAAKFITLLRKHCISELGVEHISDTVERIEQASCGDITCLQTKEHGAQLADLFVDCSGMRSLLLGETLKVPFVPCDDVFLADTAIATQVPYINEHDPIACHTISTAQEAGWIWDIGLQERRGVGYVYSSKHCSEEQARKTLANYVGLEEVKTAKKINFKPGHRKIFWKNNCVAVGLASGFLEPLEASALMLIEASANYIADQLPANKELMPITAKRFNAIMLKKWRGVIDFLKLHYALSERTEPFWLEHRDTQSIPNSLQELLSIWRYSSPSEYDFTDNVEAFSAASYQYILYGVGFKSDFSQMEHIYNQGELAKKQLQMTKIRIDQLKYNLPTHRDLINKVNSLGFAKL

SEQ ID NO: 83832 - protein, 587 aa, Nonomuraea polychroma
  misc_feature (1)..(587): tr|A0A438MEW4|A0A438MEW4_9ACTN Tryptophan halogenase OS =Nonomuraea polychroma OX=46176 GN=EDD27_6881 PE=4 SV=1
MEQWSGAMGPGGRTPLDELLETLTQQESAGVKAWLGSGPSWPGAPAGVSPKALTEHHEKVEGDRFRPSDDDPRAIRSVGVIGGGTAGYMTALALKTKRPWLDVTLVESKEIPIIGVGEATVSYMVMFMHHFLGIDPMELYRKVEPTWKLGIKFDWGPDPDGFMATFDWHHHSIGALGALEEDNTVNGFTVQSLMMMADRAAVYKIGDKNVSLMKYLPFAYHLDNARFVAFLTELAAERGVKHVEARLEDVVLNGEEWVDHVRTSDGRQLSYDFYVDCTGFRSMLLGKALGTGFHSYADTLFTDSAVTGNLEHGGHLKPYTTATTMNAGWTWNIPTPQSDHLGYVYASGALSDEEAAKELTEKFPGIEGLRQVRFRSGRHDKAWRGNVMAIGNSYAFVEPLESTGLLMIALAVQTLTSVLPASWEDQAVREVVNRGLGQRWDAIRWFLGIHYKFNTRLDTEFWKDVRDRCDVSGFQPLMELYQNGAPLTRRDPYILDLALGAAPTFFGLAGIDNILLGQKVPARLLKRAEPIEDWRARRKAADALVAKAMTQAEALHAFTTDPELNTQLLNDFDSWAGRHIAGYIGML

SEQ ID NO: 83833 - protein, 481 aa, Sphingomonas koreensis
  misc_feature (1)..(481): tr|A0A1L6JGX7|A0A1L6JGX7_9SPHN Tryptophan halogenase OS =Sphingomonas koreensis OX=93064 GN=BRX40_16900 PE=4 SV =1
MTATALAKSLGRAVRITLLESEEIGTVGVGEATIPTIHWFNQFIGLDETAFLSATKASFKLGIEFTDWTRLGHRYFHPFGTYGAQLPGVAFHHRWLKAAREGLDLPLSAFSLASALAEQNRFAKPQGDARSILSTLGYAYHFDASLYAGHLRSIAEAAGVVRVEGLLQDVERESESGFVTALTTQRGERLDGDLFIDCSGFRALLIDKTMGGDFEDWSHWLPCDRAAAVPSARNGAITPYTRSTAREAGWQWRIPLQHRTGNGYVFSSRFISEDEAIATLLANLDGAALAEPRVLRFLAGTRRRAWIGNVVALGLSSGFLEPLESTSIHLIQSGIAKLLTLFPDRDCDPALADRFNRLLNADMDVIKDFLILHYHATERTEPMWVERRAMALPDSLVAREAQYRRSGRLMLDAEELFRETSWLAVLNGQGVIAKGYNPLADTLDPEVNRAQVQQIADVIARAAPTLPLHDDALAEATGSGS

SEQ ID NO: 83834 - protein, 799 aa, Methylorubrum sp.
  misc_feature (1)..(799): tr|A0A4Z0EIE9|A0A4Z0EIE9_9RHIZ Tryptophan halogenase OS =Methylorubrum sp. Q1 OX=2562453 GN=E4V01_00570 PE=4 SV =1
MFRSERSAPPRLVVAGGGPAGWMAALYLKRVLRRAGWTVTLVGSAPAAGASAALATRPAFTRFLTGIGIDEAIFMRRCAATYRLASRYDDWFAEGQGHWHPFGACGPRIAGRDLFHYWMKLRQESTEEGAEVEAGSYADYAPQALMAAAGRGPRPMADRSSLTESGDYGYHLDRTALVRFLRDLALSEGVRGVAGRVREIERDLYGDVGAVVLDGGQKVEGDIFLDCTGATGQLIGTALGEAWVAGSGPGNRMARLSLPQSPEVPPFTAYRGRAEGWTASLPLADRTEHLYVYDSRTTPPDAAAATLRCAFDSEAGIVDAELRHGRRASPWQRNVVALGAAAGAVEPLLGFDLDLVLAGLETFLATLPRQGDGGDVLRRAYAARLNRFHDDAAEAVAAHYVLGRRSEPFWAAARAVTIPDRLADRLDLYELAGHVALSEEAPFSEGDHYLLFSGADFLPRRPFAPVDVADGREIARLLASIRAQSAQIAEAMAPHGRLMDALHGKVPVAGPSVRIAAASAPVGPAGLRRTPEGARLADLVAGLGQPFGYERSVKASPAGLQTDRFLMSLHRASLGLTPETTLDRLAAGLGLPERERAEAAGLIGGADILHLGYEDGPPGALYKLYVEWSSRTDAAWTGADEAGAEPMLVHRAYKWTPGGTHPPVVTLYHWPRVRGPEEIGARLNRMAGEWGAAGAPARDTAHAILRLAQERGRGAVHYLEAREEPGRRLSYDLNLYACGLTVADAEPLLGQAFVNLGVPREAAARVLRERLQETLGHVAGGVGRDGQPFITVYSGVAGG

SEQ ID NO: 83835 - protein, 525 aa, Luteimonas sp.
  misc_feature (1)..(525): tr|A0A4U5JM41|A0A4U5JM41_9GAMM Tryptophan 7-halogenase OS=Luteimonas sp. H23 OX=2572684 GN=FCE95_10860 PE=4 SV =1
MAIVRKVLVVGGGTAGWLTATYLARALGAAKPGGIVVELVESPDISIVGVGEGTFPSIRGTLSAIGLDENKFIARANATFKQGIRFEHWARSPGAPGRDHYLHPFSAPSQRPGAPELLPYWLLGYAPKELAFAEAVTMQKRVTDAGRGPKRLSDGPWQAPLNHAYHFDAARFADVLSEHGQRELGIVRRAATIERVELDQTGAIACVHTREQGALSADLYVDCTGFRSLLCGQALGVGWRSAKDVLFNDRAWAMQVPYERKDTPIPSFTIARAHEAGWTWDIGLHERRGVGYVFSSRHTDETRAEQVLRDYLGKAADGLTAKLIKFEAGHRTAPWHKNCVAVGLAGGFVEPLESTGIALIEIAAYLIAHLFPADGDMAPVSKTFNAMMAARYERIFDFIKLHYCLSQRRDTPFWIDNVDAASIPQTLQDKLAMWRCRPPHRLDFISDLEMFLPASWQYVLYGMEFRTDLSAMRGVYDQGESARREFAAVQHVAGLALDDLPAHRTLVEAMARDYETQGDRMPQTA

SEQ ID NO: 83836 - protein, 514 aa, Pseudoalteromonas citrea
  misc_feature (1)..(514): tr|U1KT69|U1KT69_9GAMM Tryptophan halogenase OS=Pseudoa lteromonas citrea DSM 8771 OX=1117314 GN=PCIT_08458 PE= 4 SV=1
MTLKKIIILGGGTAGWLTANHLAKKLNAELGQNVSITVIASDTIPTIGVGEGTVPYIKETLQYFGISEEAIITEAEGTYKQGIKFQNWSEDPIKRGEHAYYHPFEPFPLGQESIIRSWLQEPDKVNFEDYISIQARLAENNLAPKLITHGNYQSFVDYAFHFDAGKFTKLLSNNAITQFGVEAKNAVINRVELNPDGSIHSLVSENEVFEADFFVDCSGFQSDLLSGTLGVGFNDLSDTLLTDKALVTQIPYPQSPEKYDINPYTKAVAQSCGWIWDIQLQTRKGVGLVYSSSHSSIDEAHTLLSDYTGIDKDILNARQIDMKVGYRKQFWKKNCAAIGLSQGFVEPLEATGLLVFDMTASMLSYALAGGGDVLTQSAAKFNRDVETVWLNIVDFIKLHYCISKRRDSEFWIDNCENSKIPDSLSEKLEMWRFRAPNKFDFTSKLNVFTISNYQYVLYGMKHFPEALVNPSPFSNSVYQEMLKSKTMEYEYWADKAQLHSELIDKIIKFGVSKG

SEQ ID NO: 83837 - protein, 515 aa, Novosphingobium sediminis
  misc_feature (1)..(515): tr|A0A512AFW8|A0A512AFW8_9SPHN Tryptophan halogenase OS =Novosphingobium sediminis OX=707214 GN=NSE01_04410 PE= 4 SV=1
MMTPDPIRSILIVGGGTAGWSAAALLSAVLGPSGCSITLIESSDVPTVGVGEATIPPVFEFLAHCGIDEIEFIRQCQATFKLAIRFDDWLERGHSYWHPFGNLGVTINQRPFHHYWWKNKAAGHGETFADLCPAIALAQDGKFAFPPPDGSYPGGALNYALHFDAGLVAAFLKKHSTARGVAHIDARIAGCELAADGAIAAVQLADGRRIEADFFIDCSGFRGLLIEEALHAGYEDWTRWLPCDRAVAMPTATVGPPAPYTVSAAHEAGWRWRIPLQSRVGNGYVYSSRHVSDEQAAETLRGAAAGEALAEPRFLRFTAGHRKAMWVKNCLAVGLSSGFLEPLESTSIHLIHTALNRLLDYFPDRHCDSALSAAYNREAADEYAHIRDFLLLHYVPNRRHGEPFWDEIRHNPLPDSLAAKLELFRRTGRIVSRRRELFADISWFFVAAGMGIVPEALDPLADAAPFGEVRKVIGQISEVMGRYRQAAPTHQDMLARLLDPALKGRPNFKQTWGGA

SEQ ID NO: 83838 - protein, 503 aa, Microbulbifer sp.
  misc_feature (1)..(503): tr|A0A2S1JWW4|A0A2S1JWW4_9GAMM Tryptophan halogenase OS =Microbulbifer sp. A4B17 OX=359370 GN=BTJ40_19755 PE=4 SV=1
MSSQRKKIIILGGGTAGWITANLMANHWQDKGFEITLVESPDIGIIGVGEGSTPPLKGFMETIGVSEAEWMPACNATYKVGITFRDWSVKPGFTEYVHPFVGQPDQFTIPAFFHNSFLRRKGVELEGHPDHFFLATEMIRQKLSPVAPENFPFEIAYGYHFDSGLLGQFLRRVAETKGVHYKVATVAGAMLDAQGNIDHLKTTDGEVLKADLYVDSSGFRGSLIQQSLKVPFISSAESLFNDSAVVFATDQEKEYAPHTISTAMKYGWAWKIPLTNRNGNGYVYSSRFVDDDKAETEFRAHLGLLNSDVEARRLKFKVGRVAQHWAKNCLAVGLSQGFIEPLEATALDMVQETVVRFIEAYNNGDHTDKFRDDFNNRISARFDAVRDYIVCHYRISSRTDTDYWIVNGANEKISPSLRSILMSWMAGKNITDELLDQKLDVYFPNVSWNCLLTGKGIYPDQEQLRPGNELAHKYKMEEIREFNRRCALNFMSHMDQLNQLRMG

SEQ ID NO: 83839 - protein, 506 aa, Sphingomonas koreensis
  misc_feature (1)..(506): tr|A0A430G169|A0A430G169_9SPHN Tryptophan 7-halogenase OS=Sphingomonas koreensis OX=93064 GN=DAH66_15930 PE=4 SV=1
MTQRSIVIAGGGTAGWMTAAALARFCGSGWTISLVESDAIGTVGVGEATIPMIRLFNQALGIDEAEFLRETHGTWKLGIEFDGWGVPGERYMHAFGQVGRGLGLLPFHHYWLRARAAGRAGPLGNYVLNDIAAKANRFGHVERAADSVLPAMPYAFHFDAGLYAAYLRRYAEARGVARIEGRVERVERDGENGDVTTLVLAGGVRVAGDLFVDCSGFRGLLIEGALETGFEDWGHWLPCDRALAVPCERADPLIPYTRATARKAGWQWRIPLQHRTGNGYVFSSAHISEDEAASVLLANLDGAPRAEPRLLKFRAGKRRKAWNRNVVAIGLSSGFLEPLESTSIHLIQSGITRLLDFLPNGRVADADRDAYNRMTDFEIERIRDFVILHYFANRREGEPMWDALRYMDLPEPLADRIAMFRACGRIVREHDELFDVPGWIQVLAGQGIVPERWHPLADELSAEQLDQFLSTVADAYARDAARLPGHADYLTRFCGAPSTLSQSSIA

SEQ ID NO: 83840 - protein, 510 aa, Sphingomonas sp.
  misc_feature (1)..(510): tr|A0A4R2TCX6|A0A4R2TCX6_9SPHN Tryptophan halogenase OS =Sphingomonas sp. PP-F2F-A104-K0414 OX=2135661 GN=C8J46 _101175 PE=4 SV=1
MTDPNPGPIRKVVIVGGGTAGWMAAAAAARYLDDGQRQVVLIESDAIGTVGVGEATIPPILGFNALLGIDERDFLRATGATFKLGIEFVGWDTGDDRYMHAFGGHGRDIQGLAFHQLWLKLRDRPGIGALEEYAPSAVAAYLHKFGQPGGQPPLAYAYHFDAGLYAAFLRRRAEAGGVTRIEGRITGTDRDPLTGHVRAVRLEGGQSVDGDLFIDCSGFRSLLLGETMGVAFEDWSHWLPCDRAVAVPTEPSTPLLPYTRATARTAGWQWRIPLQHRTGNGHVYSSAHISDDEATATLLANLDSKPTAEPRQLRFKAGRRERLWEGNVVALGLAGGFLEPLESTSIHLIQTGISKLFALFPDRGFSAVERDEYNRLMGDAYTSVRDFIILHYHATRRDDSAFWRHVRTMPIPDSLTRKLTLFRKNARIFRYDDELFGISSWVQVLLGQDVVPVGYDPIVDALDADRVADAVRQIRGATLRTAQALPGHGDFVATHGRFEGVPPMRSPVRT

SEQ ID NO: 83841 - protein, 519 aa, Marinobacter sp.
  misc_feature (1)..(519): tr|A0A1I2ET16|A0A1I2ET16_9ALTE Tryptophan halogenase OS =Marinobacter sp. DSM 26671 OX=1761793 GN=SAMN04487869_ 12830 PE=4 SV=1
MNQDEKKIFDVVIAGGGSAGWMAAAFLSEVFKLENSQKYTVTLVESETIAPIGVGEATIQSMRGFLAACGINEGEFLVATDATFKHGILFKEWLHKQGEDELPHQYFHPFEGPMTLAPEPLVSHWLNAKLSGLNSERYDRCSGVQGALAAAGRCPKTWQSSAYEAPINYGYHLDATKFATFLKKISLQKGVKHLLADINGVHLSEKGNISHLDLKSGQHLYGDLFLDCTGFSGLLMKSLDSEFIDYSKYLFCDRAVTIRLPHKSSDYEPRPYTTATARESGWTFEIDLQGRTGFGYIYSSKHCDSATAEEALRRFYPNIVPEQKANHLKMNVGRLKKSWNRNCVAVGLSSGFLEPLESTGLYFVEMELRLLVDYWDPLSKSTACQEQFNDAFNSKFDEAMEFIVLHYVLTKREDSSFWRDVQSQTAELPALKHKLAMWEHKPPTDGDFKNETVLFRAPNYSTVLYGMDWLPEETPVSISHIPPQESLEHFVKLRKLQKMAIEGSPTHSEYLKKYTASFR

SEQ ID NO: 83842 - protein, 497 aa, Amphiplicatus metriothermophilus
  misc_feature (1)..(497): tr|A0A239PQG2|A0A239PQG2_9PROT Tryptophan halogenase OS =Amphiplicatus metriothermophilus OX=1519374 GN=SAMN062 97382_1400 PE=4 SV=1
MSQSRPRKKVIIAGGGTAGWMAAAAIGKTLGKIVDVTLVESDAIATVGVGEATIPTLVTYNRLLGIDEAKFMSAVGGTFKLGIAFENWTDLGHRYIHSFGVTGKDHWTAGFAHFWRRGREMGIARDFGDYCLELVAAERERFAHLPDLGLNYAFHLDSTAYAAFLRNIAEEHGVVRKEGRICGVRRKENGDLQALVLEGGTALEGDLFLDCSGFRALLIGETLGVGYDDWTHWLPCDRAIAVQTKSTRPPVPYTRSIAHEAGWQWRIPLQHRTGNGIVFCSRYMSEDEARERLLSSIEGEILTEPRVIRFRAGARRAHWHRNCVSIGLSSGFIEPLESTSIHLIQRSVIRLMQMFPHGDVEPSDVTEFNKQTFYELEHIRDFIILHYHLTNRTDTEFWRHCRNMDIPDGLKHRMRLFSQTGRAFKANDELFAENSWTQVMLGQGLLPKTYHPVADVMSEEELARFLAHVEGNVARTVESLPAHEAYLKTYCPVKAPA

SEQ ID NO: 83843 - protein, 245 aa, Sphingomonas sp.
  misc_feature (1)..(245): tr|A0A4V6NS93|A0A4V6NS93_9SPHN Tryptophan halogenase OS =Sphingomonas sp. PP-F2F-A104-K0414 OX=2135661 GN=C8J46 _10860 PE=4 SV=1
MTIDIQRMQDLAHEIVWLQGELDREIENRRRALGVELTGRIVGFEHGVLDAQRRLKVSVLRFVARSDVVSIVTAPVIYSLIVPLAIVDLWVSAYQAICFRAYGIARVRRRDYIMFDRAHLGYAQVRDFIILHYHATERSDSPFWDHCRTMALPESLKGKLALWRGKARVFREQGELFTPDSWIAVLLGQNVQPASFDPLTGGLPLGEATRFMAHIREMIGKTAEAMPTHEDFIARHCSAPMVRQA

SEQ ID NO: 83844 - protein, 525 aa, Mesorhizobium sp.
  misc_feature (1)..(525): tr|A0A442VH46|A0A442VH46_9RHIZ Tryptophan 7-halogenase OS=Mesorhizobium sp. OX=1871066 GN=EOS11_20280 PE=4 SV= 1
MTKSVLIVGGGTAGWMTASYLAKVFPKLRITVLESDIIPTIGVGEATFSTIKVFFDFLGLPESEWMPHCNATYKLAIKFANWGPEPGHFYHPFQRYATIDGFNAGEWWLRLKPGQQFDRSCFVTPALCEAKLSPCFLDGRVFDEKVQDLFADPRRKASVLSEHKEQYPYGYHFDAALFAKYLRDYATKLGVKQILDDVINVELADDGSIDHVIGKISERVSADLFVDCTGFRGLLLNEALQEPFISFKDSLLNDRAVALRVPSTPDTDEIEPFTTATTMSAGWTWNIPLYNRIGTGYVYSSQFITPEMAESELRNHVGSRAENCSANHIKMRIGRSRNSWVKNCIGIGLTSGFVEPLESTGIFFIQHNIEELVAHFPGENIDPDVVASFNRIVGSCIDGVRDFLVLHFKGSGRNDTPFWKAVKQTPLPDHLEERFQLWRKRLPNAKSIDSRYHGFEYYSYSVMMLGLGSAPTEYLPTLAQRDPKNAILSFNQVNEQSQKLVSTLPSHREYIMQLYSTAPHSERHK

SEQ ID NO: 83845 - protein, 500 aa, Novosphingobium sediminis
  misc_feature (1)..(500): tr|A0A512AFS7|A0A512AFS7_9SPHN Tryptophan halogenase OS =Novosphingobium sediminis OX=707214 GN=prnA PE=4 SV=1
MTETHAKRRIVIAGGGTAGWMAAAALARTMGDAIELTLVESEAIGTIGVGESTIPPLVAYNRLLGIGEADFMRATQATFKLGINFENWRVQGENYFHSFGTTGRDHWSAGFQHFWMHGLTKGHEASYDDYCIELQAAMKSRFAHLPDNRINYAYQLDSGLYAVFLRKLAEADGCRRVEGKIAEVQLHPETGDIAALLLESGQRVEGDLFLDCTGFRALLMEGALHVGYDDWTHWLPCDSAIAVQTASVRPPVPYTRAIAHDAGWQWRIPLQHRQGNGIVYCSRYLDKDAALDRLLTTVEGEVLTKPNVIRFTTGARRKQWHRNCVAIGLSGGFMEPLESTSIHLIQRAILRVVRMLPAGEISPRDVAEFNDQQHTDMEQIRDFLILHYKATDRRDSPFWRQCAGMDIPESLTHKIELFRETGRVFRKNEELFVENSWVQVMMGQGIMPRSYHPVATKLSDAELAHLLSGLRESVAKTVAGLPDHHAYVAQYCGAQEARAA

SEQ ID NO: 83846 - protein, 504 aa, Sphingomonas sp.
  misc_feature (1)..(504): tr|A0A4R2TCH3|A0A4R2TCH3_9SPHN Tryptophan halogenase OS =Sphingomonas sp. PP-F2F-A104-K0414 OX=2135661 GN=C8J46 _101345 PE=4 SV=1
MVEQRVRKVVIAGGGTAGWLTAAALSRQLGQLLDITLVESEEIGTIGVGEATIPTMRSFHAILGLDEREFMRATQATFKLGIAFENWAHDGDRYIHSFGDLGKSTWMGDFHHFWLAAKAAGDPSEIGDYCLELQAAKAERFALPSEGEINYAYHLDAGLYARFLRARSEANGLKRIEGRIASVDRDGETGFISALVLDSGERVDGDLFIDCTGFRGLLIEGTYAAGYEDWSHWLPTNSALAVQTASRGPAHPYTRAIAHDAGWRWRIPLQHRVGNGLVYASEHLSDDEAHARLLGAIGSAPLTEPRLIRFRTGRRRQVWKGNCVALSLASGFVEPLESTSIHLIMTGVLRLMKSFPFGGIAPAVVTRFNDQAQAELEHVRDFIILHYHLNNRPEPFWAARRDMPIPDTLIERIALFAEGAQAYQGGEDLFRVASWVQVMLGQHLVPHDHHRLGSIMGGPQLASVLTKIRSDIAGMVSGMPTHQQFLDRYLAPPIAAGSGIRSMN

SEQ ID NO: 83847 - protein, 514 aa, Amphiplicatus metriothermophilus
  misc_feature (1)..(514): tr|A0A239PX55|A0A239PX55_9PROT Tryptophan halogenase OS =Amphiplicatus metriothermophilus OX=1519374 GN=SAMN062 97382_2267 PE=4 SV=1
MTDALSRSAIRRIVIIGGGTAGWMTAAALSRLMRNGHSSITLIESDEIGAIGVGEATIPPITAFNKLLGIDENDFVAKTQATFKLGIEFVDWTRRGHRYIHPFGEYGLDIEAVKFYQIWLKLYSLEDDIPYIDEFNLSAVAAKLERFLKPSTDPRSVMSSLAYAFHFDATQYAAYLRRYAEARGVKRIEGKVVDTTLRSEDGFIEAIRLESGEKIGGEFFIDCSGFRGLLIEQALHAGYESWTRWLPCDRAVAAPSERVRDPIPYTRASAHSAGWRWRIPLQHRTGNGCVYCSEHMDDETAMAQLVAGLDSPLTGEPRYLKFTAGRRKEFWKKNCVAIGLSAGFLEPLESTSIHLIQAGVSKLIALFPDGEFNPIERDEYNRLTALQFEQIRDFLILHYHATERDDSEFWRYTRSIPIPETLKAKIELFRSKGRIFRFQDELFGESNWLSVLLGQNIRPRTWDPFVDALDYAQIRGQLMRMHALIRSTAEKMPRHQAYIDRFCAAAKPVREQSK

SEQ ID NO: 83848 - protein, 502 aa, Amphiplicatus metriothermophilus
  misc_feature (1)..(502): tr|A0A239PWH7|A0A239PWH7_9PROT Tryptophan halogenase OS =Amphiplicatus metriothermophilus OX=1519374 GN=SAMN062 97382_2268 PE=4 SV=1
MPNQSHGETRNIVIIGDGFDAWLSAAYLTRKLRAGYDIVVCAPPREEMQDHCAVFAGPATSSLHAELAVDERDLLRYCRGTFSLGAHFLDWTKPGKDYVVAFGAYGAPIETIAFHQCWRKRQRIVKGGDRFDSYSLSATAARAGKFAHPSRDPADIRSTYRYGYHVDVELYTDYMRRYAMHYGAKKAGARYANALLKERREGIDAVRLADGEIIPAFLALDCASAAAPLIEGALGATWTSFPSPGAVDSVITFAASSVASPSMTRIVAAKTCWRMDIPFQDGARCMIGYDSRAVSLDALAREHGPLENLEAKRIVRGRRAPAIGNVAALGESACRLDPLFCPAPATLIAGLKTLVELLPASQSGAETDEYNRIMSDVFERCNDFVTLQYWLAEQLGQHAWAAGAEKALSPHLRRKIEQFRSRGQIVQFDEEIYDQEMWIASLLGAGVNPERYDPFADGLSETMLDARLAALREKIAETVRAMPDQMIYLRQARATAPERSGS

SEQ ID NO: 83849 - protein, 515 aa, Paucibacter aquatile
  misc_feature (1)..(515): tr|A0A2N8KVC7|A0A2N8KVC7_9BURK Tryptophan halogenase OS =Paucibacter aquatile OX=2070761 GN=C1O66_07675 PE=4 SV =1
MTSAPPASPHFVIVGGGTAGWMSACLLARQLGPACRYTLVESSDIGIIGVGEGSTPYLRDFFRQLGLEERDWMPACHATYKAGIRFPGWSTHPGYESYVHPFFNEADRPLGQAFIQQANQRRCGEDVDANPADFFLAAELARQRRAPHYVHPAQHPATDYAYHFDSGLLGSFLKRHAQEQLGLQHCVDTVAAVERHAESGDITALRLQSSGQRLEGDFFIDCSGFRGLLINETLGEPFIPWGDRLFNDRAIAIPTPLEPDRDIASETTSTALGHGWAWQIPLTHRHGNGYVYSSQFISDDAAEAALRAHLGPAAEGASARRLKMRVGRVARHWRHNCVAIGLSQGFIEPLEATALMLIQFSVQHLIEALQTGGDDPATLRERYNAEINRMFDGVCDYVQTHYLLNTREDTEYWRANRAMKPGSDRLAELLASWDAGADFDAALGRHEAALMYQRPSWYCLLAGMGRFPANAPGHRAAPSQAMALSGLQARAALMDQARKHFLPHREALRRLATSA

SEQ ID NO: 83850 - protein, 490 aa, Sphingomonas sp.
  misc_feature (1)..(490): tr|A0A4R2TBQ4|A0A4R2TBQ4_9SPHN Tryptophan halogenase OS =Sphingomonas sp. PP-F2F-A104-K0414 OX=2135661 GN=C8J46 _101174 PE=4 SV=1
MTSRTPIASIAVLGAGVVGLSAAIAFARALPGLAVTLIETPDDAAALTDRLSGTLPSITAFHDRIGLRERDLLAAGATHRLGTRLSDWSADGAPVVLAQGERGGTIAPGAFHQHWLNARRAGKTAAFDAFSVPAVLAAAEKFVHPSDDPNSPISGFGYALRLDPPRYRDLLRALARHIGIVPVPGAFAGVERGEDGRVSAVLLADGRRLVADLYVDCSGPAAPLRSALDTQWDDWRTWLPVDRLLLGTAPVQTLTPTDDLVAVPAGWRFASRLRDRTLVGLAYAADQTSDSSARRILPAGDTIVPLTPGARPEPWKHNVLALGDAAVVLDPLADANLHLAHAAILRAIDLLPGRDCAPTELAEYNQRSYRQAARVRDFQAAHYLPTGRTRGPFWKHASRLSRPDSLAHTLEHFAHRGRLPFYEDESFDKDDWHGLLLGLGIIPRIADPIASASPPDTIAATLKRLAEATAALPARLPPYPLYLAQLERAR

SEQ ID NO: 83851 - protein, 504 aa, Amphiplicatus metriothermophilus
  misc_feature (1)..(504): tr|A0A239PVM6|A0A239PVM6_9PROT Tryptophan halogenase OS =Amphiplicatus metriothermophilus OX=1519374 GN=SAMN062 97382_2130 PE=4 SV=1
MNDAHIRSIVILGGGTAGWMSAALLAKVMGRKRRITLVESEEIGTIGVGEATVPPLQLFNGLLGVDENEFLRATNGTFKLGIEFVDWGRLGARYFHPFGRHGDHFDVAPFHQYWLKCRLAGKAAPIDEFSLCAAAARCSRFQRPPTKDPRSIWSTFSYAFHFDASAYAAFLRRYAEARGATRVEGKVADVRLRAEDGFVDRLVLADGREIAGDLFIDCSGFRALLIGQALGVGDEDWSHWLPADRAVAVQCENAGPLLPYTRSTARRAGWRWRIPLQHRVGAGYVFVSDYLSEDEAAADLLAGLDGPALAEPRLLKFRTGRRKAFWAKNVVAVGLAGGFLEPLESTSIHLIQTALTKLASWFPDRRFDPMIVAEYNRLHHLETERIRDFIILHYKATEREDSPLWRYCRNMPIPDSLAEKMELFRRYGKLKQLEGDFFQDASWLAVMLGQFVTPERNDPIADLHETEPLAKTLETMRAIIARTAKDMPEHAAFVERSCAAAAAH

SEQ ID NO: 83852 - protein, 506 aa, Sphingomonas sp.
  misc_feature (1)..(506): tr|A0A4R2TTC9|A0A4R2TTC9_9SPHN Tryptophan halogenase OS =Sphingomonas sp. PP-F2F-A104-K0414 OX=2135661 GN=C8J46 _101173 PE=4 SV=1
METGGTRVVVVGGGTAGWMTAAALVRLLPTACSVHLIESAEIGIVGVGEATLPHIRAFVERLGLDEADFMRATHATFKLGIDFRDFGAIGDSYIHPFGTFGRPLDDVGFHHYWLRLAAEGRAGPIGDYSVAVAAAKAHRFAIPDGPADDLAASFGYAYQFDATLFGPYLRRFAEAHGARRTEARIISVDQDAVSGDVRAVRLDSGETVEGDLFVDCSGFRSLLLGNAMAEPWEDWSRWLPCDRAVAMPCTSPEGPIEPYTRATAKPAGWQWRIPLQHRVGNGYVYSSAHIADQAAADALVASVEGTPLADPRFLKFRAGRRSNSWVGNVVAIGLASGFLEPLESTSIYLAQMAITQLIELFPQRAGSEGISATDRTEFNRMVDMEYDRIRDFLILHYHATTRDDSDFWNHVRTMEVPATLADKMELFRRAGRVTQYSEGLFLEPSWIAVYLGQGIIPQAWDQRADRPGLDGLDRAVASLRDHVAATASAMPDHAAFIARRNATIAA

SEQ ID NO: 83853 - protein, 505 aa, Amphiplicatus metriothermophilus
  misc_feature (1)..(505): tr|A0A239PY70|A0A239PY70_9PROT Tryptophan halogenase OS =Amphiplicatus metriothermophilus OX=1519374 GN=SAMN062 97382_2269 PE=4 SV=1
MSQSALIKRILIVGGGTAGWMTAAAMGKLLAPLKIDVTLLESDQIGTVGVGEATLPHIRFFNRRLGIDEADFMAQTAATFKLGIEFRDWARKGDAYIHPFGDYGRDIKGVPFHHYWLRLRQRGRAWRIGEFSAPVMISEFGRFAMPVEDERSVMSSFSYAYQFDAGLYAKYLRRFAEACGVRRIEGKITTVIQRGEDGFIEAVKTEDGRRVEADLFVDCSGFRGLLIEQTLKAGFEDWSAVLPCDRAVAVPCENAAPSLPYTRATARGAGWQWRIPLQHRVGNGYVYCSEHVSDDEAAQTLMASLEGRPRAEPNFLRFRAGKRRRQWVKNCVSIGLSSGFLEPLESTSIYLIQASVTKLLELFPDRDFRACDIDEFNRAMDLEYERIRDFLILHYHATERDDTPFWDYVRTMKIPDSLAYKMTLFRKRGVVVKYKDGLFLHPSWIAVYLGQRVMPDMYDPRAEFIAEDELEKTLSAMRNLIRKTAESLPDHSDFIRRYCPAPGTV

SEQ ID NO: 83854 - protein, 266 aa, Rubellimicrobium mesophilum
  misc_feature (1)..(266): tr|A0A017HWG3|A0A017HWG3_9RHOB Tryptophan halogenase, p utative OS=Rubellimicrobium mesophilum DSM 19309 OX=442 562 GN=Rumeso_00401 PE=4 SV=1
MQEAHLFQHLIWKKRGPFAEVNGKRVPAGPFHYAFHFDQALVGAWLRKKAKGIRHLDAQVTGVETGGDGVAALHLDTGERVDGDLFIDASGFRRRLVSELPFEWVSFSEMLPNNRALPFWLDLKDGEEIDPVTGAWAQGHGWMWKIPTQGRFGCGYVFCDAYISIEEAQAEIERALGHPIEPRGDIRINPGRQPGRLGGERRGGGACVVLPRAAGGDLDPRDHRAAHLPDGVDGPAGGRGALQRHRRSASGGLSGLRAAALRVGAA

SEQ ID NO: 83855 - protein, 510 aa, Sphingomonas koreensis
  misc_feature (1)..(510): tr|A0A1L6J8L3|A0A1L6J8L3_9SPHN Tryptophan halogenase OS =Sphingomonas koreensis OX=93064 GN=BRX40_07205 PE=4 SV =1
MADPMSQRSIVIAGGGTAGWMTAAALARFCGSGWTITLVESDAIGTVGVGEATIPMIRLFNQALGIDEAEFLRETHGTWKLGIEFDGWGVPGERYMHAFGQVGRGLGLLPFHHYWLRARAAGRAGPLGNYVLNDIAAKANRFGHVERAADSVLPAMPYAFHFDAGLYAAYLRRYAEARGVARIEGRVERVERDGENGDVTTLVLAGGVRVAGDLFVDCSGFRGLLIEGALETGFEDWGHWLPCDRALAVPCERADPLIPYTRATARKAGWQWRIPLQHRTGNGYVFSSAHISEDEAASVLLANLDGAPQAEPRVLKFRAGKRRKAWSRNVVAIGLSSGFLEPLESTSIHLIQSGITRLLDFLPNGRVADADRDAYNRMTDFEIERIRDFVILHYFANRREGEPMWDALRYMDLPEPLADRIAMFRACGRIVREHDELFDVPGWIQVLAGQGIVPERWHPLAGELSAEQLDQFLSTVADAFTRDAARLPGHADYLTRFCGAPSTLSQSSIA

SEQ ID NO: 83856 - protein, 503 aa, Sphingomonas sp.
  misc_feature (1)..(503): tr|A0A031I014|A0A031I014_9SPHN Tryptophan halogenase fa mily protein OS=Sphingomonas sp. RIT328 OX=1470591 GN=B W41_01685 PE=4 SV=1
MTAPATPRRIVIAGGGTAGWLAAAILTRQLGPFAEITLIESDEIGTVGVGESTIPTVRAFHALIGVDEREFMEATGASFKLGISFENWARHGDRYIHSFGDVGQSTWMSDFHHFWLEAQARGIAEPFGAYCYEHEAAAADRFAVGGTPALNYAYHFDAGRYAHFLRGKAEANGLRRIEGRIDRVVRDADSGDIATLILADGTAVPGDLFFDCTGFRALLIGEALGVGFEDWGEWLPTNRALAMQTEATGPAPPYTRAIAHDAGWRWKIPLQHRVGTGLVYCADYLSDDAARARLLAAAEGRTLIEPRLIRFRTGRRKAAWQHNCIALSLASGFVEPLESTSIHLIMIALTRFLQLLPAGRPSAAAIARFNGQAAQEIEGVRDFIILHYHLTGRDEPFWRDRRTMAIPDSLAERIALFRDSANAYQADHDLFRVASWLQVMLGQRLAASSHHPLLRLMPSNQLNAVLQGIRQRISASVDALPSHETYLQDYLRSKGPPTLRTHR

SEQ ID NO: 83857 - protein, 508 aa, Sphingomonas sp.
  misc_feature (1)..(508): tr|A0A031I0B2|A0A031I0B2_9SPHN FAD dependent oxidoreduc tase family protein OS=Sphingomonas sp. RIT328 OX=14705 91 GN=BW41_01786 PE=4 SV=1
MRQDAIRRVVIVGGGTAGWMAAAGISRILGDMPGLSIELVESEEIGTVGVGEATIPQIVLFNTMLGLDEAMFMRETRATYKLGIEFVDWVRPGHRYVHPFGSYGLDMKGIEFHHFWLKGRELGDTTPLDAYSLAIVAGLQGRFGHPRPDQPGSPLSKLGYAFQFDAGLYARLLRRLAEANGVRRTEGRIVGVDRDGESGHVAAVTLASGARVEGDLFIDCSGFRGLLIEGEMQAGFEDWRDWLPCDRAVAVPCANGGERQPLTRSTARAAGWQWRIPLQHRIGNGYVYASEHLSDDEAAATLLANLDGAPLAEPRFLRFTAGHRRRAWVGNVVALGLAGGFLEPLESTSIHLVQSAIARLLTYWPTRAFDQREIDRFNAAHVEDYRDIRDFLVLHYKATDRDDTAFWDYCRTLPPPPGLADKLAIFAANGRIFREHEELFTETSWLSVMVGQGVRAGGYHPAADLLSDAETLARLGHIRTVVAETAHLLARQDDILAHYGCTLTGAAA

SEQ ID NO: 83858 - protein, 534 aa, Streptomyces stelliscabiei
  misc_feature (1)..(534): tr|A0A0L0KQY4|A0A0L0KQY4_9ACTN Tryptophan halogenase OS =Streptomyces stelliscabiei OX=146820 GN=IQ64_33865 PE= 4 SV=1
MNGQDSRIKKVVILGGGTAGWMTAAYLGKALENTVEITVLEAPTIPRIGVGEATVPNLQRVLFDFLGINEDEWMRECNASFKTAVRFVNWRTEGKGEPAARELPAGGPDHFYHPFGLLPDYDQTPLSHYWYKNHHEGTTTEPFDYACFREPPVMDAKLAPRWLDGRHATRYAWHFDAALVAQFLRRFATDKQGVLHVEDEMTRVEQDERGFVTALHTKSGKVLDADLFVDCSGFRGLLINQAMAEPFIDMSDHLLCDSAVATAVPHDDEANGIEPYTSAIAMSSGWAWKIPMLGRFGSGYVYSSKFATQDEATREFSELWGLDPENTKFNQIRFRVGRNRRAWVKNVVSIGLSSCFLEPLESTGIYFITAAIYQLAKHFPDRNFNETLINRFNNEIEVMFDDTRDFIQAHFHLAPRNDTPFWRANKELTLPENIQEKIAAYRAGLPINSPVTDESTYYGNFEAEFRNFWTNGSYYCIFAGLGLVPDAPLPALSYRPGSVAGAQPLFERVKRQQKDLLDTLPTTYEYLRQLHGAS

SEQ ID NO: 83859 - protein, 518 aa, Pelomonas sp.
  misc_feature (1)..(518): tr|A0A0Q7SRM8|A0A0Q7SRM8_9BURK Uncharacterized protein OS=Pelomonas sp. Root1444 OX=1736464 GN=ASD35_01530 PE= 4 SV=1
MSDIQSIVIVGGGTAGWLAACYLQRTLGAARQSPLPITLIEPPQAVSLGADLATVPTLRGTMQALGLPERALFTAADATLSNGLRFNGWRRGGAAPDDSFDHPFDIPPPFHGFATTAHWLNLLQRGLTREPMAQACAVQTTLFDGHQSPKLVDSPEYQAPVSYGYQLDAVKLAMLLQQKALERGVRHVQGEVVRVQRGAGGIEAVELADGRRCEASFFIDCTGSRSLLLQQALGVPWVSFADWLPCDRTVSLPLAHGQAHGALRSHTTATAQAAGWTWDMDLQSRRGTGYVYASRFCSEDEAVATLRELGAGHKPLAEPRLQRLRAGHAARAWEANCLALGAAGGFIEPLESTGLYLVEWMLQLFVDHVAPAGNSDACRGRVNRVFGDFYEEMRDFIVAHYALSQRRDTPFWRACTEEATLPPRLAELLALWDSKVPTPTDLDRRLSLFGVANWSYLLAGLQRLPSRGIGLSDHISPEISLKAMAHVQGIRRIAAAQSPTMRDYLLSLDGVVTSHAAH

SEQ ID NO: 83860 - protein, 480 aa, Gammaproteobacteria bacterium
  misc_feature (1)..(480): tr|A0A2N1Y1M7|A0A2N1Y1M7_9GAMM Tryptophan halogenase OS =Gammaproteobacteria bacterium HGW-Gammaproteobacteria- 2 OX=2013798 GN=CVV12_10285 PE=4 SV=1
MAAAILAKAMGPQLSIRLIESEEIGIVGVGEATIPQIRLINSFLGVDENEVLRASQGTFKLGIEFNDWRRVGDSYLHAFGETGMPLGPLSFHHYWLRSQQAGGKTRLWDYSLNTSAAEGLRFARMDKVGDTPVGGIRYAYHFDAGLYGQFLRRYAEQRGVRRSEGKVVDVHLRATDGFIESVQMDSGERIEGDLFLDCSGFRGLLIEGALKAGFDDWSRWLPCNRAVTVASARVEPMRPYTQSNARPAGWQWRIPLQHRTGNGHVYCSDFMSEDEASALLLANLDGEALAEPRALRFTSGIRNTLWQRNCVALGLASGFVEPLESTAIHLVQSCINRLLTLFPDRHCDAALRDEFNRQTRYEFESVRDFLVLHYKATERDDTPFWRHCAQLQLPERAARKVALFRASGQIVRENEELFTEGSWLQVMLGQGIEPERYHPSADAISAAQLDGFLRGIRGTVAQAAAMLPSHSEYVAGHCRA

SEQ ID NO: 83861 - protein, 507 aa, Erythrobacter sp.
  misc_feature (1)..(507): tr|A0A3N5D8J8|A0A3N5D8J8_9SPHN Tryptophan 7-halogenase OS=Erythrobacter sp. HN-E23 OX=2488860 GN=EG799_04380 P E=4 SV=1
MSEPARPPLRVVVLGGGTAGWMTAAGLARLLPGMANVQLIESEDIGIVGVGEATLPHIRGFVERLGIDEAAFMRATHATYKLGIDFRDFGRLGESYIHPFGSFGEEVAGVGFHHWWLQLQSQGMAGDLGNYSLAVAAARADRFAPPAGDASLASTYGYAYQFDATLFGPFMRDFGLGIGVARHEGLVIEVERDAQTGDVTALVLEDGRRIEGDLFVDCSGFRSVLLGQELGEEWEDWTHWLPCDRAAAMPCTHATGAIRPYTTATAMPAGWRWRIPLQHRMGNGYVFASSFTSEDEACETIRSAADGEPLADPRILRFRPGRRRRSWSHNVVGVGLASGFLEPLESTSIYLAQMAITYLIELFPEGPGIDPRDRNEFNRLVDMEYDRVRDFLILHYHATTRDDSDFWNHVRTMTVPDSLADKMELWRRAGRIEKYSDGLFYDASWIAVYLGQGVFPERHDPRTSLADPARVEGALERLKRTIADHVAAMPAHADYLHRESARLAEEA

SEQ ID NO: 83862 - protein, 492 aa, Sphingomonas sp.
  misc_feature (1)..(492): tr|A0A0Q5PPH9|A0A0Q5PPH9_9SPHN Tryptophan halogenase OS =Sphingomonas sp. Leaf343 OX=1736345 GN=ASG07_00575 PE= 4 SV=1
MSAPFTVTIAGGGTAGWMTAAALARFAGPATRVRLIESDAIGTVGVGEATIPQIRLFNHGLGIDEDAFLAATGGTFKLGIEFVDWLRRGHRYMHAFGTVGRDIGVVPFHHYWARANAAGVAAPLGDYALNDVAARAGRMHRGPSITAPNLPPVPYAYHFDATLYARFLRDYAEARGVERIEGRILSVERADTGDIGALRLEGDRRIDGDLFVDCTGFRALLIGETLGVGYETWSHWLPCDRALAVPSEPTPEPVPYTRSTAHKAGWQWRIPLRHRTGNGHVYCSAHTSDDEAAATLLAGLDTPALGDPRPLSFTTGRRIRTREANVVAIGLSSGFLEPLESTSIHLIQSAIARLLKLFPGRTVIAAERVEHNRQTDFEIERIRDMVILHYHATERPEPFWQTCRDMTLPDTLAAKIDLWRARGHIVREHDELFTEPGWLQVLAGQGIAPAAWHPLAETLPDADLAGFMRMLADHNAREAAAMKPHAAFLRPQ

SEQ ID NO: 83863 - protein, 485 aa, Asticcacaulis sp.
  misc_feature (1)..(485): tr|V4PH22|V4PH22_9CAUL Uncharacterized protein OS=Astic cacaulis sp. AC466 OX=1282362 GN=AEAC466_06170 PE=4 SV= 1
MSAAAISKSFGTDILVQLVESEEIGLIGVGEATVPHISAFNRLLGINEAEFVRETKGTFKLGIQFNDWGKIGDSYIHGFGTIGRDLGLMPFHQYWLKARFARKAKEISQYSLNTVAAPMGKFMAPPRDAPANSPLAEIAYAYHFDATLYARFLRTRAEAQGVVRTEGKVVAVNQNKESGFVESVTLENGATITADLFIDCTGFRALLIEDTLHAGFEDWTHWLPCDRALAVPCEKVGPPTPYTRSTARSAGWQWRIPLQHRTGNGYVYSSQFTSDSEAADLLLNSLDGRALSDPKAIRFTTGKRRKLWDKNVVAIGLAGGFIEPLESTAIFLIQSGISRLVSLFPQSDFEPVLQDVYNAQMQFEYERIRDFIILHYYATERSDSEFWNYVRTMRVPDSVKSYIDLFAANGQFFREGTELFGLTSWVQVMLGQGIMPRSYHPAVDWVKNEDMQALVDHVEKVVASNVALMPRHEDFIARYCAASPI

SEQ ID NO: 83864 - protein, 602 aa, Microcystis aeruginosa
  misc_feature (1)..(602): tr|A0A551XYQ5|A0A551XYQ5_MICAE Tryptophan halogenase OS =Microcystis aeruginosa Ma_QC_C_20070703_M131 OX=248626 3 GN=EWV85_13210 PE=4 SV=1
MNSTITQSREYDVVIMGAGFAGLCQARHLMLNIPNIRVALIDPRPVERTDKDLKIGESLIEVAALFLCKELGLHDYLIENHPPKSGLNFHWPKDPAKTETLDDYYHVWANRQTPVGSFHLQRAKFEQDLLVMNCQMGADFYEGRVKDIALTSGDELKTVYAKVGEENITLQAKHVIDAAGKNFIIGRKTDNVLSGPENLLGLNNGSAWLRVKNIDRTIFHSGYHPEGASTSHYYATNHYFGQGHWLWMIPIDKHSMELSIGIIHHHEVIPAHSINNLDKFSNFLKSNHTILSQLIESGEVVDFHYWPKIAHKSKVLFSPDNWYVIGDAAHIFDAFYSYGTTMIAFEVESVTEIIRAKLAEEAAAEQKRSAYNDFNLAYARTVNCLYRDHAYQLGHASVMSWRIYFEYMWWFGVHVPTYIGKWHLDLNFIPRYVTIADGNVNGIFADLCQEFHQLVSQGANIGLMDAYRADQLLGGYGTLKHFDDFLENTKFEPRRCNVFASMKAAYFYIAIWYALFQWKAFGIAGWLNPKHWYYFGRMLKLSIQATIAEVIYKRKTRGIADNSQIEKMREEFKNYHYQPQKKSPSVVQNVISERVKIESFPA

SEQ ID NO: 83865 - protein, 497 aa, Pseudoalteromonas sp.
  misc_feature (1)..(497): tr|A0A1I6Y5X7|A0A1I6Y5X7_9GAMM Tryptophan halogenase OS =Pseudoalteromonas sp. DSM 26666 OX=1761892 GN=SAMN0448 7870_0545 PE=4 SV=1
MKPIKHVVIAGGGTAGWIAAALLNKVLGKVINITLIESTHIGTVGVGEATIPPIMQLNNALGINEQHFINATNATIKLGIEFENWKSSAHSYMHAFGTLGKNFPFCDFYNFWLKGQTQGNKDDFWDFSLNYQAAKNNKFAPLNTISNTSLPGLSYAYHFDASLYAEFLKHLATERGVKHLDAKINEVMQCPTSGNIQSLTLDDGSSISGDLFLDCTGLRALLIEQTLNTGFVDWSHYLPCDSAIAVQTASNDELKPYTRSIAHSAGWQWQIPLQHRMGNGLVYCSRYISDDDAKQLLLNNLPAEPITEPRLIKFKTGRRLKQWHKNVVAIGLSSGFLEPLESTSIHLIQSAVTRLIKLFPHHGVSDALVTEFNKQSITEIEHIRDFIILHYKLTEREDTPFWRQCKQMEIPQSLAHKMDLFKQTGKVVRENDELFAEVAWQQVMIGQGLLPDDYGALADSLTNEQLAELFSNLKTLINSTVEQLPSHTVFLSSLKPK

SEQ ID NO: 83866 - protein, 503 aa, Sphingomonas sp.
  misc_feature (1)..(503): tr|A0A031I3X1|A0A031I3X1_9SPHN Tryptophan halogenase OS =Sphingomonas sp. RIT328 OX=1470591 GN=BW41_00830 PE=4 SV=1
MTAPSIGSIVIVGGGSAGWMTAAALSSLIDERSAMTITLVESEAIGSVGVGEATIPDILAFNQMLGIDEAEFMRATEATFKLGIEFIDWARPGDRYIHPFGQHGVDMEGVDFHHYWLRLRADGVETPIETYSLSALAARAGRFTAPHPDPRSILSHLRYAYHFDAALYARYLRRYAEARGVTRVEGIVTQVDRTASGEGIAAVVMASGERITGDIFFDCTGFRALLIGETLDVAYTDWSAWLPCDSALAMPSAPVGPPLPYTRSTAQPAGWQWRIPTQRRTGNGHIYSRHFMDDDTAEAVLRAGVDGAPLAEPRQIRFTAGHRRRFWSGNCVAIGLSAGFLEPLESTSLYFIQEGISRFISLFPTKDMPDILRTEYNRHMNVEFEQVRDFIVLHYAATERDDTPFWRYCRTMDLPDTLRHKIELFRETGRVFRYNDELFARPSWVAVLLGQRIMPRRYDPVIATLPVGDVAHSLRSMAHAMADAVQRLPTHADYLAHYCAAGR

SEQ ID NO: 83867 - protein, 102 aa, Cupriavidus sp.
  misc_feature (1)..(102): tr|A0A5C8AXK6|A0A5C8AXK6_9BURK Tryptophan halogenase (F ragment) OS=Cupriavidus sp. OX=1873897 GN=E6Q40_00260 P E=4 SV=1
MENAGKISHLVIVGGGTAGWMSAAFFSKVFTPQQMKITLVESADIGTVGVGEATIPPITFFNQVVGVDERRMLTATQGTYKLGIEFVGWGDPGDAYMHPFGN

SEQ ID NO: 83868 - protein, 504 aa, Asticcacaulis sp.
  misc_feature (1)..(504): tr|V4PFS1|V4PFS1_9CAUL Uncharacterized protein OS=Astic cacaulis sp. AC466 OX=1282362 GN=AEAC466_10385 PE=4 SV= 1
MKKLISKVVIVGGGTAGWMTAAMLAKTMGTQAYDITLIESEQIGTVGVGEATIPPIQMFNSVLELDEDEFVRETNATFKLGIRFNSWFMPGSSYFHPFGFMGQDMDGIGFSHFWLRFARLSGNVDFGRFNVETMAANENRFGRTPPADGREKYGLNYAFQFDAALYAAYLGKYAQKRGVKRVEGLVVAVDQEAESGFVTGVRLKDGPTIAGDLFIDCSGFRGLLIEETLKAGYENWSEWLPCDRAAAVPCDRNPGPITPYTTSTAQEAGWQWRIPLQHRTGNGYVFCSDFISEDAACEKLLGRLDGAAQKDPKVLRFTTGHRRKIWDKNVIAVGLASGFLEPLESTSIHLTQSVITKLISLFPKFGVQQSVIDQFNRDILADYVNVKDFLIAHYKVTGREDTPFWKRCKSMDIPDSLKHRLEIFKTTGHIHVQPHELFKEASWFAVLVGQGLFPDNYHPLADTISEDALRQRLARIRTGITDRVNGLPAHDAFVGRVGAVRAAV

SEQ ID NO: 83869 - protein, 497 aa, Sphingomonas sp.
  misc_feature (1)..(497): tr|A0A031HV07|A0A031HV07_9SPHN Tryptophan halogenase OS =Sphingomonas sp. RIT328 OX=1470591 GN=BW41_02342 PE=4 SV=1
MTAPMPRRIVVAGGGTAGWMTAAALTRTLGRTAAVTLVESDTIGTVGVGESTIPPLITFNRLLGITEAEFMAATQATFKLGIQFDGWKGPDDSYFHAFGLTGKDHWAAGFQHFWLEGQARGHQQSYDDYCLELIAARESKFAHLPDDRLSYAYQLDSTLYGRFLRRMAESDGARRIEGRIARVDLDGESGDIAALVLDDGSRVEGDLFVDCTGFRALLIEQALHVGYDDWTHWLPCDSAIAVQTESVRPPVPYTRAMAHDAGWQWRIPLQHRVGNGIVYCSRYLTREAALDRLLGNVEGKVLTEPNMLRFVTGARRKQWHRNCVAIGLAGGFMEPLESTSIHLIQRAILRLIRLLPAAGAISPHDIAEFNDQQLTDMDQIRDFLILHYKVTERRDSPFWRQCAAMDIPDSLAQKIGLFRETGRVFRRNDELFAENSWIQVMLGQGITPAARHPIAAKLPDEELDRFLSGLRQGVATTVRGLPAHSDYVSRYCGAAPT

SEQ ID NO: 83870 - protein, 547 aa, Alteromonas stellipolaris
  misc_feature (1)..(547): tr|A0A0S1YQA2|A0A0S1YQA2_9ALTE Tryptophan halogenase OS =Alteromonas stellipolaris LMG 21856 OX=1160720 GN=AOR1 3_3556 PE=4 SV=1
MSNQPIKHVVIVGGGTAGWLCAGVLAARLGNRSGNSDESAINITLVESPNVPSIGVGEGSWPSLRDTLQEIGIKEAEFLTCCNASFKQGSTFAGWRNGQQNDNYQHPFTTPTGYTELDIHRCWQQFFSNESFEQSFCLQPDICHAGLAPKQNSTPEYAYVLNYGYHFDASALATLLTNHCKTSLGVKHTQAHIANVVTQDNGDIEALVTERGDTIKGDLFIDCSGQQGLLIDKHYHVPWHSVSSVLLNNRAVAAQVPYGSSDIEGSADSISSTTIATAQTCGWTWDIGLQHRRGVGLVYASEYASEEDAESILREHLAKQLPKTEIENLNYRHLQFDPGYRKQFWVNNCIGMGMSSGFIEPLEASAIAMVELGIRMLCDQFPQNRKHMSHVATRYNQRFTYRWERVIDFLKLHYVLSERTEPYWKAQRSENSIPDSLNALLDLWQYQAPSRYDLIENEEIFPSASYQYILYGMGFHTNGRQLDKNSDMVNKAFAVKQSLQQGKRQLLAGLPTNRDLLTAISHHAEKETTTNDNDKKEGPRHDVIGFR

SEQ ID NO: 83871 - protein, 511 aa, Pelomonas sp.
  misc_feature (1)..(511): tr|A0A0Q7SIE3|A0A0Q7SIE3_9BURK Tryptophan halogenase OS =Pelomonas sp. Root1444 OX=1736464 GN=ASD35_17910 PE=4 SV=1
MSDLSLRKIVIVGGGTAGWMAAAPLAQLFARAGARRPEIVLVESPDIGTIGVGEATLPPIRAYNKTLGLDEADFVRQTQGSFKLGIEFRDWGHVGNRFFHGFGDFGPAIEGRSPWQHWLRLQRSVADMPTYEDWSTPTVMARRNRFTLPEGGAPSAANAFSFAYHFDAGLYAAYLRDYAMQRGAQRIEGLIVDVELRPEDGFVAAVKLQDGRRIDGDLFIDCSGFRALLIGGAMQSPFEDWSELLPCNSAQAVPSERVEPLTPYTQSTARAAGWQWRIPLQHRTGNGHVYCSSFISDDEAAATLLAGLDSKALDTPRQLRFTTGRRKQGWVKNVVAIGLSSGFLEPLESTSIQLIMDAVGRLIQFLPDRNFKPHLAAEFNRLMARQYESIRDFIVLHYKVTARRDSELWRYCAAMPIPDSLAHQIELFRSTGRVAVLDPDSFAEPSWVSLFLGLGLRPEAYDPFVDLIDVQALLQHFVRLRQAITQTVAGMPDHADYIAKHAPAPRPVSPG

SEQ ID NO: 83872 - protein, 589 aa, Microcystis aeruginosa
  misc_feature (1)..(589): tr|A0A551XYQ1|A0A551XYQ1_MICAE Tryptophan halogenase OS =Microcystis aeruginosa Ma_QC_C_20070703_M131 OX=248626 3 GN=EWV85_13205 PE=4 SV=1
MNTTQALHYDVVIMGAGFAGLCQARHLMLKIPNIKVALVDPRPEQRTDKDLKIGESTIEIAALFLAKELGLHDYLIENHAPKQGLNFHWPKNPAKTETIDDYYHAGSNRQVPIPSFQINRSKFEQDLLKMDKAMGINFYNGQVVDVDLTPGDAIKTVKIKVGDERIDLQAKHVIDAAGRKFIIGRKTDNLLFGPENLMGLNTGSAWVRVKNVDRTIFHSGYDPLNASTSHYYSTNHYFGEGHWLWMIPIDTQTMELSIGVIHHHDVIDSTQVNSREKFHNFLQNHHQVLANIIDSGEAVDFHYWPRISHASKTLFSPDNWYVLGDAAYIFDAFYSYGTTTIALAIEGITEIVRAKLAGEADAEQKRAAYNEFNLAYSRSVNCLYRGHAKQLGQASVMSWRIYFEYMWWFGVQVPMYVGKWHLDLTYIPIFLKTLNSNIDGLFADLNEQFTELADKDVNIGLMDCYRGDQLFKGYHTLKHFDDFLENTKFEPRRCNVFAGLKATCFYAALWYALFQWKGFGIQGCLNPRHIYHFLRLLGLSGQATIGELIYKFKTKGLPANSEIEAMRQEFKTYQYQPKLQPWLAEATNS

SEQ ID NO: 83873 - protein, 476 aa, Pseudoalteromonas atlantica
  misc_feature (1)..(476): tr|A0A510ZG15|A0A510ZG15_PSEAF Tryptophan halogenase OS =Pseudoalteromonas atlantica OX=288 GN=PAT01_01060 PE=4 SV=1
MLNKVLGKVIKITLIESSTIGTIGVGEATIPPIIQLNNALGINEQDFINATNASIKLGIEFENWKTPSHSYMHAFGSFGKDFPFCDFYNFWVKGHISGAEESLWDFSLNYQAAKQHKFAPLNTIPNTQLPGLSYAYHFDATLYAEFLKNLATSRGVEHIDAKIEQVEQCPLSGNIKSLTLDNTQQINGDLFIDATGQRALLIEQTLNTGFVDWSHYLPCDSAVAVQSQGTSELKPYTRSIAHSAGWQWQIPLQSRIGNGLVYCSRYLSDDAATQLLLNNLPAEPMTEPRVIKFKTGRRLKQWHKNVVSVGLASGFLEPLESTSIHLIQSTVTRLIKLFPHNGISEALVTEFNKQSVIEIEHIRDFIILHYTLTAREDSPFWRQCKQMDIPDSLAHKLKLFKQTGKVVRENDELFAEVAWQQVFIGQGLIPEDYNSIVDSLSSEQLNDLFSTLKTLITSTVDQLPTHKDFLAKIKKA

SEQ ID NO: 83874 - protein, 507 aa, Sphingomonas sp.
  misc_feature (1)..(507): tr|A0A0Q5URM3|A0A0Q5URM3_9SPHN Tryptophan halogenase OS =Sphingomonas sp. Leaf198 OX=1736299 GN=ASG20_06325 PE= 4 SV=1
MTGTPAARITKVVIVGGGTAGWMTAAVLSRLVATGVAVTLVESEDIGTVGVGEATIPSLRDYNRMLGIDEDALVRATGATFKLGIEFRDWRRLGDSYLHPFGTHGRDIEGVSFHQLWLRQANLGGDPGPIGDYCLSAVAARKGRFTRPASNPQSVLSTLSYAFHFDAALYAKFLRGMAEEAGVVRVEGRVAAVDRDAETGFITGLRLDGDRRIDGELFIDCSGFRSLLLGDALGVPFTSWQHWLPCDRAWAVPSERLGTLTPYTRATAETAGWRWRIPLQHRVGNGHVYASDHVDDDDALRALLAGLDGKPLAEPRQLRFVAGRRERFWEKNCVAIGLSGGFLEPLESTSIHLIQSGITRLMALFPDRGFGGVEIAEYNRVMLREYAQIRDFIILHYHATERSDSTFWNHCRTMTIPDTLQAKLDLWSGNARTFREQGELFTPDGWIAVLLGQGVRPVSTDPLVAALPPEESARFMDHVRDMIGKTADAMPTHEQFIAQHCAATIAP

SEQ ID NO: 83875 - protein, 522 aa, Pseudoalteromonas atlantica
  misc_feature (1)..(522): tr|A0A510ZLL3|A0A510ZLL3_PSEAF Tryptophan halogenase OS =Pseudoalteromonas atlantica OX=288 GN=PAT01_21080 PE=4 SV=1
MNDTLKSIVIVGGGTAGWLSAGIIAAYLKKHHSLNYHITLVESADIATVGVGEGTWPTMRRTLQNMGVDEAQFINQCNVSFKQGAKFANWHSTKENDFYYHPLMMPQGFADNDLAAAWLRQDTDSAAPHNHFANFVCPQHALCEHNLAPKALTTPQYSGVANYAYHLDAGLFATFLKNHCINHLNVTHVVASVLSVNNNANGDIHSLSLDNNTALCGDLYIDCSGFKSLLLGENLKIGFKSCKDILFADSALAVHMPYDDETQVISSHTISTAQTAGWIWDIGLQTRRGVGHVYSSRHISEQEAKEQLFDYLNISPAKRADFNVKKISFEPGHREKFWHKNCVAIGLSAGFLEPLEASALLLVEISANFIAEQLPANRQVMDITAARFNRTFSYRWQRIIDFLKLHYMLSERTDSLFWQRHCAEQSIPQSLQGNLALWRTHIPNDNHFDYSVEVFPAASYQYVLYGMGFKTATTHYGNHPRAIKKARNLAAKNTKDTAELVSKLPDNRTLLKQIKQYGLQKI

SEQ ID NO: 83876 - protein, 516 aa, Sphingomonas sp.
  misc_feature (1)..(516): tr|A0A0Q5V6U2|A0A0Q5V6U2_9SPHN Tryptophan halogenase OS =Sphingomonas sp. Leaf198 OX=1736299 GN=ASG20_06330 PE= 4 SV=1
MRKRILIVGGGTAGWLTAGYLAKRLGADLAGGVSITLVESRDIGILGVGEGTFPTIRRTLATIGIDEAELVRRCGATFKQGAKFVHWRHEPGQGRTDHYLHPFQVADANDGLDLLPYWLLGYGGPDNWDEVSNPQKKAADQMRAPKLATNPDYVGPLNYAFHFDAVALAGLLREQGVKNGVRHLTDTVTEVLLDADGAIGGVRTEQNGLLDANLYIDCTGFRAELIGKAMKIPYRSCRDVLFCNRAITAQLPYARRDEPIASYTISTAQESGWIWDIGLDRRRGIGHVYSSDHSDDETAERVLRGYLGAGGDEADVRHFKFDAGYREVNWYKNCVAVGLSSGFFEPLEATGIAFAEVSAGMIANLFPWGGDYETSARQFNANMLRRYERALDFIKLHYCISERRDTAFWRDNVADSSVPDSLLELLDRWRFRPPNELDIDGQVDIFTDASWQYVLYGMGWKTDLSAKAGALRYPDDARRAFAEVQRQAQYAIANLPSNRALVDYAQTHRFGARAPA

SEQ ID NO: 83877 - protein, 496 aa, Sphingomonas sp.
  misc_feature (1)..(496): tr|A0A031HMF3|A0A031HMF3_9SPHN FAD dependent oxidoreduc tase family protein OS=Sphingomonas sp. RIT328 OX=14705 91 GN=BW41_03316 PE=4 SV=1
MNDRTVRRVVIVGGGTAGWMAAAVLCRSFPRERLAVTVVQSSEIGTVGVGEATIPPILQLNAQLGLDEDALIRATQGTYKLGIEFRDWGQLGDRYFHPFGSFGADLAGVPFHQHWLRLREGRLTDYSLPARAAYASRFTRPSDDPRSVLSKMSYALHFDAALYADLLRTLALAEGCQRSEGRIVDVRLAAEDGFVKHLVLDDARVIEGDLFIDCSGFRGLLIEEALATGYLDWSHWLPMDRALAVPSEAVAPPAPFTRATAGAGGWRWRIPLQHRVGNGHVYCSAFVDDDSAARALLDGLDSPALGDPRPLRFTTGRRRLSWHRNVVALGLASGFIEPLESTSIHLIQRGIATLMSLFPANGFVPAEVDLYNDLMRRETEAVRDFVILHYKQTRRDDTPFWRTMRGMAVPDSLAQRMEIFANLGRVILEPGELFREASWVAVMLGQGLQPHDHDPAADLLPAEETRASLRRMRDLMHRGVQAMPTHEAFLSGARAA

SEQ ID NO: 83878 - protein, 562 aa, Ruegeria atlantica
  misc_feature (1)..(562): tr|A0A0N7LR89|A0A0N7LR89_9RHOB Flavin-dependent tryptop han halogenase RebH OS=Ruegeria atlantica OX=81569 GN=r ebH PE=4 SV=1
MNNRLRKITIVGGGTAGWMTALILDMVFSRTSAPKDRPRICLIESPNIATVGVGEATVPRMPVTLRQAGISERDFFRETNASFKLGVKFCNWNKDAKGNRIDYVNPFAHGQLLEGLEAAEYFLRFGNGDRDFTQSISPHDDLARLCKGGRPLGQPEFEQRFGYAYHLDAVKFAGMLTKVCTKRGVEHIQDEVQAVELDEQGNVSHLMLERKGRHDIEMVIDCTGFRGLIINKALGEPFMDYSDYLPNDRAMALQIEHPDPEKIESVTRSTALGAGWTWRVPLYNRVGTGYVYSSAHRTDDQAADEYLEWLGDSGKDLTPRVIPMRIGRVRNAWVKNCLAIGLSGGFIEPLESTAIHMVDHAVRWFAEHLPTRDIEPSLRARYNRQMNKMYDEVLDFICLHYRLGNRTDDQYWIDARTEMKIPDRLAENLELWQHRLPMEHDIEFATLFNFRVYQTVLLGKQVYDTGYGTGIRDRLRPLKKPIWFQWWKGAKVDLAQILKAMPDHKTLLRDIRGELEQPPAFGMAAAMQPTVAMPGEQLAPVAIQNMPNLAEIQSGKKDLQLF

SEQ ID NO: 83879 - protein, 495 aa, Sphingomonas sp.
  misc_feature (1)..(495): tr|A0A0Q5PKM7|A0A0Q5PKM7_9SPHN Tryptophan halogenase OS =Sphingomonas sp. Leaf343 OX=1736345 GN=ASG07_11400 PE= 4 SV=1
MTDTPKRTRVVIAGGGTAGWLAAAILTHQLGPLIDVVLVESDEIGTVGVGEATIPTIQAFHALIGLDEREFMAATGASFKLGISFENWTRPGERYIHSFGDVGRSTWMGDFQHFWLEARAQGIAAPIGAYCVEHEAALAGRFATGGQDRLNYAYHFDAGRYARYLRARCEAAGLTRIEGRIARIEQDSDTGHIAALHLDDGQRIAGDLFLDCTGFRALLIGDTLGIGFEDWGHWLPTNRALAVQTKAVGPAVPYTRAVAHDAGWRWQIPLQHRVGNGLVYSADHLSDDAAHDRLLASVEGETVTDPRLIRFRTGRRLRSWHGNCIALSLAGGFVEPLESTSLHLIMVAMTRLVQQFPFDGISPATVARYNDQSRREIEGVRDFIVLHYHLNLRDEPFWRDRREGGIPDTLADRIALFRDNAQAYQGADELFRVTSWLQVMLGQGLQPRTHHHVARMMPPGRLRDTLAQLQAGVAAGVEALPTHQDFLDRYCPTST

SEQ ID NO: 83880 - protein, 513 aa, Sphingomonas sp.
  misc_feature (1)..(513): tr|A0A031HLK5|A0A031HLK5_9SPHN Tryptophan halogenase fa mily protein OS=Sphingomonas sp. RIT328 OX=1470591 GN=B W41_03243 PE=4 SV=1
MHPIRNIVIVGGGTAGWLTAGVIAARHQGQRPHGFTVTLVESPNVPIIGVGEGTWPTLRTTLKRMGVSETEFFRQCDASFKQGARFNRWTTGAVDDGYYHPLMLPQQFGSVNLAPHWLAAGGDDSFCDMVTPQGRLCDEGLAPKTMATPEYEGQANYAYHLDAGKFSAFLQRHCCDTLGVRHVLADVTEVLKDEGGDITGLRTEQGIAVDGDLFVDCTGFAALLIGKAMDVPFRSCADTLFCDTALAIQVPYAQADDPIASHTLSTAQSAGWIWDIGLPTRRGVGHVFSSSHIDVDAAERELRAYLGPAGADLPVRRLAIRAGHRERFWERNCVAVGLAAGFLEPLEASAIVLIELSAKMIAEQLPPCREVMDVVARRFNETTHYRWGRIIDFLKLHYALTRRTDTDFWRDNARPETIPDRLRGLMELWQHQSPWLHDEFDRAEEVFPSASYQYVLYGMGARSAVLPGTIEGEAELARRARRENAMQTQRMVASLPRHRELIERIVRHGLQPI

SEQ ID NO: 83881 - protein, 461 aa, Fischerella sp.
  misc_feature (1)..(461): tr|A0A1Z4THS7|A0A1Z4THS7_9CYAN Putative tryptophan halo genase OS=Fischerella sp. NIES-4106 OX=2005456 GN=NIES4 106_12710 PE=4 SV=1
MNHSDYDVVIIGGGPAGSTLSTFLVRKGHQVLVLEREKFPRFHVGESLLPATQLIWEKLGIAESLQNFGNTFKYGTEIRMGLNPQQSEYEYSRQEFYNIPRQRLHQRPYAYQVERSEFDLFLLNHARQEGVTVFEEAVVKEILWEGDKATGIRWKNKDNIEYITKAKCIADCSGRYAFISRSRKFLTPNKTIKTSAVFGHFKHVTRASGIQQGYFNGYLIENGWIWFIPLASDIMSIGVVMNEPGTSWWKQKSSEEILLTYIKQYKFIQERFEQAEQFSKVRMLHNLSYASKHSVGNGWILVGDANFFVDPLFSSGVHIAFRSAEKAADAIDGFLKNNWDKKAFQYYQKWSQKEHFHVSTTMGLMYKMLKYRVSMEILVKLTGKYSNHWDNPLLRRLVAWGSGYYEEFHLVLYCSWIFCILLIAIGWVYEKFLGISAWNTHHEFNSESPQAIAKSVGILEK

SEQ ID NO: 83882 - protein, 532 aa, Sphingomonas sp.
  misc_feature (1)..(532): tr|A0A031HWW0|A0A031HWW0_9SPHN FAD dependent oxidoreduc tase family protein OS=Sphingomonas sp. RIT328 OX=14705 91 GN=BW41_01785 PE=4 SV=1
MNEHTIRSVVILGGGTAGWMAAAALSRFLNNGVTRVTLIESEEIGTVGVGEATIPPLRTFNTMLGIDEHEFIRQTGGTYKLGIEFVDWGGLGERYFHPFGAHGHDLAGVHFHQLYLRERQRRVMPDISAWSMSAVAAQAGKFAPPAAQAQSAVKDLFYAYHFDAARYAAFLRRFAEQNGVQRIEGKVTAVAQRPEDGHVTALKLEDGQVVGGDLFIDCSGFRGVLIEETLETGYEDWRHWLPCDRAVAVPSAYAGDPDPFTRATARGSGWQWRIPLQQRMGNGLVYCSDFQQPEQAERELLANLEGEALAAPRHLSFTTGRRKRSWHRNVVALGLASGFIEPLESTSIHLVQSGIARLIALFPDRRFNPVERDEYNAQMDELYADVRDFVILHYKATRRSDTPFWDRCRTMSVPDSLARKIELFRAKGRVFRENRELFATTSWVSVCLGQHIVPDDHEPAVDALDEEKVAGALEEMRRGYLDVAARLPSHGDFLRHVAGRPAAPPPPPPTSPETPTFSFASESPFDFSADPL

SEQ ID NO: 83883 - protein, 519 aa, Escarpia spicata
  misc_feature (1)..(519): tr|A0A370DHA7|A0A370DHA7_9GAMM Tryptophan 7-halogenase OS=endosymbiont of Escarpia spicata OX=2200908 GN=DIZ78 _13570 PE=4 SV=1
MVKKSGDREMNERIDDITIVGGGSAGWLMGLFLTTMLNKGESKVKVTLIESPNIPTIGVGEGTVTGFPRMLQQLGIKESEFLRNSDATFKCAGKFVGWNLDAKGKPTTFYNPFNVGGYVGGFETGYYYQKYGNAPGASSFVDSIMPTQMVVENLLGPKLIGAKDYESPAPYTYHLHAHDFSRQIANIAKKRGVVHILDEMVDAEQDENGYITALNLKEKGCVPVKLVIDCTGFSGRILQQVLKEPYNEFGNHLLCDRAIPIPHPHEDPKRLSPCTTATAMKAGWTFDVPLYSRMGTGYVYSSRFISDDEALDELIRHIGDESLRERTPPVIKMRVGRVRNTWVKNCIATGLSAGFVEPLEASAIYTIEMTARMLLTYYPEQGIEQKTVDRFNEVMNRMYNEILSFIVMTYYTSNRTEPFWVAAREDIDLPDKLRENLEMWQSFMPSPHDVEGKFLFSHWNYIYVLLGKGYFEGRHFPAERFLVKSDWMRFSNHIAEVKRQLKQKLPSHYDLLTAIRSGR

SEQ ID NO: 83884 - protein, 603 aa, Microcystis flosaquae
  misc_feature (1)..(603): tr|A0A3E0KXT3|A0A3E0KXT3_9CHRO Tryptophan halogenase OS =Microcystis flos-aquae DF17 OX=2060470 GN=DWQ53_21805 PE=4 SV=1
MKNMSNRPYDVIIMGAGLAGLCQARHLMLKIPNIRIAMIDPRPENRTEKDLKLGESTVEVATLFFGKDLGLYEYLIENHPPKYGLNFHWPKRNDQTKTIDDYFHIWANRQPDLASTQLNRPKFERDLLKMNREMGADFYNGRVVDIDLTPNDQLHTVKVKLPNESIKLQGKHLVDAAGRRFLIGKKTNNISFDSKDLYGVNTGSAWVRVQNVDRTIFHSGYDPTGASCSHYYATNHWFGKGHWLWMIPTDIETMELSIGVIHHHDYISSESLNSKEKFYEFLKANHNILYQLVTSAENIDFHYWPRLAHTSKTLYSPDNWYVIGDSACIFDAFYSLGSTMIVSAIDSITEIIRAKLAGEVNAAEKCQAYNQFNLTLINSINLFMHNHSRHLGDASIMSWRIYFENMIWFGILIPIFVGKWHLDLEFIPQFVQTFQTTLRSLVYEIHDQFDQLVDEKKNIGLMDCYRSDQLIWNYHTPKRYTHALENAQYEPKQTSVFTSMKKTFFYLTIWYLKLQWKSGGLSQVCHPRSLGTMAKLLTTSIYIGLGDIIYSLTGNHGSESRLIAEMRQAFQEYQYGDTLQPWTVEGVDTKSPEMEAEKVPLQV

SEQ ID NO: 83885 - protein, 504 aa, Sphingomonas sp.
  misc_feature (1)..(504): tr|A0A031HYZ4|A0A031HYZ4_9SPHN Tryptophan halogenase OS =Sphingomonas sp. RIT328 OX=1470591 GN=BW41_01738 PE=4 SV=1
MTAAHPNPPLKTVTIVGGGTAGWMTAALLSRLLLGAYTIRLIESAEIGTIGVGEATIPAIRTFNGLAGIDEFEFVRATQATFKLGIEFRNWGGVGDSYIHGFGKIGQDLYWLHCHQFWLKARAAGDARPFDHYSLNTLAARMNRFALPDPAHPHSPIADLDYAYHFDAALYAAFLRRRAEAAGVERIEGRIVAANRRGQDGFLDHVVLADGRTVDGDLFVDCSGMRGLLIGDAMGVGYEDWDRWLLCDRAIAVPSARQGPLTPYTRSIAHDAGWQWRIPLQHRTGNGHVYASRFVSDEAAARTLLAHLDTPAIGDPRPVRFRPGKRLRAWERNVVALGLAGGFLEPLESTSIHLIQTGILRLLALFPGRGFHPADIAEYNRQTDFEYRDVRDFIIAHYKVTEREDTPFWRYVKHMEVPDSLTERLALFAASARFFLHGSAELFREESWVQVLLGQRLHATYDPMVDMVPAEQATAFLHDVEEVIGEVAAGMPTHEAFIARHCQA

SEQ ID NO: 83886 - protein, 494 aa, Sphingomonas sp.
  misc_feature (1)..(494): tr|A0A031HXU8|A0A031HXU8_9SPHN Tryptophan halogenase fa mily protein OS=Sphingomonas sp. RIT328 OX=1470591 GN=B W41_01784 PE=4 SV=1
MTAIDAPIERIVVVGGGIVGWSAAVALRRRVPDVAVTIVATPPSPDALADRIAQTLPSTIGFHDDLGLREEDAVLRAGGVWRLGTLFDGWAEGQPPYVHAYGPCGQPFGTASFHHHWLRAARAGTTAPFEAHAPAAALARAGRMPVPPAGPMAEVQAALVLDVPRYRGMLEAFGRHFGVVVRDGTVASVRLRGDDGFVAALALADGGEVTADVFVDASGPRALVRSAIDAQWEDWQPWLRCDRLVTGEGAAAPLTALDTVSALPAGWRWRSAAVGRTLHGLCYAAEFLSEAEAQQALTAAGATMVTPAASFRQGTRPAPWARNCVAIGDAATVIEPLDFTHLHLAQSAIDRIISMLPGRACHPLEIADYNRQASAEVMRVRDFVLAHYATARRPEPFWREPVALPPSLAETLALFGARGRLPFFEEETFSRDDWLAVLIGQGALPRRIDPLIDGTDAADSDRAMASYRGAIAEAVMRCPTLDDYYHSQRKRLSR

SEQ ID NO: 83887 - protein, 512 aa, Herbidospora sp.
  misc_feature (1)..(512): tr|A0A4U3MF76|A0A4U3MF76_9ACTN Tryptophan 7-halogenase OS=Herbidospora sp. NEAU-GS14 OX=2575442 GN=FDA94_19040 PE=4 SV=1
MIRSVAIVGGGTAGWMTATYLKAAFGDRIDVTVVESAQVSRIGVGEATFSTVRHFFDYLGLDEAEWLPKCAGGYKLGIRFENWSAPGEYFYHPFERLRVVDGFSLADWWLEHGDRSQPFDRQCFVTTALCEAKRAPRMLDGSLFAAGLDGSLGRSTLAEQRAQFPYAYHFDADRVAGFLAEYGVARGVRHVVDDVEHVAQDERGWISHIVTKERGELTADLFVDCTGFRGLLINQTMGAEFMSFQDVLPNNRAVALRVPRDEATDMNPYTTAYAAGAGWIWTIPLFGRNGNGYVYSDQFISPEDAERELRAHVAPGRDDLPANHIRMRIGRNRDAWIGNCVAIGLSGAFVEPLESTGIFFIQYAIEQLVKYFPDERWDETQRREWNTRMANAVDGVKEFLVLHYKSARREDTPYWKEAKVRQMPGSLAARLDLARSQLLDEETIYPNYHGFETYSWNTMNLGLGNVPAHPRPALRHMDPTQALAEFAQVKADADAMVAALPSCYDYLASIND

SEQ ID NO: 83888 - protein, 587 aa, Microcystis flosaquae
  misc_feature (1)..(587): tr|A0A3E0KZK2|A0A3E0KZK2_9CHRO Tryptophan halogenase OS =Microcystis flos-aquae DF17 OX=2060470 GN=DWQ53_21820 PE=4 SV=1
MMKTTNSVRQFVYDVVIMGAGFAGVCQARHLMLKVPNIKIALIDPRPENRSDKDLKIGESTVEIANLFICKELGLYEYMIENHPPKFGLNFHWPKDSHKTDTIEDYYHIWTNRQPPLASSQMNRAKFERDLLRMNKEMGVDFYNGRVVDVTIHPGNDPHQVKVKLHDEVIELTAKHLVDAAGRQFIIGKKTDNVIFDPEHLCGVNTGSAWVRVKNIDRTLFHSGYDPEATSCSHYYATNHWFGQGHWLWMIPTDTDTQEISIGVIHHHEIIPADYLNQEQKFYAFLKANHKLLYDLLSSGEKIDFHYWPRIAHTSKEVLSADNWYVIGDAAYIFDAFYSMGTSLTTFAIESVTEVIRSKLAGEADAEVKRIAYNQFNLAQAEGVNQLMRDHKTQLGHASIMSWRIYFEYIWWFGILVPLYVGKWHLNVSFIEGFVKIHRQTVNSLFVEIYEQLNQLVERKANLGLLDCYRGDQLLGDYQPPVHFDSFLENAQYEPFRSNIFTSIKYTHFYGAIWYLVFQWKGFGLGGVIAPKHLYHFLRLLLLSGVASFGEFYHRLKMKKIPHNHQIACTTEEFKHYQYQSSLNPWM

SEQ ID NO: 83889 - protein, 517 aa, Asticcacaulis sp.
  misc_feature (1)..(517): tr|V4P9R5|V4P9R5_9CAUL Uncharacterized protein OS=Astic cacaulis sp. AC466 OX=1282362 GN=AEAC466_06965 PE=4 SV= 1
MASPLKVVILGGGTSGWMCAAALSAILKPGTPSSILDLRLIESADIGTVGVGEATLPHIKEFNDFLGINEAEFMRKTKATFKLGIEFRDWGQVGNSYIHPFGTFGQTLAGVEFQHYWTRAQALGEAASIEDYSYAIQAARGQKFDFPSEDKESIKSTFSYAYHFDAGLYAAFLRDFAEARGLKRTEGKVETVALKPDSGDIASLTLASGEVIEGDLFIDCSGFRGLLIEDHLHAGWEDWSRWLPCDRALAVPSERTDDFPSYTRSTALSAGWQWRIPLQHRTGNGYVYSSAFISDDDAQKALLANLDGAALMDPKPLRFKAGRRKKSWYKNCLTIGLSSGFLEPLESTSIYLVQIAVQTLIALFPSSKPGEPIDDKLADEFNRLIDIEYERVRDFLILHYHANTRTDSALWDYVRHMNVPDSLTHKIEQFKRRGYVKKYRDGLFSPPSWLAVFIGQGVVPHGYDRMADTMDDATVIEKLADMRVRIRANVDAMPDHADFVRDYCFVPPAKVMAEVSK

SEQ ID NO: 83890 - protein, 376 aa, Bacteroidetes bacterium
  misc_feature (1)..(376): tr|A0A136L8M8|A0A136L8M8_9BACT Tryptophan halogenase OS =Bacteroidetes bacterium OLB8 OX=1617419 GN=UZ08_BCD001 002150 PE=4 SV=1
MVEKEKFPRFVIGESLLPRCMEAFEEAGFMDDLKRQGYQTKNGALFLRGDDKCDFDFNTQYTQGWNWTWQVQRAKFDSCMTENLVNRGVDLRFEQTVKAIEFDGSDSTTTVEGKEGNQYKIRARFIIDASGYGRVIPKLFNLDRPSDLPPRMTLFAHVDDPRRGQFQAADRIHAIVQEPHTWIWSIPFSDGTTSVGFVSNPEYFEGLNGSPEENLRALIAREPSVSARFQGNKFLFEPRILKGWSISTDKFFGDGFVLTGNVTEFLDPIFSSGVTLAAASSQLAANIVVRKFRGEQVDWAADYLAPMLEGVDVFRTYVMSWYNGRLQKIFFSKTIDETIKAQLCSVLAGYVWDYSNPYVRKHKERVESLAAMVGGD

SEQ ID NO: 83891 - protein, 502 aa, Sphingomonas sp.
  misc_feature (1)..(502): tr|A0A031HYL9|A0A031HYL9_9SPHN FAD dependent oxidoreduc tase family protein OS=Sphingomonas sp. RIT328 OX=14705 91 GN=BW41_01783 PE=4 SV=1
MDGKRQRVVVVGGGASGWMAATALAKLLPTRCTVELVESEAIGIIGVGEATLPHIRAFNERLGIVEAEFMAATRATFKLGIEFRDWGRVGDSYIHPFGTFGRGSGEVQFHHYYTRLLRAGVTLPPIEAYSMACSLARANRFGPPARDPQQIASTFGYAYQFDAVAFAPYLRRLAERLGARRTEGRIVAAERDPASGSVTALILSDGRRVEGDLFVDCSGFAAILIGQEMAERFEDWSQWLPADRAVAMPCRTETAVTPYTSAIAMPAGWRWRIPLQHRTGNGYVFASDFLSESAATDALLASVEGTPLTDPRVLRFKAGRRTRSWVGNVVAIGLASGFLEPLESTSLYLVQQAITALVELFPERTIADVDRDAFNRLINMEYDRVRDFLILHYHATERDDSPFWRHMRTMAVPDSLAEKMALFRRRGRVVKYREGAFLDASWVSVYLGQRIVPAAADPRASAPSTDSLLAGLERMRGEITGAVGAMPDHAAFLADYCPMPAA

SEQ ID NO: 83892 - protein, 510 aa, Sphingobium sp.
  misc_feature (1)..(510): tr|A0A0Q4ITP8|A0A0Q4ITP8_9SPHN Tryptophan halogenase OS =Sphingobium sp. Leaf26 OX=1735693 GN=ASE85_22080 PE=4 SV=1
MSGEPLPPVKRVVIVGGGTAGWMTAAALSRLTDAGVAVTLIESEEIGTVGVGEATIPSLLDFNRYLGIDEDAFMAATGATFKLGIEFVDWADRGDRYLHPFGIHGRDVHGVKFHQIWLRQSRLAGRMGQVGNVSDYCLANQAAASGRFTRPVPDPAAVLSSFSYAFHFDASLYARFLRGLAEEAGVQRIEGKIVHVDIASDDGCIRAVELADGRRAEGELFIDCSGFRSLLLGDALGVPFTSWQHWLPCDRAVAVPSASTSAPLPYTRATADSAGWRWRIPLQHRVGNGHVYASAFIDDDEATAKILDNLDAPPLDAPRPLRFTAGVRERLWERNCIAIGLAGGFLEPLESTSIHLIQSGITRLMSLFPDTGPAIAERKEYNRLLRQEYEQVRDFVILHYHRTNRTDSDFWNYCRTMAIPTTLEDKIALWRAKGRIIRDQGGLFSDDSWIAVLMGQGLIPQSHDPLADALPIEEAGRFLDHLRDVIARTAAAMPRHIDFIASHCRSDLAA

SEQ ID NO: 83893 - protein, 504 aa, Erythrobacter sp.
  misc_feature (1)..(504): tr|A0A3N5DKM4|A0A3N5DKM4_9SPHN Tryptophan 7-halogenase OS=Erythrobacter sp. HN-E23 OX=2488860 GN=EG799_11980 P E=4 SV=1
MTDRPITRYCIAGGGTAGWMAAAALARFLPGGHTVELVESEAIGTVGVGEATIPQIHLFNGALGLDEAEFLRETKGSIKLGIEFDGWLREGAAYMHAFGNIGRSAGLLPFQHYWLRAHALGFAKPLQRYSLNELAGRTMRMQRGKTAGGQEMPYAYHFDAALYARYLRRFAEERGVTRYEGRIEQVERAGQSGDISALLLDGDRRIEADFFIDCTGFRGLLIEGALETGFEDWSDWLPCDRALAVACEGGGDFTPYTRSIARPAGWQWRIPLQHRLGNGLVYCSAQWSDDEAAETLLANLDGAPQTDPRPIRFTTGTRRRHWNRNCLALGLAAGFMEPLESTSIHLVQSAISRFLAVLPHAAPDPAIVGWFNQQARFEWERIRDFLILHYTANDRVGQPFWDQVRTMIPPDTLTAKLDQWRATGFIHREHEELFTDVGWFQVLVGQGVAARGYNRLADAMPEDDLRRFLGETERALIEQVKPMPRHLDFLRDCIARSERQGVDA

SEQ ID NO: 83894 - protein, 518 aa, Pseudoalteromonas atlantica
  misc_feature (1)..(518): tr|A0A510ZJV4|A0A510ZJV4_PSEAF Tryptophan halogenase OS =Pseudoalteromonas atlantica OX=288 GN=PAT01_14990 PE=4 SV=1
MNQQNKKIKTVVVVGGGIAGWLTAGRLAAHHKSNTPDGLNVVLVESPNVPIIGVGEGTWPTMRSTLIALGISETDFIRECEASFKQGAKFAKWVDGSNDDFYYHPLVLPQGFSKTDMAGHWLNNTAESTSFSNAVCYQEAICEQGLAPKTIRTPEYAALANYAYHLDSAKFAVFLQKHCTQELGVKHFLADVTQVNSAKNGDIASVTTKQQGEISGDLFVDCTGFSSLLLGEHYKVPFMPCDDVLFIDTALAVQVPYENEDESIASHTISTAQEAGWIWDIGLQHRRGVGYVYSSKYSSEAQAREKLKEYVGDKIESLTIRKIPIKSGHRSHFWQNNCVAVGLSAGFLEPLEASALVLVEMSAQMISEQLPHTRDIMDITAKRFNETFSYRWEKIIDFLKLHYILSTRDDNAFWRDNRDPKTIPQSLQDLMKLWQYRAPADHDFTSNNEVFPAASYQYVLYGMGFKSDYSTISYMLKDTDFAKSQFDKNKSMINQAVTNLPSNRELLNKIKSHGFSTI

SEQ ID NO: 83895 - protein, 512 aa, Azospirillum sp.
  misc_feature (1)..(512): tr|A0A239A3B4|A0A239A3B4_9PROT Tryptophan halogenase OS =Azospirillum sp. RU38E OX=1907313 GN=SAMN05880556_1014 00 PE=4 SV=1
MGERIRDLVIVGGGTAGWMVAAAMADHFRGSGPRITLVESSTIGTIGVGEATIPTIRRFYQSLGLRDLDVLKATHGTVKLGIRFDGWTGDGGGFIHPFGLHGQDLRGIPFHHYWLRARTAGLGGAFGDYSLAVALAKAGRFTLPSANPPSTLSVFDWALHFDAGLFAGLMRQVAEQRGVRRIDARIEQVQQRGEDGHITGLLLDDGRVVTGDLFVDCSGFQGLLIEGAMQAGYQDWGQWLLCDRALAAQGPALSPPPPFTRVTAQQAGWRWTIPLQHRTGHGYVYSSRHIDDAAAEAELLAAIGAKPTVGPRRIAFTPGRRTQAWKGNCVSIGLSSGFLEPLESTSIALIETGIEKLKQLFPDRDMDPTLAAEFNDWSRREMERVRDFIILHYWLNRRGEAFWQDCRAVDLPDSLAHKVDLFRRRGHLVRYRWEMFHPDSWLAIFAGFGFLPERYDPALDGMDVASLDRALAGMRQAIATAVADCPSHEEFIEHYARVAAPTLSTSTAGNAR

SEQ ID NO: 83896 - protein, 501 aa, Erythrobacter sp.
  misc_feature (1)..(501): tr|A0A3N5DHA4|A0A3N5DHA4_9SPHN Tryptophan 7-halogenase OS=Erythrobacter sp. HN-E23 OX=2488860 GN=EG799_05000 P E=4 SV=1
MTIEHIVIVGGGTAGWMAAAALSRLRAGRELAITLVESESIGTVGVGEATIPPFVEFNQLLEIDEAEMLAAVQGTFKLGIQFRNWGRQGDSYIHPFGNYGYQIGSVGFHHVWHHARAHGDKRPIQVFNAETMAAYFGRFQRTQGMDRDDLPPINYAYHIDASRYAGFLRRYAEKRGVVRQEGRVEDVALHGDRGDVVSIRLESGEVVAGDLFVDCTGFRGLLIEQALETGYEDWTHWLPCNRAVALPCHRDDGSGPPPFTVATAHAAGWQWQVPLQHRNGNGHVYCDAYMDADEATDILMANMAGKPTAEPNHLRFVTGRRRLFWNRNVVALGLSAGFMEPLESTSIHLINTGVTKLIATLSLDGITDAQRNTFNRITGREYEKIRDFLILHYHATARDDSEFWNYCRTMSVPDSLTEKIALFRDTGQIFREEDELFTETSWAAVMMGQGIAMRGHNALADTLDPAKTRKELDEIEKSIRFLVQHMPAHADFLAGYCPGTP

SEQ ID NO: 83897 - protein, 511 aa, Pseudoalteromonas sp.
  misc_feature (1)..(511): tr|A0A1I6X9R8|A0A1I6X9R8_9GAMM Tryptophan halogenase OS =Pseudoalteromonas sp. DSM 26666 OX=1761892 GN=SAMN0448 7870_0056 PE=4 SV=1
MDIKKVAIVGGGTAGWLAANHIGKEMLNRKGISVTLIESPDIPPIGVGEGTVPDIRNTLKSFGIREDEFIRQCDATFKQSIKFINWMDKKKHGEGNFFHHLFDVPSPYDAKHLTSYWLNNKEESQSYAQGLSSQYVICEAGLAPKNITNAQYEGELAYAYHFNAGKFAQLLACNAKEKFSVEHIHTHVTQVKLGDDGAIAALITDNNEELEFDFYIDCSGFESLLMSKALKIPFVDVSESLLINSALVVQVPTKADDAIPPYTLATAHQAGWIWDIALTNRRGVGFVYSDNHMTDEQAHEKLDRYLGDSKQDLTYRKIPMRVGYRKKFWHKNCIALGLAQGFLEPLEATSILLTDFSAKFLTLRFPSSTTQLEQLEERFNHAMGYAWERVIDFIKLHYCISDRTDSAFWIANKNQDTISTSLKEKLNLWKEFTPVRDDFFSQFEVFYLENFLFVLYGMNYNTKASNSPDKEQAHCLARLNQRAEIDHYLINKLPDHRALLNKIKQYGLQSI

SEQ ID NO: 83898 - protein, 489 aa, Sphingomonas sp.
  misc_feature (1)..(489): tr|A0A031I0N9|A0A031I0N9_9SPHN FAD dependent oxidoreduc tase family protein OS=Sphingomonas sp. RIT328 OX=14705 91 GN=BW41_01306 PE=4 SV=1
MNPPIRSVVIVGGGTAGWMAAAAAARFLNDGQRTITLIESEAIGTVGVGEATIPPIRGFNARIGLDEASFLRATGGTPKLGIEFVGWGALDERYMHPFGTVGHEIEGLNFHQLWLRLRDRAEIGSYGDYAIAAVAARAGRFAPPAGDPRSPTGQLDYAYHFDAGLYAALLRGHAEAQGVTRIEGRITGVERDARGHVAAVRLEGDRRVAGELFLDCTGFRSLLLGETMGVAFEDWSHWLPCDRAIALPTARQGPLLPYTRATAHDAGWQWRIPLQHRTGNGHVYASAFTDDETAERVLMANLDAAPTAEPRRLSFRAGRRTKLWAGNVVALGLAGGFLEPLESTSIHLIQDGISKLFALFPDQGFGTVERDEYNRLMGDQYAAIRDFIILHYAATRRDDTPFWRHVGTMALPETLIRKLALFREKGRIFRYDDELFTVPSWVAVLLGQGIVPSGYDPIVDALDADRVAGALRQMRRGYAAAAAAMPALG

SEQ ID NO: 83899 - protein, 525 aa, Sphingomonas sp.
  misc_feature (1)..(525): tr|A0A0Q5V6Z0|A0A0Q5V6Z0_9SPHN Tryptophan halogenase OS =Sphingomonas sp. Leaf198 OX=1736299 GN=ASG20_06605 PE= 4 SV=1
MSVTDGAGATRNSGPLRSIVIVGGGTAGWMAATLLARKLDRQSVTITVVESSDIRTVGVGEATVPGIRDFFREIGVTEQEVMAAAQGTVKLGIEFVDWKREGERFFHPFGLYGMRSRGVAFHHYWRKLNAAGQTTPLSDFCLATALAERNLFMRPTDSPVHDLLFFDWAVHFDAGLFAKFLSKKAGEWGVKHIDATITDVLVDQSTGLISSVDTQCGKTIAGDLFIDCSGFRSLLLGDALGVPYEDWTNLLPCDRAVAMPCERAGPLTPYTRSTALTAGWQWRIPLQHRVGNGYVYASRHISDDEAVATLKGRLEGEALAEPNMIRFRTGRRTEFWKGNCVALGLAAGFMEPLESTSITLIQTGLEKLLALLPDRGFDPALADEYNRTTGLEYARIRDFLVLHYFANGRQGQPMWDRCRGTALPEQLARKLTLFKARGHLVRYEWESFQDPSWLSMYAGFGIDAAAHDPLADHFSLSDLEAAFERMKGSIRDAVALAEPHETFLKSFAPASAPPASRSMNFTANG

SEQ ID NO: 83900 - protein, 499 aa, Sphingomonas sp.
  misc_feature (1)..(499): tr|A0A0Q5P662|A0A0Q5P662_9SPHN Tryptophan halogenase OS =Sphingomonas sp. Leaf343 OX=1736345 GN=ASG07_13150 PE= 4 SV=1
MEQQARIRRVVILGGGTAGWMTAAALSRSFGRSISITLLESEEIGTVGVGEATIPTIHWFNDLIGLDEAEFLRATKATFKLGIEFVDWTAPGSRYFHPFGHFGAALPGVAFHHRWLKARAEGLDMPLSDLSLAGRLAAQGRFAKPGGDGRSILSTLGYAYHFDAGLYAAYLRGLSERHGVRRVEGKMQAVERHPETGFVTALTTERGERMEGDLFVDCSGFRALLVEKAMGEAFEDWSHWLPCDRAVAVPCARTTATPPFTRSTARAAGWQWRISLQHRTGNGYVYASRYISDDEAAATLLANLDGEALAEPRMLCFAAGMRRRAWRGNVVAIGLASGFLEPLESTSIHLIQSGITKLLTLFPDRDCDPALADRYNQLLGRDMDGIRDFLILHYHATSGRDEPLWRRCQTMALPDTLLIREEQYRRSGRLMLDPEELFRDASWLAVLNGQGITAAGYNPLADAIDSATNRAQVQQIADVIARAAPTLPLHDTALAELMA

SEQ ID NO: 83901 - protein, 501 aa, Sphingomonas sp.
  misc_feature (1)..(501): tr|A0A0Q5URE4|A0A0Q5URE4_9SPHN Tryptophan halogenase OS =Sphingomonas sp. Leaf198 OX=1736299 GN=ASG20_05805 PE= 4 SV=1
MVEQRIRKVVIAGGGTAGWLAAAALTRQLGQLLDITLVESEEIGTIGVGEATIPTMRAFHTILGLDEREFMRATQATFKLGISFENWARDGDRYIHSFGDIGKSTWMGDFHHFWLAAKAAGDPSEIGDYCLELQAAKAERFALPSEGQINYAYHLDAGLYARFLRARSEANGLKRIEGRIASVDRDGETGFIRALVLDSGERVEGDLFLDCTGFRGLLIEGTYGAGYEDWSHWLPTNSALAVQSAAIGPAHPYTRAIAHDAGWRWRIPLQHRVGNGLVYASDHLSDDEAHARLLGAIGGAPLTEPRLIRFRTGRRRQVWMENCVALSLAGGFVEPLESTSIHLVMTGLMRLMQAFPFGGIAPSLVTRFNDQAQAELERVRDFIILHYHLNERPEPFWAARRDMLIPDTLVERIALFTEGAQAYQGGEDLFRVASWVQVMLGQRLTPRDHHRLGNIMGGPQLASVLTNIRSTIADAVAGMPTHQQFLDRYLATPTAAASGIR

SEQ ID NO: 83902 - protein, 483 aa, Sphingomonas sp.
  misc_feature (1)..(483): tr|A0A031HZW8|A0A031HZW8_9SPHN Tryptophan halogenase fa mily protein OS=Sphingomonas sp. RIT328 OX=1470591 GN=B W41_01307 PE=4 SV=1
MNRREALHDIVVVGGGIVALTAAIAFARALPRATVSLVATKADPAALADRLPAVTPAVAEMFETLGLDEAALVAGGVATHRLGERFAWGEPAFTVGEGDGVANLAGAPPHQLWRAHGEGAFETLVPAAVLAQAERFAPPAEDRASLLSSLNYTLRLDPEALTPALLAAMRAARVRLIAPTSLSVERQAGQTVALLVDGGTRLTADLFIDASGPAALLAAEDAAWVDWRATLPVDRLLLAAAAARPSPLDRYEAGSHGWGARWPLARRTLVGFAYARETTNDARAAKELPGPAERIALHPRRQVAPFAGTVLAIGDAAAALGPLGWPGYTLALAQLELALSLMPARTPEPLLIAEYNRRATLRAERLHAYAAAFYLAGTARRGGFWHAARKAEPPAELATALAQFGQRGTLPPVEEEMVAPAQWWQALIGLGVSPQRRDPVALSVPRVSAIAAMTQLRTAIAALPAQLPPYPAWLAQAGGARSR

SEQ ID NO: 83903 - protein, 508 aa, Pseudoalteromonas atlantica
  misc_feature (1)..(508): tr|A0A510ZL44|A0A510ZL44_PSEAF Tryptophan halogenase OS =Pseudoalteromonas atlantica OX=288 GN=PAT01_19020 PE=4 SV=1
MNKAIKTIAVIGGGTAGWLSAAIIASYHQGNKGDGLKVMLVESSDIPTIGVGEGTWPTMKNTLQQIGLREVDVFKACNATFKQGGKFVNWTHGNNDFYYHPFTVPLGYGRIDLAPYLDNVENFAQQTNFQHDICEANLAPRGIAQGEYQANCNYAYHLDAGAFAELLKQHCKSKLGIEHIIGTVDQVKLDESGAIDTLTLTDQTRTINADLFIDCTGFSSLLLGQALNVPFKKMDHVLFNDSALAMQVPYDEGDESLASHTIATAQNAGWIWDIGLTHRRGVGHVYSSKFLSDEEAEQNLRNYLGDAAKGLTARKISFESGYREKFWHKNCVAVGMSAGFVEPLEATAIMLVEISSRFVAEHMPADTQVMSIVAKRFNEQMDYRWQRIIDFLKLHYMLTKRPEPYWQAHVQPQSIPQSLQEDLLLWGTRGPLIQDFHGALELFPAASYQYVLYGMGFKPDFTKQAYLYSNDAQASQIIERNSQLTQQMLQTLPPHRAYIEQWLAANPV

SEQ ID NO: 83904 - protein, 501 aa, Sphingomonas sp.
  misc_feature (1)..(501): tr|A0A031I7K1|A0A031I7K1_9SPHN Tryptophan halogenase OS =Sphingomonas sp. RIT328 OX=1470591 GN=BW41_00469 PE=4 SV=1
MTEPPVTTIVIAGGGTAGWMAAAALGHLLEDGYRIHLVESEAIGTVGVGEATIPQIRLFNQALGLDEDAFLRATGGTFKLGIAFDGWGAPDESYMHGFGDVGRDVGLIAFQHYWLRARRLGLAGPLDGYNLNTIAARAGRMHRGDPLTAATIPAMPYAFHFDAGLYAAYLRRFATNRDVERSEGRIVRVERDGEGGDVTALLLDSGARIAGDLFIDCTGFRGLLIEETLGAGYEDWRQWLPCDRALALPTEAAAAPLPYTRAIASAAGWQWRIPLQHRTGNGYVYCSDFTSDAAAAATLTATVEGAPLGDPRPLRFVTGRRKQAWQRNVVAIGLASGFLEPLESTSIHLIQSAIARLVKLLPALPVAAALRDEYNRQTAFEIERIRDFLILHYWANGRSEPFWQACRAMALPDSLRARIALWQEAGVIVREADELFTEDGWLQVLAGQGVAAGAHHPLADRIAPQDLGDYMKTLDLLYRREAGVMPRHADYVARHCAMPAR

SEQ ID NO: 83905 - protein, 521 aa, Litorilituus sp.
  misc_feature (1)..(521): tr|A0A502L1W4|A0A502L1W4_9GAMM Tryptophan 7-halogenase OS=Litorilituus sp. RZ04 OX=2491017 GN=EPA86_03535 PE=4 SV=1
MQAKEKKISHIVIVGGGTAGWLAASHLAKQLRPNAADGVKVTLIESPNIPTIGVGEGTVPMMRNTLKDLGITETEFFKHCDATFKQGIKFVDWLDNPTNEHSSYYHHLFDYPEIDHFDATPYWLKGLAGEGRSFADCVSLQGIVCDAELAPKKITTPEYEGITSYGYHLDANKFSALLTKNAVERHGVQHIKAHVEEVCLNDDGEIHSVITKEKGEISGDFFVDCTGFDCLLLGKTLGVPFVDKSDVLFVDHALTIQIPYESEDATIPSYTISTAMEAGWIWDIGLLERRGVGHVYSSKYTSHEEAEKALRAYVGPMADKYPTRLIPMNIGHREKFWHKNCAALGLAQGFVEPLEATGLLVFDATAKMLAAQFPTQKNTMNIVAKQFNERIKLSWESVIDFVKLHYYLSRRDDNQFWLDNRKAETTPDTLLERLELWKTQLPNALDFYSGYEIFKLENYLYVLYGMEFSTDIEALSHRYPETEKAKQFFSAIEKAAAKLKGDLSSNRELVNKILSFGLQKV

SEQ ID NO: 83906 - protein, 530 aa, Actinopolyspora mortivallis
  misc_feature (1)..(530): tr|A0A2T0GYW2|A0A2T0GYW2_9ACTN Tryptophan halogenase OS =Actinopolyspora mortivallis OX=33906 GN=CEP50_06405 PE =4 SV=1
MNDSVESIVILGGGTAGWMSATYLKKALGDTVHITLVAAPDIPTLGVGEATIPNLQTAFFDFLGIEEDEWMRECNASYKMAIRFVNWRTPGPGRPVPRGSDDGEDEFYHSFGILPYHHGIPLSHYWFDRRWRGRTTRPFDRSCYREPPVMRARKSPRWADGTRATNYAWHFDAHLVADFLRRVATERFGVHHVEDRLEHVRRRPSGFIDAVTTGEGRTLEADLFVDCSGFRGLLINQEMEEPFLDMSDHLLNDSAVATAVPHDDSAHGVEPYTSAIAMPSGWTWKIPMPGRFGTGYVYSSAFATEDEAVRDFCALWGLDPERHQLNRIRFRVGRNRRAWVRNCVGIGTSSCFVEPLESTGIYFIYAALYQLVKHFPDKSFDQVLIDRFNREIEVMFDDTRDFIQAHFHCSPRTDTPFWRANKEIALGEEMREKIRCYDAGLAINAPATDDAQVYYGNFEEEFRNFWNNSNYYSVLAGLGYLPDKPLPKLRHMPEAVETVDRVFDRIRDEQKYLLNTLPSCHEYLNAQHGR

SEQ ID NO: 83907 - protein, 506 aa, Litorilituus sp.
  misc_feature (1)..(506): tr|A0A502LBL5|A0A502LBL5_9GAMM Tryptophan 7-halogenase OS=Litorilituus sp. RZ04 OX=2491017 GN=EPA86_01205 PE=4 SV=1
MKIKQVAIVGAGTAGWLAANHLGSELQSEDIQITVIESDKVPTIGVGEGTVPYIMKGLERFGISEAELLVSCDATFKQGIKFVNWMKPTQEAEHFYYHPFDAPYPGGFDVSRHWLNNEPTRPFDDVGIQARICELGLAPKRKSSGEYQGDLAYAYHFDAAKFAKLLADNAKKKFNVNHIIETISGVKKDRNGSITHLLTESNAELAFDFYIDCSGFSSVLIDKELNVPFIKKDKELLTDTVLVQQVPVTEDEELNPYTTATAHKAGWVWDIPLTTRRGTGFVYSSKHMSEAEAKACYAKYLGVNEEGFTPRKVPMEIGYRESFWQNNCVALGLAQGFLEPLEATSILLSDFSAELLAKNFPRQTADIECANTYYNKVVTYAWERTVDFIKLHYCLSDRDDSAFWQENREQSSFSTELKQRLNKFKLRPPQQSDFFSRFDMFDDKNFLYVLYGMNFTTKKSIISEHEQSHSKKLLEHNDQLVKQAATNLLNHKTWLYGLKKAMLNRQ

SEQ ID NO: 83908 - protein, 520 aa, Streptomyces rimosus
  misc_feature (1)..(520): tr|A0A5B7YVZ8|A0A5B7YVZ8_STRRM Tryptophan 7-halogenase OS=Streptomyces rimosus OX=1927 GN=CTZ40_09640 PE=4 SV= 1
MLTNVVIVGGGTSGWMSASYLKAAFGDRLSVTVLESKRIKTIGVGEATFSTVRHFFDYLGLPEHVWMPKCNATYKLGIRFENWHRKGSYFYHPFERLRVVDGFPLTDWWLHRKPGNSERFDQDVFLMSAICDAERSPRYMDGTLFEQDFKEQTDPKDRKPERSTLTEQDTQFPYAYQFDASLLADYLCAYSTERGVRHIEDDVVEVARDDRGWIGHLRTREHGEVTADLFIDCTGFKGLLLNEALEEPVISFQDTLPNDRAVALRVPVDMEKRGLRPCTTATAQDAGWIWTIPLFGRIGTGYVYASDYTTPEEAERTLREFVGPDAKDVEANHIRMRIGRSRNAWVNNCVAVGLSSGFVEPLESTGIFFIQQGIEQLVKHFPGADWNPQLRDSYNRAIGNTIDGVREFLVMHYRGAGRNDNQYWKDAKTRALPDGLAERLDMWRSKLPTTETIFPNYHGFEPYSYHSMLLGLGGVDLKAPPALALMDDSAAQAEFKLLRAQSQELAKRLPSQYEYLAQMH

SEQ ID NO: 83909 - protein, 547 aa, Sphingomonas sp.
  misc_feature (1)..(547): tr|A0A0Q5UDM1|A0A0Q5UDM1_9SPHN Tryptophan halogenase OS =Sphingomonas sp. Leaf198 OX=1736299 GN=ASG20_16875 PE= 4 SV=1
MNEHSIRRVVIVGGGTAGWMAAAAFARFLNNGYTEITLVESEEIGTVGVGEATIPPLINFNQMLGLDENAFLAATSGTFKLGIEFVDWGALGERYFHPFGNYGHDLQGVHFHQLWLREKARRPIDDISAWSMSAMAAANGKFGRATGDARSPVRELFYAFHFDASLYARYLRDYAERAGIVRIEGKIAQVNQRPADGYVAAVTLEDGRRIEGDLFIDCSGFRGLLIEETLHTGYESYAQWLPCDRAIAVPCALPNPSEPDAFTRSTAHKAGWRWRIPLQHRMGNGLVYCSKYLGDDEAEAQLLASLEGEQLAEPRRLQFTAGRRRDCWNRNVVALGLSSGFIEPLESTSIHLVQAGIQRLIALFPDKRFDPVERDEFNRQMHDLYEDIRDFIILHYKATRRDDSPFWNQVRTMDVPESLQRKIDLFAGKGRLFREGYDLFSNPSWVAVCLGQGITPQGWEPAADALDEQKVASALEQMRRGYLDTAQRLPTHGEFLRRTALSPLAAQAASPPTTPASAPAPTSSDDLPFFAFTAESPFDVGGGGSPL

SEQ ID NO: 83910 - protein, 384 aa, Bradyrhizobium arachidis
  misc_feature (1)..(384): tr|A0A1I7M753|A0A1I7M753_9BRAD Tryptophan halogenase OS =Bradyrhizobium arachidis OX=858423 GN=SAMN05192541_130 39 PE=4 SV=1
MRARWRDEAASQQDNAAIIVDRTLFDRFLIEAARKAGVTVLCPARARRPAFVDERWIIPIDARDAGALVVEAQFLVDATGRRGGCRPAGAPTIALCGRWQGKVSSSPAEMCIDAGEHAWFWAAPLSHDSATAQVFIHPQSYTRRGAADCATLYRTLLDQSRLAREFLRGLSLADIRIRDATFRVDNETVTPNSIKVGDRAFAMDPLSSQGVQAAIRSGLQASAVIHTILRRADLEAALEFYRATLQGAVKVHDRHASEVYASQALYASSFWQSRSSTRSLEEKKPAASIRISDNPELMLSQNARLIALPVIEGDEIRRRTALTHPGLERPVAWLGGVPLGTVLSAIRSKRPAASILAEWSGQTTPAQAHALLDWMIAREILVNA

SEQ ID NO: 83911 - protein, 497 aa, Erythrobacter sp.
  misc_feature (1)..(497): tr|A0A3N5DMQ1|A0A3N5DMQ1_9SPHN Tryptophan 7-halogenase OS=Erythrobacter sp. HN-E23 OX=2488860 GN=EG799_11440 P E=4 SV=1
MSEAGDSGPRISRVVVAGGGTAGWTVAAALVKALGRLLTITVVESDQIGTVGVGESTIPTARRFHELLGIDEKTFVQATNASFKLGIKFQDWLREGESYFHSFGTSGRSNWLADFHHIWLRARELELAEEYGAYCLEHHAALSGKFACGAGSGLNYAYHLDATSYGGFLRQHAEANGVLRREGRIARVRRDGETGDIAALEMEDGEAIEGDLFVDCTGFRALLIGETLEVPFADWTHWLGCDRALAVQTEPVGPPPPYTRARAHRAGWQWRIPLQNRVGNGLVYASERLSECEAQSLLRERTDGAYVTEPRLIRFRTGMRRTMWERNCIAIGLTGGFVEPLESTSIHLIMTAAIRLLQLFPFDGMTAAGQSRFNVVGRREMEHIRDFIVLHYHLNRRQEPFWREAADMEIPDTLTARIEAFAEGAIAWQEPDELFRIDSWVQVMLGQGIVPSSHHAFARMMERETLAKSLAGLSGNIRSATSQLPDHGDFLSRYPAG

SEQ ID NO: 83912 - protein, 512 aa, Pelomonas sp.
  misc_feature (1)..(512): tr|A0A0Q7SFT3|A0A0Q7SFT3_9BURK Tryptophan halogenase OS =Pelomonas sp. Root1444 OX=1736464 GN=ASD35_07425 PE=4 SV=1
MSDDQAIRRVVIVGGGTAGWMTAAPLGQLMGRGEHAARCEIVLVESPEIGTVGVGEATLPTIRYYNRTLELDNAEFIRKTQATFKLGIEFKDWGHLGNHFFHGFGEFGPAILNRSSVMHWLRLHHLGGMDSHEEWSTATVMARRNRFVPPEGDLPSAANAYSYAFHFDAGLYAAFLREYAMARGVKREEGTIVDVSVRPGDGFVTAVTLADGRRIEGDLFIDCSGFRALLIEGVCKAGYHDWTHWLPCDSAQAVPCDKVAPLTPYTTSTARSAGWQWRIPLQHRTGNGHVYCSAYTSDQEAGQVLMRNLDGAAQADPRQLRFKTGMRKKAWDRNVVAIGLSSGFLEPLESTSIQLIMDGVGRLIELFPDRRCDVHLAAEYNRRMARQYESIRDFIVLHYKLTKRDDSEFWRYCAAMSIPDDLKHQIEIFRRSGRVAILDPDSFAEPSWVSLFLGLGCWPQRHDPLLAQVDEQALRTHFERLRAAISGTVDDMPDHGAFIEKHLRAAPMEMVK

SEQ ID NO: 83913 - protein, 562 aa, Ruegeria atlantica
  misc_feature (1)..(562): tr|A0A0P1EM76|A0A0P1EM76_9RHOB Flavin-dependent tryptop han halogenase RebH OS=Ruegeria atlantica OX=81569 GN=r ebH PE=4 SV=1
MNNRLRKITIVGGGTAGWMTALILDMVFSRTSAPKDRPRICLIESPNIATVGVGEATVPRMPVTLRQAGISERDFFRETNASFKLGVKFCNWNKDAKGNRIDYVNPFAHGQLLEGLEAAEYFLRFGNGDRDFTQSISPHDDLARLCKGGRPLGQPEFEQRFGYAYHLDAVKFAGMLTKVCTKRGVEHIQDEVQAVELDEQGNVSHLMLARKGRHDIEMVIDCTGFRGLIINKALGEPFMDYSDYLPNDRAMALQIEHPDPEKIESVTRSTALGAGWTWRVPLYNRVGTGYVYSSAHRTDDQAADEYLEWLGDSGKGLTPRVIPMRIGRVRNAWVKNCLAIGLSGGFIEPLESTAIHMVDHAVRWFAEHLPTRDIEPSLRARYNRQMNKMYDEVLDFICLHYRLGNRTDDQYWIDARTEMKIPDRLAENLELWQHRLPMEHDIEFATLFNFRVYQTVLLGKQVYDTGYGTGIRDRLRPLKKPIWFQWWKGAKVDLAQILKAMPDHKTLLRDIRGELEQPPAFGMAAAMQPTVAMPGEQLAPVAIQNMPNLAEIQSGKKDLQLF

SEQ ID NO: 83914 - protein, 505 aa, Sphingomonas aerolata
  misc_feature (1)..(505): tr|A0A2T4YMJ7|A0A2T4YMJ7_9SPHN Tryptophan halogenase OS =Sphingomonas aerolata OX=185951 GN=C8J24_2841 PE=4 SV= 1
MTTPPIHRVVIAGGGTAGWMAAAAIARTMGRTVAVTLVESEAIGTVGVGESTIPPIVTFNRLLGINEAEFMRETQATFKLGILFDNWKDRGDTYFHSFGTTGKDHWSAGFQHFWLHGLTRGHHQPFDDYCLELRAALQGKFAHLPDGRMNYAYQLDSGLYARFLRKMAEADGTTRIEGRIAQVELNGESGDIAALTLDSGARIEGDLFLDCTGFRALLIEQALHAGFDDWTHFLPCDSAIAVQTESARPALPYTRAIAHDAGWQWRIPLQHRTGNGIVYCSRYLDHDAALERLLGTVEGPTLTEPNRIRFVTGARRQQWHRNCVAIGLSGGFMEPLESTSIHLIQRAILRLLRMFPSAGISPRDVAEFNEQQHTDMLQIRDFLILHYKATNRRDSAFWRQCASMPVPDSLAHKIALFRETGRVFRKNDELFAENSWVQVMLGQGIVPESYHPIATKMRDDELVRLLCGLRDTTNATVDALPDHAAYVAHYCSTAPSASAGSPHLG

SEQ ID NO: 83915 - protein, 513 aa, Pelomonas sp.
  misc_feature (1)..(513): tr|A0A0Q6T7U6|A0A0Q6T7U6_9BURK Tryptophan halogenase OS =Pelomonas sp. Root1217 OX=1736430 GN=ASC95_25360 PE=4 SV=1
MRDDQAIRRIVIVGGGTAGWMTAAPLGQLMGRGEHAASCEIVLIESPEIGTVGVGEATLPTIRFYNRTLQLDNVEFIRKTQASFKLGIEFKDWGHLGNRFFHGFGEFGPAVFNRSSVMHWLRLHQQGGMDSHEEWSTATVMAQRNRFVPPEGDLPSAANAYSYAFHFDAGLYAAFLREYAMERGVKREEGTIVDVSLRPGDGFVTAVTLADGRRIEGDLFIDCSGFRALLIEGVMKAGYHDWTHWLPCDSAQAVPCDKVQPLTPYTTSTARSAGWQWRIPLQHRTGNGHVYCSGYMSDEAAGQMLMQNLDGAPQSDPRQLRFKTGMRKKAWDKNVVAIGLSSGFLEPLESTSIQLIMDGVGRLIELFPDKRCDRYLADEYNRRMTQQYESIRDFIVLHYKLTKRDDSEFWRYCAAMSIPDALSHQIELFRRSGRVAILDPDSFAEPSWVSLFLGLGCWPERHDPLLRQVDEQALRAHFQRLRAAISQTVDGMPDHGAFIDRHVRAPAMEAVKP

SEQ ID NO: 83916 - protein, 521 aa, Xanthomonas citri; identical to SEQ ID NO: 83608
  misc_feature (1)..(521): tr|H8FH58|H8FH58_XANCI Tryptophan halogenase family pro tein OS=Xanthomonas citri pv. mangiferaeindicae LMG 941 OX=1156940 GN=XMIN_2686 PE=4 SV=1

SEQ ID NO: 83917 - protein, 521 aa, Xanthomonas phaseoli
  misc_feature (1)..(521): tr|A0A1V9HD44|A0A1V9HD44_9XANT Tryptophan halogenase OS =Xanthomonas phaseoli pv. dieffenbachiae OX=92828 GN=IM 53_006505 PE=4 SV=1
MPDTTPSDPQQRPVRHVVIAGGGTAGWMAAAALSKLLGRHLQITLVESDEIGTVGVGEATIPSLVTFHRLLEIDEAAFMAATQATIKLGIAFEHWRDVDQHYIHSFGHAGTDHWSAGFQHFWLKGRQRGVARDFGDYCLELRAAQEGRFAHLPNGGMNYAYHLDAGLYARFLRRFSEGFGVQRIEGRIGQVETDPESGFLTALTLHNGARVEGDLFIDCTGFAGLLIGKTLGVGSDDWSRWLFADSALAVQTESVGPPVTYTRSRADQAGWMWRIPLQHRVGNGIVYSSRYMDQDGARAVLERNLTGRALTEPRPLRFTPNQRHRVWEKNCVALGLASGFLEPLESTNIHLIQRGIIRLLQTFPQVINAVDIAEYNRQAAQEITHIRDFVILHYHATDRRDTPFWRDCAAMDIPDSLRHRVELFRQSGRVFHQANELFAENSWVQVMLGQGIVPQQHHPVADLMGGAELGRFLETIRTRVEAALVRLPAHADFLQRYCPAPPLPEPAARAPAPHVMATPAG

SEQ ID NO: 83918 - protein, 495 aa, Pseudoalteromonas sp.
  misc_feature (1)..(495): tr|A0A0W1L4K2|A0A0W1L4K2_9GAMM Tryptophan halogenase OS =Pseudoalteromonas sp. 10-33 OX=1761890 GN=ATS76_04020 PE=4 SV=1
MTKTNAVKNVVIAGGGTAGWMAAAALAKLIGKNIHVTLVESDDIGTVGVGEATIPPIRTFHKLLGINEQTFMKATQASFKLGISFENWGDENTRYIHSFGATGKECWAGEFHHFWLQGKTLGIHNPFGDYCYELQAAKAGKFAFNQQNPINYAYHMDATRYAQFLREFSEPLGVKRVEGKIQKVVKNAKTGHIESLLLNSGEQINGDFFIDCTGFRGLLIEQALHTGYEDWSHLLPCNSAIAVQTKSTSNTVLPLTRSIAHKSGWQWRIPLQNRVGNGLVYCSQYMDDEQAKALLLNNIEGEALTEPRVIKFKTGRRLKGWNKNCLALGLASGFVEPLESTSIHLIMSGIIRFMRLFPFNGITNHAIDEYNKQLKSEIENIRDFIVLHYKVTNRDDSEFWLHCSAMEVPKTLKHKIDLFKQTGRVFLDDGDIFRVDSWVQVMLGQGIGPEQHHLIASMMSDEELTRFLHGIKQQIEQRVSQLPPHHEFLKHYCPA

SEQ ID NO: 83919 - protein, 467 aa, Sphingomonas aerolata
  misc_feature (1)..(467): tr|A0A2T4YTT3|A0A2T4YTT3_9SPHN Tryptophan halogenase OS =Sphingomonas aerolata OX=185951 GN=C8J24_0605 PE=4 SV= 1
MTATVAVLGANLCGWIAAAALARRLPRESYRVVVIDDGTGGDGLGDFAPVIAVPPALARFHADLGLDAATLVRMTGGGHALGVAFGGWRADRAAAFLSYGETGAPLEGIAFHQLAGRLRAAGHPVRLADHALSAVAAQAGRFAPGAPLAHALHLPVAPYEALLRGAALRAGAERASADFVDAEIAANGIVEKLTLADGTGIEPWLVLDCSGTDARIASRTSPASEDWSSWLPCDRTHAETVPAQGAPPPYTQVDAQDTGWTATWPLDGADVRLTCSVGGNGKPFRAASRFEAWRGNCVALGAAAGLLEPLHPTALTLLLRSLAQLIQLWPAGPQAPIEAAAFNRTAAAALQGARDFLIAHYAVAGRAGALWDDRRTASLPGPLAAKHDLFAARGRLPMYDDEVFEEEDWAVMFDAMGLMPRRYDARADIVPLAAIERHLAGQRARVIAQVRALPPYAQAMAALRTRA

SEQ ID NO: 83920 - protein, 538 aa, Burkholderia cenocepacia
  misc_feature (1)..(538): tr|B1K9Y4|B1K9Y4_BURCC Tryptophan halogenase OS=Burkhol deria cenocepacia (strain MC0-3) OX=406425 GN=Bcenmc03_ 6983 PE=4 SV=1
MTHPIKNIVIVGGGTAGWMSASYLVRALQQQANITLVESAAIPRIGVGEATIPSLQKVFFDFLGIPEREWMPQVNGAFKSAIRFVNWRKSPDGSRSDHFYHLFGNVPNCDGVPLTHYWLRKREQGFQQPMEYACYPQTEALDGKLAPCSLDGTRQMSHAWHFDAHLVADFLKRWATERGVKRVVDEVEQVHLNDRGHISSLSTKEGRTLEADLFIDCSGMRGLLINQALKEPFIDMSDYLLCDSAVASAVPSDDARVGIEPYTSAIAMNSGWTWKIPMLGRFGSGYVFSSKFTSRDQATADFLDLWGLSDKQPLNQIKFRVGRNRRAWVNNCVSIGLSSCFLEPLESTGIYFIYAALYQLVKHFPDTAFDPRLADAFNAEIVYMFDDCRDFVQAHYFTTSRDDTPFWRANRHDLRLSDAIKEKVERYKAGLPLTTTSFDDSTYYETFDYEFRNFWLNGNYYCIFAGLGLLPDQSLPLLRHRPESIDKAEAMFARIRREAERLRSSLPTNHDYLRSLRERAAGRSRSQPGPTLATPETL

SEQ ID NO: 83921 - protein, 506 aa, Xanthomonas citri
  misc_feature (1)..(506): tr|H8FE69|H8FE69_XANCI Tryptophan halogenase family pro tein OS=Xanthomonas citri pv. mangiferaeindicae LMG 941 OX=1156940 GN=XMIN_1630 PE=4 SV=1
MIPAPLRNIVIVGGGTAGWMAAAAFARVLGPTFKVQLIESEQLGTVGVGEATVPHIKAFNNLLGIDEAEFVRQTQGSFKLGIEFVDWQRPGSTYMHGFGTQIGHPLGLLPFHQYWIKQHARGKAQPLGAYTLNTVAAARGKFMTSAGDVPANSPLANIAYAYHFDATQYAHFLRRYSQQRGVTRIEGLVEQVQLHPESGHVQSLQLASGQVVHGDLFIDCSGFGGLLIEQALHTGYHDFTHWLPCDRALAVPCEQVSPPAPYTRSTARAAGWQWRIPLQHRTGNGYVYCSAHISDDEAAATLLANLDGKPLADPRSLRFTTGRRKQCWNRNVVALGLASGFLEPLESTSIHLIQSGISKLLELFPREGISPVLVQRYNDRLAFEFDRIRDFLLLHYHATERDDSAFWRHCRHMPITPELQATLDLFRDSGRFYRNAEEMFAEISWVQVLVGQGILPQGYHPLVDQVPDRDAEGFLASVAQTISHCVDVMPSHQQFIDRYCKAATLP

SEQ ID NO: 83922 - protein, 516 aa, Duganella sp.
  misc_feature (1)..(516): tr|A0A3E1RU76|A0A3E1RU76_9BURK Tryptophan 7-halogenase OS=Duganella sp. BJB475 OX=2233914 GN=D0T23_13565 PE=4 SV=1
MQQNQADRRIKQILIVGGGTAGWMTAAAMSKLLGGHYQVRLVESDEISTVGVGEATIPQIKLFNQALGIDEDDFLRETQGTFKLGIQFVNWGKLGENYIHTFGSIGLDMGLIEFHHYWLKLHQAGLAPDFGAYSLAAVAAPQNKFMRAVDAGNSPVSHIAHAFQFDAGLYAKYLRKFAEARGVVRTEGKVADVILREGDGHVAAIMMENGERIEADLFIDCSGFRGLLIEGALKTGYEDWTHWLPCDRALAVPCESTGPITPYTRATARTAGWQWRIPLQHRIGNGHVYSSKYISDDEATAQLMANLDGAPLAEPKPLRFVTGKRKKFWNKNVVAIGLASGFMEPLESTSIHLIQSTIARLMSFFPGRDFNQDNIDEFNRQAHFEVDKIRDFLVLHYHATERDDTPFWNYCRTMEVPESLKQKMDLFKQHGRFYREKDEMFASVSWLQVMLGQGLRPQSYHPLVDLYPQEQIEAHLRTIKTVVENCAGKMPNHEDFIAAHCQATAMNMKRPNYGAR

SEQ ID NO: 83923 - protein, 515 aa, Pelomonas sp.
  misc_feature (1)..(515): tr|A0A0Q7T5R4|A0A0Q7T5R4_9BURK Tryptophan halogenase OS =Pelomonas sp. Root1444 OX=1736464 GN=ASD35_01315 PE=4 SV=1
MTNKRRILIVGGGTAGWLTAAYLAKALRLPERSHLEITVLESPDISSVGVGEGTFPTIRSTLQFLGIDEAQFIRATSATMKQGIRFVDWAHAPTAGRQHQFFHPFEAPFYADGINLVPYWLLQDEATRPPFAEAMTLQYRVAQAQRAPKRAGEAPYAAPLNYAYHFDAIKLARLLADRARELGVRHVEGTVNHVALDTAGAIAHLDSVQQGRQERHQADLYIDCTGFRAELIGGALASPFKSVRGQLFADRALACKLPFESPDTPMESCTIATAHEAGWLWEIGLNGARGIGCVYSSSHLSDDRAAEILRAYCGAGRDEALAMRSIPFAPGYREQQWLKNCVAVGLSAGFLEPLESTGLVLIEAAVGMIAEMLPHSGPMEAPARRFNELMTARFDNIVGFLKLHYCLSQRTEPFWRDNTAPATIPARLAELLAQWRLRPPGRFDFVLDTETFAFFNYQYILYGMGVQTDLGAGRADFTQGDEAQKLFAKIQRFAERALVDLPSHRALIQQINAVK

SEQ ID NO: 83924 - protein, 519 aa, Pelomonas sp.
  misc_feature (1)..(519): tr|A0A0Q7SJR9|A0A0Q7SJR9_9BURK Tryptophan halogenase OS =Pelomonas sp. Root1444 OX=1736464 GN=ASD35_12495 PE=4 SV=1
MNAQLTTAVRRIVVLGGGSAGWLTAATLAAELGGDAPDALQVTLIESPDVPSIGVGEGTWPTMRATLRRIGLSEVDLVRECDAAFKQGSRFDGWLHGGQGDRYYHPFTLPHGYGDAELAGAWLQGGCDQAFAESTGPQPHLCNAHLAPKQTTTPDFGGVVNYGYHFDAVKLGHLLRRHATTVLGVRHVVDHFTAVRAHENGDIAALATREHGDIEGDLFIDCSGLASLLLGKHFGVPFRSEKGVLFNDSALAVQVPHADARAPLASATVATAHAEGWTWDIGLPTRRGIGLVYSSGHTDEAAAERALLGYLKRSGLDHADVSLRRLRFSPGYREQFWHRNCVAVGLAAGFIEPLEASALALVELSAAFIRDEIPAHRADMDLVAKRFNDAFAYRWSRIIDFLKLHYVLSRRDDADYWHDHRKAATQPESLRDLLQLWQHRVPSHNDFYRVEEVFPAASYQYVLYGMQFKPALRALRAQQLAKAEGCIKEVATMTRRLLGGLPRHRDLIQHIHAHGIAAA

SEQ ID NO: 83925 - protein, 504 aa, Asticcacaulis sp.
  misc_feature (1)..(504): tr|V4R062|V4R062_9CAUL Uncharacterized protein OS=Astic cacaulis sp. AC466 OX=1282362 GN=AEAC466_06975 PE=4 SV= 1
MDHRIRRLVIVGGGTAGWMTAAAFAKILGTVNYDIVLVESEDIGTVGVGEATIPQIRTYNDLLGIDENTFVRETNGTFKLGIHFVDWKRPGESYIHPFGLYGVDMDGIPFIHFWHRLANMGGNGDWGRFNAETMAMRENKFTRIPKGEASGLPQINYAYQFDASLYAAFLRRYAEARGVTRREGRIVRVGQAPESGNLTALHLENGQSIAGDFFIDCSGFRGLLIEQTLKCGYEDWSEWLPCDRAAAVPSAKPDGPITPYTRSTSREAGWQWRIPLQHRTGNGYVFCSEFISEDEACEKLLTRLDGAPLKDPKVLRFTTGHRRKMWHKNVVAFGLASGFLEPLESTSIHLVQAGIAKLLALFPRTGIAQSVVDQYNRETIADYVNVKDFLIAHYKVTEREDTPFWRRCKHMSVPDSLTARLETFRATGQAAAQQWELFKEVSWFSVLAGQGLMPGDYHPVADVISDDDLRQRLGRLRSQVDQRVKGMMSHDDYIAKFCAAPKAA

SEQ ID NO: 83926 - protein, 527 aa, Fischerella sp.; identical to SEQ ID NO: 83380
  misc_feature (1)..(527): tr|A0A1Z4TV55|A0A1Z4TV55_9CYAN Tryptophan halogenase OS =Fischerella sp. NIES-4106 OX=2005456 GN=NIES4106_56580 PE=4 SV=1

SEQ ID NO: 83927 - protein, 501 aa, Azospirillum sp.
  misc_feature (1)..(501): tr|A0A239A3Y8|A0A239A3Y8_9PROT Tryptophan halogenase OS =Azospirillum sp. RU38E OX=1907313 GN=SAMN05880556_1014 01 PE=4 SV=1
MKPLRRIVIAGGGTAGWITAAMLSHLLNGSATAVELVESEEIGTIGVGESTIPPFITLLRNLGIDEQDFIRQTSASFKLGIRFRDWYRLGSGYFHPFGAIGGQIDVHEFYQCWLRAKAHGHPSALMDFAPAAIMADEYRFMLPFKAQRTMVGAASYALHVDAKRVATYLRRYAEERGAVRTEGRIERVRTRPDGAIEALCLRDGREVTGDFFIDCTGFRSLLVGQTLGVGLIDWSDQLLCDRAVAVQTENTGDTHPFTLSEALGHGWRWRIPLQHRAGNGYVYSSRFLSDEEAVATLRSKLQGRLLTEPAIIPFKTGMRARMWEKNCLALGLAAGFIEPLESTAIHLVYRAVDHLARFFPDQDCDPALAAEFNRRMGAEYEEVKDFIVLHYCLSQRDDTPFWQACRQAPVPASLRARLDLFRASGVLREGLEELFRAVSWQSVYEGMGVRPARYQGLVETLPLSVITETLDRSAPILRAQVKGLPSHDEFLRTHCAAERDF

SEQ ID NO: 83928 - protein, 517 aa, Azospirillum sp.
  misc_feature (1)..(517): tr|A0A239HGE9|A0A239HGE9_9PROT Tryptophan halogenase OS =Azospirillum sp. RU38E OX=1907313 GN=SAMN05880556_1123 2 PE=4 SV=1
MGDAGPLPSGSWKVCPVQQQIKKILIVGGGSAGWMVAALFSRLFKRLYEITLVESDEIGTIGVGEATIPAIKRFNELLGLDEDDFLRRTQGSFKLGIEFRNWHRQGDSYIHGFGPIGQDLGWLRCHHYWLHQQAQGKAPDFDGLAINTAAARAGKFMRARPDLPDSPLSHIAHAFHFDAGLYARYLREMAEKAGVQRLEGRIGAVHLRPEDGFVQSVTLADGREVAADFFIDCSGFRGLIIEQALKTGYEDWRHWLPCDRALAVPCARQPGEMTPYTSATAHGAGWQWRIPLRHRTGNGHVYASPFMEEAEAEHILLSNLDGPALADPLRIQFTTGKRRQLWNRNCVAVGLASGFLEPLESTSLHLIQSAAIRLVRLMPDGRFDPAVIAEFNRQSDFEYERIRDFIILHYKATARDDTPFWRYCRDMAIPETLQRKIDLFAACGRIFREDEELFAEESWIQVFLGQGIIPRSPDPLVRVQDDAEIAEYLSNITGVIGKCVAVMPGHAAYLERICGVG

SEQ ID NO: 83929 - protein, 501 aa, Azospirillum sp.
  misc_feature (1)..(501): tr|A0A239F3F2|A0A239F3F2_9PROT Tryptophan halogenase OS =Azospirillum sp. RU38E OX=1907313 GN=SAMN05880556_1066 3 PE=4 SV=1
MTLPYRIVIAGGGSAGWMAAAALVRQLRGTGTAITLVESEEIGTVGVGEATIPPIQAFNRMIGLDETEFVKATRGTFKLGIEFVNWWRQGHRYFHPFGRYGDDFGLVPFHQQWLAARAMGDETPLAAYSLAHAAAASGRFAVPPDGGQSVFATYGYAYHFDAGLYAAHLRTLAEGHGVTRIEGMIDHVARDPESGFVTALHLTDGRVVAGDLFLDCTGFRALLIGEVMQTPYLDWRHWLPCDRAVAVPCARVEPLTPFTRSTARDAGWQWRIPLQHRTGNGHVYCSGFIDDQAAEDALLAHLDGQPLAEPRRLRFVTGRREQAWQGNVVSIGLASGFLEPLESTSLHLIQSAVTKLIHLFPGRDFDPAVRDEYNRRMATEFERVRDFLILHYAQTERDDTPFWRHCAAIDQPDSLKDAIGLFRRTGRLFIRDEDIFHEPSWLAVLLGQGVTPQGRDQLADAVPAAERADILQAMRRVIARTADQLPTHASMVDGPFSWQGR

SEQ ID NO: 83930 - protein, 473 aa, Gammaproteobacteria bacterium
  misc_feature (1)..(473): tr|A0A2N1XZ80|A0A2N1XZ80_9GAMM Tryptophan halogenase (F ragment) OS=Gammaproteobacteria bacterium HGW-Gammaprot eobacteria-2 OX=2013798 GN=CVV12_14985 PE=4 SV=1
PPSCRIRLIESEEIGIVGVGEATIPNIKHFNAALEIDEDEFLKATQGTFKLGIEFVNWGQLGDRYIHGFGKVGPDTSLVGFHHYWLRLKQLGKASGLDAYSINTVAPRQAKFMRYRKDMPGSPLGDIVHAFHFDASLYARWLRGLAEKRGVMRTEGKVKQVLRRAEDGYIEALVMEGGERIDGEFFIDCSGIRALLIGDALGVGYEDWSHWLPCDRALAVPSAPVKPLLSMTRSTAHSAGWQWRIPLQHRVGNGHVYSSLFMSDDEATSILLANIDGEKMADPRLIRFRTGMRRKLWERNCVAVGLSSGFLEPLESTSIHLIQTAVSRIATFFPHQGFDAADIDEYNAQGRLEYQQIRDFLILHYKATERTDSAFWNYTRTMPIPATLQRKIDLYRSNGRLFRDGNELFAEPSWLQVMEGQRIHAQGYHPFAGFMPESELCEFVGGVEAVIGKCVGVMPDHAQFIAEHCAAQR

SEQ ID NO: 83931 - protein, 549 aa, Asticcacaulis sp.
  misc_feature (1)..(549): tr|V4PF26|V4PF26_9CAUL Uncharacterized protein OS=Astic cacaulis sp. AC466 OX=1282362 GN=AEAC466_00980 PE=4 SV= 1
MIISRLNGKNGKPPIMTKIASEPASPPHRDVLIVGGGAAGWMTAAYLAKHLGTDRNGGPRITVMESPDIGIIGVGEGTFPTIRNILRTLGIDEAGFMRESHATFKQGIRFDDWEVTPKDGRRSHYFHPFEQPYWSREELNLLPYWLLQDKDKRLPFAEAVTFQKKVADSKLAPKRIHQGNYQGPLNYAYHFDAHRFAGVLAKYAKDLGVHHLSGNLDGVTLDADGAIAHITAKEHGDLKADLYIDCTGFRSEILGKAMGVPFKSIKDTLFTDRAVAIQVPYEKPDSPLESYTISTAHEAGWTWDIALSTRRGIGYVYSSDHTDDDRAEEVLRAYVGPMAEGVEARCIRFNAGYRTQHWVKNCIGVGLSAGFLEPLESTGMVLIESAVNKIVEFFPFRGPLDASAHIFNEAMTKRYETIIGFIKLHYCLTKREEPFWRDNTRPDSIPPHLRELIALWKFRPPSRFDFTLDNESFAFFSYQYILYGMNFETDYEAARGSLQHTDLANHLFARISQFGDQASKDLVSHRQLINAVYKGGFVERPNAPMAVAR

SEQ ID NO: 83932 - protein, 494 aa, Xanthomonadales bacterium
  misc_feature (1)..(494): tr|A0A1M3QS61|A0A1M3QS61_9GAMM Tryptophan halogenase OS =Xanthomonadales bacterium 66-474 OX=1895868 GN=BGP23_1 2165 PE=4 SV=1
MTALLLANSAYGARLKVTVLESSQVGVIGVGEGSTPWLRGFFEGLGIEESEWMPECHATYKAGISFDGWSTRPGYESYFHSFASMLDNMTMAPFIDNVHARLDRADVHAHPDRFFISARLARECKAPRPQQSFPFDVWYGFHFDSVLLGRFLQKKAMDRGVQHVVGHVTEVRLAESGDVASLALKDGGTLAGDFYVDCTGFASLLMGKALGTPFVPFKDNLFNNAAIAISKPHDGPIMPKTISSALGHGWVWKIPLTTRYGYGYVYSTDFCPPENAEKELRGHLGLLDADVPARHLEFRPGRVAEPWRRNCVANGLAQSFIEPLEATTLLYVQRTAEMLVAALEQRDLGEGTRRRFNDTLNAGVEGTRDYIVTHFKTNTRNDTDYWRANAANTHLSEPLQQLLRTWLASRPISAGIAQGKFGRGYPIMSWYSLLAGVGLFPGDPRPPTAEEAKYDMAEVDTLLDRSAMNFPDHRTFLGAIPPKPKPSSLQVYFW

SEQ ID NO: 83933 - protein, 543 aa, Asticcacaulis sp.
  misc_feature (1)..(543): tr|V4PI27|V4PI27_9CAUL Uncharacterized protein OS=Astic cacaulis sp. AC466 OX=1282362 GN=AEAC466_04810 PE=4 SV= 1
MFLTCRRRLLDGAGFFLRLDTAMTTPKSGHRDAFFVLNGIEMTTTGPLRKIVIVGGGTAGWMVANALSKVLGKSGPAITLIESEEIGTVGVGEATIPPILAFNALLGINEVEFMKETQATFKLGIEFVDWLRIGHRYFHPFGIYGVDAGAVPFEALWQRSRHLGTPRPLNDFSVCARAAAMGRFMRPAGAGGPLAHLAYAYHFDATLYARFLRKYAEAAGVTRIEGRIAHTSQRPDDGFIEAVTTQDGRRIEADFFIDCSGFHALLIGGVMGAKFEDWNHWLPNDRAVAAPSANMAPPTPFTTSTSRTAGWQWRIPLQHRTGNGYVYSSAHSSDQAAQDLLTTNIAGDLLAEPRVIKFRTGRQRAFWIKNCLALGLASGFMEPLESTSIHLVQAGIARLLEMLPNRSCDPADIRRYNRLMTTEYDSIRDFIILHFHATERRDTQYWRSLANMSIPDTLAERIDIYRHSGRVFRESDDLFSKTSWLAVMDGQGLVPQAYDPLAEGVSPEQAQKHMEHIASVQAAAVKTMPSHHNYIAKYCSTAQ

SEQ ID NO: 83934 - protein, 512 aa, Mycobacteroides salmoniphilum
  misc_feature (1)..(512): tr|A0A4R8S167|A0A4R8S167_9MYCO Flavin-dependent tryptop han halogenase RebH OS=Mycobacteroides salmoniphilum OX =404941 GN=rebH PE=4 SV=1
MLEEVVIVGGGTAGWMTASYLKVAFGDRIMVTVVESGRIGAIGVGEATFSTIRHFFDYLGLEEHEWMPSCCATYKLGIRFQDWRKPGHHFYHPFERQRVVDGFSLTDWWLSNPRSDSFDRDCFLMGTLCDNEKSPRRLDGSLFIGNGAEGAAYRTTLSEQETQFPYAYHFDASLLADFLRDFAVRRGVRHVVDDVVDVRQDDRGWITHVRTRAHGGIGGDLFIDCTGFAGLLLGRAMGEPFESYQGSLLNDRAVALRVPTDQDRGYLPPYTTATAQDSGWIWSIPLFGRIGTGYVYAADYCSPEDAERTLRDFVGPAAEGLEANHIRMRIGRSRRSWVRNCVAIGLASGFVEPLESTGIFFIQHGIEQLVKHFPDENWEESLRDSYNRVINRCMDGVREFLVLHYYLAARVDTQYWRDTKSVELPAALSERIEHWRSKLPDAGSVYPHYHGFEPYSYVCMFLGLGGIPARASTAMRHLDATRAQREFDLLAQQASRLRHSLPTHHEYLAQMY

SEQ ID NO: 83935 - protein, 432 aa, Sphaerisporangium sp.
  misc_feature (1)..(432): tr|A0A366LEB4|A0A366LEB4_9ACTN Tryptophan halogenase OS =Sphaerisporangium sp. LHW63015 OX=2248750 GN=DP939_441 60 PE=4 SV=1
MDPYETVDVVVIGGGPGGATAASTIAAEGRSVLLLEKSPFPRFHIGESLLPYTAGVLEQMGLLEPFANNGYVPKCGAEFTDRTGSFRRVSFEDQGPGRHHQTFQVERAHFDNALLEHAQEAGAQIRNPAPVDELIVEDGRVVGVRYRHEGETREVRAQYVVDASGRSGKVAHAFGLRRSVDQLRMVAIYRHFTGLDEAANPGERGDIQIGNHKDGWVWAIPVWEDTISIGTVMHKDTFRRHGEPEQIFDEHRARIPRIAQRLEGTEPSTKIRIETDYCYLSDEIAGPGWLMVGDAGCFVDPIFSGGVFLAMVTGREAGRTVAAALEHPYRTEQLQASYESFYKTGYDTYFRLIRGFYDYKFNFRQYREDLPDFIEERHVSLLLAGDFWSQGNALARYLKSERRWDTFAPFEYFYGCPVYPDLELLERVEMGV

SEQ ID NO: 83936 - protein, 510 aa, Pelomonas sp.
  misc_feature (1)..(510): tr|A0A0Q7S0Q3|A0A0Q7S0Q3_9BURK Tryptophan halogenase OS =Pelomonas sp. Root1444 OX=1736464 GN=ASD35_07420 PE=4 SV=1
MNNDQAIRRIVIVGGGSAGWMTAAPLSQVFGTQPGGSANPVGCEIVLVESADIGTVGVGEATLPSIRHYNDALELDNAEFMRKTQASFKLGIEFKDWGHVGNRFFHGFGGFGPPILNRSSVAHWMRLNRAGGMPSYEEWSTATVMAQRDRFVPPEGGPPSAANAYSYAFHFDAGLYANFLRDYALARGVKREEGTIVDVSLRPGDGFVTAVTLADGRRIEGDLFIDCSGFRALLIEGVMKAGYHDWTHWLPCDSAQAVPCDKVLPLTPYTTSTARSAGWQWRIPLQHRTGNGHVYCSSYISDEEAGRVLMQNLDGAPQGDPRQLRFKTGMRKRIWEKNVVSVGLSSGFLEPLESTSLSLVIHGVSALVELFPDRQCEPHLVDEYNRRMTRQYESIRDFIILHYKQTERDDSELWRYCAAMPIPDTLAHQIDNFRRNGRVVILDRDSFGEDSWYSLYLGLGMKPEALDPLLAQVDEQPLREHFKRLHMAISKTVEGMPDHAAYLSRLVGTR

SEQ ID NO: 83937 - protein, 510 aa, Kutzneria albida
  misc_feature (1)..(510): tr|W5WNC1|W5WNC1_9PSEU Uncharacterized protein OS=Kutzn eria albida DSM 43870 OX=1449976 GN=KALB_6284 PE=4 SV=1
MIKSVVIVGGGTAGWMSATYLKAAFGDRLRVTLVESQRVNRIGVGEATFSTVRHFFDYLGLREQDWMPHCSASYKLAIRFQDWRAKGHHFYHPFERLRVADGFNLAEWWLADRGEDFDRSCYITPHLCEAERAPRLLDGSMFAANLDGSLGRSTLAEQRAQFPYAYHFDADLLAGFLARYGVERGVQHVVDDVVEVVQDQRGWISGVRTKEQGLVEGDLFVDCTGFRGLLINQTLREQFESFTDVLPNDRAVALRVPQDMAATGMRPYTTATAMDAGWIWNIPLFNRVGTGYVYAEEFCSPEEAERTLRQVAAPGRDDLEANHIRMRIGRNRRSWVNNCVAVGLSSGFVEPLESTGIFFIQHAIEQLVRHFPDERWDPALVADYNNRVAHVIDGVKEFLVLHYRAAARDDTPYWKEAKVRKIPDGLAERLELATSHLLDEETIYPYYHGFEMYSWNTMLLGLGWQPERAKPALAHLDPAAARREFAQLRADAEQLVAALPSCREYLATIH

SEQ ID NO: 83938 - protein, 514 aa, Sphingomonas sp.
  misc_feature (1)..(514): tr|Q1NHT3|Q1NHT3_SPHSS Putative tryptophan halogenase O S=Sphingomonas sp. (strain SKA58) OX=314266 GN=SKA58_00 925 PE=4 SV=1
MVRPVRNIVIVGGGTAGWLTAGVIAARHRTRIGQDLSVTLVESPNTPIIGVGEGTWPTLRTTLSRMGISETDLFRQCDAAFKQGAWFARWTDGTASDGYYHPLMLPQNFGQVNLVPHWLARDGDESFCDAVCAQGRICDDGLAPKTMATAEYDALANYAYHLDAGKFAPFLQRHCCEKLGVRHVLADVEQVVLHDDGDIAAVRTTQAGLVEGDLFVDCTGFKALLIEGAMGVPFRDCNDVLFCDTALAMQVPYAAPDSPIASHTISTAQSAGWIWDIGIQTRRGVGHVFSSSHISDEQAERELRAYVGPASDGLNVRKIKIRSGHRETFWKGNCVAVGLAAGFLEPLEASAIVLIELSAKIIAEQMPACREVMDIIASRINATTHYRWGRIIDFLKLHYVLTQRTDSDFWRDNVRAETMPDRLRELLHLWRYQSPWFHDEFDRAEEVFPAASYQYVLYGMGFRTQVPTAALARDAHLAGRAMRENAAATARLRAGLPRHRDLIDRIVAQGLQPV

SEQ ID NO: 83939 - protein, 500 aa, Sphingomonas sp.
  misc_feature (1)..(500): tr|Q1NHZ6|Q1NHZ6_SPHSS Tryptophan halogenase OS=Sphingo monas sp. (strain SKA58) OX=314266 GN=SKA58_00610 PE=4 SV=1
MTQPSLPRRIVVAGGGTAGWMTAAALARTLGPVAQVTLIESEQIGTIGVGESTIPPLVAYNRILGIDEADFMRATQATFKLGIQFENWRVPGESYFHSFGGTGKDHWSAGFQHFWMHGAAQGHDAPYDEYCLELKAAMAGRFAHLPDDRMNYAYHLDSGLYAKFLRAMAEGDGATRIEGRIVAVDLDGASGDIAALRLDGDRRIEGDLFIDCTGFRALLIEGALHAGYDDWTHWLPCDGAVAVQTASVRAPVPYTRAIAHDAGWQWRIPLQHRQGNGIVYCSAFMEPQAAQDQLLATVEGDRLVQPNPIRFRTGARRRQWHRNCVAVGLSGGFMEPLESTSIHLIQRAVLRILRMLPAGAISPRDIAEFNDQQMADMEQIRDFLILHYKATDRRDTPFWRHCASMSVPDSLTHKMELFRETGRVFRKNEELFAENSWVQVMMGQGITPQSYHPVAAKLRPQELKHLLTALRDQVSRTVSALPDHGAYVARYCGAQDVAAA

SEQ ID NO: 83940 - protein, 255 aa, Pedobacter cryoconitis
  misc_feature (1)..(255): tr|A0A327S6D6|A0A327S6D6_9SPHI Tryptophan halogenase OS =Pedobacter cryoconitis OX=188932 GN=LY11_04361 PE=4 SV =1
MLSKVVERGGKIFPRTKCTNLIQKENGHWELQMKHQTRGDFMINAKFLFDASGRQGHLCRMLDLPIVKYDQLVGVGAFLHFKVPKVIAQEMFIETVKDGWWYCAALPGQRMVVTLFSDADVIKKQQLRQPENWNALLSATKNIKKRIQHAVADEQPWVRNAFSQLTDSSSRSNFLAIGDAAAAFDPISSMGIGFAVSSACNAARAVDYFFSGNADGIKSYQQDIKSIFNQYLDLRKQYYRTEQRWAEEPFWERRI

SEQ ID NO: 83941 - protein, 505 aa, Alteromonas stellipolaris
  misc_feature (1)..(505): tr|A0A0S1YN77|A0A0S1YN77_9ALTE Tryptophan halogenase OS =Alteromonas stellipolaris LMG 21856 OX=1160720 GN=AOR1 3_2898 PE=4 SV=1
MVKTYKILILGGGTAGWMAANLMAKSWSKQGFSITLMESPDIPTVGVGEGSTPYIRRFFEQMDIPESEWMPQCHATYKNGIRFTDWTTKPGFESYFHPFATDIDNPHFNLFKQHVALRRQGLNISVHPDDYFLMTHMTKRKKLPLPTGQFSHTLFYAYHFDAKLLGDFLKKRALCAGVKYLVDKAFEIEKHPNGDIAAIQTHSNQRIEADFFVDCSGFSSLLMQKALDVPFISYRDSLHNDAAVAIPSAAEAPFLPQTLSAAMPCGWRWKIPLTHRTGNGYVYSSDHLSGDEAEQQLRNAAGINNARTAAHHIKMRVGRNQAHWKRNCLAVGLSQGFIEPLEATGLQMTLITIEQFIAHFEKGNFTSRYQENVNNGINAAFDHIRDYVLLHYLANNRNDTQYWRDCRGDVAISDSLRSILEIWSQGGDLEQELQRQNISQYYPSLSWHVILTGMGVFPSAHYQNPSLNQQFQTSKANMKAFFNHCVAQFQSSVSANQQGSVQNVY

SEQ ID NO: 83942 - protein, 530 aa, Kutzneria albida
  misc_feature (1)..(530): tr|W5WDK6|W5WDK6_9PSEU Uncharacterized protein OS=Kutzn eria albida DSM 43870 OX=1449976 GN=KALB_5897 PE=4 SV=1
MNDHRINDVVVLGGGTAGWMAAAYLGRALGPSARITVLEAPAIPKIGVGEATIPNLHKVFFDFLGIPEEEWMRECNASFKMGIRFVNWRTPGPGQAEPRPHEGGRDHFDHLFGLLPDHAGLPLSQYWVQRKLAGQTDVPFDYACYRQPPVFDAKLSPRHSDGTRWASYAWHFDAHLVADFLRRFATEKQGAVHLQGTMTSAEVDQRGHITRLHTEDGRTIEGDLFIDCSGFRGLLINQLLREPFLDMGDHLLNDRAVATAVPHDDAANGVEPFTSAIAMSSGWTWKIPMLGRFGTGYVYSSRFSTQDEATEEFCRMWGLDPETQPLNHVRFRVGRNRRAWVKNCVSIGLASCFLEPLESTGIYFVYAALHHLVKHFPDKRFEPVLTEQFNHEIETMFDDTRDFIQGHFSFAPREDTPYWRACKELELAPAYRQKVATYRAGLPVSLPATDESGYYGNFEAEFRNFWSNANYYCMFAGMDFLPEHPLPSLAYRQEASESVDSVFAEIRREQERLLATLPSTYDYLRQLHGK

SEQ ID NO: 83943 - protein, 503 aa, Alteromonas stellipolaris
  misc_feature (1)..(503): tr|A0A0S1YQG8|A0A0S1YQG8_9ALTE Tryptophan halogenase OS =Alteromonas stellipolaris LMG 21856 OX=1160720 GN=AOR1 3_3557 PE=4 SV=1
MSSDSDNSNTSGAKTSPVKRVVIAGGGTAGWMAATALSKLLGKSLSITLVESKDIGIVGVGEATIPPIRTFHKLLGIDEKAFMRATNATFKLGIEFENWREQNHSYIHSFGVTGRECWAGEFHHFWLRAKNLGFGGDFGDYCTELKAAKEGKFAYGERMPMNFAYHFDAVAYGRFLKGLAVEAGVTHIEGDIQHVSKCSQTGCITSIKLSDDKEIAGDLFIDCTGFKGLLIEKALHTGYENWSHWLPCDSALAVQTASTGAPIPYTKSVAHTAGWRWKIPLQNRVGNGLVYCSNYMSDDEAKNTLLDAIEGDTLNEPRIIRFTPGKRRLGWNKNCVALGLASGFIEPLESTSIHLIMTGIVRLMRLFPFDGITQSTVDEYNNKYDSEMAAILDFIVMHYKVTNREDSPFWDHCKSMEIPPSLTHKINLFKQTGRVFLDDGDIFRVDSWTQVMMGQGLLPQQYHRVADEMSETELERFLAGLKQQVDNQVSALPSHHDFLEKYL

SEQ ID NO: 83944 - protein, 512 aa, Mycobacteroides salmoniphilum
  misc_feature (1)..(512): tr|A0A4R8SEX8|A0A4R8SEX8_9MYCO Flavin-dependent tryptop han halogenase RebH OS=Mycobacteroides salmoniphilum OX =404941 GN=rebH PE=4 SV=1
MLEEVVIVGGGTAGWMTASYLKVAFGDRIMVTVVESGRIGAIGVGEATFSTIRHFFDYLGLEEHDWMPSCCATYKLGIRFQDWRKPGHHFYHPFERQRVVDGFSLTDWWLSNPRSDSFDRDCFLMGTLCDNEKSPRRLDGSLFIGNGAEGAAYRTTLSEQEAQFPYAYHFDASLLADFLRDFAVRRGVRHVVDDVVDVRQDDRGWITHVRTRGHGDIGGDLFIDCTGFAGLLLGRAMGEPFESYQGSLLNDRAVALRVPTDQDRGYLPPYTTATAQDAGWIWSIPLFGRIGTGYVYAADYCSPEDAERTLRDFVGPAAERLEANHIRMRVGRSRRSWVRNCVAIGLASGFVEPLESTGIFFIQHGIEQLVKHFPDENWEESLRDSYNRVINRCMDGVREFLVLHYYLAARVDTQYWRDTKSVELPAALSERIEHWRSKLPDAGSVYPHYHGFEPYSYVCMFLGLGGIPARASTAMRHLDATRAQREFDLLAQQASRLRHSLPTHHEYLAQMY

SEQ ID NO: 83945 - protein, 516 aa, Azospirillum sp.
  misc_feature (1)..(516): tr|A0A239J326|A0A239J326_9PROT Tryptophan halogenase OS =Azospirillum sp. RU38E OX=1907313 GN=SAMN05880556_1184 5 PE=4 SV=1
MDKPVKTVVIAGGGSAGWIAAGRIAARNGTSLAGGVRVILIESAVIGTIGVGEGTWPTMRNTLRKIGIRETDFIRQCDAAFKQGAQFARWTDGSAGDAYYHPLNPPQGAPQINLSGHWQAFARENPLNFAEAVDFQASLCDAGLAPKSITSPEYAGLANYAYHLDAGKFADLLRDHAVEKLGVIHMVDDITEVHQDEAGDLTGLTLRGAGRVDGDFFVDCTGFASLLLGGTYGVPFKDCSDVLFCDRALALQVPYDRPDAPIATHTISTAQDAGWIWDIGLPTRRGTGHVYSSRHMSDEAAEESLRRYLGPAADGLSPRLIKIRAGHRASFWTHNCVGVGLAAGFLEPLEASALMLIETAVDFIADRLPANRAVMDTLSRQFNRAFTHHWDRIIEFLKLHYVLTKRTDTAFWRDNLDPASIPLELREKLELWRYHPPGPADFPHQPEVFSWPSYQYVMHGMGFAADYSGLAQVKAEAASARRAFAQAERARQQALRDLPRHRDLLNRIQQYGLQPV

SEQ ID NO: 83946 - protein, 528 aa, Alteromonas stellipolaris
  misc_feature (1)..(528): tr|A0A0S1YJT0|A0A0S1YJT0_9ALTE Tryptophan halogenase OS =Alteromonas stellipolaris LMG 21856 OX=1160720 GN=AOR1 3_1413 PE=4 SV=1
MAVANQKEANQQATDQQTRDHQEAKHTPVKRVVVAGGGTAGWLAAALLKKVIGEAVNITLVESEAIGTVGVGEATIPPIRLVNQVLGIDEATFLRDTKATIKLAIRFENWKQQGQHYYHTFGAPGKSMAFCHFHHFWLKARQQGLKHDLWDYDLNYLAAEAGKFARINAKDPVLELPFAYHFDASLYAQYLRKLSEGMGVRRVEGKISHVSRHKLSGNVKALHLENGHAIDGDLFIDCTGFRGLLINETLGAGYDDWSHLLPCDSAIAVPSERHENTAPFTRSIAHDAGWQWRIPLQHRNGNGHVYSSRYISDNQAHDTLMANLDTKPLGDPKLIKFTTGRRRQQWYKNVVAVGLSSGFLEPLESTSIHLIQSAIVRLIKLFPHQGISDSAVAEYNAQSKVEFEQIRDFLVLHYCLNEREDSDFWRDMRHLTLPDSLVHKMALFKQNGNLVREQSDLFLESSWLQVMYGQGLVPEDYHGLTNSFSDEKTQAMLASLYKIKREPIASLPTHDAYIQSMIDSANKTSVSF

SEQ ID NO: 83947 - protein, 504 aa, Asticcacaulis sp.
  misc_feature (1)..(504): tr|V4PD22|V4PD22_9CAUL Uncharacterized protein OS=Astic cacaulis sp. AC466 OX=1282362 GN=AEAC466_04830 PE=4 SV= 1
MSQEAIKKVVIAGGGTAGWMTAAWFSKILRDDFDEIVLVESEEIGTVGVGEATTPYIHVFNRCLGIDEDAFVRFTKGTFKLGIEFVNWGRQGHAYHHSFGPYGREYGALPFHAIWLRHYLENPQDRLENYSLQSVASLNGRFMRPTGANSPLAEIAYAYQFDASLYARFLRSISEAAGARRIEGKIQTVKLDAEGAIESLCLTDGRIVDGDLFIDCTGFRALLLGEALGVGYIDWSKYLPCDRAIAVPTRREGAPAPFTRSTALSAGWQWRIPLQHRDGNGHVFSSAFMDETKAMDDLFANLGSAPIGDPRPIRFTTGRRETFWKKNCIAVGLSAGFLEPLESTSIMLIQNAILRLQYLFPDKGFAAADTAAYNAAMVREYEDIRDFLILHYKVGVRQDSEFWRYCQQMDIPDGLQHRIDLFSSRGRIPEERGEQFRTPSWLAVMVGQGLCPAAPDPLSLSIPSDRVETWLSDLRSVIGNCLSRMPMHQDFIARYCQAEGLEVA

SEQ ID NO: 83948 - protein, 503 aa, Azospirillum sp.
  misc_feature (1)..(503): tr|A0A239HXY9|A0A239HXY9_9PROT Tryptophan halogenase OS =Azospirillum sp. RU38E OX=1907313 GN=SAMN05880556_1131 32 PE=4 SV=1
MGESLPGEILIVGGGTAGWMAAAALARTLNRQARITLIESGSIGTVGVGEATIPAIRHFNRLLGFNEGDFLAFTQGTYKLGIEFRNWRREGHSYFHPFGVYGSSLDASYTHQYWLRLRQLGEGGELADYSLCSVMAALGRYTAPASANSQRDRDILPSIGSAYHFDAALYAQYLRLYAERLGVVRLDRNIVDVVLRGEDGFIEAVVAEGGERLKADFFIDCTGFAGLLIEKALKAGYEEWTHWLPCDRAWAVPSASDGRIVPYTRSTARDAGWQWRIPLRHRVGNGYVFSSNHLGEEAACQTLLSSLDSAALAEPKLLRFTTGRRRQAWVKNCVSLGLSSGFLEPLESTSIHLIQTGITRLLDLFPGKRIEPAEVAEYNALTQAEYEAVRDFLILHYHVTERTGSPLWNDCRTMAIPDSLRQRIDLFRQRGRVSTRGRALFSDTSWLSVLLGQGIMPETYDPLVDVHALDAIRERMGTMRRRIRQAAEAMPTHEAYLAGARAA

SEQ ID NO: 83949 - protein, 496 aa, Asticcacaulis sp.
  misc_feature (1)..(496): tr|V4P4U5|V4P4U5_9CAUL Uncharacterized protein OS=Astic cacaulis sp. AC466 OX=1282362 GN=AEAC466_18635 PE=4 SV= 1
MSAQGVKKVVIAGGGTAGWCAAAALSRLLGPVLDITLIESADIGIIGVGEATIPTVRAFHHLLSVDEQAFMRETDATFKLGIGFENWAREGDQYFHSFGTIGKSPWMGHFYNIWLEGRSRGIGGSLDDYSLETKAAKAGKFQIHKNLPINYAYHFDAVMYGKYLRKLSESGGVKRHEGEIKSVQQQAETGFITSVTLASGEVISGDLFIDCTGFRGLLIEETLHTGYEDWTHWLRTDRAVAVQTQPAGPPLPYTKSIAHADGWRWRIPLQSRVGNGLIYASAHLSDEDAEARLMASLDAPAVNTPRLIKYRTGRRKQIWNKNCVAVGLASGFIEPLESTSIHLFQKSVLDLVQNFPFFGINDTLVAHYNRLAQQEIEYARDFVILHYKLTERSDSAFWRENAGMDVPDSLKERIELFQESGLAFQGPGELFRTDSWAQVMLGQRLEPKGWHRLGALMNEGELNQVFAGLKSTIDDTVAKMLPQDAFLKQYCPTAVV

SEQ ID NO: 83950 - protein, 507 aa, Pelomonas sp.
  misc_feature (1)..(507): tr|A0A0Q7RU47|A0A0Q7RU47_9BURK Tryptophan halogenase OS =Pelomonas sp. Root1444 OX=1736464 GN=ASD35_10805 PE=4 SV=1
MRSQALKKVVIVGGGSAGWITAAPLARLLCRPGQPDHCEVTLVESAEIGTIGVGEATLPTISFYNQLLGIDEAEFVRKTQASFKLGIEFSDWGRVGHRFFHGFGGFGPGIHNRPLWAYWLRLREQDPQLPSYEEWSTATVMARNLRFTRPQPDTPSPAGAFNYAYHFDATLYGNYLREHAQRHGAQRIEGTIVRVETSEENGQVTTLHLSDGRRVDGDLFIDCSGFRALLIDGAMKSPYEDWSSWLPCDRAMAVPCQRTDPMTPYTTSTARSAGWQWRIPLQHRTGNGLVYCSSHLSDDEAAGLLLGNLDGAALDKPRQQRFVTGRRKQAWVKNVVAIGLSSGFLEPLESTSIHLIMEAVGRLTALLPDRSFQPTLADEFNRQMARRYESVRDFIILHYKLTERRDSEFWRHCADMPIPDDLAHQITLFRETGRVAILEPEGFGEASWASILLGLGVVPRRHDPYVDQVDIDIVRRHLASVHSAIRNAVRTMPSHADFLASANGSGP

SEQ ID NO: 83951 - protein, 538 aa, Oceanicola sp.
  misc_feature (1)..(538): tr|A0A5B8BXY3|A0A5B8BXY3_9RHOB Tryptophan 7-halogenase OS=Oceanicola sp. D3 OX=2587163 GN=FHY55_19665 PE=4 SV= 1
MGEPIREVTIVGGGTAGWMTALLLQSMLKGGPEGGVRVTLIESPNIPTVGVGEATVPGMPRTLKQGGIDEREFFRTCNASFKLGVVFGHWNEDAEGNRVDYINPFAHPPAIDGVSAAEYALEFGTGGLDFVQTFSPSVDLAAEAKGPRGRGQMPGPPVGFAYHLDAGKFAGLLKEHCVVRGVVHVLDDLVEVELDERGYVAALQLERGGRHPVEMVIDCTGFRGLIINKALGEPFESYGKYLANDRAMAVQVPHRDPERLDSVTKSTALGAGWAWRVPLFNRIGTGYVFSSAHRTDEEARAEFLAHLGEDGEGAEPRVIPMRVGRNRNAWVKNCVAVGLSGGFIEPLESTAIHMIDTAVRWLVAYFPDRDFADPLRNRFNHLVDELYNEVRDFICLHYALGNRTDDQYWIDAREELEVPDSLAENLELWQYGLPTHHDIRFVSLFSPMTYQAVLLGKRVYETGYGKGKFATGRRLDPAKWEAYLARARAGIGAQVQAAAGHRELLRALRGDVVEENGLLPGLGGGPGMVKGEGEAAIL

SEQ ID NO: 83952 - protein, 505 aa, Asticcacaulis sp.
  misc_feature (1)..(505): tr|V4QY50|V4QY50_9CAUL Uncharacterized protein OS=Astic cacaulis sp. AC466 OX=1282362 GN=AEAC466_09975 PE=4 SV= 1
MTAGIIRNIVIVGGGTAGWMAAAALSKVLGTQKYSLTLIESDEIGTVGVGEATIPTIQEFNRMLEIDENTFMRETNASFKLGIRFLNWSAQGSDYFHPFGTYGLDMNGINFTHYWMRYHLAGGSADFGLFNPQTLAARQNKFGRMAEINPKAPNVNYAFHFDASLYAKFLRAYSEEKGVVRREGKINAVAQAPDSGDVESVTLEDGGTINGDLFIDCSGFRGLLIEQTLKSGYTDWSHWLPCNRAVAVPCEKTRPITPYTQSTAREAGWQWRIPLQHRTGNGYVFCDSYLSEDKASELLLQRLDGKAQAEPRVIRFVTGHRTKQWNRNVVAVGLASGFLEPLESTSIHLVQEAVLTLLRYFPGKVITDTLRDCFNRDMLAAYDNVKDFLIAHYKVTKREDTDFWAHCKRMEIPDSVKFRLAAFEEHNHSLVEANELFKEASWFAVLVGQGLRPLSYAPQADVMAKEEFDWRMDRIREGTAALAGVMPLHESYIAGVCASRQRVGT

SEQ ID NO: 83953 - protein, 507 aa, Asticcacaulis sp.
  misc_feature (1)..(507): tr|V4PIM0|V4PIM0_9CAUL Uncharacterized protein OS=Astic cacaulis sp. AC466 OX=1282362 GN=AEAC466_05910 PE=4 SV= 1
MTATDRSIRKIVIVGGGSAGWMTAAALSNALQTGCHITLIESEEIGTVGVGEATIPAIKMFNQTLGLDENAFLKRTQGTFKLGIQFVDWGRRGHSYFHPFGTYGRPFDTVNAHHFWQRAFEAGRASSLDDYCMAWAAASRGRFAPPSTDQRNVLSTYDYAYHFDAGLYARFLREYAEARGVQRMEGKVSDVAMDAMSGHVTSVQMEDGRCIEGELFIDCSGFRGLLIEGALKTGYCEWTDWLPCNRAVAVPCAATPEPIPYTRATARDAGWQWRIPLQHRTGNGYVYAADHISDEAAADELMANLDAPTLAAPRYLRFVTGRRRLFWNRNVIAIGLSSGFIEPLESTSLHLIQAGIAKLLAFFPDLGFDPMTRDEYNRVATNEIERIRDFIILHYRLTQRTDSALWRYCAAMGIPDTLAEKIEHFRQHGRLIQRDFELFGPASWLAVQIGQLNTPQKTDPLMAYRTLDAAPWLDKLREAMAAAAAGLPTHGAYIDRYCKAEQDPLSC

SEQ ID NO: 83954 - protein, 536 aa, Streptomyces sp.
  misc_feature (1)..(536): tr|A0A345HMJ5|A0A345HMJ5_9ACTN Tryptophan 7-halogenase OS=Streptomyces sp. GSSD-12 OX=2282738 GN=DVK44_09645 P E=4 SV=1
MSASGTDNRQANDPGRKKRVVIVGGGTAGWMTASYLVAAFGDRIDVTVVESARIGTVGVGEATFSDIRHFFEFLQLAESDWMPACNATYKLAVRFEDWREPGHHFYHPFEQLGSVDGFPLSDWWLRSPTTSRFDKDCFVLASLCDAGRSPRYLDGKLIDQGFAEQERDETSARSTIVEYQGTQFPYAYHFEAALLAKYLTKYSTQRGVRHISDDVTDVALDEDGFISHVRTAGHGRLDGDLFVDCTGFRALLLNKALGEPFESYQDTLPNDRAVALQVPLDMDREPMRPCTTATAREAGWIWTIPLVSRIGSGYVYASDYTTPEEAERTLRAFIGPAAADVEANHIKMRIGRSRRSWVKNCVAVGLSSGFVEPLESTGIFFIHHAIEQIVKYFPSGRDDHHLRNLYNESIEHVMDGVREFLVLHYVGAKRADNQYWKDTKTRRIPDSLAERIEIWKHKVPDAQTVFPYYHGLPPYSYNCILLGAGGIEVRHSPALDLADDRAALAEFERIRLKAEKLVQELPTQNQYFANMRAGAV

SEQ ID NO: 83955 - protein, 508 aa, Pelomonas sp.
  misc_feature (1)..(508): tr|A0A0Q7RWB4|A0A0Q7RWB4_9BURK Tryptophan halogenase OS =Pelomonas sp. Root1444 OX=1736464 GN=ASD35_09980 PE=4 SV=1
MSLLQDIVIVGGGTAGWMTAAALSTVLRGRYRIRVVESDEIGTVGVGEATIPMIQRFNRVVGIDENEFLRETGGTFKLGIEFVDWGRVGDRYMHGFGRLGQDLWSVPFEQYWHRMRALGRAQPLEQYCITRMAAKANKFMPPRTDFGNSPLADIAYAYHFDAHLYARYLRGLSEARGVLRTEGRITHATRRGEGAHAGHVDAVVLESGERIAGELFIDCSGFRGLLIEQTLQTGFEDWTHWLPCDRALAVPSESVKPLTPYTRSTAHRAGWQWRIPLQHRIGNGHVYCSAHVSDDEAAATLLAHLDGKPLADPRPIRFRTGMRRLAWNENVIAIGLAGGFLEPLESTSIHLIQQAVQQLLDFFPDRGFSAPDIAEFNRHSRFHWERIRDFIILHYHLNQRDDSAFWQACAHMTVPDTLREKLDLYRSHGRIVRRDNELFSEVGWIQVMEGQNLTPLRHHPLAELRDEPDTVEYLEGVREVVAKCVAFMPDHAAYVAEHCAAKPAPHPA

SEQ ID NO: 83956 - protein, 493 aa, Fischerella sp.
  misc_feature (1)..(493): tr|A0A1Z4TVZ5|A0A1Z4TVZ5_9CYAN Putative tryptophan halo genase OS=Fischerella sp. NIES-4106 OX=2005456 GN=NIES4 106_59260 PE=4 SV=1
MSTLPKSTQVLVIGGGPAGSTAATLLAREGFDVTLVEKAVGPRYHIGESLLPSSMEVLELIGVKEKVDAYGFQRKDGAYLEWGSESWSFEFTKLNGKQKHSYQVRRADFDKLLLDHASSQGVKVFEGIEVRELSFNGTRPRNAIWSQTSGGNSSGELSFNFVIDASGRAGLMATRYLKNRRQNNVFQNVAVWGYWKGASKLTKGPEGAIGVGSIPEGWLWAIPLHDGTLSVGVVLHREAYKAQRSASLKEFYLNAIAECPLVAELLTQAELVSSVEAEQDFSYTSESLCGPGYFLVGDAACFLDPLLSTGVHLANFSGMLASASIASVLRNEVTEDQALSFYEKSYRQAYLRFLMLVSFLYDQKRGQKAYYQEAQELTHNDYKADAANAAFVNIVSGMEDLTEVQDGIDYQVTKKISQRVAKSISIDDFRKNYDPEVLDPQIMQAMEGTLSFSKDLSVEAAIDGFYIVTQPRLGLSRVQHKAEELLSSELFHS

SEQ ID NO: 83957 - protein, 513 aa, Pelomonas sp.
  misc_feature (1)..(513): tr|A0A0Q7SFN1|A0A0Q7SFN1_9BURK Tryptophan halogenase OS =Pelomonas sp. Root1444 OX=1736464 GN=ASD35_18535 PE=4 SV=1
MNTRLRQIVVLGGGSAGWLVAGLLAAEHGGPDGPLCITLIESASTPPIGVGEGTWPSMRDTLRRIGISEVDLIRECDASFKQGSRFDGWASGREGDRYHHPFTLPTGCGEADLVAAWLAEHADRPFAEVVCPQTAVCDAGLAPKQAATPQFAAVANYAYHFDAGKFSQLLRRHAVGKRGVRHIVDDVEAVLPAADGSVAALRTRTSGDLAADLFIDCSGLPSLLIGGHHGVPLVEQRDVLFNDAALAMQVPHAEPDAPLASCTIATAWSKGWIWDIGLPQRRGVGAVYASRHATQDEAAEALRHYLRATGAPQPLPAMRPISFTPGYRERFWVGNCVAIGLSSGFIEPLEASALAMVELSVQWISESLPADRAALPTLARRFNEVFAYRWRRVIDFLKLHYALSQRDDSAYWREHRDPASWPEALRELLPLWRERPPSRLDLGRIDEVFPWASYQYVLYGMGFRPESTARPAAAQAAAPHLQAAAALSRRMLGGLPKHRALIDHIIRSGLPHI

SEQ ID NO: 83958 - protein, 432 aa, Mameliella sp.
  misc_feature (1)..(432): tr|A0A2E9I6D1|A0A2E9I6D1_9RHOB Tryptophan halogenase OS =Mameliella sp. OX=1924940 GN=CMF72_23155 PE=4 SV=1
MLNGAPLAAYYLKYGAGDLDFVYLFSPCLDLRDGLCGPRPFRAGEFAQGAGFAYHLDAGKFSAFLRDTCIARGAVHIFDNLQDVELDETGKVAALHLEKGGRHDVELVLDCTGFRGLIINKALGGEFISYSKYLVNDRAMAVQVPHLSDDIEPMTRSTALGAGWTWRVPLFNRVGTGNVFSSAHRTDEQARDVLMSWVGPAGEGLEPRVIPMRIGRNRENWVKNCVAVGLSAGVIEPLEPTAIHMIDMAVRALITYFPDTSYAAPLRRRYNRQMERLYDEVRDFICLHYALGNRTDSQYWVDAREELAVSDTLAENMALWRYALPQPGDLDSAVLFSAQVYRAVLLGKRVYDMGYKADNFAAGYALDENRWWDFVAKRRARYAEFADRGANHRHLLREIRGELVGRERRGVERGETVDTPRAMSELSENSML

SEQ ID NO: 83959 - protein, 523 aa, Sphingomonas turrisvirgatae
  misc_feature (1)..(523): tr|A0A1E3LSG1|A0A1E3LSG1_9SPHN Tryptophan halogenase OS =Sphingomonas turrisvirgatae OX=1888892 GN=BFL28_04410 PE=4 SV=1
MGGGTAGWMAALLLQRAFPNASLTLLESSAIGTIGVGEGSTPALKSFFDAVGIDEHAWMPTCGATFKSGIRFDDWSRVPGFESYFHPFLTQFDRDHIRALAYNSELRRRGVDVHAHPDLFCYSAYLADRALCPVPPHSFPFDVQYGYHFDANRLAAFMKASAQARGVVCRDGLARHVRRDERGDVSAIELDDGATIAADFFIDCSGFASVITKNALGISYETYGDALFNDRAVTFATPPVPVAASHTTATALPCGWVWHIPQQERTGNGYVYSSAHRSEDQAASELAAHLGVAENAITPRTLRFSTGRATTVWNRNTLAVGLAQGVLEPLEATALALVQLTLARFIRYWRAGQGNARYASQLNDEIADAYANVKDYLHTHYLTSNRDDSGYWRACRANGSAISPRLKAVIETWFSGGDIAPVLHETGLGRHYKLNSWLYLLSGMGIYPRGVALTPASREQLDKVPPASIRDFFERCTLNHLPQADALARLRAGLPAEEGAAATDPDLALERMLGLDFAAASPR

SEQ ID NO: 83960 - protein, 505 aa, Cupriavidus sp.
  misc_feature (1)..(505): tr|A0A5C8A199|A0A5C8A199_9BURK Tryptophan 7-halogenase OS=Cupriavidus sp. OX=1873897 GN=E6Q40_15220 PE=4 SV=1
MDMYRKFVVVGGGTAGWIAAATLIQAMKGRVGEVELIESDEIGTVGVGEATIPPIQFLNGLLGIDEIDFVKKTQATFKLGIQFRDWSKLGAEYFHPFGVYGQPIDGVGFHHYWLRLREQGEGGSLDSYALSAVAAKAGKFALPPKELPPGVPGLGYAYHFDAGLYAKYLRDYAETRGVKRTEGKIAKVEQDPQSGFVTGLTLTDGRRVEGDFFVDCSGFRGLLIEQALEAGYEDWSHWLPCDRALAVPCENAYRLTPYTRSTAREAGWQWRIPLQHRTGNGYVFCSSHIGAVAAAQTLLANLDGKALADPRSLRFTAGRRKKSWSKNVVALGLAGGFMEPLESTSIHLIQTGAMRLLSLLPIGGYDPAAEAEFNRLTQIEYEQIRDFIVLHYKATQRDDAELWRYCRDMAVPDSLAHKIELFESRAKIARFDEQLFAEPSWLAVFLGQGIWPRDYDRLADVPTYDEAVSALLRIGRMNADIVTRLPTHDAFIAATCKADSIRSSE

SEQ ID NO: 83961 - protein, 532 aa, Erythrobacter sp.
  misc_feature (1)..(532): tr|A0A3N5DJN4|A0A3N5DJN4_9SPHN Tryptophan 7-halogenase OS=Erythrobacter sp. HN-E23 OX=2488860 GN=EG799_04360 P E=4 SV=1
MTNSEGIVNINAVDRVVIVGGGTAGWMAAAALSRYFDNGRRKIVLVESDAIGTVGVGEATIPPIASFNAMLDINENDFLRATRGTFKLGIEFVNWGRLGDRYFHPFGTYGQDLHGIKFHQLFLREAARGGPRSIADFSMSTAAAAAGRFGRPAPGAQSLVSQIAYAFHFDAGLYASFLRKMAEKQGTRRREGRIVRVHRNAENGDVTGVELDGGEVVKGDLFLDCSGFRGLLIEEALETGYEEWSRWLPMDRALAMPTANTRSPPPFTRATAHGAGWQWRIPLQHRTGNGHVFCSAYTNADDAETTLRDHAEGEPLADPRLLRFVTGMRRKAWNHNVVSLGLSAGFIEPLESTSIHLIQNGIARLFALFPEREISPLERDEYNRGMRELYEDVRDFIILHYKATQRNDTPFWRYVREMDVPESLTRKMALWRLHGRIFRENAELFSEPSWIAVMLGQNVWPDRYDPIADTLDEHRVASAMAQMREAYHRTAQGLPTQEEFLRQAGAWHEEGPTGAPPSPAPFASFHATGGFR

SEQ ID NO: 83962 - protein, 517 aa, Sphingobium sp.
  misc_feature (1)..(517): tr|A0A0Q4IQT5|A0A0Q4IQT5_9SPHN Tryptophan halogenase OS =Sphingobium sp. Leaf26 OX=1735693 GN=ASE85_22075 PE=4 SV=1
MRKTILIVGGGTAGWLTAGYLARRLGADLPGGVEICLVESAEIGILGVGEGTFPTIRRTLATIGIDEAEMVRRCGASFKQGAKFVHWRHAPGQAGPDHYSHPFQVAESPNGMELLPYWLLGAGGDSNWDDVCGPQKMAMDACRAPKLPSHPDYVAPLNYAYHFDAVTLAAMLRDKAVENGVDHKVDQVTDVFVGEDGAIDGVRTARHGILHADLYIDCTGFRAELIGKALGMPYRSCRDVLFCDSAMAMQVPYDSPVDPIASCTISTAQDAGWIWDIGLEKRRGIGHVFSSAHMDDTAAEDRLRAYVGPASERLECRKFRFEAGYRETNWHKNCVAIGLSSGFFEPLEATGIVFSEIAAGMVANLFPWGGDYETSARQYNLNMRKRYERTLDFIKLHYCLSERRDTPFWIENVDPASVPDSLLELLDRWRFRPPTEMDIDLQVDIFSEMSWQYVLYGMGWKTDLSAKAGVYRYREEAIQAFANVRRQADFAIANLPSNRDLISQAHRGHFGERSAAA

SEQ ID NO: 83963 - protein, 513 aa, Sphingomonas sp.
  misc_feature (1)..(513): tr|A0A0Q5UXI0|A0A0Q5UXI0_9SPHN Tryptophan halogenase OS =Sphingomonas sp. Leaf198 OX=1736299 GN=ASG20_02090 PE= 4 SV=1
MHQIRNIVIVGGGTAGWLTAGVLAARHKGQREHGFTVTLVESPNIPTIGVGEGTWPTLRATLRKMGVSETELFRHCNAAFKQGARFNRWTTGAVDDGYYHPLMLPQQFGSLNLAPHWLAEDGHDSFCDAVTPQGRICDEGLAPKTMATPEFDGVANYAYHLDAGKFSHFLQRHCCDTLGVRHVLADVTEVILDETGDIARVETAQGVSIKGDLFIDCTGFAAKLIGEAMGVPFRSCTDTLFCDTALAVQLPYERPDDPIASHTISTAQSAGWIWDIGLPHRRGVGHVFSSSHIDVDAAERELRAYIGPAGKDLPVRKLSIRAGHRETFWKGNCVAVGLAAGFLEPLEASAIVLIELSAKMIAEQMPVCREVMDVVANRFNATTTYRWGRIIDFLKLHYTLTKRTDTDFWRDNVRPESIPDRLRGLMELWQYQSPWIHDEFDRAEEVFPSASYQYVLYGMGARTAVMPGTIEADAELARRARRENHVQTQRMMSSLPGHRDLIDRIVKHGLQPI

SEQ ID NO: 83964 - protein, 512 aa, Amycolatopsis antarctica
  misc_feature (1)..(512): tr|A0A263D591|A0A263D591_9PSEU Tryptophan halogenase OS =Amycolatopsis antarctica OX=1854586 GN=CFN78_08655 PE= 4 SV=1
MIGSVVIVGGGTAGWMTATYLKAAFGERIGVTLVESEQVSRIGVGEATFSTLRHFFDYLGLDEADWLPKCAGGYKLGIRFENWSKPGEHFYHPFERLRTVDGFTMADWWLELGDRSMPFDRQCFITTALCDNKRSPRMMDGSLFAAGLDGSLGKSTLEEQRAQFPYAYHFDADAVAQYLAKYGTDRGVRHIVDNVENVGQDERGWITHVDTKSHGKIEGDLFIDCTGFRGMLINQTMGGEFDSFSDVLPNNRAVALRVPREEATEMNPYTTATAMSAGWMWTIPLFRRNGNGYVYSDQFITPEEAEQELRDAVAPGRDDLQANHIRMRIGRNKQSWVKNCVAIGLSSAFVEPLESTGIFFIQHAVEQLVKHFPDERWDPRLMRDYNDRVGHVVDGVKEFLVLHYKSAQREDTPYWKEAKIREMPAGLAERLELSGSHLLDDETIYPRYHGFENYSWNAMNLGLGNIPPRARPAIKHLDPANARREFANLKAEGEAMVAALPSCYEYLASIND

SEQ ID NO: 83965 - protein, 507 aa, Sphingomonas sp.
  misc_feature (1)..(507): tr|A0A0Q5V5L4|A0A0Q5V5L4_9SPHN Tryptophan halogenase OS =Sphingomonas sp. Leaf198 OX=1736299 GN=ASG20_05120 PE= 4 SV=1
MNDRALRSIAIIGGGTAGWMAAAAVSRVLGTHNVAITLVESEEIGTVGVGEATIPPIQAFNALLGINEDAFVKATMGSFKLGIEFVDWLRPGTRYFHPFGVYGTDIGAVPFEGLWHRLRRQGLADPLEAYSICAQAAKDGRFMRPLADGGNTPLHRIGYAFHFDASLYARFLRTHAEAAGVVRREGRVVDVALRTADGFIEAVTLASGARIEADLFVDCSGFRSLLLGETLGTGFEDWSHWLPNDRAIAVPTASNGPPTPFTRSTARDAGWQWRIPLQHRTGNGYVFSSAHLSEDEATATLLANLDGEPLADPRTLRFRTGRRDAFWVKNCVGLGLSSGFLEPLESTSIHLIQAGIARLLEMLPTRDFEAADIRRYNRLMTAEYDSIRDFIILHFHATERADTPYWDHVRTMAVPETLAERIRIYQATGRVFRESDDLFSKTSWLAVMDGQGLRAEGFDPLAASLSVDDAQARLARIAAVTAAAAARMPPHAEFIARHCAGAIASRT

SEQ ID NO: 83966 - protein, 497 aa, Aliikangiella marina
  misc_feature (1)..(497): tr|A0A545TCU4|A0A545TCU4_9GAMM Tryptophan 7-halogenase OS=Aliikangiella marina OX=1712262 GN=FLL45_08830 PE=4 SV=1
MTKSLIKNVVILGGGTAGWMSAVLIKKVMGSVVNVELVESEAIGTIGVGEATIPPIQLFNSVLGLNEAEFLRETKATIKLAIKFDNWKELNHSYYHTFGAAGKSLAFCHFHHLLQRAQNLGHQSHLWEYDLNYLCCEAEKFAKINTQDPILEMGYAYHFDASLYAAYLRKLSEQMGVKRTEGMVNDVKQHKESGFIESLILKDGQEIQGDLFIDCSGMAGLLTEKKLNTGYEDWSHWLRCDRAVAMPSERFENTLPYTRSIAHTAGWQWRIPLQHRNGNGLVYSSHHYSEDEAVNILTDNLESPSLGDPNFIRFRTGRRRKQWNKNVIAVGLSSGFLEPLESTSIHLIQSAIVRLLHNFPHQGIDESQVAEYNKQSKIEYEQIRDFIILHYHVNERTDSQFWIDVRHMDIPASLKHKIKIFKENGQLFREQEDLFAESSWLQVMMGQGIQPRDYHPLADGVPQDKLFNMLDQIKAIKQEPLAKLPTHDEFLNKLCNT

SEQ ID NO: 83967 - protein, 532 aa, Streptomyces aurantiacus
  misc_feature (1)..(532): tr|S3ZP19|S3ZP19_9ACTN Uncharacterized protein OS=Strep tomyces aurantiacus JA 4570 OX=1286094 GN=STRAU_2393 PE =4 SV=1
MEDHRIKRVVVLGGGTAGWMSASYLGKALGPDVSITVIEAPQVGRIGVGEATVPNLHKTFFDYLGFTEEEWMRECNASFKMGIKFTNWRTPGTGEATARALGQGEDSFYHLFGLLANSDNLPISHHWTHQKLTGQTDEPFDYACYREPPVMDLNLSPRYMDGTKWTNYAWHFDANKVADFLCRFAVEKQGAIHIQDKMTGAEVDERGFITCVKTETGRVIEGDLFIDCSGFRALLINGVMREPFLDMSDHLLNDSAVATAVQHDDEAEGVEPYTGAIAMSSGWTWKIPMLGRFGTGYVFSSRFQSRDDATLEFCKMWGLDPETQPLNQIKFRVGRNRRAWVRNCVSIGLASCFLEPLESTGIYFTYAALYQLAKHFPDKRFDPILQSRFNAEIETMFDDTRDFLQAHFSFAPRNDTAFWRACKDLELADDIKEKMAMYRAGLPVNMPITDETTYYGNFDAEFRNFWNNSNYYCIFAGLDHMPEHTLPILAARPDMVDRSQAVFEGIKAKQKELIATLPSTYEYLRKLHGKTG

SEQ ID NO: 83968 - protein, 496 aa, Colwellia hornerae
  misc_feature (1)..(496): tr|A0A5C6Q3P8|A0A5C6Q3P8_9GAMM Tryptophan 7-halogenase OS=Colwellia hornerae OX=89402 GN=ESZ27_16580 PE=4 SV=1
MSHTIKKVVILGGGTAGWISAALLKKLLGSAVSIELVESEKIGTIGVGEATIPPIQHLNNVLGINEVEFIRETKATIKLAIKFEHWKTQGHSYYHSFGAVGKSPAFCHFHHLLKRDNQLENDEHLWQYDLNYLCAEAGKFAKINSKDPILDMPYAYHFDAGLYAKFLRKLSEKMGVVRKEGIVEQVKQCNESGFIQALKLKSGQEITGDFFIDCSGIAALLIQKKLNTGYEDWSHWLRCDRAIAVPSERAETTLNYTRSIAHESGWQWSIPLQHRNGNGLVYSSNYCSEDKAMDLLMSNLEGKAIADPKIIKFQTGRRYKQWNKNVVAVGLSSGFLEPLESTSIHLIQSAVVRLVHLFPHHGVNDTLVTEYNKQSAVEYDQIKDFLILHYHVNQRENSDFWRDMRNMDIPDSLRHKIEIFKENGRLFRDQNDLFLENSWLQVMIGQGIVPRDYHPLANNMSLAQLQATLKKIKEIKQEPMSKLPSHDDFLKHIMKI

SEQ ID NO: 83969 - protein, 517 aa, Sphingopyxis sp.
  misc_feature (1)..(517): tr|A0A1L3J9Q7|A0A1L3J9Q7_9SPHN Uncharacterized protein OS=Sphingopyxis sp. LPB0140 OX=1913578 GN=LPB140_02500 PE=4 SV=1
MNKDDKIQSIAIIGGGTSGWSTAALLGAILKDSGVKITLIESSDIPTIGVGEATIPPIFEFLRNIGADEVEFIRQCQATFKLAILFKNWVRQGQQYWHPFGNLGITINQRPFHHYWWKNKTHGHDENFADFCPAIALAEDNKFAFPSPDGNWPGGAVAYAMHFDAGLVAKFLRDHSQKAGVIHHDAKVERSKVRDGEWIDGLILNNGDELTADLYIDCTGFRGLLIEEALQSGYVDWSNWLPCDRAVAVQSEPHETRTPYTIATAKEAGWQWRIPLQNRIGNGYVYSSTFTDDDRAAQSLLDGLDSPKLAEPRFLKFTAGYRKSGWIGNCIAIGLSAGFLEPLESTSIHLIHTGLNRLLDYFPDKNFDPALRRAYNAEIEAEYSHIRDFLLLHYYPNQRHGEPFWDAMRHNKLPDSLAHKMELFAQSGRISSRRKELFSDMSWFYVAAGMEITPKYIDPLADIAPFDEVCNIMGQMKGAMAAYRHAAPTHDAILNMLIDPNEKRRPNFGVGAGWSGR

SEQ ID NO: 83970 - protein, 506 aa, Limnohabitans sp.
  misc_feature (1)..(506): tr|A0A315DP81|A0A315DP81_9BURK Tryptophan halogenase OS =Limnohabitans sp. 2KL-1 OX=1100699 GN=B9Z47_13450 PE=4 SV=1
MQQAPLIRSIVIVGGGTAGWMTAAALATMLKGRYPIRLIESDEIGIVGVGEATIPMIQRFNKVLGIDEAEFMRETMGSFKLGIEFVNWGRQGDRYMHGFGKIGQDLWTTRFDQYWQKMRRLGKAAPLENYAITRMAALANKFMPTPDGVQNSPFNDIAYAYHFDASLYAKYLRKLAEQRGVLRTEGKITQVSQRPSDAHVDAVVLENGERIEGDLFIDCSGFRGLLIEQTLHTGFEDWTHWLPCDRALAVPCASASTLTPYTRSTAHQAGWQWRIPLQHRTGNGLVYCSQYISDDEAASVLLAHLDGKALADPRPIRFTTGMRQQAWNKNVVAIGLSSGFLEPLESTSIHLIQNTISQLVEFFPDQGFNPTQIAEFNRQNRFQMERLRDFVILHYHVNQRDDSAFWQACAHMAIPDTLQHKIDLYKTTGRVLRVDNELFAEDGWLQVMEGQNLRTQSYHPLVDLQSEDSIHEYLESVREVIAKCVSVMPDHADFIAQHCAAPKMNM

SEQ ID NO: 83971 - protein, 502 aa, Idiomarina homiensis
  misc_feature (1)..(502): tr|A0A432Y6I3|A0A432Y6I3_9GAMM Tryptophan halogenase OS =Idiomarina homiensis OX=364198 GN=CWI70_07650 PE=4 SV= 1
MTQPYHIVILGGGSAGWMTAAALSKVLDRQHYKIILVESSAIGTVSVGEATIPGIREFNQLLQIDENEFLRETQGSFKLGIAFENWQNIGDEYMHPFGPYGITLNGVPFHHYYLRHEREVGAGDAMPLHELNLEWSAALAHKFTRPIADKRSPLGHIKYAYHFDAHAYARYLKKYATARGVVALEDRMQTAKQHPNGAIASLMLEKQGELAGDFFIDCSGFKALLISETLGVSYHDWRKWMPCDSAVALPGEHDAADILPYTRSIAHHEGWRWKIPLQHRTGEGWVYSSRFTDSDKAEREFRETIGNFDSTANHLRWINGRRDEAWKHNVCAIGLSAGFIEPLESTGLQLTQSGIMRLISLLPGKGSMTERAQAFNRYTAEEITNIRDFVMCHYKLTDRDDSEFWRYCRDMEIPDSLQERLDLYHENGSIFRNSNNELFNEISWFSMFHGQGLTPAQVHPIAEQMPAETMQQHLATVQRIFKQSVAQLPSHADFIRKHCQAS

SEQ ID NO: 83972 - protein, 501 aa, Sphingopyxis sp.
  misc_feature (1)..(501): tr|A0A1L3JAP2|A0A1L3JAP2_9SPHN Uncharacterized protein OS=Sphingopyxis sp. LPB0140 OX=1913578 GN=LPB140_04555 PE=4 SV=1
MKNIVIAGGGTAGWMAAAAFARFLSPNYNIILVESDDISTIGVGEATIPPIRTFNAGLGIDEREFIQKTKGSFKLGIIFDGWGRPDQKYIHAFGDMGRPLGLISYYQYWLRANLAGNISTLWDASPSAQAAYQNLYSHLALKNGGHSGVAWAYHFDAGLYAKFLREYSESRGVRRVEGKIVQVNNNGQNGNVDSLILENGDEISGDFFIDCTGFRALLIGENQGAKFDDWSHFLPCDGAVTVPCADNGPLKPYTISKAHKAGWQWRIALQHRVGNGHVFCSEYMSADEAQAILLAHLDGEPYEEPRHIKFTTGRRRQWVKNCLALGLSGGFMEPLESTSIYLIQTAIARFLSLLPSGPQCEILAQEFERQSQIEWQGIRDFLILHYYANQRKEPFWARCRALEIPQSLKDRINLFQQSGQIFRHDEELFTEAGWVQLMVGQGIMPRAYHPLANKLDDAQLAEFINISGAHARDIAGKMVDHREFINLLLDRKIEPKFTGHL

SEQ ID NO: 83973 - protein, 520 aa, Aliikangiella marina
  misc_feature (1)..(520): tr|A0A545T183|A0A545T183_9GAMM Tryptophan 7-halogenase OS=Aliikangiella marina OX=1712262 GN=FLL45_21850 PE=4 SV=1
MTQPLVKKIVIVGGGSAGWLAAGLLAAEHNACAENGIKITLIESPNVPAIGVGEGTWPTMRETLDKIGVSETDFFRSCDASFKQGAKFCKWVDGKDDDAYYHPLVIPNGYTKTNLVHAWQHHKDKIAFADAVCYQGHLCEQGKAPKQISTPEYASVANYAYHLNAPKLGEFLKQHCTEKLNVELIVDHVIDINNDDDGYIESLTTQQNGRLFGDLFIDCTGLKSLLLGQHYQIPFQSKKDILFNDSALAIQVPYQNEDDPIASHTISTAQSAGWIWDIGLPTRRGVGYAYASDYISDEDAEKELRAYIAEKLDRDRVDELTVRKIQFNPGHREKFWHKNCVAIGMAAGFLEPLEASALVLIELAIAKISLDLPANREVMAIAEKRFNKLFLYRWQRIIDFLKLHYVLTKREDTSYWCDNCKPETIPDSLKEMLTFWKHQPPSPHDFTHINEVFPSASWQYILYGMGFETLPSHTDRKTSDYEKAINFFRETQQTTHQYLDALPSNRELINKILKYGMQSV

SEQ ID NO: 83974 - protein, 539 aa, Salipiger bermudensis
  misc_feature (1)..(539): tr|Q0FQ65|Q0FQ65_SALBH Tryptophan halogenase, putative OS=Salipiger bermudensis (strain DSM 26914 / JCM 13377 / KCTC 12554 / HTCC2601) OX=314265 GN=R2601_10012 PE=4 SV=1
MGQPLSSITIVGGGTAGWLAAVYLRRACAERIRITLIESPNIPTVGVGEATVPQMPFTLRQIGLDERTFFRRCDATFKTGVMFRNWNTDRKGKLVSYLNPFSNAPSLDGVSIGNHFHAFGAGKRDYVSCYSPYAHMAKAFKGPFSFKDPKADPMPKPAYAYHLNAVAFAKLLAEVGTERGIEHVLDDVDDVELDERGYVAALQLRERGRHPVELVIDCTGFRGRIIREALDEPFEDYSDYLGNDRAMALQIPHTNPEKLPPFTSSTALGAGWSWSVPLFNRVGTGYVFSSAHRTDDEARDEFLAHLGAAAPPGSEPRVIPMRIGRSRRAWVKNCIAMGLSGGFIEPLESTAIHMIDQSIRMLLFNMPSTDYEAPVRRRFNRLVDDLYGEVRDFICLHYRMGNREDSAYWIDARTELKITDRLAENLELWQYQLPTQHDLESAQLFTHDTYQTVLFGKRCYENGYGAERLNTPREVRAGSWKAYLRDADIRFAKIVDYKGDHHRLLMALRGELEPGAARKTPAVVAARTGSCLKETPVLF

SEQ ID NO: 83975 - protein, 497 aa, Shewanella sp.
  misc_feature (1)..(497): tr|A0A4Y5YGT4|A0A4Y5YGT4_9GAMM Tryptophan 7-halogenase OS=Shewanella sp. SM1901 OX=2588449 GN=FH971_13120 PE=4 SV=1
MNKSIKKVVIAGGGTAGWMAAAAFSKLLGKNLDIVLVESDQIGTVGVGEATIPTLHIFHRLLGLKEQDVMAATNATFKLGIQFENWHDVNKDYLHSFGFLGKDCWACGFQHFWLKGQQQNMVSQIGDYCTEHLAARQGRFAVLPNQDYNHAYHMDASLYAKFLRKFAEQHGISRIEGKIADVLQHEDTGNIRALQLENGELIEGDLFIDCTGFKALLIEQTLNTGFEDWSHWLPCDSAIAVQTEAVQKPIPYTRSIARESGWQWRIPLQTRTGNGLVFCSKYISDADATELLLNNIEGSPINQPRVIKFKTGTRRQHWNKNCIAVGLSAGFLEPLESTSIHMIQRSIVRLLQLFPSHGVIQADVDEFNQQTKIEMDNIRDFIILHYKVTDREDSRFWRYCKNMPIPASLQHRIDMFSQSGKVYKYGNELFGESSWIQVMMGQGLEPKEYHPIVDMMEEAELQSFLNSIKATVKRKVETLPAHHDFVEHYCKSTAMQG

SEQ ID NO: 83976 - protein, 496 aa, Sphingomonas sp.
  misc_feature (1)..(496): tr|A0A0Q5UXG2|A0A0Q5UXG2_9SPHN Tryptophan halogenase OS =Sphingomonas sp. Leaf198 OX=1736299 GN=ASG20_07600 PE= 4 SV=1
MTIPTPPVPLKTIVIVGGGTAGWIAAAMLARFVPRTTKIRLVESDAIGTVGVGEATIPQIRLLTAALGIDENAMLAATQGTFKLGIEFVDWTGPDSRYMHAFGAVGRGLGVVPFHHHWLRAQASGTAAPLGDYIASARAAADARFDRHPDLAYAYHFDATLLARWLRGLAEASGVDRIEGRIVTAQRDGETGDLTGVALDDGRAVEGDFFLDCSGFRSLLLGETLGVAFEDWSHWLPCDRAMAVACETTAPLLPYTRATARPVGWQWRIPLQHRTGNGLVYAAAHLSDDEAVSRLLANLDGVVIGDPRPLRFATGKRATFWERNVVALGLASGFMEPLESTSIHMVQSAVARLLSLFPSAGDNAAARTAYNRQTHVEYDTVRDFLILHYHANRRPEPFWQRCRDMPLPERLAEKIAQFRAAAILTQDVADLFTEPAWLQVMIGQGIHPVTWSPLAEALSPDHLAGFLADIRERHAATARELPAHADTVARHCMAKR

SEQ ID NO: 83977 - protein, 499 aa, Sphingomonas sp.
  misc_feature (1)..(499): tr|A0A031I303|A0A031I303_9SPHN FAD dependent oxidoreduc tase family protein OS=Sphingomonas sp. RIT328 OX=14705 91 GN=BW41_00831 PE=4 SV=1
MDPLAIRSIVVVGGGTAGWMAAAALSHMLTGVEIDLVESEAIGTVGVGEATIPHILYFNRLLGIDEAEFIRQTGATFKLGIEFVDWGRIGDRYFHPFGTYGQEMEGLHFHHFWYRQTRLGHALPLDRFSIGAQAAAAGRFQRPDQARPGSPLGTLNYAYQFDAGRYARFLRERAEARGVRRSEGRITTVRRAAETGHVEAVVLEDGRALGGDLFIDCSGFRGLLIDQTLAAGFEDWSHWLPCDRAVARACARVDAPLPYTRATAVAAGWRWRIPLQARTGNGFVYCSHYCDDEAALRSLDAALDGEPLSNPNVLRFKAGLRRKAWDRNVVALGLAAGFLEPLESTSIHLIQSGIARLLTNFPDRCFNQHDIDYYNRRTRIEYEQVRDFIILHYAATTRDDSPLWRHCRTMALPASLAERIAIFRENGRLYRHDNELFSETSWLAVLHGQGIAPKRQHPLAHQLPEQELDRRMAHIARAMDLTVERMPSHQDILDTIAGG

SEQ ID NO: 83978 - protein, 405 aa, Advenella kashmirensis
  misc_feature (1)..(405): tr|V8QX47|V8QX47_9BURK Tryptophan halogenase OS=Advenel la kashmirensis W13003 OX=1424334 GN=W822_06095 PE=4 SV =1
MIGAGPSGSVAAALLRQRGWQVCVLERQHFPRFSIGESLLPYCMEILEEAGLLQAVNEAGFQVKNGAAFTWGDRNTTIDFRDKFTAGPGTTFQVQRARFDQILIQEAEKMGAEVHFGHTVNNLDFTDEHATLSVSTDQNQSYTLQARFVLDASGYGRVLPRLLNLERPSAFPLREAWFTHIQDNISDPDFDREKIVIATHPRDRAIWMWLIPFSQGRCSIGVVGEPSHLAMNGRDPLVFLQDITREIPLLKRLLENAIWDTPVNPLRGYSANVTSLHGSRYALLGNAAEFLDPVFSSGVTIAMHSAKLATALVDKTLHGQTPDWEKDFVQALRVGIETFKTYVSGWYDCRFQDVIYSTQMNQDIRRMIASVLAGYAWDISNPFVEKSERRLNALAEICGEAQLDT

SEQ ID NO: 83979 - protein, 511 aa, Erythrobacter sp.
  misc_feature (1)..(511): tr|A0A3N5CRH3|A0A3N5CRH3_9SPHN Tryptophan 7-halogenase OS=Erythrobacter sp. HN-E23 OX=2488860 GN=EG799_04365 P E=4 SV=1
MNGDPISRIVIVGGGTAGWMAAAAISRIMGELPDLTITLIESDAIGTVGVGEATIPQLIGFNKLLGVDEREFVRETHATYKLGIEFVDWLRLGHSYVHPFGSYGIDMKGIEFHQFWLRGRALGEAAELDDYSIAVAAAKAGKFLWPRPDQPNSPLARLSYAFQFDAGLYARYLRRRAEAQGVKRIEGRVTDVSQDGETGHVDAVTLESGERVEGELFIDCSGFRALLIGQTLGVPFTDWTDWLPCDRAVAVPCTLAGANEPLTRSTARPAGWQWRIPLQHRIGNGHVYSSTHMSEDEATAILLANLDGRPLAEPRHLRFTGGLRQRAWEKNVVALGLAGGFLEPLESTAIQLVQAGIARLMSLFPTTAFAPVEMERYNRETEEAYTDIRDFLVLHYLASERDDTAFWRYCRNLDPPDGLKEKLAMFRSSGRVIREHNELFTETSWLSVMVGQGVQARGYHPAAALLDEDETRRRLGHIREVIATTVSQMPTQEEFLAQNGSAIPRERRITA

SEQ ID NO: 83980 - protein, 499 aa, Sphingomonas sp.
  misc_feature (1)..(499): tr|A0A0Q5UFZ9|A0A0Q5UFZ9_9SPHN Tryptophan halogenase OS =Sphingomonas sp. Leaf198 OX=1736299 GN=ASG20_16880 PE= 4 SV=1
MRDGTGGLMRQEQLRSVLVAGGGITAWCAAAALKRRAPFLDVAILRCTPSRDALADRIACTLPSLLGFHDDLGIGAADGIARTASGYRLGTLFSGWATVLPDYVHAYGRYGRSLGPTAFHLHWVRSVLEGARAAPFDSHSPAAALARAGRFAPPMPETPFADHEYGLTLDLPRYQTMMRAFALHVGVREIVGEIADFVRDTGDGIAAVELASGSRIVADLFVDATGPDAKLRGALDDVRDDWSAWLPCDRVLLAEGSAEPLVLTTAVAHPAGWRWSSGAQSGFAYASGEISDAKAARVLRNAAGTAPGEPIRVRPGTRPHPWLGNCIAIGDAATEVEPLEWCNLHLALSAIDRLIAMLPGRTPTRGEAAEFNRQTLAEAERVRDFLALHYRVAQRDDPLWQAVAAAAVPPASLSHTLAQFTERGRLPFYEEETFARDSWAAVLIGQGVLPRRIDPLVAAVPAAAAQTAMARLTTEIAAALPHIPTHAAYRAAQTRHLLP

SEQ ID NO: 83981 - protein, 494 aa, Acinetobacter sp.
  misc_feature (1)..(494): tr|G7GD43|G7GD43_9GAMM Uncharacterized protein OS=Acine tobacter sp. NBRC 100985 OX=1071390 GN=ACT4_021_01340 P E=4 SV=1
MLNLRGMNRVVVVGGGTAGWFAALQLRQLFSASVEIMVISAPQIPIVGVGEGGVLNLLTVLHDLNVDLKDFIAKTGSTLKLGFRYESWRTGQSDDYYYHLFPLATDDFVWNENGYNPFLSGLFNHGIDISKYMASYQFSEEKKPFEEVLEILLEGKNNFGASLHFDTFRVGQYLRDIAIARGILHVEEKVESFQIDTLTGHISSICLEKRNIDCDFLIDASGFARLLIGKQYQSEWCSFSDVLPLNRALPFHLQYGDEPKELVTRATAMSSGWMWQIPLQERIGAGYVFHDEFISDQQAQREVEAWLGCEIKPAKPISFEAGCYKEVWIKNVVAIGLASGFVEPLEATSIGQMLTQLQLLVSFIKENHGIISKQNIDCFNQQNTQFWFGIRDFIRMHYDTGRSDTDFWKFMLTVQQPETYQELKKCWVYRTPRDIDFVQHSMGGVSMFSVASWFAVGAGVGIIKPDATATELYALSPEKKARVAKFLHEFKRNS

SEQ ID NO: 83982 - protein, 519 aa, Sphingobium sp.
  misc_feature (1)..(519): tr|A0A2L0A9W1|A0A2L0A9W1_9SPHN Tryptophan halogenase OS =Sphingobium sp. SCG-1 OX=2072936 GN=C1T17_11195 PE=4 S V=1
MTTDTPSPGRAVILGGGTAGWLAAAYLSRTLKMSNVTLVESSEIGIIGVGEGTFPTIRSTLANLGISEAEFLVRANATFKQGVLFEGWADGSDSYFHPFNLPIGGEDEALLPHWIADTNPTRPSWADAVTVQEQVIRAGRAPKRPDDPDFSGPMNYAYHFDAARFADYLRDISVAAGVQRVEGTVATVERQGNGDIAALLLIDEQRIEGDFFLDCSGFGALLIGRTLGAEFTSCGDTLFNDRALAMQVPYARPDTPVRPYTLATAHDAGWTWDIGLTERRGIGYVYSSRHCSDDEAEATLRRYVGKDGDALTPRQLRFATGYRERQWIGNCVAVGLSAGFFEPLESTGIMLIESALRMIGDFLVPGDRALLDAAARSFNRSMAGRFERIVHFLKLHYCITRRTDTAYWRDNADPATIPEALRDMLAQWRSRPPSRFDFIVDLETFLPPSYHYILYGMGFQTKLAAGAARYPGAADAREAFARVKAASAGAVAHLPDHRALLNRFHADSSHKTIASLQSR

SEQ ID NO: 83983 - protein, 533 aa, Asticcacaulis sp.
  misc_feature (1)..(533): tr|V4PDD2|V4PDD2_9CAUL Uncharacterized protein OS=Astic cacaulis sp. AC466 OX=1282362 GN=AEAC466_02490 PE=4 SV= 1
MTPLRKVVIVGGGTAGWMAAALLSKLTRQKAGQKNGQAYERGLEIELVESEDIGTIGVGEATIPAIKRFNHLLELDENDFIRATQATFKLGIEFTDWGHVGNSYIHGFGKIGQDLGWLRMHQYWLKMRGTGQVSDVFADYSINTAAAYENRFMRARDDMKASPFNDIAYAYHFDAGLYARYLRTYAEKLGVKRTEGRIVRVNQRSTDGFIESVRLESGAVVPGDLFIDCSGMRALLIEETLGSGFEDWSHWLPCDRAIAVPCGFRPAQAISRTGSDAPARLPNAELASGLTPYTRSIARPAGWQWRIPLQHRIGNGHVFSSRFMSEDEATAILMANLDGDALAEPRVIRFKTGKRRKVWQKNVVAVGLASGFMEPLESTSIQMVQSALLRIVALFPDMSFAQTQIDAYNTQSDFEYTRIRDFLIAHYKVTTRDDTAMWRFCRDMDVPETLRARLDLWRRAGRYFKDADELFADESWIQVLIGQGLVPDSYDPFVDLRPDEEAVKYLNDIKTVIAKCVAVMPAHADYIEATCKA

SEQ ID NO: 83984 - protein, 503 aa, Sphingomonas sp.
  misc_feature (1)..(503): tr|A0A0Q5UKV1|A0A0Q5UKV1_9SPHN Tryptophan halogenase OS =Sphingomonas sp. Leaf198 OX=1736299 GN=ASG20_16885 PE= 4 SV=1
MAKPKTRVVVVGGGTAGWMTAAALSRLLPGQCSVHLIESEAIGVVGVGEATLPHIRAFNERLGIDEADFMARTRATFKLGIEFRDWNRLGDSYIHPFGTFGRGAAGVDFQHYWARLLREGAPLPSLDTVSYACALARAGKFDRPETDPHRLAGTFGYAYQFDALLFAPYLREIAEGMGARRTEGVVVRVERDGDSGDIAAIVLDTGERIEGDLFVDCSGFRALLLGEAMAEPFVDWSHWLPTDRAVAMPCRTRTAVTPYTSAIAMPAGWRWRIPLQHRTGNGYVYASGFVADDDARRALEAAVEGEALAAPRVLRFKAGRRRRSWVGNCVAIGLASGFLEPLESTSIYLVQQAITTLIELFPEPRIAAADRDEFNRVIDLEYDRIRDFLILHYHATTRSDSPFWDYVRTMPIPDTLSEKLDLWRTRARIVKYREGVFLDPSWVAVYLGQGIVPEGWDPRADPVASDALARSLDALRGEIASDVARRPDHRSFIERYCAMAQAA

SEQ ID NO: 83985 - protein, 515 aa, Sphingomonas sp.
  misc_feature (1)..(515): tr|A0A0Q5PSY4|A0A0Q5PSY4_9SPHN Tryptophan halogenase OS =Sphingomonas sp. Leaf343 OX=1736345 GN=ASG07_06205 PE= 4 SV=1
MGGKSAATVNTVIVVGGGSAGWLAACRLAAQAKRTGSGVSVTLVESDRIPTIGVGEGTWPTMRNTLAKIGISETEFIRSCDAALKQGARFVGWTDGQPGDAYYHPLNPPAGASEIDLAPYWLGRSTDFADCVDYQAALCEAGLAPKTITSAEYAGHANYAYHLDAGKFATMLREHATGALGVTHVIGDVARANQADNGDILDVEMADGRRIAGDLFVDCTGFAALLIGGVYGVPFESCRDVLFADRAIAMQVPHASDDDPIACHTISTAQDAGWIWDIGLWTRRGVGHVYSSAHTSDDAAEAALRRYVGPAGDDLSVRTIRIDGGHRERFWQNNCVAVGLSAGFIEPLEASALMLIEASMDAIAERLPRTRSAMNLAARQFNATFRHHWMRIIEFLKLHYVITQRTDTDFWQDNVAASSIPDGLEERLEFWRHHSPAPQDFPHAREVFSWPSYQYVLHGMRFASRYPPVGTATPEAAMAAGLITRNERIRGDLIARAPAHRDLLRAVRNYGLQRV

SEQ ID NO: 83986 - protein, 618 aa, Frankia sp.
  misc_feature (1)..(618): tr|A0A1X1MWL2|A0A1X1MWL2_9ACTN Tryptophan halogenase OS =Frankia sp. KB5 OX=683318 GN=KBI5_11265 PE=4 SV=1
  misc_feature (267)..(267): Xaa can be any naturally occurring amino acid
MRDHYDVIIAGGGPAGSTLAALLARTSDLKVAIFEKDEFPREHIGESFAHPLIPVLAESGALAKVLASNCWVKKFGGIYSWARQGPSRAFFDHANWAVDGVHRWALHVNRSEFDQILLEHARDLGVDVTTGMAVTDFAAAANGCQVTLADGTAVSGAYFVDASGRQQSLVTKKPREWLSGYRNIAIWQHYLGGLPAQGLDGDWNIFREKNLSPIGCFAFPDGWCWYIPVPRIVNGERVLTHSIGIVTSPEVLKEPGKDFTDSEVFLXTVRGVPRLADLVAEVTPISDQMMTVTNYSRVNERFADLDRHWILIGDASYFVDPLFSSGVAFAANQAASAALLLRTTLRAELSPGLVRDLWQDYDHEWHGMAEVFALSIDQWYHMIGADNPGSAYWHRRNSSPHLDMPDRSFDALLNTAFTPDLLLIMTRGTGRMSDLAIDGPYQQARAHVMLTEPEPDAVLVAAPGVRMRAGVALDVPGFKAVLPPADLELDTPAAVRAAVAEYWTDPVAAEANGGLGVPSPTASPVPCHRFEFDSDALVDSGSGATGFSVRGVDSHDGAPQLWEILSRGPVVYGELGSRLAPGQRVLLQRLIKAGMVTVKTAARQTTPGTEAAEVTLAD

SEQ ID NO: 83987 - protein, 499 aa, Sphingomonas sp.
  misc_feature (1)..(499): tr|A0A0Q5UJQ7|A0A0Q5UJQ7_9SPHN Tryptophan halogenase OS =Sphingomonas sp. Leaf198 OX=1736299 GN=ASG20_15420 PE= 4 SV=1
MNDTSEPPRTRVVVAGGGTAGWIAAAAIVRQLGSLVDVTLVESDEIGTVGVGESTIPTARSFHAFLGIDEAAFMRATQATFKLGIAFENWRQVGDRYFHPFGSIGRSVAIADFQHFWLEARARGFGEAYGDYSLEQQAAGAGLFGHDEQHSLAYAYHLDATAYARFLRALAEPWGVRRVEGCIERVERDGEGGYIAALVLASGERISGDLFVDCTGFRALLTEGTLETGFEDWSEWLATDRALAVQTETVGPPVPYTRAIAHGAGWRWQIPLQTRTGNGLVYSSGHMSDDEAHETLIGALDGRTLFEPRPLRFRSGMRRQAWNRNCIALGLAAGFIEPLESTSIHLIMNAVIRLIQLFPFRGDDHGALASRFNAQSRHEWEHVRDFIILHYHVTQRDDSAFWRDCARMTIPDSLAERIALFTKTAGAWQGQDDLFRIDSWVSVMLGQGVVPRAHHRIASIIKGQELRTSFEDLSRGIASTVRLLPRHCDFLARYCPADG

SEQ ID NO: 83988 - protein, 495 aa, Erythrobacter sp.
  misc_feature (1)..(495): tr|A0A3N5DMY2|A0A3N5DMY2_9SPHN Tryptophan 7-halogenase OS=Erythrobacter sp. HN-E23 OX=2488860 GN=EG799_12000 P E=4 SV=1
MSERRPPHVVVLGGGSAGWITACLLHRAWHERGGRVTVVESPDIGIVGVGEGSTPQLKAMFDHLGIAEAEWMAACDATFKLGIRFTGWSERPGFQTYFHPFPGPVDLHTEPAFARNCALARRGFAISALPDDYFLAARLAMEGKGPRASDTFPFAPSYGYHFDAYRLGAFLRDWGVRRGVDHLSRTVDDVEMAADGSVAALLCEDGIRIDGDIFVDCSGFRAMIAQGALGARYISFSDNLFNDRAVVMQTMANRDCHPQTDSVAMRAGWRWRIPLTTRAGNGYVYSSRHISDEDAEAELRSAIDAGADVDARIVRMKVGRLEESWQQNCLATGLAQGFIEPLEATALHIVIATALDFARSYEEGGFGPRNRDAFNARTAMRYDGIRDYIVAHYRMNQRSDTAYWRENAANAALSDNLKTMMTAWFTHRDIASVNRETYAEPPYPAMSWLALFAGYGTFPPREKAQGLPPPGSAADPQAITDMLTACTRNFAPATR

SEQ ID NO: 83989 - protein, 498 aa, Sphingomonas sp.
  misc_feature (1)..(498): tr|A0A031HYZ9|A0A031HYZ9_9SPHN FAD dependent oxidoreduc tase family protein OS=Sphingomonas sp. RIT328 OX=14705 91 GN=BW41_01308 PE=4 SV=1
MAGEERIRVVIVGGGTAGWMTAAALATLAPGAAEVHLIESAEIGIVGVGEATLPHLRAFVTRLGIDEAAFMAATHATFKLGIEFRDFGAIGDAYIHPFGSYGRALDGVGFHHYWLRRHHAGTVPPIGDYSTAVAAAAALRFTRPGADPHDLANAYGYAYQFDATLFGPFLRSHAEARGAKRTEGRVVSVERDGESGDIAAVTLADGTRIAGDLFIDCSGFRALLIGGTLDEAWEDWSHWLPCDRAVAAPCASPEGGIEPYTRATAMAAGWRWRIPLTHRIGNGYVYASEYLSEGAATDALVAAMESPPLAEPRHLRFRAGRRRRSWVGNVVSIGLASGFLEPLESTSIYLVQMAITQLIEHFPAARVCAADRDGFNTLVDAEYDRLRDFLILHYHATTRDDSPFWDHVRTMTIPDSLTAAMTLWRQTGQVARYTHGLFLEPSWIAVYLGQNIVPEGWDPRADLPDGASLDRALAALRGGIAGAVAAMPDHAAYLGTAA

SEQ ID NO: 83990 - protein, 516 aa, Sphingomonas sp.
  misc_feature (1)..(516): tr|A0A0Q5Q311|A0A0Q5Q311_9SPHN Tryptophan halogenase OS =Sphingomonas sp. Leaf343 OX=1736345 GN=ASG07_03425 PE= 4 SV=1
MIAKRRTVTIVGGGTAGWMAAALLSRLLVDGYDIRLIESDEIGTIGVGEATIPSIRTFCGLAGVDQVAMIRATQATFKLGIEFVDWRDRGHSYIHGFGKIGQDLMWLHPHQFWLKYAPRGQAKHFDTYALNCVAARMNRFALPDTRQPESPMAGIDYAYHFDASLFAQFLRTTCEARGVERIEGRIVSVEQRPENGFVDHLTLADGRSVGGDLFIDCSGMRGLLIGQTLGVGYEDWSRWLLCDSALAVPCGSVAPLTPYTRSTARDGGWQWRIPLQHRIGNGHVYSSAHVGDQAAADTLLANLDGKPLADPRPVRFRPGKRERAWEKNVVAIGLASGFLEPLESTSIHLIHTGLLRLISLFPRDDFDARDIAEYNRQTDFEYRDIRDFIIAHYKVTDREDTDFWRYCKTMEVPDSLNERLDLFASSARFFVRNKAELFREESWVQVLLGQGMAMRYDPMVDMIPDDQAIGFLSDIEAVVADCARAMPDHAAYIQRNCSATATPVMRPPTGRLTVRV

SEQ ID NO: 83991 - protein, 509 aa, Sphingomonas sp.
  misc_feature (1)..(509): tr|A0A0Q5Q200|A0A0Q5Q200_9SPHN Tryptophan halogenase OS =Sphingomonas sp. Leaf343 OX=1736345 GN=ASG07_01680 PE= 4 SV=1
MQSGTIGEAEGDRRVRSILIVGGGTAGWMTAAALAHAMPRGCRITLVESEEIGTVGVGEATIPPIRLFNETLGIAEADFLRETKGSFKLGIEFVDWGRLGHRYFHPFGGYGKPFDLLPVHQHWLAARAQGCAVPLDDLSMAWGAASRNRFAPPLADPRSVASTFDYAYHFDAGLYAAFLRRYAEARGVVRVEGRVADVALDGEGGQVASVTLDDGRMLAADLFVDCSGFRGLLIEGALKTGYEDWRHWLPCDRAVAMPCATGGDGFTPYTRSTARAAGWQWRIPLQHRTGNGYVYCSEYLSDDEAAATLAANLDGAALGDAWPLRFATGRRRLFWKRNVVAIGLSSGFMEPLESTSIHLIQAGIAKLLALFPTRDMAPMLVDEYNRIAITEYERIRDFLILHYTLTQRDDAPLWRYCANMAVPDTLALKIAHFRDSGRLIARDMDLFGPASWLAVHVGQFNMPVGADPLLGNMADPGASRDFVERLAAAIAGMAGSMPVHRDTVARMVR

SEQ ID NO: 83992 - protein, 504 aa, Frankia sp.
  misc_feature (1)..(504): tr|A0A1X1N1G7|A0A1X1N1G7_9ACTN Tryptophan halogenase OS =Frankia sp. KB5 OX=683318 GN=KBI5_06660 PE=4 SV=1
MSASARPEEYDVIVVGGGPAGSTASTLVALEGHRVLLLEKEVFPRYQIGESLLPATIHGICRLLGVADEVEQAKFMPKRGGSFRWGTNPQPWNFLFALSPQLSGPTSYAYQVRRADFDDILLRNAARKGVDVREGVDVREVLREGGQVRGVRWLDGEGISHRATAKWLVDASGNKSALYKEAGGDRHYSEFFKNIALFGYFEGGKRLPGPDAGNILCAAFDEGWMWYIPLSDTLTSVGAVVSRTQADQLRGDQEAALWGFVNRTSVVREMMSDATRVTEGMYGELRTRRDYSYTNTRFWAPGMVLVGDAACFIDPVFSTGVHLATYGALLAARSINSVLAGDLTDERAFGEFDGRYRREYGVFHEFLTAFYDMQANEGSYFWKARKVTEENSTDLEAFVTLVGGVHSKEVALAGRSGEFSTLAERFNRSAADLADAAEKTGTMQTESGERMYHLFGAPVVADVMKEMNQIQARGLRGEATRESPILTGGLITSRNGLRWAEATG

SEQ ID NO: 83993 - protein, 503 aa, Sphingomonas sp.
  misc_feature (1)..(503): tr|A0A2A2SBP9|A0A2A2SBP9_9SPHN Tryptophan halogenase OS =Sphingomonas sp. 1PNM-20 OX=1141887 GN=CKY28_15795 PE= 4 SV=1
MTDRSPSPPIRIVVLGGGTAGWMAACLFAHEWPQARVTVIESPDIGIIGVGEGSTPQLRALFAKLGIAEADWMPAANATYKVGIAFTGWSERPGYGRYFHPFASAVDLHTEPQFHASARARRTGRDVPAHPDRFFLNSRLAERGFVPLAPDNFPFEVGYGYHFDAHLVGQVLARRAAELGVEHRQDRVVEVAVGEDGQVSHLLTDGGEAIAGDLFVDASGFRSVIAQAALGGKFLPFASNLFNDRAVVMPTPNGDELNPYTTATALSAGWVWHIPLTSRAGNGYVYSSRYIDPDHAETELRRHLGTLDDPTPARHLEMKVGRVERSWTGNCLAIGLAQGFIEPLEATALHIVQATVEGFIQAYADGGFTPQHRDVFNRTIARRYEGIRDYIVCHYRLNRRTDTQYWRDAATLADLSDDLKAVMTCWFTGGDLPAEVHRLDIARYYAPMSWGCLLAGYGTFPADEKLRPAPPPADLASLDRLLDGCLLNFRSHAQALGSLRASA

SEQ ID NO: 83994 - protein, 547 aa, Idiomarina homiensis
  misc_feature (1)..(547): tr|A0A432Y5E2|A0A432Y5E2_9GAMM Tryptophan 7-halogenase OS=Idiomarina homiensis OX=364198 GN=CWI70_04685 PE=4 S V=1
MEKRKILIVGGGSAGWMAAAYLNGALNRRGNDHRVDIELLESPDTPRISVGEATIPSMRHLLAAIGIDEMEFMRVTEGTFKQSIKYVNWVHNDNSFYHHPFSSLRAQPIDYAGSDWLRSDRSVPFMETCSIQPLVCEWGRAPVMFGEWRMGARLNYAYQMNAQKFADYLRDFSTARNVVHTMANMAEVKKHANGDIASVTTDKGQEITADIFVDCTGFRSLLLEKEMGVGYEDFGKYLLCDRAVTMHVPYDTHYPGMVRPYTTATALSNGWIWDIPMQTRRSIGYVHSSAFIDEEAAEREMRAYQGGNTDDLPCRFIPFKAGRRHQQWQGNCVAIGLSGGFIEPLESTGLYLSDLGAVLLAEHFPWRREDQEILAARYNRLMTNRYYEILDFINMHYCLTKRTDTEFWRTVQEREHITDRLQAKFEFWRHKPPSAHDFQDQNFAALVGQADGALPPLGSGLMDARSPVDTGGLWNHESYECILYGMEFLQEECDQWFGERRPPTQVNPAILQRLQMARQMLPPHELWLQRALGMKDYPTAARPKGWV

SEQ ID NO: 83995 - protein, 505 aa, Sphingopyxis sp.
  misc_feature (1)..(505): tr|A0A1L3JEK4|A0A1L3JEK4_9SPHN Tryptophan halogenase OS =Sphingopyxis sp. LPB0140 OX=1913578 GN=LPB140_04575 PE =4 SV=1
MTPPKSIIILGGGTAGWMAANLLAHHWSDRGVKITLIDSADIGIIGVGEGSTPQLKAFFDILGVTERQWMPQCNATYKLGINFEGWSNRHGFDRYFHPFQSELDGQILPAFYYNALARRTARNVPAHPDLFFLPTKLARMGNGPIAKNGYPHQLSYGYHFDAHLVGQFLKKLALDRGVRHLDRKINSASLNTMGEIDAIIDEDGGEYRADFFIDCSGFRALLIQKSLNEKFISYGDMLFNDSAVVMPTLPAMAADKGPNNYTGARALSSGWLWNIPLTNRTGNGYVYSSHYQSDDKAEIEFRTEIGALEDKGHVRHLKMKVGRVENSWVKNCMALGLSQGFLEPLEATAIHIVLATMEKFIAQYNNPENTDIADAQAIFNEDIGRRYDGICDYIVAHYKLNQRHDTQYWRDNAQNQNLSPSLKQIITTWFTAGDLTREIGRQNISSYYSSLSWHCLFSGYGIFPMEDKMIPAGDDIRHYDMQEIENFLADHADNFPSHAELLGKL

SEQ ID NO: 83996 - protein, 412 aa, Neisseria flavescens
  misc_feature (1)..(412): tr|A0A154U3Q8|A0A154U3Q8_NEIFL Tryptophan halogenase OS =Neisseria flavescens OX=484 GN=TW90_0730 PE=4 SV=1
MSVEFDVAVIGAGPSGSVASALLNKQGFKVCVLEKQHFPRFVIGESLLPHCMEMLEEAGFADAVHAEPSFQFKDGAAFSWGSRYTDFNFTEKFSDGPGTIYQVRRGIFDKILIDEAAKQGVDVRFGHGVTAFDNSGDVARLSVESDTGENYELTAKFVLDASGYGRVLPRLLDLESPSELPPRQAHFTHIDDNITSPKFDRNKILINTHPEHRDVWIWLIPFGDNRCSIGVVGTPDKLAGESEAVLKKFVYECPMLAEILDKAVWENDFPFRSIQGYSANVKTLYGKHFALLGNAAEFLDPVFSSGVTIALHSAKLAADLLGKQLKGETADWQTEFADQLMIGVNAFRTYVNGWYDFRFQNAIYAPNRSPEISRMISSILAGYAWDTNNPFVEKSEQRLSTLAALVGDLKVE

SEQ ID NO: 83997 - protein, 497 aa, Shewanella sp.
  misc_feature (1)..(497): tr|A0A3N4EMF8|A0A3N4EMF8_9GAMM Tryptophan 7-halogenase OS=Shewanella sp. R106 OX=2487741 GN=EGC77_03470 PE=4 S V=1
MNKSVKKVVIAGGGTAGWMAAAAFSKLLGKNLDIVLVESDEIGTVGVGEATIPTLHVFHRLLGLKEQDVMAATNATFKLGIQFENWHDVNKDYLHSFGFLGKDCWACGFQHFWLKGQQKNIVSEIGDYCTEHLAAREGRFAVLPNQDYNHAYHMDASLYAKFLRKFAEHHGMTRIEGKIADVLQHEDSGNIRALQLENGELIEGDLFIDCTGFKALLIEQTLNTGFEDWSHWLPCDSAIAVQTEAVQKPIPYTRSIARESGWQWRIPLQTRTGNGLVFCSKYISDADATELLLNNIEGKPINQPRVIKFKTGTRRQHWNKNCIAVGLSAGFLEPLESTSIHMIQRSIVRLLQLFPSHGVIQADVDEFNQQTKIEIDNIRDFIILHYKVTDREDSRFWRYCKNMPIPASLQHRIDMFSQSGKVYKYGNELFGESSWIQVMMGQGLQPKEYHPIVDMMEDAELASFLNSIKATVKRKVDTLPAHHDFVQHYCKSTAMQG

SEQ ID NO: 83998 - protein, 498 aa, Paraglaciecola polaris
  misc_feature (1)..(498): tr|K6YEL0|K6YEL0_9ALTE FADH2 O2-dependent halogenase I OS=Paraglaciecola polaris LMG 21857 OX=1129793 GN=prnA PE=4 SV=1
MQQDAIKNVVIAGGGTAGWMTAAAFGKLFGKNIKVTLVESDAIPTVGVGEATIPTLHLFHDLLKINEADFMAATNATFKLGIKFDDWYKKQQSYIHSFGHFNHGCWAAGFQHFWLRGKNVNIASEIGDYCPEHLACRLGKFATAPKQERNHAFHLDAGLYAKFLRNIAQQCGVKRIEGKINTVNLDEDNGFIQSLILDNGQHIVGDLFIDCTGFRGVLIEQTLHTGYEDWSHWLPCDSAVAVQTELLGNSVPYTRSIAHDAGWQWQIPLQNRMGNGLVFCSKYISDEDAKTQLLANIQGKTLNTPRVIKFKTGVRRKLWNKNCVAIGLAGGFIEPLESTSIHLIQQSIIRLMQSLPTKRMDPAIIDRFNTSMRGEIDNIRDFIILHYHATARKDSAFWRYCQNIPIPETLRARMEQFAQSAHVYQGSGELFGEASWLQVMLGQGIMPNSYHPIVDLMSEQELIEFLATIKSQTSRRVSSLPDHLDFIRHYCKSPSAHT

SEQ ID NO: 83999 - protein, 412 aa, Neisseria flavescens
  misc_feature (1)..(412): tr|A0A154UDP6|A0A154UDP6_NEIFL Tryptophan halogenase OS =Neisseria flavescens OX=484 GN=TW91_1518 PE=4 SV=1
MSVEFDVAVIGAGPSGSVASALLNKQGFKVCVLEKQHFPRFVIGESLLPHCMEMLEEAGFADAVHAEPSFQFKDGAAFSWGSRYTDFNFTEKFSDGPGTIYQVRRGIFDKILIDEAAKQGVDVRFGHGVTAFDNSGDMARLSVATDTGENYELTAKFVLDASGYGRVLPRLLDLESPSELPPRQAHFTHIDDNITSPKFDRNKILINTHPEHRDVWIWLIPFGDNRCSIGVVGTPDKLVGESEAVLKKFVYECPMLAEILDKAVWENDFPFRSIQGYSANVKTLYGKHFALLGNAAEFLDPVFSSGVTIALHSAKLAADLLAKQLKGEAVDWQTEFADQLMIGVNAFRTYVNGWYDFRFQNAIYAPNRSPEISRMISSILAGYAWDTNNPFVEKSEQRLSTLAALVGDLKVE

SEQ ID NO: 84000 - protein, 513 aa, Xanthomonadales bacterium; identical to SEQ ID NO: 83642
  misc_feature (1)..(513): tr|A0A1M3QKJ4|A0A1M3QKJ4_9GAMM Tryptophan halogenase OS =Xanthomonadales bacterium 66-474 OX=1895868 GN=BGP23_1 0105 PE=4 SV=1

SEQ ID NO: 84001 - protein, 538 aa, Burkholderia sp.
  misc_feature (1)..(538): tr|A0A0D0HG01|A0A0D0HG01_9BURK PrnA protein OS=Burkhold eria sp. MSHR3999 OX=1542965 GN=prnA PE=4 SV=1
MSNPIKNIVIVGGGTAGWMAASYLVRALQQQTNITLIESAAIPRIGVGEATIPSLQKVFFDFLGIPEREWMPQVNGAFKAAIKFVNWRKSPERSRDDHFYHLFGSVPNCDGVPLTHYWLRKRELGFQQPMEYACYPQPGALDGKLAPCLSDGTRQMSHAWHFDAHLVADFLKRWAIERGVKQVVDEVVEVRLNDRGYISSLSTKEGRTLEADLFIDCSGMRGLLINQALKEPFIDMSDYLLCDSAVASAVPNADARVGIEPYTSAIAMNSGWTWKIPMLGRFGSGYVFSSKFTSRDQATADFLDLWGLPDNQPLNQIKFRVGRNARAWVNNCVAIGLSSCFLEPLESTGIYFIYAALYQLVKHFPDTSFDPRLTNAFNAEIVHMFDDCRDFVQAHYFASSRDDTPFWLANRHDLRLSDAIKEKVERYKAGLPLTTTSFDDATYYETFDYEFKNFWLNGNYYCIFAGLGLLPDRSLPLLRHRPESIDKAEAMFARIRREAERLRTSLPTNYDYLRSLREGAAGLSRSQPGPTLAAPEIL

SEQ ID NO: 84002 - protein, 416 aa, Hyella patelloides
  misc_feature (1)..(416): tr|A0A563W4Z9|A0A563W4Z9_9CYAN Tryptophan halogenase OS =Hyella patelloides LEGE 07179 OX=945734 GN=H1P_90018 P E=4 SV=1
MKIAVIGGGTAGCMIAAHISKYFPEFELYHIYSSTIPSIGVGEGSFPLFREWIHKITGLSFAALQERCKVTRKFGIQFENWGVKHQQFMHNFYPQNVEHAYHISAIEVVKLLQEHISATYLDKKISSIESDGVEIELKFEDNSQLAVDFAFDARGFPKSFESNDYENIPLIPTNAALVRRGPAVISLSATRSIARPHGWIFVIPLTTHTSYGYIYNSSVNSIAEIETDLNKFLQDEKVETSGNAKRLNFPNFTCKTFFDGSLFKVGNAASFIEPLEATSLALVLLEMVLASDFVLKGLYAAKNKREKFDELTIKAINDFLYEKVWETSLFISWHYAEGSRFKTDFWDFAKSNFDREIKNLEKRGLTDDFQKHLQAGSKLDSWQYLGINDTDCERPLFGFFKSLSFHEMGQGIGYYS

SEQ ID NO: 84003 - protein, 523 aa, Colwellia sp.
  misc_feature (1)..(523): tr|A0A1Y5CU29|A0A1Y5CU29_9GAMM Tryptophan halogenase OS =Colwellia sp. 39_35_sub15_T18 OX=1856279 GN=A9Q74_1770 5 PE=4 SV=1
MAVDNNHILIIGGGTAGWLSAAILAKSLNSNNIDGVKVTLVESPTIPILGVGEGTWPNLRATLHKIGISETDFIRECDATFKQGAEFINWSKIPEPEQSHSYYHPLSTVSHSSYDFNLAPYWLQQDKKTRLPYDRAVASQARICDEGLAPKQIVMAEYSAAQEYAYHLNANKLAEFLKCHCIEKLGVKFISANVTNIALDSDDFITHVDTDHASEKQIAADFFVDCSGAKGLIIKDVYHTAWHDISDVIFNDTALAVQVPYSNKDQKINTHTLATAQEAGWIWDIGLQNRRGVGHVFSSKYISDQKAEQQLIDYLGDDYTEDLTIRKIKLNHGYHEKFWHKNSVAIGMSAGFVEPLEASAIFLFDAAANMLAAQFPRDKAQMKYAEDKFNQQLTMRMQRTVEFIKLHYCISERRDSQYWIDNCDPISIPDNLKQRLAFWQGQVPTKYDFENAWEPFNLDSYLYVLYGMGFETNVANVAAKYTERVKAEHLFNNIDKASLLLIDKLPKQRELIEKVIKYGFTQV

SEQ ID NO: 84004 - protein, 514 aa, Amycolatopsis antarctica
  misc_feature (1)..(514): tr|A0A263D2P8|A0A263D2P8_9PSEU Tryptophan halogenase OS =Amycolatopsis antarctica OX=1854586 GN=CFN78_17295 PE= 4 SV=1
MVRERHNSSGGAVNSGQEYDVIVVGGGPAGSTVSTLVRKRGHRVLLLEKESFPRYQIGESLLPATVHGIAHLLGVHEELRDAGFTVKHGGTFKWGANPEPWTFDFAVSRRMAGPTSFAYQVERMKFDHILLENARKHGVEVSEQCTVTDVLKSADRAEGVRYTDAEGAVHEARARYVVDASGNSSRIYAAADSRREYSTFFRNLALFGYFEGGKRLSAPSSGNILSVAFDNGWFWYIPLTPEITSVGAVVNQESASLVQGDPAKAMRGFVQSCPLIADMLAEATPVTEGPYGQFRVRKDWSYCNTRFFAPGMVLVGDAACFVDPVFSSGVHLATYSGLLAARSINACLEAGDEGAGEGIGEQAAFEEFEQRYRREYGLFYEFLVGFYEMHESEDSYFWRARKLSDSAGSDIEAFVELVGGVSSGEFDGGGTATERIAAGTRDMTRMVAGAEEHADGAVIGAAAGKLLEQGTALQARALVGSQAGEGRSITPGGLSASADGLSWVRDDGAGVDAR

SEQ ID NO: 84005 - protein, 511 aa, Pelomonas sp.
  misc_feature (1)..(511): tr|A0A0Q7SNE3|A0A0Q7SNE3_9BURK Tryptophan halogenase OS =Pelomonas sp. Root1444 OX=1736464 GN=ASD35_18520 PE=4 SV=1
MQHTNAPLRTGPVRRVVIAGGGTAGWMVAALLSKVLGKGLAIRLVESDEIGTVGVGEATIPTLLTYHQLLGINEQEFMAATQATFKLGIQFENWRNVGEDYVHSFGLTGKDHWTAGFQHFWLAARQRGEQRVPHGDYGDYCLELRAGLENRFAHLPRNGLNYAFHLDASRYAVFLRGISQGHGVQRIEGKIAQVLQHDDGDIRALRLADGSEVEGDFFIDCTGFRSLLLGQTLGVGFEDWSHWLPCDSAVAVQTASVGEAVPYTRSIAHPFGWQWRIPLQHRVGNGLVFASRYLGDDEARAMLLQKIEGEALMQPRVLKFTPGQRDVTWKRNVVAIGLASGFLEPLESTSIHLIQRGITRLMQCFPAGGIHQTDIDEYNRQVRDEIEHIRDFIILHYKVTNRRDAPLWQHCAAMDVPQSLAHRIQMFSDTARVFKAPHELFGENSWIQVMLGQGLTPGAHHPTADLMGDDELGHFLGEIRKQVARQLVQLPRHEDYVRSYAAPVQPQAATA

SEQ ID NO: 84006 - protein, 511 aa, Alteromonas stellipolaris
  misc_feature (1)..(511): tr|A0A0S1YP84|A0A0S1YP84_9ALTE Tryptophan halogenase OS =Alteromonas stellipolaris LMG 21856 OX=1160720 GN=AOR1 3_3252 PE=4 SV=1
MAQSSQHSSKQRIVIVGGGTAGWLSAAIIAAKHNSGPSECGLDITLIESSDIPTVGVGEGTWPTMRNTLKDIGLSEKEVFRRCSAAFKQGGKFVNWVKPQGDAYYHPFTVPLGYGRVEMAPYLDDIANFANATNFQQHVCEQNMAPRTLSEAEYSSAQSNYAYHLDAGAFADLLKEFCKDKLGVSHKVATVDSVKKAHGSDNIESIQLNDGSQYHADLFVDCSGFRSLLLGESLKEPLVSTNDVLFNNSAIALHVPYDGDYEIKPYTQATAQEAGWIWDIGLSSRRGVGHVFSTDFTSDDQAESILRNYVGDTDAKLKARVIRFESGYRKQIWKGNCVGVGLSAGFVEPLEATALMLIEISARYIAEQMPLPQAAMPIVSQRFNKQMQYRWQRIIDFLKLHYIFNQRSEPYWVANRDPSSIPESLKEDLEIWKYRGPQIADFSAAIELFPAASYQYVLYGMGFSPDFSLQSHFYRDQALADKVMSQNKLITQQKLSSLPNHRDYISQWLEG

SEQ ID NO: 84007 - protein, 490 aa, Pelomonas sp.
  misc_feature (1)..(490): tr|A0A0Q7S9I5|A0A0Q7S9I5_9BURK Uncharacterized protein OS=Pelomonas sp. Root1444 OX=1736464 GN=ASD35_10790 PE= 4 SV=1
MTQKFDRIVVVGGGSAGWMTAMALVTGLKGRVNVEVVESEEIGIVGVGEATFPSIRHYNQLVGIDETEFLRATNGTYKLGIRFCDWLEVGRDYFHTFGHFGNLFGSQTLWAQYRRMRLAEPLGLQCVPTVMAMQGRFALPSEQDQFKYAYHFDAVRYAAFLRQLAMQRGARHTQGRIVDVVRRADGGVAAVQLDDGRRVEGDIFVDCSGFRSLLLGGALQEPFVDFSHWLPVDGAWACPTERVGEELAPYTQATALEGGWAWRIPLQNRTGHGHVFASRFIDPERAREQLLARLDGKPVAEPRLLRFTTGHRQRFWVNNVIAIGLSSGFLEPLESTSIYLIQDGISRLMTMLTAGRPLDENDRALFNDGSVRRFARIRDFIILHYCLTRRRDSELWRHVATMELPETLAFRMELWRRYGVLHEYDEEGFDATSWLAIHAGMEHWPERDDPVFAEIPPERALQALQGRRNAIAASVARMPLHHQMLGQVLR

SEQ ID NO: 84008 - protein, 501 aa, Asticcacaulis sp.
  misc_feature (1)..(501): tr|V4PIA9|V4PIA9_9CAUL Uncharacterized protein OS=Astic cacaulis sp. AC466 OX=1282362 GN=AEAC466_05135 PE=4 SV= 1
MSESDKTSRRVIIVGGGTAGWMAAACLSKVFGPQNLTVTLVESAEIGTVGVGEATIPMINMFNMILGIDEIDLVKETEATFKLGIEFVDWAQLGQRYFHPFGNYGVNMEGINFFHYWLRLAKHEGAREYGQFNLETLAASQGRCGATADDTPQLKLNKAYHFDARLYALFLRKYSEARGVHRIEGKVCQVELDSEYGHVRHLVLEDNCVITGDLFIDCSGFSGLLIGKALGVPYVDWSHWLPCNRAVAVACEAVEPPVPYTRSTAREAGWQWRIPLQHRTGNGYVFCDAFLQEDRAAEHLLSHLDGAPIAEPRLLKFTTGHRSRMWEKNVVSLGLASGFLEPLESTSIYLVQSALARLMALFPAGDVNPNIRAKFNDDMNSEYERIRDFLIAHYKLTKRDDSPFWNQCRTMDVPDSLTARLDAFEKEGILLEYPFDLFKETSWFAVLVGQGLFPKSYHPLADALPRDAFLRRMTQVRSMVLKRLPTLPPHAQYIAQIKGTQ

SEQ ID NO: 84009 - protein, 461 aa, Gammaproteobacteria bacterium
  misc_feature (1)..(461): tr|A0A2N1Y4U7|A0A2N1Y4U7_9GAMM Tryptophan halogenase OS =Gammaproteobacteria bacterium HGW-Gammaproteobacteria- 2 OX=2013798 GN=CVV12_04515 PE=4 SV=1
MEQADRAIRRIVIVGGGTAGWMTAASLANTLGTSCRIELIESEAIGIVGVGEATIPPIKLFNRALGIDENTFIKATQGTFKLGIEFVNWTRLGQRYFHPFGQFGAEFDAVPLYQYWLRERARGDDTPLQDYAMAWVAARNNKFAPPLADRQRIQSTYDYAYHFDAGLLIEGDLFIDCSGFRGLLIEDALHTGYENWQHWLPCDRAVAVGSTHGNGALTPYTRSTAQQAGWQWRIPLQHRMGNGHVYCSQFSSDDEATAVLLANLEGEPLGTPRPLRFTTGRRKAFWNRNCIAIGLSAGFMEPLESTSIHLIQSAITRLLALFPDRYCEPLLAQEYNRITGQEYERVRDFLILHYKAIARDDAPLWRYTAAMDIPDTLHYKIDQFRSSGRIVAEPLELFQNPNWLAVLIGQEVWPQHYSALVDLRSSVDAAGKLASLRRISEEASAALPDHAQYIARHCRAG

SEQ ID NO: 84010 - protein, 505 aa, Pelomonas sp.
  misc_feature (1)..(505): tr|A0A0Q7S0D2|A0A0Q7S0D2_9BURK Tryptophan halogenase OS =Pelomonas sp. Root1444 OX=1736464 GN=ASD35_06865 PE=4 SV=1
MRSRSLRRVVIVGGGSAGWITAAPLARMLCGPDGPDHCEVVLVESEEIGTVGVGEATLPTIRFYNQLLGIDETDFVRATQASFKLGIEFCDWGRIGHRFFHGFGGFGPPIHNRPLWSYWLRLRERDPGIESYEDWSTATVMARALRFTPPQPGEPSPANAFDYAYHFDAALYGRYLRDYAVRHGAQRVVGTIVGVKTSEQNGFVEALHLSDGRRVEGDLFIDCSGFRALLIGGAMKSPYEDWSHWLPCDRALAVPCERTDPMTPYTTSTARSAGWQWRIPLQHRTGNGLVYCSSHLSDGEAAQTLLANLDGKPLDDPRPQRFTAGRRKRAWTKNVVAIGLSAGFLEPLESTSIQFIMDSVGRLTALLPDRDFAPSLAEEFNRQMAYRYESVRDFIVLHYKLGERRDSEFWRYCADMSIPDVLAHQLELFRETGRVAIIDPEGFAEPSWASLMLGLGLTPRRRDPYVDLVDLDSVKRHLATVRSAIRRTTQAMPLHAEVLSRIAGG

SEQ ID NO: 84011 - protein, 97 aa, Pseudomonas sp.
  misc_feature (1)..(97): tr|A0A2N8FLR1|A0A2N8FLR1_9PSED Tryptophan halogenase (F ragment) OS=Pseudomonas sp. FW305-130 OX=2070644 GN=C1X 73_34285 PE=4 SV=1
LRAYLGPRGRDLAARKLAIRAGHRETFWKNNCVAIGLAAGFLEPLEASAIVLIELSAKLVAEQMPVCREVMDILAARFNATTLYRWGRIIDFLKLHY

SEQ ID NO: 84012 - protein, 510 aa, Glaciecola pallidula
  misc_feature (1)..(510): tr|K6ZH11|K6ZH11_9ALTE Tryptophan halogenase OS=Glaciec ola pallidula DSM 14239 = ACAM 615 OX=1121922 GN=GPAL_1 330 PE=4 SV=1
MKKLLILGGGTAGWMAANMMNHYLGRNKEDIANSKAWEITVVESPQIGIIGVGEGSTPQLKKFFDLLDITESQWMPACSATFKNGISFIDWSEHTQTNRYFHPFPSPFDRQTAAAFLYHCQMRSRGMDVPVNPDDFFLSAHLAKFKLSPKPLPGKPQVPLNYAYHFDSAKLGAFLCQHAVSNGVRHISSTMESVLQHPDSGIQAIQLASGEQLNADLFIDATGFNSLLLQGVLQEPFETFASNLFNNSAVAIPSNRQDIIAAETKATALSAGWAWQIPLTNRTGNGYVYSDQYLSPEQAEKELRDHIGADMSKDSGAEQKPAKHLKMKVGQVQRHWHKNVVAVGLSQGFIEPLEATALHLVQETVLKLASSLLDPMYTSEPDRIKLAFNESIRKRFNGVRDYIVCHYKMNTRTGSQYWIDNRENNNISTQLADVIDTWRAKKDIASVLEKHTMTQYYPVISWYCLLAGYGSFASASSANKLPSSNMRQLTQYLMRSTTHFASHNASLGLI

SEQ ID NO: 84013 - protein, 499 aa, Alteromonas sp.
  misc_feature (1)..(499): tr|A0A1J0RW88|A0A1J0RW88_9ALTE Tryptophan halogenase OS =Alteromonas sp. Mex14 OX=1917157 GN=BM527_15160 PE=4 S V=1
MNSNPSQSIQKIVIVGGGSAGWMTAASLSNVLKGKCVITLIESDEIGIVGVGEATIPPIRVFNQTLGISEAEFLQRTNGTFKLGIEFVNWGSNGSRYFHPFGTYGRQFDTVSMHHYWLSAHQQGQAKPLDDYAMAWHLARNGKFIHPSGDPKNVLSTFEYAYHFDAGLYVKFLRDYAEQRGVKRIEGKVSHVSKNKDTGFVSSVSLESGQVIDGEFFIDCSGFRGLLIEQALHTGYETWSEWLPCDRAWAVPTAGSADPMPYTRSTAHTAGWQWRIPLQNRVGNGHVFSSAFISEEDARQQLLDNLDSDMLAEPRLIKFVTGRRKRFWNKNVVAIGLASGFIEPLESTSIHLIQAGIAKLLALFPDKSFNQRSIDEYNRIAIAEVERIRDFIILHYKLMERRDTEMWRYCADMDVPDELADKIAHFREFGRITKGEIDLFGNTSWLAVHIGQGNIPQRTDPLVYYSDADYAGWLKKLNQVMTQYAQQAPSHMAYINKIK

SEQ ID NO: 84014 - protein, 521 aa, Xanthomonas arboricola
  misc_feature (1)..(521): tr|A0A2S6ZWN2|A0A2S6ZWN2_9XANT Tryptophan halogenase OS =Xanthomonas arboricola pv. arracaciae OX=487851 GN=Xar aCFBP7407_07125 PE=4 SV=1
MTDTAPSDPQQRPVRRVVIAGGGTAGWMAAAALSKVLGRHLKIVLVESDEIGTVGVGEATIPSLVTFHRLLEIDEAGFMAATQATIKLGIGFEHWRDVDRHYIHSFGHTGTDHWSAGFQHFWLKGRQRGLARDFGDYCLELRAAQEGRFAHLPNGGMNYAYHLDAGLYARFLRRFSEGFGVQRIEGRIGNVETHAHSGYLTALTLEDGTRVEGDLFLDCTGFAGLLIGKTLGVGTDDWSQWLFADSALAVQTESVGAPVAYTRSRADQAGWMWRIPLQHRVGNGIVYSSRYMDQDSAAQVLQRNLSGRALTQPRALRFTPNQRHRVWEKNCVALGLASGFLEPLESTNIHLIQRGIIRLMQTFPQVINDVDIAEYNRQAVAEITHIRDFVILHYHATDRRDTPFWRDCAAMDIPDTLRHRVELFRQSGRVFHQANELFAENSWVQVMLGQGITPKQHHPVADLMGDAELRHFLETIRTRVDAALARLPAHADFLRRYCPAPPLPEPATRLPADAALATGAR

SEQ ID NO: 84015 - protein, 496 aa, Alteromonas sp.
  misc_feature (1)..(496): tr|A0A1J0RYQ9|A0A1J0RYQ9_9ALTE Tryptophan halogenase OS =Alteromonas sp. Mex14 OX=1917157 GN=BM527_09300 PE=4 S V=1
MYDKAVKKVVVVGGGTAGWISAAVIKRLIGTDLTVTLVESEDIGTVGVGEATIPPIITLNNVLGIDEKEFLRETNATMKLAIKFENWRVKGEDYFHTFGAPGKSYAFCHFHHYFKRAQKLGLTDSIWEYDLNYLACKAGKFAHIKSPDPIIEMPYAYHFDASLYARFLRKKCEAMGVTRKEGIIHDVKQDSESGFITGVTLKDGEHIEGDLFIDCSGFKGLLTQQTLNTGYEDWSHWLPCDRAVAMPSERLEKTLPYTRSISHSAGWQWRIPLQHRNGNGLVYSSNYYTDEQALDILSNNLDTKPLADPNFIRFKTGRRRKQWNKNVIAVGLSSGFLEPLESTSIHLIQSAVVRLIHLFPHEGFKQRQIDEYNKQSKTEYEQIRDFIILHYHVNERTDSHFWKDLRKMDVPDSLTHKIELFRESGNLFREQNDLFLESSWLQVLMGQGIAQGDYHPLANALSEQKLQELMQNIKRIKNEPIGKIATHDDFLKQFCG

SEQ ID NO: 84016 - protein, 506 aa, Pseudoxanthomonas indica
  misc_feature (1)..(506): tr|A0A1T5K9E0|A0A1T5K9E0_9GAMM Tryptophan halogenase OS =Pseudoxanthomonas indica OX=428993 GN=SAMN06296058_148 3 PE=4 SV=1
MEQGRVRKVVIAGGGTAGWLAGAALAHQFRDLLDITLLESEQIGTVGVGESTVPPIRNFHRFLQIDEQEFLRAVAGTFKLSISFENWRRHGDRYIHPFGITGQSTLVCAFHHFWLDSLRRGMSSDLGDYCLETLASREDRFDLPQQPQVNYSYHLDAGLYARFLRQRAESHGLKRVEGKIREVRQHPDSGFVQALVLEDDQVIEGDLFIDCTGFRGLLIEQTLKTGYEDWHQWLPADRAVAVQTEPVGPPVPYTRAIAHQAGWRWHIPLQHRVGCGLVYASKHMSDDEATAKLLHDVGAPPIRDPWRVPFRSGRRLKAWNKNVVSLGLASGFIEPLESTSLHLSMTAIVRLIEAFPNEGMPSALIEQFNETSRKEMEHVRDFIILHYHANQRDEPMWQACREMELPDSLSIRLRAWRERAHAWQGANELFRVDSWTHVMWGQGLMPEQAHPLARALPDAELQRFLTGVREPLQRAVAKMPSQQDFITRYCAAPAAVWGSRPRTVSA

SEQ ID NO: 84017 - protein, 518 aa, Massilia flava
  misc_feature (1)..(518): tr|A0A562PS76|A0A562PS76_9BURK Tryptophan halogenase OS =Massilia flava OX=871742 GN=IP92_02353 PE=4 SV=1
MAPIRNILIVGGGTAGWLAACFLAKMLGAKADGAVQITLVESPEIGIIGVGEGTFPSIRGTLSLIGIDEARFIRECNATFKQGVRFNHWVRPAGAPGPDHYFHPFSQPSQRPGGPELLPYWLMGAAGNVPFAAAATLQKHVADMSHGPKRVTDGDFLGPLNYAYHFDAGRFAALLCTHAQTLGVRRVEATVEDVTLDGEGAIDSVVTREAGVLRGDLYIDCTGFRARLIGEALGSPFRNISDTLFVDRALAMQVPYERPDAPIPSYTISTAHEAGWTWDIGLHERRGIGYVYSSRHTSDERADEVLRGYIGKASEGRTPRLLKLNVGYRETQWVKNCVAIGLSSGFLEPLESSGIGLIEAATYLVGFLFPHDGNLAPVAKTFNAQMKARYERIVDFIKLHYCLTQRRDNAFWIENADPATIPESLRDQLAMWRARPPHRLDFVTDLEMYPPSSWQYVLYGMEFATTLHANRAALPELDAAKREFQTIAQLCHHAVKDLPPHRALVDHYLRRGEGLRRA

SEQ ID NO: 84018 - protein, 509 aa, Stenotrophomonas sp.
  misc_feature (1)..(509): tr|A0A2N1GII8|A0A2N1GII8_9GAMM Tryptophan halogenase OS =Stenotrophomonas sp. Betaine-02u-21 OX=2058301 GN=CXF9 6_09175 PE=4 SV=1
MNAVDTTQGRIRKVVIAGGGTAGWLAGCALAHQFRDQLDIVLVESEQIGTVGVGESTVPPIRMFHRFLQIDEQEFLRAVAGTFKLSISFENWRRPGDRFIHPFGTIGQGTWATPFHHFWLESLRRGMPSDLGEFCLESAASLEDRFSLQTQPQASYAYHFDASLYARFLRGKAEANGLRRVEGKIREVRQHAHDGAVASLVLEDGQVIEGDLFIDCTGFRGLLTEQTLHTGYEDWHEWLPSDRAVAVQTESVNPPVPYTRAIAHEAGWRWHIALQHRVGCGLVFSSRHMSDDEAQAKLLRDIEGRPLRDPWLVPFRSGRRLKAWNKNVVALGLASGFIEPLESTSIHLTISAVVRLIQLFPLEGISPSLMALYNDVSRQEMEHVRDFIILHYHANQRDEPMWKACREMALPESLQVRLRAWRERAHAWQDPGELFRVDSWTSVLTGQGIQPGPPHPLSRAISDADLRTLLDRIRRPVQQEVAKMPSQAAFIERYCNASAQAWQRGMAVT

SEQ ID NO: 84019 - protein, 505 aa, Xanthomonas arboricola
  misc_feature (1)..(505): tr|A0A2S7A217|A0A2S7A217_9XANT Tryptophan halogenase OS =Xanthomonas arboricola pv. arracaciae OX=487851 GN=Xar aCFBP7407_01390 PE=4 SV=1
MSQAPIRKIVIAGGGTAGWIAACALSHQFRELLEITLVESEQIGTVGVGESTVPPIRSFHRFLQIDEQEFLRAVAGTFKLSISFEHWRRQGERYIHPFGITGQSTLVCAFHHLWLESQRRGMPGSFGDYCLETVASRVDRFALLREPAVNYAYHLDAALYARFLRTRSEACGVRRIEGRIQQVTLQPDSGDVASLLLEDGQVLEGDLFIDCSGFRGLLIEQALHTGYEDWSHWLPCDRAVAVQTEALGPPVPYTRAIAHEAGWRWHIPLQHRVGNGLVFSSKHLSDDEAHAKLLRDVAAPALKDPWLVPFRTGRRLKAWNKNVVSLGLASGFIEPLESTSIHLTIAAVVRLISLFPGEGIAPSQVQLFNDISRAEMEHVRDFIILHYHATQREEPLWRQCRAMELPESLALRLRAWRERAHAWQAADELFRVDSWTHVLMGQGIVPEQHHPLARALSDRDLRRLLDGIAQPIRHVVEQMPSQQAFIDAYCKAGASVWGLRSQVVT

SEQ ID NO: 84020 - protein, 517 aa, Glaciecola pallidula
  misc_feature (1)..(517): tr|K7A056|K7A056_9ALTE Tryptophan halogenase OS=Glaciec ola pallidula DSM 14239 = ACAM 615 OX=1121922 GN=GPAL_2 039 PE=4 SV=1
MHKPLRKIVIVGGGSAGWLTAGVIAAEHSTDPNVGIEVTLIESADVAPIGVGEGTWPTMRSTLKKMGISETDFLLECDASFKQGSKFSNWRSNTNEHYYHPFTLPHGFNDTNLASFWQPYRHKVSFADAVGVQSHLGEHGLAPKQISTAEYDFYANYGYHLDAGKFAALLQKHCTTKLAVKHIIDHVTQVNSSSNGDIATITTKNNGDITGDLFIDCTGTASLLLAKHYAVPFVSTKHILFNDSALAVHVPHQDSNSPIASFTCSTAQSAGWIWDIGLPSRRGVGYTYSSRHITDVEAEKALRDYITPIMGESAAQSTKIRKIDFSPGHREKFWHKNCVAVGLSAGFIEPLEATALALIELSAKMISEQLPADREAMDLVAKRFNAKFLHRWLNIVDFLKLHYVLSKRTDSAYWREISDAEQLPDTLKEQLLLWKTRAPYHYDATHTEEMFPPASYQYILYGMDFITQPVNTKRVDESKKAQVLFAENVKQTKQLLSSLPSNRELINKIKLYGLPKI

SEQ ID NO: 84021 - protein, 502 aa, Sphingomonas sp.
  misc_feature (1)..(502): tr|A0A0Q4EX10|A0A0Q4EX10_9SPHN Tryptophan halogenase OS =Sphingomonas sp. Leaf208 OX=1735679 GN=ASE69_18775 PE= 4 SV=1
MKRVQRLVILGGGTAGWMTAAALSATFGDLVKISILESDAIGTVGVGEATIPTIHWFNQLVGLDEEAFVAATKASFKLGIEFVDWARPGTRYFHPFGRYGVDLGPVPFHQHWLRAKGDGLDRPLSTYSLVAQLAAAGRFAKPVDDPRSILSTLGYAYHFDAGLYARHLRQLAEKRGVVRHEGMLRDIERDPETGFVTALTSDRGERLEGDLFIDCSGFRALLIDETMGAQFEDWSHWLPCDRAVAVPCARIAATTPFTRSTLRPAGWQWRIPLQHSTGNGYVYASSFVSDDEAVATLLSNLDGEALADPRMLRFTAGFRREAWRGNVVAIGLSSGFLEPLESTSIHLIQSGIAKLITLFPDADCDPALARQFNTLFARDMDGIRDFLILHYHATQGHDAPLWQHTRHMTPPPTLVDKMAQYTRAGRLMLSADELFREASWLAVLEGQGVGALGHAPLADTLDAATNRRQLNQIETVIARATPTLPLHDAAIAALVAPQVAAR

SEQ ID NO: 84022 - protein, 521 aa, Xanthomonas arboricola
  misc_feature (1)..(521): tr|A0A2N9DE41|A0A2N9DE41_9XANT Tryptophan halogenase OS =Xanthomonas arboricola pv. fragariae OX=487822 GN=prnA _2 PE=4 SV=1
MTDTAPSDPQQRPVRRVVIAGGGTAGWMAAAALSKVLGRHLQITLVESDEIGTVGVGEATIPSLVTFHRLLEIDEAAFMAATQATIKLGIGFEHWRDVDRHYIHSFGHTGTDHWSAGFQHFWLKGRQRGVARDFGDYCLELRAAQEGRFAHLPNGGMNYAYHLDAGLYARFLRRFSEGFGVQRIEGRIGNVETDAHSGYLTALTLDNGTRVESDLFLDCTGFAGLLIGKTLGVGTDDWSQWLFADSALAVQTESVGAPVPYTRSRADQAGWMWRIPLQHRVGNGIVYSSRYMHQDSAAQVLQRNLSGRALTQPRALRFTPNQRHRVWEKNCVALGLASGFLEPLESTNIHLIQRGIIRLMQTFPQVINDVDIAEYNRQAAAEITHIRDFVILHYHATDRRDTPFWRDCAAMDIPDTLRHRVELFRQSGRVFHQANELFAENSWVQVMLGQGITPKQHHPVADLMGDAELRHFLETIRTRVDAALARLPAHADFLHRYCPAPPLPEPATRLPADAALATGAR

SEQ ID NO: 84023 - protein, 505 aa, Sphingomonas sp.
  misc_feature (1)..(505): tr|A0A0Q4EQ52|A0A0Q4EQ52_9SPHN Tryptophan halogenase OS =Sphingomonas sp. Leaf208 OX=1735679 GN=ASE69_08000 PE= 4 SV=1
MTLDSPIRRIVIVGGGTAGWMAAAALARLIPTGASVTLIESDTIGTVGVGEATIPPIRAFNAMLGIDEAAFLAATAGSFKLGIEFVDWGAIGERYLHPFGGFGFDIEGVRFHQHWRRRRAAGVVEDIDAYSLCAVAARAGRFAPPSPDPASILSQMAHAYHFDAGLYARFLRGRAERDGVTRIEGEIGDVALDGDTGHVRHVTLAGDRRIEGDLFLDCSGFRGLLIEQALGAGYEDWTRWLPCDRAVAMPTANIGTAITPYTRSTAREAGWQWRIPLQHRTGNGYVYSSAHCSDDEAAATLLDGVDGPPLADPRVLRFTAGRRRKQWIGNVVALGLASGFTEPLESTSIHMVQTGISKLLALFPDQGFSPVEIDTYNRLAETQFDQVRDFLVLHYHATRRTDSPFWREAGARAIPDSLAEKIALWRRRGRLFRWEDDLFAEASWVAVLLGQGIVPEGWDRLADTVDARDVDARFDRLRVMFADAAARMPHHEDYLARTSPARVRA

SEQ ID NO: 84024 - protein, 521 aa, Glaciecola nitratireducens
  misc_feature (1)..(521): tr|G4QE46|G4QE46_GLANF Tryptophan halogenase, putative OS=Glaciecola nitratireducens (strain JCM 12485 / KCTC 12276 / FR1064) OX=1085623 GN=GNIT_3226 PE=4 SV=1
MKSDINNIVIVGGGTAGWLTAAVLAAHFDTKTKFNITLIESPNIKTIGVGEGTWPTMAATLRRIGISEAQFISECDASFKQGSRFIDWNEGESYYHPFSLPIGYKDINIVDHWLESPSDLSFDEFATNQAGVCQHNLAPKQATTPEYANVLNYGYHLNAGKFATLLKNHSINNLGVKHISADVSSVNAHNATFIESVVLADGTQIEGDLFIDCTGFKRLLIGKSLKVPFKSVKDVLFNDRAMAFQVPYSHENAAINSATHATAHKNGWIWDISLPTRKGIGVVYSSKYGTEQQAFDTAEQYMQKHMPHINIAGLSPNKINIEPGHLETYWKGNCLAIGLSAGFIDPLEATAMILVEFSAKFLREHLPASRNELGLLAKKFNKRMDLHWNNIIDFIKLHYILSNRTDSQYWINHREQNTIPISLQRSLMMWKNRAPWHADVEVAESMFPPASYQFILYGMGFQSKSTLADRRLASEERLHLKKLLSNKHAELQKLCQHLPTNRKLLLDIKQSWMNRVPNVEI

SEQ ID NO: 84025 - protein, 530 aa, Cellvibrio japonicus
  misc_feature (1)..(530): tr|B3PI15|B3PI15_CELJU Tryptophan halogenase OS=Cellvib rio japonicus (strain Ueda107) OX=498211 GN=CJA_0354 PE =4 SV=1
MNKKRAALLLRAFFMVDKYLTRQIATMQKNTLNSICIVGGGTAGWMAASLLSSALQGSHIKITLIESPDIATIGVGESTVPSMMEFLRVCRINLKEFVEATSATFKLGIRFDDWLKPGEQYFHPFGRVGQDINGFAFYQAWLKNSVDGYGTRWVDHSPSAIMAEHQRFMLRPSQQQNWVLRSYGYALHLDAILVARYLRDFSQGCGVERIEATVDKVVIDERQFIHTLALNNGITITSDFFIDCTGFKGLLIEEALKVGYEDWTHYLPCNRAVAVQTTNAGTLPPFTIATAREAGWTWRIPLQHRTGNGYVYSSQYCSDDQAIHTLLTAVEGELLIEPRVIPFATGRRKKIWHNNCLALGLAAGFLEPLESTAIHLIYKTLVHFIRYFPDQDFEVYTEQAFNQKINIDYQEIRDFIILHYCTTGRDDTEFWRWCQGMPVPDSLQEKICLFRARGQIEHTPDQFFSQDSWCSILEGMKVRPKKYHPLMDAFDGQGLASTLQESAQSVYETVMQMPMHGDYIQQHCAAKKMM

SEQ ID NO: 84026 - protein, 505 aa, Rhizobium fredii
  misc_feature (1)..(505): tr|A0A2A6LNA1|A0A2A6LNA1_RHIFR Uncharacterized protein OS=Rhizobium fredii OX=380 GN=CO661_30850 PE=4 SV=1
MMLDLTNAKRIGIIGGGIVGWLAAIALRRVFDVDVDISVIEAPTVFPLGPGEGGSLNLIDTLCRNELDLDVFIGEAGATHKLGVLYENWRGGGTPDRYYRMFGGSGIPEIECRVGGFFPLLSARIAAGENLHTCIPGFELITKKASQVEIDELLATGESGLYPSFHFNHAGFERYLRRVGLARGITSRRAVVHGMRLDDRGHVSAFQLGGEELEVDFAVDASGFARLGLGTVLNTRWCSFADVLPTDRAIIFELEPRASSPVTRATAMKAGWMWEAPLNRSISAGYAFSSRYADAAMAIAEVENHCGFRVEAKHELSLDQGYFSTAWVNNFVALGTASGFVEPLEAALAAHTFEALRNLERILANGSGIVPARAIEGYNSANARCWTGVRDFLRLHYDSKRIDTPFWRDLAAAELPEGYANLRACFQKRTPRFIDIQPYVGSGWQSLFHEIDWISVAVPLGVVPQAAACAELRRLSTESRSEVQAYVDRLKGTIAKISSTRGCMH

SEQ ID NO: 84027 - protein, 504 aa, Cellvibrio japonicus
  misc_feature (1)..(504): tr|B3PC67|B3PC67_CELJU Tryptophan halogenase OS=Cellvib rio japonicus (strain Ueda107) OX=498211 GN=CJA_2881 PE =4 SV=1
MSDSNNIQSIIILGGGTAGWMTAAALAKVITTRNCSITLIESEEIGTVGVGEATIPQISIFNSVLGIDENDFIKATQGTFKLGIEFVNWKSIGSAYIHPFSTYGTDLHNVQFYHYWQKAFKLGLSPDISDYSLNIQACYHNKFTRPMDVPNSPLAKIAYAYHFDAGLYARYLRRYAEALGVRRVEGKVTQVNKNHDNGFIKSLLLTDGSVHAADFFMDCSGFRGLLIEGALHTGYENWSHYLPADSAIAIPCRRVEPLIPYTRATAHTAGWQWRIPLQHRTGNGHVYSSQFIDDKSALDTLVNHLDGEPLAEPRQLRFVTGKRRKVWNKNCVALGLASGFLEPLESTSIHLVQSVISKFLGLFPRKDSFTAEQEKFNKYMDDEYLGIRDFIILHYKATQRDDSAFWNHCRTMEIPESLQRKLELYRSSSRLYRDNNELFDESSWLAVMHGQGIVAEGYNPIVDAMPVEELENRLRGIRQVISKCLDVIPTQDAYIDKYCRAGQL

SEQ ID NO: 84028 - protein, 503 aa, Cellvibrio japonicus
  misc_feature (1)..(503): tr|B3PDU7|B3PDU7_CELJU Tryptophan halogenase OS=Cellvib rio japonicus (strain Ueda107) OX=498211 GN=CJA_3150 PE =4 SV=1
MNTSMKSIKDIVVLGGGTSGWIAAAMLAAHLKPTLCRVTVIESEELGPIGVGESTIPPILHLIHSLGIDEQDFMRETQACYKLGIKFIDWRESRHSYFHPYGSIGKRIENQDFYQCWLKASLAGEHYPLEDFSPCAVMAARERFFPPGQAQNTPIGGAHYAVHLDAKLVAAYLRRYAEARGVKSIQGKCVSSERDQRGFIQALQLQDGTRVDGDFFIDCSGFRALLIGEAMGVELEDWSHYLPCDRALVVKTDVAGSRMPYTTATARKAGWSWRIPLRNGTGHGYVYASRFCSDAEAKSTLLRHLDAARLNEPRLIHFTSGRRKVVWQGNCLALGLAAGFVEPLESTAIHLIVRGMDFFLRYFPDAECEPSLARAYNRRIAADYEEVRDFILLHYCTSRRNDSDFWRWCRQMPIPDSLQERIALFTAHGLVPEASDELFRSSNWQSVFEGMGIRPHKYCPRVDNLDYVQIRETLQLARTAIAKMVEGLPSHDEYLARQFPRGF

SEQ ID NO: 84029 - protein, 502 aa, Cellvibrio japonicus
  misc_feature (1)..(502): tr|B3PH35|B3PH35_CELJU Tryptophan halogenase OS=Cellvib rio japonicus (strain Ueda107) OX=498211 GN=CJA_3630 PE =4 SV=1
MSPEPLSPRKLHIVIAGGGTAGWCAAAALSQQLMPLADITLVESDALGTIGVGEASIPPMKAFHRLAGVDEQAFMRATHATFKIGIQFEHWTRPGDSYIHSFGRLGKSAWMADFHHVWLHAKALGLDVKLDDYCLELKAALNGKFVLSDAMPLNYAYHLDATAYARFLRDLCAQRGVKRIEGLIEQVQQHADSGHITHLVLENGQAIAGDFFIDCTGFRALLIGNTLKVAYEDWSRWLPANRAVAIQSELNTPPMPYTRSIAREAGWQWHIPLQHRAGNGLVYCSDYLSDEAAQDRLLHHLPGKPTSALRKIPFQTGYRTEQWNKNCLSLGLSSGFLEPLESTSIYLMMIGITRFIKQFPFDGIAQATIDQFNTVSREEFEHIRDFIFLHYYLNERQDSPYWADYRRRPVPESLQHRMDLFRTTGLAFPPSGDLFTVDSWVQVTLGQHLWPTSYHPIGRMVSDEHLIQSLNNYKNTITRQVDEMPHHAEFIAHYCAADEQPM

SEQ ID NO: 84030 - protein, 530 aa, Pseudoxanthomonas suwonensis
  misc_feature (1)..(530): tr|A0A0E3Z297|A0A0E3Z297_9GAMM Tryptophan halogenase OS =Pseudoxanthomonas suwonensis OX=314722 GN=WQ53_11385 P E=4 SV=1
MENNRIRRVVIAGGGTAGWIAACALTHQFRDLLDITLVESEQIGTVGVGESTIPTIRTFHRLLQIDEREFLSSVAGSFKLSISFENWKRPGDHYFHPFGTTGMNTWSCDFHQFWLESLRRGMKSELGDYCLETVASRVQRFAIFDPAGASTQEWSMRWVQSPTSLERADVSYAYHFDAALYAAFLRRKCEGRGLTRVEGKIREVRQDPENGYIRALVMEDGQVVEGDLFIDCTGFRGLLIEQTLKTGYEDWNNWLPCNRAVAMQIESVEPPVPYTRAIAHEAGWRWHIALQHRVGCGWVFSSAHMSDDEAAAKLAAANNNAPVVREPWIVPFRTGRRLKVWNKNVVSLGLASSFIEPLESTSIHLTLSAVTRLVQMFPFAGIDDANVDRYNDVSRDELEHVRNFIILHYHLNQRDEPLWRECREMKLPDDLAQRIQLFRDTAYAWQGEDELFRLDSWTHVMLGQGVVPREHHPLTRGLGDTDMARLFEAVRQPINRMVAAMPSHEDFLKRYCPADPSVWNLRRAPAQTGA

SEQ ID NO: 84031 - protein, 494 aa, Microbulbifer agarilyticus
  misc_feature (1)..(494): tr|A0A1Q2M862|A0A1Q2M862_9GAMM Tryptophan halogenase OS =Microbulbifer agarilyticus OX=260552 GN=Mag101_15470 P E=4 SV=1
MAQAIKKVVVAGGGTAGWMAAAALSKLMGKQLDITLVESEQIGTIGVGEATIPTLVFFHRLLGIDEAEFLRETQGTYKLGIQFENWRDVGKDYLHAFGVTGRDCWACGFQHFWLRAKELGFAGDFGEYCLERRAAEENKFTHLPNNGLNYAFHIDASRYAAYLRKFSEGFGVKRVEGKIDHVQLHPENGYIRSLKLDSGQEVEGDFFIDCTGMRALLIERALHTGFESWSHWLPCDSAMAVQTEAVEAPIPYTRSIAHESGWQWRIPLQTRVGNGLVYASRYQSDESARTQLLENVQGKTLTEPLSIKFQTGRRRKQWHKNCLAVGLSSGFLEPLESTSIHLIQQNIVRFLRFFPQQEIHQREVDEFNRQSEFDMERIRDFIILHYKVTDRTDTEFWRHCRQLSVPDTLAAKIDMFRETGHVFREGGELFVDSWQQVMLGQGLMPERYHPLVDAMSEQELKGFIEQVKSSVDTNVEKLKDHNVYLREMLAKSAP

SEQ ID NO: 84032 - protein, 498 aa, Caulobacter vibrioides
  misc_feature (1)..(498): tr|R0CSL5|R0CSL5_CAUVI Uncharacterized protein OS=Caulo bacter vibrioides OR37 OX=1292034 GN=OR37_03974 PE=4 SV =1
MNQPPVRKVVIAGGGTAGWMAAAALSRQLGPLLDITLVESEDIGTVGVGESTIPTARTFNALLGIDEAAFMRATQATFKLGILFENWGQVGDRYIHSFGQVGKSTWMGGFHHFWLEARAGGFGGDLGDYCLELRAAEQERFSAGDDPRLNYAYHLDAGLYGQFLRRMAEAAGARRVEGKIASVRQRGADGHVEALVMESGAVVEGDLFIDCTGFRGLLIEQTLKAGYEDWSHWLPTNSALAVQTRSIGPAVPYTRAIAHRAGWRWKIPLQHRVGNGLVYCSDHMSDDEAQAMLAAEIEGETLIPPRLIRYRTGKRRKTWDQNVVALGLASGFVEPLESTSIHMIMIGISRLMQLFPFDGISPAVVERYNRLADDELEKIRDFIILHYKLTERTDSPFWDRVREMEIPDSLAQRIALFRESGHLFQAPGELFQVDSWLQVMLGQRLEPRGHHGMGRLMPPAQLKQALDDLKANIARAVARLPPHQAFLDDYCAPLSKSA

SEQ ID NO: 84033 - protein, 447 aa, Streptomyces cellostaticus
  misc_feature (1)..(447): tr|A0A101N8B1|A0A101N8B1_9ACTN Tryptophan halogenase OS =Streptomyces cellostaticus OX=67285 GN=AQI88_40245 PE= 4 SV=1
MAKETADVVVIGAGPAGAVSAFVLAKQGHSVVLLEKEPNPRFHIGESLLPYMMGLFERIGLREVVEAQGYVRKFGGEFIDPTEKKFFEGVFRADFTKQGAGRHDNAFQVERRRFDRMLAEQAEAAGAKVVFGANVNDLLMEGDRMVGVRYDLDGESHEVRSSYVIDASGRTGKIAHRFGLRKTLEKLRMVGVFRHYSGLDERHNLGVEGDIQVGAHDDGWVWAIPLSKDTISVGTVMPRDVLRASTPEKVFEEHVARIPRIVARLTGTQPSMDFKIETDYCYHADTVTGPGWLMVGDAGCFGDPMFSGGVLVASATAVRAAETLGQALADPSAEEALFDRYSNYFKTGYDTYIRLIHAYYDGELVAMAADAARSTDRDTLEKYLVRLIGGDFWSEHNSVAQEMRRRKEWDTFEPFQRVYGCPSYPHLDEIDRKERSESRVRRVTAGR

SEQ ID NO: 84034 - protein, 511 aa, Sphingopyxis fribergensis
  misc_feature (1)..(511): tr|A0A0A7PE34|A0A0A7PE34_9SPHN Tryptophan halogenase OS =Sphingopyxis fribergensis OX=1515612 GN=SKP52_06765 PE =4 SV=1
MNEAIERIVIVGGGTAGWLAASRLASSRRAKAGRLLVTLIEAPDIPTIGVGEGTWPTMRATLAAIGIGEAEFLVACDGSFKQGSRFDGWLTGEEDDRYLHPFTSPPSAPTAELLAAWQAGASELTFAAAMGAQAHICDLDLAPRQRAMPDYQGAANYAYHLDAGKFAALLASHAVQKLGVRHISDHVVAVARDAGGGIASVATRQNGDVAGDLFIDCSGHASLLIGNHLGVEWIDRSDTLFNDRALAAQVPVAPGSPVASQTVSTAHAAGWIWDIGLPGRRGIGCVYASRFMDDDAAEATLRAYIARALPDAPEVPVRRLSFPTGHRARFWEGNCIAIGLSAGFIEPLEASAIVMIELSLNALLDNFPASRAAMAIHAERFNELFRYRWDRIVEFLKLHYALSRREEPYWLAQRDPAHVPPRLATMLQLWRDQPPSAWDFPRVDEIFSAESHQYILYGMGYPVPADLPASERAAALLAENRQRARSLAAALPANRDYLDALRPDSNAAAAR

SEQ ID NO: 84035 - protein, 530 aa, Caulobacter vibrioides
  misc_feature (1)..(530): tr|R0CXJ9|R0CXJ9_CAUVI Uncharacterized protein OS=Caulo bacter vibrioides OR37 OX=1292034 GN=OR37_03052 PE=4 SV =1
MNKPIDDILIVGGGTAGWLTAAYLARRLGGLRPDGVRITLIESSEIGIIGVGEGTFPTIQNTLRTIGIDEAQFMRGAGATFKQGIRFVDWKTAPKDGVHSHYYHPFASPRLLNGGLDLAPYWLLGAAGDIPFSDAVTLQDKVCEAGRAPKRLDDPQYGGPMAYAYHFDAGKLANLLRDVGKLTGVKHLLGNVTAVNKAKDGAIASIATAEHGELTADLYIDCTGFAGALIGKAMGGEWIDKSDTLFVDRALAMQVPYDRPDAPVSTTTISTAHEAGWTWDIGLPERRGAGYVFSSRHTSEDRAEEILRGYVGRAGDGLTPRLLKLKVGHRARHWIKNCVAVGLSGGFLEPLESTGIVLIEAAAYMLARNLPRHGGFEAAARQFNQAMTDRYLRAIDFIKLHYCISQRADNAFWTDNRDPASIPETLRDHLEMWKHRPPNMFDFPNLHESFKYFNYQYILYGMGYPTQVDPAAHDHVALARADFARVQEAGKRAAAGLPDHRLLLNAVHGRGFLSPAPAPGLAEVGETVQR

SEQ ID NO: 84036 - protein, 517 aa, Microbulbifer agarilyticus
  misc_feature (1)..(517): tr|A0A1Q2M4Q3|A0A1Q2M4Q3_9GAMM Tryptophan halogenase OS =Microbulbifer agarilyticus OX=260552 GN=Mag101_05845 P E=4 SV=1
MSDPINSVVILGGGTAGWITAGTLAARFNREQEEPVRVTLVESPTVPTIGVGEGTWPTMRSTLKKMGVRETDFIRECNVGFKQGAKFARWTTGADDDFYYHPLVQPEGFHNHNLATHWLGGNTSESFSNTVCPQEALCEHNRAPKQIGTPEYAAVANYAYHLDAGKFAGFLQRHCTENLGVRHILADVTGIEESETGDIAALKTEAHGKVSGDLFVDCSGFGSRLLGGHYKVPFRSCKDVLFIDSALAVQVPYEREDSPIATHTISTAQSAGWVWDIGLQSRRGVGHVFSSAHTSDSAAYGELARYLKVSEGELDRLGVRKIPIVPGHREKFWHRNCVAIGLSAGFLEPLEASALVLVEISANMLAEQFPASRAAMDVVARRFNETFLYRWDRIIDFLKLHYVLTKRTDSRFWIDNCDPATIPDSLQELLTLWRYQPPWHDDFDRAVEVFPAASYQYVLYGMEFETQPAAHGVSRASLEQAGQLFQQKGKATQQMLAGLEIHRNLVNKICRHGLQQI

SEQ ID NO: 84037 - protein, 516 aa, Caulobacter vibrioides
  misc_feature (1)..(516): tr|R0EF40|R0EF40_CAUVI Uncharacterized protein OS=Caulo bacter vibrioides OR37 OX=1292034 GN=OR37_03477 PE=4 SV =1
MSHANPNAIRKIVIVGGGSAGWITAAMLSHYFQNGGCQVELVESEEIGTIGVGESTIPPFLQLIASLGIDERAFIQATQASFKLGIRFEDWKLKGQHYYHPFGAIGGPIGPHEFYQCWLRAKANGHPSELQDFAPGTVMADQWKFMLPFRAQRSLISGASYALHVDARLVAKFLRDFAEARGVKRTEGIVTDVVTRPDGAVAKVVMKDGREVEGDLFIDCSGFRALLIGKTLNAPFDDWSDMLLCDRAVVVQTQNVGDPHPFTLSRAEDAGWRWRIPLQHRAGNGYVFSSRHLGDDEARATLVRNLQGPALMEPMFIPFKTGVRRRLWDKNVVAVGLAGGFIEPLESTALHLIYRGVDFLLRFFPDRDFDPTLAAEYNRRMVADYEEIRDFIVLHYCTTQRDDTPFWRDVRQAPIPESLKERMALFQAHGVLREGVDEMFRNPSWQSIMEGMGVRPRRYQQLVDTAPYAVIAQTLDQSKPMLAAEVAGLPSHGQFLAQNCPAPPPEAAAAPFKTVA

SEQ ID NO: 84038 - protein, 509 aa, Caulobacter sp.
  misc_feature (1)..(509): tr|A0A0Q6U0E8|A0A0Q6U0E8_9CAUL Tryptophan halogenase OS =Caulobacter sp. Root342 OX=1736519 GN=ASC62_19650 PE=4 SV=1
MTPSPIRKIVIVGGGTAGWMTAAGLAAVLKGLPVAIELVESAEIGTVGVGEATVPHIRDYNARLGLDEADFMRKTQATYKLGIEFRDWGRKGDAYVHPFGAFGQPIAGIPFHQHWLRARALAKKGLGEAAPIQAYSLPIMAGLAGKFAPPSPDPRSLGSTFSYAYQFDAGLYALYLRAYSEARGVVRTEGKIATVAQRPDDGFVTGVTLESGQTIEGDLFVDCSGFRGLLIEQTLQAGYDDWTQWLPCDRAAAVPCDSVEPATPLTRATSDAAGWRWRIPLQHRVGNGYVYCSSYISDDEAARVLLEKLDGEAQADPRFLRFVTGRRKQQWLKNVVAIGLSSGFLEPLESTSIHLIQVAISTLLELFPHQGCEQADQDEYNRVMDLEFERIRDFLVLHYHANQREDSAFWNDRRAAPIPDSLAQKIALFRERGVVAAYKDGFFKEPSWLSVYLGQNVLPDGFDPLVEAIDPAQSARLLAELQAAVARTVQSMPEHETFLRSVADARTPA

SEQ ID NO: 84039 - protein, 500 aa, Pseudoalteromonas luteoviolacea
  misc_feature (1)..(500): tr|A0A167NHI7|A0A167NHI7_9GAMM Tryptophan halogenase OS =Pseudoalteromonas luteoviolacea CPMOR-1 OX=1365248 GN= N473_07620 PE=4 SV=1
MNSRKIIILGGGTAGWMAANLIAKSWCDKDICISVIESPDIGIIGVGEGSTPQFKAFMDFIEVPESEWMPQCNATYKNGIRFVNWSMRPGFEQYFHPFPAQPDDYSAPAFFHNSFVRRKGVDLEGHPDPFFLATYLAEHAKAPIAAESFPFEINYGYHFDSAKLGLLLAEKAKSFGVEHIQARVQDVRKNTDGTIAALICESGIEVSGDIFIDCSGFSSLLLQQHLQVGFESFSNNLFNDSAVVLPTEQGDVIASETLSIARKYGWSWHIPLTNRIGNGYVYSSRYCNKDQAETELRAALGLLDSDIEARHLNMKVGQVKEHWHKNCVAIGLSQGFIEPLEATALHIVQETVQSFIECYQEENFSCKGRGKHNRMMSQRYQAIRDYIVAHYRVNSRNDTAYWRDNANNNQLSKSLFDVLNTWVQGKNLSDELDRQDIDKYYPSVSWHCLLAGYGIYPEQHQLVAASQAANKYEMSQVREYIRRCGLNFTDHRTQLARFID

SEQ ID NO: 84040 - protein, 518 aa, Caulobacter sp.
  misc_feature (1)..(518): tr|A0A0Q6UGT8|A0A0Q6UGT8_9CAUL Tryptophan halogenase OS =Caulobacter sp. Root342 OX=1736519 GN=ASC62_01285 PE=4 SV=1
MDNTGKISHLVIVGGGTAGWMSAAFFSKVFTPQQMRITLVESAEIGTVGVGEATIPPITFFNKVVGVDEGRMLAATQGSFKLGIEFVGWGDPAGRYLHPFGYYGAPMEGVSFHAYWLRARRLGYKADLAEFSLSCLAAKAGRFDWRVDDPHDPRAAMAHAYHFDASLYAKLLREVAEARGVRRVERTIRGVDLDPLDGTIASLALDDGEALAGDFFIDCSGFRGLLIGDALKVGYDDWSRFLPADRAVAVPSARFEDPIPYTRAIADTAGWRWRIPLQHRTGNGYVYVSDHIGDDAAADVLLASLAREHPDNKALADPRFLRFTTGRRKQSRVKNCAAIGLSSGFLEPLESTSIHLIQHGLIKLAGSFPLAKNDPAAAGIYNRIMGEEMEQIRDFLIYHYHANRRVGEPLWDRLRHMTVPDSLREKMELFRTRGATIFPNQTIFQEPNWLAIMMGQQGEPEGYDPLANLMDERLMAERLQQVRIACLKAVERMPTHAQVLGRFTAADGAKGKSDVEIA

SEQ ID NO: 84041 - protein, 505 aa, Sphingopyxis fribergensis
  misc_feature (1)..(505): tr|A0A0A7PNH2|A0A0A7PNH2_9SPHN Tryptophan halogenase OS =Sphingopyxis fribergensis OX=1515612 GN=SKP52_12890 PE =4 SV=1
MSRVGDGRITKVVIVGGGTAGWMAAAALSRTMDNLSIRLVESDAIGTVGVGEATIPAIRLFNALIGIDENEFIRETGGTFKLGIQFHDWGRIGDVYMHAFGQIGRSLGMLPFQQYWLRGRNEGVAGRLGDYSLNETAGRQNRFARLPQIPNTSLDGIAYAFHFDAALYAAYLRKISEAAGVERTEGQIASVRRNGESGHVEAVVLENGTAIEGELFIDCSGFRALLIEEALETGFEDWTHWLPCDRAIAVPSENAGPARPYTQAIAHKAGWQWRIPLQHRTGNGHVFCSDFIGEDEATAILLAHVEGRPLADPRTLRFRTGMRKKAWNANVVALGLASGFLEPLESTSIHLIQNGIAKLLAHFPDRDFDTANIDAYNRRVRFDYERIRDFVILHYHANQRTDAPFWVRCREMGIPETLARKIELFKSQGQIVREGDELFIEIGWFQVLTGQNILPGGYHPMADQLTRDELAGFFADIETIVARTASHLTGHEDFIAQHCAAGVPA

SEQ ID NO: 84042 - protein, 506 aa, Gallaecimonas pentaromativorans
  misc_feature (1)..(506): tr|A0A3N1PGC6|A0A3N1PGC6_9GAMM Tryptophan halogenase OS =Gallaecimonas pentaromativorans OX=584787 GN=EDC28_105 231 PE=4 SV=1
MTIKNVVILGGGSAGWMSAAMLVKSLGKQLAITLVESDQIATVGVGEATIPPIGLFNRYLGIDEAEFLTQTQGTIKLGIEFENWGREGECYMHAFGELGRDLGITPFIHYWLRARQQGHGRGLWDYSLNYQAAKAGRFIPLPKVPDSPLKGLVHAYHFDAGLYAGLLRRYSEGLGVKRIEGKVVEVALDEGGAISELVLASGQRVAGELFIDCSGQRARLIGEALGGQFEDWGHYLPADSALAVPSENTGEPRPYTRAIAHDVGWQWQIPLQHRTGNGLVYASRYLGDDEARAKLLAAIEGKALAEPRLIRFKTGRQRQQWLKNCVSLGLASGFLEPLESTSLHLVQSGITRLIKLFPRTGIAASAVAEFNRQSAEECEAIRDFIILHYHLNQRPEPFWQAMREMAVPSSLGRRLALFGDCGRVFREGAELFSEVAWQQVLIGQNLLPTDYDPLADSLDGKELEGYLANLATIITATRDKLPRHGDFLARARELAATKGKGLTTKG

SEQ ID NO: 84043 - protein, 528 aa, Microbulbifer agarilyticus
  misc_feature (1)..(528): tr|A0A1Q2M3G2|A0A1Q2M3G2_9GAMM Uncharacterized protein OS=Microbulbifer agarilyticus OX=260552 GN=Mag101_06145 PE=4 SV=1
MKSIKNVVVVGGGTAGWLAAASLARHLDPLTHHEYTVTLVESPDAPIIGVGEGTWPTMRNTLRNLGIDEFEFIRECDTSFKQGTRFVNWHTRAENGQDASYFHSFELPRGMWPIPPGPYWHHLQKELGLSYAEAISPQPAACMHHLAPKGLDTAQYETVLNYAYHLDAGKFATFLRRHACEKLGVTHLLAHVESVNVSEAGYIESIATKQGEKISGDLFIDCTGFASLLLDKTYHIPFRGVSDTLLVNKAVAMQVPYASEQAPICSPTLSTAQSAGWIWDIGLQTRRGTGYVYSDNHTSPDEAEATLRAYNKEALNKQVVNTNHQAVDVDQLDARQIDLRLGYREKVFHKNCVGMGLSAAFLEPLEASAIFLIEASCNMLTELFPQRMEQLGTLEKKYNAVFTQRWHRVVDFIKLHYFLSRRTDSGFWLDNTDQTTLPDSLKEQLEFWKFYPPTRFDMPSALEPFVRESYEFILYGMEYHADYQWSAGQLPHLENAQANFARIRKLSAEITDVLPSNRALINKIRKMR

SEQ ID NO: 84044 - protein, 510 aa, Mesorhizobium sp.
  misc_feature (1)..(510): tr|A0A4S0VRI4|A0A4S0VRI4_9RHIZ Tryptophan 7-halogenase OS=Mesorhizobium sp. M00.F.Ca.ET.170.01.1.1 OX=2500524 GN=EN813_002135 PE=4 SV=1
MVDTESTPAGRIRKVVIAGGGTAGWLAGCALAHQFRDQLEITLVESEQIGTVGVGESTVPPIRTFHRFLQIDEQDFLRAVAGTFKLSISFENWRLPGDRFFHPFGTIGHGTWAAPFHHFWLDSLRRGMPSDLGDFCLESIASRGDRFSLQTQPQASYAYHFDAGLYARFLRRRAEGHGLRRIEGRIAQVRQHAHDGSVQALVLEDGQVIEGDLFIDCTGFRGLLIEQTLGTGYEDWHEWLPCDRAVAVQTEAVAPPVPYTRAIAHEAGWRWHIALQHRVGCGLVYSSRHLSDDEATAKLLRDVGAPPLRDPWQVPFRSGRRLKAWNRNVVALGLASGFIEPLESTSIHLTISAVVRLIQLFPFDGIRASLVQLYNDVSRQEMEHVRDFIILHYHATQRTEPMWKACREMRVPESLQQRLQAWRERAHAWQDPGELFRVESWTSVLLGQGIPPGPPHPLARAVSDADLRTLLKGIQQPVQHAAAQMPTQAEFIAQYCRSGADVWRSMATPA

SEQ ID NO: 84045 - protein, 510 aa, Brevundimonas sp.
  misc_feature (1)..(510): tr|A0A326L6C9|A0A326L6C9_9CAUL Tryptophan halogenase OS =Brevundimonas sp. OX=1871086 GN=DI552_00755 PE=4 SV=1
MSQDQRIRRIVIVGGGTAGWMAAAVISRNLAADYAQIDLVESPEIGTVGVGEATIPPLLTLNRLLGVDENEFVRRTQATYKLGIQFRNWGRLGHEYVHPFGAYGADLDGIAFHQHWLRLRGLADVDAIDAYSLPIMAMKAGRFTRTSDDPRHVHSRMAYAYHFDAGLYGGFLREMAMARGVNRIEARIVDVALNPDSGFVEAVVLDDGRRIEGDLFIDCSGFRGLLIEQALKTGYEDWSRWLPMDRALAVPCEAVGAPTLYTRSTAHDAGWQWRIQLQHRTGNGHVYASAFTTEEAARDTLLTHLDGKPLADPRPLRFVTGRRKKAWNKNVVSLGLASGFLEPLESTSIHLIQSGVTTLMSLFPDRRFDQADIDKYNSLMREEYEHARDFIILHYHVGERDDSEFWRHVRATEIPDSLKERIDLFRSRGRVMGRHEDLFAHTSWVAVMLGQGITPEGHDPMADQSPAAEMAARLAQIRAVIRNGVSAMPPHQQFIDRHCRADAPAAKEPA

SEQ ID NO: 84046 - protein, 538 aa, Burkholderia sp.
  misc_feature (1)..(538): tr|A0A132CD22|A0A132CD22_9BURK Tryptophan halogenase OS =Burkholderia sp. ABCPW 14 OX=1637860 GN=WS62_27240 PE= 4 SV=1
MSNPIKNIVIVGGGTAGWMAASYLVRALQQQANITLIESTAIPRIGVGEATIPSLQKVFFDFLGIPEREWMPQVNGAFKAAIKFVNWRKSPDRSRDDYFYHLFGSVPNCDGVPLTHYWLRKREQGFQQPMEYACYPQPGALDGKLAPCLPDGTRQMSHAWHFDAHLVADFLKRWAIERGVNRVVDEVVEVHLNDRGYISSLSTKEGRTLEADLFIDCSGMRGLLINQALKEPFIDMSDYLLCDSAVASAVPNADARVGIEPYTSAIAMNSGWTWKIPMLGRFGSGYVFSSKFTSRDQATADFLNLWGLSDKQPLNQIKFRVGRNGRAWVNNCVSIGLSSCFLEPLESTGIYFIYAALYQLVKHFPDTSFDPRLTDAFNAEIVHMFDDCRDFVQAHYFTTSREDTPFWLANRHDLRLSDAIKEKVQRYKAGLPLTTTSFDDSTYYETFDYEFKNFWLNGNYYCIFAGLGMLPDRSLPLLRHRPESIDKAEAMFARIRREAGRLRTSLPTNYDYLRSLREGDAGLSRSQPGPTLAAPEIL

SEQ ID NO: 84047 - protein, 504 aa, Brevundimonas sp.
  misc_feature (1)..(504): tr|A0A326L0Z8|A0A326L0Z8_9CAUL Tryptophan halogenase OS =Brevundimonas sp. OX=1871086 GN=DI552_00890 PE=4 SV=1
MANGPIRDIVVVGGGTAGWMAAAALSRLSGNGVTRVVLVESDAIGTVGVGEATIPPIRTFNAMLGLDEADFVRETRGTFKLGIEFVGWTRPGHAYMHPFGAFGADLEGVKFHQAWRRLHDKGLAGPFGDYNICEAAARAGRFGPGDPRNPVTRTTWAYHFDAGLYAAYLRRYSQARGVVRHEGRVVSVEQRPEDGFLSAVMLEDGRRLEGDLFVDCSGFGGLLIEQTLKAGYEDWSRWLPCDSAVAVPCAHRDPGVLDPYTRATARTAGWQWRIPLQHRVGNGHVYSSAHVSDEDARALLLNHLEGEPLAEPRRLTFTTGRRKRAWVKNCVALGLASGFLEPLESTSIHLIQAGVTKLLALFPDRGFDPRDIAEYNRLTDLQIEQVRDFIILHYKANGRVGEPLWDHCRAMTVPESLERRMNLFRHKGRLFRHEDELFAESSWLAVLLGQAVTPQGHDPLADALPLPALDAAAREIRDRVCAVALAMPPQAEVIARFCAAPEAA

SEQ ID NO: 84048 - protein, 521 aa, Caulobacter sp.
  misc_feature (1)..(521): tr|A0A0Q6TXJ0|A0A0Q6TXJ0_9CAUL Tryptophan halogenase OS =Caulobacter sp. Root342 OX=1736519 GN=ASC62_08245 PE=4 SV=1
MTNTNPNAIKKIVIVGGGSAGWISAAMLSHYFQKGGPQKETCEVELIESEEIGTIGVGESTIPPFLQLIASLGVDEREFIQATQASFKLGIRFEDWKRKGEHYYHPFGAIGGPIGPHEFYQCWLRAKANGHPSNLQDFAPGTVMADQWKFMLPFKAQRSLIAGASYALHIDARLVAKFLRDYAEARGVKRTEGIVTDVVTRPDGGVAKVIMKNGHEVEGDLFIDCSGFRALLIGKTLDVPFVDWSDLLLCDRAVVVQTQNVGAPHPFTLSKAEDAGWRWRIPLQHRSGNGYVFSSKHLSDDEARATLVKTLQGEALMNPMFIPFKTGMRQRPWEKNVVAVGLAGGFIEPLESTALHLIYRGMDFLLRFFPDRDCDPALAAEYNRRMTADYEEIRDFIVLHYCTSQREDTPFWRACRDAPIPDSLKERIALFRAHGVLREGVDEMFRNPSWQSIMEGMGVRPRRYQQLVDTVPYEVIQNTLDQSAPMLAAQVAGLPSHGEFLAQNCPAPPPEPIAAPMKTVA

SEQ ID NO: 84049 - protein, 407 aa, Brevundimonas sp.
  misc_feature (1)..(407): tr|A0A3B9RKH7|A0A3B9RKH7_9CAUL Tryptophan halogenase (F ragment) OS=Brevundimonas sp. OX=1871086 GN=DCG66_10335 PE=4 SV=1
MDQPRRPLKKICIVGGGTAGWIAAALMAEHFKGRMAEVELVESDDIGTIGVGESTVPPFLEMLKKLGINEQDFIQQTQASFKLGIQFDDWTEKGESYFHPFGAIGVPVDVSDFYPVWLKARMNGYRRPLMDFASAAQMAAHERFMLPFKAQRSPIGGASYAVHVDAKRVARYLRDFAEARGVKRTEGIVEDVMTRPDGFVSGLKLKSGQTVEADFFIDCTGFRALLIGKTLGVGYTDWSEWLMCDRAIAIQTENVGAPKPYTLAQAQDCGWRWRIPLQHRTGNGHVFCSHYMSDDEATARLLAQVEGRPVVNPMVVPFKTGVREKIWDRNVLSLGLASGFIEPLESTAIHLIYRGMDFFFRLMPDLDCDPKLAAEYNRRMTVDYEEIRDFIILHYALTRRDDTPFWR

SEQ ID NO: 84050 - protein, 532 aa, Streptomyces sp.
  misc_feature (1)..(532): tr|A0A3R9WDZ5|A0A3R9WDZ5_9ACTN Tryptophan 7-halogenase OS=Streptomyces sp. WAC07061 OX=2487410 GN=EF912_10655 PE=4 SV=1
MTGTDSRIQKVVILGGGTAGWMTAAYLGKALQGTVDITVLEAPAIPRIGVGEATVPNLHKVLFDYLGIAEEEWMRECNASFKMAVRFVNWRTGGQGQPDARELENGGPDHFYHPFGILPDSDNVPMSHYWAKRKLEGLTEEPFDYACFREPPVMDAKKSPKWLDGTPSTRYAWHFDAALVADFLRRFATEKQGVHHVQDEMTHAEKDGRGFVKALHTKAGRVLDADLFVDCSGFRGLLINQALEEPFIDMSDHLLCDSAVATAVPHDDEANGIEPYTSAIAMSSGWTWKIPMLGRFGSGYVYSSKFTTKEEATREFSALWGLDPETTKFNHVKFRVGRNRRAWVNNVVSIGLSSAFLEPLESTGIYFITAAIYQLAKHFPDRTFNPELANSFNHEIEVMFDDTRDFIQAHFYYAPRNDTPFWRANKELTLPKNIQEKISAYKAGLAINSPIADESTYYGNFEAEFRNFWTNGSYYCVFAGLGLEPDAPLPILAHKPDSVAGAEALFGKVKQEQNHLLDTLPSTYDYLRKLHG

SEQ ID NO: 84051 - protein, 508 aa, Brevundimonas sp.
  misc_feature (1)..(508): tr|A0A521MMK0|A0A521MMK0_9CAUL Tryptophan 7-halogenase OS=Brevundimonas sp. OX=1871086 GN=EPO54_05695 PE=4 SV= 1
MTTAIPSATAVRRVVIVGGGTAGWMTAAALARLVAPSGVQITLVESEAIGTVGVGESTLPHIRAFNERLGIDEAAFMKATRATFKLGIQFENWGQIGGSYIHPFGDYGAPGGEAPFHHYWLRGRELGDVGPIDDYSLPVVAAREGRFAPPSDDPRSLLSTYRYAYQFDATLYARFLRGMAETEGVRRIEGRIQNVAQDGESGAITKVTLDDGRQIEGDLFVDCSGFRALLIEQTLKAGFTDWSHWLPCDRAVALPCESDQPTVPYTRATALEAGWQFRIPLQHRVGNGYVYSSAFIDDAAALDRLVGRLEGKPLKAPNVLKFTAGQRTRNWAANCVSVGLSSGFIEPLESTSIYLIQIAITKLIELWPTAVIDPATEAEFNRQMDLEYIRIRDFIILHYCATARNDTPFWDYVRTMPLPDTLSEKIELFRARGVVQDYREGLFLHPSWVAVYLGQDILPRRHHPLVDAVSATQLMSSLERLRRMVREASYKLPSQDDYIARYCAHLPL

SEQ ID NO: 84052 - protein, 521 aa, Xanthomonas dyei
  misc_feature (1)..(521): tr|A0A2S7C7R5|A0A2S7C7R5_9XANT Tryptophan halogenase OS =Xanthomonas dyei OX=743699 GN=XdyCFBP7245_05625 PE=4 S V=1
MSYTAPLDPQQRPVRRVVIAGGGTAGWMAAAALSKLLGRQLQITLVESDEIGTVGVGEATIPSLVTFHRLLEIDEATFMAATQATFKLGIGFEHWRDVDKHYIHSFGHTGTDHWSAGFHHFWLKGRQRGVARDFGDYCLELRAAQEGRFAHLPNGGMNYAYHLDAGLYARFLRRFSEGFGVQRIEGRIGEVQTDPDSGYLTALTLQDGTRVEGDLFIDCTGFAGLLIGKTLGVGSEDWSRWLFADSALAVQTESVGPPLTYTRSRADQSGWMWRIPLQHRVGNGIVYSSRYTDQDSARAVLERNLQGRALTEPRALRFTPNQRHRVWEKNCVALGLASGFLEPIESTNIHLIQRGIVRLLQTFPQTINAVDIAEYNRQAADEIAHIRDFVILHYHATDRRDTPFWRDCAAMDIPDSLRHRMELFRRSGRVFHQGNELFAENSWVQVMLGQGITPQQHHPVADLMGDAELAHFLERIRHRVDATVATLPPHADFLRHHCPAPPLPDPAARAPFDAALAAPAG

SEQ ID NO: 84053 - protein, 519 aa, Microbulbifer agarilyticus
  misc_feature (1)..(519): tr|A0A1Q2M9N3|A0A1Q2M9N3_9GAMM Tryptophan halogenase OS =Microbulbifer agarilyticus OX=260552 GN=Mag101_04505 P E=4 SV=1
MDSSEQIKRVLIVGGGTAGWLSACHLAKKLASSSPAGVQVTLVESENIPTIGVGEGTVPAIRDSLRYLGISETEFIRECDATFKQGIKFANWVRPPGTSGADYYHHIFDYPDNQFGDLTPYWLQGAADGSYVDTVAVQGAVCDSGLGPKDMTVPEYEGHTSYAYHLDAAKFARLLTRHGVKKLGVKHLLADVQSVLRDESGDITAVKTVAGEQLEADLFVDCTGFASLLLGQSLGVKFVDKRDVLFADYALAAQIPNQSKDAPIPSFTISTAQESGWIWDIGLSERRGTGYVYSSDHTSHDRAESVFRDYLDDKTGDLSIRRIPMRVGYRETFWQNNCVAIGLSQGFVEPLEATGILVYDAAARMLADIFPANKSAMPIVAKQFNQAVQYSWDCVIDFIKLHYCISGRRDHAFWVDNCDTRSIPDSLQEKLALWKFQPPSAYDFPSKFGIFNLANYQYVLYGMEFETTLSAGSSGWYTRMSEAVSRIQEISMFSKQLLGALPEHRVLIERIKKYGLQKI

SEQ ID NO: 84054 - protein, 519 aa, Massilia sp.
  misc_feature (1)..(519): tr|A0A0Q7WRR4|A0A0Q7WRR4_9BURK Tryptophan halogenase OS =Massilia sp. Root1485 OX=1736472 GN=ASD92_07715 PE=4 S V=1
MRSQPLEKVVIVGGGSAGWLTAALVAAAHQTPAGPALKVTLIESPEVAPVGVGEGTWPGMRETLHRIGVSENDFFRACDASFKQGSLFVGWVDGSDDDAYYHPFELPYGYGETHLAASWQRQHGAVPFADLVSVQPHLCRAGRAPKQATTPEFAAVANYGYHLDAARFGLFLRRHCTEKLGVIHVPDHVVAVHAHDDGDIASVQTKLGGAIEGDLFIDCSGSQALLLGKHYGVPLLPQQHILFNDRACVVQLGYPEPASPIASQTRSTAQEAGWIWDIGLPTRRGIGHVYSSAHTSDAQAEQALLAYVERSGGGAPMLTTPRKLGFEPGYRDHFWHRNCVAIGQSAGFIEPLEASALAMVELSATMLSDGMPANRAVMDIIAKRFNDAFTYRWERVIDFLKLHYVLSRRNASQYWRDHRAPESIPTRLNELLALWRTQPPSRYDLHRIEELFPAASYQYVMYGMGLVPEVDRRIRHCEHADLADGYFRQAAAMTRKMLAGLPGNRELIGHIVHHGMPTR

SEQ ID NO: 84055 - protein, 509 aa, Cellvibrio japonicus
  misc_feature (1)..(509): tr|B3PBU4|B3PBU4_CELJU Tryptophan halogenase OS=Cellvib rio japonicus (strain Ueda107) OX=498211 GN=CJA_1159 PE =4 SV=1
MKPLRIAIVGGGTAGWLAANHLAVELKAEPGIEITVIESPEIGIVGVGEGTVPHIKKTLQKFGIPEADMLAACDTSLKNGIRFANWMQPSRQGKAHVYYHPFSSPFPAGYDVTPYYLKYRAALSFGAVSHAPDISELGFSPKRISSVPFEGVVDYAYHFNAYKFGQLLAKNATQRFSVRRKEATICAVTRNEQGNVEALQTKEGESLAYDFFVDCSGFHALLLGNTYQVPFVDISDRLLTDTALAIQVPIKNNQPIPPYTQASAHGAGWIWDIPLTTRRGVGFVYASQCLSENDAIAGLAAYLGELPENMAPRKITMKMGYREKFWVNNVVALGLAGGFVEPLEATSILVTDFAAELFARNLPRDLSALPAVTSYCNKVMAYTWERVIDFIQLHYCISDRRDTEFWIANTHSGNLSEVLAERLAIWRVHSPKKADFFSRFDLFDVDNYLYVLYGMEYPTSPKSMTAYEEQVYREVLLGVRHHSDELARQLVGHRTWLDGFSQAYKQKAI

SEQ ID NO: 84056 - protein, 495 aa, Cellvibrio japonicus
  misc_feature (1)..(495): tr|B3PBE6|B3PBE6_CELJU Tryptophan halogenase OS=Cellvib rio japonicus (strain Ueda107) OX=498211 GN=CJA_2713 PE =4 SV=1
MVSAPVSSIVVVGGGTAGWMSAAYLAHWLDKTGIRVSLIESDQIGTIGVGEATVPGIHQFLKGLNIRESEFLRATNATFKLGIEFVEWAGAGKSFFHPFAGYGVPLEDRPFHKTWWSQKKQDYEEGLEAFCLCTQLARAGKFALPSFDQDSKLAWYNYAYHFDASLFAKFLREYAEKRGVSRIEGKVERVQLDATTGYISSLHMESGMVISGDLFIDCTGIPALLIGKTLGVGYEDWSHWLPCDSAVAIQTTRVVDPDPFTRSSARTAGWQWHIPLQHRVGNGYVYSSQFIAHDQARQELLGHLAGEPVTDPRLIRFKTGMRDSFWYKNCVSIGLSSGFLEPLESTSISLIQTGIAKLAAFLVNFEINEKHVAEANRLNRLEYERIRDFIILHYKLNGCDGPFWQYVRDMPIPATLEEKIAIFASSGDIKLIEQESFKEESWISMFYGFGREPLGSVEPQLDVDKARSIMAKMKSAIHKGCQHAMSHAEFLRTVE

SEQ ID NO: 84057 - protein, 334 aa, Brevundimonas sp.
  misc_feature (1)..(334): tr|A0A2D8FKD4|A0A2D8FKD4_9CAUL Tryptophan halogenase (F ragment) OS=Brevundimonas sp. OX=1871086 GN=CL682_00470 PE=4 SV=1
MDQPRRPLKKICIVGGGTAGWIAAALMAEHFKGRMAEVELVESDDIGTIGVGESTVPPFLEMLKKLGINEQDFIQQTQASFKLGIQFDDWTEKGESYFHPFGAIGVPVDVSDFYPVWLKARMNGYRRPLMDFASAAQMAAHERFMLPFKAQRSPIGGASYAVHVDAKRVARYLRDFAEARGVKRTEGIVEDVMTRPDGFVSGLKLKSGQTVEADFFIDCTGFRALLIGKTLGVGYTDWSEWLMCDRAIAIQTENVGAPKPYTLAQAQDCGWRWRIPLQHRTGNGHVFCSHYMSDDEATARLLAQVEGRPVVNPMVVPFKTGVREKIWDRNVLSL

SEQ ID NO: 84058 - protein, 501 aa, Brevundimonas sp.
  misc_feature (1)..(501): tr|A0A354EPY0|A0A354EPY0_9CAUL Tryptophan halogenase OS =Brevundimonas sp. OX=1871086 GN=DDY79_04435 PE=4 SV=1
MQSSQAIDRIVIVGGGTAGWMAAAALAHVFEGAGKSVTLVESEAIGIIGVGEATIPEILKFNARLGIDEADFLRETKATFKLGIEFDGWRREGERYFHPFGAFGVDMEGVAFHHFWLKACAEGQADPLETYSMAWQAARRGRFVHPQGGPQSPLSSLGYAYHFDAALYAGFLRRYAEARGVVRCEGRVVEVQQSQAGDVSGVVLEDGRLVAGDFFIDCTGFIGLLIEKTLKAGYDDWSAWLPCDSAVAVPCERVEPLSPYTRSTAREAGWQWRIPLQHRVGNGYVYSSSHLSHQDAEDALMARLEGPPLAQPRRLRFATGRRRECWKRNCVAVGLSSGFLEPLESTSIHLIQSAITKLITLFPSQTTDEGLRREFNALMEEEFVTVRDFLILHYKVTQRDGPFWAQVRAMPIPDRLADKIALFEQTGRIVRRDHDIFSESSWLAVAVGQGLAPRGRHPISDVLGRDENRARLAAIRDSIWRTADALPSHADALAATMRPHA

SEQ ID NO: 84059 - protein, 507 aa, Cellvibrio japonicus
  misc_feature (1)..(507): tr|B3PG13|B3PG13_CELJU Tryptophan halogenase OS=Cellvib rio japonicus (strain Ueda107) OX=498211 GN=CJA_3467 PE =4 SV=1
MHAIKSLVIVGGGTAGWMAAAFFAKRFTGCAMTITLVESTEIGTIGVGEATVPSMKMFLADLGIDEREFIQNTQATCKLGIDFNGWWQQDTAFFHPFAMFGAKIAHIPFHHYWAYLRAQGQAGPIDDYSLPAQMARANKFALPKDEALDIARFNYAYHFDAGSFANYLSRFAQTLGVKHIEARVTHVLKNADTGNISTLILNNGKEIEGDFFIDCSGFRALLIEENLHTGYQDWSHWLPCDRALALPCAHQGYIPPYTRALACTAGWQWRIPLQHRHGNGYVYSSHYISDDQALAELTQHMHAKPTADPRVIRFTTGMRNKCWNKNVFALGLSSGFLEPLESTSIYMVQTALATLFTYFPTTADNIALSTKVNKILAEHNEKLRDFIILHYHLNQRIGMDFWDACRAAPLPDSLSNRIEEFRATGNIRFNDLDFFQISSWLAMFSGFQLLPQYQHPKILHTNKTLIIQELQQMRNAIQRVVRELPEHHQFIAKNASLTNTAITAESG

SEQ ID NO: 84060 - protein, 497 aa, Chromatiales bacterium
  misc_feature (1)..(497): tr|A0A1F8TSQ8|A0A1F8TSQ8_9GAMM Tryptophan halogenase OS =Chromatiales bacterium RIFOXYA1_FULL_46_5 OX=1797676 G N=A2203_15605 PE=4 SV=1
MNNEQNRIKKVVIAGGGTAGWMTAAGLTKLLGKNLEVVLVESDDIGTVGVGEATIPTMHIFHRLLNIKESEVMAATNATFKLGIQFENWKTVGEDYIHSFGFLGKDCWACGFQHFWVKGRQKGIATEIGDYCVEHLGARQGRFAVLPNQDLNHAYHMDASLYAKFLRRMSEQHGIKRIEGKIREVQQHMDGNISALLLESGELIEGDLFIDCTGFRALLIEQTLNTGFEDWSHWLPCDSAFAVQTKTTQEPVAYTRAIARDAGWQWKIPLQSRVGNGLVFCSKFMTEAEAKQTLIDNVEGEMLFEPRLIKFKTGTRRQHWNKNCVAIGLSSGFLEPLESTSIHLIHRSIIRLLQMFPSNGIVSADVAEFNRQTKIEMDNIRDFIILHYKATERTDTRFWRYCKDMEIPDTLAHRMELFKQSGKVYKFAQELFGESSWLQVLIGQGLMPEQYHPIVDLMPDSELNDFLMSIKHNVKRTVSQFPTHHEFIQHYCKSSLV

SEQ ID NO: 84061 - protein, 509 aa, Brevundimonas sp.
  misc_feature (1)..(509): tr|A0A326L0J3|A0A326L0J3_9CAUL Tryptophan halogenase OS =Brevundimonas sp. OX=1871086 GN=DI552_01905 PE=4 SV=1
MRQLKRILIVGGGSAGWMTAALFSKLFRGRYDITLVESDAIGTIGVGEATIPAIRKFNELIGLDENDFIRRTQGSFKLGIQFVDWLRKGDRYMHAFGVIGRDLGWLRCHQYWLKMRESGGAGDLGAYSINAAAALENRFMRPDPKMRSSPLGQITYAFQFDAGLYARYLRQMSEAAGVVRREGKVCAVQLRAEDGFVESVTLEDGEVIAADLFVDCSGFRGLIIEEAMKTGYEAWTQWLPCDRAIAVPCARTEPFTPYTRATARDAGWQWRIPLQHRTGNGHVFSSRHMDEAEAERVLLANLDGAQLAEPNRIRFVTGKRRRIWNRNCVAVGLAAGFLEPLESTSLHLIQSSLIRLVRLMPDAGFDPANIDEFNRQTDFEYERVRDFIILHYKATERDDTPFWRHCRDMPVPDTLQRKIDLFRANGRVFREDDELFTEESWIQVFLGQGITPRHPDPLVDVTDEAAIDRYLGDIRSVVGKCVARMPPHPDYVARIVQAPQGQAAGASQT

SEQ ID NO: 84062 - protein, 496 aa, Hyphomonas sp.
  misc_feature (1)..(496): tr|A0A062U7Z3|A0A062U7Z3_9RHOB Uncharacterized protein OS=Hyphomonas sp. T16B2 OX=1280941 GN=HY2_07250 PE=4 SV =1
MQKVRKVVIAGGGTAGWITAAALSRMLGPLLDITLVESDDIGTVGVGEATIPTHRTFHHLLGIDEREFMRATKATFKLGIAFENWGGIGDTYIHSFGQVGKSSWMGEFYNIWLAAREKGIGEDLDAYCFELQAAKHNKFYTDEKFNINYAYHLDASLYAKFLRAFSEEKGVKRVEGLIGGVEQDGETGFITALKLKSGDRIEGDFFVDCTGFRGLLIEQTLKSGFEDWAHWLPTDSALAVQTRSVGPALPYTRSIAHQSGWQWRIPLQHRVGNGLVFCSQYMQPDAAEEILRNNIEGELLGEPRLIRYKTGRRRKVWNKNCVALGLSSGFLEPLESTSIHLIQIGASRLVQQFPFDGVSEAIANHYNEQSLRELERIRDFIILHYKVTERDDSAFWRDRRDMDVPDSLAQRLDVFRENGLAYQATDDLFRVDSWLQVMMGQRMRPKGYHHMGHMITEDQMRRALGGLSSGIANTVAKMPTHQDFIERYCAIEAEAV

SEQ ID NO: 84063 - protein, 477 aa, Empedobacter haloabium
  misc_feature (1)..(477): tr|A0A5C7BFA5|A0A5C7BFA5_9FLAO Tryptophan 7-halogenase OS=Empedobacter haloabium OX=592317 GN=E7V67_28205 PE=4 SV=1
MVAAGLSKSLGKLLDIKLIESDEIGTVGVGEATIPTLMNFHHLLEIDEREFMAETMATFKLGISFENWRNVGEDYIHSFGTTGTDHWTAGFQHFWHKGRERGLAGDYGDYCLELKASLHNRFAHLPKNGMNYAYHMDAGRYAKFLRRFSERYGVQRVEGKIAEVRKDLICGDIRALRLDSGVELEGDLFIDCTGFRALLIGETMGVGYEDWSHWLFNDSAAALQTKSVGDAIPLTRSIARESGWQWRIPLQHRVGNGIVYSSRYTDDDTAIRTLQANVEGEPLMTPRIIRFKPGQRQQTWKGNCVAIGLASGFLEPIESTSIHLIQRGIIRLMQMFPTDGISQADVDEYNKQAETEIHHIRDFIILHYHVTNRRDTPYWRDAASMPVPASLRHRIDLFRETGRVFRIPNELFAENSWIQVMLGQGIHPRQHHQTADLMGDDELAHFLGSMATSIERTVAQLPSHQQYVQQYCAGTGW

SEQ ID NO: 84064 - protein, 356 aa, Sphingobacteriales bacterium
  misc_feature (1)..(356): tr|A0A4Q3G882|A0A4Q3G882_9SPHI Tryptophan 7-halogenase (Fragment) OS=Sphingobacteriales bacterium OX=2044944 G N=EOP48_23225 PE=4 SV=1
NRFSINEHNKINYAFHLDAGRYASFLRARSESRGVKRVEGKIASVQQNSDTGFITSLKLESGQEIAGDLFIDCTGMRGILIEQCLQTGFEEWGHWLPCDSAIAVQTESHEPAVPYTKSIAHHAGWRWQIPLQHRVGNGIVFSSPYLSNDEATNMLLSSMQGKVLTEPRVIKFKTGRRKKSWNKNCIAMGLASGFLEPLESTSIHMIMTAVTRLLQLFPHDEIRQSIVDEYNTQAESEYVRIRDFIILHYKATERDDSPFWRYCKNMEIPADLKHRMNLFKEFGRSNQVEGELFRLDSWTQVMLGQGILPSSHHPIVELMPEQELQHFLSGIATDVDKNIAMMSTHHEFITKYCDIK

SEQ ID NO: 84065 - protein, 322 aa, Caulobacter sp.
  misc_feature (1)..(322): tr|A0A258K5R2|A0A258K5R2_9CAUL Tryptophan halogenase (F ragment) OS=Caulobacter sp. 35-67-4 OX=1970331 GN=B7Y78 _14875 PE=4 SV=1
MAAASLQRHFQGSPLKITLIESSEIGTIGVGEATIPTIRNFYQNLGLSDLDVMRATGATCKLGIRFNDWLKPGSSFLHPFGLFGQDLRGVPFHHYWLRLKALGDESEIGEYSLGASLDKGGKFTQPSRNPPSSLSVFDWALGVKRIDARITRVNLRPEDGFIASVDLDTGATVEGELFIDCSGFRGLLIEEALHTGYEDWSPWLLCDRALAVQSEGSGEPPPYTDVSAQTAGWRWRIPLQHRYGNGYVYSSRHISDDDAMAELKGAVPDPLLHEPRQIRFTPGRRLKAWNKNCVALGLAAGFLEPLESTSIALIETGIEKIK

SEQ ID NO: 84066 - protein, 505 aa, Burkholderiales bacterium
  misc_feature (1)..(505): tr|A0A1F4HSG7|A0A1F4HSG7_9BURK Tryptophan halogenase OS =Burkholderiales bacterium RIFCSPHIGHO2_12_FULL_69_20 O X=1797561 GN=A3E25_10125 PE=4 SV=1
MDNKLIDTIVIVGGGTSGWMTAAALAKVLRGKYKIQVVESDEIGTVGVGEATIPMIRRFNQVLEIDEDEFLRETQGTFKLGIEFVNWGRPGERYMHGFGVFGQDLWTVGFDQYWQRMHQAGKALDLEAYSINRMAARANKFMRAQPDLGNSPLADIVHAFHFDASLYARYLRRYSEALGVQRIEGRIVDVLLRGSNGHVDSLQLDDGRRVAGELFVDCSGFRGLLIEQTLQTGYEDWTHWLPCDRAVAVPCESVSELLPYTRSTAHQAGWQWRIPLQNRIGNGHVFCSAYISEDEATAVLMANLDGAPLAEPRTLRFATGMRRQAWNRNVVAVGLAGGFMEPLESTSIHLVQTAIARLLAFFPDRSFNPLDIDEYNRQSRFEFERIRDFIILHYHLNQREDAPFWQHCREMEIPATLQQKIDLYRAHGRIVREGSELFAEVGWLQVMHGQGLRAQGHHPLASLITEPEVAEYLDNVSGVIGKCLQVMPGHAEYVARHCAAPAARR

SEQ ID NO: 84067 - protein, 497 aa, Caulobacter vibrioides
  misc_feature (1)..(497): tr|R0D391|R0D391_CAUVI Glycine/D-amino acid oxidase, de aminating OS=Caulobacter vibrioides OR37 OX=1292034 GN= OR37_01094 PE=4 SV=1
MNRISRVVILGGGTAGWMTAAALSRCFGRTVRIDLVESEAIGTVGVGEATIPTIHWFNALIGLDEAEFLRATKASFKLGIEFVDWARPGHRYFHPFGRYGVELDQAPFHQLWLKSRADGSSRPLSDFSLATALAAANRFAKPAEDPRSILSTLGYAYHFDAALYASHLRGLAEAAGVVRHEGKVTAVERDPKSGFVVALSTDRGERIEGELFIDCSGFRALLIGEALGAPFEDWSHWLPCDRAVAAPCARSRETTPYTRSTLRPAGWQWRIPLQHRTGNGYVYASAFISDDEAASTLLANLDGELLAEPRFLRFKAGFRRESWRGNVVAIGLSAGFLEPLESTSIHLIQSGIAKLISLFPDRDCDPSLARQFNALFGRDMDGIRDFLILHYHATEQHNQPLWRQARAMAAPDSLSEKIAHYRRSGRLMLSQDELFREASWLAVLEGQGIVAQGYAPLADTLDPASNLRRLDDLAALIARAAPTLPNHDAVIAELVGG

SEQ ID NO: 84068 - protein, 505 aa, Xanthomonas dyei
  misc_feature (1)..(505): tr|A0A2S7C973|A0A2S7C973_9XANT Tryptophan halogenase OS =Xanthomonas dyei OX=743699 GN=XdyCFBP7245_03940 PE=4 S V=1
MHQARIRKVVIAGGGTAGWIAACALSHQFRDLLDITLVESDQIATVGVGESTVPPIRTFHRFLQIEEQEFLRAVAGTFKLSISFEHWRRQGERYIHPFGITGQSTLVCAFHHLWLESQRRGMPGAFGDYCLETVASRVNRFALPREPAVNYAYHLDAALYARFLRTRSEAHGVTRVEGKIQQVTLQPDSGDVAALVLEDGQVIEGDLFIDCTGFRGLLIEQTLHTGYEDWSHWLPCDRAVAVQTEAVGPPVPYTRAIAHEAGWRWHIPLQHRVGNGLVFSSQHMSDDEAQAKLLRDTAATPVKEPWLVPFRTGRRLKAWNKNVVSLGLASGFIEPLESTSIHLTIAAVVRLITLFPADGIAPSQVDVFNDISRAEMKHVRDFVTLHYHATQRDEPLWQQCRDMELPDSLRLRLRAWRERAHAWQGTDELFRVDSWTHVLLGQGIVPLQHHPLAAALSDNDLRRLLDGIAQPIQRVVEKMPSQQEFIERYCKADEQLWGGRRRVAM

SEQ ID NO: 84069 - protein, 512 aa, Burkholderiales bacterium
  misc_feature (1)..(512): tr|A0A1F4HH63|A0A1F4HH63_9BURK Tryptophan halogenase OS =Burkholderiales bacterium RIFCSPHIGHO2_12_FULL_69_20 O X=1797561 GN=A3E25_09040 PE=4 SV=1
MNQFTAPGPVPNPGGERPPVRRVVIAGGGTAGWMVAACLSKVLGKALDIRLVESDEIGTVGVGEATIPTLLTFHQLLDINEQEFMAATQATFKLGIGFEGWRDQGQDYIHSFGLTGQDHWTAGFQHFWLKGRDRQLAGDYGDYCLELKAARHNRFAHLPRAGMNYAYHLDASLYAQFLRRFSERLGVQRIEGRITSVQADAASGHIRAIQLDSGARIEGDLFIDCTGFRGLLIGETLKVGYEDWSHWLPCDSAVAVQTASVGEAVPYTRSMAHEAGWQWRIPLQHRVGNGLVYCSQYLPDAQARQRLLDRVQGPTLTTPRLIKFTPGQRQATWRGNCVAIGLSSGFIEPLESTSIHLIQRGIVRLMQLFPAAGISPADVDEYNQQARAEIEHIRDFIVLHYHVTQRDDSPFWRGCRSMDIPPSLRHRIDLFRDSGRVFRTGNELFAENSWIQVMLGQGIVPRRHHPVADLMGDAELAHFLDGIRAQVDRTLAQLPQHEAYVRQYCGVAAAPR

SEQ ID NO: 84070 - protein, 496 aa, Microbulbifer agarilyticus
  misc_feature (1)..(496): tr|A0A1Q2M8A2|A0A1Q2M8A2_9GAMM Tryptophan halogenase OS =Microbulbifer agarilyticus OX=260552 GN=Mag101_15440 P E=4 SV=1
MNNKVVKNLVILGGGTAGWITAALMCKVLGKSINITLVESDKIGTVGVGEATIPPIINFNQALGLDEKEFLRETKGTIKLGIQFENWLKRGDSYMHAFGTIGKNFPFCDFHHFWVRHRQNGGTESLWDYSLNYQAAKNNKFSPLGQIKGTNLPGISYAYHFDAGLYAQFLRKYAESKGVTRIEGTVDEVKLNPESGYVEKLVLEGGREVPGDLFVDCTGMAALLIHKALGVGYDDWSHWLPCDRAQAVPSALVKPIVPYTRSIAHEAGWQWRIPLQHRTGNGLVYSSRHWTDEQAREVLMSNLDAEPLADPKVIRFRTGRRREAWRKNVVAIGLSSGFLEPLESTSIHMIQTAATRLIKCFPHRGIRAEEVAEYNRQSQVEIERIRDFIILHYKANQRRDSEFWRQCEEMAVPDSLHEKMELFRRSGKAFRDFDDLFTEVAWQQVLIGQGVMPEDHHVIADGLSDSQLTDLMESLQTLIQGTVKQLADHDDFLASL

SEQ ID NO: 84071 - protein, 500 aa, Sphingomonas carotinifaciens
  misc_feature (1)..(500): tr|A0A1G7RMY0|A0A1G7RMY0_9SPHN Tryptophan halogenase OS =Sphingomonas carotinifaciens OX=1166323 GN=SAMN0521655 7_11229 PE=4 SV=1
MSDPLRSIVIVGGGTAGWMAATYLARRLSHLRPDITVIESPAIGTVGVGEATVPAIRDFLAAVELGEPEVLRETEGTIKYGIRFVDWQTKGHAFFHPFGLYGVPAGGVPFHHHWLRARAVGDATPLDAYCLATQLADHGLFLAPPDRPENDLGHFNFALHFDAVRFAHLLSRLAIANGVRHVPARIDAVIRDPQSGDVSGVRLESGAVVHGDLWIDCSGFRSLLLGEAMGVPYRDWREWLPCDRAVAMPCAPAGATMHPRTTATALPAGWQWHIPLRHRIGNGYVYCSDHVSDDEAEQTLRDRLEGAPLGNANRLRFTPGHRAEVWHRNVVGVGLASGFLEPLESTSISLVQSGLQRLVQLWPQRDIDPRLAAVYNRQSVLEFERIRDFLLIHYMFNRRIGEPFWDRMRAIEPPDHLRMKLDSWRACGEFVRYEWESFQDPSWLSLYAGLNQLPAHHSMLADAYPMPALSGHLASIRASIARVLAHGERHDRFLARVAAG

SEQ ID NO: 84072 - protein, 508 aa, Empedobacter haloabium
  misc_feature (1)..(508): tr|A0A5C7BES6|A0A5C7BES6_9FLAO Tryptophan 7-halogenase OS=Empedobacter haloabium OX=592317 GN=E7V67_28220 PE=4 SV=1
MAHPIRHIVIVGGGSAGWLTAGVIAADHRGHAPDGLRVTLIESPDVAPIGVGEGTWPTMRDTLARIGVSETAFFRECDAAFKQGSRFDGWRGSEHADYYFHPFVLPQGYGETDLIGPWQREFSHVPFADLVSFQPHLCVQGRAPKQATTPEFAAVANYGYHLDAGKFGVFLRKHCLERLGVHYVPDHVTGIASDESGDIAALQTRAHGALAGDLFIDCTGMQSLLLGQHYGIGLVDQRHVLFNDSALAVQVPYLNEDSPIASQTTSTAQRAGWIWDIGLPTRRGIGHVYSSAHTSDDEAAADLCAYLGTDATPRKLTFQPGYRRTFWHRNCVAIGLSAGFIEPLEASALALVELSAALVSDDLPATRATMDAVARRFNDAFTYRWERVIEFLKLHYVLSRRPGAYWDDHRDERSIPVRLQELLALWRHRPPSRLDFHRIEEVFPSASWQYVLYGMGFTPEPGGTRRTDPTVAAQYYREAADLTRRMLGALPSNRALIDHIRRHGLQKI

SEQ ID NO: 84073 - protein, 511 aa, Massilia sp.
  misc_feature (1)..(511): tr|A0A0Q7XUT5|A0A0Q7XUT5_9BURK Tryptophan halogenase OS =Massilia sp. Root1485 OX=1736472 GN=ASD92_13825 PE=4 S V=1
MMSKPIEHVVVVGGGSAGWLTAGVLAAEHPRLTVTLVESPGVPPIGVGEGTWPSMRETLQRIGVSEAAFFRECDAAFKQGSRFDRWVDGSDGDVYFHPFSLPQGYGEANLVAAWQRAHRGVPFADLVSYQPHLCVQGRAPKQPQTPEYAGVANYGYHLDAGKFGVFLQKHCVDKLRVRHVLAHVVDILSTDDGDIAALRTREAGLIEGDLFIDCTGMASLLLGRHYGVPLVSQRDVLFNDRALAVQVPYPTDDTPIASQTTSTAQSHGWTWDIGLPARRGVGYVYSSAHVDDDAAEQTIRAYLASTGITGEIPAPRKIAFDPGYRARFWERNVVAIGLSAGFIEPLEASALALVELSAGWLADDLPATRAQMDAIAARFNEAFTYRWERIIDFLKLHYVLSKRTDTDYWLDHRAARTQSPRLRELLALWRTRAPSRRDFPRIEEIFPSASWQYILYGMGFRPELTARASDLPERADQYFREAARLTARMLPQLPANREMLHHIRQFGMPPG

SEQ ID NO: 84074 - protein, 494 aa, Gallaecimonas pentaromativorans
  misc_feature (1)..(494): tr|A0A3N1PCU5|A0A3N1PCU5_9GAMM Tryptophan halogenase OS =Gallaecimonas pentaromativorans OX=584787 GN=EDC28_102 136 PE=4 SV=1
MDNKITKVVIAGGGTAGWMAAAAFGKLMGKRLDITLVESDDIGTVGVGEATIPTLQLFHRLLGIKEPELMAATNATFKLGIQFENWYQQGQNYLHSFGFLGQGCWACGFHHFWKKGQELALVSEIGDYCAEHLAARQGRFAVLPGQDANHAYHFDAALYARFLRQLAENHGVKRLEGKIAKVRQCPQSGNLQALQLESGEQVAGDFFLDCTGFRALLIEQTLHAGFDDWTHYLPCDSAIAVQTENIGAPLPYTRAIAHHSGWQWRIPLQSRTGNGLVFCSSYMTDDDAIKLLLENIKGAPINAPRVIKFRTGSRRAHWKKNCVALGLASGFLEPLESTSIHLIQRSIIRLLQMFPSQGLIEADMLEFNRQTMEEMTNIRDFLVLHYRATARTDSPFWRHCAAMDIPDSLARRISLFRESGAVYKYSQDLFGESSWVQVMMGQGIVPARYHPIVDMLDIKELGDMLDKLRAKARHEAGRFPPHQDFINHYCKAAP

SEQ ID NO: 84075 - protein, 514 aa, Burkholderiales bacterium
  misc_feature (1)..(514): tr|A0A257CM19|A0A257CM19_9BURK Tryptophan halogenase OS =Burkholderiales bacterium PBB6 OX=2015568 GN=CFE46_056 65 PE=4 SV=1
MSPKALRRVVIVGGGTAGWMTAAPLAQLLCGPTGAPGCEVVLVESDQIGTIGVGEATLPTLRQFNQALGVDEAHFLSHTKATFKLGIEFKDWGRLGHRFFHGFGDFGPPIEGRSAYIQWLRLQRAGGMPPLESWSVASVMARQHRFVPPSGDRPSPSNAYGHAYHFDAGLYAAYLRDVATRHGAQRMEGTIVDVEVDGGTGFVQAVRLADGRRVEGDLFIDCSGLRALLIEGVMKAGFDDWSAMLPCNSAQAVPSERSGPLLPFTVSAAKSAGWTWRIPLQHRTGNGHVYSSGFTSDDAAAAALLDGLDSAAIGEPRTIRFTTGMRRKSWVRNVVAIGLSAGFLEPLESTSIHLILDAVGRLIHLLPDRDCQPALAAEFNRKTTIQFEAVRDFIILHYKLTQRTDTEFWRYCAAMPVPPALAEQIELFRATGRVSVRDPDGFLEPSWLSIYEGHGLRPTSFDPLAHRVPEAPLRQHFARLQQAIGQMVTSMPQHADTVAHWAAAGAARGHKVGG

SEQ ID NO: 84076 - protein, 506 aa, Caulobacter sp.
  misc_feature (1)..(506): tr|A0A0Q6U1C5|A0A0Q6U1C5_9CAUL Tryptophan halogenase OS =Caulobacter sp. Root342 OX=1736519 GN=ASC62_08250 PE=4 SV=1
MQDNRIRKLVIVGGGTAGWMAAAALRRHFQGGPLEITLVESSEIGTIGVGEATIPTIRGFYQRLGLSDIEVMRATGATCKLGIRFNGWAGEGQSFIHPFGLFGQDLRGIPFHHYWRKLAQAGEPTDIADYSLGASLAAAGKFMAPPRNPASSLSIFDWALHFDASLFAQLMRRVAEDNGVRRIDAKVTKVNLRPEDGFVASLDLHTGETLEGDLFIDCSGFRGLLIEEALRTGYESWSDVLFCDRAYAVQSEGVGDPMPYTDVTAQSAGWRWRIPLQHRYGNGYVYSSRHVSDEDALAELKAAVPDPPLHEPRQIRFNPGRRKQAWNKNVIALGLASGFLEPLESTSIALIETGVEKIKALFPDKDFAPELVDEFNDWSKREMERVRDFIILHYWANKRGDTAFWRDCNTITLPDTLQRKVELFRQRGHFVRYRWEMFQPASWMAIYAGFGLLPEMVDPALDGIDPKTLSAPLAEMRKAVREVVAAAPPHGAFLEEYCRPVPIAAQ

SEQ ID NO: 84077 - protein, 515 aa, Burkholderiales bacterium
  misc_feature (1)..(515): tr|A0A1F4HIM2|A0A1F4HIM2_9BURK Tryptophan halogenase OS =Burkholderiales bacterium RIFCSPHIGHO2_12_FULL_69_20 O X=1797561 GN=A3E25_09025 PE=4 SV=1
MGDAVRRVVIIGGGSAGWLVAAVLAVDHAAATAEGLQITLLEAPGIPPIGVGEGTWPSMRDTLRKIGLAEADLVRDCDAAFKQGSRFDGWVSGAAGDHYSHPFALPQGYTEADLVGTWLARHADQPFAEVVSFQPRLCAHGLAPKQVTTPEYAAVANYGYHFDAGKFGLLLRRHCTEQLGVRHVCDEMIGVQSHANGDIASLQTRAHGALAADLFIDCTGLPSLLLGQHYGVPLVSQRQVLFNDRALALQVPYPQPDSPIASQTLATAQGNGWIWDIGLPTRRGVGHVYSSAHCSDDAAEQALRRHIRASGGPDDLPAARQLRFEPGYRAEFWHRNCVAIGLSSGFIEPLEASALALIELSVHALSAQMPATRAAMDIVARQFNEAFSYRWERVIDFLKLHYALSQRRDTDYWRDHTAAASMPERLRELLTLWRHRPPSHYDLACIEEVFPSASYQYILYGMGFRPEAGSRRREDPALAERCFQEAAALAARMRPALPGNRALITHIQRHGLPKI

SEQ ID NO: 84078 - protein, 504 aa, Microbulbifer agarilyticus
  misc_feature (1)..(504): tr|A0A1Q2M4N1|A0A1Q2M4N1_9GAMM Uncharacterized protein OS=Microbulbifer agarilyticus OX=260552 GN=Mag101_05870 PE=4 SV=1
MNRKKLIVVGGGTAGWMAALMLQKAVGDSWTIELIESSKRGIIGVGEGSTPALKSFFEDLEIPEDEWMQACSATYKSGITFDRWSEKSGFTSYFHPFYSHFDRDHAKALIHNSHLRRSGKDVHAHPDVFSYNHYLAKNRLSPVVPHHFPFEVQYGYHFDAGLLAQYLKKVALIRGVHHRDALITEVDLSTSGDIAAVIDEKGERHEGEWFIDCSGFAALLIGDTLKTPFTSYADTLWNDSAVTLAMPPDAEPPCETVSTALKNGWAWRIPLQSRVGYGYVYSSRYCTREEAEEELRAHAGADASVDARHLSMNIGRREEHWVKNCVAVGLSQGFIEPLEATSLALTQQTITRFIHAFREGNTGEEFREIFNTSVNKSYDDVRDYISVHFLTNSRTDSQYWVDSREKPGPASKALSAVFSCWFDNGDLPGLLKHLKIDGAYSNFSWHYILCGMGVFPAAETLTSPSPKDLSGIDFEQIRDFFARCTLNHQSHIEALKFSGLKRLL

SEQ ID NO: 84079 - protein, 121 aa, Sphingobacteriales bacterium
  misc_feature (1)..(121): tr|A0A4Q3B6W5|A0A4Q3B6W5_9SPHI Tryptophan 7-halogenase (Fragment) OS=Sphingobacteriales bacterium OX=2044944 G N=EOP53_20175 PE=4 SV=1
MTNKSSKPKKILIVGGGTAGWMAANLIASRWHDIEICLLESTEIGIIGVGEGSTPHLKFFFDAIGISEPEWMPRCNATYKNGISFVNWSSVPGFGSYFHPFPAQTDDFTVPIFFNNIKARI

SEQ ID NO: 84080 - protein, 503 aa, Caulobacter sp.
  misc_feature (1)..(503): tr|A0A0Q6U570|A0A0Q6U570_9CAUL Tryptophan halogenase OS =Caulobacter sp. Root342 OX=1736519 GN=ASC62_19635 PE=4 SV=1
MIENHRLRRVVIVGGGTAGWMTAAALGRFLKDGYTQVTLVESEAIGTVGVGESTIPQINMFNRMLGLDENEFVKKTKATFKLGIDFVDWQRIGHSYHHPFGPYGVDMEGVSFHAYWLKARAMGLDDDLGAYSLQTVGSRQSKFMRPNGQANSPLGQIAYAFQFDAGLYARFLREYAEARGVVRQEGRIATVQQDGETGFVTSVSLENGQVVEGDLFIDCSGFRGLLIEQTLKAGYEDWSQWLLNDRAVAMPCALAGSMAPVTRATARPYGWQWRIPLQHRLGNGYAYCSRFISDDEATADLLGNLDGEPLAEPNLLRFTAGRRKTSWDKNVVAIGLSAGFMEPLESQSIHLIQVGISRLLAHFPDRHFRQADTDRYNRTMTFEYEKIRDFLILHFKATERNDTPYWDYLREMPIPDYLTDKIELFRGSGRIFRENEELFNDTSWFAVMIGQGITPESYDPMVDSMDEALFRSRMAEIKAVIARSAEVMPDHMAFIAEHCAAEG

SEQ ID NO: 84081 - protein, 503 aa, Massilia sp.
  misc_feature (1)..(503): tr|A0A0Q7XV12|A0A0Q7XV12_9BURK Tryptophan halogenase OS =Massilia sp. Root1485 OX=1736472 GN=ASD92_13810 PE=4 S V=1
MENNNQQGRGRPIRRVVIAGGGTAGWMAAAALARTLGKVVDIKVVESDDIGAVGVGEATIPSLVHFHRLLDIGEQEFMAATQATFKLGISFESWRARGEDYIHSFGMTGTDHWTAGFQHFWLKGRDRGLASDYGDYCLELVASQEKRFGHLPNQGINYAYHLDATRYARYLRRFSEHFGAERIEAKIAKVDTDPATGHITALVLDAGTRVEADLFIDCTGFRSLLLGQTMGVEYEDWSQWLFNDCAIAVQTESTGPAVPLTRSMAHDWGWQWRIPLQHRTGNGVVFSSRYTDEATARATLLGNIEGKVLTEPRVIRFTPGQRKKVWVGNCIGLGLASGFLEPIESTSIHLIQRGIVRLLQTFPTYGIQQADVDEFNVQTEEDIRTIRDFIILHYKVTNRRDTPYWHDAASMPVPDSLQHRIDLFRGGARVFREGNELFAENSWVQVMVGQGLTPERWHPSADLMGDDELRGFLDGIRNGVRRTVSQLPPHQQYVERYCPAGKP

SEQ ID NO: 84082 - protein, 500 aa, Sphingomonas carotinifaciens
  misc_feature (1)..(500): tr|A0A1G7QPA5|A0A1G7QPA5_9SPHN Tryptophan halogenase OS =Sphingomonas carotinifaciens OX=1166323 GN=SAMN0521655 7_108164 PE=4 SV=1
MTGSSTRSVVIVGGGTAGWMAAAALARFLPPDHRIRLVESDAIGTIGVGEATIPALRIFNHMLGIDEDAFLRATQGTFKLGIEFAGWSGDGSRYTHAFGTIGRALGLVPFHHYWLRAGRPGSLWDHSAAAQAAAAGRFARDHGRPDLPSGIAWAFHFDAALYAAFLRRHAEAAGVERIEGRITGVERDGETGHIAAVHLEGDRRVAGDLFVDCSGFRSLLLGETLGTAFEDWSHHLPCDRAIAVPTARLDPLSPYTRATAHPAGWQWRIPLQHRTGNGIVYASAHLSDDEATARLLAGCNGAPLAEPRPLRFTTGRRRAAWVGNCVALGLAAGFMEPLESTSIHLVQSGIARLLEYWPGKTLADADIAAFNRRTEAEWLAIRDLLILHYHANARPEPFWQARRDAPPPDSLAERLALFRANGRILREGDELFTEVGWLQVLIGQGVQPLGHHALADAIPPADLADFLALARTHAAAVAARMPAHDAFIAAHCAAPVSKAA

SEQ ID NO: 84083 - protein, 505 aa, Limnohabitans sp.
  misc_feature (1)..(505): tr|A0A315D1C0|A0A315D1C0_9BURK Tryptophan halogenase OS =Limnohabitans sp. Bal53 OX=1977910 GN=B9Z50_16725 PE=4 SV=1
MHNPLIQTLVIVGGGTAGWMTAAALSTVLRGRYKIRLVESEDIGIVGVGEATIPMIQRFNTIVGIDETEFIQATQGSFKLGIEFVNWGQQGDRYMHGFGPIGQDLWTVRFDQYWQKMKALGKAHELGAYSITRMAAQANKFMPPRHDLANSPLNDIAYAYHFDASLYAQYLRKISESRGVLRTEGKITQVTQREHDGHITAVVLESGEKIEGELFIDCSGFRGLLIEQTLKTGYEDWTHWLPCDKAMAVPCTSAASLTPYTRSTAHQAGWQWRIPLQHRTGNGHVFCSQYISEDEAASVLLANLDSKALADPRLIRFTTGMRKQAWNKNVVAIGLSSGFLEPLESTSIHLIQSTISQLIEFFPDQGFNPTDIAEFNRQSRFHFERIRDFIILHYHLNQRTDSEFWKACAHMAIPETLQHKIDLFKATGRVLRTDGELFTEAGWLQVMAGQNLHPQQHHPLVDLQSEDNIHEYLESVREVIAKCVDVMPDHADFIAQHCAAPKITM

SEQ ID NO: 84084 - protein, 506 aa, Brevundimonas sp.
  misc_feature (1)..(506): tr|A0A521MF26|A0A521MF26_9CAUL Tryptophan 7-halogenase OS=Brevundimonas sp. OX=1871086 GN=EPO54_09815 PE=4 SV= 1
MDDPRIRSVVIVGGGTAGWMTAAALVQHFRTAPLKITVVESSDIGTIGVGEATIPTIRRFYGQLGLRDDDVMRATQATCKLGIRFLDWSGPGSDFIHPFGLYGQDVKGIGFHHYWLKQRRAGDAAPLAAYSLGAALAAGGKFTLPSPHPPSQLSVFDWALHLDAGLFAQHLRAYAEAGGCARIDARIRSVELRPEDGFVRALTLDDGREVEGDLFVDCSGFKGLVIGEALGVGFEDWGRWLPCDAAYAVQSENRPGDAPAPFTRVTARSAGWQWGIPLRHRAGNGLVFSSAHLSDDQALAELMPHLLGDPLTEPRRIPFRPGRRSQAWAKNCVAIGLSSGFLEPLESTSIALIETGIERLKALFPDRRFAQPILDEFNDQTAREMERVRDFIILHYKLNRRTDTDFWRDCREMPVPETLERKIALWTARGQFVRYRWEMFHPASWLAIYDGFGLYPDHHDPAVDAMDPAYLARSLAEMRANIADLVARTPEHAQFLAGLDPAASAA

SEQ ID NO: 84085 - protein, 423 aa, Caulobacter sp.
  misc_feature (1)..(423): tr|A0A258KGH2|A0A258KGH2_9CAUL Tryptophan halogenase (F ragment) OS=Caulobacter sp. 35-67-4 OX=1970331 GN=B7Y78 _11510 PE=4 SV=1
EFVDWHTVGQSYLHAFGPVGRPLGLAAFHHYWNRRRLQGHDESLWDYSLNALAARAGRFDRLQTAGGGYLEGLAHAFHFDAALYAQYLRRYAEAQGVRRVEGKIVGVSQHPETGFVTGLSLQDGRNVGGEFFIDCSGFRGLLIEETLKTGYDDWRSWLPMDSAIAVPCASVTPLTPFTRATAREAGWQWRIPLQHRTGNGHVFCSDYIDAAQATDVLMRNLDGAPLADPRQLTFTTGRRKRFWNRNVVAMGLASGFMEPLESTSIHLVQSALSRLIALFPNADFNTVEIDEYNRQTALEYEYIRDFLVLHYKATTREDTPFWRACKAMEIPDTLKARIELFAQSGRIFSKEDDLFKEASWVQVLIGQGVLPGAAHPLTGVVTDQQLDEYMANIRQIMGRAVEALPDHADFIARQCAAASRPAA

SEQ ID NO: 84086 - protein, 507 aa, Caulobacter vibrioides
  misc_feature (1)..(507): tr|R0CWF6|R0CWF6_CAUVI Uncharacterized protein OS=Caulo bacter vibrioides OR37 OX=1292034 GN=OR37_03478 PE=4 SV =1
MGEGRIQKLVIVGGGTAGWMAAAALRRHFQGGPLEITLVESAEIGAIGVGEATIPTIRGFYRSLGLSDAEVMRATQATCKLGIRFNGWLREGESFIHPFGHFGQDLNGVPFHHYWRKLAEGGEPTDIADYSLGASLARAGKFMPPPRDPASTASVYDWALHFDASLFAQLMRRVAEDNGVRRIDARIVKVNLRSDDGRVASLDLSNGQTLEGDLFIDCSGFRGLLIEEALGAGYEDWSDLLFCDRAWAVQSEGVGEPMPYTDVTAHAAGWRWRIPLRHRHGNGYVYASRYISDEDALAELKAAVPDALLHEPRRITFTPGRRKKVWNKNVIALGLASGFLEPLESTSIALIETGIEKIKALFPDRDLAPELADEFNDWSRREMERVRDFIILHYWANRRGDTAFWRDCNAVALPDDLKRKVELFVQRGHFVRYRWEMFAPTSWMAIYAGFELLPQGIDPALDGVDAKALGPPLARMRQAVREAVASAPTHGAFLDQFSRPAAMTAAR

SEQ ID NO: 84087 - protein, 498 aa, Chromatiales bacterium
  misc_feature (1)..(498): tr|A0A1F8UJP9|A0A1F8UJP9_9GAMM Tryptophan halogenase OS =Chromatiales bacterium RIFOXYA1_FULL_46_5 OX=1797676 G N=A2203_04680 PE=4 SV=1
MTPIKKVVILGGGTAGWLSAALLKKVLGGVVDIELVESDAIGTVGVGEATIPPIRLLNQVLGINEAQFLRETKATIKLAIKFENWRTQGDSYYHSFGAPGRSLTFCHFHHLWLRARQQFGDMTPIWQYDLNYLCAEAGKFAPITAKDPILELPYAYHFDAGLYAAFLRKFSEPMGVVRTEGMVDQVTQHHNGHIKSLLLKDGREINGDFFIDCSGFVSLLLQRKLGVGYDDWSHFLPCDRAWAVPTERFEQTVPYTRAIAHEAGWQWRIPLQHRNGNGMVFSSAHYTEQQALDVLMGNLQSTPLADPKLIKFKTGRARKQWHHNVLAVGLSSGFLEPLESTSIHLVQSGIVRLLKMFPHNGIEPATVAEYNKQSEAEFVYIRDFLLLHYHVTERTDSQFWRDMRQLQIPDSLKHKIELFQADGSIFREQHDLFHDGSWLQVMLGQGLMPRDYHPLADSFSDEQLKDMLKSIKAIKQEPLAKLFSHDEFLRRAVGASAN

SEQ ID NO: 84088 - protein, 82 aa, Cellvibrio japonicus
  misc_feature (1)..(82): tr|B3PK72|B3PK72_CELJU Tryptophan halogenase OS=Cellvib rio japonicus (strain Ueda107) OX=498211 GN=CJA_0734 PE =4 SV=1
MIDAIFKETGKIFREQDDLFHDASWLQVMLGQGIMPDDYHPIANSISDSQLQEMLVNMKKIKENLSATMPSHDQFIENLCKV

SEQ ID NO: 84089 - protein, 410 aa, Caulobacter sp.
  misc_feature (1)..(410): tr|A0A258KFR8|A0A258KFR8_9CAUL Tryptophan halogenase (F ragment) OS=Caulobacter sp. 35-67-4 OX=1970331 GN=B7Y78 _11100 PE=4 SV=1
MNTNPVRKVLIVGGGTAGWMTAAALSKVLKGVEITLIESDQIATVGVGEATIPPINTFNQILGIDEADFMRSTKASFKLAIEFVDWTAPGSRYLHPFGGFGLDIEAIKFHQFWLKAQSQGSTQPLDDFNLSATAAKLGKFMLPSKDPGQVLSSLKYAFHFDAGLYARYLRDYAEKRGVIRREGKVVDVCLRGEDGFIASVTTDGGEVIEADLFIDCSGFRGLLIEQALDTGFEDWGHWLPNDRAVAMPCDTGGDGLTPYTRATADKAGWRWRIPLQHRTGNGYVYSSQHLSDEDAVARLRATLDGPARAEPNFIKFRAGRRKQIWVKNCVAIGLASGFLEPLESTSIHMIQAGITKLLALFPDKGFDPIEIAEYNRLTILQTELIRDFIILHFKANERPEPYWQRAREMA

SEQ ID NO: 84090 - protein, 524 aa, Empedobacter haloabium
  misc_feature (1)..(524): tr|A0A5C7CNX0|A0A5C7CNX0_9FLAO Tryptophan 7-halogenase OS=Empedobacter haloabium OX=592317 GN=E7V67_05060 PE=4 SV=1
MQPIRNILIVGGGTAGWLAAGFLARTLGTQGGGTAITLVESKDIGIIGVGEGTFPSIRGTLSVLGIDEGRFIRECSATFKQGVRFNHWVRAPGARGPDHYFHPFSQPSQRPGGPELLPYWLQGAAGADVPFAAAVTMQKHVADMSHAPKRSGDADFVGPLNYAYHFDAGAFATLLASHAQSLGVRRVEATVDQVKLDDTGAIAAVVTREAGELAADLYVDCTGFRARLIGEALGSPFRNINDTLFVDRALAMQVPYERPDSPIPSYTISTAHEAGWTWDIGLHERRGIGYVYSSRHTSDDRADQLLRQYIGPASDGREPRLLKLNVGYRETQWVKNCVAIGLSGGFLEPLESSGIGLIEAATYLVSYLFPYDGNLAPAAKLFNAQMKARYERIVDFVKLHYCLTQRTDNAFWIENAHASTIPESLREQLAMWRARPPHRLDFVTDIEMYPPSSWQYVLYGMEFPTRQMAHPAALPDMTAARREFQTIAQLSHHALADLPTHRALVEHYRRGGTMAAAPARRLYV

SEQ ID NO: 84091 - protein, 424 aa, Sphingomonas carotinifaciens
  misc_feature (1)..(424): tr|A0A1G7GEM9|A0A1G7GEM9_9SPHN Tryptophan halogenase OS =Sphingomonas carotinifaciens OX=1166323 GN=SAMN0521655 7_101847 PE=4 SV=1
MNRQNRVRSVTILGGGPVAGIAALGFAQALPGARIDWIMRPVDPAALTDRLPATLPSSAPVLEQLELDEADLVAYAGATHRLGERFLGWGPADYITSEGQPMPLGVAGALHHHHALAPRHPLHRYRPAAVLADAGRFVHPTAPDGPLGFHDYGLRFDPDAITPFLADRATRAGVRIASGDGVDADLIVDATGPASAPDWIDWTDALPATTLTLAETTGTAPDPCDTYRATDTGWQATWPLAQRTLTGTATLGTGPIRPGRRAEPWQGNRLALGDAAAVMGPLCWTGFALALANLSLALSLLPGRDMPPLLLAEYNRRASLRADRLADLLSAHHHLAGHAPPRPGLAHTLAQFARRGFLPHFEEESVGPERWLAVLAATIRPARPDPIALSAPAPAPLDHLHATLAALPARLPPYPAYLARMRHA

SEQ ID NO: 84092 - protein, 502 aa, Burkholderiales bacterium
  misc_feature (1)..(502): tr|A0A1F4HJ91|A0A1F4HJ91_9BURK Tryptophan halogenase OS =Burkholderiales bacterium RIFCSPHIGHO2_12_FULL_69_20 O X=1797561 GN=A3E25_03050 PE=4 SV=1
MPDPNRSLRNIVVVGGGSAGWMAAAALSRAVHRDCTITLIESDEIGTVGVGEATIPPIQTFNQMLGLDEAEFLRRTQGTFKLGIEFVDWARQGHRYFHPFGPHGHQFDLSPQHQYWLRGRHQPGMPGLDEHSLAWVAASRGRFDKPSRDPRTVQSTYDYAYHFDAGLYARFLREVSEARGVQRLEGKITEVLLRADDGFVDLLRLADGRTVAGDLFIDCSGFRGLLIEEALHTGYEDWTHWLPCDRAMAVPCAPAGPLTPYTRSTAREAGWQWRIPLQHRTGNGYVFCSQYLSEDEAASQLLARLDGQALADPRPLRFTTGRRKQFWNKNVVALGLASGFMEPLESTSLHLVQSGISRLLALFPDRDFDPLVIAEFNRIAINEFERIRDFIILHYKLTTRDDSPLWRYCAAMRIPDTLQYKIDHFKRYGRLVTEGMELFGPASWLAVQVGQQNWPVRHDPIIDLRNVDGDAILARMRQAMVQAAEAMPTHEAFIRGYCGARA

SEQ ID NO: 84093 - protein, 501 aa, Sphingomonas carotinifaciens
  misc_feature (1)..(501): tr|A0A1G7GES2|A0A1G7GES2_9SPHN Tryptophan halogenase OS =Sphingomonas carotinifaciens OX=1166323 GN=SAMN0521655 7_101848 PE=4 SV=1
MTQPISHVVIVGGGTAGWMAAAAAARFLDDGQRRITLVESDAIGTVGVGEATIPPIIGFNRLLGLDEGRFLSATGGSYKLGIEFVGWDTGEDRYFHPFGHHGRDFDGLNFHQAWLKLRDRDGIGPIDDYAMAAAAAHAGTFAPPVADPRSPLSGLAYAYHFDAGRYAAFLRAQAEAGGVTRIEGRIERVERDPASGHVAAVVLGDGRRVAGDLFIDCSGFRSLLLGQAMGVPFVDWSHWLPCDRALAVPTRRTDPVLPYTRATARPAGWQWRIPLQHRTGNGHVYASAFMDDAEAERLLLANLDAEPTDTPRRLSFRAGRYQRMWEGNVVALGLAGGFLEPLESTSIHLIQNGISKLFALFPDKRFTAVERDRYNRFMTDAYDGIRDFIILHYHATRRDDTPFWRHVRTMTIPDTLAEKIALFREKGRIFRYDDELFAVPSWVAVMIGQNIMPDGYDPIVDALDEDRVADALRQMRRANATLARTLPPHAAVLARVGEAAG

SEQ ID NO: 84094 - protein, 505 aa, Caulobacter sp.
  misc_feature (1)..(505): tr|A0A0Q6TR24|A0A0Q6TR24_9CAUL Tryptophan halogenase OS =Caulobacter sp. Root342 OX=1736519 GN=ASC62_18035 PE=4 SV=1
MADQPYRKFVVVGGGTAGWIAAATLIQALKGKVGEVELIESDEIGTVGVGEATIPPIQFLNGLLGIDEFDFIKKTQATFKLGIQFRDWGKLGDQYFHPFGPYGEPFEGVGFHHYWLRLRAQGEGGSLDDYAMATVTARMGKFAVPPKELPPGVPGLGYAYHFDAGLYAKYLRAYAEARGVKRTEGKIAKVELRPEDGFVSGLTLADGRRVEGDFFVDCSGFRGLLIEQALEAGFEDWSHWLPCDRALAVPCESVSPMTPYTRATARAGGWQWRIPLQHRIGNGHVYCSSFISDDEAAATLLANLDGKPQADPRPLRFTAGRRKKSWSKNVVALGLAGGFMEPLESTSIHLVQTGAMRLLSLLPFGGYDPAAELEYNRLTQIEYEQIRDFIILHYHATERTDSPLWNHCRTMAIPDSLAHKIELFRNRAKIARFDDQLFAEPSWLAVFLGQGIAPRDYDHLADVPDYAVVASRLRGVGQKIAGIASGLPSHDAFIAATCKADPLAS

SEQ ID NO: 84095 - protein, 505 aa, Massilia sp.
  misc_feature (1)..(505): tr|A0A0Q7XNM0|A0A0Q7XNM0_9BURK Tryptophan halogenase OS =Massilia sp. Root1485 OX=1736472 GN=ASD92_20480 PE=4 S V=1
MSDKAIRKIVIVGGGTAGWMTAAPLALKLGASCEIVLVESPEIGTVGVGESTLPTIRYFNHALGIDGTDFVRRTKATFKLGIDFCDWGHLGNRFFHGFSDFGPTIENRPAFMYWLRLARDNPDMPSYEEWSISTAMAHENKFVPPHGDQPGPTNAYSYGFQFDAGLYALYLREYAMARGVQRVEGTVGHVEQHPETGFITALQLKDGRRIDGDLFVDCTGFRGLLIEGVYKSGYEDWSAMLPCNSAQAVPSALADQLTPYTRATAKPAGWQWRIPLQHRNGNGHVYCNAFMSDDEAGRVLLDGLDTEALDTPRQLRFTTGRRRKSWVKNCVAVGLSSGFLEPLESTSINIIELAVGWLIQYFPDRDCNQELADEFNRLVAQRYEFVRDFIVLHYKLTNRTDSEFWRYCADMPIPDTLQHQIDLFRSAGRITIYDREGFQADSYAAILLGHGIRPERTDPLIDRMDQARLLDHFRKVHATIRQVVGAMPGHAALVAQITGEPIRKS

SEQ ID NO: 84096 - protein, 498 aa, Hyphomonas sp.
  misc_feature (1)..(498): tr|A0A0F2RDX0|A0A0F2RDX0_9RHOB Tryptophan halogenase OS =Hyphomonas sp. BRH_c22 OX=1629710 GN=VR74_14195 PE=4 S V=1
MDVSNPGMKRVVIAGGGTAGWMTAAAMGKVLSKVADITLIESDQIGTVGVGEATIPTLVTFNRLLGIDEADFMKRVSATFKLGIAFENWTDLEHRYIHSFGITGKDHWTAGFQHFWKRGRDLGVASEFGDYCLELVAAEEGRFAHLPKLGLNYAYHVDSSAYALFLREMAVGFGVKRIEGRIDRVQRSESGDLSCLSLDNGQEINGDLFIDCSGFRALLIGDALGVGYDDWSHWLPCDRAIAVQTESVGLPRPYTRSIAHEAGWRWQIPLQHRTGNGIVFASRYMEEEAARLQLLESVEGKLLSEPRLIKFRTGTRRAHWHRNCVSIGLSSGFIEPLESTSIHLIQRSIMRLLQMFPRGDISSADVAEFNKQTFYELDHIRDFIILHYHLTNRNDTDFWNHVRTMDIPDTLRHRMQLFRDTGRTFRANDELFAENSWTQVMLGQGILPESHHPVVDMMTPDEVRLFLNHITENVRRTVADLPVHDDYIKKYCNASGSA

SEQ ID NO: 84097 - protein, 508 aa, Cellvibrio japonicus
  misc_feature (1)..(508): tr|B3PKX2|B3PKX2_CELJU Tryptophan halogenase OS=Cellvib rio japonicus (strain Ueda107) OX=498211 GN=CJA_2485 PE =4 SV=1
MSGVPLMNGQSNPPKILIVGGGTAGWMAANLMAHCWVASGVEVSLLESPDIGIIGVGEGSTPQLKRFFGYLGIAEQEWMPACHATYKNGIRFKGWSSKPGYGEYFHPFDSDIDLHTQPAFFYNCDVRRHGVDVYAHPDRFYLSAHLAEHHKGPLPAPNFPFNIGYGYHFDSGLLGQFLRNRAVGLGVNHIQAKVQSVQRAGSGELVSVTTDQGHIITADFFVDCTGFNALLIQKTLGVPFKKFADNLFNDAAVAMPSPQGAVIGSQTLSTAMRYGWAWEIPLTHRIGNGYVYSSAFCSADEAETELRRKLGLLDADVQARHLKMNVGRLEQHWSYNCLAVGLSQGFIEPLEATALHIVQETIQGFIDAWELGGFTPANRDAFNQRINARFEGVRDYIVAHYVCNSRSDTDYWLANRSHQAISDNLRAVLQTWVNAGNVVEQITRREMDKYYLPMSWYTLLSGYGLFPDRQALQPGTAKAHRYRLDDIDAFIAGCSLNFQEQAALLQRG

SEQ ID NO: 84098 - protein, 520 aa, Hyphomonas sp.
  misc_feature (1)..(520): tr|A0A0F2RBW0|A0A0F2RBW0_9RHOB Uncharacterized protein OS=Hyphomonas sp. BRH_c22 OX=1629710 GN=VR74_14185 PE=4 SV=1
MSELKHVVIIGGGTAGWITAGILAADHRAFADDGLEITLVESPNIPSIGVGEGTWPTLRDTLQRIGISEAEFLSVCSASFKQGSRFDGWVDGGANDTYYHPFDAPPGEDDFDPVSLWRASGDTPFADAVSSQAALCRNGRAPKQAQTPPYAAVANYAYHLDASALAALLTEHCVKRLGVKLIRDDVVDTALSADGSVDFVETREHGRIGGQLFVDCTGQQALLIEKVMGAQATDVSDVLFNDRAWATRVPYTDPQAEIASQTNSTAMPAGWVWDIALQNRRGVGYVFSSRHISEDAAQEQFLAYLEGASAGAKIDVDGLRLLKFRSGYRETPWVRNVVAIGMSQGFVEPLEASAIVMVELSAAMLSDTLPPRIAQMASTAARFNSRFAYRWARIVDFLKLHYVLSKRMEPFWSDHRDEVTWPKRLRELMQRWKDMPPSREDFVQSQEIFPAASYAYVLYGMGFPVPDRPHLRRKDSPERAQRRLSEIAERTEKMLGGLPSNRDLLNQVCGHKLVSEIGLR

SEQ ID NO: 84099 - protein, 491 aa, Sphingomonas carotinifaciens
  misc_feature (1)..(491): tr|A0A1G7P6M1|A0A1G7P6M1_9SPHN Tryptophan halogenase OS =Sphingomonas carotinifaciens OX=1166323 GN=SAMN0521655 7_10682 PE=4 SV=1
MSERRRVVIAGGGTSGWLTAAALGQQLGSVLDITLIESDEIGTIGVGESTIPTARAFHRLIGIDEQRFMAETGASFKLGIAFEDWGRVGDRYFHAFGETGRGTWMGAFHQFWLQAREQGFGGDLGAYCLELQTAEAGRFGAGGQGPELSYAYHLDAGLYARHLRGVAEGAGVRRVEGLIERVERDGDIQALVLRSGERIEGDLFIDCTGFRALLIGQAMGAAFVDWSEWLPTDSAVVTQTRAVGPAVPYTRAIAHGEGWRWQIPLQHRVGNGLVYDRAHLSDDEARARLLSAVEGEVLIEPRTIRFKAGRRTQAWRGNCISIGLAGGFVEPLESTAIHLVMIAVTRLLQMFPFDGDCTALAKRFNDQAAADLERIRDFIVLHYVLTERDDTAFWRRARTMAIPDTLRERIALFRDNAMAYQEGEELFRVDSWVQVMIGQGVVPRHHHRMGAIMGEARLRQVLDDMRAQVARQVATLPVHQAFLERYCPYPR

SEQ ID NO: 84100 - protein, 503 aa, Massilia timonae
  misc_feature (1)..(503): tr|A0A1S2N777|A0A1S2N777_9BURK Lycopene cyclase family protein OS=Massilia timonae OX=47229 GN=LO55_2297 PE=4 SV=1
MENQAIKDIVIVGGGTAGWMTAAALSSMLNGRYHIRLVESDEIGIVGVGEATIPMIQRFNRVVGIDENEFMRETMGSFKLGIEFVNWGRIGERYMHGFGRMGQDLATVPFEQYWHKMRGLGKAAPLEEYSITRMAAKAGKFMPARQDVPNSPLRDIAYAYHFDASLYAKYLRKLSEARGVVRIEGKIARATRREPDGFVDAVELDNGQRIEGELFIDCSGFRGLLIEQALETGYEDWTGWLPADRALAVPCESVPAITPFTRATAHKSGWQWRIPLQHRTGNGHVYCSRFISDDEAAATLLANLDGRALAEPRLIKFQTGMRKQAWNRNVVAIGLSSGFLEPLESTSIHLIQSSIARLVELFPDRRFSDVDRDEFNRQSRFEYERVRDFIILHYHLNQRTDSAYWTECANMAIPETLRQKMDLYRSRGKVVRVDNELFSEVGWLQVFEGQNMPLDGYHPLADTQSEADIAEYMESVREVIRKCVDVMPSHDEYIAKHCAARTA

SEQ ID NO: 84101 - protein, 505 aa, Massilia sp.
  misc_feature (1)..(505): tr|A0A0Q7WK22|A0A0Q7WK22_9BURK Tryptophan halogenase OS =Massilia sp. Root1485 OX=1736472 GN=ASD92_07700 PE=4 S V=1
MQQNNPENIGRKPVRRVVIAGGGTAGWMAAAIISRILGKTLDITLVESDEIGTVGVGEATIPSLIQFHQLLELNEADVMRATQATFKLGISFENWRAPGEDYIHSFGLTGVDHWSAGFQHFWHKGRQRGLASDFGDYCLELRSAQLGRFAHLPNDVMNYAYHLDATLYARFLRKYSEGFGAKRVEGKIDQVMLDAASGHVTGLKLGNGALIEGDLFIDCTGFRSLLLGQTMGVEYDDWSQWLFNDTAIAVQTELMGEPVPMTRAIARGAGWQWRIPLQHRVGNGHVFSSKYMDGEEAMQILLDNLHGEPLTQPRMIKFKPGQRKQSWKGNVVAIGLSSGFLEPIESTSIHLIQRNLIRLMQMFPADGICRSDIDEFNTQVQREIAHIRDFIILHYKVTSRADTPYWEAARNMEVPASLQHRIDLFRETGRVFRTEGELFTESSWLQVMLGQGIMPEQHHQSADLMGDAELSQFLGSIRQKIERTVQQLPSHQAYVQRFCRAERPS

SEQ ID NO: 84102 - protein, 515 aa, Microbulbifer agarilyticus
  misc_feature (1)..(515): tr|A0A1Q2M2X0|A0A1Q2M2X0_9GAMM Tryptophan halogenase OS =Microbulbifer agarilyticus OX=260552 GN=Mag101_05030 P E=4 SV=1
MKKIIILGGGTAGWMAAAAMARFVLPRGIEVTLIESDQIGTVGVGEATLPHLRSFNELLGIDENVFVRETQATYKLGIEFANWARQGDSYIHPFGEYGRGLNGIPFHHLWLKARANDNAEALDNYSLPVIAALKNRFEFPSEDLRSILATYSYAFHIDAGLYARYLRKFACDLGVKRIEGKVDRVEHHADGNIAALHLENGQSLAGDFFVDCSGFRSLLIGQELGSPFIDWSHWLPCDSAIAVPSEAPAGELRPYTRAEAHTAGWRWQIPLQHRMGNGIVYAQRYMQDDEAQNLLMQGLPGAATNEPRQLRFQAGRRQESWRKNCLAVGLSSGFLEPLESTSIYLIQIAITKFIGLLPANHVASQRPQRNEFNRQMALEYERIRDFLILHYCATERDDSPFWRYCRDMELPGSLQNKMALYRQSGHIADYKNGLFLEPSWLAVYQGQRISPKQYSPRADTIESDELAALLKNYAALVRRATSDMPLHSDVVDRQCGPRPTRVPSTSMSLYRSVGK

SEQ ID NO: 84103 - protein, 433 aa, Caulobacter sp.
  misc_feature (1)..(433): tr|A0A258KGF3|A0A258KGF3_9CAUL Tryptophan halogenase OS =Caulobacter sp. 35-67-4 OX=1970331 GN=B7Y78_09030 PE=4 SV=1
MRKTQATYKLGIEFRDWGKKGESYIHPFGAFGQAIGGVAFHQHWLRARARGQADDIQAYSLPIVAARLNRFAPPSSDQRSLGSTFSYAYQFDAGLYAQYLRAYSEARGVTRTEGKIQDVALRGEDGFVEAVTLESGQRIEADLFIDCSGFRGLLIEQALKTGYEDWTQWLPCDRAAAVPCDSIEPPTPYTRATSDEAGWRWRIPLQHRVGNGYVYCSSYISDDEAARVLVSKLDGKAQADPRFLRFTTGRRKKQWNRNVVAIGLASGFLEPLESTSIHLIQVAITTLLELFPERGCAGADQDEYNRVMDLEFERIRDFLVLHYHATQRDDSPFWRDKAAAPIPDSLAYKMELFRDRGMVVKYRDGFFLEPSWLAVYLGQNILPRGYDPMADSIDPDEAARKLAELKAAVRRTAEAMPGHQAFIERFCGARGAA

SEQ ID NO: 84104 - protein, 513 aa, Caulobacter sp.
  misc_feature (1)..(513): tr|A0A0Q6U9A2|A0A0Q6U9A2_9CAUL Tryptophan halogenase OS =Caulobacter sp. Root342 OX=1736519 GN=ASC62_13410 PE=4 SV=1
MQPLKKILIAGGGSAGWMTAALCSRLFQGLYEIVLVESEEIGTVGVGEATIPAIKKFNELLGLDEDDFLRKTQGTFKLGIQFRNWWRKGESYLHGFGVIGQDLGWLRSHQYWLRMRELGRAPVFDNLAINNAMALQDKFMRARADMTESPIGHIAHAFHFDAGLYAKHLSTYAQARGVTRREGKIVDVTLRSEDGFVQSVTMDDGEVIAADFFVDCSGFRGLIIEQALKTGYEDWTHWLPCDRAIAVPSERSEHFTPYTRSTAHDAGWQWRIPLQHRTGNGHVYSSQYIDDDEAERVLLANLDGAQRANPLRLRFTTGKRKKIWNKNCVAVGLASGFMEPLESTSLHLIQSAVIRMVRLLPDAGFDQATIDEFNRQSDFEYERIRDFIILHYKATERDDTPFWRSCRDMEIPATLRRKMDLFAANGRVFREDDELFTEESWIQVFLGQGIIPRGYDPLVRVHSDEDIARYLANIETVISKCLNVMPSHAEFVARACQAPPLAASLAAAPVPTS

SEQ ID NO: 84105 - protein, 499 aa, Caulobacter sp.
  misc_feature (1)..(499): tr|A0A0Q6TXC8|A0A0Q6TXC8_9CAUL Tryptophan halogenase OS =Caulobacter sp. Root342 OX=1736519 GN=ASC62_07725 PE=4 SV=1
MDQQTIRKVVIAGGGTAGWMAAAALARQLGPLLDITLVESEDIGTVGVGESTIPTARTFNALLGIDEPEFMRATQATFKLGILFENWGEVGDRYIHSFGQVGKSTWMGGFHHFWMQAKAQGFGGELGDYCFELKAAEQNKFFTGEESPLNYAYHLDAGLYGRFLRGMAERDGVRRVEGKIASVRQRSTDGYVEALVMESGDVVEGDLFVDCTGFRGLLIEQTLKAGFEDWGQWLPTNSALAVQTRSTEPAVPYTRAIAHKAGWRWKIPLQHRVGNGLVYSNAHMSDDEAKDLLMGEIEGETLIEPRLIRYRTGRRRKTWDKNVVALGLASGFVEPLESTSIHLIMIGVTRLMQLFPFAGVSQAVVDRYNRQADDELEKIRDFIILHYKATERTDSPFWDQVREMDIPDSLAQRIELFRQSAQVYQAPGELFQVDSWLQVLLGQRVTPQAYHQMGRLMPPQQLKQALDDLKRNIAGAVTRLPQHQAFLDGYCAPPVSRSA

SEQ ID NO: 84106 - protein, 501 aa, Microbulbifer agarilyticus
  misc_feature (1)..(501): tr|A0A1Q2M2Y0|A0A1Q2M2Y0_9GAMM Tryptophan halogenase OS =Microbulbifer agarilyticus OX=260552 GN=Mag101_05020 P E=4 SV=1
MTTPSPVKRVVIVGGGTAGWMTAAALAKVTQGTDSKIQLIESESIGTVGVGEASIPSLITFNKMLGIDENQFMAETKGTFKLGIDFVGWGAEGDRYFHPFGTYGRGINSIDFQHWWLQSYNQSNSPDLEEYSLAAQSAFAGKFTRMQPMPDAPFDALTYAFQFDAGLYAQFLRKFSEDLGVERIEGVIEDSQKNPESGYIESVRLTSGERIHGDLFIDCSGFRSLLIRQALGTKFVDWSSWLPCNRAVAVACERSSAPEPFTRSTARSAGWQWRIPLQHRNGNGYVYCNDYISDDEATATLLENLDGVAEGNPRQLKFTTGHLESFWEKNCIAIGLSAGFLEPLESTSIHLIQSAIQKLIALYPSQNFEEDKRRIFNERTILEYQRIRDFLILHYRANRRPEPFWRALAAMEAPPHLARKLTSYQQAGNIFREDDELFSVPSWLAVMHGQGIRTESCHPLTSKMDASFVKERLQEIRDGIQYVVGAMPSHGEYLDRYCKVK

SEQ ID NO: 84107 - protein, 508 aa, Pseudomonas sp.
  misc_feature (1)..(508): tr|A0A1B8V2N0|A0A1B8V2N0_9PSED Uncharacterized protein OS=Pseudomonas sp. AU11447 OX=1843184 GN=A6723_011730 P E=4 SV=1
MLNLSNYRRVAVVGGGSAGWFAALELRKLFLDQVEVVLVESEALGIIGAGEGSLPNFNRALDRYEIDRAEFMRETRSTYKLGLTLEGWRTGKKDDIFFHPFSFHSDGVDLNAWIEPNGSYPLASILLNQDLQLHHFPDAWRLYRDGASQQQAEAYLQEQLKFYAVPPMAFHFDARKLAEYLREVALKRGVKRVNARVESVRLNERRHVTHLILENGELEVDFVIDASGLHRLIIDKALHSPWESYSDHLLLNQALPFFIPAQGAHPSLVTRAIAMKNGWMWCIPTQDRLGVGYVYSNQHTDKEGALHEAQAYWGTEIEPVNHFAFSAGHFKEVWIGNVMAVGLSSGFVEPLEATSIGQTLVQLARFNQVVSACDGLIPQQLIDQFNRDITRHWDGIRDFLFLHYDTPRQDTEFWKAASSATPPSTYAELKRTFALRPPRDVDLEPYRGGTFSLFGPTSWMSVAAPLGVLTRKATAADLVPLSKEQRWNIGEFLAKVEPRMTAEAAMST

SEQ ID NO: 84108 - protein, 514 aa, Sphingobium chungbukense
  misc_feature (1)..(514): tr|A0A0M3ARV2|A0A0M3ARV2_9SPHN Tryptophan halogenase OS =Sphingobium chungbukense OX=56193 GN=YP76_13610 PE=4 S V=1
MVHPVRNIVIVGGGTAGWLTAGVIAARHGSRLGNDFTVTLVESPNTPIIGVGEGTWPTLRTTLSRMGISETDLFRECDAAFKQGARFARWTTGERDDGYYHPLMLPQNFGQVNLAPHWLAGAGDESFCDSVCSQGRICDDGLAPKTIATAEYDALANYAYHLDAGKFAPFLQRHCCEKLGVRHVLADVEQVLMKEDGDIRAIRTTQAGEIEGDLFVDCTGFKALLIEGAMKVPFKDRNDILFCDTALAMQVPYERPNSPMASHTISTAQSAGWIWDIGLPTRRGIGHVYSSNHISDEEAERELRAYIGPLAEGLSARKIAIRSGHRETFWKGNCVAVGLAAGFLEPLEASAIVLIELSAKIIAEQMPACREVMDIIASRFNATTHYRWGRIIDFLKLHYALTKRTDSDFWRDNVRDETMPDRLKELRLLWRYQSPWFLDEFDRVEEVFPAASYQYVLYGMGFRTEVDRSALARDTHLADRARRENRNMTAKLRAGLPRHRDLIDKIVTHGLQPV

SEQ ID NO: 84109 - protein, 504 aa, Alteromonas sp.
  misc_feature (1)..(504): tr|A0A1J0RVH7|A0A1J0RVH7_9ALTE NAD(FAD)-dependent dehyd rogenase OS=Alteromonas sp. Mex14 OX=1917157 GN=BM527_1 3880 PE=4 SV=1
MNKLPQEIVIVGGGTAGWMTACYLAKAAELMEVKRNVPVHAPKITLLESSVVSTVGVGEGSTPYLRLFFEFLGVSEFEWMHRCNATYKMGINFEHWTTTAQTKTKRSSFTDTDCYFHPFFSSLDIPTADMYFSAVNKHRKGAAHDTNPSHYFTAAHMVEKGIPPDAICPSANIDYAYHFDAGLLGDFLKDYALNKGVCHQIGTVASVQTQNHNITTLELDDNKTLSADFFIDCSGFRGLLGKQALSRTFTSYADTLFNDAAVAIASDATLSPETELQTRSIALSNGWQWHIPLINRTGNGYVYSSHFCTAAQAEEELRLAVEPSNTPKQARHIKMTVGRLDEHWKGNCLCIGLSQGFIEPLEATALMLVQYALHLFIDCWQSDSPRKIESYNAEMNRMFDGIRDYIAAHYYLNTRDDSPYWLACREEMKVPDTLSYLLNAWDRGANFEQALDEVDNKLVYLRPSWYCIFAGMKRFSNDLVPHQQPNTLAIRTAQQSVENAFREK

SEQ ID NO: 84110 - protein, 499 aa, Glaciecola pallidula
  misc_feature (1)..(499): tr|K6ZEX7|K6ZEX7_9ALTE FADH2 O2-dependent halogenase I OS=Glaciecola pallidula DSM 14239 = ACAM 615 OX=1121922 GN=prnA PE=4 SV=1
MKKQQRKIKKVIIAGGGTAGWMAAAALSKLIGNNLDVSLIESDEIPTVGVGEATIPTLHVFHQLLGISEQEFMAATNATFKLGISFENWRDVSKDYIHSFGFLGQGCWAAGFQHFWLKGRERGIASQLGDYVPEHLGAREGKFAVLAGQELNHAYHLDAGLYAKFLRKIAEKYRTKRIEGKIAKVTLDEESGYIDSLTLASGQVVEGDLFIDCTGFKGLLIEEALHTGYDDWSHVLPCDSAIAVQTKTVGKPVPYTRAIARDAGWQWRIPLQNRTGNGFVFCSKYMSDEEATKTLLDNIEGERLNEPRVIKFKTGQRRKHWNKNCIAMGLSSGFIEPLESTGIHLFQRAIVRLLLMFPSQGIKQSDIEEYNVQTKEEAENIRDFIILHYHLTERKDTAFWRYCSSMDVPNSLKHRMSLFRESGQVFKKADELFGETSWIQVMMGQGLMPEQYHPIVDMMSDNELRDFLNNIKSRVKRQVENWPDSNDFIKHYCPSSVNT

SEQ ID NO: 84111 - protein, 492 aa, Amycolatopsis sp.
  misc_feature (1)..(492): tr|A0A229TAU0|A0A229TAU0_9PSEU Tryptophan halogenase OS =Amycolatopsis sp. H5 OX=1905142 GN=CF165_12685 PE=4 SV =1
MSVEQFDVVVAGGGPSGSTVATLVAMQGHRVLLLEKEVFPRYQIGESLLPSTVHGVCKMLGVSEELAAANFPVKRGGTFRWGARPEPWTFSFSVSPRITGPKAFAYQVERAKFDHILLKNARSKGVDVREGCTVTEVLEDSERITGVRYTDADGNEREVSATFVIDASGNKSRLYSKVGGSREYSEFFRSLALFGYFEGGKRLPEPYSGNILSVAFDSGWFWYIPLSDTLTSVGAVVRREDADKIQGDRESALNALIAECPLISEYLSGATRVTSGNYGELRVRKDYSYQQPSYWRPGMILIGDAACFVDPVFSSGVHLATYSAMLAARSINSVLDGDMDEKTALTEFEARYRREYSVYYEFLVAFYEMHVDEESYFWSAKKVTKDVEHTEIESFVDLVGGLSSGEAVLAAKTRIAEHSAEFAAAVDQMAGGDDANMVPLFKSHVVRQVMQEGGQEQMRVVLGEDAEPELPLFPGGLVTSPDGMKWLPHRPV

SEQ ID NO: 84112 - protein, 516 aa, Streptomyces sp.
  misc_feature (1)..(516): tr|A0A2B8AWY0|A0A2B8AWY0_9ACTN Tryptophan halogenase OS =Streptomyces sp. Ru87 OX=2044307 GN=CRI70_15260 PE=4 S V=1
MLNRVVIVGGGTAGWMTASYFKAAFGDRIDITLVESGNVGAVGVGEATFSDIRHFFEFLGLKEKDWMPACNATYKLAVRFENWREQGHYYYHPFEQMRSVNGFALTDWWLKEKPTERFDKDCFVMSSVIDAGLSPRHLDGSLIDQPFDEGAEEMHGLTMSEHQGKTQFPYAYHFEAALLAKYLTQYSVDRGVKHIIDDVSHVDLDERGWITGVRTGEHGDLTGDLFIDCTGFRGLLLNKALEEPFISYQDTLPNDSAVALQVPMDMEKRGIRPCTTATAQDAGWIWTIPLMGRVGTGYVYAKDYLSPDEAERTLREFVGPAAADVEANHIKMRIGRSRNSWVKNCVGIGLASGFVEPLESTGIFFIHHAIEQLVKNFPGPDWDATYRNRYNDAVSHVMDGVREFLVLHYVAAKRQDNQYWKDTKTRAVPDGLAERLEKWKTQLPDSETIFPYYHGLPAYSYMCVLLGMGGIDVKPSPGLALTDSAAAQREFADIREKTRQLTETLPKAYDYFSQWH

SEQ ID NO: 84113 - protein, 506 aa, Sphingomonas sp.
  misc_feature (1)..(506): tr|A0A258S9Z5|A0A258S9Z5_9SPHN Tryptophan halogenase OS =Sphingomonas sp. 28-62-20 OX=1970433 GN=B7Y43_16730 PE =4 SV=1
MASARIGEIVIIGGGTAGWMAAAALARFVGAQASIRVIESDEIGTVGVGEATIPQLKLFNAGLGIDEAAFVRATNATFKLGIEFDGWRTPGARYIHAFGGIGRGLGLIPFHHYWLRHRAEGGSEALWAFSASAQAAAQHRFAPLQDQPGQAPSGMDYAFHFDAGLYAAFLRRFAEGLGVRRTEGRIADVVLNGETGFVEAVTLAGGARISGDLFIDCSGFRGLVIEQALASGYEDWSHWLPCDRALAVPSARTAPLTPFTRSTARDAGWQWQIPLQHRTGNGHVYCSAFMADEEAAQQLLSKLDGKPLADPRPLRFATGKRRQMWVKNCVALGLAAGFMEPLESTSIHLIQSGIARLLQLFPAAGFDSADIAEFNRQADFEWASIRDFLILHYHANARDGAFWAACRDMTIPDSLAHKLALFKANGRIFREHEELFTELGWVQVLIGQGIDPAGYHPLADQLSRQELAEFMTLARQHTDRVVVALPDHAAFIARHCAAPAVETVAA

SEQ ID NO: 84114 - protein, 195 aa, Alphaproteobacteria bacterium
  misc_feature (1)..(195): tr|A0A2N3BDP8|A0A2N3BDP8_9PROT Tryptophan halogenase (F ragment) OS=Alphaproteobacteria bacterium HGW-Alphaprot eobacteria-5 OX=2013668 GN=CVT83_04255 PE=4 SV=1
MDKADRAIRRIVIVGGGTAGWMTAASLANTLGTNCRIDLIESDAIGIVGVGEATIPPIKLFNHALGIDENAFLKASKGTFKLGIEFVDWTRLGQRYFHPFGQFGAEFDAVPLYQYWLRERARGDDTPLQDYAMAWVAARNNKFAPPLTDRQRIQSTYDYAYHFDAGLYAQFLRAYAESRGVQRSEGKVVDVSLRA

SEQ ID NO: 84115 - protein, 514 aa, Pseudoxanthomonas indica
  misc_feature (1)..(514): tr|A0A1T5IQ13|A0A1T5IQ13_9GAMM Tryptophan halogenase OS =Pseudoxanthomonas indica OX=428993 GN=SAMN06296058_014 8 PE=4 SV=1
MSERAPQSITIVGGGTAGWMTAAALSATLPRGYTIRLIESEQIGTVGVGEGTIPHIHLFNQLLRLDEADFIRSTQGTFKLGVQFKDWRRVGERYMHGFGSSLGPGLNLLPFHQYWVKARHAGRAQALDRYVLAASAGPAGKFMTSARDVPATSPLANISYAYHFDAGLYARYLRSYSEQRGVQRSEGIVRQVKQTDNGDIASVVLDNGEEIAGDLFIDCSGFRGLLIEETLKTGYHDYSQWLPCNRALAVPTENAGPPTPYTRSTARQAGWQWRIPLQHRTGNGYVYCNDFISDDEATATLLANLDGKPLKDPMPLRFVTGRRKQFWNRNVVAIGLSSGFLEPLEATSIYSIQTGITKLLALLPQDRDYAVLAERYNTQMSFDFDRIRDFLILHYKANQREEPFWQRCAAMEIPQELQEVIDLFADSGRFFRQGEEMFAEMSWVQVLIGQGVLPRHWHPLVDQVPDEDVWRFIDSVGSTIERCVEAMPMQQAFIDRHCAAPRLAMDLPREPVSA

SEQ ID NO: 84116 - protein, 390 aa, Corallococcus sp.
  misc_feature (1)..(390): tr|A0A3A8IVT3|A0A3A8IVT3_9DELT Tryptophan halogenase OS =Corallococcus sp. CA049B OX=2316730 GN=D7W82_13365 PE= 4 SV=1
MSEDSCDVAIIGGGPAGAALAVALRRRAPSLSVTLVERTTYDAPRLGETLPPDVRLPLSRLGVWEGFLRDGHLASRGTSSCWGRAEPGFHDTMMSPWGSAWHLDRARFDERLSLEAFRQGARVLRAATLVDSESLGRSGYRLRLAHGAADPSTLRARFVVDATGGKATFASARGARRLVSDRCFAVYGAFQLPGDAAFPTHALVEACPEGWWYSALLPRGRVVVALIGDGDSLRGLRWATPASWMNLLRQAPATRARLDVCDFAGEALVAVPVLVGQLDRARGEQWLAVGDAACTYDPLSSQGITKALDSALLAADALERCLRGDADALQDYESTLNTRFQDHQRTRAAYYRQEQRWPQAPFWKNRWEALPAPAAPPAQLLRPHSTEVNP

SEQ ID NO: 84117 - protein, 503 aa, Pseudoxanthomonas indica
  misc_feature (1)..(503): tr|A0A1T5JY06|A0A1T5JY06_9GAMM Tryptophan halogenase OS =Pseudoxanthomonas indica OX=428993 GN=SAMN06296058_118 0 PE=4 SV=1
MTEEVTEFPHKAVKRVVIAGGGTAGWMAAAAISRMLGRVLDITLIESEEIGTVGVGEATIPTLVTFHRLLEINEQEFMAATQATIKLGISFENWKDRDHRYIHSFGVTGQDHWMANFVHFWMRGREEGLASRYEDYCVELRAAEENKFAHLPRKGMNYAYHMDASLYAKFLRRFSEGYGAKRVEGKIVEVNQDDASGYITSLKLADGNVIEGDLFIDCTGFRALLIGKTLNVGFTDWSHWLLNDSALATQTTAVRDAVPYTRAIAGNAGWQWRIPLQHRVGNGIVYCSRYISDDEAKQEFLGSLEGEVIKDPWPIRFRPGQRQKCWSKNVVALGLAGSFIEPLESTTIHLIQRGITRLLNCFPHVITPEIVNEYNARLDTELQHVRDFVVLHYCVTNRRDNAYWRTVGSMELPPSLRQRIELFRETGNVFPVPTELFAENSWIQVMMGQGITPRQHHPIAEVMSFDELRQFLDSIRASTANTVRQIPAHMDYLRSYCPADKPF

SEQ ID NO: 84118 - protein, 504 aa, Sphingomonas sp.
  misc_feature (1)..(504): tr|A0A0Q4F6N2|A0A0Q4F6N2_9SPHN Tryptophan halogenase OS =Sphingomonas sp. Leaf208 OX=1735679 GN=ASE69_00165 PE= 4 SV=1
MANHPLRIVIVGGGTAGWMAAATFARFLETGYEIDLIESDAIGTVGVGEATIPQIHLFNDALGLDEDAFLRATGGTFKLGIEFVDWFKPGHRYMHAFGDVGRDVGLLPFHQYWLRARSLGLAGDLGAYSLNTHAALAERMQRGPARTARTLPSMPYAYHFDAGLYARYLRRYSETRGVNRIEGKIVQVTRDGESGDVSGLVLENGTTVAADLYIDCTGFRGLLIEEALATGYEDWTHWLPCDRAIAVPSARSEKFTPYTRSTAHAAGWQWQIPLQHRTGNGVVFSSAHMSEDEATATLLAGLDTPAKADPRTIAFRTGRRKRMWNRNVVALGLAAGFMEPLESTSIHLIQSAISRLLKLLPGRVIADADRTEFNRQSDFEYERIRDFIILHYKATARDDTPFWRQCRDMAVPDTLAAKIDLWRGNGHIVREHEELFTEVGWLQVLAGQGIMPAGHHPLADAISTSDLGEFLDTIDKLNAREAGQMQDHAAFVAQHCASPVGLGA

SEQ ID NO: 84119 - protein, 498 aa, Sphingopyxis sp.
  misc_feature (1)..(498): tr|A0A0W1F456|A0A0W1F456_9SPHN Tryptophan halogenase OS =Sphingopyxis sp. HIX OX=1759074 GN=ATE62_13785 PE=4 SV =1
MTQPIQRIVIAGGGTAGWMAAAAIARTMGRAVSVTLVESEAIGTIGVGESTIPPLVNFNRLLGINEADFMRATQATFKLGILFDNWKEEGHRYFHSFGLTGKDHWSAGFQHFWLHGRTRGHEQSYDDYCMELVAAMAGKFAHLPNDGTNYAYQLDSGLYARFLRQMAEGDGTVRIEGRIGHVELDPASGDIAALILDGERRVEGDLFLDCTGFRALLIEGALHAGFEDWTHWLPCDSAIALQTPNIRPPVPYTRAMAHDAGWQWRIPLQHRTGNGLVYCSRYLGRDEALERLLGNVEGEVLTEPNFLRFTTGIRRRQWVRNCVAVGLSGGFMEPLESTSIHLIQRSVLRFIRMLPLGRPSARDIAEYEEQQLQDNLQIRDFLILHYKATNRRDSAFWRQCADMEIPDSLAQKIELFRETGRVFRKNEELFAENSWVQVMMGQGIEPQSYHPVTTKLSDDELDRLLGMIRQQVADTVAKLPDHHAYVARYCGADVPQAA

SEQ ID NO: 84120 - protein, 89 aa, Xanthomonas oryzae
  misc_feature (1)..(89): tr|G7TJG7|G7TJG7_XANOB Tryptophan halogenase OS=Xanthom onas oryzae pv. oryzicola (strain BLS256) OX=383407 GN= XOC_4109 PE=4 SV=1
MGSDDWSRWLFAASALAVQTEAVGPPVTSTRSRADQAGWMWRIPLQHRVGNGIVYSSRYMDQDSARAVLERNLTGRALTEPPPLRVTPN

SEQ ID NO: 84121 - protein, 513 aa, Devosia psychrophila
  misc_feature (1)..(513): tr|A0A0F5Q235|A0A0F5Q235_9RHIZ Tryptophan halogenase OS =Devosia psychrophila OX=728005 GN=SAMN04488059_11612 P E=4 SV=1
MTRQPHFVVVGGGTAGWIAAFIIQDAARRKGLDARISVIEPSSIPTVGVGEATTAAFRVLLMHFNIDEFEFFRKTEATFKLGIRHEDWRRKGFTYYGPIDDPHQVIKAPPGAASDYLNVYAIAAGKPITDMHLFGPLLEQKKAPYARKADGSLIPLGPFHHAYHFDQAKVGRFFASKSQGVDIIDAVVSGVHRHPETGDITALELDNGTKVEADFFIDATGFRKQLIVKEMQAPWISYAHELPVNRALPFWLDIKPGDEIANYTRAWAMDSGWMWQIPTQTRYGCGYVYSDEFSTPEQAKAEVERLLGREIEVRSDIRFQIGRLENAWVGNVLAVGLSSSFLEPLESTSIHGTIVQMMLFADRYLKHPADLTPADRADYNARVGRQVDDFRTFVNTHYLVERDDTPFWREVRASRIHPETKQRLQYWQHHMPRHEQFPDTLFGLPHIQTQLHYPVLTGLGLLDQNLARQEMDKDPKLRQFARETYDSLVKEYRAAAQKALGHAEFLQAVRDMA

SEQ ID NO: 84122 - protein, 522 aa, Alteromonas sp.
  misc_feature (1)..(522): tr|A0A1J0RXJ0|A0A1J0RXJ0_9ALTE Tryptophan halogenase OS =Alteromonas sp. Mex14 OX=1917157 GN=BM527_17840 PE=4 S V=1
MKESHFQAPLTSIVVAGGGAAGWLTAAILAAEHNIKNNDRVSVTLVESPDVKILGVGEGTWPTMRDTLRKIGISEADFIASCDASFKQGTRFVNWKSTESENVYDHPFSLPAGFFEGEVGAWWLSHGHQHQKSTFSEMFSTQSLLCNFSKAPKQVQTPPYAAVANYGYHLDAHKFAELLKKHCIERLGVNYVNDHIEHIKEDAEGYIASLQCKSEEIHGDLFVDCTGFSATLIGKHFNSPITDVSHGLKNNSAIAVQAGYVDENVDIASATLSTAHENGWIWDIGLPHRKGVGCVYSSEFASEEKAAETLKAYLTSCKKTKDVSESDFRKITFSPGYRKTAWVKNCVAVGTSAGFVEPLEASALVMVEMSARFISEHLPNHREIMPSVSKRFNSNFTRRWERIVDFLKLHYVLSERKDSPYWRFMTNLDNASEQLKDWLLEWQYRPISLTDFCYADELFPAASYMYVLYGMKAPEQFAINFSRYSDSVMGQTLNAVKANEKLSQKHVAALPTNRELIKAIRA

SEQ ID NO: 84123 - protein, 521 aa, Xanthomonas oryzae
  misc_feature (1)..(521): tr|A0A0M1MIR6|A0A0M1MIR6_9XANT Tryptophan 7-halogenase OS=Xanthomonas oryzae OX=347 GN=EYR26_01570 PE=4 SV=1
MSDTLPSDPQQRAVRRVVIAGGGTAGWMAAAAMSKLLGRHLQITLVESDEIGAVGVGEATIPSLVTVHRLLEIDEAVFMATTQATIKLGIAFEHWRDVDRHYIHSFGHAGTDHGSAGFQHFWLKGQQRGVARDFGDYCLELRAAQEGRFAHLPNGGMNYAYHLDAGLHARFLRRFSEGFGVTRIEGRIGQVETDAESGFLTALTLQDGTRVAGDLFLDCTGLAGLLIGKTLGVGSDDWSRWLFADSALAVQTEAVGPPVTSTRSRADQAGWMWRIPLQYRVGNGIVYSSRCMDQDSARVVLERNLTGRALTEPRPLRVTPNQRHRVWEKNCVALGLASGFLEPLESTNIHLIQRGIIRLLQTFPQVINAVDIAEYNRQAAQEITHIRDFVILHYHATDRRDTPFWRDCAAMDIPDALRHRVELFRQSGRVFHQANGLFAENAWVQVMLGQGIVPQQHHPVADLMGDAQLSRFLDTIRARVEAALVRLPAHADVMQRYCPAPPPPEPAARVPAPPVMATPAR

SEQ ID NO: 84124 - protein, 511 aa, Sphingopyxis sp.
  misc_feature (1)..(511): tr|A0A0W1FDV1|A0A0W1FDV1_9SPHN Tryptophan halogenase OS =Sphingopyxis sp. HIX OX=1759074 GN=ATE62_07450 PE=4 SV =1
MAKRSILIVGGGTAGWLTAAYLARFFDLPRNPRLAITLIASDEIGSIGVGEGAFPTIRSTLQFIGIDESQFVRSTTATFKQGIRFDDWVRTPAPGTSSHFLHPFEPPYHGDGHSLVSYWLLQDPATRPAFAEAMTIQNRVAEARRAPKRPGEGAFDGPLNYAYHFDAARLAEVLSAQARALGVTHLQGTLTDVALDGTTGAIDHIVTAEHGTLSADLYIDCSGFRAELIGALGAPFRSVGDRLFTDRALACKIPYDDPAAPLESYTIAAAHEGGWTWDIGLAGARGVGCVYSSAHLSDDRAADILATYTGGRSHDVKVRSIPFEAGYRTTPWVKNCVAVGLSGGFLEPLESTGLVMIETAAAMIAEMFPLGGPMGAPARRFNELMSARYANIVNFLKLHYCLSRRNEPFWRDNGDPASIPDRLKELLEEWRYRPPGRFDFILDLESFAFFNYQYILYGMEYRTDLSPVREEFPDVAEAERIFARIRNFGDRAASELPAHRALIDQINAEAA

SEQ ID NO: 84125 - protein, 503 aa, Gordonia sp.
  misc_feature (1)..(503): tr|A0A1V4Q7K5|A0A1V4Q7K5_9ACTN Tryptophan halogenase OS =Gordonia sp. i37 OX=1961707 GN=B1964_10255 PE=4 SV=1
MSEVTTESVDVVVVGGGPGGSTTATLLAKSGRRVIQIEKETFPRYQIGESLLPSTIHGVCKLLGCYEKVRDAGFMHKRGGSFRWGTNPVPWNFLFAISPEFAGEGSYAYQVERMKFDHILLENSAENGVDVRQNCRVNGVDTDETGRVTGVRYLDADRVEHHVRARFVVDASGNTTRLSSRAGGERVYSEFFQNVAVFGYFEGGKRFSAPDAGNILCAAFDEGWIWYIPLSDTLTSVGVVVAKDKAQHVLNAQEQTLQHYIDRCEIVRDMLADATRVTEGTYGEIRIRKDYSYANTRFWGNGMVLVGDAACFIDPVFSTGVHLATYSGVLAARSINSVLDGTMSEERAFGEFEGRYRREYAVFYEFLSAFYDMEQSEDSYFWKARKVTNFDRNDMTAFVSLVAGGYSGEDALTDPSSIVSRFRRSSDALTEAARATGGMDTDSGQRMGHMFGAPVVREVMEEMNALQARGAVGDRATEPPLLEGGLVPSADGLAWAEPVQIAV

SEQ ID NO: 84126 - protein, 479 aa, Sphingomonas sp.
  misc_feature (1)..(479): tr|A0A0Q4EW81|A0A0Q4EW81_9SPHN Tryptophan halogenase OS =Sphingomonas sp. Leaf208 OX=1735679 GN=ASE69_06130 PE= 4 SV=1
MTAAALAAVAGRSVAEVHLVESEEIGIVGVGEATLPHIRAFNTRLGIDEAEFMRATGATFKLGIEFCDWARIGDSYTHPFGAFGHDVDGVGFHHYLSRAGQIATLPDYSLPVVAARHAKFAPPLHDPRSLLSTFGYAYQFDATRYAPFLRARAERQGVTRTEGRVVDVERSATGDVVAVMLDDGQRITGDLFIDCSGFRSLLLGQAMGEPFEDWSHWLPCDRAVAVPCADAGTLKPYTTATAMPAGWRWRIPLQHRVGNGYVYSSAHIDDGAAQDALLRSIESTPLADPRMLRFKAGRRARSWVGNVIGVGLAGGFLEPLESTSIYLIQLAITQLLELFPATPISPIDRDAFNRVVDLEYDRIRDFLILHYHATTRDDSLFWDHVRTMDVPDTLAEKMTLFRQRGRVMTYREGVFLEPSWIAVYLGQGVVPKGYDQRADRPSDAALVQALARLRTETRDAVMTMPDHAAYIAQSGAAAA

SEQ ID NO: 84127 - protein, 517 aa, Novosphingobium barchaimii
  misc_feature (1)..(517): tr|A0A561HST4|A0A561HST4_9SPHN Tryptophan halogenase OS =Novosphingobium barchaimii OX=1420591 GN=FHW33_104119 PE=4 SV=1
MTTDYPSSGRVVILGGGTAGWLAAAYLSRTLNMRDVTLVESSEIGIIGVGEGTFPTIRTTLAGLGISEAEFLARADATFKQGVLFEGWATGSDSYFHPFNLPVGGEDEALLPHWIADGSQTRLPWADAVTVQEQVIRAGRAPKRAEDPDFSGPMNYAYHFDAARFADYLRDISVAAGVTRIEGTVATVERTADGDIAALALADGRWVEGDFFLDCSGFRALLIGQTLGADFTSCSDSLFNDRALAMQVPYAQPGAPVRPYTLATAHEAGWTWDIGLSERRGVGYVYSSRHCSDDEAETTLRRYLGSEGESLTPRQLRFETGYRETQWIGNCVAVGLSAGFFEPLESTGIMLIEAALKMIGEFLVPGERSAREAAARSFNRLMAARFERIIHFLKLHYCITRRTDTAYWRDNADPASIPEALQDMLAQWRHRPPSRFDFVVDLETFLPPSYHYILYGMGFETQLAAGIQRYPGAQEAREVFARVRTAHAGARGALPDHRALLDHYHARMGAAPAKVSR

SEQ ID NO: 84128 - protein, 514 aa, Lacimicrobium alkaliphilum
  misc_feature (1)..(514): tr|A0A0U3AFV1|A0A0U3AFV1_9ALTE Uncharacterized protein OS=Lacimicrobium alkaliphilum OX=1526571 GN=AT746_17610 PE=4 SV=1
MSQRQRIIILGGGTAGWMTAAALVRYLPASEFDICLLESSQIGTVGVGEATIPHIRQFNQWIGLDESQFIQSTGATYKLAIRFQGWGKEAASYFHPFGFSGEDLNGLPFHQYWLWLRQHQQAGLKPYDHYSMAVLMAQGGHFSYPQEQPDDPLSAYNYAFHMDATLYAKLLRERCIEQGVEWLDARVEAVSQHCSGDIRALKLDDGREVEGDLFIDCSGFAGVLIEQHLHAGYENWQRWLPCDRALAVPSDANSNPPVYTSSRATAAGWQWRIPLQHRTGNGLVYCGEFMSDQQAEETLLSGLQEMALNDPKSLRFVTGRRRHSWVKNCVAIGLSSGFLEPLESTSLYLIQVAIQQLLACFPGTQIGDTERQYFNRTMELEYQRVRDFLILHYKLNRRPEPFWQHCAQMEIPDSLAERLAMYRETGHLLEYRQGLFQPASWLAVALGQGEYPGNLDARLDSQSQASAMAWFSDYQQKLQQMAAQMPKHADALQQNMAAREPPAINSLYGFRSGR

SEQ ID NO: 84129 - protein, 506 aa, Xanthomonas arboricola
  misc_feature (1)..(506): tr|A0A2N9D8S2|A0A2N9D8S2_9XANT Tryptophan halogenase OS =Xanthomonas arboricola pv. fragariae OX=487822 GN=prnA _1 PE=4 SV=1
MIPAPLRNIVIVGGGTAGWMAAAAFARVLGPGFKVQLIESEQLGTVGVGEATVPHIKAFNNLLGIDEAEFVRQTQGSFKLGIEFVDWQRPGTSYIHGFGTQIGHPLGLLPFHQYWIKQHARGKAQPLGAYTLNTVAAVRGKFMTSAGDVPANSPLANIAYAYHFDATQYARFLRNYAEQRGVTRIEGLVEQVQLHADSGHVQSLQLASGQVVSGDLFIDCSGFRGLLIEEALHTGYHDFTHWLPCDRALAVPSENVGPPTPYTRSTARTAGWQWRIPLQHRSGNGYVYSSAHISDDEAAATLLANLDGKPLADPRPLRFTTGRRKQFWNRNVVALGLASGFLEPLESTSIHLIQAGISRLLELFPREGISPVLVQRYNDRLAFEFDRIRDFLVLHYHATERDDSAFWRHCRTMPITPELQTTLDLFRDSGRFYRNAEEMFAEISWVQVMVGQGILPRGYHPLVDQVPDHDAERFLASVAQTIGHCVDVMPTHQQFIDRYCKAAAPR

SEQ ID NO: 84130 - protein, 509 aa, Xanthomonas oryzae
  misc_feature (1)..(509): tr|A0A5E8KWU4|A0A5E8KWU4_9XANT Tryptophan halogenase OS =Xanthomonas oryzae OX=347 GN=ADT27_08615 PE=4 SV=1
MIPAPLRNIVIVGGGTAGWMAAAAFARVLGPTFTVQLIESEQLGTVGVGEATVPHIKAFNNLLGIDEAEFVRQTQGSFKLGIEFVDWQRPGTAYMHGFGTQIGHPLGLLPFHQYWIKQHARGKAQPLGAYTLNTVAAARGKFMTSAGDVPANSPLANIAYAYHFDATQYAHFLRRYSQRRGVTRIEGLVEQVQLHPESGHVQSLQLASGQTVHGDVFIDCSGFRGLLIEEALHTGYHDFTHWLPCDRALAVPCEKVGPPTPYTRSTARAAGWQWRIPLQHHTGNGYVYCSAHISDDEAAATLLANLDGKPLADPRPLRFITGRRKQFWNRNVVALGLASGFLEPLESTSIHLIQSGISKLLELFPREGISPVLVKRYNDRSAFEFDRIRDFLLLHYHATEREDSAFWRHCRSMPITPELQTTLDLFRDSGRFYRNAEEMFAEISWVQVMVGQGILPQGYHPLVDQVPDRDAEGFLASVAQTIAHCVDVMPPHQQFIDRYCKAAALPCGG

SEQ ID NO: 84131 - protein, 505 aa, Xanthomonas arboricola
  misc_feature (1)..(505): tr|A0A2N9D6X2|A0A2N9D6X2_9XANT Tryptophan halogenase OS =Xanthomonas arboricola pv. fragariae OX=487822 GN=LMG1 9146_01263 PE=4 SV=1
MSQAPIRKVVIAGGGTAGWIAACALSHQFRELLEITLVESEQIGTVGVGESTVPPIRSFHRFLQIDEQEFLRAVAGTFKLSISFEHWRHQGERYIHPFGITGQSTLVCAFHHLWLESQRRGMPGSFGDYCLETVASRVDRFALLREPAVNYAYHLDAALYARFLRTRSEACGVRRIEGRIQQVTLQPDSGDVASLLLEDGQVLEGDLFIDCSGFRGLLIEQALHTGYEDWSHWLPCDCAVAVQTEALGPPVPYTRAIAHEAGWRWHIPLQHRVGNGLVFSSKHLSDDEAHAKLLRDVAAPALKDPWLVPFRTGRRLKAWNKNVVALGLASGFIEPLESTSIHLTIAAVVRLISLFPADGIAPSQVQLFNDISRAEMEHVRDFIILHYHATQREEPLWRQCRTMELPESLALRLRAWRERAHAWQAADELFRVDSWTHVLMGQGILPEQHHPLARALSDRDLRRLLDGIAQPIRHAVEQMPSQQAFIDAYCKAGASVWGLRSQVVT

SEQ ID NO: 84132 - protein, 509 aa, Xanthomonas oryzae
  misc_feature (1)..(509): tr|A0A0M1K727|A0A0M1K727_9XANT Tryptophan halogenase OS =Xanthomonas oryzae OX=347 GN=ADT25_18185 PE=4 SV=1
MIPAPLRNIVIVGGGTAGWMAAAAFARVLGPAFNMQLIESEQLGTVGVGEATVPHIKAFNNLLGIDEAEFVRQTQGSFKLGIEFVDWQRPGIAYMHGFGTQIGHPLGLLPFHQYWIKQHARGKAQPLGAYTLNTVAAARGKFMTSAGDVPANSPLANIAYAYHFDATQYAHFLRRYSEQRGVTRIEGLVEQVQLHPESGHVQSLQLASGQTVHGDVFIDCSGFRGLLIEEALHTGYHDFTHWLPCDRALAVPCEKVGPPTPYTRSTARAAGWQWRIPLQHRTGNGYVYCSAHISDDEAAATLLANLDGKPLADPRPLRFTTGRRKQFWNRNVVALGLASGFLEPLESTSIHLIQSGISKLLELFPREGISPVLVQRYNDRSAFEFDRIRDFLLLHYHATERDDSAFWRHCRSMPITPELQTTLDLFRDSGRFYRNAEEMFAEISWVQVMVGQGILPQGYHPLVDQVPDRDAEGFLASVAQTIAHCVDVMPPHQQFIDRYCKAAALPCGG

SEQ ID NO: 84133 - protein, 495 aa, Colwellia beringensis
  misc_feature (1)..(495): tr|A0A222GBS6|A0A222GBS6_9GAMM Tryptophan 7-halogenase OS=Colwellia beringensis OX=1967665 GN=B5D82_17130 PE=4 SV=1
MTNLKTKVVIAGGGTAGWLSAFSLVTRLGSVLDITLIESDQIGTIGVGEATIPTMRTYHRLIGIDEQEFMAETQATFKLGIQFDNWGQQNDSYFHSFGEIGQRSWMAEFHEFWMEAKAQGFGGSLEDYCLELKAAKANKFATQAGNKPVNFAYHFDATAYAHYLRKKSETAGVKREEGFIERVKKDATGNISSLTLSCGKEILGDVFIDCTGFKGLLIGEHLNVGFEDWSHYLAADSAIAVQTKTVEEPRPYTQSIAHRAGWQWRIPLQGRVGNGIVYSSKYLSDDEARSTLMGNLTGEPITEPRLVRFTTGRREKAWHKNCIAIGLSSGFLEPLESTSIHLVTTALLRLMKLFPFSGNSALLAEQYNREVQREAETVRDFIILHYHLTERDDSPFWEHYRTMEIPESLAHRMAIFRENGYAWPDDVNLFRVDSWVQVMMGQGLMPKRHHKGSCVIPTEGLKDQMKALKIRIEKSVEQLPTHSDFIKKYCPVKGI

SEQ ID NO: 84134 - protein, 513 aa, Sphingomonas sp.
  misc_feature (1)..(513): tr|A0A0Q4EWM6|A0A0Q4EWM6_9SPHN Tryptophan halogenase OS =Sphingomonas sp. Leaf208 OX=1735679 GN=ASE69_04275 PE= 4 SV=1
MHEIQNIVIVGGGTAGWLTAGVIAAKHQARRQHGFTVTLVESPNVPTIGVGEGTWPTLRSTLKKMGVSETELFRQCDASFKQGARFNRWTTGAPDDGYYHPLMLPQHFGQVNLAPHWLADEGSATFCDTVTPQGRICDEGLGPKTIATPEYDGHANYAYHLDAGKFSHFLQRHCCDTLGVRHVKADVTEVHLDESGDIASLDTEQGVSIAGDLFIDCTGFAALLIGGAMKVPFRSCTDILFCDTALAMQVPYDVPDAPIASHTISTAQSAGWIWDIGLPTRRGVGHVFSSSHISADAAEQELRDYIGPAARDLTARRLTIRAGHREQFWVRNCVAVGLAAGFLEPLEASAIVLIELSAKMIAEQMPACREVMDVVAHRFNDTAHYRWGRIIDFLKLHYALTKRTDTAFWRDNVRPESIPDRLSGLIELWRFQSPWVYDEFDRAEEVFPSASYQYVLYGMGARTAVMPGSIDDDVALARRARHDNQVQTQRLVSSLPGHRDLIDRIKRHGLQPI

SEQ ID NO: 84135 - protein, 496 aa, Colwellia beringensis
  misc_feature (1)..(496): tr|A0A222GB56|A0A222GB56_9GAMM Tryptophan 7-halogenase OS=Colwellia beringensis OX=1967665 GN=B5D82_15910 PE=4 SV=1
MTNKIKKVVVLGGGTAGWMSASLIKKLMGKSVDVELVESEAIASVGVGEATIPPIRLFNSVLGINEAEFLRETKATIKLGIKFENWKNTEESYFHTFGAAGKSSPFCQFHHYLKRAQDAGLKDNLWDYDLNYLCATQGKFAQIKSKDPIIDIPYAFHFDAGLYAEFLRKFSEKIGVKRTEGMVENVEQCKKTGNVNSLVLKSGEVIKGDLFIDCSGFRGLLIQQTLNTGYEDWGHWLPCDRAVAVPSKRFDETVPYTRSIAHAGGWQWRIPLQHRNGNGLVYSSKHYSDEQAKALLLANIESEPLAEPRIIKFTTGRRRKQWHKNVIAIGLSSGFLEPLESTSIHLIQSAIVRLIHMFPQKGISTAQVDEYNRQSKVEYEQIRDFIILHYHVNQRDDSQLWRDLREMDIPESLAEKIKLFKESGKIFREQNDLFNEGSWLQVMLGQGIEPEDYHPMANDMPLEQLNSMLAKIKAIKHEPLTKLPSHDEYLTNFCRL

SEQ ID NO: 84136 - protein, 435 aa, Planctomycetes bacterium
  misc_feature (1)..(435): tr|A0A517NPW6|A0A517NPW6_9BACT Flavin-dependent tryptop han halogenase RebH OS=Planctomycetes bacterium K23_9 O X=1930275 GN=rebH PE=4 SV=1
MRVAIIGGGTAGHMALAHLSKQWPNAQLVHLYDRDRPTIGVGEGTTPDFVNWLSTIGITFDDLVNHCNVTRKRGISFHGWGTRESDFEHEFLPRSQQAVHFSAARLPELLASRSSFDHINDSVESIDTSGDRSIITTHRGRQIDADLVIDARGFPCPSETEIHRFDWIPTNSALVTKSPFADGETITKAIARPLGWVFRIPLKNETSWGYVYNSQLTTRSGIERDFLAFLKETGVSGHNPFRQLDFPNFARRRVFDQGVFHIGNCASFLEPLEATAISVITLQLHLLSHWKTLQDQGLPLVLATDRINRIHEDTLIKISIFIAWHYAAGSQYDTPFWQTAKQRFQQVTQAPELGQIFRQFDELLAQSNSVSAAALAELNTPTDLERWGMNGPAQPNFGGYNKLSFSQLAAGLRETSPSIGPHFNLDPSARPSRSV

SEQ ID NO: 84137 - protein, 500 aa, Sphingomonas sp.
  misc_feature (1)..(500): tr|A0A0Q4ENA9|A0A0Q4ENA9_9SPHN Tryptophan halogenase OS =Sphingomonas sp. Leaf208 OX=1735679 GN=ASE69_07990 PE= 4 SV=1
MGARMQVVIVGGGTAGWMTAATLAMSFAGRLADVTLIESEEIGTVGVGEATVPHIRFFNQRLGIDEADFIRRTNATYKLGIEFRDWGRIGDSYTHPFGDFGHDIDGLPFHQYWAHASRGDTDGLPTLEDCSLPIVAARDNRFTPPLEDQRSIRSTYSYAYQFDATLYAAYLRDYAEARGVVRIEGRVDAVEQSAGSIEAVRLADGRRIAGDLFIDCSGFRALLIDGALKVKYEDWSHWLPCDAAWAVPTANAGALTPYTRATAREAGWQWRIPLQHRTGNGHVFSTRFTDPETARAVLMDNLEGEALAEPRMLRFRTGRRDLQWVGNCVAIGLSAGFLEPLESTSIHLIQLAIGKLIELFPSGGVFDPADAAEFNRAMALEYDRVRDFLVLHYCATERDDTPFWRYMRTMTLPSSLTEKIAEFRERGIVASYREGMFLPASWLAVYYGQRIMPDRVNPLIADMPMATSHAHVAKVAAACASAAKTMPLHEDYIARIKAAA

SEQ ID NO: 84138 - protein, 508 aa, Sphingomonas sp.
  misc_feature (1)..(508): tr|A0A258SFW6|A0A258SFW6_9SPHN Tryptophan halogenase OS =Sphingomonas sp. 28-62-20 OX=1970433 GN=B7Y43_06795 PE =4 SV=1
MARIERLVILGGGTAGWMTAAALAKALGRTVQIDLLESDAIGTIGVGEATIPTIHWFNELIGLDEADFVRATKASFKLGIEFVDWARPGHRYFHPFGRYGVDLGPVPFHQCWLKAGRDGATTPLADYSLATALAGSNRFARPVDDPRSILSTLGYAYHFDASLYAAYLRTLAEAQGVTRHEGRLVSVERDPETGFVTALTSDRGDRLAGDLFVDCSGFRALLIGDELGASFEDWSHWLPCDRAIAVPCARVAETTPYTRSTLRDAGWQWRIPLQHRTGNGYVYASGFLSDDEATATLLANLDGEPLADPRLIRFTAGFRRESWTKNIVAIGLSSGFLEPLESTSIHLIQSGIAKLIALFPNRDCDPALARQFNALFGRDMDAIKDFLILHYHATQGHQAPLWQHTRHMTLPDSLIEKEEQYRRTGRLMLASDELFREASWLAVLNGQGIVAMDHSPIADTLDGVTNRRQLDQIAALIARAAPTLPRHDDAIATLIGQAAPRAAVAAVP

SEQ ID NO: 84139 - protein, 531 aa, Streptomyces sp.
  misc_feature (1)..(531): tr|A0A2B8AN60|A0A2B8AN60_9ACTN Tryptophan halogenase OS =Streptomyces sp. Ru87 OX=2044307 GN=CRI70_30810 PE=4 S V=1
MDNRIKSVVILGGGTAGWMAASYLGKALQRTVDITVLEAPSIPRIGVGEATVPNLQRAFFDYLGIPEEEWMRECNASFKMAVKFINWRTPGPGSPQPRTRDDGRPDTFHHPFGLLPSADRIPLSHYWAAKALRGETNEAFDDACFVDTAIMDAKKAPRWLDMSRATNYAWHFDAAKVAAYLRDFAVTKQAVVHVQDEMTEVLTDERGFITALRTKSGQLLKGDLFIDCSGFRGLLINKAMEEPFVDMSDHLLCNSAVATAVPHDDEKNGVEPYTSSIAMPSGWTWKIPMLGRFGTGYVYSRDFTGQDEATLAFSKLWGLDPDHTEFNHVRFRVGRNRRAWVRNCVSVGLASCFVEPLESSGIYFIYAAIHMLAKHFPDKTFDKVIIDRFNREIQEMFDDTRDFLQAHYSLSPRTDTPFWQANKELVLADGIKDKIETYRAGLPVNLPVTDESTYYGNFEAEFRNFWTNGSYYCIFAGLGLMPRAPLPLLAYKPQSAAQADLLFADIKKRQRETADSLPSTYELLRQLHGVS

SEQ ID NO: 84140 - protein, 521 aa, Xanthomonas campestris
  misc_feature (1)..(521): tr|Q3BMZ1|Q3BMZ1_XANC5 Tryptophan halogenase OS=Xanthom onas campestris pv. vesicatoria (strain 85-10) OX=31627 3 GN=XCV4141 PE=4 SV=1
MPDTTPSDPQQRPVRRVVIAGGGTAGWMAAAALSKLLGRHLQITLVESDEIGTVGVGEATIPSLVTFHRLLEIDEAAFMAATQATIKLGIAFEHWRDVDQHYIHSFGHAGTDHWSAGFQHFWLKGRQRGVARDFGDYCLELRAAQEGRFAHLPNGGMNYAYHLDAGLYARFLRRFSEGFGVTRIEGRIGQVETDAQSGFLTALTLQDGTRVEGDLFLDCTGFAGLLIGKTLGVGSDDWSRWLFADSALAVQTESVGPPVTYTRSRADQAGWMWRIPLQHRVGNGIVYSSRYMDQDGARAVLERNLTGRALTEPRPLRFTPNQRHRVWEKNCVALGLASGFLEPLESTNIHLIQRGIIRLLQTFPQVINVADIAEYNRQAAQEITHIRDFVILHYHATDRRDTPFWRDCAAMDIPDSLRHRVELFRQSGRVFHQANELFAENSWVQVMLGQGVVPQQHHPVADLMGDAELGRFLETIRARVEAALVRLPAHADFLQRYCPAPPLPEPAARVPAPPVMATPAG

SEQ ID NO: 84141 - protein, 504 aa, Erythrobacter sp.
  misc_feature (1)..(504): tr|A3WHM0|A3WHM0_9SPHN Tryptophan halogenase, putative OS=Erythrobacter sp. NAP1 OX=237727 GN=NAP1_09752 PE=4 SV=1
MAIQHIVIVGGGTAGWMAAAALSRLKSGRTLDITLIESEQIGTVGVGEATIPPFVGFNDLLGIPESELLSNVQGTFKLGIQFENWGKRGDSYIHPFGAYGYTMGGISFHHVWHKLAKEGDNRPIQVFNVETMAAYFGKFMRSEDYQKQRDDLPPINYAYHLDAGKYAAFLRGYAEKRGVVRQEGRVDDVSLDGETGFVTGVTLDDGRKIDGDLFIDCSGFRGLLIEQALGTGYEDWTHWLPCNRAVALPCGRDDGSPPPPFTRATAHSAGWQWQVPLQHRNGNGHVYCSEFMEDQEALDILLGNIAGKPQADPNFLRFTTGRRKKFWNKNVVALGLSAGFMEPLESTSIHLINTGVDKLLSLLSLDGVTQTQEDTFNRLTGREYARIRDFLILHYNATSRDDSGFWNYVRTMDVPETLTEKVELFKANGQIFREEDELFTETSWAAVMMGQGIAMTGHNAMADSLDPASTRKEIDEMEQSIRFLIQHMPGHGEYLSRYCPAKAA

SEQ ID NO: 84142 - protein, 502 aa, Lacimicrobium alkaliphilum
  misc_feature (1)..(502): tr|A0A0U2QRP6|A0A0U2QRP6_9ALTE Tryptophan halogenase OS =Lacimicrobium alkaliphilum OX=1526571 GN=AT746_17600 P E=4 SV=1
MTEKLRKIIVLGGGSAGWMTAAALGKVLKNQYCQIQVIESEQIGTVGVGEATIPQIMLYNQLIGLDEDEFVRRTQGTFKLGIQFVDWHKPGSSYFHAFGDVGKNMEGVQFYHYWLKLRALGKAAPLDDYTLTSLACHEKRFMRSIDAGNSPLSNIAYAFHFDAGLFAKYLRELSQGWGVQRTEGKVVEVRQHDNGFIHSLLLEDGSEHEADFFIDCSGFRGLLIEQTLKTGFEDWSHWLPCDNAIAVPSANTKEPWPFTRASAQKAGWQWRIPLQHRVGNGHVYCSQFMSEDEATHILLKNLDGEPLAEPRRIRFKTGKRKQFWNKNCLAVGLAGGFMEPLESTSLHMVQAAISKLFSFFPDRQFAQADIDEFNRQMHFDYDRIRDFLILHYYATQRDDSPFWDYCRTMDVPEELTQKIEQFRSNGRVFRFNNEMFSDLSWFEVMLGQGIEPRGYHPLADIFSEQELARRLESIRGVIRKSVDYMPSHQEFIDQHCKARKVY

SEQ ID NO: 84143 - protein, 503 aa, Erythrobacter sp.
  misc_feature (1)..(503): tr|A3WHM9|A3WHM9_9SPHN Tryptophan halogenase, putative OS=Erythrobacter sp. NAP1 OX=237727 GN=NAP1_09717 PE=4 SV=1
MSNTNVQKLVIVGGGTAGWITAAAFSRLMGRTLSIELVESDAIGTVGVGEATIPQIIRLNRILGLDEHDFVKRTNGTFKLGIEFVDWGDVGTRYLHTFGDAGMNLASVPFHHYWKRAEASGSRHSLWHYSLHQLAANHAKFGKLDRVGNTSMTGLAYAYHFDASLYAAYLRAFSEQKGVTRTEGIVQSVARDGESGDITSITLDNGREIAGDFFIDCTGFRALLLGQELGVGYQDWSKWLPCDSAQAVPSERLETLVPFTRATAKTAGWQWRIPLQHRTGNGHVYCSDFISDEEAGETLLAGLDTKPLADPRPIRFTTGRREQFWSNNCAAIGLSSGFLEPLESTSIHLIQSHVSRLLQLFPASNRSDVERAEYNRRCEAEFEQIRDFLILHYHQTNREDSEFWRYCRNMDVPDSLTHKQELFASSGRVGRDADDLFREASWVQVMLGQGVTPQSHDAMANGLSDAQLSEFLGNVRTLIERAVGTLPTHEQYLKQNCAAAEAA

SEQ ID NO: 84144 - protein, 510 aa, Massilia sp.
  misc_feature (1)..(510): tr|A0A1S9ALK9|A0A1S9ALK9_9BURK Tryptophan halogenase OS =Massilia sp. KIM OX=1955422 GN=B0920_14000 PE=4 SV=1
MEDAMNNIDRIGSITVVGGGSAGWMAAAALATYLGKHARIRLIESEQIGIVGVGEASVPHLRLFNGQWLGIDETEFVRRTQGTVKLGIQFNDWGRIGDSYLHGFGILGRSLGPLPFHQFWLKLRQAGRAAPIGEYSAQTLMAPRGKFAPGDRNAAPNSPLADIAYAYHFDATLYARFLRELAERRGVERIEGKITGVQQRPDNGYVASVTLESGQVVDGELFIDCSGFRGLLIEETLGTGYVDWSHWLPCDRAVAVPSERAGPDTPYTRATARGAGWQWRIPLQHRTGNGYVYASRHLSDDEAAATLLANLDGKALAEPRQLRFTAGMRRKAWNGNVVALGLASGFLEPLESTSIYLVQSGITRLLSLFPRRDLDPLLAERYNRETAFEYERIRDFLILHYHATERDDTPFWKHCRTMEVPDTLRETMDMFRADGRYLRNGEDFFALPSWVQVMLGQGIQPRGYHPLVDEMPEEKLVDHVESVRAMLAHAVDAMPTHREWIERYWKAPAP

SEQ ID NO: 84145 - protein, 371 aa, Myxococcus fulvus
  misc_feature (1)..(371): tr|F8CJF8|F8CJF8_MYXFH Tryptophan halogenase OS=Myxococ cus fulvus (strain ATCC BAA-855 / HW-1) OX=483219 GN=LI LAB_03730 PE=4 SV=1
MAVALRDLAPFLSVVMLERTGYDTHRPGEALSPDIRTPLSRLGVWSSFLRDGHLASRGTSSCWSRAEPRVQDMRMSPWGSAWNLDRARFDERLSLEAARQGARVLRLTTLLDAEPLAAEGYRLHLSQRKAGALTLRARFVVDATGWKATFAMSQGARRRIRDRCFTVHGAFQLRPGESFPTDALVEACPEGWWHSARLPADRVAVTLVGDGDSLHGLRWATPERWMALLEQAPVTLARVAVCDFAGEPLVAAPVLVGELDRMHGARWLAVGDAAHTHDPLSAQGIFSALDSALLAAEALEQYMRGEEAALRAYEETLHLRFDAHLRKRSETYREEQRWPDAPFWKNRHAAFPSLTPVAGQHSAPTPAGLAT

SEQ ID NO: 84146 - protein, 489 aa, Sphingopyxis sp.
  misc_feature (1)..(489): tr|A0A0W1EIM5|A0A0W1EIM5_9SPHN Tryptophan halogenase OS =Sphingopyxis sp. HIX OX=1759074 GN=ATE62_20650 PE=4 SV =1
MIRRIVIVGGGSAGWMTAAAFGRALSPQTHKITLVESEAIGTVGVGEATVPPIHEFNRFLRIETADFLRATHGTIKLGIRFEGWGGVGHSYFHPFGYLGIEMAGIHFHHHWLRHLAEGGDADHGPYNLETMAARAGRFAPATRHGPVHHAVQFDAAAYAQYLRAYAEAKGVTRVEGKVADVQLRSEDGHISALTLDDGRTIEGDFFIDCSGFRGLLIEGALETGYTSWQHWLPCDSAVAMPCARSGDPMPYTVSTAREAGWQWSIPLQHRDGNGYVYSSAHLAHDEAEALLRSRLPGEALADANRLRFVAGHRNAIWNRNCVAIGLAGGFLEPLESTSIHLIQTTIIRLLSLLPRDAIDPNVVARFNRDALHEYATIRDFVIAHYATANRTDTGFWRDVAAAGVPDSLAERIAAFRATGNILFEPGDLFGPTNWYAVLTGQGVHPQSHHPIADTLPAGEFAKRLAILRTRVAEQLAELPPHADFLRSLG

SEQ ID NO: 84147 - protein, 515 aa, Novosphingobium barchaimii
  misc_feature (1)..(515): tr|A0A561HW09|A0A561HW09_9SPHN Tryptophan halogenase OS =Novosphingobium barchaimii OX=1420591 GN=FHW33_103122 PE=4 SV=1
MVANPIRSILIVGGGTAGWMAANLLATRLRGLPIAITLVESADIRTVGVGEATVPAIRDYFKAIGVTEAEVMQAAQGTVKLGIEFRDWRAPGTSFFHPFGRYGVDAFSVPFHQYWLKRRMAGDQTPLSDYCLPTQAAMRNLMLLPSEQPVNDLGVFDWAIHFDAGLFARFLAQRGRDLLGVRHLEGTISGANRDAENGRIASVTLTDGRTLEADLFVDCSGFRSLLLGQTLEVPYEDWTHLLPCDRAVAMPCAHGDSLTPYTRSTALSAGWQWRIPLQHRVGNGYVYSSRHISDDEATATLIANLEGEALAEPNMLRFRTGHRTRVWEKNCVAVGLAAGFLEPLESTSIVLIQSGIERLLAHFPDRDFDPSLADEFNRITALEYARIRDFLLLHYWGGQREETIWRECRALDLPETLAQRIRAYEGAGKLPRFEWDSFQSPSWLSMFAGFDIWPSRYDPLADQFSAEELGGTFEQMRAAVARAVSLAGTHEQFIAETCAAPAAQNAAPQFTLNSA

SEQ ID NO: 84148 - protein, 498 aa, Lacimicrobium alkaliphilum
  misc_feature (1)..(498): tr|A0A0U2Z4X2|A0A0U2Z4X2_9ALTE Tryptophan halogenase OS =Lacimicrobium alkaliphilum OX=1526571 GN=AT746_03955 P E=4 SV=1
MKSVMRKVVILGGGTAGWMSAALLKKILGSAVDIELVESEMIGTVGVGEATIPPIRLVNNVLGIKEADFLRETQATMKLAIRFENWRVPGEGYFHTFGAPGKSMAFCHFHHYWRRAQQEGLKDSLWEYDLNYLCAQAGKFSHINSKNPVLELPYAYHFDASLYARFLRNYSEKLGVVRTEGKVEKVDQDNDSGYIQSLQLDNGKIIGGDLFIDCSGFRGLLIQQKLNTGYEDWSHLLPCDRAVAVPSERFQKTLPYTRSIAHGAGWQWRIPLQHRNGNGMVYSSAHCSDEQAADSLLANLDSKACGDPNFIRFLTGRRRKQWHKNVIAVGLSSGFLEPLESTSIHLIQSAIVRLIHLFPHQGIQPSAVTEYNKQSKLEFEQIRDFLVLHYHVNQRTDTQFWRDLQSMEIPDSLTQKIALFAETGRLFREQNDLFLESSWLQVMMGQGIMPKDYHPMAENPSREQLLGMLQQIRQVKQDPLPKMLDHDEFLTGYCQIKE

SEQ ID NO: 84149 - protein, 507 aa, Porphyrobacter sp.
  misc_feature (1)..(507): tr|A0A4Y6VYD1|A0A4Y6VYD1_9SPHN Tryptophan 7-halogenase OS=Porphyrobacter sp. YT40 OX=2547601 GN=E2E27_07165 PE =4 SV=1
MSSAPPAPLTSIVIVGGGSAGWMTAAALAHAVGGACAITLIESEAIGTVGVGEATIPPIRTFNQRLGIDEATFVRETQGSYKLGIEFVDWGRLGHSYFHPFGQYGAEFDQVPFYHHWMREHLEGRIEGPIDDFSMCWAMARDGKFARPSPDRRMIQSTFDYAYHFDAGLYAAYLRRFAEARGVTRIEGKVIDVSLRGEDGFIEAVTLDSGTRIEGELFIDCSGFRGLLIEEALHAGYDNWQHWLPCDRAVAVPCKRGEFTPYTRSTAREAGWQWRIPLQHRTGNGYVHCSQFISEDEASATLLANLDGKPLADPRTLRFVTGKRRRFWEKNCVAIGLSAGFMEPLESTSLHLIQYAILRLIALLPDSTMSPLLAREYNAQTAREYELIRDFLILHYKASERDDSELWRYTAAMPIPDSLQYKIDHFRAHGTLVAEPQELFANPSWIAVYLGQGIVPHRAPALAHMREGVPVAERMAQIREAMAEAVAAMPSHGDFVARHCAAPPIAG

SEQ ID NO: 84150 - protein, 505 aa, Xanthomonas oryzae
  misc_feature (1)..(505): tr|A0A0M1MKD1|A0A0M1MKD1_9XANT Tryptophan 7-halogenase OS=Xanthomonas oryzae OX=347 GN=EYR26_16335 PE=4 SV=1
MIQAQIRKVVIAGGGTAGWIAACALSHQLRGLLDITLVESEQIGTVGVGESTVPPIRTFHRFLQIDEQEFLRAVAGTFKLSISFEHWRAQGERYIHPFGITGQSTLVCAFHHLWLESQRRGMPGSFGDYCLETVASRVDRFALHGEPAVNYAYHLDAALYAKFLRARSEACGVKRIEGKIQQVTVQPHSGDVASVVLEDGQVIEGDLFIDCSGFRGLLIEQTLHTGYEDWSHWLPCDRAVAVQTEAVGPPVPYTRAIAHEAGWRWHIPLQHRVGNGLVFSSKHLSDDQAHAKLLHDVAAPAVKDPWMVPFRTGRRRKAWNKNVVSLGLASGFIEPLESTSIHLTISAVVRLLALFPGEGIAPSQVQLFNDVSRAEMEHVRDFVILHYHATQRSEPLWQQCRAMELPESLALRLRAWRERAHAWQGADELFRVDSWTHVLMGQGIEPEQHHPLTRAFSDHDLRRLLDGIAQPIQHAVQQMPSQHAFIERYCKAGAQVWGMRSPVPA

SEQ ID NO: 84151 - protein, 521 aa, Xanthomonas oryzae
  misc_feature (1)..(521): tr|A0A0M1KB42|A0A0M1KB42_9XANT Tryptophan halogenase OS =Xanthomonas oryzae OX=347 GN=ADT25_14690 PE=4 SV=1
MPDTTPSDPQQRAVRRVVIAGGGTAGWMAAAAMSKLLGRHLQITLVESDEIGTVGVGEATIPSLVTFHRLLEIDEAAFMAATQATIKLGIAFERWRDVDRHYIHSFGHAGTDHWSAGFQHFWLKGRQRGVARDFGDYCLELRAAQKGRFAHLPDGGMNYAYHLDAGLYARFLRRFSEGFGVTRIESRIGQVETDAESGFLTALTLQDGTRVEGDLFLDCTGFAGLLIGKTLGVGSDDWSRWLFADSALAVQTEAVGPPVTYTRSRADQAGWMWRIPLQHRVGNGIVYSSRYMDQDSARAVLERNLTGRALTEPRPLRVTPNQRHRVWEKNCVALGRASGFLEPLESTNIHLIQRGIIRLLQTFPQVINAVDIAEYNRQAAQEITHIRDFVILHYHATDRRDTPFWRDCAAMDIPDSLRHRVELFRQSGRVFHQANELFAQNAWVQVMLGQGIVPQQHHPVADLTGDAELSRFLATIRARVEAALVRLPAHADFLQRYCPAPPPPEPAARVPAPPVMATPAG

SEQ ID NO: 84152 - protein, 498 aa, Leeuwenhoekiella sp.
  misc_feature (1)..(498): tr|A0A2G2JHA6|A0A2G2JHA6_9FLAO Tryptophan halogenase OS =Leeuwenhoekiella sp. OX=1977054 GN=COA80_06900 PE=4 SV =1
MYNDPVRNVVIVGGGTAGWMCAAGLSRMLDMRGLSVTLIESDEIGTIGVGEATIPSLHVFNQLLGLDEADFMRQTRATIKLGIEFTDWGKLGDHYIHPFGDYGLDRPDVKFHQMWLKLLHAGADVGAIGDYNMCLMAARLNRFGIGQMRRGLPDLRHAYHLDAGLYARYLRRYAEQRGIVRREGLVTNVNQREDGFVSSVTLRDGQVVEGDLFVDCSGFRALLIGQTLGVGFEDWGRWLPCDRAVAMPCENTGPLIPYTRATADAAGWRWRIQLQHRIGNGHVYSSAYIDSDTAEARLRATLDGAAMSDPLHIRFKPGHRHRLWDRNVIAIGLSGGFIEPLESTSIHLIQTGVSRLLLLFPDMRFTPALIDEFNRSSLLEYEQIRDFIILHYKATRRDDTPFWRYCRDMEVPDSLRHKMELFRAGGRIFRFSDDLFTESSWLAVLLGQGIVPECHDPVADAIPAGDMERALLSLRAAVLDAAKALPDHTDFIRSYCAI

SEQ ID NO: 84153 - protein, 509 aa, Colwellia beringensis
  misc_feature (1)..(509): tr|A0A222GBU5|A0A222GBU5_9GAMM Tryptophan 7-halogenase OS=Colwellia beringensis OX=1967665 GN=B5D82_17135 PE=4 SV=1
MKTRVVIVGGGTAGWLTAGIIAAQHYLKGAPTQDTEVILVESPDVKNLGVGEGTWPTMRDTLRQIGISEREFLSCCDASFKQASKFVGWSNGQNEHYYHPFTAPSGYGVVSMADHWSAATKDMNFENWVCAQGTICDYNLAPKLPKMSEYAFSVNYGYHLNAGKFVKILHQHCVDNLGVKYIQGHVEQVLSAENGDISEIVLSDGEHIAGDLFIDCSGFAAILIGKHYQISFKSQKHILFNDTALALQVEHASEDTPIASSTIATAQQSGWIWDISLQNRRGIGHVFSSDFTNVGDAEDALSMYVKNDPLLTAQKLTPRIIKFNPGHRETFWHKNCVAIGVSAGFVEPLEATALVLIEKSAEWVSQQLPRDSDAMSVLAKRFNNLTLQRWKEIIDFLKLHYVLSNRTDSEYWQAHQQLGSIPESLQESLQLWRSQAPGLYESNQRFELFSSASKQYVLYGMGFNTAPHPLGQKEASLIKRLRNETLHNTEKLLSALPTNRQFLSKILQK

SEQ ID NO: 84154 - protein, 503 aa, Massilia sp.
  misc_feature (1)..(503): tr|A0A1S9ABL8|A0A1S9ABL8_9BURK Tryptophan halogenase OS =Massilia sp. KIM OX=1955422 GN=B0920_18055 PE=4 SV=1
MHNQAIKDIVIVGGGTAGWMTAAALSTVLNGRYNIRLVESDEIGIVGVGEATIPMIQRFNRVVGIDENEFMRETMGSFKLGIEFVNWGRLGERYMHGFGRLGQDLATVRFEQYWQKMRLAGKAAPLEEYSITRMAARANRFMPPRFDVPNSPLGDITYAYHFDASLYAKYLRKLSEARGVTRIEGKITRVTRREPDGHVDAVELENGARVEGELFIDCSGFRGLLIEQALETGYEDWTHWLPADRALAVPSESAPGITPYTRATAHRSGWQWRIPLQHRTGNGHVYCSRFISDDEAAATLLANLDGKALAEPRLIQFQTGMRKLAWNRNVVAVGLSSGFLEPLESTSIHLIQSTIQRLIDFFPDRGWSAVDRDEFNRQTRFDYERIRDFIILHYHLNQRTDSPYWLECANMAIPDTLRQKMDMYRTHGRVVRVDNELFSEVGWVQVFEGQNMPVEGYHPLVDTQSEEDIAEYLDGVRGVIAKCVGVMPSHDEYIAKHCAARKM

SEQ ID NO: 84155 - protein, 444 aa, Dechloromonas aromatica
  misc_feature (1)..(444): tr|Q477Q8|Q477Q8_DECAR Monooxygenase, FAD-binding:FAD d ependent oxidoreductase:Tryptophan halogenase OS=Dechlo romonas aromatica (strain RCB) OX=159087 GN=Daro_4197 P E=4 SV=1
MEQQAQGVERRQCDVLVIGGGPAGSTVAPMLAEKGYKVVMLEKAHHPRFHIGESLLPANLPLFERMGIAEEVKAIGMLKPGAEFVSPHHDMSSVFNFAEAWDKSMPYAYQVKRDQFDTILIRNAEKKGVEVHEGCKAKAVDFLPDNTAAIRAVSDDGREIEWQARFVVDASGRDTFLANRFQIKHRNPKHNSSAIYGHFAGAQRHEGQAEGNITIFWFEHGWFWFIPMQNDITSIGMVTWPYYMKTKGERSLEQFLRDGFAQCPKLTERLKDAKLINEIEATGNFSYVSERNHGTNYVMLGDAYAFIDPVFSSGVLLAMNSGVIAAEAIDTCLKTPAKAPAALKKFDALMKHGPKEFSWFIYRVTNPIMREFFMGPRNLFRAKEAVLSMLAGDIFGKTPIWSSIFAFKMLYYIANITQPKKAFMGWKRRKFNIRKVDDAVVYNA

SEQ ID NO: 84156 - protein, 507 aa, Erythrobacter sp.
  misc_feature (1)..(507): tr|A3WHN5|A3WHN5_9SPHN Tryptophan halogenase, putative OS=Erythrobacter sp. NAP1 OX=237727 GN=NAP1_09702 PE=4 SV=1
MAEEAYAPLKSIVIVGGGSAGWMTAAALSDAVGKSCSITLIESEAIGTVGVGEATIPPIRQFNARIGIDEATFVKETAGSYKLGIQFVDWSRKGHSYFHPFGQYGAEFDKVPFYHYWMREALDGRIAGPIDEFSMCWAMAKAGKFARPEPDRRKIQSTFDYAYHFDAGLYAAFLRRVSEARGVKRIEGRVTDVIQRGEDGFIESVTLDKGTSVSGELFIDCSGFRGLLIEDTLKAGYENWQHWLPCDRAVAVPCAKQAEITPYTRSTAKEAGWQWRIPLQHRTGNGYVHCSEFISEDEATETLMGSLDGEAQADPRTLRFVTGRRKKFWDKNCVAIGLSAGFMEPLESTSLHLIQYGILRLIALLPDSEMSPLLAREYNRQTADEYARIRDFLILHYKATTRDDAELWRYCSAMDIPESLQYKIDHFRNYGLLVADERELFANPSWIAVYMGQDIMPRRAPAITEMRDGVPVAQRMQMISQAMREAVAQMPTHADFLARHCPSPLAS

SEQ ID NO: 84157 - protein, 499 aa, Sphingomonas sp.
  misc_feature (1)..(499): tr|A0A0Q4EQD8|A0A0Q4EQD8_9SPHN Tryptophan halogenase OS =Sphingomonas sp. Leaf208 OX=1735679 GN=ASE69_17285 PE= 4 SV=1
MSEFSEAQRTRVVVAGGGTAGWIAAAAIVRQLGPLVDVTLIESDEIGTVGVGESTIPTARSFHAFLGIDEAAFMRATQATFKLGIAFENWGQVGDRYFHPFGSVGRSVAIADFQHFWLEARARGFGGPYGDYSLEQQAAGAGLFGHDEQHSLAYAYHLDATAYARFLRTLAEPWGVRRAEGRIERVERDGEGGDIAALVLASGERIAGDLFIDCTGFRALLTEGALGTGFEDWSEWLSTDRALAVQTETVAPPVPYTRAIAHGAGWRWQIPLQTRTGNGLVYSSAHMTDDEAHATLIGALDGRPLFEPRPLRFRSGMRRKAWNRNCIALGLAAGFIEPLESTSIHLIMNAVIRLIQLFPFRGDDHVALAARFNAQSRHEWEHVRDFIILHYHVTQRDDSPFWRDCAHMTIPDSLAGRIALFTKTAGAWQGQDDLFRIDSWVSVMLGQGVEPRAHHRIARIIKEQELQTSFADLSRGITSTMRALPRHCDFLAQYCLADG

SEQ ID NO: 84158 - protein, 495 aa, Lacimicrobium alkaliphilum
  misc_feature (1)..(495): tr|A0A0U3B3W6|A0A0U3B3W6_9ALTE Tryptophan halogenase OS =Lacimicrobium alkaliphilum OX=1526571 GN=AT746_17575 P E=4 SV=1
MQDNVVTKVVIAGGGTAGWVAAAALSKRLNGLVEVVLVESEDIGTVGVGESTIPPVQLFHNLLGIDEQEFMRATDATFKLGISFENWGQVGDKYMHPFGTTGKGSFLADFQHYYLHGLQLGIDAPLGDYCYELQAAQAHKFGKTDSSGISYAYHLDAGRYARFLRGFSEAQGVTRIEGKIAEVRQHANGDISSLVLESGQELEGDLFIDCTGFRALLIEQTLQTGFEDWGHWLPCDSAVVVQTESADTLPPYTRAMAHDAGWQWRIPLQHRVGNGLVYASDYLQEEQARERLLGNLETQALMTPRVLRYKTGRRKLFWNKNCVALGLSSGFIEPLESTSIYLFMNGVIRLLRLFPFNGVTQPLIDEYNQQSISELEKIRDFIILHYHQTERDDSEFWRYCRNMTIPDSLAHRMELFREGAHAFQTGEELFRLESWTHVMLGQRLIPKSYQKIVSTLSEQQLTQHLQGIRRTINQVVARLPGHSDFIGRYCPAEGE

SEQ ID NO: 84159 - protein, 518 aa, Colwellia beringensis
  misc_feature (1)..(518): tr|A0A222GAD5|A0A222GAD5_9GAMM Tryptophan 7-halogenase OS=Colwellia beringensis OX=1967665 GN=B5D82_14365 PE=4 SV=1
MTKSLKHVVIVGGGSAGWITAGTIAAMHNSQSPQGIQVTLIESPDVNIIGVGEGTWPTMRTTLKKMGISETDFMRQCDVSFKQGAKFSKWVTGEEDDFYYHPLVLPEGYFDLDLFNYWQKNYKDKSFSDAVCFQEQLCEKGLAPKLITSPEYAAVANYAYHLDAGKFANFLKQHCISTLGVNYISDHVEDIINTENNDILAVTTKEHGNIEGDLFVDCTGFKSLLIGQHYQVPFISKKDILFIDTALAVQIPYEEGKDDIASHTISTAQDSGWIWDIGLPSRRGVGHVYSSRHTNQEAAEKALRAYLRQSIGDKSDTLTFRKIDINPGVRETFWVNNCVAVGLSAGFLEPLEASALVMIELAATAISEQLPANRATMDIVAKRFNERFSYNWDRIIDFLKLHYVASKREDSAFWRDNRDKDTIPESLQELLSLWRYRAPSEYDFSHKREVFSAASYQYVLYGMAFDFTTPVCKTNEKHEQLAQRLFAANENKIEKYTTALPTNRELISKINQYGFSKI

SEQ ID NO: 84160 - protein, 509 aa, Pseudoxanthomonas sp.
  misc_feature (1)..(509): tr|A0A1H0ZXH6|A0A1H0ZXH6_9GAMM Tryptophan halogenase OS =Pseudoxanthomonas sp. CF125 OX=1855303 GN=SAMN05216569 _0634 PE=4 SV=1
MDRSDKGQIRKVVIAGGGTAGWLAACALSHQFRDRLDITLVESEQIGTVGVGESTVPPIRTFHRFLQIDEQEFLRAVAGTFKLSISFENWRRPGERYIHPFGTTGQGTLVCPFHHFWLDSLRRGMQSELGDFCLETVASRDDRFALPQQPQVNYAYHFDASLYARFLRRIAEGYGLKRIEGKIHEVRQHADSGFVEALVLEDGQVVEGDLFIDCTGFRGLLIEQALHTGYEDWNQWLPSDRAVAVQTESVGPPVPYTRAIAHEAGWRWHIPLQHRVGCGLVFSSRHMSDDEARAKLLQDVGAKPIKDPWLVPFRTGRRLKAWNKNVVSLGLASGFIEPLESTSIHLAISAVVRLIQLFPFDGIAPSLVDIYNDVSRAEMEHVRDFIILHYHANQRDEPMWKECREMELPESLAMRLRAWRERAHAWQGADELFRVDSWTHVLLGQGIEPEQHHPLARALPDQDMRKLLDSIRQPIDRTVAQMPSQQEFIERYCKAAPEVWGARPSPATT

SEQ ID NO: 84161 - protein, 509 aa, Sphingomonas sp.
  misc_feature (1)..(509): tr|A0A0Q4F724|A0A0Q4F724_9SPHN Tryptophan halogenase OS =Sphingomonas sp. Leaf208 OX=1735679 GN=ASE69_00150 PE= 4 SV=1
MDGLGQHIVILGGGTAGWMTACLIAHRWRGRGVRVTLVESPEIGIVGVGEGSTPQLKHFFDTLGIAEAEWMPACDATYKLGIGFEGWSDREGYERYFHPFPTALDGHTAPQFFYNARARRTGRNVDAHPDQFLLPARLAAQNRAPQPAANFPFEVSYGYHFDAYKVGAFLATHATETQGVVHLQRRIASVERASTGEITALIDTDGERIAGDFFIDASGFRSTIFSALDVPFVSYADVLFNDRAVVMPTAHTPGAPIPSQTRATAMSAGWAWHIPLTSRNGNGYVYSSRHLTEAQAEAELRAHIGVDTGEARHLTMRVGRVRDSWSHNALAVGLAQGFLEPLEATALHLVIATVEAFLDGIDGGGATDAVRTAFNTRIAARYDGVRDYIVAHYRLNQHHDDPTGYWAEALRVDALSDDLKMLMSTWFTGADMVAAIDRAGLGRYYSAISWHCLFAGYGTFPDTARLIPPGTDIDPINLPKIDDFLTRCASNFGSHASRLRAAADHKDHV

SEQ ID NO: 84162 - protein, 514 aa, Novosphingobium barchaimii
  misc_feature (1)..(514): tr|A0A561H2M6|A0A561H2M6_9SPHN Tryptophan halogenase OS =Novosphingobium barchaimii OX=1420591 GN=FHW33_11911 P E=4 SV=1
MVHPIRNIVIVGGGTAGWLTAGVIAARHRTRIGKDLTVTLVESPNIPIIGVGEGTWPTLRTTLSRMGVSETDFVRECDAAFKQGARFARWTTGRADDGYYHPLMLPQNFGQVNLAPHWLADETDESFCDNVCAQGRICDDGLAPKTIATAEYDGLANYAYHLDAGKFAPFLQKHCCEKLGVRHVLADVEHVKMKDDGDIRAVGTAQAGEIEGDLFVDCTGLKALLISGAMNVPFRDCGDVLFCDTALAMQIPFDLPDDPIASHTVSTAQSAGWIWDIGIQTRRGIGHVFSSSHITDEQAERELRAYIGPAADRLDARKIKIRSGHRETFWKGNCVAVGLAAGFLEPLEASAIVLVELSAKIIAEQLPACREVMDIVASRFNATTQYRWGRIIDFLKLHYALTQRTDSDFWRDNRRKESIPERLQELLLLWQYQSPWFHDEFDRVEEVFPAASYQYVLYGMGFHTHVDSAGLMRDAALAGRARRENAAATARLRSALPRHRDLIDKIVSYGLQPV

SEQ ID NO: 84163 - protein, 501 aa, Sphingomonas sp.
  misc_feature (1)..(501): tr|A0A0Q4ES59|A0A0Q4ES59_9SPHN Tryptophan halogenase OS =Sphingomonas sp. Leaf208 OX=1735679 GN=ASE69_00540 PE= 4 SV=1
MAEQRIRKVVIAGGGTAGWLAAAALSRQLGQLLDITLVESEEIGTIGVGEATIPTMRAFHTILGLDEREFMRATKATFKLGISFENWARDGDRYIHSFGDIGKSTWMGDFHHFWLAAKADGNSSEIGDYCLELQAAKAERFALPSEGQINYAYHLDAGLYARFLRARSEANGLKRIEGRIASVDRDGETGFIRALVLESGERVEGDLFIDCTGFRGLLIEGTYAAGYEDWSHWLPTNSALAVQTAAAGPAHPYTRAIAHDAGWRWRIPLQHRVGNGLVYASDHLSDDEAHARLLATIDGTPLTEPRLIRFRTGRRRQVWMGNCVALSLASGFVEPLESTSIHLIMTGITRLMQTFPFGGIAPALVKRYNDQAQAELERVRDFIILHYHLNERPEPFWAARRDMPIPDTLVERIALFTEGAQAYQGGDDLFRVASWVQVMLGQRLTPRDHHRLGSIMGGPQLAGVLTNIRSTIADAVAGMPTHQQFLERYLAAPGTAPARVR

SEQ ID NO: 84164 - protein, 500 aa, Massilia flava
  misc_feature (1)..(500): tr|A0A562PGJ2|A0A562PGJ2_9BURK Tryptophan halogenase OS =Massilia flava OX=871742 GN=IP92_05122 PE=4 SV=1
MEQARDSKPVRRVVIAGGGTAGWMVAAGLSKSLGKLLDIRLIESDEIGTVGVGEATIPTLMNFHHVMEINEQEFMAETMATFKLGISFENWRNVNEDYIHSFGTTGTDHWTAGFQHFWHKGRERGLAGDYGDYCLELKASLQNKFAHLPNAGMNYAYHMDATRYAKFLRKFSERYGVQRVEGKIAEVRKDLNTGDIRALRLENGAELEGDLFIDCTGFRALLIGQAMGVGYEDWSHWLFNDSAVALQTKSVRDAVPLTRSIARDAGWQWQIPLQHRVGNGLVYSTRYTDDETALRTLQAAVDGEPLMTPRVIRFKPGQRKETWKGNCVAIGLASGFLEPIESTSIHLIQRGIIRLMQMFPQHGISQADIDEYNKQADYEIQHIRDFIILHYTVTNRRDTPYWRDAAAMKLPASLQHRIDLFRETGRVFRVPNELFAENSWIQVMLGQGILPASHHQTADLMGDEELARFLGNISGSIDRTVAQLPSHQRYVEQYCSGTGW

SEQ ID NO: 84165 - protein, 505 aa, Xanthomonas oryzae
  misc_feature (1)..(505): tr|A0A0M1KP83|A0A0M1KP83_9XANT Tryptophan halogenase OS =Xanthomonas oryzae OX=347 GN=ADT25_05710 PE=4 SV=1
MTQAQIRKVVIAGGGTAGWIAACALSHQFRDLLDITLVESEQIGTVGVGESTVPPIRTFHRFLQIDEQEFLRAVAGTFKLSISFEHWRSQGECYIHPFGITGQSTLVCAFHHLWLESQRRGMPGSFGDYCLETVASRVDRFALHGEPAVNYAYHLDAALYAKFLRARSEACGVKRIEGKIQQVTVQPHSGDVASLVLEDGHVIEGDLFIDCSGLRGLLIEQTLHTGYEDWSHWLPCDRAVAVQTEAVGPPVPYTRAIAHEAGWRWHIPLQHRVGNGLVFSSKHLSDDEAHAKLLRDVAAPPMKDPWMVPFRTGRRLKAWNKNVVSLGLASGFIEPLESTSIHLTISAVVRLLALFPAEGIAPSQVQLFNDVSRAEMEHVRDFVTLHYHATQRDEPLWKQCRAMELPESLALRLRAWRERAHAWQGADELFRVDSWTHVLMGQGIKPEQHHPLTRAFSDHDLRRLLDGIAQPIQHAVQQMPSQHAFIERYCKAGAQVWGMRSPVPA

SEQ ID NO: 84166 - protein, 505 aa, Sphingomonas sp.
  misc_feature (1)..(505): tr|A0A0Q4EXJ0|A0A0Q4EXJ0_9SPHN Tryptophan halogenase OS =Sphingomonas sp. Leaf208 OX=1735679 GN=ASE69_06120 PE= 4 SV=1
MSEHTIREVVIVGGGTAGWMAAAALSKFLGGGQGQGQPRIRLIESEEIGTVGVGEATIPTIATFNQMLGIDEDDFVAKTQGTFKLGIEFVDWRKIGERYFHPFGQFGHDIEGLNFHQFFLKLAKQGKCADIWHYAPCAVAAAAGRFARQSPDPRSPFGTLPYAFHFDAGLYARYLRSYAEARGVERIEGRIVDVALRGEDGFVEALTLEDGRRIEGELFVDCSGFRGLLIEGALKTGYEDWRHWLPCDRAVAVPTANVGDPVPFTRATARSAGWQWRIPLQHRTGNGYVYSSAHISDEDAQATLLSTVEGSPIADPRRLSFVTGRRKRFWNRNVVALGLSGGFLEPLESTSIHLIQTGIAKLLALFPDRRFLQVEAGEYDRLMGSAYDGVRDFIILHYHATTRDDSPFWNHVRTMTVPDSLRRKTELFQAKGRFFRYDDELFSLASWVAVMLGQGVTPEGYDPIVDGLDERKLVEAVERMRLGIRQTIAQMPSQSDYIRAHCAAI

SEQ ID NO: 84167 - protein, 516 aa, Sphingopyxis sp.
  misc_feature (1)..(516): tr|A0A0W1EI94|A0A0W1EI94_9SPHN Tryptophan halogenase OS =Sphingopyxis sp. HIX OX=1759074 GN=ATE62_20765 PE=4 SV =1
MTGQQVYRIVILGGGTAGWMCAAGLSRLLPAADYDITLVESDEIGTVGVGEATLPHIKTFNDMLGIDEAEFMRETMGSFKLGIEFVGWKAPGERYIHPFGTFGDRWAGSDFQHAWARARLAGTDTRSLQDYSFAVAAARANGFEHPNEDPKSIRSTYAYAYHFDAGLYARFLRTWATARGIRRMEGKVVDVGRDAESGDVGHVTLESGAVVAGDLFVDCSGFRSLLLGQTMGVPWIDWSEWLPCDRALALPCTGVAPLTPYTRSTAQRGGWTWRIPLQHRTGNGYVFSSHYCGEEEARETLLGAIDGEAMDEPRLLRFQAGRRASGWAGNVVAIGLSSGFLEPLESTSIFLIQAATTDLAALMPRRGEKVDPRLVAEFNRLFEIHYDRTRDFLVLHYTANARIGEPLWDHVRHMALPDSLAHKIALFRESAIAPDYKLGLFSRDSWLSVLEGQGVIPSATNLLTHRQPDTELQARLDDLAERIAINAADMTPHAEFIAGYCAAAGIAVPGAAASAA

SEQ ID NO: 84168 - protein, 506 aa, Xanthomonas campestris
  misc_feature (1)..(506): tr|Q3BMA5|Q3BMA5_XANC5 Putative tryptophan halogenase O S=Xanthomonas campestris pv. vesicatoria (strain 85-10) OX=316273 GN=XCV4377 PE=4 SV=1
MIPAPLRNIVIVGGGTAGWMAAAAFARVLGPTFKVQLIESDQLGTVGVGEATVPHIKAFNNLLGIDEAEFVRQTQGSFKLGIEFVDWQRPGTAYMHGFGTQIGHPLGLLPFHQYWIKQHARGRAQPLGAYTLNTVAAARGKFMTSAGDVPANSPLANIAYAYHFDATQYAHFLRRYSQQRGVTRIEGLVEQVQLHPESGHVQSLQLASGQTVHGDLFIDCSGFRGLLIEEALHTGYHDFTHWLPCDRALAVPCEKVGPPTPYTRSTARAAGWQWRIPLQHRTGNGYVYCSAHISDDEAAATLLANLDGKPLADPRPLRFTTGRRKQCWNRNVVALGLASGFLEPLESTSIHLIQSGISKLLELFPREGISPVLVQRYNDRLAFEFDRIRDFLLLHYHATERDDSAFWRHCRHMPITPELQTTLDLFRDSGRFYRNAEEMFAEISWVQVLVGQGILPQGYHPLVDQVPDRDAEGFLASVAQTISRCVDVMPSHQQFIDRYCKAAALP

SEQ ID NO: 84169 - protein, 477 aa, Lacimicrobium alkaliphilum
  misc_feature (1)..(477): tr|A0A0U3B3M2|A0A0U3B3M2_9ALTE Tryptophan halogenase OS =Lacimicrobium alkaliphilum OX=1526571 GN=AT746_17125 P E=4 SV=1
MAAAAISKLLGKNLEICLVESDQIATVGVGEATIPPLLTLHKLLEIKEQDFMVATQATFKLGISFENWRDVNEDYIHSFGTTGQDCWAAGFQHFWLKGKQQGIASDYGDYCPELLASLAGKFAVQPKSGLNYAYHFDAGLYAQFLRKMAEKHGTRRVEGKISEVQCCNQTGMIDRLILESGEQLEGDLFIDCTGFRGLLIEQTLHTGYLDWTHWLPCDSALAVQTENTKPPIPYTRSIARESGWQWRIPLQHRTGNGLVYCSRYMSDEQAEQTLLDNLEGDPITQPRQIRFRTGQRRLHWNKNCVALGLASGFIEPLESTSIHLIQRGIVRLMQMFPHTGIVQSDIDEFNGQMFSEVENIRDFIILHYHVTNRRDSAFWRHCAGMDIPDSLAHRIELFRETGKVFKVPNELFGENSWTQVMLGQGIMPQQYHPIVDQMSDEELSHFLNQIRTQSRRMVDQLPSHQDFLRHYCPAAMP

SEQ ID NO: 84170 - protein, 508 aa, Pseudoxanthomonas sp.
  misc_feature (1)..(508): tr|A0A1H0ZKB6|A0A1H0ZKB6_9GAMM Tryptophan halogenase OS =Pseudoxanthomonas sp. CF125 OX=1855303 GN=SAMN05216569 _0428 PE=4 SV=1
MSENAIKSIVIVGGGTAGWMAAAALSKVLGDKCAIRLIESEAIGTVGVGEGTIPHIRLFNSLLQIDEADFVRNTQGTFKLGIQFNDWNRLGDSYMHGFGNEIGRGLGLLPFHQYWIKAAKTGKAAGIDAYLLSALAAPRGKFMVSASDVPAGSPLASIAYAYHFDAGLYARYLRGYSERRGVQRTEGIVARVLLDAESGFVDAVEMENGEVVHGDLFIDCSGFRGLLIEETLKTGYIDFTHWLPCDRAMAVPSENAGPAAPYTRATAREAGWQWRIPLQHRTGNGYVYSSAHISDDEATATLLKNLDGRALDDPRPLRFTTGRRKKFWNRNVVALGLSSGFMEPLEATSIHLIQVGIMRLLSLLPREGVNDVLVDRYNAQLSFEFERIRDFLILHYHATQRDDTAFWRQCAAMSIPAELQASIDLFRDSGRFFRNADEMFAEMSWVQIMIGQGILPQSYHPLVDQLPDEELARFMASIGGTISDCVDVMPMQQAFIDRYCAATPPTAM

SEQ ID NO: 84171 - protein, 497 aa, Lacimicrobium alkaliphilum
  misc_feature (1)..(497): tr|A0A0U3AKM8|A0A0U3AKM8_9ALTE Tryptophan halogenase OS =Lacimicrobium alkaliphilum OX=1526571 GN=AT746_09735 P E=4 SV=1
MSNNPIQKLVILGGGTAGWMAASSLKDTFPQLNITVVESSEIGTIGVGEATIPTIRRFYSMLGLTDEEVIRATQGTCKLGIQFNGWLSPKSSFLHPFGSYGEALNGIPFHHYWLKHNSAESAGQLEQYCVAVQLAKQNKFCLPPSKPQSALSVFDWALHLDAGLFAGLLRRHAEENAVQRIDATVTEVETSAENGFITALKLDNGQRVEGELFLDCSGFKGVLIEQTLKTGYQDWSRWLLCDSAVVAQSELQGDPAPYTQANARTAGWQWKIPLQHRQGNGLVYSNTHQTDKQAEAELRANIEGKLLQDPRVLRFTPGRRNKSWNKNCIALGLAAGFFEPIESTNIALIETAIEKIKLLFPDTGFQPALRDEFNYRIEKEYESVRDFVILHYCLNQRQEPFWQEYRQISIPDTLAHRIELFKANGMLPRQRHEIFQPNSWLALFDGYQCYPLRYDPSIEKIPLDLIRQGLAGMRRSIASAVENSPPHTAYLQRCQQG

SEQ ID NO: 84172 - protein, 513 aa, Sphingomonas sp.
  misc_feature (1)..(513): tr|A0A1G5T6X2|A0A1G5T6X2_9SPHN Tryptophan halogenase OS =Sphingomonas sp. NFR15 OX=1566282 GN=SAMN03159340_0102 4 PE=4 SV=1
MQSVQNIVIVGGGTAGWLAAGVIAAKHQARMPADFTVTLIESPNTPIIGVGEGTWPTLRTTLAKIGVSETDFFRECNASFKQGARFARWTTGEADEGYYHPLMLPQGFQRVNMAAHWLADRHDQSFCDAVTPQGVLCDDGLAPKTIATPEFDAVANYAYHLDAGKFAGFLQRHCTTKLGVRHVLADVTEVRQAENGDITSLVTEQAGEIAGDLFVDCTGFAALLIGKTLGVPFKSCADVLFCDTALAIQVPYESEDAPIASHTISTAQSSGWIWDIGLPSRRGTGHVYSSSHISDEDAERELRAYLGPVGADADVRKIKIRSGHRETFWKNNVVAVGLAAGFLEPLEASAIVLIEMSTKLIAEQMPVCREVMDIVAARFNATTHYRWGRIIDFLKLHYVLTKRTDSDFWRDNVRADTIPDRLRDLLTLWKYQPPWFHDEFDRVDEVFPAASYQYVLYGMRFGTEVSRAALSAEARLAEQTRREAAVQTQRLRAGLPRHRDLIRKIIDHGLPAI

SEQ ID NO: 84173 - protein, 506 aa, Rhodanobacter sp.
  misc_feature (1)..(506): tr|A0A154R1U0|A0A154R1U0_9GAMM Tryptophan halogenase OS =Rhodanobacter sp. FW510-R10 OX=1524462 GN=RhoFW510R10_ 15595 PE=4 SV=1
MTDPRIRNIVIVGGGTAGWMAAAAFAKVLDAGCSIRLVESEEIGTVGVGEGTVPHLKLFNNLLGIDDVEFVKNTQGTFKLGVQFNDWGRLGDSYVHGFGTIGHDVGLLPFHQYWIKARRAGKADEIGAYSLNTAAAPRGRFMPSASDAPPGSPLANIAYAYHFDAGRYARFLRGYAEQRGVRRTEGKVAQTVLRGDDGFVEAIVLESGERIEGELFIDCSGFRGLLIEQALHTGYLDFSHWLPCDRALAVACEKVGPPTPYTRASARPAGWQWRIPLQHRTGNGYVYSSAHVSDDEAAATLLGHLDGEPMGEPRLLRFTTGVRRQAWNRNVVALGLAGGFMEPLESTSIYMIQSGIARLLNLFPQRDFSPVLIDRYNAQSRFEYEHIRDFLILHYHATERDDTPFWNQCRTMSIPPQLADNIRLFRDSGRFFRDGEEMFATPSWVQVMLGQRIAPRSYHPLVDQMPDAELAGFMASVGHVVASCVEVMPAHQAFIDRCCTAPAMTA

SEQ ID NO: 84174 - protein, 497 aa, Porphyrobacter sp.
  misc_feature (1)..(497): tr|A0A4Y6VYU7|A0A4Y6VYU7_9SPHN Tryptophan 7-halogenase OS=Porphyrobacter sp. YT40 OX=2547601 GN=E2E27_08165 PE =4 SV=1
MGQGKPVRKVVIAGGGTAGWTVAAALVKNLGPLIDIVLVESDAIGTVGVGESTIPTARRFHELLGIDETAFLRATGASFKLGISFENWTREGESYFHSFGIMGRSTWMADFQHMWLEARALGVAGPLGDYSLETQAALAGKFRTGGNVPLNYAYHLDATAYGLFLREFAEKLGVTRHEGRIRDVRRDGESGDIAALALDDGSLIEGDLFIDCTGFRGLLIEETLETGFEDWTHWLSTDRALAVQTAAAGPARPYTRAIAHDAGWQWQIPLQHRVGNGLVYASAHLSDDAALDRLKGRLEGEMLTEPRVIRFRTGARAKAWNRNCIAIGLSSGFVEPLESTSIHLIMIAVTRLMQLFPFGGVTEALADRFNALSRTELEGIRDFIILHYHLNAREGEPFWDACRTLEIPESLASRIALFRESATAFQASDELFRIDSWVQVMLGQGLYPQAHHRLGSMIGRERLDRSLSDMARSMKQAVVGLPSHQDFLDHLSAPVPA

SEQ ID NO: 84175 - protein, 417 aa, Amycolatopsis sp.
  misc_feature (1)..(417): tr|A0A229TBY0|A0A229TBY0_9PSEU Tryptophan halogenase OS =Amycolatopsis sp. H5 OX=1905142 GN=CF165_13090 PE=4 SV =1
MAEEFDVLVVGGGPAGSTTAGLLAQRGHRVLVLERERFPRYHIGESLITGMLSVFDELGVRERIERAGFPRKNGLSIVWGANRDLWNVDFAEIDGPYDYSYHVRRAEFDEILLDHARQLGVTVVEEATVKEPILDAGRVTGVRYECGGEDVEATAPLVIDASGQSRVLSRRLTTVEWADDLRNIAYWTYFENTADLPAGQLGNILVERVTHGWFWAIPVDDATRRLSVGYVTPTASLVSGGPSIGELYDAGVAESKQLRLLLAGATRVGDYRSTRDWSYRGRAVTGPGWLSTGDASGFIDPLFSGGVCLAVLGADAAAAAADTALRRPDLAGRAMRAYDAGIDNMVSSFLDYVRFFYDPTRDREDYFQQARSMADFNERYPHARAAFVAVISGRLAMSELFRIPGVDDTALAGSIET

SEQ ID NO: 84176 - protein, 506 aa, Mitsuaria sp.
  misc_feature (1)..(506): tr|A0A2G9CBI7|A0A2G9CBI7_9BURK Tryptophan halogenase OS =Mitsuaria sp. HWN-4 OX=2049333 GN=CS062_12300 PE=4 SV= 1
MRSHALTKIVIVGGGSAGWIAAAPLARMLCRPGQPDHCEVTLVESAEIGTVGVGEATLPTIQFYNQLLGIDEADFVRQTQASYKLGIEFRDWGRLGHRFFHGFGGFGPGIHNRPLWAYWLRLREQDPTLPDYEEWSTATMMARGLRFMPPRRGEASPASAFDYAYHFDAALYGGYLRDYALRHGAQRVEGTIVRVETSEQNGFVTAVHLRDGRRIEGDFFIDCSGFRALLIDGAMHSPYEDWSHWLPCDRALAVPCARTEPMTPFTSSTARGAGWQWRIPLQHRTGNGLVYCSAHLDDEAANELLLANLDGPALAEPRPQRFVTGRRKRAWVRNVVAIGLSSGFLEPLESTSIQLIMDGVSRLTALLPDRDVAPALADEFNRQMAYRYESVRDFIILHYKLSERSDSEFWRQCAAMRIPDGLAHQIQLFRDTGRVAILEPEGFGESSWVSLLLGLGVVPLRLDPYVDLVDPRVVRRHLHGVHDAIKRTVQAMPTHSEFLARMSGGG

SEQ ID NO: 84177 - protein, 542 aa, Nannocystis exedens
  misc_feature (1)..(542): tr|A0A1I1WHS2|A0A1I1WHS2_9DELT Tryptophan halogenase OS =Nannocystis exedens OX=54 GN=SAMN02745121_02260 PE=4 S V=1
MTEVAGPDAVDVLVIGGGPAGSTAAAVMAKAGLRVLLLEAGAHPRAHVGESLLPGIIPILAEIDALAEVEAAGFGRKTGSTLWGWGKTPRWDLWFYDSDAYDHAWLVERARFDAILFAAATRAGATVLDRAVARTLSWDGERLVGATWERAGQSHETRARLVIDATGQSMLLGRAKGRREEIAGLRHQAMWAHFTGCVGVPPPRHEQALFVAEAEQWWWFFPIGGGKASVGVVQLDAGEARGAPRRDFDALLAAARELGPVLGPAATRATPVRHERDWSYRMSEVTGPGWIQIGDAAGFIDPVLSTGVLLAMHSAWHAGRTAIAVLRDGADEASARAKYQAHHREMFGDLLRMVRFYYQQNLYREDYFWESKRILLTRDTELKPQKAFVVLTSGLVQNLALDEVRDEATARQTARAEGQGRELGEAGPDRLGFVCVHLRERAAAPGQGDLYLLIEPRDPVAPALARTRNFDIGAIAPRHGSDPLRAPTLAPAIRGFVALVQGLDAAVGTTLAEFWRASRVRVGTWLKEHVPANMELVRVFGE

SEQ ID NO: 84178 - protein, 528 aa, Sphingomonas sp.
  misc_feature (1)..(528): tr|A0A0Q4EQC5|A0A0Q4EQC5_9SPHN Tryptophan halogenase OS =Sphingomonas sp. Leaf208 OX=1735679 GN=ASE69_17130 PE= 4 SV=1
MGGLSVTDGAGTTHHSGPLRSIVIVGGGTAGWMAATLLARRLDRQSVTITVVESSDIRTVGVGEATVPGIRDFFREIGVTEQEVMAAAQGTVKLGIEFVDWKREGERFFHPFGLYGMRSRGVAFHHYWRKLNAAGQPTPLSDFCLATALAERNLFMRPTDSPVHDLLFFDWAVHFDAGLFAKFLAKKAGEWGVKHVDAKITDVLVDQVTGFISSVDTQCGKTIAGDLFIDCSGFRSLLLGDALGVPYEDWTNLLPCDRAVAMPCERAGPLTPYTRSTALTAGWQWRIPLQHRVGNGYVYASRHISDDEAVATLKGRLEGEALAEPNMIRFRTGRRTAFWQGNCVAIGLAAGFMEPLESTSITLIQTGLEKLLALLPDRSFDPALADEYNRTTGLEYARIRDFLVLHYFANGRQGQPMWDRCRGTALPEQLARKLTLFKARGHLVRYEWESFQDPSWLSMYAGFGIDAAAHDPLADHFSLSDLEAAFERMKGSIRDAVALAEPHETFLKSFAPASTPPASRSMNFAANG

SEQ ID NO: 84179 - protein, 206 aa, Nannocystis exedens
  misc_feature (1)..(206): tr|A0A1I2IB99|A0A1I2IB99_9DELT Tryptophan halogenase (F ragment) OS=Nannocystis exedens OX=54 GN=SAMN02745121_0 8544 PE=4 SV=1
MTVEHADCVVLGGGPAGSTFAAIAKKYAPGAKIVLLEKCRFPRWHIGESTIPAANGVLEDLGVYQTMLASDFVKKMGVTFIWGRDRTPWTADYLTLKTISRAGGDASIIEVTGQDFEKLLGPGQTQRTPYSAFNVERSRFDELLLDNARRLGADVREGTKALGAQRVGKSSQHVITWEDDAGNSGSITADFVLDATGLSHLLTKGE

SEQ ID NO: 84180 - protein, 393 aa, Sphingopyxis sp.
  misc_feature (1)..(393): tr|A0A0W1F8Q9|A0A0W1F8Q9_9SPHN Tryptophan halogenase (F ragment) OS=Sphingopyxis sp. HIX OX=1759074 GN=ATE62_09 705 PE=4 SV=1
GFGSIIDGGDFFPHWVKARHHGLGVGLDDFSLTATAAHQGRLFFPDEESERYARADYGYHLPAAAYAKSLRAIARHLGVEIVEAESAGIERGENGIAALLLDGDRRVEAGLFVDVTREASLLHDTPGAAFDSTPSPGNRLLVARAPRFAALPVYSEVRAGANGWTALYPAMAHTHVAHVFSGGVTSDDDALAAAQATSGLPLESVAICPLGAGIAAAPWVQNVVALGEAAAAFDPLHGLPLHALQLGIVHLIAAYPGAGACDARRTEYNRLMRSHFDRVADFQTAHLALQTYIGPFWDAARATPRSAELDHMLAFFRARGELAPHEDESLPPDSWRALLTGHGLLPEGWRPSADRTPPDAVKTHFRKMLGTVREQVLRQPTHDAALARIMQRA

SEQ ID NO: 84181 - protein, 506 aa, Sphingopyxis sp.
  misc_feature (1)..(506): tr|A0A0W1F468|A0A0W1F468_9SPHN Tryptophan halogenase OS =Sphingopyxis sp. HIX OX=1759074 GN=ATE62_13800 PE=4 SV =1
MTSEMERVVIVGGGTAGWLAAARIAAARPALSVTLIEAPDIPTIGVGEGTWPTMRATLAAIGIDEGEFLAACDGSFKQGSRFDRWVSGAGDDRYLHPFTPPPPLATRELLAAWQAGEAGQSFAAAMTAQAAVCDLDLAPRQRAMPGYQGAANYAYHLDAGKFAALLMAHAKLRLGVRHVADHVTGVRRGEGDHIAAVVTRTHGEIEGDLFLDCTGHAALLIGGELGVEWIDRSDTLFNDRALAAQVPTDPDSAIASQTVSTAHRAGWIWDIALPTRRGIGCVYASRFLSDDEAEAELRAYIAEQLPHAPEVPVRRLSFPTGHRARFWQGNCLAVGLSAGFIEPLEASAIVMIELSLNALVDNFPASAAVLPIHAQRFNALFRYRWNRIVDFLKLHYVLSRRTEPYWRAQRDPEHIPATLAAMLSLWQDQPPSAWDFPQVDEIFSAESHQYILYGMGVAPPPGLTSSDRAVTALAEARQRARALTAALPTNRDYLGALGAAAATAAE

SEQ ID NO: 84182 - protein, 495 aa, Sphingomonas sp.
  misc_feature (1)..(495): tr|A0A0Q4ER41|A0A0Q4ER41_9SPHN Tryptophan halogenase OS =Sphingomonas sp. Leaf208 OX=1735679 GN=ASE69_08005 PE= 4 SV=1
MTDALRSVTIVGGGTAGWMAAVAFGRLLGPAGTRVTLIESDDIATVGVGEATIPPIRTFHAMLGIDEDAFLRATGGSYKLGIRFEGWTRPDESYVHPFGQTGTDIAGVPFAAQWLRALQAGAAAPLAAYSLEACAAEAGRFSRPIANGNSPLSRIGYAYHFDAGRYAAFLRTQAEAYGVVRHEGLVERVERGPAGIAAVHLADGSRIAGDLFLDCSGFRALLIEGAMEAGWTDWSEWLPCDRAVAVPSVADAAPLPLTRAIAERAGWRWRIPLQHRTGNGHVFSSRHMSEDEATATLLAGLHGEALAEPRVIRFATGHRNRFWSGNCIALGLSAGFMEPLESTSIHLVQSGLQHLLRMLPTGAPPAPALVERYNRIMTAEYTRIRDFLVAHYHLNARAEPFWRDRAAAAIPEGLAEKLALFRAGGRIFREADELFNETSWLAVLTGQNAPVSGYDPICDGIPIETAANRLAQIERVVATSLTHMPSHAHALARLA

SEQ ID NO: 84183 - protein, 518 aa, Sphingorhabdus sp.
  misc_feature (1)..(518): tr|A0A2D3REL6|A0A2D3REL6_9SPHN Tryptophan halogenase OS =Sphingorhabdus sp. YGSMI21 OX=2077182 GN=CHN51_09120 P E=4 SV=1
MSEAQHIRKIAIVGGGTAGWSAACLLGRIFARDNTEITLIESSAIPTVGVGEATIPPIFEFLQLLEIDPVDFVRETQSTFKLAIEFRDWLKVGHSYWHPFGNFGLTIDRRPFHHYWWKNQAEGHDESVADFCPSIALAEKNKFLFPPADGQFPGGALSYALHFDAGLVAKYLRQVSEGLGVTRLDRKVQSATLNDRGHIGELLCDDGSRVAADLYIDCSGFRGLLIEQSLNAGYEDWTNWLPCDRAVAVQSEAVLPRTPYTISTAREAGWQWRIPLQNRVGNGYVYSSAFISDADAQDRLVGSLDGKPLADPRVIGFTAGHRKKFWDGNCVSIGLSAGFLEPLESTSIHLIVTGLNRLLDYFPDRNFDPSLQAAYNRETLTEYEHIRDFLLLHYYPNQRVGEPFWDQVRHAPLPDSLATKMEMFRKNGRIISRRRELFHDLSWFFVARGMGITPESYDPLVDIPDFADVRDVMGQVGDAVGRLADAAPTHDQFLDALITPGNHRRPAFHAPSISGFGR

SEQ ID NO: 84184 - protein, 538 aa, Burkholderia sp.
  misc_feature (1)..(538): tr|A0A228QCI4|A0A228QCI4_9BURK Tryptophan halogenase OS =Burkholderia sp. HI2714 OX=2015359 GN=CFB82_38225 PE=4 SV=1
MSNPIKHIVIVGGGTAGWMSASYLVRALQQQASITLIESEAIPRIGVGEATIPNLQKVFFDFLGIPEREWMPQVNGAFKSAIKFVNWRKSPDRSRDDHFYHLFGSVPNCDGVPLTHYWLRKREQGFQQPMAYACYPQPDALDAKLAPCLLDGTRQMPHAWHFDAHLVADFLKRWAVARGVKRVVDEVVEVHLNERGDIASLSTKAGRTLEADLFIDCSGMRGLLINQALKEPFIDMSDYLLCDSAVASAVPNDDARVGIEPYTSAIAMNAGWTWKIPMLGRFGSGYVFSSKFTSRDQATADFLKLWGLSDKQPLNQIKFRVGRNGRAWVNNCVAIGLSSCFLEPLESTGIYFIYAALYQLVKHFPDTGFDPRLRDAFNAEIVYMFDDCRDFVQAHYFTASRDDTPFWLANRHDLRLSDAIKDKVERYKAGLPLTTTSFDDATYYETFDYEFKNFWLNGNYYCIFAGLGLLPDRSLPLLRHRPESIDKAEAMFARIRREAERLRTSLPTNYDYLRSLCDGDAGRARSQPGPAVVAPETL

SEQ ID NO: 84185 - protein, 494 aa, Alteromonas sp.
  misc_feature (1)..(494): tr|A0A1J0RY22|A0A1J0RY22_9ALTE Tryptophan halogenase OS =Alteromonas sp. Mex14 OX=1917157 GN=BM527_17825 PE=4 S V=1
MASTQTKKKQRLVIAGGGTAGWMAAAAFTRLLGKEVDVTLIESSEIGTVGVGEATIPTLVFFHKLLKINEQEFMAQTNATFKLGINFENWKDLEHAYLHAFGVTGKDCWAAGFQHFWMRGLKEGLATDFGDYCLERKAAEANKFAHLPNNGLNYAYHIDATRYAGFLRNLAEKEGLRRIDSTIKEVTTREQDGFITSLTLASGEVIEGDFFVDCTGFKGLLIEKALHTGYEDWSHWLPCDSAVAVQTESVGEPIPYTRCIAHEAGWQWRIPLQNRVGNGMVFCSNYFSDDEVIEKLLNNVEGKPLNDPRVIHFRTGKRRKQWNRNCLALGLASGFLEPLESTSIHLIQQGIVRFLRMFPTAGIVQEDIDEFNRQADFDIEHIRDFIILHYHVTNRTDSPFWRHCRQMDIPASLRHRIDLFKKTGRVFREGSELFDDSWQQVMIGQGLMPQSYHPIVDTMSRQELETLLNSIKQGIEKTVAKLPPHQDYITRFCG

SEQ ID NO: 84186 - protein, 509 aa, Xanthomonas oryzae
  misc_feature (1)..(509): tr|A0A0M1MRV5|A0A0M1MRV5_9XANT Tryptophan 7-halogenase OS=Xanthomonas oryzae OX=347 GN=EYR26_22860 PE=4 SV=1
MIPAPLRNIVIVGGGTAGWMAAAAFARVLGPTFNVQLIESEQLGTVGVGEATVPHIKAFNNLLGIDEAEFVRQTQGSFKLGIEFVDWQRPGTAYMHGFGTQIGHPLGLLPFHQYWIKQHARGKAQPLGAYTLNTVAAARGKFMTSAGDVPANSPLANIAYAYHFDATQYAHFLRRYSQQRGVTRIEGLVEQVQLHPESGHVQSLQLASGQTVHGDVFIDCSGFRGLLIEEALHTGYHDFTHWLPCDRALAVPCEKVGPPTPYTRSTARAAGWQWRIPLQHRTGNGYVYCSAHISDDEAAATLLANLDGKPLADPRPLRFTTGRRKQFWNRNVVALGLASGFLEPLESTSIHLIQSGISKLLELFPREGISPVLVQRYNDRSAFEFDRIRDFLLLHYHATEREDSAFWRHCRNMPITPELQTTLDLFRDSGRFYRNAEEMFAEISWVQVMVGQGILPQGYHPLVDQVPDRDAEGFLASVAQTIAHCVDVMPPHQQFIDRYCKAAALPCGG

SEQ ID NO: 84187 - protein, 541 aa, Corallococcus sp.
  misc_feature (1)..(541): tr|A0A3A5G407|A0A3A5G407_9DELT Tryptophan 7-halogenase OS=Corallococcus sp. H22C18031201 OX=2249217 GN=DRW03_1 5495 PE=4 SV=1
MDKNSSENDNRVRKIIIVGGGSSGWMAAAYLHKALNFNVDITLIESPRIPRIGVGEATIPTIKEELFDFLQIPEEEWMSECKATYKLGIRFQNWKKPASQGGDHYYHNFGEMPEVKGIPLSHIWMYGRQRQGRTDSMEYACYPTSPICDALKSPRFMDGSKAVHYAYHFDALLMANYLKKWSIERGLTYISDDIVETPLTEDGSIKCLKGESGRVYEADLYIDCSGFAGLLIEKALGEPKITFHDSLLTDRAVAVNIPSDSATEGIRPYTTASAFSSGWTWEIPLYGRSGNGYVYSSAFQTPEEAEREVRAWFGKKVDNLDVRHIKFVSGRRRRSWVKNCVSFGLASSFLEPLESTGLYFVYAALYQLVACFPNKQIEPALRDKFNERVSYMVDDVRDFIVLHFCTSPRTDTPYWRANQNELKLPETLKEVLELQRAGIPIRRSYASNEALYASFEAGFDRFWTNSNFQSIFAGVGYLPRQPMPLLQHRPDILAEAERVFDDVRKKTSQMMSRLPSQYDYLTALYARGARPMEEASRQKAS

SEQ ID NO: 84188 - protein, 522 aa, Lacimicrobium alkaliphilum
  misc_feature (1)..(522): tr|A0A0U3BDU3|A0A0U3BDU3_9ALTE Uncharacterized protein OS=Lacimicrobium alkaliphilum OX=1526571 GN=AT746_17110 PE=4 SV=1
MQNSKIRVVVIGGGTAGWLTANLLAADHDTGENGNLDITLVESPDIKTIGVGEGTWPSMRTTLERIGLSETDLICECDASFKQGSLFKNWYSADDSDHYYHPFSLPAGYQQLEFSRFWQQHRKNVDFASAATPQASICRRGLAPKQLSTPEYAFILNYGYHLNAEKFVELLTRHGKKKLGIRHMQDKVTDILWPEHCDKQQSPIKAVRTEKQGLLEADLFIDCSGFSGLLIGKHYQIPMRSVQDVLFNDRALVLQVPYQDEQAPIQSCTLSTAQQNGWIWDIGLSSRRGVGYVYASAYEPQADAEKRLRDYVARDRGEQAASKAEPRELRFNSGYRQQFWKHNTVAVGLSAGFIEPLEASALALIEMSARFISDNLNALEQHMPLVSERFNHRFSYHWQGIVEFLKLHYCLSAREDSAYWRDNRKNLSDSLEQKLMLWQHQSPSVYDKPLAEELFPAASFQYVYYGMQGATTFAPQRRQSQQADQAEQLLQENQHKIQRMTQALPTNRALINDIKQQGLRRL

SEQ ID NO: 84189 - protein, 450 aa, Amycolatopsis sp.
  misc_feature (1)..(450): tr|A0A229SPW1|A0A229SPW1_9PSEU Tryptophan halogenase OS =Amycolatopsis sp. H5 OX=1905142 GN=CF165_40610 PE=4 SV =1
MTDFDVVVAGGGPGGSTAAGLVAADGHRVLLLEQEHLPRYRIGESLLPATVHGICALLGVRDEVERAGFVRKRGGMFRWGSNPEPWTFAFAASDRMAGPTSYAYQVERTRFDTILLRNASRLGADVREGHRVLGTLRDGGRITGVRYLDDTGREREATARFVVDASGHTSRLHHDVGGAREYSPDFRNLALFGYFRGGARLPEPDAGNILCAAFDDGWFWYIPLSASLTSVGAVVRRDAAARVQGDPETAFRALIADCPMIRDFLCGVPRATEPPYDRLRVRKDYSYDRTSLRCPGMVLVGDAACFIDPVFSSGVHLATYSALLAARSINSTLAGLVPEERCFAEFEARYRREFGLFRDFLRGFYRLEADQRSYYRHAGAVTGRDDRTAFLDLVGGVSSADFDTLGEVLAEGAQLQLRGLLGADAGEEPPMFPGGLVSTSDGRRWRVPDA

SEQ ID NO: 84190 - protein, 509 aa, Lacimicrobium alkaliphilum
  misc_feature (1)..(509): tr|A0A0U3AIH8|A0A0U3AIH8_9ALTE Tryptophan halogenase OS =Lacimicrobium alkaliphilum OX=1526571 GN=AT746_09730 P E=4 SV=1
MQSNNQSRRILILGGGTAGWMTAMIMARHWQKQEVSITLLESSDIGIIGVGEGSTPALKQFFDMMDIREQEWMPACNATYKVGITFSQWSVKPGFESYFHPFKFRLDEQFSQAFFHSALMRRQGIEMPAHPNQFFLAPLLAEKHLAPLPHYNFPFEPAYGYHFDSALLGRFLKEKAQELGVRHKEGKVNQVIRSDSGHILSLLTEQGEQIDAELFVDCSGFAGVLMQKSLKVPFVGFESNLFNDAAVAIPSPPDSHLPSQTLSTAMKHGWRWQIPLTNRNGNGYVYSSKYCSADEAETELRSALGLLNQDVPARHLKMKVGRLEKHWHKNCLAIGLSQGFIEPLEATALFLVQQAAALFVDAYEKGQFTEQNQDAYNASISGYFEGIRDYIVGHYITSSRTDSPYWLDCQNNQQNLSDTLRHILDVWHSGGNLAEELRREHISRYYSPVSWHCLLAGTGTFPDPDKLRPPSPTDKQVNIRKIQEFLYRCSLNFDPQHQYLQQRNAEQMP

SEQ ID NO: 84191 - protein, 517 aa, Massilia sp.
  misc_feature (1)..(517): tr|A0A1S9A7W5|A0A1S9A7W5_9BURK Tryptophan halogenase OS =Massilia sp. KIM OX=1955422 GN=B0920_24595 PE=4 SV=1
MVTSTISHVVIVGGGSAGWLTAAVLAARYRPLEHGGLRITLIESPDVAPIGVGEGTWPTMRDTLREAGVSETAFFRSCDAAFKQGSRFNRWVSGAEDDYYFHPFVLPQGYGETDLGRHWQKRHAQVPFADLVSYQPHLCVAGRAPKQVSTPEFAGVANYGYHLDAGKFGLFLKAHCLEKLGVHYVPDHVTGIRSHENGDIAALHTKEHGELEADLFVDCTGMQSMLLGKHYGVPLLSQKHVLFNDSALAVQVPYAGENDPIASQTTSTAQSAGWIWDIGLPTRRGVGHVYSSAHVSDEEAERELRAYLKSTGVTGEIPAPRKLGFQPGYREKFWHRNCVAIGLSAGFIEPLEASALAMVELSAAMLADEMPVTRDQLDACAQRFNETFTYRWERVIDFLKLHYVLSRREDSDYWRDNRRPETIPERLANLLTLWRHRPPSRYDINRIQEVFPAASYQYVMYGMGFRHEPGPALRHEDAALADSYLREAASLTRRMLPALPDNRALIDHIRRHGLQQR

SEQ ID NO: 84192 - protein, 511 aa, Variovorax guangxiensis
  misc_feature (1)..(511): tr|A0A433MI85|A0A433MI85_9BURK Tryptophan 7-halogenase OS=Variovorax guangxiensis OX=1775474 GN=EJP67_10400 PE =4 SV=1
MLNLRNISRAVVIGGGTAGWFSALTLRRLFAPQVEVRVIESPAIGIVGVGEGGLLNLIDALRRNGIGLNEFVRETGAAFKLGFCYEGWRTGEDDDRYYHLFGRPGLQEIDWMEAGFHPLLSGMVHEGMELHRYIPGFASIAINASQQQAAAMLQLGASSGLSASFHFDSHKLADYLRRVAVSRGVVHQQARVEELVCDAQGMARAVRLEGAEETVGLDLLVDASGLARLGIGGKLGVRWRSFSGYLLLDRAVPFHMPHPQPNPSLVTRAIAMPAGWMWQIPLVERVGAGYVFSSAHADEAQVVEEIHRRIGPGIEPMRTLRFEPGHFEQVWVGNVMAVGLASGFVEPLEATSIGQMLEQLRNFERIVAAGDGVVAGHLIDDFNEANARCWSGIRDFLRMHYDCPRRDTAFWRDVAELPLPPSYAELWACFQQRTPRMVDVQNYAINGWQGIFHALNWLFVAAPLGVVPREAAAAELQGLPSASRARVAAYITRMRELGAAGDFSSKGDRSA

SEQ ID NO: 84193 - protein, 505 aa, Xanthomonas oryzae
  misc_feature (1)..(505): tr|A0A5E8KX45|A0A5E8KX45_9XANT Tryptophan halogenase OS =Xanthomonas oryzae OX=347 GN=ADT27_07345 PE=4 SV=1
MIQAQIRKVVIAGGGTAGWIAACALSHQFRGLLDITLVESEQIVTVGVGESTVPPIRTFHRFLQIDEQEFLRAVAGTFKLSISFEHWRAQGERYIHPFGITGQSTLVCAFHHLWLESQRRGMPGSFGDYCLETVASRVDRFALHSEPAVNYAYHLDAALYATFLRARSEACGVKRIEGKIQQVTVQPHSGDVASVVLEDGHVIEGDLFIDCSGFRGLLIEQTLHTGYEDWSHWLPCDRAVAVQTEAVGPPVPYTRAIAHEAGWRWHIPLQHRVGNGLVFSSKHLSDDQAHAKLLHDVAAPAVKDPWMVPFRTGRRRKAWNKNVVSLGLASGFIEPLESTSIHLTISAVVRLLALFPGEGIAPSQVQLFNDVSRAEMEHVRDFVILHYHATQRNEPLWQQCRAMELPESLALRLRAWRERAHAWQGADELFRVDSWTHVLMGQGIEPEQHHPLTRAFSDHDLRRLLDGIAQPIQHAVQQMPSQHAFIERYCKAGAQVWGMRSPVPA

SEQ ID NO: 84194 - protein, 490 aa, Massilia sp.
  misc_feature (1)..(490): tr|A0A1S9A8H2|A0A1S9A8H2_9BURK Tryptophan halogenase OS =Massilia sp. KIM OX=1955422 GN=B0920_24610 PE=4 SV=1
MRRVVIAGGGTAGWMAAACISKVLGKRLDIKLIESDEIGTVGVGEATIPTLVHFHKLLEINEQEFMAATKATFKLGISFEGWRNVKEDYIHSFGMTGTDHWTAGFQHFWHKGRERGLAGDYGDYCLELRAAQEKRFAHLPRDGMNYAYHLDATAYARFLRQFSERHGVQRIEGKIVDVTTSALTGHIRSITLDSGADIEGDLFIDCTGFRALLIGQAMKVDYEDWSQWLFNDSAAAVQTMSVGEAVPYTRSIAHGFGWQWRIPLQHRVGNGIVFSSRYAGEEQAIQALMDNVEGEALMKPRVIKFTPGQRRQVWKGNCLAIGLASGFLEPIESTSIHLIQRSIVRLMQMFPSDGISQSDVDEYNKQAWTEIEHIRDFIILHYHVTNRGDTPYWRDARNMDVPASLRHKIDLFRETGRVFRISNELFAENSWIQVMLGQGVMPASHHQAADLMGDIELSQFLGSIKGSIDKTVSQLPSHQQYVERYCKSPM

SEQ ID NO: 84195 - protein, 489 aa, Sphingomonas sp.
  misc_feature (1)..(489): tr|A0A1G5UQU7|A0A1G5UQU7_9SPHN Tryptophan halogenase OS =Sphingomonas sp. NFR15 OX=1566282 GN=SAMN03159340_0325 7 PE=4 SV=1
MAEPVREVVILGGGTAGWMTAAALSKALERSGTTITLVESEEIGTVGVGEATIPTIHWFNGLVGIDEARFMADTGATWKLGIEFRGWQGEGSAYFHPFGTYGSPGDGATFPHRLARAWLAGEEAPIEVFSLTTQLARARRFAKPVGDPRSLLSTLGYAFHFDAARYAAHLRGLAEARGVVRREGKVVSVEQDEASGHVRALVLEGGAQVAGDLFVDCSGFRGLLIEQTMHAGYEDWPRWLPCDAAWAAPSAAEAQVTPYTQATAQEAGWRWRIPLQHRVGNGYVFSTRFQDVDDARALLVGAMESPPIADPRLIRFTPGRRNRAWVGNVVAIGLASGFLEPLESTSIHLIQSGIGKLLSLFPRADMNPLLAEQYNRLSAREIEEIRDFVILHYHRTHGRNEPLWQHCQTMPIPETLAYKIDQFRASGRIMLAPDELFRDASWFAVLSGQGVRARDYNPLLDVMSESDNRAQLQAVRDAIKETVLKLSSV

SEQ ID NO: 84196 - protein, 269 aa, Magnetomorum sp.
  misc_feature (1)..(269): tr|A0A0M9E1B1|A0A0M9E1B1_9DELT Tryptophan halogenase OS =Candidatus Magnetomorum sp. HK-1 OX=1509431 GN=MHK_007 939 PE=4 SV=1
MNSKKAENKANLLFKLLNNVQLEGTEASFKLSWKSFLQVRFLMGIRTKNLKINKLEKICTQLSIPKEYLIKIKQDFNKSNIILFGFEESENNCIYKVYLEFWDQNFKIVQNTSNPKNPLLQYIGFKWDAFDNLQRVITKYYSHPFIPVHSILTRIENIFNHKSHKKVLDNSKAIVTYAMKRIDIIKDPFIYLEVLDNKGFRNSFDINLYESELTIEDLKPYLYEIQKNFMITNHPFRPFLEQISSKILGHLSGGFDKKGDAFLTFYYDI

SEQ ID NO: 84197 - protein, 512 aa, Massilia flava
  misc_feature (1)..(512): tr|A0A562PH34|A0A562PH34_9BURK Tryptophan halogenase OS =Massilia flava OX=871742 GN=IP92_05125 PE=4 SV=1
MSKPINHVVIVGGGSAGWLTAGVLAADHPALQVTLIESPDVAPIGVGEGTWPSMRDTLSRIGVSESAFFRECDAAFKQGSRFNDWREGGGAADYYFHPFVLPQGYGETDLVRAWLDTGAAVPFADLVSYQPHLCVQGRAPKQPATPEFAAVANYGYHLDAGKFGLFLKKHCLEKLGVRYVPDHVTGIDSAPNGDIAALRTRAHGPLAGDLFVDCTGMQSMLLGGHYGVPLLRQKHVLFNDSALAVQVPYAAPDSPIASQTTSTAQRAGWIWDIGLPTRRGIGHVYSSAHTSDAEAEADLRRYVAATGGPADMPAPRKLTFEPGYRQRFWHHNVVAIGLSAGFIEPLEASALALVEMSAAMVSDDLPANRDAMDIVAHRFNDAFTYRWERVIEFLKLHYVLSRRTGSDYWHDNRRSETIPARLRELLTLWRHRAPSRLDFYRIEEVFPSASWQYVLYGMGFLPERDHVTRRTDTAAADPYFREAAELTRRMLRALPSNRELLDHIRLHGLQKI

SEQ ID NO: 84198 - protein, 506 aa, Alkalimonas amylolytica
  misc_feature (1)..(506): tr|A0A1H3Y9X7|A0A1H3Y9X7_ALKAM Tryptophan halogenase OS =Alkalimonas amylolytica OX=152573 GN=SAMN04488051_1015 76 PE=4 SV=1
MIRNIAVVGGGTAGWLVANHLGQAFRHLPDYQITLIESPSIATIGVGEGTVPAIRYSLKKFGVSETDLFNQCDATFKHSIHFINWLDRNKHGDNGYHHLFSNPLLRGLDLTSLWLQQGGDYASFVSPQATVVAAKLAPKLITTAEYQCTVPYAYHFDARKFAGLLHTNATRSFQVKYLQADVTDIRTDEAGFITHLMTAQHGALAFDFVVDCTGFQASLLGEKLKIPFQSCADQLFTDTALAVQVPYSQEPQLPPYTLASAHQAGWIWDIALTSRRGVGFVYSSAHMAEEKAYQKLERYVGKSELAALSVRKIPMRVGRRAKFWHKNCVAIGLSQGFVEPLEATAILLADFSADLLSQCFPADRDEMNLVAERFNQRMVHAWDRVLDFIKLHYCISDRTDSDFWHDNREPASIPESLQQKLALWRNHVPTREDFFSKFEVFDLENYLYVLYGMRYPTKKPLLRSDYQAQAELAAKQVQQQAMALTAELGLHMDLLAKIKQYGLQRL

SEQ ID NO: 84199 - protein, 517 aa, Erythrobacter sp.
  misc_feature (1)..(517): tr|A0A2K1E618|A0A2K1E618_9SPHN Tryptophan halogenase OS =Erythrobacter sp. SAORIC-644 OX=1869314 GN=BA950_10835 PE=4 SV=1
MSGEFTNLVIVGGGTAGWLSACILAARRPELAITLIEAPDIPTVGVGEGSWPTLRETLAVIGIDETEFLTECDASFKQGSRFDGWVDGSERDCYYHPFSAPLSGAMPDILAAWKMQNDGQPYAEAVSPQAAICNRDLAPRQRTMPPFAGALNYGYHLDAGKFGALLASHGVKRLGVRHVHGKVTGTERSVDGLFTRLLLDNGSAIEGDFFIDCTGMASKLIGEELEIGWVDRSDVSFNDRALAVQVPVVPDSAIASQTIGTAHRAGWLWDIGLPTRRGVGCVYSSRFLSDDEAQAILMNYVGAKIAGAEQAALTPRGLKFSTGYREKFWAGNCLAIGLSAGFIEPLEASAIVLIELSLKALADGYPQSRAALPRLADRFNSLFRYRWERIVDFLKLHYVLSTRTEPYWQAHRDPATIPSSLAAHLDLWRDHAPSSGDFPQIDEIFSAASHQYVLYGMRFPQPADISSAPSSEVQRQFAKVAERSRALSAALPSNRAYFDALCSSMDKNSARGVPTRQ

SEQ ID NO: 84200 - protein, 501 aa, Mitsuaria sp.
  misc_feature (1)..(501): tr|A0A2G9C4P5|A0A2G9C4P5_9BURK Tryptophan halogenase OS =Mitsuaria sp. HWN-4 OX=2049333 GN=CS062_20035 PE=4 SV= 1
MVQRIVIVGGGAAGWMTAAAMTASRRGRGSVELVESEEIGIIGVGEATFPSIRAFNERVGIDEAEFLRATHGTYKLGIEFRDWHSVGDRYFHTFGNFGSLLGPYMLWGQYRRMADASLGEFGEQCLPTAMAMQGRFVVPDEDGGAPYKYAYHFDATLYAAFLRDFSMRRGARRIEGRIVEVIRAENGDVKRLRLADGREVEGDLFIDCSGFASLLLGRAMKEPFVDFSRWLPVDGAWACPCERVGEALTPYTRATALEGGWAWRIPLQSRTGHGHVFSSRHIDPDVAREQLMAQLDGKPLTEPRLLRFTTGHRERFWVRNVVALGLSSGFLEPLESTSIFLIQTNLAHLMTLLEAKAPLDETAIADFNARGAREFRRIRDFIILHYCLTARRDSALWRDMATMDLPDTLAYKIDLWRHHGVLHQQQDEGFDETSWLAIHAGMRHWPQRTDPVLNELPLDHARDILQRRREAIARAVAPLPPHHAYLARLMNLAQGAQRPAR

SEQ ID NO: 84201 - protein, 496 aa, Sphingopyxis sp.
  misc_feature (1)..(496): tr|A0A4P7RTI4|A0A4P7RTI4_9SPHN Tryptophan 7-halogenase OS=Sphingopyxis sp. PAMC25046 OX=2565556 GN=E5675_06805 PE=4 SV=1
MSARARAVQRIVIVGGGSAGWMTAAALGRALAGQPHSITLVESEAIGTVGVGEATVPPIHEFNRYLRLDPSEFLRATHGTIKLGIAFEGWGGLGHRYFHPFGYLGVEMSGIHFHHYWLRHLAAGGDPDHGPYNLETMAAREGRFAPATRHGPVHHAVHFDAAAYARFLRTYAEDKGVVRVEGKVADVRLDGEDGFITALALDDRRVIEGDLFVDCSGFRGLLIEGALHTGYTEWSHWLPCDSAVAMPCENTGDPAPFTRSTAREAGWQWRIPLQHRDGNGYVYSSAHLGHDEAEALLRSRLPGAPLADANRLRFNAGHRKAIWNRNCVAIGLAGGFLEPLESTSIHLIQTTIIRLLSLLPRDAIDPNVIRRFNRDALHEYQVIRDFVIAHYALANRDDTPFWRDVAAAGMPDSLAERIEAFRATGNILFEPGDLFGPTNWYAVLTGQGVRPQSWHPIADGLSDGELAARLATLRGRVAEQLAELPLHIEFLRRLNS

SEQ ID NO: 84202 - protein, 499 aa, Sphingopyxis sp.
  misc_feature (1)..(499): tr|A0A4P7RYC8|A0A4P7RYC8_9SPHN Tryptophan 7-halogenase OS=Sphingopyxis sp. PAMC25046 OX=2565556 GN=E5675_08095 PE=4 SV=1
MSDRKPVQRVVIAGGGTAGWMMAAAIARTMGHTVDLTLVESEAIGTIGVGESTIPPLVNFNRILGIPEPEFMRATQATFKLGILFDNWKHDGDSYFHSFGLSGKDHWSAGFQHFWLNARERGHEQPYEDYCLELVAGMQGKFAHLPEDRMNYAYHVDATLYGRYLRKLAEADGCTRVEGKITRVELDGETGDIAALHLDGERRVEGDMFVDCTGFRGLLIDGALHAGFEDWSHWLPNDSAIAVQSKHLGPPMPYTQAIAHDAGWQWRIPLQHRMGAGIVYTSGYLSRDEAYDRLMSSVGEPLIEPFDIKFKGGVRRKQWYRNCVAVGLAGGFVEPLEATTVHLIQRAVLRFIRLMPNGRVSERDAQEFNDQQRLDIEQIRDFVVLHYKATNRRDSPFWRHVANMPVPDTLQQKIELFRETGRVFRKNEELFAENSWVQVMMGQGIEPQTYHPIAAKLRDDEVERLFQTLRDNIAQTVATLPEHHAYVARYCGAEEPKAA

SEQ ID NO: 84203 - protein, 434 aa, Alphaproteobacteria bacterium
  misc_feature (1)..(434): tr|A0A2N3B606|A0A2N3B606_9PROT Tryptophan halogenase OS =Alphaproteobacteria bacterium HGW-Alphaproteobacteria- 7 OX=2013670 GN=CVT85_00860 PE=4 SV=1
MLAAVGGTFKLGIQFENWNRIGDSYIHPFGAYGYTMGGISFHHVWHRMANAGDKRPIQVFNLETMAAYFGKFARTQDFARDDLPPVNYAYHLDATRYAAFLRRFAEARGVVRQEGRIADVALDGETGFVTTVTLDDGRQFAGDLFIDCSGFRGLLIEQALQTGYDDWSHYLPCNRAVALPCQRDDGSPPPPFTRATAHRAGWQWQVPLQHRNGNGHVYCSSFMEDQDALDILVGNIAGKPQAEPNFLRFVTGRRKKFWNKNVVALGLAAGFMEPLESTSIHLVNTGIDKLISLLSLDGITQAQEDAFNRLTGREYARIRDFLILHYNATSRDDSDFWNYVRTMEVPESLTEKIEIFKANGQIFREEDELFTETSWAAVMMGQGIAMGGHNAMADALDPAKTREEADEMEKSIRYLVQHMPGHGDYVARYCPAAT

SEQ ID NO: 84204 - protein, 503 aa, Shewanella putrefaciens
  misc_feature (1)..(503): tr|A0A3S5EAS6|A0A3S5EAS6_SHEPU Tryptophan halogenase OS =Shewanella putrefaciens OX=24 GN=NCTC10737_01127 PE=4 SV=1
MTTAIKRVVIAGGGTAGWMAAAALTKLMGKHLEIVLVESDEIGTVGVGEATIPTLHIFHRLLGLKEQEVMAATNATFKLGISFENWQDINKNYLHSFGFLGKDCWACGFQHFWLKGKQLGMVSEIGDYCAEHLAARQERFAVLPNQDYNHAYHMDASLYAKYLRKMAEQHGIHRIEGKIKQVLQHHDSGNIKALVLENDETIEGDLFIDCTGFRALLIEQTLNTGFEDWSHYLPCDSAIAVQTQSVGAPIPYTRSIARDSGWQWRIPLQNRTGNGLAFCSKFISDEDATELLLANLEGEPLNKPRVIKFKTGTRRLHWHKNCVAVGLSGGFLEPLESTSIHLIQRSIIRLMQLFPSAGIVQSDIDEFNQQTKLEMDNIRDFIILHYKATEREDSRFWRYCKNMEIPASLKHRIEMFADSGKVYKYGSELFGESSWIQVMMGQGILPKHYHPIVDVMEEPELEAFLNNIKSTVKRKVESLPAHLDFIQHYCPAEVLANTKPMPM

SEQ ID NO: 84205 - protein, 326 aa, Oxalobacteraceae bacterium
  misc_feature (1)..(326): tr|A0A4Q3IHF8|A0A4Q3IHF8_9BURK Tryptophan 7-halogenase (Fragment) OS=Oxalobacteraceae bacterium OX=1871070 GN= EOO80_18480 PE=4 SV=1
GIIDSVQLHPETGYVESVALQSGERIAGDLFIDCTGFRGLLIEEALHTGYIDYTHWLPCDRALAVPCAPVGPPTPYTRATAREAGWQWRIPLQHRTGNGYVYSSAHISDDEAAATLLRNLDGKALADPRPLRFTTGRRKKCWNRNVVALGLASGFMEPLESTSIHLIQSGISKLLELFPGNGINEVLVDRYNDQLAFEFERIRDFLVLHYKATEREDTPFWRQCRDMAIPPSLQANIDLFQDSGRFFRNHNEMFAEISWVQVMVGQGILPRTYHPLVDQVSDDDTYRFIASVERTISDCAAAMPPHQAFIDRHCAAPPMTRETATT

SEQ ID NO: 84206 - protein, 508 aa, Janthinobacterium sp.
  misc_feature (1)..(508): tr|L9PL72|L9PL72_9BURK Tryptophan halogenase OS=Janthin obacterium sp. HH01 OX=1198452 GN=Jab_1c09460 PE=4 SV=1
MNPGTRDPNNRRPVRRVVIVGGGTAGWMAAAGIAKVLGKRLDIKLIESDEIGTVGVGEATIPTLMNFHNLLEINEQEFMAETQATFKLGISFEGWRNVKQDYIHSFGVTGTDHWTAGFQHFWHKGVERGLAADYGDYCLELKASLEHRFAHLPDNGMNYAYHLDASRYAKYLRRLSEPRGVQRIEGKIVRYTKHEDNGDVRSVVLESGQEIEGDLFIDCTGFRGLLIGDAMQEPMEDWSQWLFCDRAIAVQTEAVGDALPLTRSMAHQAGWQWRIPLQHRVGNGIVYSSRHLDEDVAMKQLMSNVEGKALITPRVIKFKPCQRKHTWKGNVVAIGLSSGFLEPIESTSIHLIQRSVVRLMQTFPTDGISQADIDEYNNQCNSEIEHIRDFIILHYHVNHRTDSQFWIDAREMSIPASLQHRIDLFRETGRVFRVPNELFAENSWIQVMLGQGIMPRSHHQSADLMGDEELKHFLGGIKSRVDRIVVQLPSHQAYVERYCGRAESAKAA

SEQ ID NO: 84207 - protein, 591 aa, Nostoc minutum
  misc_feature (1)..(591): tr|A0A367R2A1|A0A367R2A1_9NOSO Tryptophan halogenase OS =Nostoc minutum NIES-26 OX=1844469 GN=A6770_21155 PE=4 SV=1
MNSTQELVYDVVIMGAGFAGNCQARHLLLKVPNIKIAIVDPRPPERTTKDLKVGESTVEIAATFLSKELGLYEYLIENQAPKHGLSFHWPKDPNQTNSTDDYYNIWTNGLPPTESFQLNRAKFEQDLLQMNRNMGATFYNGRVVDLDLTSKDELHTVEVKLEDGKINLKAKHVVDAAGRRFLIGKKIDNVILDPEELYGINTGSSWVHVKGIDRSIIDNGYHPDTSIASHYYTTNHWFGHGHWIWMIPLGKSGKELSIGVVYHQNVIPTKDINTFEKFKAFLKENHTLLYHLIESGEFIDFNNLPRLAHKSRKMISEDNWYVLGDAAHMFDPFYSPGLSLTALDIESVTECIRAKLAQEADAEKKQAFYNRFLVTNSNSYNYIYQRHEKHLGNACAMSWRTYLEDMLWFGVLLPMYIGKWFLDFEFISQYESIANFLFFKKNSLFAGFYKILDEVVDRQLNIGLMDFTRNDQLFFKYGPLQFFDDYLKKTKFEPLRCNVFAGIKGTFLFFILASAKLRFAAFGILGVLSPRNIFFTIQLLALYLYVSIGERIYLFKMRNVPANTAVDSMRKEFKNYQHQPQLRSWKEAIKA

SEQ ID NO: 84208 - protein, 493 aa, Pseudoalteromonas ulvae
  misc_feature (1)..(493): tr|A0A244CTC1|A0A244CTC1_9GAMM Tryptophan halogenase OS =Pseudoalteromonas ulvae OX=107327 GN=B1199_00780 PE=4 SV=1
MNKNIQNVVIVGGGTSGWITAALLGKILGPSLNLTLIESDKIGIIGVGEATIPPIIHLNNALGISEKTFLKETKGTIKLGIEFDNWGQQGDSYMHAFGGIGKNLPFCDFHHTWLRSQQLGDSEDFWRYSLNYQAAKHNKFAKTPAGQGGLEYAYHFDAGLYAKLLSKLSQQQGVKRIEGVVENVLVDGNSGHVTSVQLDSGEQISGDLFIDCTGLKALLIEQTLNTGFIDYSHWLPCDRAVAVPCESVSPIIPYTRSTAHPAGWQWRIPLQHRTGNGLVYCSQYMTDEQAIETLLNNLDGPALGEPKVIHFKTGVRRKQWHKNVVAIGLSSGFFEPLESTNIHLIQTAAIRLIKLFPHQGIDQSTVDEFNRQSRIESDRMRDFIILHYKLNQKVDSPFWQRCQNMDVPDTLHAKMALFADSGRVFREQDELFTEIAWQQVMIGQNLRPKDYHPVAGSLSAEQVLELMKNLQTITDKQVSQWPTHDEFLASLYL

SEQ ID NO: 84209 - protein, 492 aa, Alteromonas pelagimontana
  misc_feature (1)..(492): tr|A0A2A6AV06|A0A2A6AV06_9ALTE Tryptophan 7-halogenase OS=Alteromonas pelagimontana OX=1858656 GN=CA267_14170 PE=4 SV=1
MIEQARKQRVVIAGGGTAGWMAAAAMTRTLGKQVDVTLIESSDIGTVGVGEATIPTLVFFHKLLKVSEQEFMAATQATFKLGINFENWKEVNQNYLHAFGVTGKDCWAAGFQHFWLKGLQQGLSTDFGDYCLERVAAEAGKFAHLPNNGLNYAYHLDASLYAKFLRNLAEKEGLRRIDAKIQQVFTREDNGYIESVLLDDGQKIEGDLFIDCTGFRGLLIEQTLHTGYEDWSHWLPCDKAIAVQTEAQASPIPYTRSIAHEAGWQWRIPLQHRVGNGLVYCSRYWSDDEAMSTLLNNIEGTPLNEPRVIPFRTGRRLKQWNKNCVALGLASGFLEPLESTSIHLIQQGIVRLLRMFPHTEIQQTDVEEYNRQTDFDVEHIRDFIILHYHVTERKDSPFWRHCRQMEVPTSLAHRIKLFKETGRIFREANELFDDSWQQVMIGQGLMPASYHPIVDNMSREELTHLLSQIRNNITRTVERLPTHEQYLKQYCQ

SEQ ID NO: 84210 - protein, 542 aa, Janthinobacterium sp.
  misc_feature (1)..(542): tr|L9PHP5|L9PHP5_9BURK Tryptophan halogenase OS=Janthin obacterium sp. HH01 OX=1198452 GN=Jab_2c32260 PE=4 SV=1
MPGRRRTLPMETGKTMKTIPTPVKNVLIVGGGTAGWLTAAFLARTLGADADPGAGGDNVRITLVESKEIGIIGVGEGTFPSIRGTLAAIGIDEARFIRECNATFKQGIKFTDWVRPPGTPGNDHYFHPFSLPSQRPGGPELLPYWLQGAAPAGVGFAAAATMQKRVADASHAPKRFNDADFMGPLNYAYHFDAGKFAALLSTHAQSLGVRHVLATVERVSLDEQGAIGAVHTKEAGELTADLYIDCTGFRAALIGDALGTAFRNINDTLFVDRALAMQVPYDTADAPIPSYTIATAHEAGWTWDIGLHQRRGIGYVYSSRHTDDTRAEQVLRAYIGKASDGLNPRQLKLNVGYREQHWVKNCVAVGLSGGFLEPLESSGIGLIETAAYLVSYLFPHDGDMAPVAKVFNEMMKARYERIVDFVKLHYCLTQRTDNAFWTDNTDPASIPESLRDKLAMWRRRAPHRMDFVVDLEMYPPSSWQYVLYGMEYPTAQYANASTLPRFDEARREFQTIEQMSHRALADLPTHRALIAHFLQRGERRIA

SEQ ID NO: 84211 - protein, 503 aa, Oxalobacteraceae bacterium
  misc_feature (1)..(503): tr|A0A4Q3M1A2|A0A4Q3M1A2_9BURK Tryptophan 7-halogenase OS=Oxalobacteraceae bacterium OX=1871070 GN=EOO77_01965 PE=4 SV=1
MGIRHQPISSVLIVGGGTAGWMAAAVLAKTLAGAGITITLVESEEIGTVGVGEATIPPIRELNALLGIDENAFVRMTGATFKLGISFENWGAVGQNYLHPFGRFGADIGPLPFHSYWQALRAFDEPTAGPLTSYSMSAMAAAAGKFRHPSPNSRGPLSDISYAFHFDAGLYAKYLRGLAEAGGIVRREGQIVDVGLTDAGFIRDVAMDDGDRLAADFFIDCSGFQGLLIEGALRTGYVDWSHWLPCDSAIAMPTTRIAEPVPFTRAIAEDAGWQWRIPLQHRMGNGHVFSSAFTTKDAAERILRTSVTGEPLADPRLLRFTTGRRRKAWSKNVLAIGLAAGFLEPLESTSIHLVQSALTRLLALFPDKGFASADIAYFNRATELEYERVRDFLILHYHVTKRDDSAFWRHVRTMPIPDTLTDRLDLYRSRGRFFPEALDLFLEPSWIAVMEGQGLRPTLGDPMALVAVKQLSTLLPRIRQKISEVVGEMPSHVESVTKCVTGI

SEQ ID NO: 84212 - protein, 496 aa, Halieaceae bacterium
  misc_feature (1)..(496): tr|A0A3D1YR48|A0A3D1YR48_9GAMM Tryptophan halogenase OS =Halieaceae bacterium OX=2026743 GN=DEX20_09700 PE=4 SV =1
MTNKINKIVIVGGGTAGWNAAAFLSRTLGKVIDITLVESDEIGIVGVGEATIPPILAFNNALGFEETAFLKNTQGSIKLGIQFENWGQVGDKYMHAFGNVGKDFAFCSFHNFWLRAKKEGRKEDFWDFSLNFQAAKLNRFAKVKQISGTDLQGIAYAYHFDAGLYAKHLRKFSETRGVKRIEGKISNVNQCAHTDFITDVVLESGQKVEGDLFIDCSGFRGLLIEQALKTGYENWSHWLPCDRALAVPTKSVGQVKPYTRSIAHKAGWQWNIPLQHRTGNGHVYCSDYISDEEARETLLAHLGSEPLAEPRSIPFVTGRRKLQWNKNCVAFGLASGFLEPLESTSIHLIQVGLRRLVQHFPHQGIKQAEIDEFNRQSQREMEHIRDFIILHYKLNQRSDSEFWVNCQNMDVPDSLKHRMELFKASAKVFKESDDLFHEIAWQQVMIGQGLIPDDYHPIAHTISSDQLNGLFRDLQTLIGKTVAAMPSHDKFLEAVS

SEQ ID NO: 84213 - protein, 510 aa, Streptomyces lydicus
  misc_feature (1)..(510): tr|A0A3S9YEH6|A0A3S9YEH6_9ACTN Tryptophan halogenase OS =Streptomyces lydicus OX=47763 GN=DDE74_22370 PE=4 SV=1
MVIVGGGTAGWMSASYLKAAYGDRINVTLVESDRVATIGVGEATFSTVRHFFDYLGLDEREWMPECSGSYKLGIRFENWREPGHHFYHPFERLRTSDGYTLADWWLQEGDRSQPFDRSCFITPALCEAKRSPRLLDGSLFAGGLDGSLGRSTLEEQRAQFPYAYHFDAALLAKFLAKYGTDRGVRHVVDDVTRVGRDERGWISHVATREHGDLTGDLFIDCTGFKGMLINETLEEPFESFQDVLPNNRAVALRVPQADQATTGMNPYTTATAMDAGWIWNIPLFGRNGNGYVYSDEFCTPEEAERTLRDHVAPGQDDLEANHIRMRIGRNRRSWVNNCVAIGLSSAFVEPLESTGIFFIQHGIEQLVKNFPDENWDPALADDYNNRVAEVLDGVKEFLVLHYKAAQREDTPYWKEAKTRALPDGLAERLATGASHLLDERTIYQPYHGFEQYSWITMMLGLGHEPKRPRPSLAHIDPTNARAELARLKADADELVAALPSCYEYIASLNS

SEQ ID NO: 84214 - protein, 585 aa, Nostoc minutum
  misc_feature (1)..(585): tr|A0A367R317|A0A367R317_9NOSO Tryptophan halogenase OS =Nostoc minutum NIES-26 OX=1844469 GN=A6770_21160 PE=4 SV=1
MNSTEELVYDVVIMGAGFAGNCQARHLLLKNPSIKIAIIDPRSPERTTKDLKVGESTVEIGATFLSKELGLHEYLIENHSPKHGLNFHWAKDPNHTKNIDDYYHVGNRTVAIDTFQLNRAKLEQDLLQMNREMGAIFYNGRVVDVELTPKDELHTVQVKLEKNQINLKAKHLVDAAGRRFIIGKKTDNLIFDPEQLYGINTGSAWLRVKNIDRSIIDNGYHPATSAASRYYATHHWFGHGHWIWMIPIDKHDKELSIGIVYHKNVIPSQEINTLEKFTNFLKANHTVVSNLIESGELVDFNHLPRLAHNSKQIISQDNWYVLGDAAHMFDPFYSPGLTLTALAIESTTEIICGKLAGEPDVEQKQEFYNRFLLTNARTYNQIYQKHDKHLGDASVMSWRIYMENMFWFGILVPMYIGKWFLDFDFVSQYQKIADFIFFGKNSIFTELYRLFDQLVERKINIGVIDYTRADQLFWNYAPTKTFDDFLPNTKFEALRCNVFAGMKATFFFLIFYYLKLRFKGFGILGVLAPRCIFRVLQLLALYIYVGMGEQIYLFKTRNLPDNTFINQMRQDFKNYQYKPQLQPWF

SEQ ID NO: 84215 - protein, 537 aa, Pseudomonas sp.
  misc_feature (1)..(537): tr|A0A2T0ZPX1|A0A2T0ZPX1_9PSED Tryptophan halogenase OS =Pseudomonas sp. NFPP22 OX=1566224 GN=OD69_1011348 PE=4 SV=1
MNKPIKNIVIVGGGTAGWMAASYLVRALQQQVNITLIESAAIPRIGVGEATIPSLQKVFFDFLGIPEREWMPQVNGAFKAAIKFVNWRKSPDPSREDYFYHLFGSVPNCDGVPLTHYWLRKHEQGFQQPMAYACYPQPGALDGKLAPCLADGTRQMSHAWHFDAHLVADFLKRWAVERGVNRVVDEVVEVQLNDRGYISTLLTKEGRTLEADLFIDCSGMRGLLINQALKEPFIDMSDYLLCDSAVASAVPNDDAREGVEPYTSAIAMNSGWTWKIPMLGRFGSGYVFSSKFTSRDQATADFLKLWGLSDNQQLNQIKFRVGRNKRAWVNNCVSIGLSSCFLEPLESTGIYFIYAALYQLVKHFPDTSFDPRLRDAFNAEIVYMFDDCRDFVQAHYFTTSREDTPFWLANRHELRLSDAIQEKVERYKAGLPLTTTSFDDSTYYETFDYEFKNFWLNGNYYCIFAGLGMLPDRSLPLLQHRPESIQKAEAMFASIRREAERLRTSLPTNYDYLRSLRDGAQLSRNQHGPTLAAQERQ

SEQ ID NO: 84216 - protein, 502 aa, Oxalobacteraceae bacterium
  misc_feature (1)..(502): tr|A0A4Q3LVI9|A0A4Q3LVI9_9BURK Tryptophan 7-halogenase OS=Oxalobacteraceae bacterium OX=1871070 GN=EOO77_06100 PE=4 SV=1
MNDTNPAIRSVLIVGGGTAGWMTAAALAHALGERCQITLIESDEIGTVGVGEATIPPIKLFNDTLGIAEADFLRETKGSFKLGIEFVDWAKLGHRYFHPFGTFGKPFDLVAVHQHWLAARSAGSPIPLDDLSMAWAAASRGRFAAPMADPRSVASTFDYAYHFDAGLYAAFLRRYAEGRGVIRVEGRVGNVVLHGETGHVAYVMLPDGRRIDADLFVDCSGFRGLLIEGALATGYEDWTHWLPCDRAVAVPCTTGGDGITPYTRSTARAAGWQWRIPLQHRTGNGYVYCSRHISDDEATATLMANLDGEALAEPRLLRFTTGRRRAFWNRNVVAIGLASGFMEPLESTSIHLIQTGIAKLLAYFPRRDFSPLLVDEYNRVAITEYERIRDFLILHYKLTSRDDAPLWRDCAAMAIPDTLALKIAHFRQGGRLVARDMDLFGPASWLAVHIGQLNHPLELDPLLDSSKGATASASFIDRLSGAMAKMAQSMPTHESYLEQLCK

SEQ ID NO: 84217 - protein, 498 aa, Xanthomonadales bacterium
  misc_feature (1)..(498): tr|A0A354Z680|A0A354Z680_9GAMM Tryptophan halogenase OS =Xanthomonadales bacterium OX=2006849 GN=DDZ76_09295 PE =4 SV=1
MNTGHDTRTIRRVVIAGGGTAGWMAAAALSKTLGRVLDITLVESEEIGTVGVGEATIPTLVTFHRLLDINEQEFMAATQATIKLGIGFEHWRDRDQHYIHSFGTTGKDHWTAGFQHFWLEGRHRGLARDYGDYCLELRAAQEARFAHLPNGGINYAFHLDAGRYARFLRQFSEGFGVRRVEGKIRNVLTRAADGHIEALELDDGSRIEGDLFIDCTGFRALLIGQTLGVGFEDWSHWLFCDSAFAVQSTSVRPPIPYTRSIAGEAGWQWRIPLQSRSGNGIVFSSRFIDNEAALATLLGSIEGEPLLEPRLLRFCPGQRQRSWQGNCVALGLAGGFLEPLESTNIHLIQRGIVRLLQCFPAVLSQTTIDEYNQQTAAEITHIRDFIILHYHVTQRRDTPFWRAAAEMSIPATLQHRIDLFRETAQVFRVPNELFAENSWVQVMLGQGIEPWSWHPVTRLMPDPELSGFLEAIRSTVERGMRQLAPHQQYLERYCPAPA

SEQ ID NO: 84218 - protein, 499 aa, Shewanella putrefaciens
  misc_feature (1)..(499): tr|A0A3S5EAZ1|A0A3S5EAZ1_SHEPU Lycopene cyclase family protein OS=Shewanella putrefaciens OX=24 GN=NCTC10737_0 2349 PE=4 SV=1
MNKIKDIVIVGGGSSGWMTAAMLARLFKSTLNITLIESEDIGTVGVGEATIPPLQIFNNVLGISEADFINATQATFKLGIQFENWGKPDEAYMHAFGNIGKDIGFTQFHHYWLSTSPTEVNSFWDYSVNYQAAKHNKFQVLQQIPNSPLAGLTHAYHFDAALYAQFLRRFSEQLGVKRIEGQITEVELTPNGDIESVILGTGQTIKADFFIDCSGFAALLIEKALKVGFDSYQHWLPCDSAYAVPCEKTPAITPYTRSIAHDAGWQWRIPLQHRTGNGLVYCSRYISDDAAKQLLLSNLDGKPLAEPKKINFTTGRRIKQWHKNCVAIGLSSGFLEPLESTSLHLVQSAIIRLSKLFPHQGIAQANVDEFNRQSQLEFEQIRDFIILHYHLNQREDAQENGFWHQCRTMVLPESLQQKIALFRATGTVFRHQDELFTEAAWIQVMLGQGIRPRDFNPLAATIQPQALSEFLLNMRTIIDNTVTKLPTHDQYLAHLSTHK

SEQ ID NO: 84219 - protein, 507 aa, Shewanella putrefaciens
  misc_feature (1)..(507): tr|A0A3S4P813|A0A3S4P813_SHEPU Tryptophan halogenase OS =Shewanella putrefaciens OX=24 GN=NCTC10737_01091 PE=4 SV=1
MTIKTIAIVGGGTSGWLAANHIGRVLKDNPELSITLIESPAIPIIGVGEGTVPSIRKSLSSFGISESEFINSCDVTFKQSIKFVNWLDRTKHGNNNFYHHLFDMPSLFGEDLTPYWLINPKEHFADLVSSQHAVCEENKAPKLITTPEYSGVTGYAYHLNAAKFAMLLAKNATERFNVEHVHATVNDVSFGIDGSIHSLLTDKGELTFDFYIDCSGFESILLAKRFDVPFIDKSQQLFVNTALVTQVPTQNFEKIPPFTIATAHKAGWIWDISLTQRRGTGFVYSNDHMSNTEAEDKFDQYLGGKLAELTPRKIPMKVGYRQQFWVKNCVALGLAQGFLEPIEATSILLTDFSARFLAERFPSDKDDIDYLAKRFNETVSQAWERVVEFAKLHYCLSDRSDSAFWRDNRSDKTIPEGLKQRLKMWRNFIPIAEDFPSKFEVFNRENYLYVLYGMKYFTRPIYSNAEVDKRVVQHLAKMKLLKSKMISELPEHRELLDKIRLYGLQSI

SEQ ID NO: 84220 - protein, 73 aa, Desulfurella multipotens
  misc_feature (1)..(73): tr|A0A1G6NCG1|A0A1G6NCG1_9DELT Tryptophan halogenase OS =Desulfurella multipotens OX=79269 GN=SAMN05660835_0116 8 PE=4 SV=1
MSKIVVLGAGISGHTAASYLRKLLPKEHEVIVIAPNSKWNWIPSNIWVGIGAMEPEDVTFELEKVYKKNRRNI

SEQ ID NO: 84221 - protein, 176 aa, Oxalobacteraceae bacterium
  misc_feature (1)..(176): tr|A0A4Q3K7Z4|A0A4Q3K7Z4_9BURK Tryptophan halogenase (F ragment) OS=Oxalobacteraceae bacterium OX=1871070 GN=EO O78_16430 PE=4 SV=1
NCVAIGLAAGFVEPLESTSINLIETAVGKLVELFPDRDFRPELADEFNRVMSVRYESVRDFIMLHYKLTARDDSEFWRYCAAMPIPDSLRHQIALFRESGRVTVLDSDGFAEASYVAMMMGLGVLPKRYDPLADGDDLRQVHGHFAGLRDMIVAAVAKMPDHDTFVRTQAVSAKVA

SEQ ID NO: 84222 - protein, 495 aa, Acidobacteria bacterium
  misc_feature (1)..(495): tr|A0A2E4W8C9|A0A2E4W8C9_9BACT Uncharacterized protein OS=Acidobacteria bacterium OX=1978231 GN=CL489_11000 PE =4 SV=1
MHDTAGIIDRRVAIVGGGNAGLICALILRRTFPEYQITIIKSDKIGTIGVGEGSTEHWRGFMNFVDIKVADLIPATSATHKKGIRFEGWTHHTPDYFHSVSGPPKGSPRVGEFYASYGGLQAKGILLSDATMFGDPRNNTVLAENPHGSVNQFHFDTHLLNEFLTLKCRKRNIRIVDGEVWDVNLSDSDWIESVDIDTLEHPVEADFWIDASGFNRILMSNLPDMKWNSFSDYLLTDSAIAFRFDADPSGEIRPYTRAMAMRNGWAWEIPTQTERGGGYVYSSQFCSEEDAVSEMEELLDIQLSGYKHFQFDPGYLEKMWVGNCVAVGLSSSFVEPLEATSIGSTINQSFALLGFLASFRRENKYSIKQYNNMMNNMMLNIRDMIRLHYISDREDTEFWREQKSMPIPDSLEHLLGVWSERQPEDTDMQGPWLLFRMLHLYHVVQGQGLLSAEVALDSIAAYGVADRVENYLYDLKQAKYSKPTRDHAEALKELR

SEQ ID NO: 84223 - protein, 217 aa, Oxalobacteraceae bacterium
  misc_feature (1)..(217): tr|A0A4Q3HXX2|A0A4Q3HXX2_9BURK Tryptophan halogenase (F ragment) OS=Oxalobacteraceae bacterium OX=1871070 GN=EO O79_07950 PE=4 SV=1
MNKQTPLKNIVIVGGGTAGWMAAAALSRLLKNKYAIRLVESDAISSVGVGESTIPMMRLFNNVLGINEDEFMRETEATFKLGIEFEDWGRVGERYMHGFGKFGQDLETVDFFQYWRKAYRAGQAPDLERYSINRMAAHAGKFIRPSPEMANSPLADIVYAFHLDAGLYARYLRTYAEQRGVVRTEGKIVQVRQRLNGGPRDGFIESLALEDGSVVEG

SEQ ID NO: 84224 - protein, 517 aa, Pseudoalteromonas fuliginea
  misc_feature (1)..(517): tr|A0A063KMJ6|A0A063KMJ6_9GAMM Tryptophan halogenase OS =Pseudoalteromonas fuliginea OX=1872678 GN=DC53_08830 P E=4 SV=1
MNDDIKSIVIVGGGTAGWLSAGIIAAYLQKHHSKKINITLLESSDIPTVGVGEGTWPTMRRTLKDMGIRETEFIKKCNVSFKQGAKFAKWVTGENDDYYYHPLELPTGMFENNLATSWLNINNAQPPFAQYVSAQQSICESGLAPKQITTPEFSAIANYAYHLDAGLFATFLKNHCIDNLNVKHIVGTVAGVNNCTNGDIKSVSLNNKIEIAGDLFIDCSGFKSLLLGENLGVGFKSCKDVLFADSALAIHMPYKGDEPICSHTLSTAQTSGWIWDIGLQTRRGVGHVYASNYISDDEAKQQLFDYLNINQAQQSKYKVKKLTFEPGHREKFWHKNCVAIGLSAGFLEPLEASALLLVEISAKFVAEQFPYNECLMAITAERFNRTFSYRWARIIDFLKLHYILSKRTDSPFWQAHCCTQTIPQSLKDNLAIWTFHTPSDNHFDHSQEVFPAASYQYVLYGMGFLSSTELHNNPDCYFKKAQALVNNNLRHTEQLLKKLPTNNALLEQIKQFGMQQI

SEQ ID NO: 84225 - protein, 503 aa, Sphingobium yanoikuyae
  misc_feature (1)..(503): tr|K9D7H2|K9D7H2_SPHYA Uncharacterized protein OS=Sphin gobium yanoikuyae ATCC 51230 OX=883163 GN=HMPREF9718_02 370 PE=4 SV=1
MHADFPTSDRVVKRVVVAGGGTAGWVTATALVRHLGPLIDITLVESDAIGTIGVGESTVPTFRGFHQLMKIREDRFMAEAQATVKLGIEFKNWGQVGDRYIHPFGTIGLQWSWMADFHHFWLRARAQGFGGELGEYCLEWVAGEANRMSLSSSVAPSYAYHIDAARYARFLRSLAEPAGVKRVEGKIRNVELAPESGHIAALVLESGTRIEGDLFIDCTGFRSLLLGEALGVGFEDWGQWIRTDRAVAVQSTSDGPAQPYTSAIAHEAGWRWRIPLQHRDGNGFVFASDFMSDDEAHARLLAEIEGEPIVDPWLVRFKTGTRTRAWHKNCVGLGLAGGFIEPLESTSIHLMMAAVTRLIEDFPFHGFDDALLDHFNRKSRLEFENIRDFIILHYHVTQRDDSPFWDHCRTMEIPDSLKERLALWQENGRAYQLGHELFRVDSWSSVLLGQGMHPRGYHHVAAMMPEPQLREELARMRKDIAGVVAEMPSHREFLRRYCPAELV

SEQ ID NO: 84226 - protein, 538 aa, Burkholderia sp.
  misc_feature (1)..(538): tr|A0A4R4CPA4|A0A4R4CPA4_9BURK Tryptophan halogenase OS =Burkholderia sp. SRS-46 OX=2094191 GN=C5O80_15240 PE=4 SV=1
MSNPIKNIVIVGGGTAGWMAASYLVRALQQQANITLIESEAIPRIGVGEATIPSLQKVFFDFLGIPEREWMPQVNGAFKAAIKFVNWRKSPDRSRDDYFYHLFGSVPNCDGVPLTHYWLRKREQGFQQPMAYACYPQPGALDGKLAPCLPDGTRQMSHAWHFDAHLVADFLKRWAIERGVNRVVDEVVEVRLNDRGYISSLSTKEGRSLEADLFIDCSGMRGLLINQALKEPFIDMSDYLLCDSAVASAVPNADARVGIEPYTSAIAMNSGWTWKIPMLGRFGSGYVFSSKFTSRDQATADFLDLWGLSDKQPLNQIKFRVGRNGRAWVNNCVAIGLSSCFLEPLESTGIYFIYAALYQLVKHFPDTSFDPRLTDAFNAEIVHMFDDCRDFVQAHYFASSREDTPFWLANRHDLRLSDAIKEKVQRYKAGLPLTTTSFDDATYYETFDYEFKNFWLNGNYYCIFAGLGMLPDRSLPLLRHRPESIDKAEAMFARIRREAERLRTSLPTNYDYLRSLREGDAGLSRSQPGPTLAAPEIL

SEQ ID NO: 84227 - protein, 172 aa, Acidobacteria bacterium
  misc_feature (1)..(172): tr|A0A355F7L5|A0A355F7L5_9BACT Tryptophan halogenase (F ragment) OS=Acidobacteria bacterium OX=1978231 GN=DD490 _28850 PE=4 SV=1
MTRDHVDVAIVGGGPAGCAAGLSLRAHAPELTVALFEATAWESPRVGETLPPLARRLLEHLGVWDAFRGQGRHNIHREIHGTAAAWGAPEPQERPYLFATQGNGWHLDRAAFDALLAAEAERRGVTVLRQTRLRRAERTGTTWRLHPAKAAADAPRTARFLIDATGSAAAFA

SEQ ID NO: 84228 - protein, 80 aa, Oxalobacteraceae bacterium
  misc_feature (1)..(80): tr|A0A4Q3K4V7|A0A4Q3K4V7_9BURK Tryptophan halogenase (F ragment) OS=Oxalobacteraceae bacterium OX=1871070 GN=EO O77_40735 PE=4 SV=1
MHDQPVRSVLIVGGGTAGWMAAAVISRSFAPEAVAVTVVESAEIGTVGVGEATIPPILQLNALLGLDEDELVCRTQATYK

SEQ ID NO: 84229 - protein, 520 aa, Oxalobacteraceae bacterium
  misc_feature (1)..(520): tr|A0A4Q3K7F0|A0A4Q3K7F0_9BURK Tryptophan 7-halogenase OS=Oxalobacteraceae bacterium OX=1871070 GN=EOO78_16265 PE=4 SV=1
MTDTAPSDPQQRPVRRVVVAGGGTAGWMAAAALSKVLGRHLQITLVESDEIGTVGVGEATIPSLVTFHRLLEIDEAAFMAATQATIKLGIGFEHWRDVGRHYIHSFGHTGTDHWSAGFQHFWLKGRQRGVARDFGDYCLELRAAQEGRFAHLPNGGMNYAYHLDAGLYARFLRRFSEGFGVQRIEGRIGRVETDAHSGYLTALTLDNGTRVEGDLFLDCTGFAGLLIGKTLGVGTDDWSQWLFADSALAVQTESVGAPVPYTRSRADQAGWMWRIPLQHRVGNGIVYCSRYMDQDSAAQVLQRNLSGRALTQPRALRFTPNQRHRVWEKNCVALGLASGFLEPLESTNIHLIQRGIIRLMQTFPQVINAVDIAEYNRQAAAEITHIRDFVILHYHATDRRDTPFWRDCAAMDIPDTLRHRVELFRQSGRVFHQANELFAENSWVQVMLGQGITPKQHHPVADLMGDAELSHFLETIRTRVDAALVRLPAHADFLRRYCPAPLPDPATRLPADAALATGAG

SEQ ID NO: 84230 - protein, 508 aa, Shewanella putrefaciens
  misc_feature (1)..(508): tr|A0A366IQ82|A0A366IQ82_SHEPU Tryptophan halogenase OS =Shewanella putrefaciens OX=24 GN=DET47_11938 PE=4 SV=1
MNNSPLKSITIVGGGSTGWMTALYLSKLYNHSSNIIDIRLIESKEIGIIGVGEATVHSLRFFFAAMGLDENELLRETNATLKTGILFRNWMKPVDGKMHEYFHPFEQQKPSGKIDNASAWILNNQINESNSTPFAEATSLSFSLMQNNLSPKTQYLNQYQGIVPYGYHLDATLMAAFLKRKATQAGVDHVEANVTDVLVNDGNIIEVVTDQGSFKSDIFIDCTGFKGLLIQSLKNDNWQSFETELPCNKAVAMQREYLHHQLPRAYTTATALSHGWAWEIDLTNRQGTGYVYDGRSLTREQAEAELKAYLGDEQEIIRTVHLDMKIGCRREFWVGNCIAMGLAGGFIEPLESTGLHLINLGARLLATHLTSSNPSQAIRTSYNIAMNGLYTDLRQFIVLHYCLTDRDDNEFWQKAAQSSVFIPALEQKMTLWKDKVCEYVDLANGYSSVFTDENYRYVLYGMQHIPEIHIPCPKNEISRILDNLKTQQFRAKEQSLSHQEFLAKIKNI

SEQ ID NO: 84231 - protein, 355 aa, Oxalobacteraceae bacterium
  misc_feature (1)..(355): tr|A0A4Q3LUK6|A0A4Q3LUK6_9BURK Tryptophan 7-halogenase (Fragment) OS=Oxalobacteraceae bacterium OX=1871070 GN= EOO77_06630 PE=4 SV=1
MMQSRIEKIVIVGGGTAGWMTAAALSRSFEHSDVTITLVESDDIGTVGVGEATIPTLTGFNAFVGLDERQFLKDTSATYKLGIEFVDWTRLGHRYVHPFGEYGFDVASLPFQHWWQRAKHRWPDIASFSLETRAALAGKFSHKTGIAHPVLKDTAYAFHLDASRYATTLRTLAEERGTIRMEGRVTEVIRDGEDGRLTAVRLQGGLEIPGELFVDCSGFRSLLLGETLGVPFDDWSNDLPCDRAWAVPCAGGGGAEPYTRATAREAGWQWRIPLQHRVGNGHVFSSAHMTDEDALDIVLASLEGAPLAEPRLLRFKAGCREAFWSHNCVGIGLAAGFLEPLESTSIHLIQLGIMR

SEQ ID NO: 84232 - protein, 517 aa, Xanthomonadales bacterium
  misc_feature (1)..(517): tr|A0A354Z4B4|A0A354Z4B4_9GAMM Tryptophan halogenase OS =Xanthomonadales bacterium OX=2006849 GN=DDZ76_09280 PE =4 SV=1
MSHACRHVLVVGGGSAGWLTAGLLASRLGGPEGSPEAIEITLIESPDQPAIGVGEGTWPSMRDTLRRIGVSESDFIRECDTAFKQGSKFLGWADGDAGRGYVHPFSLPHGHGEADLVSAWLARPDAIFADLVSAQPAVCEAGKAPKQQTTPEYAAVANYGYHLDAMKLGAFLRRHCVQKLGVRHLVDHVETVSADPWGGIAALTTRAHGTLHADLFIDCTGMRARLIGQHFKVPLVDCRPWLFNDSALAMQVPYAREDAPIACQTLATAQPAGWIWDIGLPTRRGLGHVYSSIDCSEDEAAARLIDYARRTGAPEASLAGAPRLIRLEPGYRRDAFIHNCVAVGLAAGFVEPLEASSLVMVELAAGMLCEQFPADRDDMTLLARRFNEAFRYRWQRVIDFLKLHYAVSRRSDSDYWRRHRDPDTLTDALCELLPHWQRHPPSRFDFPRIDEMFPSASYQYVLYGMGVRPQPRGFRDQSSRCETLFAETAGLRRRWLNGLPDHRELLDGIAAHDLPHV

SEQ ID NO: 84233 - protein, 409 aa, Caballeronia turbans
  misc_feature (1)..(409): tr|A0A158GSU0|A0A158GSU0_9BURK Tryptophan halogenase OS =Caballeronia turbans OX=1777134 GN=AWB73_03277 PE=4 SV =1
MNASVDVAIIGAGPSGAVAAALLRKAGRSVLVLERQHFPRFSIGESLLPQSMAYLEEAGMLQDIVEAGFQYKNGAHFVHRNQASAYDFRDKHSDGWGTTFQVERAVCDDLLIRRAAKQGAEVRFGHTVLEMKTGNAPVLEVADEAGTRYQVHARFVLDASGFGRVLPRLLNLEAPTRMPTRAAIFTHVRDGIPVDAHDRSKITVAVHPEHRDVWYWMIPLANGRSSVGCVAEAAFLDVPEAQREAKLRALIRSEPTLNRLIGDAPFLMPVRHIGGYSANVERLHGPGYALLGNAGEFLDPVFSSGVTIALRSAHLAVETLKRQLNGEVVDWQAQYDWPLRKGIDTFRAFVENWYTGKLQDIIFAREQTPAIRRMISAVLAGYAWDETNPYVVEPVRRLNTLHEVCTRRE

SEQ ID NO: 84234 - protein, 497 aa, Pseudoalteromonas fuliginea
  misc_feature (1)..(497): tr|A0A063KR74|A0A063KR74_9GAMM Tryptophan halogenase OS =Pseudoalteromonas fuliginea OX=1872678 GN=DC53_09310 P E=4 SV=1
MKSIKHVVIAGGGTAGWITAALLNKVLGKVINITLIESSSIGTVGVGEATIPPIIQLNNALGINEKEFINETNATIKLGIEFENWKTPSHSYMHAFGSFGKDFPFCDFYNFWVKGNITGSEDSLWDFSLNYQAAKQHKFAPLNTILNTQLPGLSYAYHFDATLYAEYLKKLAISRGVKHIDAKISEVTQCLATGNVETLILDDNKQINGDLFIDCTGLRALLIEKTLNTGFVDWSHYLPCDSAIAVQTKSNDELKPYTQSIAHSAGWQWQIPLQSRIGNGLVYCSRYLSDEDAKALLLNNLPADPITEPRFIKFKTGRRVKQWHKNVVAVGLSSGFLEPLESTSIHLIQSAVTRLIKLFPHHGISDALASEFNKQSVTEIEHMRDFIILHYKLTERGDSAFWRQCKQMEIPDSLTHKLSLFKHTGKVVRENDELFAEVAWQQVFIGQGLIPDDYNSIVDSLSSEQLNDLFSTLKTLITSTVEQLPTHKDFLKEIKKA

SEQ ID NO: 84235 - protein, 501 aa, Streptomyces sp.
  misc_feature (1)..(501): tr|A0A0M9Y961|A0A0M9Y961_9ACTN Tryptophan halogenase OS =Streptomyces sp. WM6378 OX=1415557 GN=ADK54_36165 PE=4 SV=1
MTASYLKAAFGDRINVTLVESGHVGAVGVGEATFSDIRHFFEFLGLKEKDWMPACNATYKLAVRFENWREKGHYFYHPFEQMRSVNGFPLTDWWLQQGPTDRFDKDCFVMASVIDAGLSPRRLDGTLIDQPFDEGADEMQGLTMSEHQGKTQFPYAYQFEAALLAKYLTKYSVERGVKHIIDDVKQVNLDDRGWISGVTTAEHGDISGDLYIDCTGFRALLINKALDEPFISYADTLPNDSAVALQVPMDMEKRGIMPCTTATAQDAGWIWTIPLMGRVGTGYVYAKDYLSPEDAERTLREFVGPAAADVSANHIKMRIGRSRNSWVNNCVAVGLSSGFVEPLESTGIFFIHHAIEQIAKNFPNEDWNPNQRVLYNRSIAHVMDGIREFLVLHYVAAKRQDTQYWRDTKTRAIPDSLAERLEMWKTQVPDSESIFPYYHGLPAYSYMCVLLGMGGIEMKPSPALALSDPSAAEREFAAIRDKTRRLTETLPKAYEYFAQHH

SEQ ID NO: 84236 - protein, 547 aa, Alteromonas naphthalenivorans
  misc_feature (1)..(547): tr|F5ZGD4|F5ZGD4_ALTNA Tryptophan halogenase OS=Alterom onas naphthalenivorans OX=715451 GN=ambt_22075 PE=4 SV= 1
MSNQPIKHVVIVGGGTAGWLCAGVLAARLGNRIGNSDESAINITLVESPNVPSIGVGEGSWPSLRDTLQEIGIKEAEFLTCCNASFKQGSTFASWRNGQQNDNYQHPFTTPTGYTELDIHRCWQQFFSNESFEQSFCLQPDICHAGLAPKQNSTPEYAYVLNYGYHFDASALATLLTNHCKTSLGVKHTQAHIANVVTQDNGDIESLVTENGDTIKGDLFIDCSGQQGLLIDKHYHVPWHSVSSVLLNNRAVAVQVPYGSIDLSASADTIASTTIATAQTCGWTWDIGLQHRRGVGLVYASDYASEENAESILREHLAKRLPQSELENLTYRHLQFDPGYRKQFWVNNCIGMGMSAGFIEPLEASAIAMVELGIRMLCDQFPQNRQHMSHVASRYNQRFTYRWERVIDFLKLHYVLSEREEPYWLAQRSESSIPDSLNALLDLWQYQAPSRYDLIENEEIFPSASYQYILYGMGFHTTGRQLDKNSNMVKKAFALKQSLQKGKRQLLAGLPTNRDLLTAISHCVEKETTTNDNDKKEGPRHDVIGFR

SEQ ID NO: 84237 - protein, 517 aa, Alteromonas pelagimontana
  misc_feature (1)..(517): tr|A0A2A6AUM1|A0A2A6AUM1_9ALTE Tryptophan 7-halogenase OS=Alteromonas pelagimontana OX=1858656 GN=CA267_14185 PE=4 SV=1
MSDKINNIVIVGGGSAGWLTAGVLAAEYNTQGDDAINITLVESDIVAPVGVGEGTWPSMRATLEKMGISETEFLLECDASFKQGSQFNNWLNGNDHYFHPFTLPIGNQELDIAPYWQVYKDKISFANAVCPQGHLSERHLAPKQISTAEYSYAANYGYHLDAAKLGAFLQKHCTQKLGVKQVIDHVTHITSAENGDIASIATAKHGELIGDLFIDCTGSQSLLLGQHFKVPFVDCKHTLFNDSALAAHVPYASENSPINSFTHSTAQTAGWIWDIGLPSRRGVGHTYSSEHISDDSAEQQLRQYIAQTASQQVSESVAVRKISFQPGYRSKFWQNNCVAIGLSAGFIEPLEASALALVELSAKMLSEQLPGTQQDMEIVAKRFNQKFSQRWQNIIDFLKLHYVLSKRTDSAYWQDNRDNQTIPESLQQLLTLWQYQPPSHYDIPQTEALFPTASFQYILYGMGFESGDVLGRKRKNKAAQAERLFAENMQHSKHLLAALPGNRELLNKIKKYGLPKI

SEQ ID NO: 84238 - protein, 495 aa, Pseudoalteromonas fuliginea
  misc_feature (1)..(495): tr|A0A063KU94|A0A063KU94_9GAMM Tryptophan halogenase OS =Pseudoalteromonas fuliginea OX=1872678 GN=DC53_04900 P E=4 SV=1
MTKTNAVKNVVIAGGGTAGWMAAAALAKLIGNNINITLIESDDIGTVGVGEATIPPIRTFHKLLGINEQAFMKATQASFKLGISFENWGDENTHYIHSFGATGKECWAGEFHHFWLQGQVLGINNPFGDYCYELQAAKAGKFAFNQQNPINYAYHMDATRYAQFLREFSEPLGVKRIEGKIQKVIKNTKTGHIESLILNSGEHINGDFFIDCTGFRGLLIEQALHTGYEDWSHLLPCNSAIAVQTKSTSETVLPLTRSIAHKSGWQWRIPLQNRVGNGLVYCSQYMDDEQAKALLLNNIEGEPLTEPRIIKFKTGRRLKGWNKNCLALGLASGFVEPLESTSIHLIMSGIIRFMRLFPFNGITNHAIDEYNKQLKSEIKNIRDFIVLHYKVTNRDDSEFWQHCNAMEVPKTLQHKIDLFKQTGRVFLDDGDIFRVDSWVQVMLGQGIEPNQHHLIASMMSDEELTRFLHGIKQQIEQRVSQLPPHHEFLKQYCPA

SEQ ID NO: 84239 - protein, 502 aa, Xanthomonadales bacterium
  misc_feature (1)..(502): tr|A0A354Z754|A0A354Z754_9GAMM Tryptophan halogenase OS =Xanthomonadales bacterium OX=2006849 GN=DDZ76_14275 PE =4 SV=1
MSDRRIQRIVIVGGGTAGWMTAAAMVNALRGACTIELIESDAIGTVGVGEATIPPIKYFNQSLGIDENAFLAATQGTFKLGIEFVDWTRIGQRYFHPFGSFGAEFDAVPLYQHWLHQRALGDDTPLTDHSMAWAMARRGRFERPTGDRRRVQSTFDYAYHFDAGLYARLLRDYAEHRGVIRTEGVIADVALDPESGFVTALTLANGDRRTGDLYIDCSGFRGLLIEQALHVGYDDWRHWLPCDRALAVGSAGNGPDLLPYTRSTAHPAGWQWRIPLQHRIGNGFVYCSDCISDDQATALLLAQIDGPALGDPRPLRFVTGRRRMSWYRNCVAIGLAAGFMEPLESTSIHLIQSAISRLLALFPERDFDPLLAAEYNRITALEYERIRDFLILHYHTVARRDAPLWRRTATMAIPDSLRRKLDFFVTQGRLLIEERELFQNPNWLAVLIGQEVHPQRSDPLAALASDAAARLAGLRRVIGEAAEIMPSHAAYIARHCPASGAV

SEQ ID NO: 84240 - protein, 494 aa, Pseudoalteromonas fuliginea
  misc_feature (1)..(494): tr|A0A063KWP1|A0A063KWP1_9GAMM Tryptophan halogenase OS =Pseudoalteromonas fuliginea OX=1872678 GN=DC53_05225 P E=4 SV=1
MNQNAIKKIVIAGGGTGGWMCSAAMAKLLGKNIEICLVESDLIPTVGVGESTIPTLHIFHDLLKISESEFMAATNATFKLGISFEGWKQNQQSYFHSFGYVGQGCWAAGFQHFWLKGMQQGVAADIGDYCTEHVASRLGKFAVIPNQDRNHAYQLDAGLYAKFLRNFAEQNGAKRIEGMISKVNLEPTNGFIKSLTLGDGQIIEGDLFIDCTGFKGLLIEQALHTGYEDWSHWLPCDSAVAVQTELVSPIVPYTRAMAHKCGWQWQIPLQSRRGNGLVFCSKYMSDDEAKTALLNNVEGKPINEPRVIKYRTGTRRKHWNKNCVAIGLASGFIEPLESTSIHLIQQSIIRLMQNMPTKAIESCYQDDFNNKMRFEAENIRDFIVLHYHVTQRTDSDFWRYCKNMPIPESLAKRIELFKQSGHVYKAEQELFGEASWLQVMLGQGLVPQNYHPIVDSMSDDELKRFLESIKNHVAKKANSLPSHIDFINHYCKAK

SEQ ID NO: 84241 - protein, 268 aa, Oxalobacteraceae bacterium
  misc_feature (1)..(268): tr|A0A4Q3K4H3|A0A4Q3K4H3_9BURK Tryptophan 7-halogenase (Fragment) OS=Oxalobacteraceae bacterium OX=1871070 GN= EOO77_39980 PE=4 SV=1
MAATLLARRLDRQSVTITVVESSDIRTVGVGEATVPGIRDFFREIGVTEQDVMAAAQGTVKLGIEFVDWKREGERFFHPFGLYGMRSRGVAFHHYWRKLNAAGRPTPLSDFCLATALAERNLFMRPTDSPVHDLLFFDWAVHFDAGLFAKFLAKKAGEWGVKHIDATITDVLVDQSTGFISSVDTECGKTIAGDFFIDCSGFRSLLLGDALGVPYEDWTNLLPCDRAVAMPCERAGPLTPYTRSTALTAGWQWRIPLQHRVGNGYVYA

SEQ ID NO: 84242 - protein, 543 aa, Shewanella putrefaciens
  misc_feature (1)..(543): tr|A0A448EIE8|A0A448EIE8_SHEPU Geranylgeranyl reductase family OS=Shewanella putrefaciens OX=24 GN=NCTC10737_0 1130 PE=4 SV=1
MQQATHTAINNIVIVGGGTAGWITAALLAAEHNVDKGQLAHSPKLNITLIESPDVATIGVGEGTWPSMRNTLDKIGISETEFIRQCDASFKQGSRFIHWQYDDTEHTKLFGSNQYLHPFSLPHGHQELDLCPFWLPHSDKVSFAQAVSNQDALTQLGLAPKTIATPEYHFQNNYGYHLDAGKFSQLLMQHCTEKLGIKYIRDHVTQVHSHANGDIESLATKEHGVILGDMFIDCSGTKSLLLGEHFNVPFLSQKAVLFNDSALAIQVPYTEENSPIASCTLSTAQPNGWIWDIGLPTRKGVGYVYSSAHCSDDEAEQTLRAYLANDTSTKPQSASSNALDSRKQECRKLNINPGYHAKCWQNNCIAIGMAAGFIEPLEASALALVEWTANTLATQLPTHRGVMDTIAQRVNERYERHWQQIIDFLKLHYVVSRRELDGYWRDHREAASIPERLQQQLDLWRYQAPSSHDISYKEPLFPAASFQYVLYGMGFNTAQPTHIKPSQQQVAQRLFSENQQKIHALSQSLPSNRDLLNKVRQFGFPKI

SEQ ID NO: 84243 - protein, 493 aa, Alteromonas pelagimontana
  misc_feature (1)..(493): tr|A0A2A6AYP8|A0A2A6AYP8_9ALTE Tryptophan 7-halogenase OS=Alteromonas pelagimontana OX=1858656 GN=CA267_05615 PE=4 SV=1
MRQIQKVVILGGGTAGWMSAALMKKVLGDTVSITLIESDEIGTVGVGEATIPPIRLVNNVLGLNESEFLKETKATIKLAIRFENWKRPGESYFHTFGVPGKSMAFCHFHHVLARGQKLGVEDDLWAYDLNYHCAVAGKFAQINSQDPIMEMPFAYHFDAGLYAQFLRKISEKAGVKRIEGKVQQVLRGQNGDISALVLENSRKIDGEIFIDCSGFKGLLIEQTLGTGFDDWSHWLPCDSAIAVPSEHHQQTVPYTRSIAHKAGWQWQIPLQHRNGNGHVFCSRYITDEEARSVLMENLETKALAEPRLIRFTTGRRRRQWNRNVVAIGLSSGFLEPLESTSIHLIQSGIVRLLQLFPQHDIKPAMVEEYNRQSQLEFEQIRDFLVLHYYLNEREEDFWNDMRHVQVPELLAHKIALFKENGKLFREQNDLFLESSWLQVMVGQGIKPQEYHPLVNTLPDAAIIKMLTQLKAKKLEPVFHLPSHDDYIRHMLSR

SEQ ID NO: 84244 - protein, 513 aa, Alteromonas naphthalenivorans
  misc_feature (1)..(513): tr|F5ZFA2|F5ZFA2_ALTNA Tryptophan halogenase OS=Alterom onas naphthalenivorans OX=715451 GN=ambt_17280 PE=4 SV= 1
MTPVNSVVIVGGGTAGWLTAGLLAATHSKQGSTGARLSVKVIESDSIHPIGVGEGTWPTMRSTLAKIGIEEAALVQQASATFKQASKFVHWHTEGQRTGYYHPFSAPQGSASVDITPYWLHNDSLNEYASDVCFQPSLCEQGLAPKLKADSKQSFSANYGYHLDAGKFINVIREHCKKVLGVEHIIDDVTDVATDDAGIKHVVTKNNDHIRGDIFVDCTGFSARLIEKALDVPMEDASSVLFSDSALVHQIAYSDEHQPIACHTLSTAQEAGWIWDIGLQNRRGTGYVYSSEFQSDDEATQTFMAYLKSINPNEELPSTFRKINYKTGYRKRFWEKNCVAIGLSSGFLEPLEASSLMLIEQSAIQLAEQLPAYTQVMPHVASRFNRALTNKWQSTIEFLKLHYVLSNRNEDFWLANRSPQSIPQRLASLLEEWQYRPILDSDFTDTDEVFSAQSYRYILYGMSHKTNLSQYVRSMSEYEGADKQLQLNKALIAQLKARLPSHRGLIDTMLNKH

SEQ ID NO: 84245 - protein, 504 aa, Oxalobacteraceae bacterium
  misc_feature (1)..(504): tr|A0A4Q3J1W2|A0A4Q3J1W2_9BURK Tryptophan 7-halogenase OS=Oxalobacteraceae bacterium OX=1871070 GN=EOO80_01170 PE=4 SV=1
MQDRIKNIVIVGGGSAGWMAAAALATYLGRNASIRLVESEEIGIVGVGEASVPPLRQFNTQWLGIEEADFVKRTQATVKLGIQFNDWGRIGDSYIHGFGAIGNSLGPLPFHQFWLKARQRGRAAPIGAYSPQGVMAPQGKFAPGDANAPPHSPLADIAYAYHFDAALYARYLRELAEERGVMRIEGKIVKVNQRGHDGFIESLGLENGQVVDGELFIDCSGFRGLLIEETLQTGYTDWSYWLPCDRALAVPSERAGPLTPYTRASARPAGWQWRIPLQHRTGNGYVYSSRHISDDEAATTLLANLDGKALGDPRLLRFTTGRRAKLWNKNVVALGLAGGFLEPLESTSIYLAQSGITRLLSLFPARDINPQLAERYNRESMFEYERVRDFLILHYHATERKDSPFWDLCRTMPIPDTLRDTIDLFRTDGRYFRNGEDFFALPNWVQVMLGQGIVPHGYHPIVDEMPEEKLVEHVEGVRTLLAQAVATMPTHEEWIDHYWKAPAP

SEQ ID NO: 84246 - protein, 130 aa, Oxalobacteraceae bacterium
  misc_feature (1)..(130): tr|A0A4Q3IL72|A0A4Q3IL72_9BURK Tryptophan halogenase (F ragment) OS=Oxalobacteraceae bacterium OX=1871070 GN=EO O80_16615 PE=4 SV=1
MADNRIRDIVIVGGGTAGWMTAAALSKILATGYSITLVESDEIGIVGVGEATIPMIKLYNQALDLDENDFMRKTKGSFKLGIEFRDWGKLGDSYVHGFGKIGQDLGLVSFYQYWLKMHHAGKAANLEEYS

SEQ ID NO: 84247 - protein, 340 aa, Oxalobacteraceae bacterium
  misc_feature (1)..(340): tr|A0A4Q3JDH3|A0A4Q3JDH3_9BURK Tryptophan 7-halogenase (Fragment) OS=Oxalobacteraceae bacterium OX=1871070 GN= EOO78_37110 PE=4 SV=1
FHPFASMLDNLTMHQFVDNVHERLGGADVHAHPDRFFVAAALARQGRGPRAHASFPFDVWYGYHFDATLLGQFLATKAVALGVRHLQRHVRQVRLGERGDIGDLLLDDGQPLAADLFVDCTGFFSLLIGQALQTPFIPYAENLFNDAAIAMPTPLQGAIASQTVSTALRHGWAWKIPLTNRYGNGYVYSSAHCSADHAETELRAHLGLLDADIPARHLKMRVGRMAQVWNRNCIAVGLSQGFIEPLEATALLFVQRTAAMLVEVLENGDIGAASQAAFNDAMCTRFENTRDYIVAHYKTNSRTDTDYWRENAENLHLSDSLQGVLMTWMSRKPLVAGLQA

SEQ ID NO: 84248 - protein, 518 aa, Shewanella putrefaciens
  misc_feature (1)..(518): tr|A0A366ITL3|A0A366ITL3_SHEPU Tryptophan halogenase OS =Shewanella putrefaciens OX=24 GN=DET47_11568 PE=4 SV=1
MKVKQAIRKIIILGGGTAGWMAAAALANNPVFAAIELCLVESDNIGTIGVGEGSTPHLKRFMDNLGISEKDWMEPCHASYKTGIDFINWNGDGQQYFHPFYFQMDVKPAEVFFINANARRRGHGNAVRPDAFFSSGVLAKHNLSPRPNKALPYTNEYGYHFDATELANYLKEYACQRGVKHLIGDVIEVSTTQNQHIDALMLANGERLNADFFIDASGFSAKLIHKTLGVPFQSFANELLNDSAVTVPVPVPALMDSTQTQQTHDLQNNALQTQAQQAKFHTRATALSAGWLWQIPLTHRLGNGYVYSSRHLSANAAAKELLHSVNLPESTQVRFLKMRVGVSDKAWHNNVLAIGLAQSFIEPLEATSIMMTQFTLEKFMSLFERYQLNKQAETLSRQTLNQAVMQLVLGIKDYIQAHYVTSQRSEPYWLAARKVTISQRLTQLLQAWYQGEDFDLLLYQYDQQLAYFRPSWYALLAGMDYRDPKLKRPFEPISTEITAQAIRYSQTLVEQYFQPKHP

SEQ ID NO: 84249 - protein, 442 aa, Caballeronia turbans
  misc_feature (1)..(442): tr|A0A158FBS6|A0A158FBS6_9BURK Tryptophan halogenase OS =Caballeronia turbans OX=1777134 GN=AWB73_00941 PE=4 SV =1
MSEAIQTWDVAVIGGGPAGSTAATLLADRGYRVRVLEKARHPRFHIGESLLPANLRLFERLGVADEVRAIGMVKLAAEFVSPQHGDRMQRFLFADAWDKSMPSAYQVRRSELDEILLRNAAKHGAHVSEGCRARDVVFAPDGSSATIGAEHDDGRIEEVRARFVVDASGRDTLLANHFKTKRRNERHNSSALYGHFRNARRNVGQNEGNITVFWFEHGWFWFIPLADGATSIGAVVWPAYLKRRPKGTSVETFFRDTIALCAPLAERLEDAELISEVHATGNYSYTGDMTHGRNFLLLGDAFAFIDPVFSSGVMLAMQSAFAGAEAIDTALKNPASARAALAKFDRDVRHGPREFSWFIYRMTSPTMRNLFMGPRNPLRMKEALLSLLAGDIFGTTPIWHSLRAFKGIYYVSAALDWRNSLRAYRQRRRNLSDAKRAELSAN

SEQ ID NO: 84250 - protein, 522 aa, Porphyrobacter sp.
  misc_feature (1)..(522): tr|A0A2N4WWG8|A0A2N4WWG8_9SPHN Tryptophan halogenase OS =Porphyrobacter sp. TH134 OX=2067450 GN=C0V72_05680 PE= 4 SV=1
MRSNGIGNADRLARVVVVGGGTAGWMAAAALSRFFNDGRRTITLIESDAIGTVGVGEATIPPIRSFNAMLDITEAEFLRETRGTYKLGIEFVNWGRIGDRYIHPFGNFGQDFHGIPFHQLYLREQARGGAVGAIGDYSMSAAAARSGRFARPAAGAQSLVKELAYAYHFDAGLYAAYLRRLAERQGICRVEGTIVHVTRDGESGDVASLTLDNGTIIPGDLFIDCSGFRGLLIEEALETGYEDWSRWLPMDRALAVPSRTPGPPDPFTRATAHTAGWQWRIPLQHRTGNGHVYSSAFMDEESARDILLANLESEPLAEPRGLRFLTGMRRKAWNHNVVALGLASGFIEPLESTSIHLVQNGIARLFALFPDMPISPIERDEYNRGMRDVFEDVRNFVILHYKATAREDSEFWRYVKHMDVPDSLTRKMALWQHRGRVLRDNAELFSLPSWIAVMLGQNIWPEAHDPIADTLDEAKVAAAMAQMREAYRETAAKLPVHEAFLRQSGSWHDDGVQVAPPRAVNA

SEQ ID NO: 84251 - protein, 507 aa, Pseudoalteromonas ulvae
  misc_feature (1)..(507): tr|A0A244CTI4|A0A244CTI4_9GAMM Tryptophan halogenase OS =Pseudoalteromonas ulvae OX=107327 GN=B1199_01125 PE=4 SV=1
MKTTIKSVVIVGGGTSGWMTAAALSHHFAQSKVSVKVIDSTEIGTIGVGEATIPTLRRFYQTLGLTDQDVLTACQATCKLGIEFKDWYQAGSSFIHPFGLFGQAANGVPFHHYWLKLKQNGDPSPLSDYSYGVRLAQKNKFTLPVNNPNSPLAIFDWALHFDASLFAELMKKVAIKHGCEHIDNTITSVNLDAQQEAIDSVTLKNGQCVTADLFIDCSGFKALLIEGALKAGYQNWSQWLKCDRAVAVQTTRVDEPLSRTVVQAREAGWQWTIPLQNRSGNGHVYSSQYMSQDEATALLLEHVKGEVLQPPRHFSFTPGRRTQAWKSNCIAVGLAAGFLEPLESTSIALVETAIDKIIQTFSSPEYTKQDVERFNHVTATEYERVRDFLIVHYALNQREQGQMWQDCREMTLPRSLSDKLHQYQTNGALTRLPWEMFGPDSWLAIFDGFACYPQSYDPLVDKLSVDYLAESFKLMRDGISDAVAHAPTHSEFLRQMTHFQSHQPEPA

SEQ ID NO: 84252 - protein, 512 aa, Acidobacteria bacterium
  misc_feature (1)..(512): tr|A0A2E4W2P6|A0A2E4W2P6_9BACT Uncharacterized protein OS=Acidobacteria bacterium OX=1978231 GN=CL489_01100 PE =4 SV=1
MKKNLVIVGSGQSGLIAALLVKSILPEYANITVISSSDIPPIAVGEGSTEHWNEFEKIVGLVRRETIRQCDATFKYGIRFMDWTHHTPDYMHSIGGDGLYADHFNVLYNYVNSSDHLLTSVLLPVGLTEGLVKHEEDDHMLHQVNQLHFDTHKLNNYLRDRCVKLEIEFVDAKVQGLERDSHTGDIAKLVTSAGNYPADFVIDASGFSRTVLSLLGDVHCTTFDDVLPCDTALVFRTPSESNSILKPYTSARALSSGWLWEIPTYRCRGNGYVFSSDYITESQALEEVETTLGIEVPDANLIEFRPHYVTNSWQSNCVAVGLASNFLEPLEATSIAATINQVRLLCSNLPAYKPNSSVLQNSYLKTFRSMVDNMLAMVAMHYVSDRADSPMWLEQQSRPKPDLLQHLIGIMKYRGPEDHDIPHTGFELFRAGHFWHVGQGQGLIDRENSRVALMARLQEDNAADRVRTIVTQQGAKGSLDHRRVLELAREDLPVTHYPDWKFGEYQIERLDV

SEQ ID NO: 84253 - protein, 496 aa, Colwellia sp.
  misc_feature (1)..(496): tr|A0A3D0C9D3|A0A3D0C9D3_COLSX Tryptophan halogenase OS =Colwellia sp. OX=56799 GN=DEO86_11770 PE=4 SV=1
MNSPIKKVVVLGGGTSGWISAALLKKILGTAIQLELVESDAIGTIGVGEATIPPIKHLNNVLGINEAEFLRETKATIKLGINFENWKSQGHSYLHSFGAAGKSLAFCHFHHLLKRANQLEDDSNLWQYDLNYLAAKAGKFAQIKSKDPIIELPYAYHFDAGLYAKFLRKFSEKLGVIRTEGLVEYVEQCPNSGHITSLKLKNGQTVTGDLFIDCSGFKGLLIQEKLRTGYEDWSHLLQCDRAIAVPSERLEKTLPYTRSIAHAAGWQWRIPLQHRNGNGLVYSSSHCSEQQAMDTIMGNLDSKAIADPKVIKFQTGRRYQQWNKNVIAIGLSSGFLEPLESTSIHLVQSAVVRLAHLFPHQGINSSLVDEFNKQSATEFEQIRDFLVLHYHVTERTDSDFWQDMRQMKIPDSLAHKIEIFKQSGRLFREQNDLFTDSSWLQVMLGQGIVPQDYHPIANMMSDEKLTEMLRKVKEIKQAPIDKLPSHDEFLRVFCRQ

SEQ ID NO: 84254 - protein, 516 aa, Pseudoalteromonas fuliginea
  misc_feature (1)..(516): tr|A0A063KVC5|A0A063KVC5_9GAMM Tryptophan halogenase OS =Pseudoalteromonas fuliginea OX=1872678 GN=DC53_04905 P E=4 SV=1
MTKPITKIVVLGGGTAGWLSAGLLAAEHPHLNVTLVESANVPILGVGEGTWPSMRNTLKRIGIKESDFITQCDASFKQSSKFINWRNLSEGENYYHPFMNPQGYEHTNLHASWQRIAPNQKFADVVNMQSFVCQAALAPKQLQTPEYAAVTNYGYHLDAGKFAEFLKNYCVKNLNVTHITDDVTEVINDEHGYIAALKTNNNGDITGDLFIDCSGSCARLIGDHFNSEFIAQDHILFNNSAVAAQIPNAHINQPIASATLSTAQSNGWIWDIALPTRRGTGYVFSSKYQSDESAANTLKSYITKSTSEQQAEQLTYRVLKFSPGYRQKFWIKNCVAVGMSAGFLEPLEASALAMVELSISMISEQLPQNRTHMSQLKTRFNDRFSTRWQRVIEFLKLHYVLSKRDDTPYWQDISNLNTAPERLQNLLKLWQFQPPSRFDFIENEEVFSSSSYQYVLYGMGFNTQTVSAQNTFNDPRAGDYYYQQNREKIAQCLNGLPSNRALLNHLLSNNGQPHND

SEQ ID NO: 84255 - protein, 496 aa, Colwellia sp.
  misc_feature (1)..(496): tr|A0A3D3GYY9|A0A3D3GYY9_COLSX Tryptophan halogenase OS =Colwellia sp. OX=56799 GN=DIS98_03470 PE=4 SV=1
MSTLKNIVIVGGGTAGWMTAISLLHKWAGSGTKVSLIESPEIGTVGVGEGSTPALKTFFTDLGITESEWMPACNATYKVGISFSNWSTVTGHTDYFHPFFSEYDVGPGESFFTRCGHKRRGVSLTAHPDNHFIAPQLFKQNKGPAAIEPTQIDYGYHFDSSRLALFLKEKSLALGLNYIEAKVSNVTLAANGDIEGIQIDGIKDIKADFFVDCSGFYSLLIEKALNSKFISYENSLFNDSAVTIPTEVYADRAPSATISEALSSGWCWQIPLTNRIGYGYVYSSKYLSAEGAEKELRKHIGKSSEGKPAKHLKMRIGRREEHLKNNCVAIGLSQGFIEPLEATALMLVQYSIYKFIRYVETSDTDVDNYNTTINQMFEGVKDYIVTHYKLNDRVDSQYWIDCREKPAISNTLESIITAWDSEQDFDAALSKLSPSLMYKRASWYAIFAGMGRFPEGRKAATTFQLIPSHEKTLSFCQGITAEKFIDHKESILMLTQ

SEQ ID NO: 84256 - protein, 804 aa, Methylobacterium sp.
  misc_feature (1)..(804): tr|A0A2U8W3L0|A0A2U8W3L0_9RHIZ Tryptophan halogenase OS =Methylobacterium sp. 17SD2-17 OX=2202825 GN=DK389_0921 5 PE=4 SV=1
MMRPSSDTSAPRVVVVVGGGLTGWMSAAYLRRVLRRLGSPVTLVAGAGTPAPGALATRPVFTRFLRGFAIDEAIFMRRCGATYALANRYDDWFEAGAGHWHPYGECGPRIDGLDIFHPWLKERLEGGTAGPYADYAPQTHMAAAGLGPAPDTGGSSVTEAGSYGYHLDRAALVRFFREIALSEGVRAVPGRAVSAETGPLGDVAAIAVEGGARIAGDIFVDCTGEAAFLIGGTLGEAWIEDPAAGACDRLASVSRPPDPARPSFAAYAGTREGWTQRLPLAGRTEIALAYRAELTSQEDAEAALRGLAGAGPDGAVRHRVLRAGRRRAPWLRNVVGIGGSVRESGPLGGFEVDLIPCALEAFVEHLPRGEGVAILRQGYARRMADLADEASGAVALHFALGRRPEPFWAAARRAPLPDALADRLDLYEIGGRVAVPEARLFGESDHYRLLAGADLLPRRAFAPVDLADPRGLGTFLAGIRARAEQLAGTMAPHALLLERLHGPVETPRPDARLAPANRAATGPAALRRTPEGARVADLVAALGQPFGYERSVKASAGTLQSDRFLMSLHRTSLGPEPGPVLKGLAAKLGLGPAERAEAAAHIAEADLLHLGYEDGPSGPLYKLYVEWSARTDAAWAREDEGEGEPLLVHRAYKWDPLRPGPAIVTLYHWPRVRGPDEIAARLARIGAGEAGWGEAGPRVLGVAQALLELARASGRGAPHYLEAREAPGPRLSYDLNLYACGLTVGAAENLLLAAFADLGVPGAEAAAILAERRDEALGHVAGGVGRDGRPFLTLYSGVAAGSER

SEQ ID NO: 84257 - protein, 498 aa, Pseudoalteromonas sp.
  misc_feature (1)..(498): tr|A0A1R4JSL5|A0A1R4JSL5_9GAMM Tryptophan halogenase OS =Pseudoalteromonas sp. JB197 OX=1434839 GN=CZ797_07745 PE=4 SV=1
MNNKITNVVIAGGGTAGWITAALLNKVLGNVINITLVESDQIGTIGVGEASIPPISHLNGALGINEHEFINATQATIKLGIEFENWREQNHKYMHAFGSIGKDFPFCEFHHFWLKAKQQNYAPDLWDFSVNYQAAKAGKFAHLRNLPNTQLPGLHYAYHFDATLYAKLLKKLAQQRGVKRVEGKIKSVQQCQQSGDIQALTLESGSVIKGDLFIDCTGLSALLIEKTLNTGFEDWSHWLPCDSAVAVQSESANEPVPYTRSIAQNAGWQWQIPLQHRVGNGLVFSSRYLTDDEVKQQLLANLPGKAITEPRVIRFKTGRRRLQWHKNVVAIGLSSGFLEPLESTSIHLIQTAAIRLIKLFPHNGIKHSQVTTYNLQSKTEIERIRDFIILHYKLTTRTDSAFGRQCQQMSIPETLQQKITLFKQTGKLTREDDELFSEPAWQQVMIGQGLEADDYHPLGNALTDEPLLALFSDLKALINHTVEQLPSHSEFLSRMKNN

SEQ ID NO: 84258 - protein, 507 aa, Novosphingobium mathurense
  misc_feature (1)..(507): tr|A0A1U6GUT2|A0A1U6GUT2_9SPHN Tryptophan halogenase OS =Novosphingobium mathurense OX=428990 GN=SAMN06295987_1 01527 PE=4 SV=1
MTQNRFSIVIVGGGTASWMSAAALARFAPPGYAVTLVESEAIGTVGVGEATIPAIRLFNKALGIDEAQFLRETSASYKLGIAFDGWLREGHSYMHAFGTVGRHLGLLPFRHYWARARASGVARPLAHYAANELAARTGRMATGISGPGIPELPWAYHFDAGLYAAFLRRLAEGMGVVRHEGRVARVIRDDAGDIAAVETDAGQALSADFFIDCSGFTGLLIEKELQTGYEDWRHWLPCDRAVAAPCEAAGPFTPYTRSIARSAGWQWRIPLQHRIGNGLVYCSEYLSDDAATGLLLSHLEAPAQAEPRALRFTTGRRAKAWNRNVLAVGLASGFMEPLESTSIHLIQSTIMRFLTVLPSGPASPAIVNEFNRRTAEEFERIRDFLILHYRANARVGEPFWDRCRDMAVPDTLAARIAEFEEACQIQPAGDELFQEPAWLQVMAGQGIEPKGWNPIADALSDDDLSGFLGAIEQACIETVRPMPRHMDFLAATCAAAPSRSPELETLR

SEQ ID NO: 84259 - protein, 496 aa, Cellvibrionales bacterium
  misc_feature (1)..(496): tr|A0A424RHQ8|A0A424RHQ8_9GAMM Tryptophan 7-halogenase OS=Cellvibrionales bacterium TMED157 OX=1986773 GN=CBD1 7_003395 PE=4 SV=1
  misc_feature (181)..(181): Xaa can be any naturally occurring amino acid
  misc_feature (194)..(194): Xaa can be any naturally occurring amino acid
  misc_feature (206)..(206): Xaa can be any naturally occurring amino acid
  misc_feature (283)..(283): Xaa can be any naturally occurring amino acid
  misc_feature (302)..(302): Xaa can be any naturally occurring amino acid
  misc_feature (488)..(488): Xaa can be any naturally occurring amino acid
MSERKVERVVIAGGGTAGWMAAAALSRLVGRKLSVTLVESEEIGTVGVGEATIPTILTINRLLQIPEPDFIKLTSGTFKLGIRFENWRTEGEDYFHSFGDTGKGSWAAGFHHFWLRAKELGLAEQYGEYCPELKAAEAERFAITSENKLNYAYHLDASKYGMYLRKLAEASGVTRIEGKIXKVETSPHDGFIEXLELDNGQRIEGXLFIDCTGFRALLSEGALETGFDDWSHWLPANRAWAVQSELSEHPKPYTRAIAHKVGWQWRIPLQHRAGNGLVYCNDXMDEETARDLLLENVPEKTXIEPRPIRFTTGQRKQYWNKNCIAIGLSSGFIEPLESTSIHFIQNGIMWLLLMFPDLCIEESTVREYNTKMRSEAEHIRDFIVLHYALNERHGDPFWDHCRNMDLPDSLKHRMELFERSARVFKPQDDVFAENSWVQVMMGQGLTPEGYHNIAQAMSSEQMTAFLKGIQHEVAQTVAKLPQHGAFVXTLIQHAKV

SEQ ID NO: 84260 - protein, 497 aa, Colwellia sp.
  misc_feature (1)..(497): tr|A0A2G2EKT2|A0A2G2EKT2_COLSX Tryptophan halogenase OS =Colwellia sp. OX=56799 GN=COA35_22620 PE=4 SV=1
MKPIKNVVIAGGGTAGWIAAALLNKVLGKVINITLIESSSIGTIGVGEATIPPIIQLNNALGINEQDFINATNASIKLGIEFENWKTPSHSYMHAFGSFGKDFPFCDFYNFWVKGQISGSEDSLWDFSLNYQAAKKHKFAPLSAIPNTQLPGISYAFHFDATLYAEYLKKLALSRGVKHIDAKIERVTQCPNTGQINSLTLDNNSQIEGDLFIDCTGQRALLIEQTLNTGFVDWSHYLPCDSAVAVQSTGSDELRPYTRSIAHNAGWQWQIPLQNRTGNGLVYCSRYLSDEGATALLLNNLPGEPTTDPRLIKFKTGRRLKQWHKNVVAVGLSSGFLEPLESTSIHLIQSAVIRLIKLFPHNGISDALVTEFNKQSVTEIEHIRDFIILHYKLTEREDSPFWRQCKQMDIPQSLAHKIDLFRQTGKVVRENDELFAEVAWQQVCIGQGLIPEDYNNIVDSLSSEQLNDLFSTLKTLITSTVDQLPTHKDFLAKIKKA

SEQ ID NO: 84261 - protein, 528 aa, Alteromonas naphthalenivorans
  misc_feature (1)..(528): tr|F5Z7K9|F5Z7K9_ALTNA Putative tryptophan halogenase O S=Alteromonas naphthalenivorans OX=715451 GN=ambt_07620 PE=4 SV=1
MVVANKTAANQQATDQYSRDHQEAKQTPVKRVVVAGGGTAGWLTAALLKKVIGDAVNITLVESEAIGTVGVGEATIPPIRLVNQVLGIDEATFLRDTKATIKLAIRFENWKQQGQQYYHTFGAPGKSMAFCHFYHFWLKARQQGLKHDLWEYDLNYLAAEAGKFARINAKDPVLELPFAYHFDASLYAKYLRKLSEGLGVKRVEGKISYVSRHKHSGNVKALHLENGHAIEGDLFIDCTGFRGLLINETLGAGYDDWSHLLPCDSAIAVPSERHENTAPFTRSIAHSAGWQWRIPLQHRNGNGHVYSSRYMSDSQAHDTLMANLDTKPLGDPKFIKFTTGRRRQQWYKNVVAVGLSSGFLEPLESTSIHLIQSAIVRLIKLFPHQGISESAVKEYNAQSKVEFEQIRDFLVLHYCLNEREDSDFWRDMRHLTLPDSLTHKMALFKQNGNLVREQNDLFLESSWLQVMYGQGLVPEDYHGLANSFSDEKTQAMLSSLYNIKREPLASLPTHDAYIQSMIDSANKTSVSF

SEQ ID NO: 84262 - protein, 517 aa, Xenorhabdus szentirmaii
  misc_feature (1)..(517): tr|W1J423|W1J423_9GAMM Tryptophan 5-halogenase OS=Xenor habdus szentirmaii DSM 16338 OX=1427518 GN=pyrH PE=4 SV =1
MINSVLIVGGGTAGWMTAAYLSKAFDKNINITVVESKEVKKIGVGEATFSTVRHYFDYLGLNESEWLPECSGSYKLGIRFENWDGQGNHFYHPFERWEVVKGFPISEWWLSKKLKDQRFDYDTFLTPHLCEAKRSPRRLDGSLFAQSIDKSLGQSTLAEQRAQYPYAYHFDADGVASFLKRYAMNRGVKHIEDDVTHVEIDTNGNIGYLEAKIYGKLRADLYIDCTGFKGLLINKALNEPFISFSDVLKNNRAVALRVPRENENDIEPYTTARTMSNGWRWTIPLYKRNGYGYVYCNKYQSPEEAEMELRKSIPYENAECVANHIRMRIGRSNRSWVKNCVAIGLSSAFVEPLESTGIFFIQHGIEQLVRFFPRSSGNELLIEEYNTRVNRVVDGVKEFLLLHFSLAQRNDTLYWKEWKNVELPKELLKKITLAQDHLLDKETIYPFYHGFEEYSWNTMILGLCSGSLNNKPALSLMTSDEADEMLLQHYMKAENMVNNLPTCYEYLKHIHDLKNKN

SEQ ID NO: 84263 - protein, 508 aa, Porphyrobacter sp.
  misc_feature (1)..(508): tr|A0A2N4WW78|A0A2N4WW78_9SPHN Tryptophan halogenase OS =Porphyrobacter sp. TH134 OX=2067450 GN=C0V72_05700 PE= 4 SV=1
MNDSAPKPVRVVVLGGGTAGWMTAAGVAKLLPGLASVQLVESEEIGIVGVGEATLPHIRGFVEKLGIDEAAFMKATHATFKLGIDFRDFGRIGESYIHPFGSFGEEVGGVGFHHYWLELARHGKAREIGDYSLAVAAAKANRFRPPSADDSLGSTYGYAYQFDATLFGPFMREFARGIGVERHEGRVVTVERDPASGDVTALVLADGRRIEGDLFIDCSGFRSILLGQELEVPWEDWTHWLPCDRAAAMPCTHATEDLRPYTTATAMPAGWRWQIPLQHRMGNGYVFSSAHISEEQACDAIRACAEGAPLAEPRILKFRPGRRARSWSHNVIGVGLASGFLEPLESTSIYLAQMAITYLIELFPAAAGAIDPRDRDEFNRLVDMEYDRVRDFLILHYHATTRDDSEFWNHVRTMRVPDSLADKLELWRRAGRIEKYSDGLFYDASWIAVYVGQGLLPEVHDPRAAMIAPDALARATERLRMAVTGEVAAMPGHRDYLRGEAARLADAA

SEQ ID NO: 84264 - protein, 508 aa, Porphyrobacter sp.
  misc_feature (1)..(508): tr|A0A2N4WTU9|A0A2N4WTU9_9SPHN Tryptophan halogenase OS =Porphyrobacter sp. TH134 OX=2067450 GN=C0V72_08410 PE= 4 SV=1
MQPGITKLVIVGGGTAGWIAAAAFSRLLGERLTIELVESEAIGTVGVGEATIPQIIRLNAILGIDEHEFLRATSGTFKLGIEFVDWGRQGSRYLHTFGDTGMNLGNVAFHHYWRRSVSGQAVPDPKGLWDYSLHQQAADQARFGKLDRVGNTAMTGLAYAYHFDASRYALFLRAYSEARGVTRTEGIVQSVERQGESGDITAIGLADGTRVAGDFFIDCTGFRSLLLGGELGVGYEDWSRWLPCDRALAVPSERLPTLVPYTRATAKAAGWQWRIPLQHRTGNGHVYSSGFTSDDAAADVLLKGLDTKALGDPRPIRFTTGRRAAFWAQNCVAIGLSSGFLEPLESTSIHLIQSHISRLIQLFPRAGNPAALRDEYNRRCAAEFAQIRDFLILHYHRTDRDDSEFWRYCKHMAVPDSLSHKLELFAAAGRVGRDPDDLFRDASWVQVMLGQGIMPADYDPMADSVAPQQLGEFLTNLRILISRAVAQLPSHEDYLRQHCPADESLLAA

SEQ ID NO: 84265 - protein, 504 aa, Sphingomonas sp.
  misc_feature (1)..(504): tr|A0A0W1QJ38|A0A0W1QJ38_9SPHN Tryptophan halogenase OS =Sphingomonas sp. WG OX=1592629 GN=ATB93_13455 PE=4 SV= 1
MGGAKPIRVVIVGGGTSGWMTAAALARLLPKRVSLHLIESETIGVIGVGEATLPHIRGFVEKLGIREADFMAWTRGTFKLGIEFRNWGRIGDSYVHPFGTFGRGKGEVDFHHYWTRLRLAGAELPPFEVFSYACMLARANRFDLPSEDPDRLTSTYGYAYQFDALLFAPYLRAIAEGLGARRTEGKVVEVVRDGERGTITAVRLDNGERIEGDLFVDCSGFRSLLLGEALAEPFEDWNHWLPADRAVAMPCRTTTSVTPYTSAIAMPAGWRWRIPLQHRTGNGYVYASAFTSDDEAARALTGAVEGAPLADPRILRFRAGRRRRSWVKNCVAIGLASGFLEPLESTSIYLVQQAITALIELFPDNADSDVERDEFNRLIDLEYDRIRDFLILHYHATTRTDTDFWNYVRTMEVPDSLAEKIELFRRAGRVVKYREGVFLDASWVAVYVGQGILPQGYDPRADVPDADVLMRGMRALQGEIAAAVDRVPEHLRYIDRYCPMAAAA

SEQ ID NO: 84266 - protein, 499 aa, Sphingomonas elodea
  misc_feature (1)..(499): tr|A0A495F2Q0|A0A495F2Q0_SPHEL Tryptophan halogenase OS =Sphingomonas elodea OX=179878 GN=C8E52_2457 PE=4 SV=1
MGQHIIIAGGGSAGWMAAALFARLRPAPDTRITLVESDAIGTIGVGEATVPILRDFNRLLGLHEPDFVATTQGSFKLGIEFVGWGDAGNRHFHGFGDFGAPIEGLAPHHHWLRLRAAGRIADPIDGWSMPALAAAQDRFAPPEALRGEAAEYRYAYHFDAGLYAQLLRSHAEARDVTRIEGRILAAERDPSTGDLTALRLEGERRIAGDLFIDCTGFASRLLGEALGTPFVDWSRWLPADRALAQGCTRAGRFTPFTRSTAHAVGWQWRIPLQHRTGNGLVYSSAYLSDDEAAAWLAANLDGDAIGDPRPLRFTTGRRERFWAHNVVAIGLAAGFMEPLESTSLQLVQTGLVRLAELLPSIGAADPAVIAEYNRETIGEYERIRDFLIAHYCISRRPEPFWRDMAAMALPDTLAHKLALWDAIGRLPLYDRESHAEASWVAVLLGQGRFPRGHEPTADRPPLDALDRLFAQRRAELEAALPRLPAHDHFVAKTCRAEDA

SEQ ID NO: 84267 - protein, 503 aa, Sphingomonas elodea
  misc_feature (1)..(503): tr|A0A495F2U9|A0A495F2U9_SPHEL Tryptophan halogenase OS =Sphingomonas elodea OX=179878 GN=C8E52_2417 PE=4 SV=1
MAVAAPYRIVVAGGGTAGWMAAAALARFLGEGFTITLVESDAIGTVGVGEATIPQIRMFNASLGIDEDAFVAATQASYKLAIEFFGWTKGGRYMHAFGDVGRDNGLLAFRHTWLRGLAEGVAEPLAVYALNNVAALANRMQRGPARTARVLPEMPYAFHFDAGLYARFLRSYAEARGVVRHEGRIEAVARNGEGGDVAALHLDGDRRIEGDLFLDCTGFHARLIGEAMGVGYQDWSHWLPCDRALAVPSARARDFTPYTRATAHDAGWQWRIPLQHRTGNGIVYSSRHLSDDEAAARLLAGLDEPALGDPRPIRFRTGRREVAWAGNVIALGLASGFLEPLESTSIHMIQSAVERVLKLLPSGRALAPLRDSYNRQAANESERIRDFLILHYWANDRDEPFWRDRRESPLPDGLAEKIALWRETGEIVREDGDLFSDVAWLQVLVGQGIAARGHHPLADQPPVAQIAEYLDLLAKLNAREVAQMLSHSDFVRAHGAADAEIAA

SEQ ID NO: 84268 - protein, 503 aa, Caulobacter sp.
  misc_feature (1)..(503): tr|A0A258IV06|A0A258IV06_9CAUL Tryptophan halogenase OS =Caulobacter sp. 32-67-35 OX=1970330 GN=B7Y81_04765 PE= 4 SV=1
MTTGENHVSGQIVKKVVVAGGGTAGWMAAAALSKQLGPLLDITLVESDDIGTVGVGESTIPTARTFNALLGIDEATFMRETQSTFKLGISFENWGQIGDRYIHSFGQVGKSTWMGGFHHFWLQARAQGFGGELGDYCFELKAAEADRFFTDENATTNYAYHLDATLYGRFLRKMSEGKGVRRLEGKIARVQQRAEDGFIEALVMESGEIVEGDLFIDCTGFRGLLIEQTLKAGWEDWSHWLPTNSALAVQTTSTEPAVPYTRAIAHKAGWRWKIPLQHRVGNGLVYCSDHMSDDEARALLLREIDGEPLIEPRVIRYGAGRRRKTWSKNCVALGLASGFVEPLESTSIHMIMIGVTRLMQLFPFGGVNDALIERYNRLAEDELEKIRDFIILHYKATERSDSPFWDYCRTMDIPDSLAQRIDLFRENAQVFQAPGELFQVDSWLQVLLGQRVEPRSHHHMGRMMPPDQLRQALDSLKGNIARAVEGMPSHQAFVDRYCAAGST

SEQ ID NO: 84269 - protein, 530 aa, Caulobacter rhizosphaerae
  misc_feature (1)..(530): tr|A0A561MRN8|A0A561MRN8_9CAUL Tryptophan halogenase OS =Caulobacter rhizosphaerae OX=2010972 GN=FHW61_11929 PE =4 SV=1
MSQTINDILIVGGGTAGWMTAAYLARRLGSTRPDGVRITLIESSEIGIIGVGEGTFPTIQNTMRTLGVDEARFMREAGAAFKQGIRFVDWKTAPRDGVHCHYYHPFAQPRLLNGGLDLAPYWLMGQAGDIPFSDAVTLQDKVCEAGRGPKRLDDPQYGGPMAYAYHFDAGKLAGLLRDVGKATGVRHVLGNVLAVNKAEDGSIASVTTREHGDLVADLYVDCTGFAGALIGEAMGSPWIDKGDTLFVDRALALQVPYDRPDAPVATTTISTAHEAGWTWDIGLPDRRGTGYVYSSRHTTDDRAEQVLRGYVGKAGEGLTPRLLKLKVGHRDRHWIGNCVAVGLSGGFLEPLESTGIVLIEAAAYMLARNLPRRGAMEAAARQFNAAMTDRYLRAIDFIKLHYCLSQRTDNRFWTDNADPASIPETLRDHLAMWKHRPPNVFDFPNLHESFKYFNYQYILYGMGFETTVDPAAHVHGDLARADFARVREAGLRAAASLPDHRALLTDVYARGFSTKAPDLATAEAGEAPRR

SEQ ID NO: 84270 - protein, 499 aa, Novosphingobium kunmingense
  misc_feature (1)..(499): tr|A0A2N0H6D3|A0A2N0H6D3_9SPHN Tryptophan halogenase OS =Novosphingobium kunmingense OX=1211806 GN=B0I00_2095 P E=4 SV=1
MTAASTRRIVIAGGGTAGWMAAAALANALGDAIDLTLVESDAIGTIGVGESTIPPIALFNRLLGINEAEFMRATQATFKLGIKFDNWKEVGSTYFHSFGATGKDHWTAGFQHFWLHGLTQGHKHSYDDYCLELKAALDGKFAHLPNDRMNYAYQLDSALYAAFLRRRAEGEGTKRVEGRIVSVELDGESGNIAALVLDRDRRIEGDLFIDCTGFRALLIEGALHAGFDDWTHWLPCDSAIALQTASVRPPVPYTRAIAHDSGWQWRIPLQHRQGNGIVYCSRYLTEDAALERLLGSVEGEVLTPPNRIRYTTGVRRRQWHRNCVAVGLSGGFMEPLESTSIHLIQRAVLRLIRMLPGGSISPRDVAEFNEQQFTDMEQIRDFLILHYTVTERRDSPFWRHCAALPRPDTLDQKIELFRETGRVFRKNEELFAENSWVQVMMGQGIVPQTYHPIATKLRAEELDGLLTMLRDGVAKTVAGLPGHQDYIARYCGTAQEAAA

SEQ ID NO: 84271 - protein, 503 aa, Brevundimonas sp.
  misc_feature (1)..(503): tr|A0A168N7L3|A0A168N7L3_9CAUL Tryptophan halogenase OS =Brevundimonas sp. GW460-12-10-14-LB2 OX=1827469 GN=A42 49_02000 PE=4 SV=1
MSDQPEPVRHIAIVGGGTAGWMAAAALGRAFTRAQGLALRITLIESESIGTVGVGEATIPPIRQFVQTIGLSEEDFIRSTAATAKLGIAFKDWIAPGSEYFHGFGDYGPTVAGQAWRQYLFRLKAAGRIDGLDPWSMPTAMARAGKFAPPVEDSRSVLSHYSYAYQFDAGLFARRLRTLAEKLGVVRREGRITGVDRDGETGLVRAVTLEDGGEVEADLFIDCSGFRGLLIEQTMQAGYEEWTHWLPCDRAVAVPCSSSLAPEPITTARAREAGWQWRIPLQHRVGNGYVYSSDHVDDQTALDDLLGQIESEPLAEPNRLRFVTGRRREAWKGNVVSLGLASGFVEPLESTSINLIQTGIGRLLEMFPDRSFDPALIREYNRRSAQEFERIRDFIILHYHLAGRAGAMWDRCRETAPPDTLMEKIELFHARGEVGLLEDESFREDSWAAVFTGLGTWPKQASPLVCLDDLETVDRQARQFAQLIARAAAALPDHSTTFTGYAR

SEQ ID NO: 84272 - protein, 510 aa, Sphingomonas sp.
  misc_feature (1)..(510): tr|A0A1I5BBC4|A0A1I5BBC4_9SPHN Tryptophan halogenase OS =Sphingomonas sp. OK281 OX=1881067 GN=SAMN05428984_0368 PE=4 SV=1
MTDGQLGRVTKVVIVGGGTAGWMTAAALSRLVPSGVSVTLVESEEIGTVGVGEATIPSLLDYNRMLGIDEDAFVRATGATFKLGIEFRDWARPGDSYLHPFGTHGRDVEGVSFHQLWLRQVALSNPDPGPIGDYCLSAVAARRGRFTRPSGNPQSILSSLFYAFHFDAALYATFLRDIAEQDGVVRVEGRVVAVDRDAETGFIQSVRLEGDRRIDGELFIDCSGFRSLLLGDALGVPFTSWKHWLPCDRAWAVPSARQGPLTPYTRATADTAGWRWRIPLQHRVGNGYVYSSAHIDDDDARRALLAGLEGQALGEPRQLRFEAGRRERLWDRNCVAIGLAGGFLEPLESTSIHLIQSGITRLMSLFPDMGFGATEIDAYNRVMLREYEQVRDFVILHYHATERSDSPFWDQCRTMSIPASLSAKLALWSGKARVFREQGELFTPDGWIAVLLGQGIRPSSIDPLAATLPPGESVRFMAHVRDMIDKTATAMPTHESFIAQHCASPLRQPA

SEQ ID NO: 84273 - protein, 538 aa, Burkholderia pseudomallei
  misc_feature (1)..(538): tr|A0A0E1VW49|A0A0E1VW49_BURPE Tryptophan halogenase Pr nA OS=Burkholderia pseudomallei 1710a OX=320371 GN=BURP S1710A_A2017 PE=4 SV=1
MSNPIQNIVIVGGGTAGWMAASYLVRALQQQANITLIESAAIPRIGVGEATIPSLQKVFFDFLGIPEREWMPQVNGAFKAAIKFVNWRKSPDRSRDDYFYHLFGSVPNCDGVPLTHYWLRKREQGFRQPMEYACYPQPEALDGKLAPCLPDGTRQMSHAWHFDAHLVADFLKRWAIERGVNRVVDEVVQVHLNERGYISSLSTQEGRTLEADLFIDCSGMRGLLINQALKEPFIDMSDYLLCDSAVASAVPNDDARVGVEPYTSAIAMNSGWTWKIPMLGRFGSGYVFSSKFTSRDEATADFLNLWGLSDKQPLNQIKFRVGRNRRAWVNNCVAIGLSSCFLEPLESTGIYFIYAALYQLVKHFPDTLFDPRLTDAFNAEIVYMFDDCRDFVQAHYFTTSREDTPFWRANRHDLRLSDAIKEKVQRYKAGLPLTTTSFDDSTYYETFDYEFKNFWLNGNYYCIFAGLGLLPDRSLPLLRHRSESIDKAETMFARIRREAERLRTSLPTNYDYLRSLREGDVGLSRSRPGPTLAAPEIL

SEQ ID NO: 84274 - protein, 480 aa, Burkholderia pseudomallei
  misc_feature (1)..(480): tr|A0A0E1VZY6|A0A0E1VZY6_BURPE Putative tryptophan halo genase OS=Burkholderia pseudomallei 1710a OX=320371 GN= BURPS1710A_2599 PE=4 SV=1
MHLPNRTQVLVIGGGPAGATGAAFLAREGVEVTLVDKEVFPRYHIGESLLPSCLEILTLMGARDTFDRHGFQRKPGAYFNWKGETWKLDFGELGGTYRYSYQVRREEFDHLLLQHARAVGAQVHEGVSVREILFDDGRPCAALCVAQGAEEATTVEFDYLVDASGRNGLMSTRYLDNRKFHEIFRNVAAWGYWEGLSWPDDCAPGSILVSSIPDGWWWAIPLADRPTSVGVVMHRDAFVAARRTGTLEQVYAQALALSPVMANLTEHARLVTPLKTEQDYSYTCDSFAGNGYFLSGDAACFLDPLLSTGVHLAMYSGMLAAASLASILRAEVTEREAAAYYRDSYRQAYLRFLVFVQTFYEAHGKLGYYSKADELSHYMIEAGDIRRAFLNLVSGLEDIADAEQATSHLMGEMSRRIDQNLALRKDKRALLSAIGSTQVEDNARFFDAIEGLPCLSANMALDGLYVSTRPRLGLQRVAAM

SEQ ID NO: 84275 - protein, 498 aa, Sphingomonas sp.
  misc_feature (1)..(498): tr|A0A0W1QKC3|A0A0W1QKC3_9SPHN Tryptophan halogenase OS =Sphingomonas sp. WG OX=1592629 GN=ATB93_12690 PE=4 SV= 1
MSEDRRIRSICIAGGGSAGWMTAAALANALGSSVAITLVESSAIGTVGVGEATIPPIRLFNRTLGIDEAEFVRRTRGSFKLGIEFVDWGRIGTRYFHPFGPFGRDFDLVPLHQYWLDARDKGGAPALDDLSMAWAAAKRGKFAPPLADPRSVGSTFDYAYHFDAGLYAALLRDYAEARGVARIDAEIAGADRDGERGDLTAVRLQDGRRIAADLFVDCSGFRGLLIEEVLGTGYIDWRHWLPCDRAVAVPCERGAFTPYTRSTARAAGWQWRIPLQHRTGNGHVHCSAFMGEDEATAILLANLDGAPLAEPRTLRFTTGHRQRFWSHNVVAIGLSSGFLEPLESTSLHLIQAGISKLLALFPTRDMDPLLIDEFNRISIAEFERIRDFLILHYKLTEREDSPLWRYCATMAVPDTLQWKIDHFRSTGRLVAREFDLFAAPSWLAVHIGQGNWPTGRDALLAARGIDGRAHLAKLADAMARAAETMPDHADYVAGLIGA

SEQ ID NO: 84276 - protein, 505 aa, Caulobacter rhizosphaerae
  misc_feature (1)..(505): tr|A0A561N6E9|A0A561N6E9_9CAUL Tryptophan halogenase OS =Caulobacter rhizosphaerae OX=2010972 GN=FHW61_10880 PE =4 SV=1
MTDRPADRAIRSIAIVGGGTAGWMAACLLSQTLRGADCAITLVESPDIGAVGVGEATIPPIFDFLKLIEVDLDAFIPATQATFKLGIRFDDWRAIGDSYWHPFGTFGVSIDRRPFQHVFHKARARGLNPTVPQFSLAAALGDAGRLAHPDPRAPGPLAGLRQALHFDAALVARFLRDHALRRGVRRLEREVAQVRLRGDGFIDALALKEGGELSADLYIDCSGFRGLLIEQALGAGYEDWTRWLPCDRALAAPTAHAGPPAPYTQATAQGAGWRWRIPLQHRVGNGYVYSSAFIDDGAAQDELLAAIGPPLAEPRKLSFTAGRRKTMWSRNCVALGLASGFLEPLESTSIHLVCSGLYKLLDHFPDRDFAPANIAAYNRALADEYETYRDFILLHYCVTARDDTPFWRERAAAPLPDRLAERLELYRACGRVDARPGELFTDLSWFYIFEGMGVLPRAYDPLVDASNFDQVRAILPELTARIDTVVAQSPSHEAALAAIVRRSAA

SEQ ID NO: 84277 - protein, 505 aa, Sphingomonas sp.; identical to SEQ ID NO: 83716
  misc_feature (1)..(505): tr|A0A0Q4JVZ1|A0A0Q4JVZ1_9SPHN Tryptophan halogenase OS =Sphingomonas sp. Leaf29 OX=1736212 GN=ASE81_17470 PE=4 SV=1

SEQ ID NO: 84278 - protein, 524 aa, Caulobacter rhizosphaerae
  misc_feature (1)..(524): tr|A0A561NLX4|A0A561NLX4_9CAUL Tryptophan halogenase OS =Caulobacter rhizosphaerae OX=2010972 GN=FHW61_104323 P E=4 SV=1
MSASASERASLRGQPIRRVVIVGGGTSGWMAAAALARMAPPDLSVTLIESDEIGTIGVGEATIPTLADFNAFLGIDEDDFVRQTQATFKLGIEFVDWDRIGERYLHPFGVHGHPTPEFKFHQLWLRLAHWAGDDPERRALVGDLGDYNVGAVAARLGRFSRPQAGAHNVLSTIRHAFHFDAGLYARYLRAYAEARRVVRLEGMVVGAQQGPRDGFIEAVRLGDGRVVEGDLFIDCSGLRGLLINGVLGAGFVDWSRYLPCDRAVAVPYERTAPPDPFTRATADLAGWRWRIPLQHRMGSGYVYCSDHLGDQAAADRVVSQAEGRLLADVRPLRFTAGHRERFWVKNCVAIGLAGGFLEPLESTSIHLAQMGVARLILLWPDLAFGQAEIDAYNTAARLEYEQARDFIMLHYKATRRVDTEFWRRCGAMRIPDSLAHKIALFASSGRVFRFQDDLFTEDSWLAVMLGQGVRPQGYDRLVDQIAHDELLANMGRLKDITLKAALSLPAHQIFIDTCCRGAAGIAQA

SEQ ID NO: 84279 - protein, 525 aa, Alteromonas australica; identical to SEQ ID NO: 83165
  misc_feature (1)..(525): tr|A0A350NZ17|A0A350NZ17_9ALTE Tryptophan halogenase OS =Alteromonas australica OX=589873 GN=DCW74_00940 PE=4 S V=1

SEQ ID NO: 84280 - protein, 496 aa, Thalassotalea sp.
  misc_feature (1)..(496): tr|A0A516H9R0|A0A516H9R0_9GAMM Tryptophan 7-halogenase OS=Thalassotalea sp. PS06 OX=2594005 GN=FNC98_03305 PE= 4 SV=1
MTDKKIQNVVIAGGGTAGWMAAAALTKLLGKTISVTLVESDEIPTVGVGEATIPTLHIFHRMLGINEAEVMAATNATFKLGISFENWRDVNKDYIHSFGFLGQDCWACGFHHFWLKGLQKGLVGDIGDYCPEHLASREGKFAVMANQDLNHAYHLDAGLYAKFLRNIAEQHGCQRVEGKIQDVVLNSDNGYIEKLHLANGKTVEGDLYLDCTGFRGLLIEQALHSGYDDWSHYLPCDSAIAVQTKSTERPVPYTRSIARDAGWQWRIPLQNRTGNGLVFCSKYMSDEEAKQTLLDNIDGELLNEPRVIKYKTGARRTHWKKNCIAVGLASGFIEPLESTGIHLFQKAIVRLMQLFPHHGIQQSDVDEYNAQTREEANNIRDFIILHYHLTDRRDTPFWRYCANMDIPESLQHRMKLFKESGRNFKKQDDLFGESSWVQVMLGQGLMPEQYHPIVDMMGDKELEAFLNKIKNGVRKKVDSWPDHNDFIQHYCRAANT

SEQ ID NO: 84281 - protein, 181 aa, Rhizobiales bacterium
  misc_feature (1)..(181): tr|A0A524KN89|A0A524KN89_9RHIZ Tryptophan 7-halogenase (Fragment) OS=Rhizobiales bacterium OX=1909294 GN=E4H18 _02790 PE=4 SV=1
MGRPLRSITIVGGGTAGWLAASFLNRFCKSKDAKHQLEITLIESPTIPIVGVGEASLPGMVVLLNQLGVSESEFFKLTDATFKVAAHFINWNHDDKGRPAEFLNILNAPGGIDGRQLADYFITFDPARAAPDAGLAYVRSFSSVAEMVRGNLAPRRPGEPEFSGEVGYTYHFDATKLATFL

SEQ ID NO: 84282 - protein, 508 aa, Colwellia sp.
  misc_feature (1)..(508): tr|A0A0S2JHM0|A0A0S2JHM0_9GAMM Tryptophan halogenase OS =Colwellia sp. MT41 OX=58049 GN=CMT41_12850 PE=4 SV=1
MQQEQAKQQNKINNIVIVGGGTAGWMTAATLAKILGKNYCAIRLIESDQIGSVSVGEATIPQISLFNKILGIDENDFVKKTSATFKLGIEFIDWTKNGGAYMHPFGEHGTNMDAIQFHHYWLKMHQQGKSPDLEEYSLAAVAARQGKFIRPQNMGNSPLSKINYAFHFDATLYADYLRDYAIERGVNRTEAKVVDVSLRDSDGFIDSLLLEDGERVTADLFIDCSGFKALLIEGALKTGFDDWSDVLPCNRAVAIPCLAKETEVLYPFTQAKAQKAGWIWRIPLQHRVGNGYVYPSKFVSDEAAVKILTAQMEGEPIGEPNFLRWTTGVRKKAWHKNCIAIGLSAGFVEPLESTGLHLIQSSIAKLMALFPHQGFNQIDIDTFNAQSKTELEYIRDFIVLHYKATDRDDSEFWRDCQKLQVSERLQAKMALYQANGRIYRQDNELFNETSWLAVMHGQGLRPSGYHPLVDALPEDEIERRLKHIHSVIQKSVATMPMQKDYIAKYCKA

SEQ ID NO: 84283 - protein, 503 aa, Brevundimonas sp.
  misc_feature (1)..(503): tr|A0A168N7K4|A0A168N7K4_9CAUL Tryptophan halogenase OS =Brevundimonas sp. GW460-12-10-14-LB2 OX=1827469 GN=A42 49_01995 PE=4 SV=1
MIPAPLKRILIVGGGTAGWMAAAALAHVTRGTVKIELVESEVIGTVGVGEATIPPILLFNQLLGIDENEFVRATQATYKLGIQFNDWFQKGRSYFHPFGTYGTRIDAASFHQYWLRLNKAGLDDDLDAYSVTTMAARMGRFTRPDTDPRGAGSQMTYAFHFDAGLYARFLRQRAESQGVVRHEGKIADVRLRDGDGFIQSVRLDDGRELEADFFIDCSGFRGLLIEGALKTGYEDWTHWLPADRAVAMPCTRVGDPTPYTQSTALEAGWRWRIPLQHRTGNGYVYCSPFISDDEAQAKLRASLDGEAMAEPNFLRFTTGRRKRTWNKNCLALGLASGFLEPLESTSIHLVQSGISKLLLHFPDTGFAQADIDNYNRMMRLETERIRDFIILHYHATARDDSPLWRHVRAMPIPETLKQKMDQFRSRGRIFRYEDELFQETSWIAVLLGQGVIPERHDPITETIPLEQVQQWLQKMKAMIQQGVARMPTHEAFIAANCKAPPLQ

SEQ ID NO: 84284 - protein, 508 aa, Thalassotalea sp.
  misc_feature (1)..(508): tr|A0A516HG95|A0A516HG95_9GAMM Tryptophan 7-halogenase OS=Thalassotalea sp. PS06 OX=2594005 GN=FNC98_16240 PE= 4 SV=1
MQTNSTAQTQANPSASPFNIVILGGGSAGWMTAAALANTLPSNHFNIRLVESEQIGTVSVGEATIPGIHDFNRFLNINEQELIKATNATFKLGIEFEGWTKGSKYVHPFGPYGLNKNGVPFHQMWLKAKLAGEDVAELVKYNMEGMAAQKNKFSPKLNIPNFPIEHLNYAFHLDAVAYAKYLRQYAEQRGVERIEGKFEQARLNSDGFIQSLTLTDGREIPGDFFIDCSGFKALLIEKTLHACYEDWRHWLPCDSAVAIQSKSQPQINSYTKAITHENGWRWQIPLQNRMGNGLVYSSRFMSADEAVEKLQSLVKEELITEPNHLRWVNGCRPEPWRKNCLAIGLSAGFIEPLESTGLQLIQSAIFRLLSLFPDKNFNQSNIDTYNRFANAEIKSIRDFVILHYKQTDNDHSPFWNYCRNMDVPDSLKNKMEMYQQNGNLFRENNELFSELNWLSVLNGQGMLPKTTHPLTQQFSNQEIMSELQQIENAYSRIVDSLPSHDEFLAMLA

SEQ ID NO: 84285 - protein, 516 aa, Sphingomonas sp.
  misc_feature (1)..(516): tr|A0A1I5BB86|A0A1I5BB86_9SPHN Tryptophan halogenase OS =Sphingomonas sp. OK281 OX=1881067 GN=SAMN05428984_0367 PE=4 SV=1
MTKRILIVGGGTAGWLTAGYLAKRLGADLPGGVAITLVESRDIGILGVGEGTFPTIRRTLATIGIDEADLIRRCGATFKQGAKFVHWRHAPGQGATDHYSHPFQVADSSDGLDLLPYWLLGLGGTENWDEVSNPQKKAADQHRAPKLPTNPDYVGPLNYAFHFDAVALAGLLREQGVKNGVRHLTDTVSEVLLDADGAIGGVRTERNGTLDADLYIDCTGFRAELIGKAMKIPFRSCRDVLFCNRAIAAQLPYTRPDEPIASYTISTAQEAGWIWDIGLDRRRGIGHVYSSDHSDDEAAERVLRGYLGAAGEKADVRHFKFDAGYREVNWYKNCVAVGLSSGFFEPLEATGIAFAEVSAGMIANLFPWGGDYATSARQFNANMLRRYERALDFIKLHYCISERRDTAFWRDNVADASVPDRLLEMLDRWRFRPPNELDIDGQVDIFTEASWQYVLYGMGWKTDLSAKAGALRYGEDARRAFAEVQRQAAYAIANLPSNRDLVDYAQTHSFGARAAA

SEQ ID NO: 84286 - protein, 538 aa, Burkholderia seminalis
  misc_feature (1)..(538): tr|A0A103KBW1|A0A103KBW1_9BURK Tryptophan halogenase OS =Burkholderia seminalis OX=488731 GN=WJ13_00155 PE=4 SV =1
MSNPIRNIVIVGGGTAGWMSASYLVRALQQQANITLVESAAIPRIGVGEATIPSLQKVFFDFLGIPEREWMPQVNGAFKSAIRFVNWRKSPDRAPGDHFYHLFGNVPNCDGVPLTHYWLRKREQGFQQPMAYACYPQTEALDAKLAPCLADGTRQMSHAWHFDAHLVADFLKRWAVERGVKRVVDEVEQVHLDDRGYISSLSTKEGRTLEADLFIDCSGMRGLLINQALKEPFIDMSDYLLCDSAVASAVPADDARVGIEPYTSAIAMNSGWTWKIPMLGRFGSGYVFSSKFTSRDQATADFLDLWGLSDEQPLNQIKFRVGRNRRAWVNNCVSIGLSSCFLEPLESTGIYFIYAALYQLVKHFPDTSFDPRLTDAFNAEIVYMFDDCRDFVQAHYFTTSRDDTPFWRANRHDLRLSDAIQEKVERYKAGLPLTTASFDDSTYYDTFDYEFKNFWLNGNYYCIFAGLGLLPDRSLPLLRHRPESIDKAEAMFARIRREAERLRKSLPTNHDYLRSLREGHAGLSRSQPGPTLAAPEIL

SEQ ID NO: 84287 - protein, 532 aa, Sphingomonas sp.
  misc_feature (1)..(532): tr|A0A1I5GS71|A0A1I5GS71_9SPHN Tryptophan halogenase OS =Sphingomonas sp. OK281 OX=1881067 GN=SAMN05428984_3822 PE=4 SV=1
MSMAGRLTPPRICPGVAAPDGFEAGTQTMANHPLRIVIAGGGTAGWMAAATFARFLETGYEIDLIESDEIGTVGVGEATIPQIHLFNDALGLDEDAFLRATGGTFKLGIEFVDWFKPGHRYMHAFGDVGRDVGLLPFHQYWLRARSLGLAGDLGAYSLNTHAALAERMQRGPARTARTLPSMPYAYHFDAALYARYLRRYSETRGVNRIEGKIVRVTRDGESGDVSGLVLENGTTVAADLYVDCTGFRGLLIEEALGTGYEDWTHWLPCDRAIAVPSARSEAFTPYTRSTAHAAGWQWRIPLQHRTGNGVVFSSAHLSEDEATATLLAGLDTPAMADPRTIPFRTGRRKQMWNRNVVALGLAAGFMEPLESTSIHLIQSAISRLLKLLPGRVIAEADRTEFNRQSDFEYERIRDFIILHYKATARDDTPFWRQCRDMAIPDTLAAKIDLWRGNGHIVREHEELFTEVGWLQVLAGQGIMPAGHHPLADAISTSDLGEFMDTIDKLNAREAGQMQDHAAFVAQHCASPAGLGA

SEQ ID NO: 84288 - protein, 502 aa, Pseudoalteromonas rubra
  misc_feature (1)..(502): tr|A0A0F4QRF8|A0A0F4QRF8_9GAMM Tryptophan halogenase OS =Pseudoalteromonas rubra OX=43658 GN=TW77_08620 PE=4 SV =1
MNKKRIVILGGGTAGWMAANLMAKSWQDQPIEIALVESPDIGIIGVGEGSTPQFKGFMDFMGISEAQWMPACNATYKNGIRFVDWSTRPGFSSYFHPFPSQPDDYSAPAFFHNSFVRRKAIDVAGHPDPFFLTTYLAEQAKAPIAAHHFPFEINYGYHFDAGKLGLFLAQTARDLGVEHIQANVSDVRKHPDGDIAALICEAGMEVTGDVFIDCSGFRSLLMQQHLEVGFDSFANNLFNDAAVVLPTEQGEVISSETQSIARKFGWSWHIPLTNRIGNGYVYSRRYCDPDKAETELRTALGLLDSEVEARHLTMKVGQVKKHWHKNCLAIGLSQGFIEPLEATALHIVQETVQSFIECYQDGEFTDKLKTRHNQSLDARYQAIRDYIVAHYRVNSRTDTQYWRDNANNNQLSRSLYDVLQTWVSGKNLSDELHRQDIDKYYPSVSWHCLLAGYGIYPEQSQLIAGNEEANKYDLSQVQDYIARCGLNFENHRAQLERLARMR

SEQ ID NO: 84289 - protein, 513 aa, Sphingomonas sp.
  misc_feature (1)..(513): tr|A0A0T0PZP0|A0A0T0PZP0_9SPHN Tryptophan halogenase OS =Sphingomonas sp. Leaf412 OX=1736370 GN=ASG29_03610 PE= 4 SV=1
MVRPGGTGGRRLNESTGRIRRIVILGGGTAGWMTAAALSASFGRTPSITLLESEEIGTVGVGEATIPTIHWFNELVGLDEADFLRATKATFKLGIEFVGWRRPGHRYFHPFGRYGATLPGVAFHHRWLKARADGLDLPLSDLSLATRLAAENRFAKPQGEARSILSTLGYAYHFDAGLYARHLRTRAEERGVTRVEGKLRDVERGDDGRVTALVTERGERLEGDLFVDCSGFRALLIGGAMGSRFEDWSHWLPCDRAVAVPSARVGETTPYTRSTVRSAGWQWRIPLQHRTGNGYVYCSRHCSDDEAAATLLANLDGAALAEPRHLRFTAGTRRAPWVGNVVAIGLSSGFLEPLESTSIHLIQSGIAKLLTLFPDADMDPALAARFNALFSADMDGIKDFLILHYHATQGHDDPLWRECRAMPLPDTLLAREAQYRRSGRIILDADDLFREASWLAVLNGQGIEATDYNPLADALDPATNIAQVRQVADVIARAAPTLPRHDDALAAILGHPV

SEQ ID NO: 84290 - protein, 525 aa, Alteromonas australica
  misc_feature (1)..(525): tr|A0A358E3A6|A0A358E3A6_9ALTE Tryptophan halogenase OS =Alteromonas australica OX=589873 GN=DEB45_16680 PE=4 S V=1
MMSEVNRIVIVGGGTAGWLTAGLLAATHSGADNNGQRLSVTVIESDAVPPIGVGEGTWPTMRRTLATIGISEAELVTQASATFKQASKFVNWYSDNGRNQDNSYYHPFSAPQGSATLDITPYWLTTAQTHSHYAQDVCFQPALCDAGLAPKLTANGKQSFTANYGYHLDAGQFISLLRRHCVNRLGVTHLVDKVTQVNTQADSPEAGIVSLQTQQSGKIEGDLFVDCSGFSGLLINKALGVKLKDASHHLFANSALVCQAPFENETAPIPCHTLSTAQEAGWIWDIGLQHRRGTGYVFSREHQDVDRAADTLSRYLSQVAPSMATPDAFREIQFKTGYRETFWHNNCVAIGLSSGFLEPLEASSLMLIEQSAMLLAEQLPANTTIMSKVSQRFNSRLTYLWERTIEFLKLHYVLSNRPEAFWQDNKQRGSIPERLADLLEEWRYRPILDSDFPQANEAFSAQSYRYILYGMGPKTDFNWDMSTTERSLKHHNFATKQGQLNQTLIGQLKERLPSHRGLVESFFQS

SEQ ID NO: 84291 - protein, 513 aa, Sphingomonas sp.
  misc_feature (1)..(513): tr|A0A1I5C254|A0A1I5C254_9SPHN Tryptophan halogenase OS =Sphingomonas sp. OK281 OX=1881067 GN=SAMN05428984_0908 PE=4 SV=1
MHEIQNIVIVGGGTAGWLTAGVIAAKHQGRRPHGFTVTLVESPNVPTIGVGEGTWPTLRTTLKRMGVSETEFFRHCSASFKQGARFNRWTTGAVDDGYYHPLMLPEQFGQVNLAPHWLAEGGDDSFCDTVTPQGRLCDAGRGPKTMTTPEYDGQANYAYHLDAGKFSHFLQRHCCEALGVRHVLADVNEVHLDEGGDIARLDTAQGITIAGDLFVDCTGFAALLIGKAMGVPFRSCSDVLFCDTALAIQVPYDLPDDPIASHTISTAQSAGWIWDIGLPTRRGVGHVFSSSHISVDEAEGELRAYIGPAARDLSVRKLSIRAGHRETFWVRNCVAVGLAAGFLEPLEASAIVLIELSAKMIAEQMPPRREVMDVVARRFNETTTYRWGRIIDFLKLHYALTKRTDTDFWRDNVRPESIPDRLRELMELWLYQSPWLHEEFDRAEEVFPSASYQYVLYGMGARTAIMPGAIEADDALARRARYENQVQTQRLVGSLPGHRDLIDRIVRHGLQPI

SEQ ID NO: 84292 - protein, 509 aa, Alteromonas australica
  misc_feature (1)..(509): tr|A0A350P1N2|A0A350P1N2_9ALTE Tryptophan halogenase OS =Alteromonas australica OX=589873 GN=DCW74_05615 PE=4 S V=1
MQNPKKNPIKRVVIAGGGTAGWLTASLMKKVLGEAVNITLVESEVIGTVGVGEATIPPIRLVNQVLGIDEAQFLYETKATIKLAIKFENWKTKGQSYYHTFGAPGKAMAFCHFHHYWLKGQQLGKTQDLWDYDLNYHAAEAGKFAPINAKDPLLELPFAYHFDASLYAKYLRKLSESMGVVRIEGKIGSVERDNVNGYIKALRLDNKNRIEGDLFIDCTGFKGLLIQETLGTGYDDWSHLLPCDSAIAVPSERHESTRPFTRSIAHDADWQWRIPLQHRNGNGHVFCSRYVSEDHALDTLMGNLDTKPLADPKLIKFTTGRRRKQWNKNVVSVGLSSGFLEPLESTSIHLIQSAIVRLIQLFPHNGITPSLEAEYNKQSALEFEQIRDFLILHYSVNERTDSAFFNDMRNLDLPDTLRHKIALFKENGSLFRDQNDLFLESSWLQVMYGQGITPNDYHGLVNTFSDEKLKEMLTRLLKIKREPLSQLPSHDEYLNGMVKRAKQNMSANA

SEQ ID NO: 84293 - protein, 526 aa, Sphingomonas sp.; identical to SEQ ID NO: 83715
  misc_feature (1)..(526): tr|A0A0Q4J995|A0A0Q4J995_9SPHN Tryptophan halogenase OS =Sphingomonas sp. Leaf29 OX=1736212 GN=ASE81_12825 PE=4 SV=1

SEQ ID NO: 84294 - protein, 534 aa, Sphingomonas sp.
  misc_feature (1)..(534): tr|A0A1I5GZ97|A0A1I5GZ97_9SPHN Tryptophan halogenase OS =Sphingomonas sp. OK281 OX=1881067 GN=SAMN05428984_4023 PE=4 SV=1
MRAYVQDEELIVTDGAELTRGRGPLRSIVIVGGGTAGWMAATLLARRLDRQSVTITVVESSDIRTVGVGEATVPGIRDFFREIGVTEQEVMAATQGTVKLGIEFVDWKREGERFFHPFGLYGMRSRGVAFHQYWRKMNAAGHPTPLSDFCLATALAERNLFMPPTDSPVHDLLFFDWAVHFDAGLFARFLAKKAAEWGVRQVDATITDVRVDPATGFVAGVDTQCGKPIDGDLFIDCSGFRSLLLGDALGVPYEDWTSLLPCDRAVAMPCERAGPLSPYTRSTALAAGWQWRIPLQHRVGNGYVYASRNISDDEAVATLKGRLESEALAEPNMIRFRTGRRAAFWKGNCVALGLAAGFMEPLESTSITLIQTGIEKLLALLPDRGFDPALAEEYNRTTGLEYVRIRDFLILHYFANDRQDQPMWDRCRDTALPEGLAHKLRLFKARGHLVRYEWESFQDPSWLSMYAGFGIDAAAHDPLADHFSVSDLEAAFERMKGSIRDAVALAEPHETFLKSFAPATALPAFQAMSLAANG

SEQ ID NO: 84295 - protein, 509 aa, Alteromonas australica
  misc_feature (1)..(509): tr|A0A358DX34|A0A358DX34_9ALTE Tryptophan halogenase OS =Alteromonas australica OX=589873 GN=DEB45_06320 PE=4 S V=1
MQNPKKNPIKRVVIAGGGTAGWLTASLMKKVLGEAVNITLVESEVIGTVGVGEATIPPIRLVNQVLGIDEAQFLYETKATIKLAIKFENWKTKGQSYYHTFGAPGKAMAFCHFHHYWLKGQQLGKTQDLWDYDLNYHAAEAGKFAPINAKDPLLELPFAYHFDASLYAKYLRKLSESMGVVRIEGKIGSVERDNVNGYIKALRLDNKNRIEGDLFIDCTGFKGLLIQETLGTGYDDWSHLLPCDSAIAVPSERHESTRPFTRSIAHDAGWQWRIPLQHRNGNGHVFCSRYVSEDHALDTLMGNLDTKPLADPKLIKFTTGRRRKQWNKNVVSVGLSSGFLEPLESTSIHLIQSAIVRLIQLFPHNGITPSLEAEYNKQSALEFEQIRDFLILHYSVNERTDSAFFNDMRNLDLPDTLRHKIALFKENGSLFRDQNDLFLESSWLQVMYGQGITPNDYHGLVNTFSDEKLKEMLTRLLKIKREPLSQLPSHDEYLNGMVKRAKQNMSANA

SEQ ID NO: 84296 - protein, 503 aa, Sphingomonas sp.
  misc_feature (1)..(503): tr|A0A0W1QJL3|A0A0W1QJL3_9SPHN Tryptophan halogenase OS =Sphingomonas sp. WG OX=1592629 GN=ATB93_13410 PE=4 SV= 1
MASTAPYRIVVAGGGTAGWMAAAALVRFLGAGFTVSLVESDAIGTVGVGEATIPQIRMFNASLGIDEDAFVAATQASYKLAIEFVGWTKSGRYMHAFGEVGRDNGLLAFRHTWLRGMAEGVAEPLAAYALNNVAALGNRMQRGPARTARVLPEMPYAFHFDAGLYARFLRDYAEARGVVRHEGRIEAVARAGEDGNLQALHLDGDRRIEGDLFLDCTGFHARLIGEAMGVGYRDWSHWLPCDRALAVPSARARDFTPYTRATAHGAGWQWRIPLQHRTGNGIVYSSRHLSDDAAAAALLAGLDEPALADPRPLRFTAGRREQCWAGNVIALGLASGFLEPLESTSIHLIQSAIERVLTLLPGARAIAPLRNRYNRQAAQEMERIRDFLTLHYWANDRDEPFWRERREAPLPDGLAEKIALWRASGEIDREDGDLFSDVAWLQVLAGQGIAAEGHHPLADAPPAAQIAEYLDLIAKLNAREAAQMAPHSEFVRAHGAADAEIAA

SEQ ID NO: 84297 - protein, 508 aa, Sphingomonas sp.; identical to SEQ ID NO: 83448
  misc_feature (1)..(508): tr|A0A0Q4J3S4|A0A0Q4J3S4_9SPHN Tryptophan halogenase OS =Sphingomonas sp. Leaf29 OX=1736212 GN=ASE81_14710 PE=4 SV=1

SEQ ID NO: 84298 - protein, 503 aa, Alishewanella aestuarii
  misc_feature (1)..(503): tr|J1QM61|J1QM61_9ALTE Tryptophan halogenase OS=Alishew anella aestuarii B11 OX=1197174 GN=AEST_02470 PE=4 SV=1
MKNTALNQVRRVLIVGGGTAGWMTAAMLARILGEQILLQLVESDSIGTVGVGEATIPAIQHFNAALGINEAEFLRETKGSIKLGIQFENWGRQGDSYMHAFGPVGRQLGMASFHHFWLAAKARGDQSSFWDYSLNYQAAKAGKFNPQSQLPGSPLPGLQYAYHFDAGLYAAFLRRYSEQRGVTRVEGLIAHVEQQPSGDIATVVLTDGRVLAADLFIDCSGLRALLIEQTLAAGYDNWQHWLPCDSALAVPSEARYPIVPFTRSIAHGGGWQWRIPLQHRTGNGLVYSSRFLDDEQAKQTLLTNLDAPALAEPRKISFVTGRRKQQWRHNCVAVGLSSGFLEPLESTSIHLIQSAVVRLVQCFPATRDMVALSAEFNRQSQLEFEAIRDFIILHYHLNQRTDHPLWQYCREMDLPDTLAQRLDLFRQSGQVFRQQDELFTEVAWQQVMLGQNTYPISHHPLAEGLTATQLSGYLSDLQQVVSKTVMALPTHQAYLQNLVGNLS

SEQ ID NO: 84299 - protein, 513 aa, Ideonella sp.
  misc_feature (1)..(513): tr|A0A523Q8W9|A0A523Q8W9_9BURK Tryptophan halogenase OS =Ideonella sp. MAG2 OX=2083017 GN=C4K60_05990 PE=4 SV=1
MSTRLNRLVVVGGGSAGWLVAAIVAAAHQPHHARPLSVLLVESAAVPIIGVGEGTWPSMRDTLRAIGLPEDELFTACDAAFKQGSRFDGWVNGQADDSYQHPFSLPEGFGELDLVTAWAQHHAGQSFAELVCPQAQLGPAGRAPKQVQTPQYAAVANYGYHFDATQFGQVLKRHCLERLGVQHLIADVVGLHRDEQGHILSLRTAEHGEVRGDLFVDCTGMASLLLGQYMQVGIVSQQPVLFNDRAWATQVPYPAADSPIATHTVATAQAAGWVWDIGLQSRRGVGYVYSSAHSSDAQAEDTLARYLQATGSPAGNTPRQIRFEPGYRERFWQHNCVAIGLSSGFMEPLEASALAMVEMAASLLSETCPATREDMPVVAARFNEAMRYKWERVVEFLKLHYVLSQRQDSAYWLEHRQAASVPERLAEQLLMWRHRPPSRHDLGRVDEVFPAASYQYILYGMGQRPALGHPQPLSAEVRQALQRCQQLGQRMVAALPSPRELLQHIVRHGQHRI

SEQ ID NO: 84300 - protein, 378 aa, Corallococcus exiguus
  misc_feature (1)..(378): tr|A0A5C5DLT0|A0A5C5DLT0_9DELT Tryptophan halogenase OS =Corallococcus exiguus OX=83462 GN=FH620_31580 PE=4 SV= 1
MDTLRYDVAVLGGGPAGAALALALCRHSGLRVVLFERSTYAHSHLGETLPPDSRRLLARLGVWEAFARQGHLRSMGSCSRWGDSALGDNDHLRSPWGTGWHLDRSRFDRMLADEALRFGVDVRIGSAVTDWTPLETGGHRLFVPTEGDAPRDFVDARFVVDATGRSAVFATSQGARRHTVDRTSGLCGTFALQPGRAVDALTLVESCEDGWWYSARMPGDQVVFGLMGDKDSLQGLMPEDAEAWRARMERAPETRRRLEACVFTGEPLRAVSANVACLDRLHGEDWLAVGDAACMLDPLSSQGTSHALRTANQAADVVSRYLRGDSAALRLHEVRTRHEFQEHLRIREGYYRLERRWPGAPYWRNRQQSCAPVLSSPP

SEQ ID NO: 84301 - protein, 507 aa, Sphingomonas elodea
  misc_feature (1)..(507): tr|A0A495F2W8|A0A495F2W8_SPHEL Tryptophan halogenase OS =Sphingomonas elodea OX=179878 GN=C8E52_2437 PE=4 SV=1
MRAAGQPIRSILIVGGGTAGWMAAALLERLLDRQPVTITLLESPDIRTVGVGEATVPAIRDYFRAIGVSEAEVLREAKGTAKLGIEFRDWARPGDSFFHPFGLYGIASRGVGFHHYWLKRRAGGDQTPLADYCLATQMALRGLVMPPAENPPNDLGIFDWAVHFDAGLFARFLARVATGRGVRHVEGTVAAVEQDGESGFLTGVTLQDGSRIEADLFLDCTGFRSLLLGGTLGVPYVDWSHLLPCDRAVAMPCTHGDAFTPYTRSTALAAGWQWRIPLQHRVGNGYVYASAHLSDDEAQAVLRGGLEGQALAEPNFLRFTTGHRARVWEKNVIALGLSAGFLEPLESTSLTLIQSGVERLGNLMPDRGFAPELADEFNRITALEYARVRDFLLLHYWANGRVGEPLWDACRSLALPEELAYKVALFRSRGVFARYEWESFRDPSWLSMYAGFDLLPDRYDPLADHFTDGELEGAFARMREAIGRAMSLAQPHRDFLRDIGGLAGEGV

SEQ ID NO: 84302 - protein, 548 aa, Pleionea mediterranea
  misc_feature (1)..(548): tr|A0A316FG22|A0A316FG22_9GAMM Tryptophan halogenase OS =Pleionea mediterranea OX=523701 GN=C8D97_111124 PE=4 S V=1
MSNQLTEQVVIVGGGTAGWLTAAKLAKHLHTSQPANSSQPKAVQVTLIESPDIPTIGVGEGTWPTMRKTLMDLGINESEFMAYCQATFKQGTQFIHWRQEPLASQSENSFDNTLNNTFDNSFDNSNQYFHMFSSALDPADFNLSPYWLAGVAGNDMPFADAVSAQASVCRNGLAPKKIIQRQYDGALNYAYHLDAGKFANFLMTFATEKLGVKLVRANVVSVNQNEQGDIASVVLDSSETIAGDLFVDCSGFKSLLLGEALGVEFVSVDNTLLTDSAVAIQVPYDNEQEAIACHTKSTAQNAGWVWDIGLYNRRGTGFVYSSNHISDDEAEQCLRDYLGERSNKAITQLSAKKLSMNVGYRKQHWHRNCVAIGLSAAFVEPLEASAIFLIEAAGNMLVDMFPADRAAMDYCSRRFNDSLLKRWRKTIDFIKLHYLLSQRQTSFWKDNRMDSTIPESLKERVEHWRFNPVSKYDFDNVFEPFPQESYHYVLYGMGLRHIDSDNNRVPGDLNYAQQSFQEIQKFTEHLLKTLPDHRALLTKVYQYGFQAV

SEQ ID NO: 84303 - protein, 520 aa, Duganella sp.
  misc_feature (1)..(520): tr|A0A3D9KFG9|A0A3D9KFG9_9BURK Tryptophan halogenase OS =Duganella sp. GV023 OX=2135490 GN=C7506_105507 PE=4 SV =1
MSSNDVHGGPIRRIVIVGGGTAGWMTAAPLAQRLLRHPTQPCAVTLVESPEIGTIGVGEATLPTIRAYNAALGLDADDFIAKTQASYKLGIEFKDWGHIGNRFFHPFGDFGPPLAGIGAHQHWLRLAQAFNSMPDIENWSVASVMARHGKFTPPNEQTPGMTDAYSYGFHFDASLYAAYLRDYAVTRGVERVEGMIVDVEQHPESGFVTAVKLADGRRLEGDLFIDCSGFRGLLIEGALKAGYEDWSEYLPCNSAQAVPCASVEQLTPYTRSTAKEAGWLWRIPLQHRTGNGYVYSNGFTSDARARQVLLDGLDGAALDEPRQLRFVTGRRRQSWVKNVVAIGLSAGFIEPLESTSINLIETAVGKLVELFPERDCSPALANEFNRVMGGRYESVRDFIVLHYKLTKRNDSDFWRYCADMAIPDSLRHQIELFRETGRVAILDRAGFAEPSFVAMMMGLGAMPKRHDPLAERVDIRAVHGHFAELRDLITQAVARMPDHGAYVAGQAAASAASNHKLREA

SEQ ID NO: 84304 - protein, 501 aa, Novosphingobium kunmingense
  misc_feature (1)..(501): tr|A0A2N0H3H9|A0A2N0H3H9_9SPHN Tryptophan halogenase OS =Novosphingobium kunmingense OX=1211806 GN=B0I00_3280 P E=4 SV=1
MTRKDNSIRSIVIVGGGTAGWMAAAALANAIRTGCTITLVESDEIGTVGVGEATIPPIRTFNEALGIDENEFVAATQGSFKLGIQFVNWGKLDHSYFHPFGTYGRNFDFLPLHQYWLAARASGDAPGLDDLCMAWAAAQRGKFCQPSHDQRSVLSTFDYAYHFDAGLYARYLRGYAEARGVTRLEGKVGDVTLDGGSGHVSCVTMQDGRRVEGDLFIDCSGFRGLLIEGALKTGYQDWRHWLPCDSAMAVPCERSGEFTPYTRSIARDAGWQWRIPLQHRIGNGHVYCSSFIQDQAAADVLMANLDGKALADPRKLSFVTGRRNLFWNRNVVAVGLSGGFMEPLESTSIHLIQAAISKLIAFFPDRSFDPLVIEEYNRIAINEFERIRDFIILHYKLTSRTDSELWRYCSAMEVPDTVTWKIEHFRRSGRLMQRDADLFGPPSWLAVHIGQGNQPESADPLLALRGIDHADHLRKLEGALARAAETMPSHADYIAQNCSAS

SEQ ID NO: 84305 - protein, 483 aa, Sphingomonas sp.; identical to SEQ ID NO: 83439
  misc_feature (1)..(483): tr|A0A0Q4JK88|A0A0Q4JK88_9SPHN Tryptophan halogenase OS =Sphingomonas sp. Leaf29 OX=1736212 GN=ASE81_12830 PE=4 SV=1

SEQ ID NO: 84306 - protein, 505 aa, Sphingomonas sp.; identical to SEQ ID NO: 83486
  misc_feature (1)..(505): tr|A0A0Q4JG05|A0A0Q4JG05_9SPHN Tryptophan halogenase OS =Sphingomonas sp. Leaf29 OX=1736212 GN=ASE81_12840 PE=4 SV=1

SEQ ID NO: 84307 - protein, 572 aa, Sneathiella sp.
  misc_feature (1)..(572): tr|A0A2G1YYV2|A0A2G1YYV2_9PROT Tryptophan halogenase OS =Sneathiella sp. OX=1964365 GN=COB93_10055 PE=4 SV=1
MGEQISEITIVGGGTAGWLTAAFLIRFMNLRDEETPTKITLIESPNIPTIGVGEATVPTMVSLLASLGISEKEFFKRCNTTFKLGVRFSNWHHDENGQGKSFYHPFETVFSQLAGQNPSYHFHKYGGPPGRPQIDEAFSVCVAAIRNKLAPKGLEHGDYEKHLNYAYHLDAGRFAEFLREISIERGVNHILDDVEEIEQDERGFITALNLQRQGRRPVELVIDCTGFKSVLLNKTLKVPFEDYSKYLLNNRALAVQVPHRDVENIEPCTTSTALGAGWSWRVPLYNRIGTGYVFSTHFRTDEEAMDEFLEHLGEDGIGAEPRAIPVNIGRMERAWEKNCIAIGLSAGFIEPLESTAIYMIDNSVKLLLLNFPDKDFAPSLAKRFNDTTEEMMVDIRDFIILHYCVNNRNDSEYWRVAREEMTVPDSLQTRLEEFKYPLPTTTEFDSTFLFNNVNYTLILSARGYFDGIKYPAERFIARSDWDARARDFDNYEKRLLAKLPNHYQLLRKFRGEEPEPLQGSGVTFGGFNGPMFGSGQASVQPTVQYGTPSLKPSIKFAKKEEEKLDLSESNIL

SEQ ID NO: 84308 - protein, 533 aa, Pleionea mediterranea
  misc_feature (1)..(533): tr|A0A316GHX0|A0A316GHX0_9GAMM Tryptophan halogenase OS =Pleionea mediterranea OX=523701 GN=C8D97_101225 PE=4 S V=1
MGKRFNRLVIVGGGSAGWMTAALLAKVTAGQYHITVIESEAIGTVGVGEATIPPIQLFNQLLGIDEAKFIKQTQATIKLGIQFENWNKNGDCYMHAFGNIGRDLGFTHFHHYWLRAHKKGISNNFWDYSFNYQAAKRNLFSKMDRIPNSPLQGLVYAYHFDAALYAKFLRQLSEANGVKRIEGKVCDVTQDSESGYIDALNLESGETIKGDLFIDCSGFKGLLIEQVLNTGYENWSDWLFCDRAVAVPSEKTSPVTPYTRAIAHNEGWQWRIPLQHRTGNGLVFSSDYLSTDEACHRLLTHLDGDALAAPKVIPFTTGRRKKQWNKNVVAIGLSSGFLEPLESTSLHLIQQGITRLIKHLPSNGICNAEVDEYNRQSQYEFEKIRDFIILHYHLNEKTHLNKKSHLNKRSHLNEKSHLNEKLHLNQKNSVNSHQTNQSIWQKSRHMPIPQSLKQKIELFKHTGKLFREQDELFSEVAWHQVLMGQGVVPGSYHPLANMISDEQLSEFLKNLKVIISSGLDKLSSHKMFLDSFD

SEQ ID NO: 84309 - protein, 422 aa, Rhizobiales bacterium
  misc_feature (1)..(422): tr|A0A4Q3H5V0|A0A4Q3H5V0_9RHIZ Tryptophan 7-halogenase (Fragment) OS=Rhizobiales bacterium OX=1909294 GN=EOP20 _11280 PE=4 SV=1
DFRISVVESSRIPTVGVGEATTAAFRVLLKHFGIDEFEFFRKTDASFKLGIRHEDWRRKGFTYYGPIDDPHQVVQAPPGAPSDYLNVYAVAAGRAVQEMHMFQPLLEQKKAPYALKADGSLIPLGPFHHAYHFDQALVGKFFASKAKGVEKVDALVAGVERDGESGDIRALVLDDNSRLEGDFFIDATGFRKQIIVKALEAPWKSYAHELPVNRALPFWIDVKDGEELPNYTRAWAQSSGWMWQIPTRTRFGCGYVYSDEFSTPEQAKEEVERVLGHEIEVRSDIRFQIGRLEKAWIGNCVAVGLSSSFLEPLESTSIHGTIVQMMLFAQRYMDVPSKISQKAKDDYNERVGRQVDDFRTFVNTHYMTERDDTPFWREVRANRIHPETKERLARWKHEMPRNEHFPNYLGGLPHIETQLHYP

SEQ ID NO: 84310 - protein, 514 aa, Novosphingobium kunmingense
  misc_feature (1)..(514): tr|A0A2N0H6E6|A0A2N0H6E6_9SPHN Tryptophan halogenase OS =Novosphingobium kunmingense OX=1211806 GN=B0I00_2098 P E=4 SV=1
MSKGSIQRVVIVGGGTAGWLSASYLAARRPDLAITLIEAPNIPTIGVGEGTWPTMRETLATIGISEAEFLVTCDASFKQGSRFDGWVTGDPGDSYLHPFTLPAGGDMADLLRAWQAGPSGGSFAAAVTPQAAVCAADLAPRQRAMPDYAGTMNYAYHLDAGRFAALLARHAVQRLGVRHIRAEVMGTEPAPNGDIAALRLADGDSIAADLFIDCSGQAARLIEGHFASAWVDRSDVSFNDRALAVQVPVAPDSPIASVTVGTAHQAGWLWDIGLPTRRGIGCVYASRFMADDEADAVLRGYVAAQLPGADLDALNPRRLSFRTGHRQRFWQGNCVAIGLSAGFIEPLEASAIVLIELSLRALADDFPASRSVMDIQARRFDALFRERWERIVEFLKLHYLLSHRTEPYWLAHRDAATVPARLAENLALWRNRPPSWRDFSQAEEIFPAASQQYVLYGMRFALPDSSGLMPSAAVQARLAEVRERARSLAAALPSNRTYFTAAAAASTAPAARTA

SEQ ID NO: 84311 - protein, 494 aa, Colwellia sp.
  misc_feature (1)..(494): tr|A0A0S2JHP7|A0A0S2JHP7_9GAMM Tryptophan halogenase OS =Colwellia sp. MT41 OX=58049 GN=CMT41_12890 PE=4 SV=1
MNNHKITKIVIAGGGTAGWMAAASLSKLLGKSFDITLVESDEIGTVGVGEAAIPTLTAFHRLLGINEQAFMKATHATFKLGISFENWKKGDDEYMHGFGRVGKECWAGEFQHFWLHGKQNNIDFGFEHYSPEIQAAKAEKFALAKGGLNYSYHLDASLYAKFLRTFAEAHGVKRIEGKIIDVAKDSKTGDIKSLQLANGNVIEGQLFIDCTGFVGLLIEKALHTGYEDWSHWLPCDSAVAVQTKSVSAPLPYTRSIARESGWQWRIPLQHRVGNGLVFCSKYLADDDAKTLLMNNIEGEPIKQPRVIKFKTGRRRKGWNKNCVALGLSSGFLEPLESTSIHLIMSGILRLIRLFPFEGISPSAVNEYNQQLTTELEHIRDFIILHYHATERADTPFWQYCKNMEIPDSLKQRLALFKETGRIFTAEGELFRVDSWAQVMLGQGVYPEQYHQIAAIMKPHELDKFLSDIRQTIDKAVANLPSHQSFLEQYCRSSR

SEQ ID NO: 84312 - protein, 511 aa, Sphingomonas sp.; identical to SEQ ID NO: 83728
  misc_feature (1)..(511): tr|A0A0Q4K4K7|A0A0Q4K4K7_9SPHN Tryptophan halogenase OS =Sphingomonas sp. Leaf29 OX=1736212 GN=ASE81_00070 PE=4 SV=1

SEQ ID NO: 84313 - protein, 502 aa, Sphingomonas sp.
  misc_feature (1)..(502): tr|A0A0Q4JR73|A0A0Q4JR73_9SPHN Tryptophan halogenase OS =Sphingomonas sp. Leaf29 OX=1736212 GN=ASE81_16255 PE=4 SV=1
MTDNRIRSIVVLGGGSAGWMAAAALATYLGRGVSVRLVESEEVGIVGVGESSVPHMKTFNSETLGIDEREFVMRTNSTFKLGIRFTDWGRIGDSYIHGFGTIGQGLGPLPFHQLWLRRFLAGQAAPLGDYSLQTVAAPAGRFQWDGPPGTPLSDIAYAYHLDAVLYARFLRELAERRGVERIEGKVVDVEQRAESGHVAAITLADGRRVEGEFFLDCSGFRGVLIEQTLKTGYLDWRHWLPCDRAFAVPSATVGPPMPYTEAAARGSGWQWRIPLQHRVGNGHVYSSAHESDEQAIATLLGTLDGQALDVPRQLRFTAGRRAKAWNGNVVALGLAAGFLEPLESTGIYLAQAGIRRLLGLFPGRDFDPALADRFNRETAFEYERTRDFLVLHYKATTRDDTPFWRYCRTMDVPDPLREAIELFRTDGRYFRNGEDFFALPSWVQVMIGQGIMPADYHPIVDAMPEGHLDQYLARVRGEIASTVATMPPHHQFIDHHCKALVA

SEQ ID NO: 84314 - protein, 502 aa, Thalassotalea sp.
  misc_feature (1)..(502): tr|A0A516HG50|A0A516HG50_9GAMM Tryptophan 7-halogenase OS=Thalassotalea sp. PS06 OX=2594005 GN=FNC98_15965 PE= 4 SV=1
MAEQKPFHILILGGGTAGWMAANLFANRWRNCDNQKSVKITLIESKDVGIIGVGEGSTPTLKRFFEDLNIPESQWMPACDATYKVNIRFKDWSPQSGIADYSHPFTTQVDTFTKRAFLVNGRTRRMGLDTHTRPDDFLLNGVLANQGKGPLTPDNFPFVMEYGYHFDSGKLGQFLKDKAIAAGVEHKQAHITQAKRSPQGELEAIIDDQGEAYSADFFIDCTGFSSLLMQKALRVPYKSFKSNLFNDSAVVMPSSMDSIIPVETEATALSAGWCWKIPLTSRYGNGYVFSSDFIDNDQAETEFRRHIGALDSEQECRFLKMQVGQLTEHWSYNCLGLGLSQGFIEPLEATALHLVQVSIELFASLLEKGNFSSHYAPEYNKKISERFERVRDYIVAHYKLNTRDDSEYWRANRDNNKLSQSLLSILDCWYQRGDLNEEIERQNLDTHFDAVSWNCLLAGYGTFPPLAPNQPGQGDLYQEKKIQQFLHGCSLNFSDHQSNLRK

SEQ ID NO: 84315 - protein, 483 aa, Caulobacter rhizosphaerae
  misc_feature (1)..(483): tr|A0A561NPP2|A0A561NPP2_9CAUL Tryptophan halogenase OS =Caulobacter rhizosphaerae OX=2010972 GN=FHW61_103215 P E=4 SV=1
MTGSPLSSVAILGGGVAGWMAAAALARVLPPACAIRVVETANAAPRGALSTLPALRGFHVLLGLDEAAVMRAARGTFKLGARYGGWTAPDQDHVEGFSDAGANLDGVVFHHHWLRARQRGQAGRYEDYSLAAVAGRLGRFAPPSEDPRSVLSTLSYGLHLDAAGYVAALRSTAGRTEIRAGEIAEVVLAPDGAIAEVVLADGERLAADLFVDTTQDGRLIGATPDGGWIDETAALPCDRLAQREVAPRADPPPLTEFEAVAEGWLRRVPLRGGDAVTLAYASDLTPDDTARAVLGGDAKIVRLRNGRRERAWSGNCLAIGPAASQMESLNGDDAQAIQSGVSRLIALLPTADGSPLAAMEYNRLMAETFDRARDMAVLRYLAATRIDPLWTRARRGAPPAALAYKQAQFESRGRVVLYDEETFVEGAWVGAFLGHGITPRRHDRLADRLPADQADAALARLRGLIRQAALAMPTHADALKDRP

SEQ ID NO: 84316 - protein, 513 aa, Pseudoalteromonas rubra
  misc_feature (1)..(513): tr|A0A0U3GGR7|A0A0U3GGR7_9GAMM Uncharacterized protein OS=Pseudoalteromonas rubra OX=43658 GN=AT705_04675 PE=4 SV=1
MQNAETKIKRIVIVGGGTAGWLAANHLAADASEDVSITLVESPDIPTIGVGEGTVPVIVDSLKKFGIRESDMFRLCDATFKNGIHFVGWNKPVNGQPHCYFHPFDDPNVNGVNLLPYWLHQLPGARARFDQSVSIQAHIALENKAPKLITNAEYERMINYAFHLDAGKFSALLSEHAIKNRQVNHVLDEVESVKLALDGSISGLQLRHGGLLEGDLFIDCSGFQSLLLGKALNTPFIDKSDVLFANHAVVTQVPYENEHEVPPYTISTAQQAGWIWDIGLQTRKGVGHVYSDQFMSHEQAHRDLSDYLGKPEDTVESRLIKMQVGYRSQAWVKNCIGIGLSQGFVEPLEATGLLVFDLAARMLSKRLPGERQEIPAIAQQFNQHMTHVWQSIVDFIKLHYCISDRDDSEFWRMNRLPESIPESLQHKLALWRNDIPNEYDFVSSLDVFRLENHLYVLYGMNYPSQCNYPSPQKLSQQEAMLKLVAQQQQKAGAMLETHSNLIAKAARYGFQRI

SEQ ID NO: 84317 - protein, 535 aa, Thalassotalea sp.
  misc_feature (1)..(535): tr|A0A516HDQ1|A0A516HDQ1_9GAMM Tryptophan 7-halogenase OS=Thalassotalea sp. PS06 OX=2594005 GN=FNC98_11360 PE= 4 SV=1
MVNSLKHSSSTTAQEQSHATIDKIVIVGGGTAGWLAANHLASQLKPAPEQGMDITVIDSDDIPGIGVGEGTVPMIRQSLQAFGIDEAKFIRECDVTFKQGIKFIDWLDTPRTGQSSYYHHLFDYPLVSEIPDLTAYWLNIPVEQRPSYTDFVAFQGKVCDLGLAPKQITSPQYQGNCQYAYHLDAAKFTRLLQSHAMEHFGVKLIKANVIDVDINDSGEINGLKTDHAGMVKADFFVDCSGFHSILLGKALGVDFVDKQQTLFADKALAVQVPYTQTNEPIPSFTKATAKTAGWIWDIGLTARRGCGYVYSSAHTNEADAENTFREYLGAEHKNAELRQIDMKVGYRDKFWHKNCVAIGLSQGFVEPLEATGLLVFDVTAKMLAQQFPANKALMPLVAEQFNRNVQQSWERVIDFIKLHYFLSRRDDSEFWLDNRNFESLSSTLQERIQRWRWQLPSAYDFSSGYEIFNLENYLYVLYGMEFETDLRQSQYRYHQQDRVQQLQQQLLQHSQQLANLLPEHRQLLDKIQQFGLQRQ

SEQ ID NO: 84318 - protein, 504 aa, Duganella sp.
  misc_feature (1)..(504): tr|A0A3D9KNA9|A0A3D9KNA9_9BURK Tryptophan halogenase OS =Duganella sp. GV023 OX=2135490 GN=C7506_10276 PE=4 SV= 1
MRDPNNRQPVRRVVICGGGTAGWMAATGIAKVLGKQLDIKLIESEEIGTVGVGEATIPTLTNFHNVLEINEQEFMAETQATFKLGISFESWRNLKEDYIHSFGTTGIDHWTAGFQHFWHKGVQRGLAGDFGDYCLELKASKENRFAHLPNNGMNYAYHLDASRYAKFLRRLSEPRGVQRIEGKIVRYTKHDNGDVRSVVLASGQEIEGDLFIDCTGFRALLIGEAMDEPVEEWSQWLFCDRAIAVQTTAIADAVPLTRSMAHQAGWQWRIPLQHRVGNGIVYSSRYLDEDTARKQLLANVEGKTLIEPRVIKFQPCQRRNTWKGNVVAIGLASGFLEPIESTSIHLIQRSVIRLMQMFPSDGIQQADIDEYNNQCNSEINHIRDFIILHYHANNRTDSQFWIDAREMKIPASLQHRIDLFRETGRVFRVPNELFAENSWIQVMIGQGIMPKSHHSTADLMGDEELKAFLGNIKSRIDRTVVQLPTHQAYVQRYCGRPDEGAKAA

SEQ ID NO: 84319 - protein, 516 aa, Amycolatopsis coloradensis
  misc_feature (1)..(516): tr|A0A1R0KXU9|A0A1R0KXU9_9PSEU Uncharacterized protein OS=Amycolatopsis coloradensis OX=76021 GN=BS329_11460 P E=4 SV=1
MVIVGGGTAGWLSAAYLNRAFGGKVDITLIESPRIPRIGVGEATVPTLRTTFAFLGMKEEDWMPKTNAVFKSAVRFNDWRKPHEGRDSHTYYHPFFDVPEPAVQNYEKPFHKRFGRGVSLAHFWLKQRLAGDTRVRETFGDAGMALQRLCELNKAPKPLPGTDAPDPGYRYAYHFDAALIAKYLRELATGRGVKFVSADVTSVTVDPRGTIEKVVTDTAGEIEADLFLDCTGFRGLLINKTLNEPFVSANDVLLCDSAVALPARHREGGLRPYTSATAKPDGWIWEIPLADRDGTGFVYSSAFTTPDKAERRLREHLGGRGYDIDGNHIKMRVGHNRRSWVNNCIAVGLSSCFVEPLESTTIALIEYQLALLVLHFPDSDFDERRKARYNELMVGAFEDLRDFIVMHYTLTDRDDTEFWNAVREAPIPASLEEKLTEYAESVIIPDGSQLRLFETRSIWAILSGMDFGFKKAPPSVEKMNDAAAWEMFEKIDKEREIYSAGLPGHREYIEALHRGF

SEQ ID NO: 84320 - protein, 502 aa, Sphingomonas sp.
  misc_feature (1)..(502): tr|A0A0T0PSF6|A0A0T0PSF6_9SPHN Tryptophan halogenase OS =Sphingomonas sp. Leaf412 OX=1736370 GN=ASG29_07465 PE= 4 SV=1
MSHSVSHIVIVGGGTAGWLAACRLAAAARPGALAVTVVESPDVPTIGVGEGTWPTMRRTLAAIGIAEADFLRGCDAAFKQGSRFDGWVTGDAGDSYHHPFTAPAGGDPRALVAGWQAGGLPFAQAMGPQPQVAEQDLAPRQRAMPDYAGALNYAYHLDAGKLAVLLRDRALALGVRHVRDHVERVDRTDAGDVAAVATRAHGAIAGDLFLDCTGHAALLIGGAMGVKFVDRSDVLFNDRALAVQVPVAPGSPIASTTNATAHAAGWIWDIGLPARRGVGCVYASAFMDDDTAAATLSAYLGVPDASFRRLTFRSGHRARFWHGNVLAVGLSAGFLEPLEASAIVTIELALDHLIANFPATTDAFPAAAARFNAAFRYRWDRIVEFLKLHYVLSRRTGPYWRAHRDPASIPARLRDLLDAWRHQPPSDADLPDAEEVFPAASYRYILYGMGFPVPPAVAVAVAGAADDPLAQVPQQVRALTAALPTHRAYLDALSRPMERLAR

SEQ ID NO: 84321 - protein, 491 aa, Amycolatopsis coloradensis
  misc_feature (1)..(491): tr|A0A1R0KUZ0|A0A1R0KUZ0_9PSEU Tryptophan halogenase OS =Amycolatopsis coloradensis OX=76021 GN=BS329_14110 PE= 4 SV=1
MSAEEFDVVVAGGGPGGSTVATLVAMQGHRVLLLEKEVFPRYQIGESLLPATVHGVCRILGVADELANAGFPIKRGGTFRWGARPEPWTFHFGISAKMTGSTSHAYQVERAKFDQILLTNAKSKGVVVREGCSVDDVVEDGERVTGLRYTDPDGNEREVSARFVIDASGNKSRLYSKVGGTRNYSEFFRSLALFGYFEGGKRLPAPVSGNILSVAFDSGWFWYIPLSDTLTSVGAVVRREDADKIQGDREKALMDLIGECPLISEYLSNATRVTTGQYGELRVRKDYSYQQTTFWRPGMVLVGDAACFVDPVFSSGVHLATYSALLAARSINSVLAGDLDEKTVLTEYEARYRREYGVFYEFLMSFYQMNVNEESYFWQAKKVTKNENTDIESFVELIGGVSSGETALTAADRIAERSAEFAAAVDQMASGDGDNMVPMFKSHVVKQAMQEAGQVQMKAILGEDAEPEMPLFPGGLVASPDGMKWLPYHPA

SEQ ID NO: 84322 - protein, 497 aa, Sphingomonas sp.; identical to SEQ ID NO: 83460
  misc_feature (1)..(497): tr|A0A0Q4JY02|A0A0Q4JY02_9SPHN Tryptophan halogenase OS =Sphingomonas sp. Leaf29 OX=1736212 GN=ASE81_02840 PE=4 SV=1

SEQ ID NO: 84323 - protein, 496 aa, Thalassotalea sp.
  misc_feature (1)..(496): tr|A0A516HG06|A0A516HG06_9GAMM Tryptophan 7-halogenase OS=Thalassotalea sp. PS06 OX=2594005 GN=FNC98_15960 PE= 4 SV=1
MQQPIKKLVILGGGTSGWISAALSKKLLGNAIEVELVESSEIGTVGVGEATIPPIKLLNDVLGLNEAEFLRETQGTIKLAIKFENWKNENHSYYHTFGSAGKSMAFCHFHHFLKRAGELDDDSKLWDYDLNALCAEEGKYAHIRHQDPILEMPYAYHFDAGLYAQYLRKFCEKIGVQRTEGTVAKVHQNSQNGYIESLQLKDGSLISGDLFLDCSGFRGLLIQQTLQTGYEDWSHWLRCDRAVAVASKRFEHTLPYTRSIAHKGGWQWRIPLQHRNGNGLVYNSGYYSDDEATELLLGNLDSKAITDPKVIKFQTGRRYQQWNKNVIAVGLSSGFLEPLESTSIHLIQSAVVRLIHLFPHHGINDAMVDEYNKQSKLEFEQIRDFIILHYHVNQRTDSLFWQEMRDMKIPETLAHKIELFKQDGRLFRDQNDLFLESSWLQVMLGQGLVPNSYHPMANAMPESKLKAMLEKIKAIKREPVSAIPSHDEFLKRYCGQ

SEQ ID NO: 84324 - protein, 504 aa, Caulobacter rhizosphaerae
  misc_feature (1)..(504): tr|A0A561MSL0|A0A561MSL0_9CAUL Tryptophan halogenase OS =Caulobacter rhizosphaerae OX=2010972 GN=FHW61_11870 PE =4 SV=1
MAHLNKIVIVGGGSAGWICAAMLSHYFQNGPTAVELVESEEIGTIGVGESTIPPFLQLIRTLGINEQEFIQETQAAFKLGIRFENWLEKGDVYYHPFGQIGGPLEVNEFYQCWLRAKQNGHPSKLQDFAPASVMADAGKFMLPAKAQRTMIANANYALHVDARLVALYLRRFAEARGVKRTEGIVTEVVTRPDGGVQKVILKDGREVAGDFFIDCSGFRALLIGKTLGEPFRDWGDVLLCDRAIAVQTENVGAPHPYTLVQAQDFGWRWRIPLQHRSGNGYVYASKYLSDDEATAVLMRQVQGEVVLGPNVIPFKTGVRERPWVRNVVSIGLSCGFIEPLESTALHLIYKGMDYLLRFMPDMDADPILAAEYNRRMVADYEEIRDFIVLHYVTTRRDDTPFWRDYQKVVPPESLRERMALFKAAGVLRDGVDDMFRAPSWQSVMEGMGVRPDRYQQLVDRIPLSVIMNLMDKSAPMLADFVATLPSHEEFLKAHCPAAPFRRSA

SEQ ID NO: 84325 - protein, 508 aa, Colwellia sp.
  misc_feature (1)..(508): tr|A0A0S2JD48|A0A0S2JD48_9GAMM Tryptophan halogenase OS =Colwellia sp. MT41 OX=58049 GN=CMT41_03740 PE=4 SV=1
MSSTDKINNIVIVGGGSAGWMTAAMLSKQLECNAKGSKVNITLVESDNIGTVGVGEATIPPIKTFNRMLGIDENDFLKHCNGSIKLGISFENWPKKNHQYFHPFGRFAVDFDYIPFSYFWNKHRASGDNKPLHDYASAWHLAKNNKFSPPSPDKKSLFSGFDYAYHFDASLYANYLRSYSEKRGVKRQEGKITKVDTHESNGFISSVTLASGQNIAGDFFIDCSGTTALLINKTLGIKFIDWSENLLCNRAIAVQTCHTKVISPYTRSITKQSGWQWRIPLQTRMGNGSVHCSEFIDEQSAMDELISDIDGEILSEPRVIHFNVGRREKFWHKNCVAIGLSAGFLEPLESTSLHLIQRAVMRLIAHFPNKKCDEVNTKQFNNLTVTEYEHIRNFIILHYKATKRDDSEFWRYCQHMDIPDSLQHQIDLFSSHGHLNVDANDLFKQDNWLAVLTGQNIHPTTVAPIMAYKQKIDLPRTMNSFYDIMTKTVQKLPNHEDYLKEKCPFLIK

SEQ ID NO: 84326 - protein, 508 aa, Colwellia sp.
  misc_feature (1)..(508): tr|A0A0S2JEB2|A0A0S2JEB2_9GAMM Tryptophan halogenase OS =Colwellia sp. MT41 OX=58049 GN=CMT41_03905 PE=4 SV=1
MKIKRIAIVGAGTSGWLAANHLGCELSADAEIEITVIESKDVPTIGVGEGTVPYIMKGLKRFGISEAELLNSCDATFKQGVKFVNWLDPIKHGENYYYHSFDDPYPNGFNVTPYWNSYEGSKSFDDIGVQARISELGLSPKMKNSGEYEGELSYAYHFNAAKFANLLASNAQKRFNVKHQFATIEGIKRCNEGNISHLITADGDELAFDFYIDCSGFSAVLIGKGLAVPFESKAKELLVDTALVQPMPLKADEDINPYTTATAHKAGWIWDIPLTTRRGTGFVYSSKYMSESEALALYAEYLGVNEKDLSPKKLPMAVGYRKEFWCKNCVPLGLAQGFLEPLEATSILLSDFSAELLAKNFPRDSTNIETIAPYFNKVVTYVWERTVDFIKLHYCLSDRTDSDFWLDNQDETFLSAELKERLQKFKLCPPQQSDFFSRFDLFNEKNFLYVLYGMKFETQKTILSDKEIEMSRTILKNNDRLVEQADQHLLKHKDWLMGLKSAMEKSKS

SEQ ID NO: 84327 - protein, 503 aa, Sphingomonas sp.
  misc_feature (1)..(503): tr|A0A0T0PUZ3|A0A0T0PUZ3_9SPHN Tryptophan halogenase OS =Sphingomonas sp. Leaf412 OX=1736370 GN=ASG29_13375 PE= 4 SV=1
MTDDRRIRSIAIVGGGSAGWMAAATLARLLGPGYATITLVESEEIGTVGVGEATIPQMRTFNRMLGIDEDEFVRETKGSFKLGIQFVDWGRLGHTYFHPFGGYGVDMAGVSFHAYFLRLRALGEAPSIDAYSLQAMASRGDRFMRSIDAGNSPLSDIAYAYHFDAGLYARYLRRYAEARGVVRREGRIVSVERDGESGNVAGVTLAEGGRVEADLFVDCSGFRALLIGEAMGNDFVDWGHWLPCDRAVAVPCAGRAEMTPYTRSTARTAGWQWRIPLQHRTGNGHVYASAYLSDDEAAATLLANLDGDALADPRLIRFRTGHRAKFWDGNVVALGLAAGFMEPLESTSLWLVQSGLARLLAMFPDRDFDAATTARYNRILTTEFEEIRDFLILHYHATQRRDTPFWRYCADMAVPDRLAEKMRVYAAHGRVFRENEELFNDTSWFAVMHGQLLPVKAHDPVADAMDLATTRARLAEIARAVANSADYMPGHRAFVNEHCRAAS

SEQ ID NO: 84328 - protein, 464 aa, Sphingomonas sp.
  misc_feature (1)..(464): tr|A0A0T0PVV1|A0A0T0PVV1_9SPHN Tryptophan halogenase OS =Sphingomonas sp. Leaf412 OX=1736370 GN=ASG29_13365 PE= 4 SV=1
MTAAALAHKLRHMRIAITLIESEAIGTVGVGEATVPHIRAFNAAMGFDEAEFMAATNATFKLGIEFRDWARVGDRYFHPFGLFGEPIDGVPFHHQWLAAGEDAGAFGDYCLPAAMARADRFARPRDGDDYGYAYQFDAAGYAAYLRGVAEARGVTRVEGQIVDVAVDARGHVASVALEDGRRLAADLFVDCSGFRGLLIEETLHAGWDDWRRWLPCDRAWAVPSERAGAITPYTRATALDAGWAWRIPLTHRTGNGHVFASAFVSDEAARAALLAQLDTPALAEPRMLRFAAGKRRRQWVGNTVAIGLSAGFLEPLESTSIHLAQVAIERLLDLFPTGDRDPLDAAEFNRTMDVEYERVRDFIILHYAATERRDTPFWRHVAAMPLPDSLSAKIDLFRARGVVTTYAQGLFMEPSWLAVYMGQRVRPAGHDPRASCDAAALSRIRARVATQVAGMPTHDATLAR

SEQ ID NO: 84329 - protein, 553 aa, Unknown
  misc_feature (1)..(553): tr|A0A285YZL9|A0A285YZL9_9BACT Tryptophan halogenase OS =bacterium JGI 053 OX=1855372 GN=SAMN05216486_1061 PE=4 SV=1
MQKIRIVAPPQAPLIENVVIVGGGTAGWMAASYLKKAYPGVEFTLIEAPAIPRIGVGEATIPNLQRVFFDFLGIEEDEWMRHCNAAFKVAVKFVNWRKPASAGVDDHYYHTFGILPTCDNLPLSHYWSHKRLQGFTEAFDYACYKEPPLMDLKLAPRYHDGSRAMIYAWHFDAHLVADFLQKVATGWGVKHVVDQVAGVELADDGSIASIRTAQGRTLRGDLFVDCSGFRGLLINQALGEPFVDMSDHLMCDSAVAHAVPHDDAKNGVEPYTSAIAGDAGWTWKIPMLGRFGTGYVYASRFATEDQAAHDFCKLWGLDEDKTHLNRIRFRVGRNRRAWVKNCVSIGLASCFVEPLESSGIYFIYAAIYQLAKHFPDKALDPVLIDRFNGEIEAMFDDTRDFIQMHYLTTPREDTPFWRANKFDLKISDDVKHKLATYRAGLAVNMPVATEDTYYSSFEAEFRNFWTNGSFYCILGGMGWHPEQAMPSIRYRPDSQQKAEAIFREIKQKAAELRATLPTNHEFLRKLHGRTGDDVRTAAGRHPHGRVPAGAGAG

SEQ ID NO: 84330 - protein, 502 aa, Caulobacter rhizosphaerae
  misc_feature (1)..(502): tr|A0A561NLA7|A0A561NLA7_9CAUL Tryptophan halogenase OS =Caulobacter rhizosphaerae OX=2010972 GN=FHW61_10462 PE =4 SV=1
MNSGQQQEIVILGGGAAGWIAAALLAKKTDRQRTRITLVESEEIGIIGVGEATVPVLAQCNAMLGIDEFDFIRRTQGTFKLGIEFCDWGVAGNRHFHAFSDYGHQVEGVSTHHYWLRLRQSGDDSPIDDYSFAYAVAKNNKFEPTDPQNPRYHHAYHFDAALYARYLRDVATELGVQRIEGKMTHVDLDGETGNIAAIHLANGVTVPGDLFLDCTGFASELLGKALGTPFVDWSRWLLCNRAMAVPSKRTGAPTPFTRSTAHAGGWRWTIPLQHRSGNGMVYSSEFWSDDEARDALLGNIDGEPLAEPRLFRFTSGHRKQFWNRNCVGIGFASNFLEPLESTGLQLIVMGVLKLLRYFPDRTIDPVLRDEYNDLSTREIERIRDFIIAHYHLSRRPEPLWLACRDMEIPDSLRHKLDVWKASGQVALGDSESYMEPSWVAILLGNGVVPSRYNISADLYPLEQIRKGMELRREEVMRSAQAVVSHQEFIDLYCKAPQMATAG

SEQ ID NO: 84331 - protein, 144 aa, Rhizobiales bacterium
  misc_feature (1)..(144): tr|A0A4Q3GWE5|A0A4Q3GWE5_9RHIZ Tryptophan 7-halogenase (Fragment) OS=Rhizobiales bacterium OX=1909294 GN=EOP21 _01530 PE=4 SV=1
MNSELTTAVRRIVVLGGGSAGWLTAATLAAELGGTAPDALQITLIESPDVPSIGVGEGTWPTMRATLHRIGLSEVTLVRECDASFKQGSCFDGWLDGSATDRYYHPFTLPHGQGEADLVGAWLEGGAGSDAAFAEAVSSQPHVC

SEQ ID NO: 84332 - protein, 501 aa, Sphingomonas elodea
  misc_feature (1)..(501): tr|A0A495F2H3|A0A495F2H3_SPHEL Tryptophan halogenase OS =Sphingomonas elodea OX=179878 GN=C8E52_2580 PE=4 SV=1
MSAPLSHIAIIGGGTAGWMAAAALGRVLDTRAIAITLVESEAIGTVGVGEATIPPIQAFNALLGIDEAEFLRATKGTAKLGIEFVDWRAKGTRYFHPFGIHGIDFGAIPFEALWQRARLADEAAPLEAYSICAEAARLGRFQRPVTSGNNPLTHLGYAYHFDAALYAGFLRDKAEQWGVRRQEGRIVSVERSEDGAIAGVVLEDGTRIAADFYIDCSGFRSLLLGETLGVPFEDWAQWLPNDRAVAVPCTLGAEGRSPFTRSTARGAGWQWRIPLQHRVGNGLVYASAHCSDAEAEAQLLGSLEGTPLAEPRLLRFQAGRRARFWEKNCVALGLASGFLEPLESTSIHLVQAGIARLLEMLPVGGGTPADIRRYNRLMATEFETIRDFLILHFHATARDDTDYWRHLRTMDLPDTLADRIAIYRASGRLYREADELFSKTSWLAVLHGQGIDPSGYDPIADGMPRDEAAARLARIAEVTALAASRMTTHEAFLHESGALQR

SEQ ID NO: 84333 - protein, 504 aa, Sphingomonas elodea
  misc_feature (1)..(504): tr|A0A495EQ51|A0A495EQ51_SPHEL Tryptophan halogenase OS =Sphingomonas elodea OX=179878 GN=C8E52_4341 PE=4 SV=1
MTGQPSLRVVIVGGGTSGWMTAAALARLLPERCSLHLIESEAIGVIGVGEATLPHIRGFVEKLGIREADFMAWTRGTFKLGIEFRDWGKIGDSYVHPFGTFGRGTGEVDFHHYWTRLRLAGVAVPSLERFSYGCMLARANRFDLPASDPAVIASTYGYAYQFDALLFAPYLRGIAEGLGARRTEGKVVEVLRDGASGNITAVRLDDGQVIEGDLFVDCSGFRSLLLGEALAEPFEDWNHWLPADRAVAMPCRTATSVTPYTSAIAMPAGWRWRIPLQHRTGNGYVYASAFTSDEAAAQALTGAVEGAALANPRVLRFRAGRRRRSWVKNCVAIGLASGFLEPLESTSIYLVQQAITALIELFPEAPDAPIERDEFNRLIDLEYDRIRDFLILHYHATTRTDTDFWTYVRTMTVPDSLAEKIELFRHAGRVVKYREGVFLDASWIAVYVGQGILPEGYDPRADAADPTALLQGMRALEAEIAATVAQVPEHLRYIDRYCAMAAAA

SEQ ID NO: 84334 - protein, 525 aa, Alteromonas australica
  misc_feature (1)..(525): tr|A0A075NVJ1|A0A075NVJ1_9ALTE Uncharacterized protein OS=Alteromonas australica OX=589873 GN=EP13_01165 PE=4 SV=1
MMSEVNRIVIVGGGTAGWLTAGLLAATHSGADNNGQRLSVTVIESDAVPPIGVGEGTWPTMRRTLATIGISEAELVTQASATFKQASKFVNWYSDNGRNQDNSYYHPFSAPQGSATLDITPYWLTTAQTHSHYAQDVCFQPALCDAGLAPKLTAHGKQSFTANYGYHLDAGQFISLLRRHCVNRLGVTHLVDKVTQVNTQADSPEAGIVSLQTQQSGKIEGDLFVDCSGFSGLLINKALGVKLKDASHHLFANSALVCQAPFENETAPIPCHTLSTAQEAGWIWDIGLQHRRGTGYVFSREHQDVDRAADTLSRYLSQVAPSMATPDAFREIQFKTGYRETFWHNNCVAIGLSSGFLEPLEASSLMLIEQSAMLLAEQLPANTTIMSKVSQRFNSRLTYLWERTIEFLKLHYVLSNRPEAFWQDNKQRGSIPERLADLLEEWRYRPILDSDFPQANEAFSAQSYRYILYGMGPKTDFNWDMSTTERSLKHHNFATKQGQLNQTLIGQLKERLPSHRGLVESFFQS

SEQ ID NO: 84335 - protein, 519 aa, Escarpia laminata
  misc_feature (1)..(519): tr|A0A497TIZ2|A0A497TIZ2_9BACT Tryptophan 7-halogenase OS=bacterium endosymbiont of Escarpia laminata OX=12216 01 GN=DJ030_15220 PE=4 SV=1
MLNKSGDREMNERIDDITIVGGGAAGWLMGLFLTTMLNKGESKVKVTLIESPNIPTIGVGEGTVTGFPRMLQQLGIKESEFLRKSDATFKCAGKFVGWNLDAQGKPITFYNPFNVGGYVGGFETGYYYQKYGNAPGASSFVDSIMPTQMVVENQLGPKLIGAKDYESPVPYTYHLHAHDFSRQIANIAKKRGVVHILDEMVDAEQDENGYITALNLKEKGRVPVKLVIDCTGFSGRILQQVLKEPYNEFGNHLLCDRAIPIPHPHEDPKRLTPCTTATAMKAGWTFDVPLYSRMGTGYVYSSRFISDDEALDELIRHIGDESLRERTPPVIKMRVGRVRNTWVKNVIATGLSAGFVEPLEASAIYTIEMTARMLLTYYPEQGIEQKTVDRFNEVMNRMYNEILSFIVMTYYTSNRTEPFWVAAREDIDLPDRLRENLEMWQSFMPSPHDVEGKFLFSHWNYIYVLLGKGYFEGRHFPAERFLVKSDWTRFSNHIAEVKRQLKQKLPSHYDLLKAIRSGR

SEQ ID NO: 84336 - protein, 514 aa, Caulobacter rhizosphaerae
  misc_feature (1)..(514): tr|A0A561NP47|A0A561NP47_9CAUL Tryptophan halogenase OS =Caulobacter rhizosphaerae OX=2010972 GN=FHW61_10341 PE =4 SV=1
MVRPVKNIVVVGGGTAGWLTAGLIAAKHKARQATGFTVTLVESPNTPIIGVGEGTWPTLRTTLAKIGVSETDFFRECDAAFKQGAKFARWTTGAADDAYYHPLMLPQGFSQVNLVPHWLVGGNGRSFCDAVTPQGRLCDEGLAPKTITAPPYQGAANYAYHLDAGKFAPFLQRHCCDKLGVRHVLADVRGVAMTEDGDIRGVVTEQQGEIQGDLFIDCTGFRALLLGEALGVPFRDCGDVLFCDTALAIQVPYETETSPIASHTISTAQSAGWIWDIGLPTRRGVGHVYSSRHISDDDAERELRAYIGPAGRDLPARKIPIRSGHRETFWKRNCVAVGLAAGFLEPLEASAIVLIELSAKLIAEQMPACREVMDIVASRFNATTHYRWGRIIDFLKLHYVLSQRTDTAFWRDNRARETIPDRLADLLQLWRHQPPWLYDEFDRADEVFPAASYQYVLYGMGFRTEVEPEALADERAMAERTLRETAAQTERLRATLPRHRDLIRKIVEHGLQPV

SEQ ID NO: 84337 - protein, 505 aa, Caulobacter sp.
  misc_feature (1)..(505): tr|A0A258INZ7|A0A258INZ7_9CAUL Tryptophan halogenase OS =Caulobacter sp. 32-67-35 OX=1970330 GN=B7Y81_11130 PE= 4 SV=1
MADGGLKSLTIVGGGTAGWMSAAMLSRALGSTVAITVVESDEIGTVGVGEATIPAIKLLNTFLGLDENDFLATTNGTIKLGIEFVDWHTVGQSYLHAFGPVGRPLGLAAFHHYWNRRRLQGHDESLWDYSLNALAARAGRFDRLQTAGGGYLEGLAHAFHFDAALYAQYLRRYAEAQGVRRVEGKIVGVSQHPETGFVTGLSLQDGRNVGGEFFIDCSGFRGLLIEETLKTGYDDWRSWLPMDSAIAVPCASVTPLTPFTRATAREAGWQWRIPLQHRTGNGHVFCSDYIDAAQATDVLMRNLDGAPLADPRQLTFTTGRRKRFWNRNVVAMGLASGFMEPLESTSIHLVQSALSRLIALFPNADFNTVEIDEYNRQTALEYEYIRDFLVLHYKATTREDTPFWRACKAMEIPDTLKARIELFAQSGRIFSKEDDLFKEASWVQVLIGQGVLPGAAHPLTGVVTDQQLDEYMANIRQIMGRAVEALPDHADFIARQCAAASRPAA

SEQ ID NO: 84338 - protein, 497 aa, Sphingomonas sp.; identical to SEQ ID NO: 83469
  misc_feature (1)..(497): tr|A0A0Q4JSK9|A0A0Q4JSK9_9SPHN Tryptophan halogenase OS =Sphingomonas sp. Leaf29 OX=1736212 GN=ASE81_02850 PE=4 SV=1

SEQ ID NO: 84339 - protein, 477 aa, Pseudoalteromonas rubra
  misc_feature (1)..(477): tr|A0A0L0EL62|A0A0L0EL62_9GAMM Uncharacterized protein (Fragment) OS=Pseudoalteromonas rubra OX=43658 GN=AC626 _25095 PE=4 SV=1
ITLVESPDIPTIGVGEGTVPVIVDSLKKFGIRESDMFRLCDATFKNGIHFVGWNKPVNGQPHCYFHPFDDPNVNGVNLLPYWLHQLPEARARFDQSVSIQAHIALENKAPKLITNAEYERMINYAFHLDAGKFSALLSEHAIKNRQVNHVLDEVESVNLALDGSISGLQLKQGGLLEGDLFVDCSGFQSLLLGKALDTPFIDKSDVLFANHAVVTQVPYESEHEVPPYTVSTAQQAGWIWDIGLQTRKGVGHVYSDQFTSHEQAHRDLCAYLGKPEDTVESRLIKMQVGYRAQAWVKNCIGIGLSQGFVEPLEATGLLVFDLAARMLSKRLPGERQEIPAIAQQFNQHMTHVWQSIVDFIKLHYCISNRDDSEFWRMNRLPETIPESLQHKLALWRNDIPNEYDFVSSLDVFRLENHLYVLYGMNYPSQCNYPSPQKLSQQEAMLKLVAQQQQKAGAMLETHSNLVAKAARYGFQRI

SEQ ID NO: 84340 - protein, 516 aa, Thalassotalea sp.
  misc_feature (1)..(516): tr|A0A516HDP6|A0A516HDP6_9GAMM Tryptophan 7-halogenase OS=Thalassotalea sp. PS06 OX=2594005 GN=FNC98_11365 PE= 4 SV=1
MNQNAVRSITIVGGGSSGWMTALYLNRLYNHQQSHVAIRLIESKDVGILGVGEATVHSIRFFFAAMGLDESELLRETNATLKTGIMFNNWMQPVDGQIHQYYHPFEHQALGNILDISTSWLLRSRHLFERYDQGVSLSAHLMQENHCPKMPDSKPFEGITPYGYHLDASEMARFLRRKAVQAGVEHVEALVNEVKVEQGNVKAVVTDKGEFSSDLFIDCSGFKGLLIEALKQDNWQSFTDELPCDKAVAMQVAYKDGQTPRSYTTATALSNGWAWEIDLTSRRGSGYVYDSRYLDKAEAEHELREHLGSDVEVLKTLHLDMKVGCRKEFWVGNCIAIGLSGGFIEPLESTGLHLINIGAKLLSTHISSTQTAQATRDSYNRLMNGVYDDLKRFIVLHYCLTDRDDTEFWQNAQRSVDYCPLLKQQLQAWQHKTCEYMDLAGGYATTFTDENYRFILYGMGHYPDLHIPYDEASCDQIFQRLNFMSQRALQVTMSHQDFLESVQGAVQDISTPEQAV

SEQ ID NO: 84341 - protein, 504 aa, Brevundimonas subvibrioides
  misc_feature (1)..(504): tr|D9QNH4|D9QNH4_BRESC Pyridine nucleotide-disulfide ox idoreductase OS=Brevundimonas subvibrioides (strain ATC C 15264 / DSM 4735 / LMG 14903 / NBRC 16000 / CB 81) OX =633149 GN=Bresu_2902 PE=4 SV=1
MADPIKSVLVVGGGTAGWMAAAALNRSLGPHCKVSLVESDDIGIVGVGEATVPPIRDFNALIGLDEAEFMRETRATLKIGIEFVDWGSRGNRYLHPFGTFGPGPTLSEFQQSFLALRAKGRIDDDLDAYSLCAQACKAGKAGARDPDPRSPLNALFTAYHFDAGLYARYLRKVCEGRGVERIEGEIVDVVQRPDDGFIDRVRLKDGRELSADLFIDCTGFRALLIEGALKAGFEDWSHWLPMNRAWAVPCERVGPTTPFTRSTARDAGWQWRIALQHRTGNGHVYCSDFMGDDEARQILLDNLDGPALAEPRPLRFTTGRRKAFWSKNVVALGLSSGFIEPLESTSIHMVQSGIYRLLQHFPDSRFSPVNIETYNRRLGAEVALIRDFVILHYHATQRDDTAFWRHMATMPIPDTLSQRVEAFRDRGLLYQSGADEYFSQGSWLAVMYGQGIMPTGHNPLYDLQNLDQIQAGFGQIARRWTQTVAAMPGHDEFLKASGMWAGAT

SEQ ID NO: 84342 - protein, 495 aa, Porticoccaceae bacterium
  misc_feature (1)..(495): tr|A0A351NZ15|A0A351NZ15_9GAMM Tryptophan halogenase OS =Porticoccaceae bacterium OX=2026782 GN=DCX08_11430 PE= 4 SV=1
MSQNIKKVVIVGGGTAGWMAAVSMSTLIGRDLEIVLVESDDIGTVGVGEATIPTFFALHQLLKINEAEFLSEVQGTIKLGISFENWKNKGEDYIHAFGYTGKSCWAAGFQHFWLKGKGLGFSEEYSCYSPELMAARQHKFGHLKQNQLNYAYHIDASLYAKYLRRLAERQGVVRQEGKVVEVNQTASGNIQDVVLESGLVIDGQLFIDCSGFSGLLIDKVLRVGFEDWSHWLPCDSAVAVQTESVSPPIPYTRSIARDCGWQWRIPLQSRVGNGLVFSSKYLSDDEAKTTLFNNLEGRALTEPKVIKFRTGQRSKQWNKNCIALGLAGGFLEPLESTSIHLIQRGIIRLMQMFPQTEITNADRDEFNRQMSNEYEFIRDFIIMHYHVTERDDTAFWHYCRNMEIPESLDHRIRLFKESGRVFQAEGDVFGENSWTQVMLGQGLMPEQYHPIVDMMSDPELQHFLKSIKASVDNVVGQLPAHQAFLNAYCPAKLAE

SEQ ID NO: 84343 - protein, 510 aa, Sphingomonas sp.
  misc_feature (1)..(510): tr|A0A0T0PYD6|A0A0T0PYD6_9SPHN Tryptophan halogenase OS =Sphingomonas sp. Leaf412 OX=1736370 GN=ASG29_00870 PE= 4 SV=1
MTDAPPLRIVVLGGGTAGWTAACLIAKAWPRARVTVVESPAVGIVGVGEGSTPQMRDLFRGLGIAEGDWMPAADATYKAGIRFDGWGGEGSYFHPFPSAIDRHTQAQFHHNTLARRRGADVDAHPDRFFLTARIAADARAPVTPATFPFDIGYGYHFDAHKVGQVLRDHAVGLGVVHLSRHVASIALADDGDVAALVLDDGERVAGDLFMDASGFRSLIAQQALGVRFRPFAENLFCDSAVTIPTPRPHPSAASPLPPSPTGRGKLEVHTTATALSNGWAWRIPLTSRTGNGYVYSSAHISPDAAETELRRHLNVVDDVPARHLSMKVGRVETTWTRNCVAIGLAQGFIEPLEATALHLTQVAVEGFVESYAAGGFTPAHRDAFNARIARRYEGVRDYIVAHYRLNRRGDTDFWRDNAANERLSDDLKAIMTAWFTGGDVAVLLGQRDLARYYSPMSWEVLFAGYGTFPDPGRLRATADAVDLPGIDRLLDGCVLNLPDHADALSALRSP

SEQ ID NO: 84344 - protein, 503 aa, Sphingomonas sp.
  misc_feature (1)..(503): tr|A0A0T0PSA6|A0A0T0PSA6_9SPHN Tryptophan halogenase OS =Sphingomonas sp. Leaf412 OX=1736370 GN=ASG29_07480 PE= 4 SV=1
MTDQNPRTPRRIVVAGGGTAGWMAAAAIARTMGRTVSVTLVESEAIGTVGVGESTIPPLVTYNRLLGIGEAEFMRATQATFKLGIRFDGWRTPDSTYFHSFGTTGKDHWSAGFQHFWRHGAAMGHDQPYDDYCLELRAAEAGKFAHLPDDRMNYAYQLDSSLYAAFLRRMAEADGVRRVEGKIAAVDLHGESGDVASLTLESGERIEGDLFLDCTGFRALLIEGALHAGFDDWTHWLPCDGAIAVQTESVGPAVPFTRATAHDAGWQWRIPLQHRTGNGIVFCGRYLSRDAALERLLANVQGKVLTTPNHIAFTTGARRKQWHRNVVAIGLSGGFMEPLESTSIHLIQRAIIRLIRMMPAGDISPRDVAEFNDQQAQDMEQIRDFLILHYHVTDRRDSPFWRQCAAMDVPDTLRQKIELFRETGRVFRRNEELFAENSWVQVMIGQGIVPRSYHPVAAKLRDAELDRFLGGLRDDVARTVAGLPSHAEYVAHYCGAATPAQAA

SEQ ID NO: 84345 - protein, 511 aa, Caulobacter rhizosphaerae
  misc_feature (1)..(511): tr|A0A561NSN6|A0A561NSN6_9CAUL Tryptophan halogenase OS =Caulobacter rhizosphaerae OX=2010972 GN=FHW61_10276 PE =4 SV=1
MLTETSRENGPLRRIAIVGGGAAGWMAAAALARVLGPQGPAITLIESEEIGIVGVGEATIPPIRAFNAMIGLDEDVFVRETKGTFKLGIEFVDWRRPGHRYFHPFGVYGPDFGPTPFEGAWRRLRQAGLGQSLETYSICAQAAAAGRFARPQPGAGPLSQLAYAFHFDAALYAKLLRAHAEAAGVVRREGKVAAVNLRSGDGFVEAVTMEDGERIAADLFLDCTGFRALLIGQALDSPFEDWSRWLPNDRAVAVPSANAGPPAPYTRSTARQAGWQWRIPLQHRTGNGYVFSSRHVSEDEATATLLANLDGEALAEPRVLRFQAGRRPAGWVRNVVALGLAGGFLEPLESTSIHLIQVGIARLLEMLPTRGFEPADARRYNRLMAAEFDSVRDFLILHFHATERNDTPYWDQLRTMAVPDTLLERLRIYRATGRVFRESDELFTKTSWLAVMDGQGPPVEGCEPLAEGLPLDQVEARLARIATATAQAVQQMPSQAEFIRAHGQAAARIAV

SEQ ID NO: 84346 - protein, 507 aa, Novosphingobium pentaromativorans
  misc_feature (1)..(507): tr|G6E7N0|G6E7N0_9SPHN Tryptophan halogenase, putative OS=Novosphingobium pentaromativorans US6-1 OX=1088721 G N=NSU_0365 PE=4 SV=1
MTQTRFSIVIVGGGTAGWMSAAALARFAPPGYAVTLVESEAIGTVGVGEATIPAIRLFNKALGIDEAQFLRETSASYKLGIAFDGWLGEGHSYMHAFGTVGRPLGLLPFRHYWARAKAAGNAKPLAHYAANELAARTGRMATGVSGPGIPELPWAYHFDAGLYATFLRRLAQSMGVTRHEGRIARVIRKDEGDIAAVQTEGGQTLAADFFIDCSGFKGLLIEEELQTGYEDWRHWLPCDRAVAAPCEAAGPFTPYTRSIARSAGWQWRIPLQHRIGNGLVYCSEYLSDEAATESLLASLEAPAQADPRLLRFTTGRRRKAWNRNVLAVGLASGFMEPLESTSIHLIQSTIMRFLTVLPCGPASPAIVSAFNRRTAEEFECIRDFLILHYKANARAGEPFWDRCRDMAVPDSLAARIAEFEEACQIQPAGDELFQEAAWLQVMAGQGIEPKGWNPIADALSEEDLAGFLGAVEQACLQTVGPMPRHMDFLAATCASALSSSPELETLP

SEQ ID NO: 84347 - protein, 497 aa, Porticoccaceae bacterium
  misc_feature (1)..(497): tr|A0A2E0EVK3|A0A2E0EVK3_9GAMM Tryptophan halogenase OS =Porticoccaceae bacterium OX=2026782 GN=CMK34_05600 PE= 4 SV=1
  misc_feature (339)..(339): Xaa can be any naturally occurring amino acid
  misc_feature (372)..(372): Xaa can be any naturally occurring amino acid
  misc_feature (382)..(382): Xaa can be any naturally occurring amino acid
  misc_feature (393)..(393): Xaa can be any naturally occurring amino acid
  misc_feature (399)..(399): Xaa can be any naturally occurring amino acid
  misc_feature (418)..(418): Xaa can be any naturally occurring amino acid
  misc_feature (428)..(428): Xaa can be any naturally occurring amino acid
  misc_feature (447)..(447): Xaa can be any naturally occurring amino acid
  misc_feature (462)..(462): Xaa can be any naturally occurring amino acid
  misc_feature (464)..(464): Xaa can be any naturally occurring amino acid
  misc_feature (469)..(469): Xaa can be any naturally occurring amino acid
  misc_feature (471)..(471): Xaa can be any naturally occurring amino acid
  misc_feature (483)..(483): Xaa can be any naturally occurring amino acid
  misc_feature (492)..(493): Xaa can be any naturally occurring amino acid
  misc_feature (495)..(495): Xaa can be any naturally occurring amino acid
  misc_feature (497)..(497): Xaa can be any naturally occurring amino acid
MTKQNVKKVVIVGGGTAGWMTAASLTKLIGRDLDVTLVESDEIGTVGVGEATIPTFFALHQLLKINEAEFLSEVQGTIKLGISFENWKDKGEDYIHAFGYTGKSCWAAGFQHFWLKGKELGFSDEYSSYSPELMAAKANKFGLLKQNPLNYAYHIDASLYAKFLRRIAEKSGVTRQEGKIIAVNQSSDGSIKSVDLESGVTVRGDLFVDCSGFAGLLIDKTLGTEFEDWSHWLPCDSAVAVQTASVAPPIPYTRSIARDFGWQWRIPLQSRVGNGLVFSSQYLSDEDAKKVLLDNVEGKILTEPRVIKFRTGQRVKQWNKNCVSLGLAAGFLEPLESTXIHLIQRGIIRLMQMFPLAGITDADRDEFNRQMXDEYYFIRDFXIMHYHVTERRXTEFWRXCREMAIPDSLDHRLRLFKXSGRVFQGEGXVFGENSWTQVMLGQGLMPXQYHPIVNMMSDSELXGXLQSNXAXVDHVINQLPSHXQFLSQYCPXXLXSX

SEQ ID NO: 84348 - protein, 534 aa, Sphingomonas desiccabilis
  misc_feature (1)..(534): tr|A0A4Q2IMF4|A0A4Q2IMF4_9SPHN Tryptophan 7-halogenase OS=Sphingomonas desiccabilis OX=429134 GN=EO081_15080 P E=4 SV=1
MNEHTIRNVVIVGGGTAGWMAAAAFSRFLNNGVTRITLVESEEIGTVGVGEATIPPLLTFNRMLGINENDFIRETGGTYKLGIEFDGWGEIGERYFHPFGSHGHDLGGVHFHQLYLRERKRRVMQDISAWSMSAVAAQAGKFARPAEGAQSAVKELLYAFHFDASLYARFLRRYAEAGGVQRIEGKIAEVAVRPDDGHVAALKLDNGQTVDGDLFIDCSGFRGLLIEEALETGYEDWSRWLPCDRAVAVPSRYAGDPDPFTRATARGAGWQWRIPLQQRMGNGLVYCSDFMTAEAAERELLANLEGEPLAEPRHLSFVTGRRKLGWNRNVVALGLSSGFVEPLESTSIHLVQSGIAKLIALFPDRRFNPVERDEYNRQMRDLYEDVRDFVILHYKATRRRDTPFWDRCRTMDVPETLQRKIDLFRAKGRIFREAAELFATTSWVAVCLGQHIVPEEHEPAADALDEDKVAGALEQMRQGYLQVAAQLPTHGDFLRHTGASLANAPAPPQPAEVPGEPSFSFASEKPFNFSANPL

SEQ ID NO: 84349 - protein, 497 aa, Sphingomonas sp.
  misc_feature (1)..(497): tr|A0A0T0PW08|A0A0T0PW08_9SPHN Tryptophan halogenase OS =Sphingomonas sp. Leaf412 OX=1736370 GN=ASG29_13385 PE= 4 SV=1
MIAAPIRDLVIVGGGTAGWMMAAAAALYLNDGRRRITLVESEAIGTVGVGEATIPPIRDFNAMLGIDERAFLAATGGTYKLGIAFDGWGAPGDSYVHPFGRMGRDFNGIDFHMAWLKHRAAPGVGPLGDYWMAQVAARGARFQHPATDPNTPTGQIAYAFHFDAARYAAFLRERAEAGGVVRVEGKVAGVARDPATGHVATLVLDDGRRIDGDLFVDCSGFRSLLLGQEMGVPFVDWRHWLPCDRAVAVPSERRDPLVPLTRATAHDAGWRWRIPLQHRTGNGVVYSSAHLSDDDAGARLLAALDTPATDTPRTIRFATGRRARSWEGNVVALGLSGGFLEPLESTSIHLIQSGISKLLALFPDTGFAPVLRDEYNRLMGAQYDAVRDFVILHYHANGRVGEPFWDALRDMAIPNTLATRIALFREKGRVLRYDDDLFSIASWVAVLLGQGVMPRGYDPMVDALDDGAVVAALRGLRASYAQAAGAMPDHADYLRRM

SEQ ID NO: 84350 - protein, 524 aa, Duganella sp.
  misc_feature (1)..(524): tr|A0A3D9KWU0|A0A3D9KWU0_9BURK Tryptophan halogenase OS =Duganella sp. GV023 OX=2135490 GN=C7506_1011096 PE=4 S V=1
MKTLPKDGVKQVLIVGGGTAGWLTACFLAKQLGTGADAGSVRITLVESKEIGIIGVGEGTFPSIRGTLATIGIDEARFIRECNGTFKQGIRCNHWVREPGAAGADHYFHPFSLPSQRPGGPELLPYWLQGAAGPGVAFAAAATMQKRVADASRAPKRPADPDFNGPLNYAYHFDAGKFAALLCTHAQSLGVQHVQATVERVALDDDGAIGAIHTKEAGVLTADLYIDCTGFRAALIGEALGTSFRNINDVLFVDRALAMQVPYERPDAPIPSYTIATAHEAGWTWDIGLHQRRGIGYVYSSRHTDDTRAEEVLRGYIGKAADGLNPRQLKLNVGYREQHWVKNCVAVGLSGGFLEPLESSGIGLIETAAYLVSYLFPHDGDFEPVAKVYNEMMKARYERIVDFVKLHYCLTQRKDNAFWTDNADAASIPDSLRDKLAMWRKRAPHRMDFVVDYEMYPPSSWQYVLYGMEYPTDLYANAKTLPRMEEARKEFAMIEQVSHRALADLPDHRAMVEHLLQRGERKIA

SEQ ID NO: 84351 - protein, 497 aa, Mycobacteroides sp.; identical to SEQ ID NO: 82350
  misc_feature (1)..(497): tr|A0A0R3ICH3|A0A0R3ICH3_9MYCO Tryptophan halogenase OS =Mycobacteroides sp. H001 OX=1720565 GN=AOT83_22510 PE= 4 SV=1

SEQ ID NO: 84352 - protein, 508 aa, Duganella sp.
  misc_feature (1)..(508): tr|A0A3D9KUB5|A0A3D9KUB5_9BURK Tryptophan halogenase OS =Duganella sp. GV023 OX=2135490 GN=C7506_101470 PE=4 SV =1
MQPLKDIVIVGGGTAGWMTAAALSKMLKGQYNIKLVESDQIATIGVGEATIPMINLFNRMLDLDEDDFMRQTQGTFKLGIEFVNWGRIGDRYVHGFGVIGQDGWTVDFYQHWLQQYLAGKASALEHYSINNVAAMHNKFTRARPELGNSPLSQIVHAYQFDASLYARFLRNFSETRGVQRVEGKITQVRQRDADNHVTAVVLENGTVIAGDLFIDCSGFRALLIEGAMNTPFEDWSHWLPCDAAIAVPCANGPELTPYTRATAHGAGWQWRIPLQHRIGNGHVFSSKFMSADEAQSILMNNLDGEALAEPRTIRFRTGKRSKAWHGNVVSIGLSCGFIEPLESTSIHLIQMAIAHLISYFPSGGFDAADIRQYNRVMDEEYRWARDFVILHYKATERDDTRFWNYCRQMEVPEDLQHRIDLFRSHGRVFRDGLELFTQHNWLQVLHGQRVRPRASHPLVGLTGAAQIDGLLKEVESVIRNCVGAMPTQAAFIAAHCAAPIIKTEGRNQ

SEQ ID NO: 84353 - protein, 493 aa, Sphingomonas sp.; identical to SEQ ID NO: 83464
  misc_feature (1)..(493): tr|A0A0Q4K6R2|A0A0Q4K6R2_9SPHN Tryptophan halogenase OS =Sphingomonas sp. Leaf29 OX=1736212 GN=ASE81_00085 PE=4 SV=1

SEQ ID NO: 84354 - protein, 516 aa, Streptomyces sp.
  misc_feature (1)..(516): tr|A0A4Q6IGK9|A0A4Q6IGK9_9ACTN Tryptophan 7-halogenase OS=Streptomyces sp. F001 OX=1510026 GN=StrepF001_26090 PE=4 SV=1
MVDKVVIVGGGTSGWMSASYLKAAFGDRISVTVVESDRVPTIGVGEATFSTVRHFFEYLGLKETDWMPACNATYKLGIRFENWSEVGKHFYHPFERLRVVDGFPLTDWWLKQRPSDRFDVDNFVMAQLGDTLRAPRFLDGTLFERGSSELGPGGAAFRSTLTEQDTQFPYAYHFDAALLAKFLTEYGVSRGVRHVTDDVVDVKLDDRGWISAVATRGHGDLEGDLFIDCTGFKGMLLNGALEEPFVSYQDTLPNDRAVALRVPVDTAVKGIAPYTKASAMEAGWIWTIPLFDRIGTGYVYASEYTTPEEAERTLREFVGPEAEGLEANHIRMRIGRSRNSWAKNCIAIGLSSGFVEPLESTGIFFIQHGIEQLVKHFPQADWSEQLRDSYNRAVNNCMDGVREFLVLHYRGAARSDNAYWKDAKTRKVPDALQGRLEQWQTKLPDAENIFPHYHGFEAYSYVAMLMGLKGIPLRAPGALDLMDGSAAAEEFARVRSTSSELVRSLPSQYEYLAQMH

SEQ ID NO: 84355 - protein, 521 aa, Caulobacter rhizosphaerae
  misc_feature (1)..(521): tr|A0A561NLZ7|A0A561NLZ7_9CAUL Flavin-dependent dehydro genase OS=Caulobacter rhizosphaerae OX=2010972 GN=FHW61 _104324 PE=4 SV=1
MTKHIVIVGGGTAGWMTACYLARMLAGPDAQAVKITLVESEDIGIIGVGEGTFPSIRKTLKRIGLDEAALVREANATFKQGIRFANWRHAPSVDPGDHYYHPFQIAEQHTDLDLLPYWLLGEAGEAPWARASTVQQAVIEARRAPKLIDHPDYAGPLSYAYHFDAVAFGQVLRRHAIGQGVVRIADTIGEVRLTEDGAIAALVGAVSGELRADLYIDCTGFRAQLIGQALKSEFTSYRDQLFCDRALAVQLPYEQPDAPIASCTISTAQESGWTWDIGLQERRGVGYVYSSRHTDDERAAQVLSAYAGVAPDRLEPRLLKFEAGFRRTQWRKNCVAIGLSAGFIEPLEATGIGFSEIAALILANLFPWSGEYEQAARQFNAQMQRRYEHVIDFIKLHYCLSQREDTAFWRDNRDDRSMSETLKEKLRIWRHRPPSFLDVDLNHDIFVEQNWQYILYGMGFATDLSGRAPALRFSAEARAEFASIAEQARFALTVMPDHRALIDQVRRSGFQRPAPARRASR

SEQ ID NO: 84356 - protein, 502 aa, Sphingomonas sp.
  misc_feature (1)..(502): tr|A0A1I5G4X1|A0A1I5G4X1_9SPHN Tryptophan halogenase OS =Sphingomonas sp. OK281 OX=1881067 GN=SAMN05428984_3404 PE=4 SV=1
MKRVQRLVILGGGTAGWMTAAAMSATFGDLVNISILESDAIGTIGVGEATIPTIHWFNQLIGLDEEAFVAATKASFKLGIEFVDWARPGTRYFHPFGRYGVDLGPVPFHQHWLRGKGDGLDRPLSVYSLAAQLAAAGRFAKPVDDPRSILSTLGYAYHFDAGLYARHLRQLAEKRGAVRHEGLLRDIERDPKTGFVTALTSDRGERLEGDLFIDCSGFRALLIGETMGARFEDWSHWLPCDRAVAVPCARIAATTPFTRSTLRPAGWQWRIPLQHRTGNGYVYASSFVSDDEAVATLLSNLDGEALADPRMLRFTAGFRREAWRGNVVAIGLSSGFLEPLESTSIHLIQSGIAKLITLFPDADCDPVLARQFNTLFARDMDGIRDFLILHYHATQGHDAPLWQHTHHMTPPPTLVDKIAQYTRAGRLMLSADELFREPSWLAVLEGQGVGALGHAPLADTLDAATNRRQLNQIETVIARATPTLPLHDAAIAALVAPQVAGR

SEQ ID NO: 84357 - protein, 521 aa, Thalassotalea sp.
  misc_feature (1)..(521): tr|A0A516HEG6|A0A516HEG6_9GAMM Tryptophan 7-halogenase OS=Thalassotalea sp. PS06 OX=2594005 GN=FNC98_12860 PE= 4 SV=1
MNAKSTNSVKSVLIVGGGTAGWLSACYLAKQLNQQQQNITITLVESPDIPIIGVGEGTWPTMRTTLQRIGIDESRFIRECDVSFKQASKFVNWHRPADNGKDNFYYHLFDGPGFSWEFNPVPFWLDGSLGDISFANAISLQEQVCQHNLAPKMMVTPQYQGVFNYAYHLDAGKFGQLLKTVATEELGVNHISANVTDVHLDDDGDIAFLSTDRTQSLTADLFIDCSGFKSLLLGEALNVPFKDLNDVLFVDRAVTIQAPYEDQQGPIASQTISTAQEAGWIWDIGLQSRRGTGYVYASKYSSPERAEQLLREYLGDKEQKLEARHLQMRVGHRQKFWEKNCVAIGLSAAFMEPLEASAIFLVEAACFMLAEQFPKDSQSMSYVRDNFNDSFAFRWQKTVEFIKMHYVLSERDDTPFWRDNKHPDSIPEELQKRLSHWLQNPVSKYDFASQFEPFTKESYEFILYGMRPNLSISAPILDPSLRDKAQKQSKWIQESWQQAQQQLPTNRELLNRLKENGFQKL

SEQ ID NO: 84358 - protein, 517 aa, Thalassotalea sp.
  misc_feature (1)..(517): tr|A0A516H9M0|A0A516H9M0_9GAMM Tryptophan 7-halogenase OS=Thalassotalea sp. PS06 OX=2594005 GN=FNC98_03320 PE= 4 SV=1
MNQPVKRIIIVGGGSAGWLSAGLIAAEHETKNSNSIEVVLIESANIPTVGVGEGTWPSMRASLKKMGISETQFLTECDASFKQGSKFSNWLHGDGDSYYHPFTPPVGFFETNIAQHWYPHRDKVSFADAVTCQGQLCDNNLAPKQIATPEYAFHANYGYHLDAAKFSKLLQQHCTQALGVKHILDDVTDINSCPQSNDIASVSTLEHGDIEGDLFIDCTGSKSLLLGGYYGVEFIDQSAVLFNDSALAVHVPYQTPDAEIASHTLSTAQTSGWIWDIGLPSRRGVGHVYASDYISDEQAEQQLRDYIRADIGDQADTLDIRKISIKPGHRKTFWHQNCVAVGMSAGFIEPLEASALALIEQSAKMIAEQLPANRQIMDITAKRFNQRFSHHWQRIIEFLKLHYVLSKRSEPYWQDNRAQHSIPEPLQELLTLWQYQTPFTFDSSRTEELFPAASFQYVLYGMGFDTDLSWLQKRHVPMQSVQQYFNENNKKTQHLLRTLPSNRELLNKIRQFGLNKV

SEQ ID NO: 84359 - protein, 582 aa, Sneathiella sp.
  misc_feature (1)..(582): tr|A0A2E2QK04|A0A2E2QK04_9PROT Tryptophan halogenase OS =Sneathiella sp. OX=1964365 GN=CMN56_08360 PE=4 SV=1
MDNQINEVTIVGGGTAGWLAAAFLVRFMNLRKEESPTKITLIESPNVPTIGVGEATVPTMAALLKSLGISEKEFFIRCNASFKMGVRFTNWSHDEEGQPKSFIHPFEAIRTQLGGQNPAYHFHKYGGPPGREGIDDCMSFSGTAIKHKLGPKLLTHGDYETQLNYAYHLDAGKFAEFLRDISIERGVNHVLDDVEEVEQDERGFISALKLQRQGRRPVELVIDCTGFKGVVINQVLGVPFRDYSKYLLNNRAMAVQIPHRDVSKIEPCTNSTALGAGWVWRVPLYNRIGTGYVFSSNFRSDDEARDEFLAHLGEDGKKAEPRVIPVRIGRMERAWEKNCIAIGLSAGFIEPLESTAIYMIENFVKLLLINFPDKSFPPILAQRFNEKTEKMMQSIRDFIILHYCLNNREDSEYWRVAREEMTIPDSVKDLLDEYRHSLPVNTEFDGTYLFNYFNYNVILFAKGYLKDIRYPAERFIARRDWEQRMADFIRYEQKELKGLPNHYELLRKIRGEDEVKVSQSGVSFGGFGGPAFGAPPGGVQMPQATVQLGGGPMKPSIRFAAKKSEEPAKETEQDDLSGSHIL

SEQ ID NO: 84360 - protein, 515 aa, Caulobacter rhizosphaerae
  misc_feature (1)..(515): tr|A0A561MXK6|A0A561MXK6_9CAUL Tryptophan halogenase OS =Caulobacter rhizosphaerae OX=2010972 GN=FHW61_11359 PE =4 SV=1
MSKRILIVGGGTDGWLTAGYLARTLGAQSPGGIEITLVESAETGILGVGLGEGALPTIRRTLRCIGIDEATLIREASATFKQGARFAHWRFEPGAGQPDHYLHSFQVPQEPSGLDLLPYWLLGAAGESEWSQINTPQKIAADAGCGPKLITHPDYVAPLNHAYHFDAAKLAGVLRDAATGLGVRHLVDTIDEVSLTEDGAIDTVRGRASGPMTADLYVDCTGVRAKLIGQALKSPYKSCRSVLFCDSALTMQVPYERPDAPIASYTISTAQKAGWTWDIGLDSRRGVGHVFSSDHTDVETAERVLRDYVGEAGEGLGVRHIKFEAGYRETNWVKNCVAIGLSSGFFEPLEATGIVFAEAAAVMLATLFPWGGEMETAARQYNALMRRRYERALDFIKLHYCISERRDTAFWRDNVEASTIPDSLHELLDRWRFRPPDAIDIDPNVDIFTETSWRYVLYGMGYQTDLGPKAGAYRHFNEARAAFADILEQADHACQNLPTHRDLIELAQRRGFGEG

SEQ ID NO: 84361 - protein, 502 aa, Sphingomonas sp.
  misc_feature (1)..(502): tr|A0A1I5C952|A0A1I5C952_9SPHN Tryptophan halogenase OS =Sphingomonas sp. OK281 OX=1881067 GN=SAMN05428984_1042 PE=4 SV=1
MTDPNRGPIRKVVIVGGGTAGWMAAAAAARYLDDGQRQVVLIESDAIGTVGVGEATIPPILGFNALLGIDERDFLRATGATFKLGIEFVGWDTGHDRYMHAFGGHGRDIQGLAFHQLWLKLRDRPGIGALDAYAPSAVAAYLHKFGQPNGQQPLAYAYHFDAGLYAAFLRRRAEAGGVTRIEGRITGTDRDADTGHVHAVRLDDGRSVDGDLFIDCSGFRSLLLGETMGVPFEDWSHWLPCDRAVAVPTEPTAPLLPYTRATARTAGWQWRIPLQHRTGNGHVYSSAHLSDDEATSVLLANLDSKPTAEPRQLRFKAGRRAKMWEGNVVALGLAGGFLEPLESTSIHLIQTGISKLFALFPDRGFSDVERDEYNRLMGDAYTSVRDFIILHYHATRRDDSPFWRHVRTMPIPDSLTRKIALFREKGRIFRYDDELFGISSWVQVLLGQNVIPVGYDPIVDALDADRVADAVRQIRATTLRDVQALPSHAEFIANSASSPRTM

SEQ ID NO: 84362 - protein, 490 aa, Sphingomonas sp.
  misc_feature (1)..(490): tr|A0A1I5C995|A0A1I5C995_9SPHN Tryptophan halogenase OS =Sphingomonas sp. OK281 OX=1881067 GN=SAMN05428984_1041 PE=4 SV=1
MTSRAPVASIAVLGAGIVGLSAAIAFARALPGLSVTLVETPDDPAALTDRLPGTLSSIAEFHDRIGLRERDLLAASTTHRIGTRLSDWTADGAPFVLAHGERGGAIAPGAFHQHWLNARRGGKVAGFDAFSVATVLAAGDKFVHPSDDATSPVSGFDYALRLDPPRYRDLLRALARHIGIVPTPGVFADVERTVDGRVAALRLADGRRIVADLYLDCSGPAASLRSALDVQWEDWRTGLPVDQLLLGTAPVQLPTPTDDLVAVPAGWRFASPLRDRTMVGLAFASDQTSESSARRILPAGETIVALAPGARREPWRHNVLALGDAAVVLDPLADANLHLAHAAILRAIDLLPGCDCAPTELAEYNAQSVRQASRVRDYQAAHYLPTGRTRGPFWKRASRLPRPDGLAHTLEQFAHRGRLPFYEDESFDTDDWHGLLLGLGVIPRVPDPIASAHPPETVAATLKRLADATAALPARLPPYPHYLAQLERAR

SEQ ID NO: 84363 - protein, 533 aa, Caulobacter rhizosphaerae
  misc_feature (1)..(533): tr|A0A561NEB4|A0A561NEB4_9CAUL Glycine/D-amino acid oxi dase-like deaminating enzyme OS=Caulobacter rhizosphaer ae OX=2010972 GN=FHW61_106193 PE=4 SV=1
MRLSPSAGGRYQGGMDRRRRILIVGGGAAGWLTAAYLAKSLRIAEQAHLEITLLESPEVGIIGVGEATFPTIRTTLQFLGVDEARFIRQTSATFKQGIRFNDWAWAPREDGSRHQYFHPFEAPFSTDGASLAPYWLLQNEATRAPFAEAMTIQARVADAQRAPKRPHEGNFSGPLNYAYHFDAAKLAQVLAERARELGVRHLQGRLTHVELDAAGAIDHLVCAEHGRLEAELYVDCTGFHAELIGKALKAPFRSARPILFADRALACKAPYDRPDAPIQSFTIATAHEAGWIWDIGLNDARGVGCVYSSDHVDDGRAEAILRDYVGRGVEIAPRALSFEAGYRTKQWVKNCVAVGLSAGFLEPLESTGIVLIEAAVAIIAELFPHNGPISAPALRFNELMTARYDNIITFLKLHYCLSRRTEPFWRENADPASMPERLVDLLEQWRWRPPTRYDFILDLETFAFFNYQYILYGMGFKTDLSPGRDEFPDVAGAEKLFAKIRNFGERATHDLPSHRDLIAQINRFGFDRSLEPA

SEQ ID NO: 84364 - protein, 509 aa, Sphingomonas sp.
  misc_feature (1)..(509): tr|A0A1I5C918|A0A1I5C918_9SPHN Tryptophan halogenase OS =Sphingomonas sp. OK281 OX=1881067 GN=SAMN05428984_1040 PE=4 SV=1
MAKMEHAPTRVVVVGGGTAGWMTAAALVRLLPSACSVHLIESAEIGIVGVGEATLPHIRAFVERLGLDEADFMRATHATFKLGIDFRDFGAIGDSYIHPFGTFGRPLDDVGFHHYWLRLAAEGRAGPIGDYSVAVAAARRHRFAIPDGAPDDLAASFGYAYQFDATLFGPYLRRFAEAHGARRTEARIVRVEQDAVSGDVRALRLDSGETVEGDLFVDCSGFRSLLLGDAMAEPWEDWSKWLPCDRAVAMPCTSPDGPIEPYTRATAKPAGWQWRIPLQHRVGNGYVYSSAHITDQAAAEALVASVEGTPLADPRFLKFRAGRCRNSWVGNVVAIGLASGFLEPLESTSIYLAQMAITQLIELFPQRAGSQGIAATDRTEFNRMVDMEYDRIRDFLILHYHATTRDDSDFWNHVRTMDIPTTLADKMELFRRAGRVTRYSEGLFLEPSWIAVYLGQGIIPQAWDQRADRPGLDGLDRALASLRDTVASTAGAMPDHAAFIARRNATIAA

SEQ ID NO: 84365 - protein, 539 aa, Porticoccaceae bacterium
  misc_feature (1)..(539): tr|A0A2D4QQW1|A0A2D4QQW1_9GAMM Tryptophan halogenase OS =Porticoccaceae bacterium OX=2026782 GN=CMK43_07830 PE= 4 SV=1
MRKVVIVGGGSAGWMTAAYLNGALNRQGRDNNVHITLLESPDIPRISVGEATIPSMRHLLAVVGVDENDFMRTTDATFKQSIKYVNWVKNDNSFYHHPFSRYEQFPIDHSSADWLKSDRSIPYMETVSAQPILCEMGRAPVMMSKLAMDPPLNYAYHMNAQKFADYLRDFSLPRGVVHVQANLSGVNQQENGFIKSIETDNEMTLSGDLFIDCTGFKAKLIGEAMTIGVEDCSQWLLCDQAVTMHVPYDSHYPGLVRPYTTATALSSGWVWDIPMQSQRSIGYVHSSHFISDDDAEREMRAYQGSSADQLNSRQIKFSVERRHKVWEGNCIAIGLSGGFIEPLESTGLYLSDLGAVALAEHFPFDDSHIESMAYRYNRVLSNRFYEILDFINMHYCLTKRTDTSFWQEVQRPERINDRLKAKLEYWTMRPPTPLDFEDQCFPTLSTAASSNPAFPHAPVDTAALWNHQSYQCILLGMNFMDEIHDSKSQAQRPQPRVADAVINRLTEGNKKLPPHELWLQENVGMGHYAKGTKPAGWVA

SEQ ID NO: 84366 - protein, 496 aa, Porticoccaceae bacterium
  misc_feature (1)..(496): tr|A0A2D5U7Z7|A0A2D5U7Z7_9GAMM Tryptophan halogenase OS =Porticoccaceae bacterium OX=2026782 GN=CMK25_07315 PE= 4 SV=1
MSTEKVTKVVIVGGGTAGWMAAAALARLIGRNIHVSLIESEEIGTVGVGEATIPTMMTLHHLLKINEREFLSAVQGTFKLGISFENWKNLNQDYIHSFGLTGQDCWAGGFQHFWLKGRQRGISEDFGHYSTELMAAKANKFAVLPNNGLSYAYHMDASLYAKFLRKLAEAAGVQRIEGKIVKVDINANSGDIDKLTLESGQVVEGELFVDCSGFRGLLINETLQTPFDDWSQWLPCDSAVAVQTASVSPPIPYTRSIAREAGWQWRIPLQSRVGNGLVFSSKHLDDEQATDVLLKNVEGDVLTTPRVIKFRTGQRSQHWVKNCVALGLAAGFVEPLESTAIHMVQRGIIRLLQMFPKEGIEQPDMVEFNKQMTDEYVFIRDFVIMHYHITEREDTPFWRHCKSMAIPDSLQHRLDLFKQTGRVFQQAGDVFAENNWTQVMLGQGLIPDQYHPIVDMMSDSELENFLSNLKQRTDSIVSQLPKHEEFIASYCKGASN

SEQ ID NO: 84367 - protein, 526 aa, Porticoccaceae bacterium
  misc_feature (1)..(526): tr|A0A2E8HS42|A0A2E8HS42_9GAMM Tryptophan halogenase OS =Porticoccaceae bacterium OX=2026782 GN=CMK37_05950 PE= 4 SV=1
MTQTKNINRIVILGGGSAGWLTAGVIAAEHCTGGDSAGLADTTITLVESSTISTIGVGEGTWPSMRSTLQKIGISETDLITKCDASFKQGTLFHGWKTGEGDSYTHPFTVPYGYKDTNLADQWRRFRHQIPFAEAVSSQNSLMFSDLAPKQITTPEYAFNTNYGYHLDAAKFAELLKMHCVENLNVNHIVADVVGVNSNSTGDISSLLIDAEEDVEGDLFVDCSGSRALLLGEFYGVPFVSKKKFLFNDSALASQVPYSSSEDPIASSTISSAQTEGWVWDIGLPTRRGIGHVFSSAHSDEDQVGESLLKYIEKTVSPEAASKTSIRKISFSPGHRAKFWHRNCVAIGMSAGFIEPLEASALVLVELSASMIAEELPANREVMDIVAKRFNDKFLYRWDRIIDFLKMHYVLSERKDSDYWRDSVSSESIPDSLAEKMELWRWQSPWHRDTMHVDEMFPSASFQYILYGMDFKTRARTANRRSDFDAQNSAERLFQENAQRTKKLVAAMPTNRELINKIQTYGLQKI

SEQ ID NO: 84368 - protein, 522 aa, Porticoccaceae bacterium
  misc_feature (1)..(522): tr|A0A2D8WR82|A0A2D8WR82_9GAMM Tryptophan halogenase OS =Porticoccaceae bacterium OX=2026782 GN=CMK26_01655 PE= 4 SV=1
  misc_feature (9)..(9): Xaa can be any naturally occurring amino acid
  misc_feature (29)..(29): Xaa can be any naturally occurring amino acid
  misc_feature (34)..(34): Xaa can be any naturally occurring amino acid
  misc_feature (71)..(71): Xaa can be any naturally occurring amino acid
  misc_feature (99)..(99): Xaa can be any naturally occurring amino acid
  misc_feature (237)..(237): Xaa can be any naturally occurring amino acid
  misc_feature (396)..(396): Xaa can be any naturally occurring amino acid
  misc_feature (408)..(408): Xaa can be any naturally occurring amino acid
  misc_feature (414)..(414): Xaa can be any naturally occurring amino acid
  misc_feature (430)..(430): Xaa can be any naturally occurring amino acid
  misc_feature (498)..(498): Xaa can be any naturally occurring amino acid
  misc_feature (501)..(502): Xaa can be any naturally occurring amino acid
MNDPQITDXVIVGGGSAGWLTAGIIAAEXLKTEXSSSRVKVTLVEAPNINTIGVGEGTWPSMRSTLKRIGXSETDFIRDCDVSLKQGTLFSGWTDGKDXYTHPFTVPHAYSQHNLSRDWQNKFSDLPFAEAVCPQSKLMLKNQAPKKISTPEYSFNVNYGYHLDAGKFAEKLRSHCTLELGVVHKKAEVIQVNSAENGDIRSLRLDTGESLTGDLFIDCSGSRCLLLGEHYGIPFKXIRDILFNDSAIASQVPYLSAGDSIASSTISTAQKHGWIWDIGLPSRRGIGHVYSSRYTDADNAEVTLFKHIEKLVGSKIAKKVKMRRISFSPGHRQKFWHHNCVAIGMAAGFIEPLEASALVLVELSASMIAEQLPQNRKVMDIVSKRFNEKFLYRWDXIIDFLKLHYVLXKREDSXYWRDNANKNSIPESLXEKVELWRWQGPYHKDTMHVDEMFPSASYQYILYGMGFKTNIGLSTKQSEVQTSKVAQELFDENLKYTXLLXXSMPSNRDFIEKVHQHGLQKI

SEQ ID NO: 84369 - protein, 547 aa, Streptomyces sp.
  misc_feature (1)..(547): tr|A0A2T7M1F9|A0A2T7M1F9_9ACTN Tryptophan 7-halogenase OS=Streptomyces sp. CS147 OX=2162715 GN=DBP21_21600 PE= 4 SV=1
MTHLHSGLPQLPGKSGPRSTGICGATEKESPVLNNVVIVGGGTAGWMTASYFKAAFGERINITLVESGNIGAVGVGEATFSDIRHFFDFLGLKEKDWMPACNATYKLAVRFENWREEGHYFYHPFEQMRSVNGFPLADWWLREKPTDRFDKDCFVMPSIIDAGLSPRHLDGSLIDQPFVEGADEMQGLTMSEHQGKTQFPYAYQFEAALLAKYLTTYSVERGVKHIVDDVQQVNLDERGWIRNVTTAEHGEIGGDLFIDCTGFRGLLLNKALEEPFISFQDTLPNDSAVALQVPMDMERRGILPCTTATAQDAGWIWTIPLMGRVGTGYVYAKDYISPEEAERTLREFVGPAAADAEANHIKMRVGRSENSWVKNCVAIGLSSGFVEPLESTGIFFIHHAIEQLAKNFPGEDWNPVQRNLYNDSVAHVMDGVREFLVLHYVAAKRSDTQYWRDTKTRKIPDALAERIEKWKTQLPDTETVFPYYHGLPPYSYHCVLLGMGGIDVKPSPALALGDSAAAEREFAEIREKTRHLTSVLPKAYDYFSRMR

SEQ ID NO: 84370 - protein, 503 aa, Asticcacaulis sp.
  misc_feature (1)..(503): tr|A0A2T5XR32|A0A2T5XR32_9CAUL Tryptophan halogenase OS =Asticcacaulis sp. CF398 OX=2135738 GN=C8K45_0874 PE=4 SV=1
MVHAPIQTLVIAGGGTAGWMTAAALAHHFAGTPLKIRLVESSDIGTIGVGEATIPTIRSFYQSLGMDDAGVIRATQGTAKLGICFSGWRQPGHDFIHPFASYGQDFGEIAFPQVLARLAAEGAPHTLENYSLGLQLARAGKFAFAPNPPPFSGAYFDWALHLDAGLFAAHLRRFAEGLGVERIDARIEEVTTDAETGFVTALRLDGGREVAGDLFVDCTGFQALLIGKNLGTGYESYADWLFCDRALAVQSESRDVGAPYTLVTAREAGWTWRIPLQHRTGNGYVYSSRHTDDETALKTLTGAIPDKLLMEPRPLRFTPGRRADAWVKNVVAIGLSSGFLEPLESTSIALIQTGIEKLKQLFPRTDFHPSLAAEYNDMSKREFERVRDFLILHYWASQRDEAFWADCRQVDLPDTLKHKIELYRARCHFVRYRWEMFHPQSWLAIYDGFGIAPDACDPAAERLNRADIDAALKQMRDYISTTVAKAPSHAAFIQWCQQQEKAA

SEQ ID NO: 84371 - protein, 496 aa, Hyphomonadaceae bacterium
  misc_feature (1)..(496): tr|A0A0F2QFJ7|A0A0F2QFJ7_9RHOB Tryptophan halogenase OS =Hyphomonadaceae bacterium BRH_c29 OX=1629720 GN=VR75_1 5785 PE=4 SV=1
MESQKIRKVVIAGGGTAGWIVATALSRLLGPLLDVTLVESDDIGTVGVGEATIPTHRTFHHLVGIDERDFMRATKATFKLGIAFENWGQVGDRYIHSFGQVGKPNWMGEFYNIWLLAKERGFGGSLEDYCLELKAAEANKFYTAKDAPINYAYHLDASLYAGFLRKHAEARGAKRVEGLIETVEQDPESGFIKALILKSGERVEGDLFIDCTGFRGLLIEQTLKTGYEDWSRWLPTDSALAVQTRSTESAIPYTRAIAHQAGWQWRIPLQHRVGNGLVFCSQYMSPDDAHDVLAQKVAGERLTEPRLIRYKTGRRRKVWNKNCIAIGLSSGFVEPLESTSIHLIQINATRLVQQFPFAGCSDAIANHFNAQSERELDKIRDFIVLHYKLTERDDSPFWRAMRDADIPDSLAQRIALFRENGLVYRGPDELFLTDSWLQVMLGQRLEPKGYHHMGRLMSDEQINMVLNGIRDNISKAVDRLPLHQDFVDQYCRVDEV

SEQ ID NO: 84372 - protein, 503 aa, Gallaecimonas xiamenensis
  misc_feature (1)..(503): tr|K2K9M4|K2K9M4_9GAMM Tryptophan halogenase OS=Gallaec imonas xiamenensis 3-C-1 OX=745411 GN=B3C1_09358 PE=4 S V=1
MNQGVRKVLIVGGGSAGWMAAAMLARLLDKQVAISLVESDAIATVGVGEATIPPIQLFNKVLGLDEAEFLAKTQGTIKLGIEFENWGKQGQRYMHAFGDLGRDLGLTPFVHLWLRAKAEGHGQGLWDYSLNYQAAKAGRFIPLERIPGSPLKGLVHAYHFDAGLYAKLLRQHAEGAGVTRIEGEITAVPLDDSGAIAAVQLASGRRLEADLYIDCSGFRALLIEGALKTGFEDWRHWLPCDRALAVPSSNSGQPRPYTRAIAHEAGWQWQIPLRHRTGNGHVYASEYLSDDEAAAKLLANLEGEPLAEPRLIRFQTGRRKAQWRKNCVSLGLASGFLEPLESTSLHLVQSGITRLIKLFPRLQINPALVDEYNRQSAQEFEAIRDFIILHYHLNQRPEPFWQARRQMPVPASLARRMALFAATGRVFWEQHELFTEPAWYQVMLGQNLAPADYGPMADGLEQGQLQKLLADTRTTISQTCQKLPSHGDFLARVQALAKERGLV

SEQ ID NO: 84373 - protein, 505 aa, Asticcacaulis sp.
  misc_feature (1)..(505): tr|A0A2T5XI36|A0A2T5XI36_9CAUL Tryptophan halogenase OS =Asticcacaulis sp. CF398 OX=2135738 GN=C8K45_3114 PE=4 SV=1
MPKPAISKIVIVGGGTAGWMAAAALAKTFPAPHYSITLIESDEIGTVGVGEATIPSIQTFNELLGIDENAFMKAVNGTFKLGIRFRNWKTPGSDYFHPFGVYGVDMGGLNFTHYWMRYHKAGGSGDFGLFNPQTLASREGRFGRMAEINPNVPRVNYAFHFDASLYARFLRSYCEPRGVVRQEGRITDMQQDAQSGDIASVTLADGKQISGDLFIDCSGFRGLLIEQTLKSGYEDWSQWLPCNRAVAVPCEKVGPAAPYTQSTAQEAGWQWRIPLQHRTGNGYVFCDSYMDEDTASDLILQRLDGKAQANPRVIRFTTGHRKQMWNRNVVAMGLASGFLEPLESTSIWLVQEAIMKLIRYFPRDRITDSHRRSFNADLLAAYDNVKDFLIAHYKVTEREDTPFWAYCKHMAIPDTLQARLDSFREANDSLVKSDELFKEASWFAVLAGQGMMPQSYHPGADLMLEDEFRWRMQKVREGSQGLAKMMPSHESYITKACPSSQLVAV

SEQ ID NO: 84374 - protein, 500 aa, Hyphomonadaceae bacterium
  misc_feature (1)..(500): tr|A0A0F2QLD5|A0A0F2QLD5_9RHOB Tryptophan halogenase OS =Hyphomonadaceae bacterium BRH_c29 OX=1629720 GN=VR75_0 3830 PE=4 SV=1
MEHLRKVLIVGGGSAGWMTAALFAKLLNGIYDVTLVESEEIGTIGVGEATIPAIKKYNALLELSEDDFLRRTNGTFKLGIQFNDWLRLGSSYIHGFGVIGQDLGWLRCHQYWLKMQGLGKASDFANYSINTAAALSNKFMRSAPELKESPLAHIAHAFHFDAGLYARYLRGFSEARGIKRVEGKIGEVKLRPEDGFVESVVLQNGETLAADLFIDCSGMRAIVIEGALQTGYENWSHWLPCDRAVAVGCQRSENFTPYTKSTALAAGWQWRIPLQHRTGNGHVYSSQYMDADEAERILLANLDGSPTNDPLHIRFETGKRKKIWNKNCVAIGLSSGFLEPLESTSLHLIQSAIIRLLRFLPDQSFDPATIAEFNRQTDYEYERIRDFIILHYKATERGDSEFWRYCRGMSVPATLQRKMDLFAGSGRIFREDEELFSEESWIQVCIGQGIMPKAYDPMVDIRSEAEIEAYLNNIEAVVRKCVAVMPTHAEFVERNCLAPA

SEQ ID NO: 84375 - protein, 140 aa, Oxalobacteraceae bacterium
  misc_feature (1)..(140): tr|A0A4V1TKX4|A0A4V1TKX4_9BURK Tryptophan halogenase (F ragment) OS=Oxalobacteraceae bacterium OX=1871070 GN=EO O77_44125 PE=4 SV=1
KATRQAKRFNEQAAADIERIRDFIVLHYVLTERNDTPFWDTCRTMEIPETLKDRIALFRESGMAYQDAEEIFRVASWAQVMIGQRMSPREHHRMGRIMGEERLRQVMSEMRSHVSRQVSLLPTHHGFIDNYCKDNKVSVS

SEQ ID NO: 84376 - protein, 498 aa, Xanthomonadales bacterium
  misc_feature (1)..(498): tr|A0A354Z9W3|A0A354Z9W3_9GAMM Tryptophan halogenase OS =Xanthomonadales bacterium OX=2006849 GN=DDZ76_12790 PE =4 SV=1
MTDQPMRTVVIVGGGTAGWMAAAVLSKAFGSSLTIELVESDEIGIVGVGEATIPQIRLINQFLGLDENEFLRASQGSFKLGIQFNDWTRLGDSYLHAFGEIGLPIGLLGFHHYWLRASAEGLTEPYWAWSLNAQAAAGLRFDRLERIGQSPLGGIRYAFHFDAGLYARYLRSHSEARGVRRTEGRIVTVERREPDGDIAAVVLDGGRRIAGELFLDCSGFRGLLIEGALASGYDEWSHWLPCDRAIAVPSSRSETFRPYTQANARSAGWQWRIPLQHRTGNGHVYSSRHMSDDQAAAILLANLDGEPLADPRPLRFVTGMRRRCWVGNCIAIGLASGFMEPLESTSIHLIQSAIGRLLQLFPQRHIDPALRDEYNRQTRFEYERIRDFLILHYKATERDDSEFWRACAAMPIPESLQRRIDLFRADGRIQRDADELFTEGSWVQVLLGQGIVPKQHHPVADAIDRTRLHEILHASHALIARTAQALPSHAEFVAGISA

SEQ ID NO: 84377 - protein, 169 aa, Oxalobacteraceae bacterium
  misc_feature (1)..(169): tr|A0A4Q3LTV1|A0A4Q3LTV1_9BURK Tryptophan halogenase (F ragment) OS=Oxalobacteraceae bacterium OX=1871070 GN=EO O77_07865 PE=4 SV=1
GIGLAAGFLEPLESTSIHLIQLGIMRLLGLFPTADFAPVLPATYNREMRRKYDGIRDFLVLHYLATERDDSEFWRERQATRPSEALARKIDLYRAGGILIHDQEELFRPSSWLAVFEGQGIRTDERLPLVDRFPQELVDRRLEELDKIIGLAVADMHAADRYIRDVQTS

SEQ ID NO: 84378 - protein, 501 aa, Shewanella putrefaciens
  misc_feature (1)..(501): tr|A0A3S4R1T7|A0A3S4R1T7_SHEPU Geranylgeranyl reductase family OS=Shewanella putrefaciens OX=24 GN=NCTC10737_0 2922 PE=4 SV=1
MKVKQAIRKIIILGGGTAGWMAAAALANNPVFAAIELCLVESDNIGTIGVGEGSTPHLKRFMDNLGISENDWMERCHASYKTGIDFINWNGDGQQYFHPFYFQMDVKPAEVFFINANARRRGHGNAVKPDAFFSSGVLAKRNLSPMAQKSLPSANEYGYHFDATELTNYLKDYACQRGVRQIIADVVEVSTSQNQQIETLILANGERLSADFFIDASGFSAKLIHKALGVPFQSFADELLNDSAVTVPVPALMDSTQTQQAKYHTRATALSAGWLWQIPLTHRLGNGYVYSSRHLSANAAAKELLHSVNLPESTQVRFLKLRVGVSDKAWHNNVLAIGLAQSFIEPLEATSIMMTQFTLERFMSLFERYQLNKQAETLSRQTLNQAVMQLVLGIKDYIQAHYVTSQRSEPYWMAARKVAMSQRLTQLLKAWYQGEDFDLLLYQYDQQLAYFRPSWYALLAGMDYRDPKLKRPFEPISADITAQAISYCQTLVEQYFQPKHS

SEQ ID NO: 84379 - protein, 530 aa, Saccharothrix texasensis
  misc_feature (1)..(530): tr|A0A3N1H0S3|A0A3N1H0S3_9PSEU Tryptophan halogenase OS =Saccharothrix texasensis OX=103734 GN=EDD40_1405 PE=4 SV=1
MEDRRIKKVVVLGGGTAGWMAAAYLGKALGPGVTITVLEAPSIPKIGVGEATVPNLHKTFFEFLGIAEEDWMRECNASYKMGIKFTNWRTPGRGEANPRPYGDGTDHYYHLFGLLPNHENHPLSHYWAHKKLGGQTDEPFDYACYREPPIMDAKLSPRFMDGTKWTNYAWHFDTNLISPFLRKWATTNQGAIHIQDLMTEAVIDQRGNISALKTEGGLTIEGDLFIDCSGFRGLLINQAMKEPFLDMSDHLLNDSAVATQVPHDDAANGVEPYTSSIAMSSGWAWKIPMLGRFGTGYVFSSRFQSRDDATLEFCTMWGLDPETANLNQIKFRVGRNRRAWVKNVVSIGLASCFLEPLESTGIYFVYAALYQLAKYFPDKNFDSVLQDRFNAEIETMFDDSRDFVQGHFSFAPRNDTAFWQACKELRLADDFQEKVRMYKAGLAVNMPITDESTYYANFDAEFRNFWNNSNYYCIFAGLDYLPDHSLPALAARQDVLDSAEPVFAQIKQTQKELLTTLPSTYEYLKQLHGK

SEQ ID NO: 84380 - protein, 503 aa, Alphaproteobacteria bacterium
  misc_feature (1)..(503): tr|A0A2N3B1M8|A0A2N3B1M8_9PROT Tryptophan halogenase OS =Alphaproteobacteria bacterium HGW-Alphaproteobacteria- 7 OX=2013670 GN=CVT85_07205 PE=4 SV=1
MPARLKTILIVGGGSAGWMAAALLSNLFQGLYRIKLVESEDIGTIGVGEATIPAIKKFNELLGLDEVQFMRLTQGTFKLGIQFNNWDKIGSSYVHGFGVIGQDLGWLRCHQYWLKMKLQGEASDFANFSINTAAALENKFMPARTDAGDSPIGHIAHAYQFDAGLYARFLRTYAEERGVVRQEGKIVDVNLRPDDGYVDSVVLESGETLAADLFIDCSGFRGLIIEQAMKTGFEDWTHWLPCDRAIAVPCERSDNFTPYTKATAHGAGWQWRIPLQHRTGNGHVYASSYMDEAEAERILLENLDGKPLAEPNRIRFTTGKRKQIWNRNCLAVGLAAGFLEPLESTSLFLIQSSLIRLIRLFPDGDFDQANIDEFNRQTDFEYERVRDFIILHYKATDRDDTPFWRYCRDMDVPATLARKIDLFRANGRIFREDEELFSEESWIQVMLGQGVIPQGYDPLVDIKSEAQVAQFLGNVENVIKKCVAVMPTHEDFVAKYCDAKAPV

SEQ ID NO: 84381 - protein, 539 aa, Pelagibaca sp.
  misc_feature (1)..(539): tr|A0A2D6BET6|A0A2D6BET6_9RHOB Tryptophan halogenase OS =Pelagibaca sp. OX=1979400 GN=CMI67_21790 PE=4 SV=1
MGQPLSSITIVGGGTAGWLAAVYLRRACAERIRITLIESPNIPTVGVGEATVPQMPFTLRQIGLDERTFFRRCDATFKTGVMFRNWNTDRKGKLVSYLNPFSNAPSLDGVSIGNHFHAFGAGKRDYVSCYSPYAHMAKAFKGPFSFKDPKADPMPKPAYAYHLNAVAFAKLLAEVGTERGIEHILDDVDDVELDERGYVAALQLRERGRHPVELVIDCTGFRGRIIREALDEPFEDYSDYLGNDRAMALQIPHTNPEKLPPFTSSTALGAGWSWSVPLFNRVGTGYVFSSAHRTDDEARDEFLAHLGAAAPPGSEPRVIPMRIGRSRRAWVKNCIAMGLSGGFIEPLESTAIHMIDQSIRMLLFNMPSTDYEAPVRRRFNRLVDDLYGEVRDFICLHYRMGNREDSAYWIDARTELKITDRLAENLELWQYQLPTQHDLESAQLFTHDTYQTVLFGKRCYENGYGAERLNTPREVRAGSWKAYLRDADIRFAKIVDYKGDHHRLLMALRGELAPGGARKTPAVVAARTGSCLKETPVLF

SEQ ID NO: 84382 - protein, 509 aa, Halieaceae bacterium
  misc_feature (1)..(509): tr|A0A2E1NN00|A0A2E1NN00_9GAMM Tryptophan halogenase OS =Halieaceae bacterium OX=2026743 GN=CME53_03485 PE=4 SV =1
MLGQPIQNIVIVGGGTAGWNAAALLVRMMSRVISITLVESEEIGIVGVGEATIPPVIRFNNALGLNEDDFLKSTQGSIKLGIQFENWGELGDSYMHAFGDVGRDFAFCPFHNFWVRSQQLGIEADFWDFSPNYQAAVRHKFGKVSSRSGTSDGGLPYAYHFDAGLYAKYLRGYCESQGITRVEGIVDHSSTCSDTGFIKSLTLKSGKEIEGDLFLDCSGFRGLLIEQALQTGYEEWSHWLPCDRAVAVPSESTGPIRPYTRSIAHKAGWQWNIPLQHRTGNGHVYCSSYVSDDEACHTLLSHLEGPPLAEPRQIPFKTGRRKLQWNKNVVALGLASGFLEPLESTSIHLIQTGIRRLMDNFPHQGIRQIDIDAFNKQSKLEFEQIRDFIILHYKINQRTDSQFWVNCRNMSIPDTLEQKIELFKHSGRVLRYSDELFAEVAWYQVMLGQGLIPDDYHPIADSLSEQKMLRMFAELRAMVGDTVSQLPTHDQFLASVTQQQLRTSSAASA

SEQ ID NO: 84383 - protein, 505 aa, Janthinobacterium sp.
  misc_feature (1)..(505): tr|L9PL15|L9PL15_9BURK Tryptophan halogenase OS=Janthin obacterium sp. HH01 OX=1198452 GN=Jab_1c09490 PE=4 SV=1
MIRRIVIVGGGSAGWLTAGLIAADHQGTPLHITLIESPDIAPIGVGEGTWPSMRDTLRRIGVSEADFFRECDAAFKQGSRFNRWVDGGDRDYYFHPFVLPQGYGEVNLPQQWQAQHPDTPFADLVSFQPHLCVNGRAPKQVSTPEFASVANYGYHLDAGKFGVFLRKHCLEKLGVHYVPDKVVGIVSHDNGDIAALQTQSHGALEAELFIDCTGMQSLLLGKHYEVPFISQKHVLYNDSALAVQIPYPADDYPIASQTSSTAQSAGWIWDIGLPTRRGVGHVYSSAHIGDDQAEAELRRYISATGGPQDIPPPRKLSFNPGYRARFWHRNCVAIGLSAGFIEPLEASALALVEMSAAMVSDELPATREAMDIVARRFNDAFTYRWERVIDFLKLHYVLSRRRDSDYWRDNTAAVPERLSELLTLWRHRAPSRNDFNRIEEVFPSASYQYVLYGMGFRSEYTHPHAQQAAQADHYFREAAALTRKMLGALPDNRELINHITKRHHA

SEQ ID NO: 84384 - protein, 519 aa, Sphingomonadales bacterium
  misc_feature (1)..(519): tr|A0A101VEA1|A0A101VEA1_9SPHN Tryptophan halogenase OS =Sphingomonadales bacterium BRH_c3 OX=1734408 GN=APF78_ 09730 PE=4 SV=1
MDEAMTGTIGKVVILGGGTAGWLSACYLAARRPWLDITLVEAPDIPTIGVGEGTWPTMRGTLAAIGIAEAEFFAECDASFKQGSRFDGWATGEAGDSYLHPFTTPPRGEAEDLIAAWRSAAPDLSFAEAMTPQARICAADLAPRQRAMPDFAAASNYAYHLDAGKFGALLARHATGRLGVRRIAAHVNGVIGAPSGDLSAVQTREGETIEGDLFIDCTGRAGVLIGGHCGVEWIDRSDVSFNDCALAVQVPTLPGSAIASQTVGTAHEAGWIWDIALPQRRGIGCVYSSRFMDDARAEEILRSYIGKHMPHAAWNKLSPRKIAFSTGHRARFWHRNCIAIGLSAGFIEPLEASAIVLIELSLKALAENFPASRETMDIHAHRFNELFRYRWDRIIDFLKLHYVLSAREEPYWQAQRDPATIPPRLAEQLTLWREQPPSNWDFPQVDEVFSAASQQYVLYGIGFPAPAKLPAAPSAKALAQIAEVREQARALVSALPTNRAYLDNLAAATQSPALKETTA

SEQ ID NO: 84385 - protein, 507 aa, Pseudomonas fulva
  misc_feature (1)..(507): tr|A0A0D0IDB6|A0A0D0IDB6_9PSED Uncharacterized protein OS=Pseudomonas fulva OX=47880 GN=RU08_22805 PE=4 SV=1
MLNIRSARRHVVVGGGTAGWFAALTLRRLFDPSIEVRLIESPDIGIVGVGEGGLINLIEALNRNGIPVSDFMRETGAAFKMGFCYEGWRGGGEQDRFYHLFADPKAEELGWSEFGGYPLMAALIHHNHALDGGVLGYNVGYEAVVNNLSQMEMAQLLVSGRSGLSMSLHFDSHRVADFLRKVAVSRGVVHQQGKVDSLVRDERGLVQSLRVTNTDGSAEALDLGLMIDASGFARLGIGKTEGSRWRSFKDYLLMDSAIPFHMPHPQANPSLVTRAIAMEAGWMWQIPLRERVGAGYVFSSAHMDPERAVREIEAKVGHAIEPMRTLRFEPGHFEQVWMGNVLAIGLASGFVEPLEATSIGQMLEQLKNFERVLVQSQGVVLDSVIDGFNAANTQSWSEIRDFLRMHYDCPRRDNPFWRDVADSNMPVSYQDLKASFAVRTPRLIDIQGNSLHGWGAIFHVMNWMFVAHPLGLLSREAAQADVLALPEDKRQRVDAYMDKVRQARTAR

SEQ ID NO: 84386 - protein, 505 aa, Janthinobacterium sp.
  misc_feature (1)..(505): tr|L9PGC9|L9PGC9_9BURK Tryptophan halogenase OS=Janthin obacterium sp. HH01 OX=1198452 GN=Jab_2c25050 PE=4 SV=1
MTNNRIKRVVVVGGGSAGWMAAAAVATYLGKQTSVRLIESEEIGIVGVGEASVPHIRMFNGQMLGIDETEFVKRTQGTIKLGIQFQDWSRIGDSYIHGFGVIGRSLGPLPFHQFWLKLFQSGRAAPIGEYSLQTVMAPQGKFVPGDRNSPPNSPLADIAYAYHFDAGLYARFLRQLSEQRGVQRIEGKIVGVNQRADDGFVESVTMENGQVVDGELFIDCSGFRGLLIEQALKTGYHDWSHWLPCDRAMAVPSERIDPITPYTRATARAAGWQWRIPLQHRTGNGYVYSSKYIGDDEAAATLLANLDGKPLADPRPLRFTPGMRKKCWNKNVVALGLASGFLEPLESTSIYMVQSGITRLLGLFPGSDFNPLLAERFNRESAFEYERVRDFLILHYHATERNDTPFWDYCRTMSVPDSLKEAMDLFRSDGRYFRNGEDFFALPSWVQVMLGQRIMPQSYHPIVDDMPEDKLVQYVEDMRATLAHAVAAMPTHQQWLDRYWKASAL

SEQ ID NO: 84387 - protein, 492 aa, Halieaceae bacterium
  misc_feature (1)..(492): tr|A0A3D0GKN0|A0A3D0GKN0_9GAMM Tryptophan halogenase OS =Halieaceae bacterium OX=2026743 GN=DEO43_01275 PE=4 SV =1
MSQINKVVIAGGGTAGWMAAASISKLVGRRLDITLIESETIGTIGVGEATIPSLLTINRLLKISEPEFLRETKATFKLGIAFENWRKLGHRYIHSFGDTGTGCWAAGFHHFWLRGVNEGFAKPYGDYCLELQAAEMSRFGLVSSHKINYAYHLDATQYAAYLRRLAEQAGVRRVEGIIDQVSLDPSNGNITHLLTKSGQIIEGDLFIDCTGFRGRLIAEALGTGFEDWSHWLPCDRAVALQTESVSPAIPYTRAIAHGAGWQWRIPLQHRVGNGLVYCSKYQTDEEAIDLLRRNTQGEATTEPRFIQFTTGQRQQHWTKNCIALGLSSGFIEPLESTSIHFIQNGLLWLLLMFPSDTILESVRNEYNAKMRREAERIRDFIVMHYHLTERDDTEFWRYCRGMDIPESLKHRMSLFGSSGTVFKDQDDVFAENSWVQVMMGQGLIPKTYHPIVDQMSSVELSEFLRQNLERVDQSLSQLPDHFNFVKQYAQSG

SEQ ID NO: 84388 - protein, 500 aa, Halieaceae bacterium
  misc_feature (1)..(500): tr|A0A3D1YM94|A0A3D1YM94_9GAMM Tryptophan halogenase OS =Halieaceae bacterium OX=2026743 GN=DEX20_07390 PE=4 SV =1
MSKEVNNVVIAGGGTAGWMAAAALAKLVARPLSITLIESEEIGTVGVGEATIPSILTINRMLKIPEPDFIKLTSGTFKLGIKFENWRRQGESYIHSFGDTGKGSWAAGFHHFWLKGKEAGIDHDYGDYCAELKAAEQEKFAITSQRPLNYAYHLDAAKYAQYLRSMAEAHGVKRVEGRITSVTTDEDGYITSLDINDGVRQVDGDFFIDCTGFRALLSGGALGVAYDDWTHWLPANRAWAVQSELNEPPKPYTRSIAHTVGWQWRIPLQHRAGNGLVYSSEFMTEEDARALLVRNVNDRLITDPRPIRFTTGQRAKYWEKNCVALGLASGFIEPLESTSIHMIQNGIMWLLLMFPDTTIEGSTVNEYNQRIRSEAEYIRDFIVLHYTVNERHGEPFWDYCRNMALPESLSHRIELFTRTGRIFQAQDDIFTENSWVQVLLGQGVTPQSYHNITDSLTPPQLEEFLSGIRHEVNQTVSGLPAHGDFIQSLIRHTELRAASS

SEQ ID NO: 84389 - protein, 506 aa, Asticcacaulis sp.
  misc_feature (1)..(506): tr|A0A2T5XQM7|A0A2T5XQM7_9CAUL Tryptophan halogenase OS =Asticcacaulis sp. CF398 OX=2135738 GN=C8K45_0687 PE=4 SV=1
MSEVIRKIIIAGGGTAGWMCASVLRKGLGHTVDILLIESEEIGTVGVGEATIPPIRKFLEHVGIDEGEFIRATEASFKLGIEFKGWGAADSRYFHGFGDFGAVHEAVRPYQLWRRLREAGDEMPLEDWSLPTALARAGKFFPPNPDPRSPMHDYAYAYHFDAGLFARFLRQHCEAQGVRRLNAKIDVVQLRPEDGFIEALQLDNGTTEAADFFIDCTGFRGLLIDGALKAGFDDWTHWLPADRAWAVPTEKNPAGITPYTASTAHAAGWQWRIPLQHRTGNGHVFSSAFMDEETARDVLLQNLDTPTLKDPMLIRFTTGRRPEPWTKNCVAVGLSSGFLEPLESTSINLIQSGIAQLLELFPSRQAEEVLRREYNRQMGLSYERVRDFIILHYKLNTRSEPMWRYCAGMSIPDTLAHKIELFAARGDVVKYDWDHFAEPSWIAVLNGQGVVSRFADPLAERLPLDSVRALMRQRRETIAQVARQLPAHADFIAQHCLSPNYMKAST

SEQ ID NO: 84390 - protein, 530 aa, Halieaceae bacterium
  misc_feature (1)..(530): tr|A0A3D0GKA7|A0A3D0GKA7_9GAMM Tryptophan halogenase OS =Halieaceae bacterium OX=2026743 GN=DEO43_01260 PE=4 SV =1
MTEEFDQVKRIVVVGGGTAGWLVAARLAAHYELSSETLTLTLVESDQTGPIGVGEGTWPSMRTTLNKIGITETEFVRECGASFKQGSKFIGWSRGAEDYYYHPFSLPQDHAEENAWWSWQNLANNEPFADSVSPQPAVCDRDLAPKQISMPNYAYALNYGYHLDAGRFAGLLMRHAVERLGVCHIKDHLIGVESDSDGDIAAVIGKNYGRIEGDLFIDCSGFESLLIGKHFEIGKVDCSKYLFNDRALAVQVPYATELDSISSVTLGTAHDAGWTWDIGLQHRRGVGRVYSSSHQSDEQALEGLKSYLKREAPHVDFESSSPRKLSFESGYRSKFWHRNCVAIGLSAGFVEPLEASALVLVELSAQFLTDQLPAYRSGMDAVADRFNRQFTYRWTEIIRFLKLHYAISSRDDSAYWRQHKESDSIPESLRSDLARWNYQAPWHHDEGRIDDLFPSASYQYVLYGMGFQTRDPVLRSRSHARRLTQYRERQLRTQQAQARFCEHLPTNRELVRQLQSQSFSSVPHSAVERL

SEQ ID NO: 84391 - protein, 514 aa, Asticcacaulis sp.
  misc_feature (1)..(514): tr|A0A2T5XR29|A0A2T5XR29_9CAUL Tryptophan halogenase OS =Asticcacaulis sp. CF398 OX=2135738 GN=C8K45_0873 PE=4 SV=1
MTQPVKSLVIAGGGTAGWMCAAILSHYLPKTIRIQLIESEQIGTIGVGESTVPPFVEMIRRLGIDEQDFIRQTQGSFKLGIRFKDWRHKGEEYYHPFGHIGGIIDDQDFYQHWLRARHLGDDTPLQTYSAAGEMARNHKFMLPFRAPRTPIASAAYALHVDASLVAKYLRRFAEDKGVTRHEGMIGRVDQDARGFISALELTDGRRIEGDLFLDCTGFRALLIEKALGVGYVDWSKELLCDRAIALQTENINDPHPYTYAEAQDAGWRWRIPLQHRAGNGYVYSSRHISDEDATKTLLSQVEGQPVTKPMVVPFRTGMRTEIWAKNCISVGLASGFIEPLESTAIHLIYRSMDFLLRYFPGADCDANLVREYNLRMGTDYTEIKDFVVLHYCLTQRDDTPFWRDVQAAPVAESLREKIALFAENGSLRAGADDLFRAPSWQSVMDGMGVKPRRYNLLVDRVSEADLRATLKAVREQLPAFVATLPSHGEFLRANCPAVTTEKIIGHEKHEKQMS

SEQ ID NO: 84392 - protein, 492 aa, Pelagibaca sp.
  misc_feature (1)..(492): tr|A0A2D6B976|A0A2D6B976_9RHOB Tryptophan halogenase OS =Pelagibaca sp. OX=1979400 GN=CMI67_11590 PE=4 SV=1
MRVTIVGGGSAGWIAAATLQAQLNGTGPGPVSITVVESPKAPRIGVGEATIPTMRDMLRRFGLSERGVLAACDASFKHGIRFDDWSGPGSRCLHPFHRHALPRDIAARWLASSGEPPFAAIASAQAALIAHERAPRPAGAPEFTGPVPYAYHLDAEKFAEYLAGALTSRGVTRQSAHVTGVLREGETVTALRTEDGPPLSADLWVDCTGFAGLLLPEEGRDWVSYADRLLCDRAVTMRVPEDDPAYTPAPFTRARALEAGWCWDIGLRHRRGRGYVYSSAHLSDDEAEAALRAEEGQHSAELPARVIHFTPGRRAAPWQGNVVALGLAAGFLEPLESTGLFLADFAARALVEMFPAAPGLPMQPLARRYNALLTEMHDDLADFLALHYAVAQRRDTTFWRDAAKAALRSERLRELLELWQLRPPSFADFSYRYSPFSHTAWEFILLGMGWRPATAPAGTTPCAAPAEALTRQMLDALPDHGTLLRHLAQAGR

SEQ ID NO: 84393 - protein, 503 aa, Janthinobacterium sp.
  misc_feature (1)..(503): tr|L9PFY3|L9PFY3_9BURK Tryptophan halogenase OS=Janthin obacterium sp. HH01 OX=1198452 GN=Jab_2c25950 PE=4 SV=1
MQQAAIKNIVIVGGGTAGWMTATALSTILRGQYNIRLVESDEIGIVGVGEATIPMIQRFNQVAGIDEAEFMKATQGSYKLGIEFVNWGKLGDRYIHGFGVLGQDLWTVRFDQYWQRLRGLGKARELDEYSITRMAARHNKFMPPRRDLANSPLSDIAYAYHFDASLYARYLRTVSEQRGVRRTEGKIAQVSQRADDGYVDAVVMESGERIEGDLFIDCSGFRALLIEGALKTGYEDWNHWLPCDRALAVPCESVSPLTPYTRATAHRAGWQWRIPLQHRTGNGHVYSSAFMEDEEAQRILLANLDGKPLAEPRMVKFRTGMRKLGWNKNVVAMGLASGFLEPLESTSIHLIQSSIARLVQFFPDRGFNQLEVDEYNRQSRFEYERIRDFVILHYKLNQRDDSDFWKQCAAMPVPDSLQHKLDLFRARGRVVRFDNELFAEAGWLQVMHGQNLKPEGYDPLVDLLPVDEAEKYLESIRDVIGQCVQHMPDHAEYIAQHCAATRR

SEQ ID NO: 84394 - protein, 506 aa, Acidobacteria bacterium
  misc_feature (1)..(506): tr|A0A2E4W4U5|A0A2E4W4U5_9BACT Uncharacterized protein OS=Acidobacteria bacterium OX=1978231 GN=CL489_05060 PE =4 SV=1
MTINNIIIVGGGSSGWLTAAYLSNNLPHQVKIALIESSEIPTIGVGEGTQPFTMPFLQDCGLEPADWMKKTDATYKYGVELIGWSDDPVFIDNDTQEMAVLGPNIMFHNYWLSKKCGAKEYINSMPAYILAKHNKAPKANHPDLDYTPGYTEQSCDAVHFNAHDIISTLKAHCKDRITYIDDLIVEVITDEQGVTGLKTKNNGILTADLYIDCSGFDSLLLEKSLGVKFIPVNDVLLCNRAVAIPKQYTNKKEEMHPYTKAIAMDAGWRWTIPTYSRIGNGYVYCDDFISSEKAEEALRKSINEWSAPANHIKMKTGIHEHIAYKNVYAIGLSAAFAEPLEATGITFTTKAISNLVQVLNNSNGQWNDDIRNFLTNKYQVMVNEIVNFLFLHYKLAPKDDTPFWKATKDIPYSSGCLPGVGIKNVLDKFVPNPPNTLIENGYFEMFHVGQWFSLLYGYDVYNKYVYNIDKHIVNYGDWVNTMYKDRTKYALNFFPNQYEYLKELYG

SEQ ID NO: 84395 - protein, 495 aa, Alteromonas pelagimontana
  misc_feature (1)..(495): tr|A0A2A6ATK8|A0A2A6ATK8_9ALTE Tryptophan 7-halogenase OS=Alteromonas pelagimontana OX=1858656 GN=CA267_14200 PE=4 SV=1
MSSQIKKVVIAGGGTAGWMCAAALSKLLGKNLHVTLVESDDIPTVGVGEATIPTLLVLHKLLGIDEAEFMAATNATFKLGIAFENWRDINQDYIHSFGFLGKDCWAAGFQHFWLKGLRQNMVSEIGDYIPEHLACREGRFAVLANQDKNYAFHLDAGLYAKFLRNLAQRHGCVRTEGTITQVNLREDNGYIKSLTLASGQEIEGDLFIDCSGFRGLLIEQALHTGYEHWDHWLPCDSAIAVQTETVGEAVPYTRSIAHDAGWQWRIPLQNRTGNGLVFCSKYLSDEKAKQLLLENVEGKLLNEPRVIKYRTGTRRKYWNKNCVAIGLSSGFIEPLESTSIHLFQQSIVRLMLMFPSEGINPASVDEYNRQCRSEIENIKDFVILHYHLTDRTDTPFWRYCKNMSIPTTLKHRMDLFQQSGKTLKLAEELFGETSWVQVMLGQGLMPKQYHPIVDLMSDKELKDFLDTIKAGVKRKVNNWPNHLDFIRHYCQATRV

SEQ ID NO: 84396 - protein, 501 aa, Pseudoalteromonas ulvae
  misc_feature (1)..(501): tr|A0A244CTI2|A0A244CTI2_9GAMM Tryptophan halogenase OS =Pseudoalteromonas ulvae OX=107327 GN=B1199_01115 PE=4 SV=1
MAQPIKNIVIIGGGTAGWMTAASLAKYVNQHATITLIESSDIATVGVGEATIPNIVQFNHNLGIDEVELIKATQATFKLGIQFENWTKTGGSFFHPFADYGLRIDNVDFHHYLQHANQLGGKHQLDEFSFACQLAQRGCFAQPHTHPSSPLADYAYAYHFDAGLYADFLKKFSKNLGVKHVIGTVEDVSLTADTGFIDYVTLTCGSQYHGDLFIDCSGFEGLLIEKALNTGYEDWSQWLLCDTAIAVQTTSTSEPDPFTRSIAQTAGWQWHIPLQHRTGNGYIFSRRHQSEEEAKALLLANIQGTPITTPRTIRFNPGRRKQIWNKNCIAIGLSSGFLEPLESTSISLIQTAIAKLLSFFPDMSFNPADIAEVNRLHNSELEQIRDFLIMHYTLTDKNDSPFWLDYQNIALPDGLSHKIALFKSRGHIAMYDNESFEPSSWLTFYRGYGITPKRIDPRAQAVPADVLQQRLMQMKQSIATAAQGALSHQAFISQHCLAEKE

SEQ ID NO: 84397 - protein, 503 aa, Janthinobacterium sp.
  misc_feature (1)..(503): tr|L9PI41|L9PI41_9BURK Tryptophan halogenase OS=Janthin obacterium sp. HH01 OX=1198452 GN=Jab_2c25940 PE=4 SV=1
MSLGLVKNIVIVGGGTAGWMTAAAMSALISNCCKIRLVESDEISTIGVGEATIPVIRGFNQLIGVDENEFLRQTQGTFKLGIEFVNWSKQGESYIHGFGVIGRDQLLAKFYQYWLKLYQAGKAPGVEHYSINTMAASMNKFMRADSDSGDSPLSDISHAFHFDAGLYAKYLRGLSEGRGVRRTEGRIVDAVLRADDGFVEAIVMENGERIEGDLFVDCSGFRGLLIEGALKTGYEDWSHWLPCDRAIAVPCESVSPLLPYTRATAHDAGWQWRIPLQHRIGNGHVYSSKFMEPEQAESILMNNLDGKPLAQPRHLKFTTGKRKRAWNKNVVAIGLAGGFMEPLESTSIHLVQTGITRLLMMFPHLGYDQADIDSFNEATDNEYAAIRDFLILHYKLNAREGKPFWDYCRNMEIPATLQRRMDLYRSNGRIVRASDELFTETSWLQVMHGQGLRAKGYHPLVDQRSEADIAAFLANVKDVVLRCVEHMPTHEEYIASCCAAPKM

SEQ ID NO: 84398 - protein, 496 aa, Halieaceae bacterium; identical to SEQ ID NO: 83657
  misc_feature (1)..(496): tr|A0A2D7P4X3|A0A2D7P4X3_9GAMM Tryptophan halogenase OS =Halieaceae bacterium OX=2026743 GN=CME51_09480 PE=4 SV =1

SEQ ID NO: 84399 - protein, 72 aa, Halieaceae bacterium
  misc_feature (1)..(72): tr|A0A520R949|A0A520R949_9GAMM Tryptophan halogenase (F ragment) OS=Halieaceae bacterium OX=2026743 GN=EVA64_03 800 PE=4 SV=1
MHQPIKKVVIAGGGTAGWMAAAALGKVLGKTLDITLVESDEIGTVGVGEATIPTILTLHEVLKIKEQDFLTA

SEQ ID NO: 84400 - protein, 503 aa, Sphingomonadales bacterium
  misc_feature (1)..(503): tr|A0A117S650|A0A117S650_9SPHN Tryptophan halogenase OS =Sphingomonadales bacterium BRH_c3 OX=1734408 GN=APF78_ 01555 PE=4 SV=1
MTQRLKTILVVGGGSAGWMTAALLSNLFQGLYRIRLVESEDIGTIGVGEATIPAIKKFNELLELDEADFMRLTQGTFKLGIQFNNWDRIGSSYVHGFGVIGQDLGWLRCHQYWLKMKLHGDAADFANLSINTAAALENKFMPARADAGDSPIGHIAHAYQFDAGLYARFLRGYAEDRGVVRQEGKIVDVALRGEDGFVESVTLENGERIEADLFIDCSGFRGLIIEQAMNTGYEDWTKWLPCDRAMALPCARSDNFTPYTTATANGAGWQWRIPLQHRTGNGHVYSSQFMEDDEAEAILRANLDGEALGEPNRIRFTSGKRKRIWNRNCVAVGLSGGFVEPLESTALFLIQSSLIRLIRLFPDLSFDQANIDEFNRQTDFEFERVRDFIILHYKVTQRDDTPFWRYCRDMDVPDTLQRKMDLFRANGRIFREDEELFSEESWIQVMLGQGIIPHGYDPLVDIRSEAQILQYLGNIENVIRKCVAVMPTHADFVGKYCAATASG

SEQ ID NO: 84401 - protein, 520 aa, Halieaceae bacterium
  misc_feature (1)..(520): tr|A0A2D7YJM7|A0A2D7YJM7_9GAMM Tryptophan halogenase OS =Halieaceae bacterium OX=2026743 GN=CME50_06575 PE=4 SV =1
MSEQMQKVVIVGGGSAGWLTANILAARFQTGNSGIAITLVESPNVPTVGVGEGTWPSMRTTLKNIGIDEADFIRQCDASMKQGTWFKDWLNLGDESYYHPFSLPEGFDTVNLAEYWLNGDAGNLSFAQAVTPQYAVCELGRAPKQLGIPDYAYTVNYGYHLDAGKFAALLTENAVSRLGVTHIEADVTEVLCDDHGYISAIKTEQAGDIEGDLFIDCTGFKSMLLGGHYGVLLKSQRQYLFNNAALAVQVPYDNDDAPIAATTHSTAQRNGWVWDIGLQHRRGVGHVFSTDYQTAAETEAVLDQYLKSNGRAAGLDGLTPRLLSFEPGYRERFWVKNCVGVGLSAGFIEPLEASALVLIELSASAIAEQLPSDRATMAVVAKRFNREFSSRWEQIIDFLKLHYALSQRTDTQYWQDNRDAESMPETLAENLLLWRSRAPWYYDDRRSDEMFPSASYQYVLYGMGFESTVTALQLRNNQHQRETALRFFAEAKKKAQRYSQHLPPNRFLMNQVQEKNFAAI

SEQ ID NO: 84402 - protein, 496 aa, Halieaceae bacterium; identical to SEQ ID NO: 84259
  misc_feature (1)..(496): tr|A0A2D7LWR4|A0A2D7LWR4_9GAMM Tryptophan halogenase OS =Halieaceae bacterium OX=2026743 GN=CME52_03430 PE=4 SV =1
  misc_feature (181)..(181): Xaa can be any naturally occurring amino acid
  misc_feature (194)..(194): Xaa can be any naturally occurring amino acid
  misc_feature (206)..(206): Xaa can be any naturally occurring amino acid
  misc_feature (283)..(283): Xaa can be any naturally occurring amino acid
  misc_feature (302)..(302): Xaa can be any naturally occurring amino acid
  misc_feature (488)..(488): Xaa can be any naturally occurring amino acid

SEQ ID NO: 84403 - protein, 512 aa, Streptomyces lunaelactis
  misc_feature (1)..(512): tr|A0A2R4TE69|A0A2R4TE69_9ACTN Tryptophan halogenase OS =Streptomyces lunaelactis OX=1535768 GN=SLUN_13725 PE=4 SV=1
MTASYLGKALQGTVDITVLEAPSIPRIGVGEATVPNLQRSFFDYLGIAEEEWMRECNASFKMAVRFVNWRTPGAGEPTPRALADDGPDHFYHPFGLLPDHDQTPLSHYWYKRKYEGETTEPFDYACFPEPPVMDAMKAPRSLDGEAATRYAWHFDAQLVADFLSRFATKKQGVNHVQDEMVRVEQDERGYVTALHTKGGLVLDADLFVDCSGFRGLLINKALEEPFIDMSDHLLCDSAVATQIPHDDEKNGVEPYTSAIAMSSGWSWKIPMLGRFGSGYVYSSQFTSQEEATEEFCKMWGLDPEQTEFNHVRFRVGRNRRAWVNNVVSIGLSSCFLEPLESTGIYFTSAAIYQLAKHFPDRTFNQGLVDSFNREIELMFDDTRDFLQAHFYYAPRTDTPFWRANKELELTQNIKDKIAAYKAGLPINPPISDESTYYGNFEAEFRNFWTNGSYYCIFAGLGLEPDAPLPSLAHKPESVAGALPLFKQVKARQKELVESLPSAYDYLRHLHNS

SEQ ID NO: 84404 - protein, 527 aa, Couchioplanes caeruleus
  misc_feature (1)..(527): tr|A0A3N1GRZ7|A0A3N1GRZ7_9ACTN Tryptophan halogenase OS =Couchioplanes caeruleus OX=56438 GN=EDD30_5987 PE=4 SV =1
MASNVVIVGGGTSGWMTASYLKAAFGDRVNVTLVESKNVPSIGVGEATFSTIRHFFNYLGVDEGEWMPECHATYKLAVRFEDWREPGHVFYHPFERNRIVDGFPLTDWWVQKKPTERFDRDSFLLASMCDAKSSPRYLDGSLFDSIFDLSDGGRTTLSEQNTQFPYAYHFDAALLAKFLTRYGVARGVRHVLDDVVDVVLDDQGAIDHVRTRQQGDVHGDLFVDCTGFRALLVHKALEEPFISFQDHLPNDSAVALRVPSDMAAEGLRPATTATAKDAGWIWTIPLFERVGTGYVYASEYATPEEAERTLREFVGPAADDVAANHIRMRIGRSQRAWVKNCVAIGLSNGFVEPLESTGIFIIQNGIEQLVKNFPVGHAETDDGLRKAYNRQAAHVMDGLREFMVLHWYASGRADNQYWKDTKTRTIPDGLAERLEQWKVKLPDQDSIYPHYHGFESYSYRAIILGLGGLPVPSLPVLGKLDGTAADREFQQVADQAAALLEKLPSQYEYFAHLHGLPPARRTATAGR

SEQ ID NO: 84405 - protein, 515 aa, Xanthomonadales bacterium
  misc_feature (1)..(515): tr|A0A3N5JGT5|A0A3N5JGT5_9GAMM Tryptophan 7-halogenase OS=Xanthomonadales bacterium OX=2006849 GN=EHM68_12835 PE=4 SV=1
MSTPLRDIVIVGGGSAGWLTAGILASDHRVRDNPAVRITLVESPDVRTIGVGEGTWPSMRDTLRRIGVSESEFIASCNASFKQASRFAGWRSGEAEDHYYHPFSAPQGFGEVNLVPAWLRLGEQARFADQVSFQPRLCEHGRAPKQKVTPEFAAVANYAYHLDAVKFGDFLQAHCVDRLGVRYQPAHVQGIRAHENGDIAGLETPEAGTIAGDLFIDCTGFSSLLLHRHYGIPLERVSNILFCDTALAAQVPYADPNDPIASHTLGTARAAGWIWDIGLPTRRGVGYVYSSAHTSHEQARETLLDYLRRSGATVEPEPRRIELNPGYRKTFWHRNCVAVGLSAGFVEPLEASALALIELSAKMISDDLPPNRELMDVVARRFNDRFRYRWGRIVDFLKLHYALSGRGEQFWVDNRRADSIPDRLRELLELWRFRPPGGRDFPDTEEVFPAASYQYVLYGMGFRPEPPSHPLRLDDPEAARRGLQTVAQTARKYLAGLPANRELIEHVRTQGLPRV

SEQ ID NO: 84406 - protein, 495 aa, Halieaceae bacterium
  misc_feature (1)..(495): tr|A0A2E1NQA1|A0A2E1NQA1_9GAMM Tryptophan halogenase OS =Halieaceae bacterium OX=2026743 GN=CME53_07735 PE=4 SV =1
MQKSIEKVVIAGGGTAGWMAAAALSRLVARPLSITLIESEDIGTVGVGEATIPSILTINRMLQIPEPDFIKLTSGTFKLGIQFENWRVSGESYIHSFGETGKGSWAAGFHHFWLRARELGIAGEYGDYCAELKAAQEEKFAISSQQRLNYAYHLDATKYGRYLRGLAESAGVTRVEGKISSVNLSDDGDIASLDINDGDSTVEGDLFIDCTGFRALLSGAALNGTYDDWTHWLPANRAWAVQSELGEHPKPYTRAIAHKVGWQWRIPLQHRAGNGIVYSNEFMSDDDARDTLVANVPEKLIIEPRPIKFVTGQRRQYWNRNCVALGLASGFIEPLESTSIHMIQNGIMWLLLMFPDPVIEKSTIKEYNLRIRSEAEYIRDFIVLHYAANERYGDPFWDHCRNMALPDTLSHRMELFKKTGRIFQAQDDIFTENSWVQVMLGQGVTPTAFHNIAAGQGEPSLDKFMQGIRDNVENTVAGLPRHADYIKQLMAHAKV

SEQ ID NO: 84407 - protein, 495 aa, Nostoc minutum
  misc_feature (1)..(495): tr|A0A367RL85|A0A367RL85_9NOSO Uncharacterized protein OS=Nostoc minutum NIES-26 OX=1844469 GN=A6770_14485 PE= 4 SV=1
MNFHIKKVAIVGGSSAGLLSAVTLKYFFPKLHILLLYSKKHAPIGVGESTTAWFPQFLHEHLNISREEFYKSIWPVWKLGIRFEWGVPHISHFNYTFDGQFRYESQLLSKIPGFYCMHDMRQASRYSILMDKHHAPLLHDGKGNIKILSDGFGYHIDVYEFINYLTAKALSLGVDIQDLEVLDAKLDEYGNVQHLCCADDLKVNADLFIDCSGFKSQLLGKALQEKFISFGYRLFCDSAIVGNWKRRSPIFPFTTATTMNSGWRWRIDLRDRVSFGYVYSSSFCSQDEAIQEYLSLTPYATEDLRKISFRSGRYKRFWVNNVIAIGNASGFVEPLESTGQHMIVETIWRVVLALQDSNLCPTPKLIDATNRYVVDLWDEICDFLTLHFKFNRRLDTPFWKYCQEETDLGSLQNLVELYQDSGVCHAIAHLIPKSSIFEIDGYLTLLCGQQVLVKNLQPMADAEITEWLKYRQILHNNLENSVSPQEAFYFLESLY

SEQ ID NO: 84408 - protein, 533 aa, Streptomyces sp.
  misc_feature (1)..(533): tr|A0A1C4LG25|A0A1C4LG25_9ACTN Tryptophan halogenase OS =Streptomyces sp. TverLS-915 OX=1839763 GN=GA0115251_12 0711 PE=4 SV=1
MPETDNRIRKVVILGGGTAGWMTASYLGKALQGTVDIQVLEAPAIPRIGVGEATVPNLHRVLFDYLGIPEEEWMRECNASFKMAVKFVNWRTPGRGEPDSRTRPDGKPDHFYHPFGILPDHDNTPLSHYWFKNKYEGITDKAFDYSCFREPPVMDAKKSPKWMNGESSTRYAWHFDAALVADFLRRFATDKQGVEHIQDEMVRAEQDERGYVTALHTKSGRVLDADLFVDCSGFRGLLINKALGEPFIDMSDHLMCDRAVATAVPHDDDANGIEPYTSAIAMSSGWAWKIPMLGRFGSGYVYSSRFTTQEEATREFCELWNLDPETTKFNHVRFRVGRNRRAWVNNVVSIGLSSCFLEPLESTGIYFITAAIHQLAKHFPDRTFPQALVDSFNEEIEVMFDDTRDFIQAHFYYAPRDDSEFWRAQKTLKLPENIQRKIAAYKAGLPINSPITDESTYYGNFEAEFRNFWTNGSYYCVFAGLGLEPDAPLPALAHKPESVAGAQPLFTKVAQEQRHLLDTLPSAHDYLRRLHAK

SEQ ID NO: 84409 - protein, 509 aa, Alphaproteobacteria bacterium
  misc_feature (1)..(509): tr|A0A2N3B3J7|A0A2N3B3J7_9PROT Tryptophan halogenase OS =Alphaproteobacteria bacterium HGW-Alphaproteobacteria- 7 OX=2013670 GN=CVT85_03365 PE=4 SV=1
MAERGVEKLVIVGGGTAGWITAAAFARLLGQRLTIELVESDAIGTIGVGEATIPQIIRLNTILGLDEHEFLQRASGTYKLGIEFVDWGRIGSRYLHTFGDTGMNLGNVAFHHYWRRSVMGEAAPDARGLWHYSLHQLAADQARFGKLDRVGNTAMAGLAYAYHFDATRYALHLRDYAEAREVTRTEGMVESVERDGTSGDITAITLDDGRRVAGDFFVDCTGFRALLLGGALGVGYQDWSHWLPCDRALAVPSERLPTLVPFTRATAKSAGWQWRIPLQHRTGNGHVYASGFTDDDAAADTLLAGLDTKPLGDPRPIRFTTGRREALWAQNCVSIGLSSGFLEPLESTSIHLIQSHVSRLIQLFPRGKNAAAERAEFNRRCMAEFDQIRDFLILHYHRTDRDDTEFWRYCKHMAVPDSVTHKLELFAASGRVGRDADDLFREASWVQVMLGQGIMPADYDPMADQIAPAQLDEFLANLRNVIERSVAGLPTHADYVQRHCPADTGSTPA

SEQ ID NO: 84410 - protein, 616 aa, Nostoc minutum
  misc_feature (1)..(616): tr|A0A367R573|A0A367R573_9NOSO Tryptophan halogenase OS =Nostoc minutum NIES-26 OX=1844469 GN=A6770_21125 PE=4 SV=1
MYSIQTQEYDVVIMGAGLAGNCQARHLLLNVPNIKIALIDPRPEERTEKDLKIGESTVEVAALFICKELGLYEYIIENHPPKFGLNFHWPKDPAKTGTIDDYYHIWTNRQPPMTATQLNRAKFERDLLKMNKDMGAVFYNGRVVDVDLTPGDALKTVKVKVGTESVELKAKHVVDAAGRKFIIGRKTDNVLFGPDNLCGINTGSAWVRVKNVDRTIFHNGYDPAGASCSHYYATNHWFGHGHWLWMIPTDTQSMELSIGIVQHHDVIPAESINTQEKFYAFLKANHNMLYELIASGENIDFHYWPRLAHTSKTMFSPDNWYVIGDAACIFDAFYSMGSSMTAFAIESVTEIIRAKLAGEADAEAKRSAYNEFNLIQTGGINQLMSNHAKQLGNASVMSWRIYFEYMLWFGIVVPLYVGKWHLNLTFINSFMKVYRDTVTGLFVDVYKQFNQLVDRGANIGFMDCYRADQLLGDYNTLMHFDHFLENAKFEPWRCNVFASLKYTHFYFAIWYMKLQWKGFGLPGLLAPRHLYHFFRLLILAGYISISELVYKYKIKGVPTNSQVAKMRQDFTSYRYQSELQPWDEGVVNFPVQNQKSTHQQLNDQDVARVQKLSVSG

SEQ ID NO: 84411 - protein, 526 aa, Halieaceae bacterium
  misc_feature (1)..(526): tr|A0A520R943|A0A520R943_9GAMM Tryptophan 7-halogenase OS=Halieaceae bacterium OX=2026743 GN=EVA64_03815 PE=4 SV=1
MAAGGQMTRALNRVVILGGGTAGWLTAATLAAEHGASLDIKLIESPDIPIIGVGEGTWPSMRTTLQKIGISEKALLKECDATFKQGTEFIGWLSESETHSYYHPFSLPAEYASLNLAEHWLASTVTSDFCSTVTPQAGVINACRAPKALGVPEFAFQYNYGYHFDAAKLSQLLRAHAVKALGVAHLLANLTGVERSASGAITALNLDNGASLEGDFFIDCSGQRGLLIGEAMGVPMKSMSHVLPNDRAVATQVPYSDPGAQIASVTRSTAQASGWIWDIGLQSRRGVGYVHSAAHISEDQAVSSVLDYVKRSDDGIDVGQLDVRVIPFNAARREKAWVKNCVAIGLAAGFVEPLEASSIALIEQATTRLCQILPLDADHYEAEASAFNDQMSRQWSQVEEFLQLHYVLSQRSDSAYWRDVRSDERVLPELREKLKKWRRHAIWHTDAPRFDELFPSASYQYVLYGMAGRYVSPQTHRRSFQSARDRADRAMHDVRERSNAVRSLPGNRELLNALVTNTNGTLESVA

SEQ ID NO: 84412 - protein, 503 aa, Halieaceae bacterium
  misc_feature (1)..(503): tr|A0A2D9NM13|A0A2D9NM13_9GAMM Tryptophan halogenase OS =Halieaceae bacterium OX=2026743 GN=CME49_01475 PE=4 SV =1
  misc_feature (58)..(58): Xaa can be any naturally occurring amino acid
MHQPIKKVVIAGGGTAGWMAAATLGKVLGKTLDITLVESDEIGTVGVGEATIPTILTXHEVLKIKEQDFLSAVQGTFKLGISFENWRDVGEDYIHSFGFTGKDHWAAGFQHFWLRGQQLGMVKEYGEYCAEWLAAKQNRFAVLPNLTLNYAYHFDSSLYAKFLRGIAEENGVVRREGKIAEVRQNPFNGYISELQLSDGAVIDGDFFIDCTGFRGLLIEQTLSAGYDDWTHWLPSDRAVAVQTESVGPPIPYTRAIAREAGWQWRIPLQHRVGNGLVFSSKFWSEDEATEKLLSNVQGARITDPRVIRFQTGTRRAHWKKNCVAMGLSSGFMEPLESTSIHLIQRSVIRLLQMFPHDGVRTPDVNEFNQQMQFEMDNIRDFIILHYHVTNRRDTPFWRHCASMEIPDSLKHRIELFKQSGRVFKVPTELFGENSWVQVMLGQGLVPEQYHPIVDMMSQEELKSFLEGIKGSVGNMVAQLPEHQQFINHYCSIPTSAVPQSRSA

SEQ ID NO: 84413 - protein, 558 aa, Blastocatellia bacterium
  misc_feature (1)..(558): tr|A0A321LLD9|A0A321LLD9_9BACT Tryptophan halogenase OS =Blastocatellia bacterium AA13 OX=2169413 GN=DMF61_0861 0 PE=4 SV=1
MNNHNEPIRDVLIVGGGTAGWMTAAYLAKAFGHQLNITVLEAPTIPRIGVGEATVPNLQRVFFDFLGIPEYEWMQHVNGSFKSAVKFVNWRKSENGAPNHFYHPFGILPSIDGVPLPQYWFLETNGAEEPVDYACFREPPLLDAKKSPLFMDHTRAVPHAWHFDAHLVAEFLGNWSKERDVNHITDEVNQVELDERGYIKSVHTVRGNNLTADLFVDCTGFRGLLINKALGEPFIDMNDHLLCDSAVAAAVPNDDEKVGIEPYTSAIAMKAGWTWKIPMLTRFGSGYVYSSKFATVDEAARDYCALWGLNESAVNFNKIRFRTGRNRRAWVNNCVSIGLSSCFLEPLESTGIYFITAAIYQLAKHFPTKTLDPVRIEAFNRDVEFMFDDCRDFVQSHYFTTTREDTPFWRANKNELFLSDNLKEKISLYKAGLPVNPPSYNEDDYYGSFDTEFRNFWTNGSYYCIFAGMGFLPERPHSRLLYRPESRAKALDEFVRIKNEQQTLLEQLPSTYEYLQHLHATQQSALRSPALEISHGKKRRPREWERLHEEPGELPYRP

SEQ ID NO: 84414 - protein, 496 aa, Halieaceae bacterium
  misc_feature (1)..(496): tr|A0A2D7YJJ6|A0A2D7YJJ6_9GAMM Tryptophan halogenase OS =Halieaceae bacterium OX=2026743 GN=CME50_06590 PE=4 SV =1
MSERKVERVVIAGGGTAGWMAAAALSRLVGRKLSVTLVESEEIGTVGVGEATIPTILTINRLLQIPEPDFIKLTSGTFKLGIRFENWRTEGEDYFHSFGDTGKGSWAAGFHHFWLRAKELGLAEQYGEYCPELKAAEAERFAITSENKLNYAYHLDASKYGMYLRKMAEASGVTRVEGKISHVNTSPHDGFIEALMLDNGHRIEGDLFIDCTGFRALLSEGALNTGFDNWSHWLPANRAWAVQSELSEHPKPYTRAIAHKVGWQWRIPLQHRAGNGLVYCNDFMDEETARDLLLDNVPEKTLIEPRPIRFTTGQRKQYWNKNCIAIGLSSGFIEPLESTSIHFIQNGIMWLLLMFPDLSIEESTVREYNTKMRSEAEHIRDFIVLHYALNERHGDPFWDHCRNMELPDSLKHRMELFERSARVFKPQDDVFAENSWVQVMMGQGLTPQGYHNIAQAMSSEQMTAFLKGIQHEVAQTVAKLPQHGAFVNTLIQHAKV

SEQ ID NO: 84415 - protein, 523 aa, Halieaceae bacterium
  misc_feature (1)..(523): tr|A0A2E6YRH8|A0A2E6YRH8_9GAMM Tryptophan halogenase OS =Halieaceae bacterium OX=2026743 GN=CME58_08260 PE=4 SV =1
MSQINQHIVILGGGTAGWLTANIIAAEFDPAAGISVTLVESPTTPTIGVGEGTWPSMRSTLMKIGISESAFIEKCSATLKQGTRFERWQTRDDSGDVYYHPFTLPHGFQDLNLAEFWSAGLLGSESFAESVTPQVAACEAGKAPKQIQVPEYAFTLNYGYHLDAGKFAELLRENATQRLGVKHLLADMTGVRTTASGDIESLETSEGIVSGELFIDCSGFASLLLGGHYGVPVNSQRDVLFNDSALALQVPYSDASDSIATTTHATAHHAGWFWDIGLQHRRGVGAVFSSRHTDRDSVEAALDQYLRDTGHATGLENPEPRLITFDPGYRQQFWHRNCVAIGLSAGFIEPLEASALVLVELSARRLAEQLPTLSANMATAANDFNREFNERWQQIIEFLKLHYVLSERDDTAYWRGHRDPESIPPRLQQKLGEWRYRCPWHQDERRVDEMFPAASYQYVLYGMGFRSEVQPSVYRGASSRQQRAQELSEEVRRSSHQYLQHLPLHRNLLDQVNSQGFATRAGS

SEQ ID NO: 84416 - protein, 540 aa, Halieaceae bacterium
  misc_feature (1)..(540): tr|A0A3D0GLI1|A0A3D0GLI1_9GAMM Tryptophan 7-halogenase OS=Halieaceae bacterium OX=2026743 GN=DEO43_03580 PE=4 SV=1
MRSLVIVGGGSAGWITAAYLNGALNDRGQNMKVKISLLESPDIPRISVGEATIPSMRHLISVIGIPEVEFMRATDATFKQSIKYCNWAENDGSHYHHPFTSVRERPLDLSGERWLESDRSMRFMDTCAVQPAVCEANLAPIILRKQAVPTTLNYAYHMNAQKFADYLRDFSVARGVEHVQANLVSVATDTEGWIESVSTDRTESLHADMFLDCTGFNGHLISKTLGVGFEDYSQFLLCDRAVTMHLPYERFYPGTVRPYTTATALSNGWAWDIPMQNQRSVGYVHSSQFISEDDAEAELRAYQGKGTEDISVRSVPFKVGRRHQLWKANCVAIGLSGGFIEPLESTGLYLSDLGAVLLAEHWPANKASVQNLADRYNRLMANRYYEILDFINMHYCLTKRTDTAFWREVQKPERINPRLQAKLAMWKTKPPTAHDFEDQWFNGMEAYESLFDFSHIGGRLPIDTGALWNHESYECILYGMGFAPITDQDGASEARPKSRRNQSTERAMNVLNILPDHVDVLSKALGMKAYHKAYQPNGWV

SEQ ID NO: 84417 - protein, 522 aa, Halieaceae bacterium; identical to SEQ ID NO: 83705
  misc_feature (1)..(522): tr|A0A2D7P4X6|A0A2D7P4X6_9GAMM Tryptophan halogenase OS =Halieaceae bacterium OX=2026743 GN=CME51_09465 PE=4 SV =1

SEQ ID NO: 84418 - protein, 520 aa, Halieaceae bacterium
  misc_feature (1)..(520): tr|A0A2D7LWT6|A0A2D7LWT6_9GAMM Tryptophan halogenase OS =Halieaceae bacterium OX=2026743 GN=CME52_03445 PE=4 SV =1
MSERIQKVVIVGGGSAGWLTANILAARFQAGNSGLCITLVESPNVPTVGVGEGTWPSMRTTLKNIGIDEADFIRQCDASMKQGTWFKDWINLGDEPYYHPFSLPEGFDTVNLAEHWLNGEAGELSFAQAVTPQYAVCELGRAPKQIGVPGYAYTVNYGYHLDAGKFAALLTENAVSRLGVTHIEADVTAVLCDDHGYISAIKTEHAGDIEGDLFIDCTGFKSMLLGEHYGVSLKSQRQYLFNNAALAVQVPYDNDDAPIAATTHSTAKRNGWVWDIGLQHRRGVGHVFSTDYQSAAETEEVLDQYLKSIGRAAGLDGLAPRLLSFEPGYRERFWVKNCVGVGLSAGFIEPLEASALVLIELSASAIAEQLPNDRATMAVVAKRFNREFSSRWEQIIDFLKLHYALSQRTDSRYWQDNRDAESMPETLAENLLLWRSRAPWYYDDRRSDEMFPSASYQYVLYGMGFESTVTASQLRNNQHQRETAIQFFAEAKKKAQRYSQHLPPNRFLMNQVKEKDFAAI

SEQ ID NO: 84419 - protein, 499 aa, Halieaceae bacterium
  misc_feature (1)..(499): tr|A0A2E6YRK2|A0A2E6YRK2_9GAMM Tryptophan halogenase OS =Halieaceae bacterium OX=2026743 GN=CME58_08275 PE=4 SV =1
MTDFSTKSIQSVVIAGGGTAGWMAAAALSRLVARKLNITLVESEEIGTVGVGEATIPTLLTINRLLQIPEPDFIKFTRGTFKLGIKFENWLRDGHEYLHSFGDTGKGCWAGGFQHFWLRGQKEGLADDYGSYCTELKAAEANRFGILSEHKLNYAYHLDATAYGQYLRGIAEASGVKRVEGKIQTVELNQNDGFIESLHLDSGERIHGDLFIDCTGFRALLSEGALNTGFDDWSHWLPCNRAWAVQTELNEEPIPYTRAIAHDAGWRWRIPLQHRAGNGLVYCNDFLDEDAARERLLASVDGKPLIDPRPIQFTTGQRRQYWNRNCIALGLASGFIEPLESTSIHFIQNGIMWLLLMFPDPMLSSASIDEYNQKLRSEAERIRDFIVLHYIANEREGDAFWDHCRHMAVPESLTQRVALFRDSGRVFKPQEDVFSENSWVQVMMGQGIQPEGYHNIADAMSREQLQSFLSDIQRNVNQTVSALPSHADFVNKLVSIAKK

SEQ ID NO: 84420 - protein, 519 aa, Pseudoalteromonas ulvae
  misc_feature (1)..(519): tr|A0A244CW49|A0A244CW49_9GAMM Tryptophan halogenase OS =Pseudoalteromonas ulvae OX=107327 GN=B1199_05135 PE=4 SV=1
MKKRINDVVIVGGGTAGWLSAALLAKKLNILAPDSVNITLVESPDIPIMGVGEGTWPTIRTTLQEIGIDEVEFITFCEASFKQGAEFVNWSNTPTNGQSSSYFHPLNAVFHASYDFNLAPYWLAGELGEMPYDQLAASQSRVSQLGLAPKLITTPQYQAIQNYSYHLNANKFAELLTKHCVEKLGVKHISANVTQVNLSVDGNISSVLTDIAGDIKGDLFIDCSGSKALLLGETLGVKWKGISDIIFNDTALAFQVPYQSDTSPIASNTIATAHDAGWTWDIGLQTRRGVGYVYSSQHTNDVEAEQVLRNYAGKMAEDIDVRKINLNLGYREKFWHKNCVAIGMSAAFIEPLEASAIFLIEAGVNMIADQFPRDFAAMPYVEKKFNNTFSLRWQKSVDFIKLHYCISNRRDTQYWVDNCDPKSIPDSLQEKLAHWQYHPPSKHDFDNAFEPFVLDSYLFVLYGMGFKTNLADNLSAFPHVAQAKMKKQQIDKLTEQLISQLPSNRDLIDKIKQYGMAKL

SEQ ID NO: 84421 - protein, 507 aa, Shewanella putrefaciens
  misc_feature (1)..(507): tr|A0A3S4P110|A0A3S4P110_SHEPU Tryptophan halogenase OS =Shewanella putrefaciens OX=24 GN=NCTC12093_00772 PE=4 SV=1
MTIRKIAIIGGGTSGWLAANHLGRVLQGRSELSITLIESPDIPIIGVGEGTVPSIRKSLQSFGISESEFIRSCDVTFKQSIKFVNWLDKVRHGKDNFYHHLFDIINLQSVDTVSAWLAEKQGDFADYVSPQHLVCEAAKAPKLITTPEYAGVLGYAYHLNAAKFAKLLAKNAIEKFNVEHIFATVQDVRLGDDGAISSLQTEQGTLSFDFYIDCSGFESILLAKALKVPFISKAHQLFIDTALVAQIPTQPTDIIPPYTQATAHRAGWIWDIALTQRRGTGFVYSSAHMAQSEAERKFDQYLGGKLADVPHRKIPMTVGHRQQFWVKNCVALGLAQGFLEPIEATSILLTDFSARFLAERFPVHTDDVDYLAKRFNDTVGYAWERVVEFAKLHYCLSDRTDSSFWLDNQASETIPEGLRQRLELWKSYSPIAEDFPSKFEVFNLDNYLYVLYGMKYQTNLRGGSSATQASLNMYMNKMSKVKQQMLDGLPEHRELLDKICTYGLQSI

SEQ ID NO: 84422 - protein, 494 aa, Xanthomonadales bacterium
  misc_feature (1)..(494): tr|A0A3N5JVZ9|A0A3N5JVZ9_9GAMM Tryptophan 7-halogenase OS=Xanthomonadales bacterium OX=2006849 GN=EHM68_12820 PE=4 SV=1
MDKPIKKVVIAGGGTAGWMAAALLAKTMGKVVDITLVESEDIGTVGVGEATIPPLVTYLRLLDIKEQEFMAATQATFKLGISFENWQNVKENYIHSFGTTGTDHWAAGFQHFWLRDRQRGSTVDYGDYCLELRAAKASRFSHLPKQGLNYAFHMDATLFAGFLRKYSEPLGVRRVEGKIVEVNTDPASGFVESLVMESGERVEGDLFIDCTGFRGLLIEQTLHTGYEDWSHWLPCDSAVAMQTESTIEAIPYTRSIAHEAGWQWRIPLQHRVGNGLVYCSRYMSDEEARALLLKNTVGGHVNKPRVLKFRTGRRLKNWNKNVLAIGLASGFVEPLESTSIHLIQRGMIRLMQMFPHDGIRQSEIDEYNRQSLTEIQHIRDFIILHYKVTNREDTPFWRHCRALQVPDSLAHRIQLFRETGRVFKIDGELFHENSWIQVMLGQGILPEQYHPAADVLTDEELTRFLAGIRTRVEQTVARLPGHEAYVRQYCRAKA

SEQ ID NO: 84423 - protein, 494 aa, Acidobacteria bacterium
  misc_feature (1)..(494): tr|A0A2E4W7H0|A0A2E4W7H0_9BACT Uncharacterized protein OS=Acidobacteria bacterium OX=1978231 GN=CL489_09980 PE =4 SV=1
MNMIKKIGIVGGGNAGLISALILRSAFPEHEIVVVKSDMIGTIGVGEGSTEHWLGFMNFCGIEPAEMIVAALATHKKGIRFEGWTDHTPDYFHVTSGLPDFVPRMFGFNGAYAGFLSKEWLLTEHTCHKGLLENKVPADNPHRSVNQFHFDTEELNDFLRMKVSNRNIKIIDGEVQRVVVKDDWIVSVELDDPTASADRTIRADFWIDASGFNKVLISHLSKQTWNSFGEYLLTDSAIAFRTPSDESGELRPYTRARALDSGWAWEIPTQAERGNGYVYSSSFCTEEEAVAEMEELLDVQISDHRHFQFDPGHLEEPWVGNCVAVGLAGSFVEPLEATSIGSTITQAKSLIGYLASFQKGNEWIPKEYNRQFNGMMANILDMIRLHYVSDRTDTPFWSALQDMPIPESLERLLGLWSERPPQQMDFSHGELAMFGLPHFYHVGQGQGVLNPDSAFRAIQAFVWEDSVEDAIWKIRENQSAHPIMDHHEALENLQ

SEQ ID NO: 84424 - protein, 494 aa, Alteromonas pelagimontana
  misc_feature (1)..(494): tr|A0A2A6B1S6|A0A2A6B1S6_9ALTE Tryptophan 7-halogenase OS=Alteromonas pelagimontana OX=1858656 GN=CA267_01210 PE=4 SV=1
MQNSKVKKVVIAGGGTAGWVAAAGLSKQLGKLVEVVLVESEQIGTVGVGEATIPPMRVFHSLLGIDEQEFMRATEATFKLGILFKNWGQIGDEYIHPFGTTGQGSYLADFQHFWLHGQSKGINQAYGEYSLEVQAAKANKFVVHKGGKINFAYHLDATRYAQYLRQFSERLGTKRIEGKIKQVQQHPNGYIKALQMESGELVEGDLFIDCTGFAGLLIDKTLKVPFEDWGHWLPCNSAIAIQTESVGPANPYVTCTAHNAGWQWHIPLQHRVGNGNVFCGEFMSDDQAKQHLLNNVQGKVLTEPRVIKYKTGRRQQFWAKNCVALGLSSGFVEPLESTSIYLFMNGIIRLMRLFPFDGVTEPLMNEYNQQSIDELENVRDFIILHYHATEREDSEFWRYCKNMSVPDSLSHRMDLFRQNGTVQLGEKEMFRLESWAHVMIGQRLIPEQYHKIFNTMSDQELTGYLANIRNQITEVVNKLPTHQDFINQYCKASS

SEQ ID NO: 84425 - protein, 524 aa, Acidobacteria bacterium
  misc_feature (1)..(524): tr|A0A2V7Z3I3|A0A2V7Z3I3_9BACT Tryptophan halogenase OS =Acidobacteria bacterium OX=1978231 GN=DMF53_03920 PE=4 SV=1
MSKSVVIVGGGTAGWMTAAYLKKAAPSVNVTLIESANIRTVGVGEATFSTIKLFFDFLGLEEQDWMPSCNATYKLAIKFAGWRPDGADFYHPFQRYEMVDGYNMGEWWLKLKQHEVPFDQACFTIPAMCENKLSPRFLDGRVFDDKVQDFFGGSRRPKNSFLAEHKVQYPYAYQFDASLLAEYLKGYATRRGVRQIIDEVDEVKLAEDGSIDHLVTHGHGTLRGDLFVDCTGFRGLLINQALNEPFISFRDTLLCDRAIALQVPRDIETHGIEPYTTATALSAGWVWNIPLYGRVGTGYVYCSQFLSEEEAERELRAHLGPDAHGLRANHIKIRTGRCRNSWVKNCVAIGLSSGFVEPLESTGIFFIQHGIEELISHLPGNTIDEDMVRSYNRVVGEAVDGVRDFLTLHYYASQRMDSEFWRATKQVPLSDDLRERLDIWKSRLPNAKNINPNYHGFESYSYSVMLMGLGYQPERGLPALDHMDDTNALLAFRAMRERTDRLMASLPTQYEYLTQVRAEMFVAA

SEQ ID NO: 84426 - protein, 194 aa, Xanthomonadales bacterium
  misc_feature (1)..(194): tr|A0A3N5FQ98|A0A3N5FQ98_9GAMM Tryptophan halogenase (F ragment) OS=Xanthomonadales bacterium OX=2006849 GN=EHM 84_06555 PE=4 SV=1
RVIKFRAGRRLKAWSKNVVALGLASGFLEPLESTSIHLIMTGTTRLMRLFPFNGVVQSFVDQYNEEVLRELEAIRDFLVLHYHAVERDDSPFWRHCRRMAIPASLARRMEMFRKSAHAWQYEGELFRVDSWTQVMLGQGITPERYHHYAKAMSDQDLARFLSALRGSIEQAVAQMPRHQDFLDRYCKASNAGAS

SEQ ID NO: 84427 - protein, 504 aa, Caulobacter sp.
  misc_feature (1)..(504): tr|A0A2G4JQ62|A0A2G4JQ62_9CAUL Tryptophan halogenase OS =Caulobacter sp. B11 OX=2048899 GN=CSW58_09385 PE=4 SV= 1
MSHLKKIVIVGGGSAGWICAAMLGHYFEKGFCEVELIESEEIGTIGVGESTIPPFLQLIRTLGIDEQDFIQKTQASFKLAIRFEDWRAKGETYYHPFGQIGGPVDVHEFYQCWLRAKANGHPSKLQDFAPATVMADTGRFMLPAKAQRTMIANANYALHIDAKLVAAYLRRFAEARNVKRTEGIVTDVATRADGGIEKVILRDGRAVAGDFFIDCSGFRSLLVGKTLNEPYRDWSDLLLCDRAIAVQTANVGAPHPYTLSQAQDFGWRWRIPLQHRSGNGYVFCSQYLSDDEAKAVLMRQVEGEVLIEPQVIPFKTGMRERLWVKNCVAIGLAGGFIEPLESTALHLIYKGMDYLLRFFPDMDADPTLAAEYNRRMTGDYEEIRDFIVLHYATTQRDDTPFWKACAAVELPESLKARIDLFQASGVLRDGVDDMFRAPSWQSVMEGMGIRPRRYQQLVDRVPYSAIEQLMDRSAPMLADFVRTLPTHEAFLRTHCPAEPVRKSA

SEQ ID NO: 84428 - protein, 514 aa, Pseudoalteromonas fuliginea
  misc_feature (1)..(514): tr|A0A063KSV0|A0A063KSV0_9GAMM Tryptophan halogenase OS =Pseudoalteromonas fuliginea OX=1872678 GN=DC53_08270 P E=4 SV=1
MNKTIKTIKTIKTIAVIGGGTAGWLSAAIIASYHQGKNGDGLKVMLVESSDIPTIGVGEGTWPTMKNTLQQIGLREVDVFKACNATFKQGGKFVNWTHGNNDFYYHPFTVPLGYGRIDLAPYLDNVEDFAQQTNFQHDICEASLAPRGIAQGEYQGNCNYAYHLDAGAFAEMLKQHCKSKPGVEHIIGTVDQVKLDDDGAINELTLKDQTRIISADLFIDCTGFSSLLLGQALNVPFKKMDHVLFNDSALAMQVPYDENDDSLASHTIATAQNAGWIWDIGLTHRRGVGHVYSSKFLSDDEAEQNLRNYLGDAANGLTARKISFESGYREKFWHKNCVAVGMSAGFVEPLEATAIMLVEISARFVAEHMPADTQVMPIVAKRFNEQMNYRWQRIIDFLKLHYMLTKRPEPYWQAHVHPDTIPQTLQEDLLLWGSRGPLIQDFHGALELFPAASYQYVLYGMGFKPDFTKQAYLYSQDAQAKQIIERNSQLTQQMLQTLPPHRAYIEQWLAANPV

SEQ ID NO: 84429 - protein, 450 aa, Oxalobacteraceae bacterium
  misc_feature (1)..(450): tr|A0A4Q3I774|A0A4Q3I774_9BURK Tryptophan 7-halogenase (Fragment) OS=Oxalobacteraceae bacterium OX=1871070 GN= EOO79_02335 PE=4 SV=1
HFFRKIGVEEAAWMKACHATYKLNIRFEDWSPASGVAAYSHPFFSKIDTFNQQAFFVNCMTRRLGLDVTTLPERFLLGGVLAAQGKGPLAPAHFPFDIEYGYHFDAALLGSFLAHHAVSRGVERIAATIRTAELNSQGDITAVLGDGGLRIEGDLFVDCTGFRSLLLQQALGVPFNSFSDNLFNDAAVVIPTAAPAPALLPVQTVSRALSAGWSWHIPLTNRVGNGYVYSSAFISSEQAEAELRRSLGPGAAEGEARHLNMKVGQVERHWRRNCLALGLAQGFIEPLEATALHLAQVSIESFMHCFEEGRFTALHQARFNHDIVERFERVRDYIVAHYKLNTRSDSDYWHANREKEHLSDALGSLLQAWFDRADIAKEISRIQGNSHFSAVSWHCLLAGYGAFPPIAPNQPGTGDLHAEGRIDHFLNACASNFSSHENCLHKHPERDTHD

SEQ ID NO: 84430 - protein, 521 aa, Pseudoalteromonas ulvae
  misc_feature (1)..(521): tr|A0A244CVL4|A0A244CVL4_9GAMM Tryptophan halogenase OS =Pseudoalteromonas ulvae OX=107327 GN=B1199_05130 PE=4 SV=1
MAIKAILDSIVIVGGGTAGWLTAANLAKSLNCDKNDAIKITLIESPNIPTIGVGEGTWPTMRKTLAKIGIDESEFIKQCGASFKQATKFVNWKSNPLNGENNHYYHLFSSIYDPTDFNLSPYWKLGYAGDESLTYANAVSPQALCCELGLAPKQITTKAYDGLQSYAYHLDAGKFSEMLKKHCTENLNVHFIADDVIDVCLDETGSISGVNTQNSGLIEGDFFVDCTGFSSLLLGKALNIGFKSVADTLLTDYAVTVQVPYDDPNADISSCTISTAQEAGWIWDIGLANRRGIGHVYSSKFMSHEDAERILLEYAGPQAKGLMTRKIKMEVGYREKFWHKNCVAIGLSAAFVEPLEASAIFLIEAASNMLAEQFPRQRVGMEHAERKFNESFKFRWDKTIDFIKLHYVLSKRDDPFWRANKDETTIPDSLKAQLAHWSVQPVSNYDFANVYEPFPLESYQFVLNGMGFEQNLEPSRALFPMVDKATMSFDKVKKITEFAVKDLPTNRALLNKVHQHGFSKI

SEQ ID NO: 84431 - protein, 516 aa, Pseudoxanthomonas sp.
  misc_feature (1)..(516): tr|A0A4Q8M3B3|A0A4Q8M3B3_9GAMM Tryptophan 7-halogenase OS=Pseudoxanthomonas sp. NML130969 OX=2480811 GN=EA655_ 15155 PE=4 SV=1
MDEAIRHVVIVGGGSAGWLTAGLIAAEHRDRHGPTLRVSVLESPDVPAIGVGEGTWPTMRDTLRRIGVGEADFVRACDATFKQGSQFVGWVDGGAHDRYTHPFTLPKGYGETQLAVAWAAQGQLPFAHLACFQPHLCDAGRGPKQFATPEYAAVANYAYHLDATRLGAFLRQHCVERLGVQHVVGHMDAVLSHENGDIAALAVRDQPALQGDLFVDCTGLRALLLGAHYGIAPVGVEDILFNDRALALQVPYADLNAPIACQTLSTAQRAGWIWDIGLSARRGVGHVYSSAFTSDEEAEADLRAYIQASGGPAAATLPPARRIDLQPGYRPTAWHRNCVAVGLASGFVEPLEASSLVLVELAAARVADEMPATRGQMDLLAARFNETFAYRWQRVIEFLKLHYVLSRRTTPYWQAHREDASLPPRLRELLQLWRHQSPSRSDFPRSEEIFPSASWQYILYGMGARPHSRPARRSEDLQAAQACFAESAALVQRMLPALPSHRALVEHIKAHGLPRL

SEQ ID NO: 84432 - protein, 513 aa, Sphingomonas sp.
  misc_feature (1)..(513): tr|A0A3S0TKH7|A0A3S0TKH7_9SPHN Tryptophan 7-halogenase OS=Sphingomonas sp. TF3 OX=2495580 GN=EJC47_01100 PE=4 SV=1
MQSVKNIVIVGGGTAGWLTAGIIAARHRGRMSEGFSVTLIESPGTPIIGVGEGTWPTLRTTLSKIGVSESDFFRECNASFKQGARFARWTTGEPDEGYYHPLMLPQSFSRVNLATHWLADGHGQSFCDMVSPQGRLCDDGLAPKTIATPEYEALANYAYHLDAGKFAGFLQRHCCETLGVRHILADVQHATQAENGDILTVVTEQAGEIAGDLFIDCTGFAALLIGKTLGVPFKSCSDTLFCDTALAVQIPHEDPDGPIASHTISTAQSSGWIWDIGLPTRRGVGHVYSSSHISDDAAEQELRAYLGPRGRDLAVRKLAIRAGHRETFWKNNCVAIGLAAGFLEPLEASAIVLIELSAKLVAEQMPVCREVMDILAARFNATTLYRWGRIIDFLKLHYVLTKRTDSDFWRDNVRPETVPDRLRDLLTLWKYQPPWFHDEFDRVEEVFPAASYQYVLYGMNFHTEVSRDAIAGETRLAAQARREAATQTERLRAGLPRHRDLIRKIVEHGLPTI

SEQ ID NO: 84433 - protein, 502 aa, Sphingomonas sp.
  misc_feature (1)..(502): tr|A0A0S9C9F5|A0A0S9C9F5_9SPHN Tryptophan halogenase OS =Sphingomonas sp. Leaf231 OX=1736301 GN=ASE95_16225 PE= 4 SV=1
MTQEPIRSIVIVGGGTAGWMAATFLARRLAHLRLSITVVESSAIGTVGVGEATVPAIRDFFSAVELGEADVLRETEATIKYGIRFAGWKHEGHDFFHPFGLYGVAARGVAFHHYWLKRRAAGDETPLATYCLATQLAERGLFLPPVERPANDLGVFNFAVHFDASKFAALLRRLALANGVAHYDARIIDVRRDGESGHVTAVALDDGTQLAGDLWIDCSGFRSLLLGEALGVPFVDWRRWLPCDRAIAIPCKAAQVHRPFTTATATKAGWRWHIPLRHRVGNGHVYCSDFIDDAGAEDVLLSALEGEPLAQPNRIRFTAGHRARFWDRNVVGLGLSTGFLEPLESTSITLIQSGLERLMPLFPDRGFDPRLADTYNRQSVLEFERIRDFLLLHYSGNARIGEPFWDHVRAISLTDGLQAKLDAWRAAGEFVRREWDTFQDASWLSMYAGFGDLPARRSPMADQVSDADLRDSLTRMRAAIEATLAHAEPHAAFLARVHEGQA

SEQ ID NO: 84434 - protein, 524 aa, Massilia plicata
  misc_feature (1)..(524): tr|A0A4P7BD07|A0A4P7BD07_9BURK Tryptophan 7-halogenase OS=Massilia plicata OX=321984 GN=E1742_10580 PE=4 SV=1
MQPIRNVLVVGGGTAGWLAAGFLARTLGTAGGGIAVTLVESKEIGIIGVGEGTFPSIRGTLSILGIDEGRFIRECNATFKQGVRFNHWVRPPGTPGADHYFHPFSQPSQRPGGPELLPYWLMGAAGPDVPFAAAATMQKHVADMRHGPKRTTDADFMGPLNYAYHFDAGAFAALLAAHAQTLGVRRIEATVDQVKLGASGAIAAVVTREAGELAADLYIDCTGFRARLIGEALGSPFRNINDTLFVDRALAMQVPYDRLDAPIPSYTISTAHEAGWTWDIGLHERRGIGYVYSSRHTNDDRADQLLRQYIGPASDGREPRMLKLNVGYRETQWKKNCVAIGLSGGFLEPLESSGIGLIEAATYLVSYLFPYDGNLAPAAKLFNGQMKARYERIVDFVKMHYCLSQRTDNAFWIENAHASTIPESLREQLSMWRSRPPHRLDFVTDIEMYPPSSWQYVLYGMEFPTQQLAHRAALPDLAAAQREFQTIAQLSHHALADLPAHRALVEHYRARGTRAAQPARRLYV

SEQ ID NO: 84435 - protein, 514 aa, Pseudoalteromonas luteoviolacea
  misc_feature (1)..(514): tr|A0A1C0TW38|A0A1C0TW38_9GAMM Tryptophan halogenase OS =Pseudoalteromonas luteoviolacea OX=43657 GN=A7985_0587 0 PE=4 SV=1
MNGEIKRVVVVGGGTAGWLAACHLAKQLEPSTNRGISVTLVDSPDIPTIGVGEGTVPVMRDTLKYFGISEVEFIKRCDVTFKQSIKFVDWEVAPRDGHSTYYHHLFDFPNIRPFNPTPYWLSNNAINKTHFADLVSVQSHVCELGLAPKLNRDGEFSGLFNYAYHLDAGKFTQMLSEHGTAELGISNIKANVERVHLNDDGEIMHLETDSAGVISGDMFVDCTGFKAMLIEKSMGAKFIDKSDVLLTDTALAIQIPYEDENTTIPPFTISTAQKHGWIWDIGLTQRKGVGYVFSSAHQSEDQAVHTLAEYLGQSAAQIEPRKISMKVGYQKQAWIKNCVAMGLSQGFVEPLEATGLLMFDVTARMFSEALPDFKEDMPLRAKRFNEDICQMWESTSDFIKLHYYLSKREDSQFWVDNRDPQSISTELAEKLQMWQRKLPSQFDFRHTVDSFRVSNYLYVLYGMNFNTELNGRYDQYHNVEAINKLRTEIEKGVKYCKSNLLSHREYLEKVRKLS

SEQ ID NO: 84436 - protein, 419 aa, Kangiella geojedonensis
  misc_feature (1)..(419): tr|A0A0F6RDB4|A0A0F6RDB4_9GAMM Tryptophan halogenase OS =Kangiella geojedonensis OX=914150 GN=TQ33_2224 PE=4 SV =1
MINSNQEYDVIIIGAGPAGALAASLLVQNHLRVLVIEKQTFPRFSIGESLLPQSMVYLEQAKLLSAVEASADELGFQYKNGAIFNSSEQDSIFDFSQKLSEGPAYTYQVKRAEFDQLLAQKAQEFGADFAFGYTVKSIEFTPEPILTISHPKDDELKLHSKFVLDASGFARVLPRLLDLDLPSDFPVRSSVFAHISDNINNSSFDRNKILIGSHPQAQDVWYWLIPFADGTASIGCVAKPQFFDDIRNTEALDSDNALLLHCIQQNKRFGALLSEAEIIRPAQQLTGYSSNVKQLYGDHYALLGNAGEFLDPIFSSGVTIAFKSASLASDCLLKQFNHTPVCWEREFSQPLKAGVETFKAFVHSWYQGQLQQIIQFEEAPQNVREMICSVLAGYAWDEQNPYNQNTQRRLNALGELCAS

SEQ ID NO: 84437 - protein, 504 aa, Sphingomonas sp.
  misc_feature (1)..(504): tr|A0A0S9CH68|A0A0S9CH68_9SPHN Tryptophan halogenase OS =Sphingomonas sp. Leaf231 OX=1736301 GN=ASE95_10405 PE= 4 SV=1
MEKTARQRVVVVGGGTSGWMTAAALAKLLPTRCSVELVESEAIGIIGVGEATLPHIRAFNERLGIVEAEFMAATRATFKLGIEFRDWGRIGDSYIHPFGTFGRGGGDVQFHHYYTRLACAGVALPPIEAFSMACALARANRFGPPSRDAQQIASTFGYAYQFDAVAFAPYLRRFAERLGARRTEGRIVAAERDPESGDVTAILLDDGRRIEGDLFVDCSGFAALLIGKELDEPFEDWSRWLPADRAVAMPCRTATSVTPFTSAVAMPSGWRWRIPLQHRTGNGYVFASHFLSETAAADALTAAVEGTPLVAPRTVRFTAGRRTRSWVGNVVAIGLASGFLEPLESTSLYLVQQAITALVELFPERAISSIDRDEFNRLINMEYDRVRDFLILHYHATERDDSPFWNYVRTMAIPDSLAEKMELFRRRGRVVKYREGAFLDASWVSVYLGQRVLPAGADPRAEGPSHDSLVAGLERMRGEIAGAVGAMRDHADFLADYCPMPAAA

SEQ ID NO: 84438 - protein, 531 aa, Sphingomonas sp.
  misc_feature (1)..(531): tr|A0A0S9CH82|A0A0S9CH82_9SPHN Tryptophan halogenase OS =Sphingomonas sp. Leaf231 OX=1736301 GN=ASE95_10415 PE= 4 SV=1
MNEHTIRSVVILGGGTAGWMAAAALSRFLNNGVTRITLIESEEIGTVGVGEATIPPLRTFNQMLGIDEHDFIRETGGTYKLGIEFVDWGDVGERYFHPFGAHGHDIGGVHFHQLYLRERQRRVLPDISAWSMSAVAAQAGRFAPPAPQAQSAVKDLFYAYHFDAARYAGFLRRFAERNGIQRVEGKVVAVAQRPEDGHVTALKLDDGQIVGGDLFIDCSGFRGVLIEETLETGYEDWRHWLPCDRAVAVPSANPGDPEPFTRATARGAGWQWRIPLQQRMGNGLVYCSEFQQQGAAERELLANLEGVPLTDPRHLAFTTGRRKLAWNRNVVALGLASGFIEPLESTSIHLVQSGIARLIALFPDRRFDPVERDEYNAQMHELYADVRDFVILHYKATRRADTPFWDRCRTMAIPDSLARKIALFRGKGRVFREGRELFATTSWVSVCMGQHVLPEGHEPAVDALDEQKVAGALEQMRRDYLDVAAQLPTHGDFLRHIAGAPGAATPVPSAELAPTFSFASETPFDFSADPL

SEQ ID NO: 84439 - protein, 491 aa, Caulobacter sp.
  misc_feature (1)..(491): tr|A0A0Q8FVS1|A0A0Q8FVS1_9CAUL Tryptophan halogenase OS =Caulobacter sp. Root655 OX=1736578 GN=ASD79_07315 PE=4 SV=1
MGDNRIRQVVIVGGGTAGWMAAAALAKALGPLVSIRLIESDEIGTVGVGEATIPQIKLFNGLLGLDEDDFIRQTQGTFKLGIEFVGWTRPDHAYIHAFGGVGRDLGMVNFHQYWLKHRQDGGTSDFWAYSLNGAAAKANRFDRQPGLAYAFQFDAALYARYLRAYAERLGVVRTEGKILGATLREPDGFVESVTLERGEAVGGDLFIDCSGFRGVLIEQALKTGYDDWSQLLPCDRAVAVPTASAGPLRPYTQAIARPAGWQWRIPLQHRTGNGHVFCSRYVSEDEATATLMANLEGEPLAEPRLLKFVTGRRKAFWNRNVVALGLASGFMEPLESTSIHLIQSGLSRLLNLFPDKGFAQADIDEYNRQAGLEFERIRDFLVLHYWANQRPEPFWAACRDMTIPGELARKVEIFRAHGRLFREPEDLFFETSWLQVLLGQGIEPRGRHPMTDLVSGPRLEGFLADLRKITADAANALPDHADFIRQQCAAR

SEQ ID NO: 84440 - protein, 533 aa, Streptomyces virginiae
  misc_feature (1)..(533): tr|A0A0L8M4T4|A0A0L8M4T4_STRVG Tryptophan halogenase OS =Streptomyces virginiae OX=1961 GN=ADK75_31630 PE=4 SV= 1
MTSSDTRLQKVVILGGGTAGWMTAAYLGKALQGTVDITVLEAPSIPRIGVGEATVPNLQRSFFDYLGIAEDEWMRECNASFKMAVRFVNWRTDGQGESTARELPGGGPDHFYHPFGLLPDYDQTPLSHYWFKRKYEGRTTEPFDYACFREPPVMDAMKAPRWLDGRPATRYAWHFDAQLVADFLRRFSTEKQGVNHVQDEMVRVEQDGRGYVTTLHTKGGLALDADLFVDCSGFRGLLINQAMEEPFIDMSDHLLCDSAVATAVPHDDEANGVEPYTSAIAMSSGWAWKIPMLGRFGTGYVYSSKFADQDTATREFADMWGLDVEETKFNHIRFRVGRNRRAWVKNVVSIGLSSCFLEPLESTGIYFITAAIYQLAKHFPDKTFNEGLVNSFNHEIEVMFDDTRDFIQAHFFYAPRNDTPFWQANKKLVLPENIQQKISAYKAGLPINSPITDESTYYGNFEAEFRNFWTNGSYYCIFAGLGLEPDAPLPSLAHRPDSVASAEPLFDAVKRQQQNLLETLPSAYDYLRQLHGA

SEQ ID NO: 84441 - protein, 483 aa, Caulobacter sp.
  misc_feature (1)..(483): tr|A0A4V2UE44|A0A4V2UE44_9CAUL Tryptophan halogenase OS =Caulobacter sp. BK020 OX=2512117 GN=EV278_13811 PE=4 S V=1
MNKRILVVGGGTAGWLTAGYLARTLDAQSHGGVEITLVESAQIGFLGVGEGVFPTIRKTLQRIGIDEATLVREASATFKQGARFAHWRFEPGGGQPDHYLYPFQATQEPSGPDLQHCGLSGDHVATPNHACHLDAVKLAGVLRNAATGLGVRHVVDTIDQVPLTEDGAIAAILGRASGRMTADLYVDCTGFRAQLIGHAQKSPYKSCRSALFCDSALAMQVPYERPDASIASYTISTAQEAGWTWDVGLNSRRGVGHVFSSDHTDAETAERVLRDYVGKAGDGLDIRHIKFEAGYREISWRKNCVAIGLSSGFLEPLEATDIAFTEVAAVTLGTLFPWGGEMETAARRYNDLMRRRYERALDFIKLHYCISERRDTAFWRNNVEASTIPDSLHDLLDRWRFRPPDAIDIDPNADIFTEASWRYVLYGMGYRTDLSPKADACRDFNRARPAFEDIRQQAAYAYQNLPTHRERAESAQRRGFGEG

SEQ ID NO: 84442 - protein, 506 aa, Xanthomonas arboricola
  misc_feature (1)..(506): tr|A0A2S7CMS4|A0A2S7CMS4_9XANT Tryptophan halogenase OS =Xanthomonas arboricola pv. corylina OX=487821 GN=XacyC FBP1159_03015 PE=4 SV=1
MIPAPLRNIVIVGGGTAGWMAAAAFARVLGPGFKVQLIESEQLGTVGVGEATVPHIKAFNNLLGIDEAEFVRQTQGSFKLGIEFVDWQRPGTSYIHGFGTQIGHPLGLLPFHQYWIKQHARGKAQPLGAYTLNTVAAVRGKFMTSAGDVPANSPLANIAYAYHFDATQYARFLRTYAEQRGVTRIEGLVEQVQLHADSGHVQSLQLASGQVVSGDLFIDCSGFRGLLIEEALHTGYHDFTHWLPCDRALAVPSENVGPPTPYTRSTARAAGWQWRIPLQHRTGNGYVYSSAHISDDEAAATLLANLDGKPLADPRPLRFTTGRRKQFWNRNVVALGLASGFLEPLESTSIHLIQAGISRLLELFPREGISPVLVQRYNDRLAFEFDRIRDFLVLHYHATERDDSAFWRHCRTMPITPELQTTLDLFRDSGRFYRNAEEMFAEISWVQVMVGQGILPRGYHPLVDQVPDHDAERFLASVAQTIGHCVDVMPTHQQFIDRYCKATAPR

SEQ ID NO: 84443 - protein, 498 aa, Pseudoalteromonas luteoviolacea
  misc_feature (1)..(498): tr|A0A0C1MS76|A0A0C1MS76_9GAMM Tryptophan halogenase OS =Pseudoalteromonas luteoviolacea OX=43657 GN=JF50_10280 PE=4 SV=1
MTERIQSVLIVGGGTAGWLSASLLKRVLKDQVNITLIESDDIGTVGVGEASIPPMVNFNAALGLDERTFIEQTQATYKLGIEFEGWGHQGSRYMHAFGELGKSFPFCDFFQVWLKAKQQGLTDSLAEYSLNTQAAKANRFTHLQHIPNTQLQGLTYAYHFDAGLYAKLLSKQSQTQGVRRVEGKITEVKTDPNTGHIAAVLLANGEQYSADLYLDCSGLKGLLIDQTMNVGFEDWSHWLPCDSAWALPSEQLDGEIKPYTRAIAKQAGWQWQIPLQHRVGNGYVFSSKFISEQDAKEALLHSLPSRPLAEPKLIKFKTGMRRKQWQGNVFAVGLASGFLEPLESTSIHLIQTSILRLIRHFPFDVIKDCAIENVNIEFSNEMAQVRDFIILHYKLTERDDSRFWQWCKNMSIPRSLQRKMALFEETGHCAAKTDDLFQNVAWQQVMVGQGLVPKTYHPLAEQFDDEHLKSLLDSVKVLLQSTVNKLPSHQAFIDKMTK

SEQ ID NO: 84444 - protein, 514 aa, Microbulbifer sp.
  misc_feature (1)..(514): tr|A0A0X3U7W2|A0A0X3U7W2_9GAMM Tryptophan halogenase OS =Microbulbifer sp. ZGT114 OX=1685377 GN=AVO43_05290 PE= 4 SV=1
MKEKQTRVINIIGGGSAGWMTAIYLNRYFNRGKKNFSIRLIESPDVGIIGVGEATVHSIRFFFAAMGLDEAELMAETNATVKAGIMFRNWNKPQGSEPHEYFHPFDQQQPGGSVDISSAWFIANRDAWQRYDQAVSLNAHLIEEGRCPKTMSSPPFQAVTPYGYHLDAKLLARYLRKNAVEAGVEHVEASVSDVTVEGDRVLSVTTDRGEFTGDFFVDCSGFRGLLLEKLAEDNWHSFSDALPCDRAVAIQRPLPEGDGPKPYTVATALSNGWAWQIDLVNRQGSGYVYDSDRISPEEAERELREFLGPDSESLKCTHLEMKVGCRDRFWIGNCVAIGLSGGFIEPLESTGLHMIHLGVSLLATHLAAGEVPQALRDAYNEKMRGFYHDLKQFIVLHYCLSDRDDSDFWRGASATVEHCPWLQRQLEIWRHKICEYQDFAGSYSSIFTDSSYRYVLYGMQHKPDLEFVLSEEEQQGLFQRFEDMVRRAKVASMEHKAFLRTLPAEVRPEMIEVG

SEQ ID NO: 84445 - protein, 129 aa, Pseudomonas sp.
  misc_feature (1)..(129): tr|A0A2R7S1N6|A0A2R7S1N6_9PSED Tryptophan halogenase (F ragment) OS=Pseudomonas sp. HMWF010 OX=2056847 GN=DBR41 _24335 PE=4 SV=1
RYNRVMAFEYEKIRDFLILRFKATSRNDTPYWDYLREMAIPDYLADKIALFESYGRIFRENEELFNDTSWFSVMVGQGLRPRGYDPMVDVMPVEELRARMADIRTVIARSAEVMPDHRAFIRDHCDAMA

SEQ ID NO: 84446 - protein, 261 aa, Pseudomonas sp.
  misc_feature (1)..(261): tr|A0A2R7S9C7|A0A2R7S9C7_9PSED Tryptophan halogenase (F ragment) OS=Pseudomonas sp. HMWF010 OX=2056847 GN=DBR41 _21300 PE=4 SV=1
PNDRAVAMPCETAGDGLTPYTRATADTAGWRWRIPLQHRTGNGYVYASAHLSDDAAVARLRATLDGPPRGEPNFIRFQAGRRREMWVKNCVAIGLASGFLEPLESTSIHMIQSGITKLLALFPDRGFDPVETAEYNRLTILQTELIRDFIILHFKANERDEPYWQQAREMAIPESLQRKIDLFAARGRLFQSDYDLFAEPSWVAVMLGQNIRPRGYDPLVDSLDAQLVQDQMQRLAALVRQTAEALPSHQAFIARYCAASA

SEQ ID NO: 84447 - protein, 506 aa, Caulobacter zeae
  misc_feature (1)..(506): tr|A0A2N5D7W3|A0A2N5D7W3_9CAUL Tryptophan halogenase OS =Caulobacter zeae OX=2055137 GN=SGCZBJ_18880 PE=4 SV=1
MDRAIGSIAILGGGTAGWMAAAVLAQVLRGTKTTITLVESAEIPTVGVGEATIPPIVDFLRLLEIDQGQFMAATEGSFKLGIRFDDWRVVGERYWHPFGTFGPSVDRRPFHHVWHRLVAAGDDPRLEAYSLATALGDAGRMAFADGQGLDGQGQGPLGGMRHALHFDAGLVARFLRTYSEQRGVRRLERRVEGATLKDDGFVEALVLDGGERLEADLFIDCSGFRGVLIEGALKTGYEDWSAFLPCDRAVAGLTGRDANPPPFTQAAARPAGWRWRIPLRHRTGNGYVYSSAHVSDDEALADLEGEAGKLLTEPRVLRFTGGRRKAFWNRNVVALGLASGFIEPLESTSIHFVTSGLMKLLDHFPDKDFDGANIADYNKALIAEYEAARDFIVLHYQPTRRDEPFWRERAAATLPPDLAERLALYRGTGRIPHRPTELFTELSWFYVLEGMGVRPQAYDPLVDLSNLSQVREGLAGWRRRVAEIVQAAPLHDAALDQVAGQRRPAA

SEQ ID NO: 84448 - protein, 519 aa, Sphingomonas sp.
  misc_feature (1)..(519): tr|A0A0S9CBE9|A0A0S9CBE9_9SPHN Tryptophan halogenase OS =Sphingomonas sp. Leaf231 OX=1736301 GN=ASE95_11860 PE= 4 SV=1
MTQPHGETDRPVKRVVVVGGGSAGWIAACRLAAAVRRSAGDVTVTLVESAQVPTIGVGEGTWPTMRNTLAKIGISETDFVRRCDAAFKQGARFVGWADGRPGDAYYHPLNPPAGATEIDLAPHWQPRGGAAEFASWVDYQAALCDAGLAPKSITTPEYLGQANYAYHLDAGKFAALLHEHATGRLGVEHVVGDVVRAEMADNGDVAGVSLVDGRTIAGDLFVDCSGFAALLIGGVYDIPFRSCRDVMFADRAIAMQVPYADPDDPVTCHTVATAQDAGWIWDIGLWTRRGIGHVYSSAHISDDQAEAALRRYVGPAAEELSARTLRIEAGHRERFWQNNCVAVGLSAGFVEPLEASALMLIEASMDAIADRLPRTRAAIDTAARQFNAAFTHHWSRIVEFLKLHYAITRRTDSAFWRDHADPSTWPDGLAERLALWRDHPPAAADFDHAREVFGWPSYQYVLHGMKYPTRYPRHDAAPDAALARRWIARTDRTRADAMQRLPRHRDLLRAVRDHGLQAV

SEQ ID NO: 84449 - protein, 507 aa, Xanthomonas vesicatoria
  misc_feature (1)..(507): tr|F0BGX6|F0BGX6_9XANT Tryptophan halogenase OS=Xanthom onas vesicatoria ATCC 35937 OX=925775 GN=XVE_3504 PE=4 SV=1
MWSHLQENAVNQARIRKVVIAGGGTAGWIAACALSHQFRDLLDITLVESDQIATVGVGESTVPPIRTFHRFLNIDEQEFLRAAAGTFKLSISFEHWRRQGERYIHPFGITGQSTLVCAFHHLWLESQRRGMPGAFADYCLETVASRADRFALPREPAVNYAYHLDAALYARFLRTRSEAHGVKRVEGKIQQVTLQPDSGDVAALVLEDGQVLEGDLFIDCTGFRGLLIEQTLHTGYEDWSHWLPCDRAVAVQTEAVGPPVPYTRAIAHEAGWRWHIPLQHRVGNGLVFSSQHMSDDEAHAKLLRDTGATPVKDPWLVPFRTGRRRKAWNKNVVSLGLASGFIEPLESTSIHLTIAAVVRLITLFPANGIAPSQVDIFNDISRTEMEHVRDFVTLHYHATQRDEPLWQQCRDMELPESLRLRLRAWRERAHAWQGTDELFRVDSWTHVLLGQGIVPQQHHPLAAALSDADLRRLLDGIAQPLQRAVEQMPSQQEFISAYCKMDARAWG

SEQ ID NO: 84450 - protein, 513 aa, Caulobacter sp.
  misc_feature (1)..(513): tr|A0A0Q8FV69|A0A0Q8FV69_9CAUL Tryptophan halogenase OS =Caulobacter sp. Root655 OX=1736578 GN=ASD79_21800 PE=4 SV=1
MAGNRIVIVGGGTAGWLTAAYLAKQLGADRPGGARITLIESPEIGVIGVGEGTFPTIRGTLATLGVSEARFMRESSATFKQGVRFVDWERRSADGKSSEYFHPFNLPLRPEGRDLSPYWLLDHQAGAPLAFADAVTTQGRIIEAGLAPKRPEDPDFQGPMNYAYHFDAARFADFLRGVAKELGVVHLAGKVETVQLDAETGDIASVTASELGVIEGDLFIDCSGFRALLIGEALGAPFKRCDDVLFNDRALAVQVPYPTPDAPIAPYTLATAHEAGWTWDIGLDGRRGVGYVFSSRHTDEARAEAVLRAYVGSEADHLPVRLLKFQTGYRERQWIGNCVAVGLSAGFFEPLESTGIMLIEVAATMIAEVLPLRDRAAMDSAARTFNGLMAGRFERIVSFLKLHYCLSKRDEPYWRDNADPASWPQGLRDLMAQWKHRPVSRFDFLVDLETFLPASYQYILYGMNAATDFAPVEGRYADGAMAQQAFAKVAGAATEALKHLPPHRALVEAYYRR

SEQ ID NO: 84451 - protein, 506 aa, Xanthomonas vesicatoria
  misc_feature (1)..(506): tr|F0BDY3|F0BDY3_9XANT Tryptophan halogenase OS=Xanthom onas vesicatoria ATCC 35937 OX=925775 GN=XVE_2354 PE=4 SV=1
MIPAPLRNIVIVGGGTAGWMAAAAFARVLGPTFNVQLIESEQLGTVGVGEATVPHIKAFNNLLGIDEAEFVRQTQGSFKLGIEFVDWQRPGTSYIHGFGSQIGHPLGLLPFHQYWIKQHARGKAQPLGAYTLNTVAAARGKFMTSAGDVPANSPLANIAYAYHFDASLYARFLRGFAEARGVRRIEGMVDQVQLHPESGHVVSLQLASGQVIAGDLFIDCSGFRGLLIEDALHTGYHDFTRWLPCDRALAVPCEKVGPPTPYTRSTARAAGWQWRIPLQHRTGNGYVYSSAHISDDEAAASLLANLDGRPLGDPRPLRFTTGRRKQFWNRNVVALGLASGFLEPLESTSIHLIQSGISRLLELFPREGISPVLVQRYNDRLAFEFDRIRDFLLLHYHATERDDSAFWRHCRHMPITPELQTTLDLFRDSGRFYRNAEEMFAEISWVQVMVGQGILPTGYHPLVDQVPDTDAEGFLSSVAQTISHCVDVMPTHQQFIDRYCKAAPAR

SEQ ID NO: 84452 - protein, 530 aa, Actinophytocola oryzae
  misc_feature (1)..(530): tr|A0A4R7V1D1|A0A4R7V1D1_9PSEU Tryptophan halogenase OS =Actinophytocola oryzae OX=502181 GN=CLV71_1163 PE=4 SV =1
MGDRRIRKIVVLGGGTAGWMSAAYLGRALGQQVSVTVLESPAVPRIGVGEATIPNLHRVLFDFLGVPEDDWMRACNASFKMGIKYVNWRTPGAGEATSRQRSGAPDEFYHLFGLLPTYQNLPLSHYWTHRALAGETAERFDRACYPQAPALDANLAPRNADGTRWTNYAWHFDAQLVADYLRQFAVDKQGAVHIEDMMTEAVLDQRGHVTGLRTQGGRLIEGDLFVDCSGFRGLLINQAMREPFLDMSDHLLNDRAVATAVPHDDEAHGVEPYTSSIAMSSGWTWKIPMLGRFGSGYVYSSRFANQDEATLEFCRMWGLDPEEQTLNQIRFRVGRNRRAWVRNVVSVGLASCFLEPLESTGIYFAYAALYQLVKHFPDKNFEPVMRDRFNREIEVMFDDSRDFVQAHFTFAPRDDTPFWRACKELPLADAIAEKVAMYRAGLPVSMPVVGEETYYDNFEAEFRNFWSNSNYYCILAGLDFLPDHSLPMLAARPELADQAEPLFARVKQEQRRILDTVPTCYDYLRQLHGK

SEQ ID NO: 84453 - protein, 513 aa, Caulobacter sp.
  misc_feature (1)..(513): tr|A0A0Q8FES5|A0A0Q8FES5_9CAUL Tryptophan halogenase OS =Caulobacter sp. Root655 OX=1736578 GN=ASD79_13490 PE=4 SV=1
MRPVKNIVIVGGGTAGWLTAGLIAAKHRARLATGFTVTLVESPNTPIIGVGEGTWPTLRTSLAKIGVSETDFFRECDAAFKQGAKFARWTTGAADDAYYHPLMLPQGFAQVNLAPHWLVGARGQSFCDAVTPQGRLCDEGLAPKTITAAPYQGAANYAYHLDAGKFAPFLQRHCCDKLDVRHVLADVQSVSMTDDGDIRGVVTKQHGEIQGDLFVDCTGFRALLLGDALGVPFRDCGDVLFCDTALAIQVPYETETSPIASHTISTAQSAGWIWDIGLPTRRGVGHVYSSRHISDEDAERELRAYIGPAGRDLPARKIPIRSGHRETFWKRNCVAVGLAAGFLEPLEASAIVLIELSAKLIAEQMPACREVMDIVAARFNATTHYRWGRIIDFLKLHYVLSQRSDSAFWRDNRARETIPDRLADLLLLWSHQPPWLHDEFDRADEVFPAASYQYVLYGMGFRTQIEPQALADERVLAERALRETAAQTERLRASLPRHRDLIRKIVEHGLQPV

SEQ ID NO: 84454 - protein, 516 aa, Sphingomonas sp.
  misc_feature (1)..(516): tr|A0A0S9CKY6|A0A0S9CKY6_9SPHN Tryptophan halogenase OS =Sphingomonas sp. Leaf231 OX=1736301 GN=ASE95_05710 PE= 4 SV=1
MSVSLKFAAEPIRSIIVVGGGTAGWMTAAALARSLGPQRPSITLVESDALGTVGVGEATIPPIREMNRLLGIDEDAFVRATAATFKLGIAFEDWRAIGHRYFHPFGRIGAAIGPLPFHHYWQALAAANPSAAGALTDYSLPAAAATAGVFCRPSDDPRSTLSTISYAFHFDAGRYARLLRQRAEADGVVRHEGRIVAVERGDGGHPAGPMVRAIRLADGGELAADLFIDCSGFTGLLIGDAADNPYQDWREWLPCDSALAMPTARTAEPLPYTRSIAEAAGWQWRIPLQHRMGNGHVFASAFVDREAAERVLRDSVDGKPLAEPKLLRFTPGRRSRAWSGNVVAIGLAAGFLEPLESTSIHLVQSAITRLLALWPDRALAPPDIAYFNRATASEYERIRDFLILHYHATQRDDSAFWNHVRTTAIPDTLASRLELYRSRGRFFPEAFDLFMEPSWIAVLDGQGIRPERPDPLATGAIDTLADVLPRMRAAITRAVAAMPRHGDFVAGLRDDPADGV

SEQ ID NO: 84455 - protein, 500 aa, Caulobacter sp.
  misc_feature (1)..(500): tr|A0A0Q8FKY2|A0A0Q8FKY2_9CAUL Tryptophan halogenase OS =Caulobacter sp. Root655 OX=1736578 GN=ASD79_17820 PE=4 SV=1
MTDRAIKSIAIVGGGTAGWMAASLLAQTLRGTGCAITLIESPDIGIVGVGEATIPPILDFLKLIEVDLDAFLQATQATFKLGIKFQDWSRVGESYWHPFGSFGVSIDRRPFHHVWHKARTEGLDMAVPDFSLAAALGEAGRFAPPDPRAGGPLAGLRHALHFDAALVAKFLRDHAERRGVRRLEREVARAVLRDDGFIDALTLTDGEQVKADFYIDCSGLRGLLIEQALETGYEDWTRWLPCDRAIAAPTAHAGPPAPYTLAVAQDAGWRWKIPLRHRVGNGYVYASQAIDDETALSELLAAIGEPLAEPRKLRFTTGRRKAFWNRNCVALGLASGFLEPLESTSIHLVCSGLYKLLDHFPDRDFAPSNIAAYNRALVAEYETFRDFIVLHYCATARDDTPFWRDRAEASIPDSLAERMELYRACGRIDTRPGELFTDLSWFYVLEGMGLRPRAHDPLVDASDFRQVRAILPRLAQQVATVVAQSPTHQAALGAGRSVAA

SEQ ID NO: 84456 - protein, 521 aa, Xanthomonas arboricola
  misc_feature (1)..(521): tr|A0A2S7CF60|A0A2S7CF60_9XANT Tryptophan halogenase OS =Xanthomonas arboricola pv. corylina OX=487821 GN=XacyC FBP1159_12450 PE=4 SV=1
MTDTAPSDPQQRPVRRVVIAGGGTAGWMAAAALSKVLGRHLQIVLVESDEIGTVGVGEATIPSLVTFHRLLEIDEAAFMAATQATIKLGIGFEHWRDVDRHYIHSFGHTGTDHWSAGFQHFWLKGRQRGLARDFGDYCLELRAAQEGRFAHLPNGGMNYAYHLDAGLYARFLRRFSEGFGVQRIEGRIGNVETHAHSGYLTALTLDNGTRVEGDLFLDCTGFAGLLIGKTLGVGTDDWSQWLFADSALAVQTESVGAPVPYTRSRADQAGWMWRIPLQHRVGNGIVYSSRYMDQDSAAQVLQRNLSGRALTQPRALRFTPNQRHRVWEKNCVALGLASGFLEPLESTNIHLIQRGIIRLMQTFPQVINDVDIAEYNRQAAAEITHIRDFVILHYHATDRRDTPFWRDCAAMDIPDTLRHRVELFRQSGRVFHQANELFAENSWVQVMLGQGITPKQHHPVADLMGDAELRHFLETIRTRVDAALARLPAHADFLRRYCPAPPLPEPATRLPADAALATGAR

SEQ ID NO: 84457 - protein, 532 aa, Caulobacter sp.
  misc_feature (1)..(532): tr|A0A0Q8GDN1|A0A0Q8GDN1_9CAUL Tryptophan halogenase OS =Caulobacter sp. Root655 OX=1736578 GN=ASD79_02200 PE=4 SV=1
MDVTQPINDILIVGGGTAGWITAAYLARRLGSMRPDGVRITLIESSEIGIIGVGEGTFPTIQNTMRTIGVDEARFMREAGAAFKQGIRFVDWKTAPQDGVHSHYYHPFAQPRLLNGGLDLAPYWLMGEAGNIPFSDAVTLQDKVCDAMRGPKRVDDPQYGGPMAYAYHFDAGKLAGLLRDVGKATGVKHLLGNVLSVNKTDDGSIASVTTREHGDLTADLYVDCTGFAGALIGDAMGSGWIDKSDVLFVDRALALQVPYGRPDAPVATTTISTAHEAGWTWDIGLPERRGTGYVYSSRHTTDDRAEQILRGYVGKAGDGLTPRLLKLKVGHRDRHWVKNCVAVGLSGGFLEPLESTGIVLIEAAAYMLARNLPRRGGMEAAARQFNTAMTDRYLRAIDFIKLHYCLSQRTDNSFWTDNADPASIPETLRDHLAMWRHRPPNVFDFPNLHESFKYFNYQFILYGMGFATQVDPAAHLHGELARADFMRVQEAGVRAAASLPDHRALLTQIYAHGFSTKVPDAAMAEAAESLRR

SEQ ID NO: 84458 - protein, 521 aa, Caulobacter sp.
  misc_feature (1)..(521): tr|A0A4R3GXF4|A0A4R3GXF4_9CAUL Glycine/D-amino acid oxi dase-like deaminating enzyme OS=Caulobacter sp. BK020 O X=2512117 GN=EV278_1185 PE=4 SV=1
MTKHIVIVGGGTAGWMTACYLARMLAGPDAQAVKITLVESEDIGIIGVGEGTFPSIRKTLKRIGLDEAALVREANATFKQGIRFANWRHAPSVDPSDHYYHPFQIAEQHTDLDLLPYWLLGEAGEAPWARASTVQQAVIEARRAPKLIDHPDYAGPLSYAYHFDAVAFGQVLRRHAIGQGVVRIADTIGEVRLAQDGAIAALVGAASGELRADLYIDCTGFRAQLIGQALKSEFTSYRDQLFCDRALAVQLPYEQPDAPIASCTISTAQENGWTWDIGLQERRGVGYVYSSQHTDDERAAQVLSAYAGLAPDRLEPRLLKFEAGFRKTQWRKNCVAIGLSAGFIEPLEATGIGFSEIAALILANLFPWSGEYEQAARQFNAQMQRRYAHVIDFIKLHYCLSQREDTAFWRDNRAASSISETLKEKLQIWRHRPPSFLDVDLNHDIFVEQNWQYILYGMGFATDLTGRAPALRFSAAAREEFASIAEQARFALTVMPDHRALIDEVRRSGFQRPAPARRASR

SEQ ID NO: 84459 - protein, 510 aa, Caulobacter sp.
  misc_feature (1)..(510): tr|A0A4V2UFD4|A0A4V2UFD4_9CAUL Tryptophan halogenase OS =Caulobacter sp. BK020 OX=2512117 GN=EV278_11841 PE=4 S V=1
MPAPLRVVIVGGGTAGWMCAAALVGAVRPGVCEVRLVESDEIGIVGVGEATLPQIKEFNEYIGVIEADFMRKTNATFKLGIEFVDWGFKGSSYIHPFGVHGKPMGGVPFYQYWTKARQGGRTDDIEDFCLPIVASRLNRFDFPTTDEGGINSTFAYAYHFDANLYAGFLREFSEARGLRRTEGKVIDVTLRAQDGHIAAITLNSGEVIEGDLFIDCSGFRSLLMGKALEVGYEDWTPWLPCDRALAVPCERTGPLTPYTRSTAREAGWQWRIPLQHRTGNGYVYSSRFISDDEAAATLLANLDGAALDDPRPLRFQAGRREKSWHRNCVAVGLASGFLEPLESTSIYLIQVAITNLLKLMPARTIDPALVEEFNRLVDVEYERVRDFLILHYHANTRDDAPLWTYCREMDVPESLRRRMSLFQHRGHIHKYGQGLFAPPSWLSVFVGQGLRPAHYDPLVDNLPYERIVAEMDALRDSVALAARSMSDHAAFVDDYCASPAAVRLREGVAS

SEQ ID NO: 84460 - protein, 500 aa, Sphingomonas hengshuiensis
  misc_feature (1)..(500): tr|A0A2W5BD49|A0A2W5BD49_9SPHN Tryptophan halogenase OS =Sphingomonas hengshuiensis OX=1609977 GN=DI632_05450 P E=4 SV=1
MPHEPVRSIVIVGGGTAGWMAATYLARRLTHLDLSITVVDSAAIGTVGVGEATVPAIRDFLSAVELGEPDVLRDTGGTIKYGIRFDGWGGAGHRFFHPFGLYGVGAGGVAFHHYWLKLHAAGRAGPLSDYCLATQLARRGLFLPPADRPANDLGVFDFALHFDAAAFAAMLRRLALANRVTHVDGRIDHVATDPVRGHVTGVTLADGRGIAGDLWIDASGFRSLLLGGALDVPYVDWRHWLPCDRAVAIPCRAAPGDPVPYTVATARAAGWQWRIPLRRRIGNGSVYCSDFQSDGDAETALLASLEGAPLADPNRLRFTTGHRERFWSGNVVGLGLASGFLEPLESTSISLIQSGLERFVALFPDRDCDPRLAATYNRQSVLEFERLRDFLFLHYLANGRDEPFWRAIRAVEPPESLRIKLDAWRSGGEFVRNEWDTFHDPSWLSLYAGFGDLPARHSPLADAIADDALADSFARMRDAIAGTLALAEPHGAFLARVAGG

SEQ ID NO: 84461 - protein, 506 aa, Xanthomonas arboricola
  misc_feature (1)..(506): tr|A0A2S7AWK4|A0A2S7AWK4_9XANT Tryptophan halogenase OS =Xanthomonas arboricola pv. populi OX=487823 GN=XaplCFB P3123_20270 PE=4 SV=1
MIPAPLRNIVIVGGGTAGWMAAAAFARVLGPGFKVQLIESEQLGTVGVGEATVPHIKAFNNLLGIDEAEFVRQTQGSFKLGIEFVDWQRPGTAYIHGFGTQIGHPLGLLPFHQYWIKQHLRGKAQPLGAYTLNTVAAVRGKFMTSAGDVPANSPLANIAYAYHFDATRYARFLRGYAQQRGVTRIEGLVEQVQLHADTGHVQSLQLASGQVVSGDLFIDCSGFRGLLIEQALHTGYHDFTHWLPCDRALAVPSEKVGPPTPYTRSTARAAGWQWRIPLQHRTGNGYVYSSAHISDDEAAATLLANLDGEALADPRPLRFTTGRRKQFWNRNVVALGLASGFLEPLESTSIHLIQAGISRLLELFPREGISPVLVQRYNDRLAFEFDRIRDFLLLHYHATERDDSAFWRHCRTMPITPELQTTLDLFRDSGRFYRNAEEMFAEISWVQVMVGQGILPQGYHPLVDQVPDHDAERFLASVAQTIGHCVDAMPTHQQFIDRYCKATAPR

SEQ ID NO: 84462 - protein, 505 aa, Pseudoxanthomonas sp.
  misc_feature (1)..(505): tr|A0A4V2HFB9|A0A4V2HFB9_9GAMM Tryptophan 7-halogenase OS=Pseudoxanthomonas sp. NML130969 OX=2480811 GN=EA655_ 17170 PE=4 SV=1
MGDNRIGSVVVVGGGSAGWMAAAALATYLGRQARVRLVESEQIGIVGVGEASVPHMRTFNAQVLGLDEREFAQRTQATAKLGIAFEDWGRIGERYVHGFGTIGQSRGPLPFHQFWLKQFLAGRAEPIGAYSLQTVMAPLERFVPGVANAPAGSPLADIAYAYHFDAGLYAQYLRQVSEARGVERIEGRIVQVHQHPETGHVTSLTLDGGQQVEGELFVDCSGFVGLLIEQTLQAGYIDWSQWLRCDRALAVPCARSGPIAPYTRATARGAGWQWRIPLQHRTGNGYVYSSAYVDDDQAAATLLGHLDGAPQGQPRQLRFTTGMRRRFWQGNVVALGLAAGFLEPLESTSLYLAQSGISRLLALFPTRDFDPLLAQRYNRESAFEYERVRDFLILHYHATTREDTPFWRDCRTMQVPESLREAMELFAADGRYFRNGEDFFALPSWVQVMLGQGIVPRGYHPIVDDMPQEALARYVEGTRERLAEAVAAMPTHQQFLDRYWKAEAP

SEQ ID NO: 84463 - protein, 500 aa, Pseudoalteromonas luteoviolacea
  misc_feature (1)..(500): tr|A0A541BG33|A0A541BG33_9GAMM Tryptophan 7-halogenase OS=Pseudoalteromonas luteoviolacea OX=43657 GN=FLM44_09 385 PE=4 SV=1
MNSRKIVILGGGTAGWMAANLIAKSWGDKNIQISVVESPDIGIIGVGEGSTPQFKAFMDFIEVPESEWMPKCNATYKNGIRFVNWSTRPSFEQYFHPFPAQPDDYSAPAFFHNSFVRRKGIDLEGHPDPFFLATYLAEHAKAPIAAESFPFEINYGYHFDSGKLGMLLAEKAREFGVEHIQACVQDVRKNTDGTIAALICDKSREVCGDIFIDCSGFSSLLMQQHLQVGFESFENNLFNDSAVVLPTEQGESIASETVSVARKYGWSWHIPLINRIGNGYVYSSKYCNKDQAETELRAALGLLDSEVEARHLSMKVGQVKEHWHKNCVAIGLSQGFIEPLEATALHIVQETVQSFIECYQEGEFTCQKQGKHNQMMSQRYQAIRDYIVAHYRVNSRTDTNYWRDNANNNSISRSLFNVLNVWVQGKNLSDELDRQDIDKYYPSVSWHCLLAGYGIYPEQHQLVAGNESANVHDINKIREYIRRCGLNFPDHSVQLAHSSA

SEQ ID NO: 84464 - protein, 509 aa, Novosphingobium malaysiense
  misc_feature (1)..(509): tr|A0A0B1ZUQ7|A0A0B1ZUQ7_9SPHN Tryptophan halogenase OS =Novosphingobium malaysiense OX=1348853 GN=LK12_00410 P E=4 SV=1
MTGPIERVVIAGGGSAGWMSAAALAHTLRGTNIAIDLVESDKIGTVGVGEATIPPIRIFNQMLGIDETEFVRATQGTFKLGIEFVGWGNREGRYFHPFGRHGDDFGPVPFHQQWLAARAAGEDSPLAAYSLATVAARQGRFAPPLMHAGRATVWSTFSHAYHFDASLYASFLRQRAEAQGVRRHEGQIADVRRDSQSGHVREIVLRDGRRLKGDLFLDCTGFRALLIGKVLQTPFEDWSHWLPCDRALAVPTNSTSPPVPYTRSTARRAGWQWRIPLQHRVGNGLVWCSAFLDEDAAREELSANLDAPMLAEPRLLRFTTGRRTDAWASNVVAIGLASGFLEPLESTSLHLVQTAITRLLSWFPGKDFNPLVRAEYNRLTAREWEAVRDLLIFHYTAARRTDTPFWQHCRTISLPDALANRIDLYRSSGRIMDRDGDVFGRDSWLAVMAGQGIDPLDRDRLADAVPAAERLKVLAAMREVIHTTAASMPSHAETLRGAFRSNGAAEPSS

SEQ ID NO: 84465 - protein, 522 aa, Microbulbifer sp.
  misc_feature (1)..(522): tr|A0A0X3U656|A0A0X3U656_9GAMM Tryptophan halogenase OS =Microbulbifer sp. ZGT114 OX=1685377 GN=AVO43_05295 PE= 4 SV=1
MASAATSGHIQHVLVVGGGTAGWLTASHLAKKLRARSPDGVRVTLLESDNIPTIGVGEGTVPAIRQTLQYLGISETEFIRECDASFKQSIKFVDWVHNPVAGRSDYYHHVFDYPDTRRGDLTPYWLKQAGTGRSFVDAVSVQGLVCDRGLGPKNMTLPEYQGLTSYAYHLDAAKFARLLTRHAVEELGVRHLLGTVEQVRRSDDGDIAAVVTDRHGALEADLFVDCTGFASLLLGQSLDVPFIDRTDVLFADHALAAQVPYGQMDAPIPSYTISTAQESGWIWDIGLPERRGTGYVYSSAHTDHERAETVFRNYLGAAGENAEVRRIPMKIGYRDRFWERNCVAIGLSQGFVEPLEATGILVYDATAKMLADTFPANREVMSTVAAQFNRHVRYAWERVIEFIKLHYCISQRTDSDFWLDNRAAESIPEALREKLALWRCQPPSDYDFPSKMEIFNLPNYLYVLYGMDFVTSAAHISNRFADDDNALARFVEIEAGARQLCEQLPAHRELIRKIKQFGLQKI

SEQ ID NO: 84466 - protein, 503 aa, Caulobacter sp.
  misc_feature (1)..(503): tr|A0A4R3H592|A0A4R3H592_9CAUL Tryptophan halogenase OS =Caulobacter sp. BK020 OX=2512117 GN=EV278_10961 PE=4 S V=1
MTGQSPFKFVIVGGGTAGWMAAAALAHAVKGKVAEIELVESEEIGTVGVGEATIPPIQFLNSMLGIDEIDFVKKTQATFKLGIEFRDWKKLDHSYLHPFGPIGTPIDGVGFHHYWHRLREHGDATDLYDYSMSAVAARKGKFVIAPRELPPGVPPLAYAYHFDAGLYARFLREYAEARGVKRTEGKIVEVKQRAADGFIEAVELEGGRRVEGDFFVDCSGFRGLLIEQTLKTGYEDWTHWLPCDRALAVPCDSVTPLTPYTRSTARAAGWQWRIPLQHRTGNGYVYSSPFISDDEAAATLMANLDGAPRAEPRLLRFTTGRRKQAWNKNVVALGLASGFMEPLESTSIHLIQTGVMRLLSLLPTRTYDAAAVAEYNRLSKVEYEQIRDFIILHYCATERDDSELWRYCANMALPEALTHKIELFRERGKVARYDDQLFAEPSWIAVFLGQGIEPRDHDRLADVPPIADVERTLFNIRDKMVHIADRLITHDEFIARHCKADPI

SEQ ID NO: 84467 - protein, 478 aa, Microbulbifer sp.
  misc_feature (1)..(478): tr|A0A0X3UBA0|A0A0X3UBA0_9GAMM Tryptophan halogenase OS =Microbulbifer sp. ZGT114 OX=1685377 GN=AVO43_07125 PE= 4 SV=1
MTASLMVKVLGKSLNITLVESDKIGTVGVGEATIPPIINFNQALGINERDFLKATRGTIKLGIQFENWLRQGDSYMHAFGSIGKNFPFCDFHHFWRRSRASGDESSLWDYSLNYQAAIHNKFAHLAQIKGTNLPGISYAYHFDAGLYAQYLRNYSESKGVGRIEGTVKSVQVRPQDGFVESLLLEDGQSVSGDLFVDCTGLAALLIEKTLGVGFEGWSQWLPCDRAMAVPSAGSKPIVPYTRSIAHAAGWQWRIPLQHRTGNGIVYSSRHWSDDEAREVLMKNLDGEALAEPRVIPFRTGRREKQWDRNVVSIGLSSGFLEPLESTSIHLIQSAATRLIKSFPHQGIKPEEVSEFNRQSQVEIERIRDFIILHYKLNERRDSEFWRECESMSIPQTLEHKIELFRRTGKVFRDYDDLFTEVAWQQVMIGQGIFPQDHHTIADNLSEEQLRDLMGSLRTLIDGTVKSLPDHEKFLASLN

SEQ ID NO: 84468 - protein, 503 aa, Massilia sp.
  misc_feature (1)..(503): tr|A0A5C7FQY0|A0A5C7FQY0_9BURK Tryptophan 7-halogenase OS=Massilia sp. GEM5 OX=2603288 GN=FVD38_17540 PE=4 SV= 1
MEHQAIKDIVIVGGGTAGWMTAAALSSMLNGRYNIRLVESDEIGIVGVGEATIPMIQRFNRVVGIDEAEFMRETMGTFKLGVEFVNWGKLGERYMHGFGRMGQDLATVPFEQYWHKMRALGKAAPLEEYSITRMAAKAGKFMPARTDVPNSPLGDIAYAYHFDASLYAKYLRKLCQARGVTRIEGKIARAIQREPDGFIEAVELEGGQRIEGELFVDCSGFRGLLIEQTLETGYEDWNHWLPADRALAVPCESVPTMTPFTRATAHKSGWQWRIPLQHRTGNGHVYCSRFISDDEATATLLSNLDGRALAEPRMIKFRTGMRKQAWNRNVVAIGLAGGFLEPIESTSIHLIQSAIARLVEFFPDRRFSETDRIEFNRQSRFEYERVRDFIILHYHLNQRTDSAYWTECAHMAIPETLRQKMDLYRSRGKIVRVDNELFSEVGWLQVFEGQNMPIDGYHPLADTQSEADIADYMGSVRDVIRKCVDVMPSHEEYIAKHCAAKKS

SEQ ID NO: 84469 - protein, 506 aa, Pseudoalteromonas luteoviolacea
  misc_feature (1)..(506): tr|A0A0C1Q9I1|A0A0C1Q9I1_9GAMM Uncharacterized protein OS=Pseudoalteromonas luteoviolacea OX=43657 GN=JF50_088 95 PE=4 SV=1
MIKKIVIVGGGTAGWLAANHLGKRFFGSGTEVKLIESANIPTIGVGEGTVPMMRQTLEYFGIDEGEFIKECNVAFKQGISFENWMAPNNGNMHQYYHPFDFFSSELGLVTSWLNEHSDTSFADFVGFQSTLCNHNLSPKLITQPQYDGAASYAYHLDAGAFSELLKRHAVSQLGVIHQYSDLEEVVIRDDGEIGHLVTDTGIEEADLYIDCTGFKSLLLGEALQVPFIPKGDVLFADKALAVQVPYSENEHIPSYTRSTAQSAGWIWDIGLYTRKGIGHVYSSHHTTQEQAYVELENYIGTDLDKLNVRSIDMNVGYRSKAWSKNCVALGLSQGFVEPLEATGLLVFDVTAKMLADTLPTNKIAFNTVSTHFNETVTNMWNKVIDFIKLHYCISDREDSAFWLDNRSLDSIPDSLKDKLQLWLHKVPTHYDFGGKFDVFDIDNYLYVLYGMSYPTNIESNLITSYEAKRVSDIVKTIQYQQKQARELALNNKALLDKIHQFGLAKQ

SEQ ID NO: 84470 - protein, 518 aa, Microbulbifer sp.
  misc_feature (1)..(518): tr|A0A0X3UA64|A0A0X3UA64_9GAMM Uncharacterized protein OS=Microbulbifer sp. ZGT114 OX=1685377 GN=AVO43_11765 P E=4 SV=1
MDTIRNIVIVGGGTAGWLVAASLAKQLNILADPETTITLVESPDTPTIGVGEGTWPTMRNTLKRIGIDETDFIRECDVSFKQGTQFVNWHKLNRDGSDAAYYHSFELPHTQWRTAPGPYWHYLQSEIGLPYADAISVQPEACRGNFAPKTMATPTYEGLLNYAYHLDAGKFARMLQRVATSDLGVQHVSAHIERANLSKDGYIASLSTREAGDIDGDFFVDCSGFTALLIDGTYDIPFRSVSDKLFVNSAIAIQMPYQSAAEPIASPTISTAQQAGWIWDIGLHSRRGTGHVYSDDFISDDEAEDQLRRYLGPGSEQLDAKRIKMRLGYREKVFHKNCVAVGLSAAFLEPLEASAIFLIEASCNMLGELFPRNRAMLELLEKRYNASFISRWNSVVDFIKLHYFLSGRTDSEFWIENTRPETAPDSLKEYLEFWRYYPPSRFDLSSSLEPFVRESYEFILFGMGYGHYQQSNPARLPHLEYARENFARIAQMRSEVPSQLVTNRRLLDQLKDFRFQSI

SEQ ID NO: 84471 - protein, 502 aa, Caulobacter sp.
  misc_feature (1)..(502): tr|A0A0Q8FN09|A0A0Q8FN09_9CAUL Tryptophan halogenase OS =Caulobacter sp. Root655 OX=1736578 GN=ASD79_06190 PE=4 SV=1
MNSGPQQDIVILGGGAAGWIAAALLAKKTDRHRTRITLVESEEIGIIGVGEATVPVLAQCNALLGIDEFDFIRRTQGTFKLGIEFCDWGVAGNRHFHAFSDYGHQVEGVATHHYWLRLRQSGDDHPIDDYSFAYAVAKNNKFDLSDPQNSRYHHAYHFDAALYARYLRDVATELGVQRIEGKMTHVDLDGETGNIAAIHLANGVTVPGDLFLDCTGFASALLGKALETPFVDWSRWLLCDRAMAAPSKRPDAPTPFTRSTAHAGGWRWTIPLQHRSGNGMVYSSDFWSDDEAREALLGNIDGEPLAEPRLFRFTSGHRKQFWNRNCVGIGFASSFLEPLESTGLQLIVMGVLKLLRYFPERTIDPVLRDEYNQLSTREIERIRDFIIAHYYLSRRPEPLWAACRDIEIPDSLRHKLDVWNASGQIALGDSESYMEPSWLAILLGNGAVPARHNVSADLYPLEQIRKGMELRRQEIMRSAQAVTSHQDFIDRYCKAPQAAPAD

SEQ ID NO: 84472 - protein, 503 aa, Caulobacter sp.
  misc_feature (1)..(503): tr|A0A0Q8G7K2|A0A0Q8G7K2_9CAUL Tryptophan halogenase OS =Caulobacter sp. Root655 OX=1736578 GN=ASD79_21040 PE=4 SV=1
MDRVRRLVILGGGTAGWMAATALAKTFGPQLKIELLESEAIGTVGVGEATIPTIQWFNDLIGLDEAEFVRATKATYKLGIEFVDWARPGSRYFHPFGRYGVDLGPVPFHQRWLKARADGLESPLSAFSLTTQLAAANRFAKPVSEARSILSTLGYAYQFDATLYAKYLRGLSEAEGVTRHEGKLEAVERAPDTGFVTALTTDRGERIEGELFLDCSGFRALLIDGVMGAKFEDWSHWLPCDRAVAVPCARVAETTPYTRATLRTAGWQWRIPLQHRTGNGYVYASAFISDDEAAATLLGGLDGAALDEPRFLRFKAGFRRETWQKNVVAIGLSAGFLEPLESTSIHLIQSGIAKLITLFPDRDCDPGLARRFNTLFGRDMDGIKDFLILHYHATEGHEAPLWRHTRHMPLPDSLADKEEQYRRAGRLMLTSDELFREASWLAVLEGQGVRAEGYSPLADTLDQALNLQQLEQIEAVIARATPTLPRHDDAISALIGEPASVLA

SEQ ID NO: 84473 - protein, 509 aa, Microbulbifer sp.
  misc_feature (1)..(509): tr|A0A0X3U5P9|A0A0X3U5P9_9GAMM Tryptophan halogenase OS =Microbulbifer sp. ZGT114 OX=1685377 GN=AVO43_11770 PE= 4 SV=1
MKKPFSILIVGGGTAGWMAANLMAHKWGDRKVSITLLESDAIGTIGVGEGSTPYLKGFFKTLGIAESEWMPACNATYKCGIRFPHWSTVPGYESYYHPFFSPLDREIGQVFFNNASLRRSGLDAPANPTDFFHAPFLSSNAYAPLPEQPLPFELDYGYHFDAGLLGRFLRDRAKSAGVRHIVDTISSVERKGETIEAVTAEDTGRHPADFFVDCSGFRALLLGSAPGYQFRPFHETLFNNAAVTVQIPRDDHAPLLSETISEGLSSGWMWRIPLQNRTGCGYVYSDRFLSADGAESELRKTLALPDSAQVNHLRMKVGRVEEHWQGNCLGVGLSQGFIEPLEATALMLVQFTIEHFLEAFSPGRPEVDHASREKVFNQRINRLFDGVLDYVAGHYKLNSRDDTPYWRAAREEIVISDRLRALIDCWDKNSDVDHMLDQAGEELVYSRASWYSLLAGMGRFPKNLRRADTGLQQESEEVRRFCTGNLNRFRSHQAQLDQLSLARQEAEPA

SEQ ID NO: 84474 - protein, 499 aa, Novosphingobium ginsenosidimutans
  misc_feature (1)..(499): tr|A0A5B8S1T7|A0A5B8S1T7_9SPHN Tryptophan 7-halogenase OS=Novosphingobium ginsenosidimutans OX=1176536 GN=FRF7 1_02040 PE=4 SV=1
MNPTKKLRVVVAGGGTAGWMTAAALAGTLGDCIELTLVESDAIGTIGVGESTIPPIVLFNRLLGIGEAEFMAATQATFKLGIKFENWKDVGETYFHSFGTTGKDHWSAGFQHFWLHGLSQGIEHSYDDYCLELKAALEGKFAHLPDDKMNYAYQLDSGLYAAFLRKRAEGDGAVRIEGKIAEVELDGESGNIAALRLDCDRRIAGDLFIDCTGFRALLIEGALHAGFDDWTHYLPCDSAIAVQTASVRPPVPYTRAIAHDAGWQWRIPLQHRQGNGIVYCSRYLDKDAALERLLGTVEGQVLTQPNFIRYTTGARRKQWHRNCVAIGLSGGFMEPLESTSIHLIQRAVLRLIRMLPGGPVSERDIAEFNDQQLTDMDQIRDFLILHYKVTERRDSPFWRHCAALPMPDSLAQKIELFRETGRVFRKNEELFVENSWVQVMMGQGIMPESYHPIATKLRADELDKFLAMLRDSVAKTVAGLPDHQTYIARYCAAQDARAA

SEQ ID NO: 84475 - protein, 521 aa, Xanthomonas codiaei
  misc_feature (1)..(521): tr|A0A2S7CS34|A0A2S7CS34_9XANT Tryptophan halogenase OS =Xanthomonas codiaei OX=56463 GN=XcodCFBP4690_09615 PE= 4 SV=1
MDPSPASDPRQRPVRRVVIAGGGTAGWMAAAALSKLLGRHLQITLVESDEIGTVGVGEATIPSLVTFHRLLEIDEAAFMAATQATFKLGIAFEHWRDVDRHYIHSFGHTGTDHWSAGFHHFWLKGQQRGVARDFGDYCLELRAAQQGRFAHLPSGGMNYAYHLDAGLYARFLRRFSEGFGVRRIEGRIGQVETDPESGFLTALTLQDGTRVDGDLFVDCTGFAGLLIGKTLGVGSEDWSQWLFADSALAVQTESVGPPVTYTRARADQAGWMWRIPLQHRVGNGIVYSSRYTDQDSARAVLERNLQGHALTEPRALRFTPNQRHRVWEKNCVALGLASGFLEPIESTNIHLIQRGIVRLLQTFPQVIHPVDIAEYNRQAADEIAHIRDFVILHYHATDRRDTPFWRDCAAMDIPDSLRHRIALFRESGRVFHRANELFAENSWVQVMLGQGITPRQHHPVADLMGDAELSHFLEGIRQRVDATVARLPPHADFLCHHCPAAPLPAPPARVPADAALASPAR

SEQ ID NO: 84476 - protein, 390 aa, Myxococcus macrosporus
  misc_feature (1)..(390): tr|A0A250JP86|A0A250JP86_9DELT Tryptophan halogenase OS =Myxococcus macrosporus DSM 14697 OX=1189310 GN=MYMAC_0 01015 PE=4 SV=1
MSESSCDVAIIGGGPAGAAMAVALRDKAPFLSVTVVERTAYDAPRLGETLPPDVRLPLSRLGVWGSFLRDGHLASRGTSACWGQAEPGFHDTLMSPWGSAWHLDRARFDERLSLEAVRQGARVLRTTTLLSAEALGRDGYLLHLARAKSGPSTLRARFVVDASGWKAPFASARGARRLVSDRCFAVYGAFTLPDDATFPTYALVEACPEGWWYSALLPNRRVVVALIGDGDSLRGLRWATPEPWLALLKQAPVTHARLDVCDFTSEPLVAVPVLVGQLDRMQGEQWLAVGDAACTYDPLSSQGITKALDSALLAADALERYLRGDLEALQTYEATLNERFQEHQRTRGAYYRQEQRWPQAPFWRNRWESLPGPPALPAPPRRPQPLEVTS

SEQ ID NO: 84477 - protein, 535 aa, Verrucosispora sediminis
  misc_feature (1)..(535): tr|A0A1I1Q3H6|A0A1I1Q3H6_9ACTN Tryptophan halogenase OS =Verrucosispora sediminis OX=547162 GN=SAMN05216284_112 44 PE=4 SV=1
MTVSGAAAKSTRDPGRTQRVVIVGGGTAGWMTASYLAAAFGDRIDVTVVESATVGTIGVGEATFSDIRHFFEFLRLEESEWMPACNATYKLAVRFENWREPGHHFYHPFEQMASVDGFPLSDWWLRYPTTSRFDKDCFVMASLCDAERSPRYLDGSLVDQGFVEQTRDETSARSTIAEYQGAQIPYAYHFEAHLLAKFLTGYSTQRGVKHVVDNVVDVALDDQGFISHVRTAEHGEIAGDLFVDCTGFRALLLNKALGEPFVSYQDTLPNDSAVALQVPLDMESKPLRPCTTATAQDAGWIWTIPLISRIGTGYVYASDYATPEEAERVLREFVGPETADVPANHIRMRIGRSQRSWVKNCVAVGLSSGFVEPLESTGIFFIHHAIEQMVKYFPSGLGDDLLREQYNRSITHVMDGVREFLCLHYRGAKRVDNQYWKDTKTRVIPDALAERIEIWQHKVPDSESIYPYYHGLPPYSYNCILLGTGGIDVRHSPAVELADERAALAEFERIRVKAEKLVQELPTQNEYFAAMRANQ

SEQ ID NO: 84478 - protein, 372 aa, Caballeronia calidae
  misc_feature (1)..(372): tr|A0A158EFY9|A0A158EFY9_9BURK Tryptophan halogenase OS =Caballeronia calidae OX=1777139 GN=AWB78_07697 PE=4 SV =1
MNETGATQLKFTSRDRMDVVVIGGGPAGCATAIALARRGLRVAMFEQSSYDRVRVGETLPPESRVHLAALDALRDVENDAHLPSSGIASVWGNEGLHQNDFIFNPYGHGWHLDRCRFDAMLARRAADVGVQVFLASTARWCEADSNGFEVEAKRTRAMSMRLRSRFVVDATGRGASPLPGQQRRIVYDKLVGLVGFVAQTYEEGDSRTLLEAVRDGWWYTAPLPAKRRVVVYMTDGDQLKHSRRDLDRFFLARLSEAPHTGKRVGMPSDVQSLHVLPASTYRHVSIHGERWVKVGDSACSYDPLSSSGVSKGLQSGLDAAAAVEASLDGDPFALANYTARVEQRFAQYLGSRALYYGREMRWPESAFWQRRH

SEQ ID NO: 84479 - protein, 502 aa, Erythrobacter aquimixticola
  misc_feature (1)..(502): tr|A0A419RX56|A0A419RX56_9SPHN Tryptophan 7-halogenase OS=Erythrobacter aquimixticola OX=1958945 GN=D6201_1133 0 PE=4 SV=1
MAIEKIVIVGGGTAGWMAAAALSGLSKARHVAITLVESEAIGTVGVGEATIPPFVDFQRLLEIDEAEMLSAVQGSFKLGIQFENWGKLGDSYIHPFGNYGYEIGGLTFHHIWHHQKSQGDNRPIQVFNPETMAAYFGKFAKTDDMRRDDLPPINYAYHINATAYAGFLRRYAEKRGVVRQEGRVDDVRLDGESGHVASITLESGQEIAGDLFVDCSGFRGLLIEQALETGYEEWTHWLPCNRAVAMPCNRDDGSPPPPFTRATAHSAGWQWQVPLQHRNGNGHVYCDSFMDADEATDILIRHMAGKPTADPNHLRFVTGRRKKFWNKNVVSLGLAAGFMEPLESTSIHLINTGINKLIALLSLDGVTEAQAASFNRLTAKEYERIRDFLILHYSATTRDDSEFWNYCRTMSVPDSLTEKIELFKANGQIFREDDELFTETSWAAVMMGQGIAMNGHNAMAATLDQAETRKEFDEIEKSIRFMVQHMPGHGEYLARYCPMQPA

SEQ ID NO: 84480 - protein, 538 aa, Burkholderia sp.
  misc_feature (1)..(538): tr|A0A2U9T6S1|A0A2U9T6S1_9BURK Tryptophan 7-halogenase OS=Burkholderia sp. JP2-270 OX=2217913 GN=DM992_38835 P E=4 SV=1
MSNPIKNIVIVGGGTAGWMAASYLVRALQQHTNITLIESAAIPRIGVGEATIPSLQKVFFDFLGIPEREWMPQVNGAFKAAIKFVNWRKSPERSRDDHFYHLFGNVPNCDGVPLTHYWLRKREQGFQQPMEYACYPQPGALDGKLAPCLSDGTRQMSHAWHFDAHLVADFLKRWAVERGVKRVVDEVVEVRLNDRGYISSLSTKEGRTLEADLFIDCSGMRGLLINQALKEPFIDMSDYLLCDSAVASAVPNADARVGVEPYTSAIAMNSGWTWKIPMLGRFGSGYVFSSKFTSRDQATADFLNLWGLSDKQPLNQIKFRVGRNGRAWVNNCVAIGLSSCFLEPLESTGIYFIYAALYQLVKHFPDTSFDPRLTDAFNAEIVYMFDDCRDFVQAHYFTTSRDDTPFWLANRHDLRLSDAIKEKVQRYKAGLPLTTTSFDDSTYYETFDYEFRNFWLNGNYYCIFAGLGMLPDRSLPLLRHRPESIDKAEAMFASIRREAERLRTSLPTNYDYLRSLRDGDTGLSRSQPGSTLAAPEIL

SEQ ID NO: 84481 - protein, 509 aa, Sphingomonas ginsenosidivorax
  misc_feature (1)..(509): tr|A0A5C6UDP0|A0A5C6UDP0_9SPHN Tryptophan 7-halogenase OS=Sphingomonas ginsenosidivorax OX=862135 GN=FSB78_048 35 PE=4 SV=1
MDRTETAIRSVAIIGGGTAGWMTAAALAHALGTRCPITLVESDDIGTVGVGEATIPPIKLFNDTLGIAEADFLRETRGTFKLGIEFVDWAKIGHRYFHPFGTFGKPFDLVAVHQHWLAARDAGSSIPLDDLSMAWGAASRGRFAAPMADQRSVASTFDYAYHFDAGLYARFLRNYAEARGVVRIEGKVGDVALHGDTGHVAGVTLQDGRRIEADLFVDCSGFRGLLIEGALATGYEDWTHWLPCDRAVAVPCVTGGDGLTPYTRSTARAAGWQWRIPLQHRTGNGYVYCSRHISDDEATATVLANLDGEALAEPRLLRFTTGRRRLFWNRNVVAIGLSSGFMEPLESTSIHLIQTGIAKLLAYFPTRDFDPLIIDEYNRVAITEYERIRDFLILHYKLTRRDDAPLWRECAAMPIPETLALKIAHFQRGGRLIARDMDLFGPASWLAVHIGQLNDPGFGDPLLDTATGGRTSTVFVDRLADAIAKMAESMPSHSDYLTRIGASAIPRQK

SEQ ID NO: 84482 - protein, 503 aa, Caulobacter vibrioides; identical to SEQ ID NO: 83068
  misc_feature (1)..(503): tr|A0A0H3C8H6|A0A0H3C8H6_CAUVN Pyridine nucleotide-disu lfide oxidoreductase OS=Caulobacter vibrioides (strain NA1000 / CB15N) OX=565050 GN=CCNA_01598 PE=4 SV=1

SEQ ID NO: 84483 - protein, 504 aa, Caulobacter vibrioides
  misc_feature (1)..(504): tr|A0A0H3C4P5|A0A0H3C4P5_CAUVN Tryptophan halogenase OS =Caulobacter vibrioides (strain NA1000 / CB15N) OX=5650 50 GN=CCNA_00828 PE=4 SV=1
MDGKPYRKFVVVGGGTSGWIAAATLIHALKGKLAQVELVESDEIGTVGVGEATIPPIQFLNSILGIDEFNFIRKTQATFKLGIQFRNWGRQGHEYFHPFGPYGQSIEGVSFHNYWMRLRANGEGGELDAYALATVAAKAGKFAVPPKDLPPGVPGLGYAYHFDAGLYARYLRAYAEARGVQRTEGKIAKVELRPEDGFVSGLTLSDGRRIEGDFFIDCSGFRGLLIEEALQAGFEDWSHWLPCDRALAVPCENAEPLTPYTRSTAHAAGWQWRIPLQHRTGNGYVYCSAHISDDEAAATLLANLDGKPLADPRPLRFTAGRRKKSWSKNVVALGLAGGFMEPLESTSIHLVQSGAMRLLSLLPLGGYDPAAEAEYNRLTQIEYEQIRDFIILHYCATERDDAPLWNHCRTMAIPDSLTHKIELFRNRAKIARFDEQLFAEPSWLAVFLGQGIEPKDYDRLADAPAYDEVVAAVRRIGQTNANLVARLPTHEAFIAATCKAEALG

SEQ ID NO: 84484 - protein, 499 aa, Pseudoalteromonas piratica
  misc_feature (1)..(499): tr|A0A0A7EFM4|A0A0A7EFM4_9GAMM Tryptophan halogenase OS =Pseudoalteromonas piratica OX=1348114 GN=OM33_09825 PE =4 SV=1
MMTNKINNVVIVGGGTAGWLSASLLAKVLGKHLSITLVESEQIGTVGVGEATIPPIIPFNAAIGVDEKAFIKATNATIKLGIQFENWGQQGEQYMHAFGGFGKDFPFCNFLNYWLRAKELGDTSSFWDYSINYQAAKRNRFNKLNTIPNTQLPGITYAYHFDATLYAQFLRSHAEKLGVKRVEGTVETVNTDEETGFVNEIVLDNKEQISGDLFIDCSGLHGLLLDKTLNVGFEDWSHWLPCDSALAVPCEHGEQAIKPYTRSIAHNSGWQWQIPLTNRIGNGLVYASKHLSDEDAKQLLLDNLPGKALAEPRLIRFRTGRRLKQWHKNVVAIGLSSGFLEPLESTSIHLIQTAATRLVKHFPLHGISDSLVAEYNRQSQIEFERIRDFIILHYKQTARDDSPFWRQCQQMEIPESLAHKMKLFEQQGLFCRQDDELFSEIAWQQVMLGQGALPQQYHPLAHNLTDEQLTEMLQNLKVLITHTSEQLPTHNEFLQRFGN

SEQ ID NO: 84485 - protein, 512 aa, Pelomonas sp.
  misc_feature (1)..(512): tr|A0A0Q7B758|A0A0Q7B758_9BURK Tryptophan halogenase OS =Pelomonas sp. Root405 OX=1736529 GN=ASC81_20080 PE=4 S V=1
MNTSTKPPRRVVIAGGGTAGWMMATLMGKLLGKQLDIKLIESEEIGTVGVGEATIPALLTYHNLLGITEAEFMAATNATFKLGIKFEGWKDISQDYFHSFGSTGNDHWSAGFQHFWLKGRAAGIARDYTDYNPETLAAYADRFGHVPRNGLNYAYHLDAGRYAKYLRAMSEGYGVQRIEGKIAAVLMDGPEGRDGDITALQMQDGSRIDGDLFIDCTGFRAMLIGEALGVGYEDWSHWLPCDRAVAVQTASVREAWPYTRSIAHPFGWQWRIPLQHRVGNGLVYSSKELSDADAPEMLKKNVEGEVLIQPRVIKFLPGQRHKVWHRNCIAVGLASGFIEPLESTSIHLIQRSAIRLMQLFPTQGINPADVNEFNLQCERELTHIRDFIILHYHVTHRSDSALWNHVRTMEVPATLRHRIDLFTESARVFRPSDELFAENSWIQVMMGQGITPHSYHPVADLMGPSELNQFLGDIHTKAARIAGGLHGHQAYVEQLCAPYRNATTAQLVPKQA

SEQ ID NO: 84486 - protein, 522 aa, Pelomonas sp.
  misc_feature (1)..(522): tr|A0A0Q7BB47|A0A0Q7BB47_9BURK Tryptophan halogenase OS =Pelomonas sp. Root405 OX=1736529 GN=ASC81_25130 PE=4 S V=1
MNSELTTAVRRIVVLGGGSAGWLTAATLAAELGGTAPDALEITLIESPDVPSIGVGEGTWPTMRATLHRIGLREVDLIRECDAAFKQGSCFDGWLHGGEGDRYYHPFTLPHGHGHGQVDLAGAWLQAGSEQAFAESVGAQPHVCDARLAPKQTTTPDFGGVMNYGYHFDAVKLGHLLRRHATTVLGVRHVVDHFTAVRSQENGDIAALATREHGDIEGDLFVDCSGLASLLLGQHYGVAFRSEEGVLFNDSALAVQVPHADAQAPLASATISTAHAEGWTWDIGLPTRRGIGLVYSSGHTDDAAAERALLAYLQRSGLAHADVSPRRLRFSPGYREHFWHRNCVAVGLSAGFIEPLEASALALVELSAAMIRDEMPANRADMDLVAKRFNEAFAYRWSRIIEFLKLHYALSRRDDADYWREHRNAATQPESLRELLQLWAHRAPSRNDFYRNEEVFPAASYQYVLYGMRFKPVLRALRADQRAAADAGLKDVATITRRLLSALPRHRNLIQHIREHGMPPAA

SEQ ID NO: 84487 - protein, 513 aa, Rubellimicrobium sp.
  misc_feature (1)..(513): tr|A0A5C4N0E3|A0A5C4N0E3_9RHOB Tryptophan 7-halogenase OS=Rubellimicrobium sp. YIM 131921 OX=2585369 GN=FHG66_ 10180 PE=4 SV=1
MGSSRAAPEGLVMTAAGWPRRIVVVGGGTAGWLAAMMLSDVAAKTSPGTSVTVIESSRIGVIGVGEGSTAVFRQMLRRFGLDEEEFLRETGATIKFGIRHRDWRRLGHHYDGPIDDPHLVAPGVPLDAYAVAAGKPVQEAHLFQHLIWKKRGPFAEVNGKRVPAGPFHYAFHFDQALVGAWLRKKAKGIRHVNDQVTGVETGGEGVVAVHLEGGERVEGDLFIDASGFRRRLVSELPFEWVSFADMLPNNRALPFWLDLKDGEEIDPVTGAWAQGHGWMWNIPTQGRYGCGYVYCDQYITPEEAQAEIERALGHPIEPRSDIRINPGRQRDVWVGNVVALGLASSFLEPLEATSIHGTIGQLICLTEWIGTPSGKERYNATAARQVDDFRDFVRLHYVSERRDTAYWRDVTASHPPVVTERLEKWSRKFPSREDFEPFPLGLAHVQEQLYVPVLNGLGLLSQDLARAEMARDPKLRQRARETHASLVAEYSRAAEKCLPHRAWLESLHKEMAA

SEQ ID NO: 84488 - protein, 509 aa, Aliikangiella sp.
  misc_feature (1)..(509): tr|A0A545UIC8|A0A545UIC8_9GAMM Tryptophan 7-halogenase OS=Aliikangiella sp. M105 OX=2592383 GN=FLL46_03560 PE= 4 SV=1
MIKSIVIVGGGTAGWISAGIIAARHRADNNQSIEVTLVESPDIPTIGVGEGTWPSMVNTIKTMGISEREFVRECDVSFKQGIKFERWISGRNDDVYYHPFSYPHRSQQGGLIARWLRNSNSKSYAESITTQCYLDELSLAPKQLNSPEFNALENYAYHLDAAKFSTFLKKHCTRKLKVRHIVDNVQGVNTNEQGNITSLKTQQNNEIEGDLFIDCSGISSILLRQHFGIPFKSCKDTLFVDRALAVQVPYQKPSSPIASMTRSVAQQAGWIWDIGLPSRRGIGHVFSSNHISVENAAKQLEDYLRPNVNNINDFQFREIRFEPGHAQKFWVKNCIAVGLSAGFVEPLEASALGMIELSARMIAEHLPVSHSSMDVVAENFNQIFLQRWQLIIDFLKLHYCLSKRNDSEFWIDNRKSQSMSDTLKNLLRLWENQPPLDNGFMNPYDMFPVASYQYILYGMNFLTQPSHLNSSKFETQEAIKNLQIMASRTEKLAALVPTNRELIKSMTAR

SEQ ID NO: 84489 - protein, 496 aa, Cellvibrionales bacterium
  misc_feature (1)..(496): tr|A0A1Z8TSL5|A0A1Z8TSL5_9GAMM Tryptophan halogenase OS =Cellvibrionales bacterium TMED49 OX=1986842 GN=CBC09_0 6740 PE=4 SV=1
MKNKPVKKVVVVGGGTAGWLAAASIAKLLGDNLQITLIESDEIGTIGVGEATIPTMLVLHHLLKINEQEFMSAVHGSFKLGISFENWGALGDKYIHSFGVTGKGCWAAGFHHFWLKARKLGLSGDYGNYCTELMAAKSDRFAVSVNNEKLNYAYHFDAGLYANFMRKIAEESNVRRLEGKIINVVTDEVSGFISAVRLDSGQRIEGDLFVDCSGFASLIIDKTLNTEYDDWSNWLPCDRAIAIQTSATSEPVPYTRSIAKDAGWQWRIPLQSRVGNGLVYCSSYITDADAESVLLSSVDGNALTKPRLIKFRTGQRKLHWNKNCIALGLAAGFVEPLESTSIHMVQKGIIRLLQMFPFDGIKVADKDEFNHQMREEFLFIRDFIVLHYHLTKRTDTNFWNHCRSMAIPETLRHRLELFRESGRIFEKDRDLFAENSWAQVMLGQGLMPAHYHPIVNMMADAELTFFLNNIESQAINRVTQLPKHQHFIDKYCKAIA

SEQ ID NO: 84490 - protein, 507 aa, Pseudoalteromonas piratica
  misc_feature (1)..(507): tr|A0A0A7ELH0|A0A0A7ELH0_9GAMM Tryptophan halogenase OS =Pseudoalteromonas piratica OX=1348114 GN=OM33_20360 PE =4 SV=1
MQLTHNPIEKFVIVGGGTAGWLAAATLGNIFKDSNTQVELIESDEVNIIGVGEATIPPLIDTLESLGIDLVEFIKATQASFKWGIQFENWYQESHSYFHPFGEVGQKIDGHDFYQCWLKQKAEGDNTPLMAYSPEAVLSEKNRFFVPHQAMNTPLAGARFALHLDAVLAGQYLRKFSENIGVKRTVGHVESISKTIDGNISSVTLKSGETISGDFFIDCTGFKGLLIANALNTEYQDWSEHLPCNRAVAVQTKLTGNTKPYTVSRGQKAGWSWHIPLQHRTGNGYVFCDKYITDEEAIQTLLDNVDGEPLTEPRVIPFVTGVRDKVWNKNCLSLGLAQGFLEPLESTAIHLVSKSLALFVRMFPTKKPNAVLQNEFNRRIIGDYQEIRDFLVLHYCTTKRDDSAFWRDWQQKQVPASLSERIEFFRQSGGLIPGVEELFQPTSWYAVFDGMGVIPNGYNPTLDALNSETLAKSLAAGRSALEKCAEAQPSHDEFLQQYCPADEAIFN

SEQ ID NO: 84491 - protein, 497 aa, Paraglaciecola mesophila
  misc_feature (1)..(497): tr|K6XQE1|K6XQE1_9ALTE FADH2 O2-dependent halogenase I OS=Paraglaciecola mesophila KMM 241 OX=1128912 GN=prnA PE=4 SV=1
MDKQPIKRVVISGGGTAGWMAAAAFSKLLGKNLTVSLIESDDIPTVGVGEATIPTLHIFHRLLGINEQEFMAATNATFKLGIKFENWKAQGEDYIHSFGFLGQGCWAAGFQHFWLKGKQKGLVTQIGDYVPEHLACREGRFAVLANQEQNHAYHLDAGLYAQFLRKMAEQHGCKRIEGNIQAVNLNEESGDISSLSLASGELVEGDLFIDCTGFRALLIEQALHTGFEDWSHWLPCDSAVAVQTTAKPNPVPYTRSIARDAGWQWRIPLQNRTGNGLVFCSKYMSDEQAKAALLANVEGETLNEPRVIKYKTGTRRKHWNKNCIAVGLSSGFIEPLESTGIHLFQRAIVRLMLMFPSNGIEQADVDEFNTQSRADVEDIKDFIILHYHQTERTDTPFWRYCKSMPIPDTLTHRMELFAGTGKVFKKAEELFGETSWIQVMLGQGIMPKQYHPIVDMMSDDELQRFLENIKNNVKRKVSNWPDVNDFIRHYCQTKIAN

SEQ ID NO: 84492 - protein, 61 aa, Cribrihabitans marinus
  misc_feature (1)..(61): tr|A0A1H7A024|A0A1H7A024_9RHOB Tryptophan halogenase OS =Cribrihabitans marinus OX=1227549 GN=SAMN05444007_1053 17 PE=4 SV=1
MPDHKTLLRDIRGELEQPAFGMAAAMQPTVPMPGAARPPVVIQNMPSHAEIQRGEKDLQLF

SEQ ID NO: 84493 - protein, 500 aa, Sphingobium sp.
  misc_feature (1)..(500): tr|A0A2E3BJS8|A0A2E3BJS8_9SPHN Tryptophan halogenase OS =Sphingobium sp. OX=1912891 GN=CMN60_16065 PE=4 SV=1
MTQPSLPRRIIVAGGGTAGWMTAAALARTLGPVAQVTLIESEQIGTIGVGESTIPPLVAYNRILGIDEADFMRATQATFKLGIQFENWRVPGEGYFHSFGGTGKDHWSAGFQHFWMHGAAQGHDAPYDEYCLELKAAMAGRFAHLPDDRMNYAYHLDSGLYAKFLRAMAEGDGATRIEGRIVAVDLDGASGDIAALRLDGDRRLEGDLFIDCTGFRALLIEGALHAGYDDWTHWLPCDGAVAVQTASVRAPVPYTRAIAHDAGWQWRIPLQHRQGNGIVYCSAFMEPQAAQDQLLATVEGDRLVQPNPIRFRTGARRRQWHRNCVAVGLSGGFMEPLESTSIHLIQRAVLRILRMLPAGAISPRDITEFNDQQMADMEQIRDFLILHYKATDRRDTPFWRHCAAMAVPDSLTHKMELFRETGRVFRKNEELFAENSWVQVMMGQGITPQSYHPVAAKLRPQELEHLLTTLRDQVSRTVSALPDHEAYVARYCGAQDVAAA

SEQ ID NO: 84494 - protein, 496 aa, Pseudoalteromonas neustonica
  misc_feature (1)..(496): tr|A0A558IYE9|A0A558IYE9_9GAMM Tryptophan 7-halogenase OS=Pseudoalteromonas neustonica OX=1840331 GN=FQP85_002 45 PE=4 SV=1
MTHNKPIKNVVIAGGGTAGWMAAAALSKLVGKNINVTLIESDDIATVGVGEATIPPIRTFHKLLGINEQAFMKATQASFKLGISFENWGEKNTDYIHSFGMTGKECWAGEFHHFWLHSLTLGLESEFGDYCYELQAAKQGKCAFNQQNPINYAFHMDASRYALFLREFSEQLGVKRLEGKIIHVNKCATSGFINSLTLADESIINGDFFIDCTGFNGLLIEQALHTGYEDWSHLLPCDSAIAVQTRAISDDIVPYTRSIAHDAGWQWQIPLQQRVGNGLVYCSRYLNDTDAKQLLLSNIQGETLTEPRVIKFKTGRRRKGWNKNCLALGLASGFVEPLESTSIHLIMSGIIRFIRLFPFDGITEQAIHEYNKQLKSEIENIRDFIVLHYKVTDRTDSEFWRHCKNMEVPDTLVHKISLFKETGRVFLDDGDIFRVDSWVQVMLGQGIKPKQYHLIASLMSDDELSHFLNSIKQQITQRVAQLPTHKAFLQQYCSAE

SEQ ID NO: 84495 - protein, 512 aa, Pelomonas sp.
  misc_feature (1)..(512): tr|A0A0Q7BB66|A0A0Q7BB66_9BURK Tryptophan halogenase OS =Pelomonas sp. Root405 OX=1736529 GN=ASC81_15155 PE=4 S V=1
MPDGGPLRRIVIVGGGTAGWMTAAPLGQLMGGGDHAATCEVVLIESPEIGTVGVGEATLPTIRYYNNSLKLDNAEFMRKTQASFKLGIEFKDWGHLGNRFFHGFGEFGPAILNRSSVSHWLRVHGQAGGMGYEDLSTATVMAMRNRFVPPDGDVASAANAYSFAFHFDAGLYAAFLRDYAMARGVKREEGTIVDVSLRPGDGFVTAVTLADGRRIEGDLFIDCSGFRALLIEGVCKAGYEDWSHWLPCDSAQAVPCARVEPLTPYTTSTARSAGWQWRIPLQHRTGNGHVYCSGYVSDEEAGEVLMRNLDGAAQGNPRQLRFKTGMRKKAWDRNVVAIGLSSGFLEPLESTSIQLIMDGIGRLIELLPDRRCDAHLAAEYNRRMTRQYESIRDFIVLHYKLTKRDDSEFWRYCAAMPIPDDLTHQIEVFRRSGRVAILDPDSFAEPSWVSLFLGLGLSPERHDPLLGQVDEHALRGHFERLRTAIAKTVEGMPDHGAFINKHVKAPAMEMTK

SEQ ID NO: 84496 - protein, 501 aa, Pelomonas sp.
  misc_feature (1)..(501): tr|A0A0Q7BK98|A0A0Q7BK98_9BURK Uncharacterized protein OS=Pelomonas sp. Root405 OX=1736529 GN=ASC81_25040 PE=4 SV=1
MSQAFQRIVIVGGGTAGWMAATAVATALRGRSSVEVVESEEIAIVGVGEATFPSIRNYHRLVGIDEADFLRATHGTYKLGIEFRDWRVQGEGYFHTFGDFGALTGPRALWGQHRRLADPALGALGEQCLPTVMAQQGRFVVPAADDGHEPYKYAYHFDATLYAAFLRELALKRGARRTEGRIVDVTRRADGGVQSLKLADGREVTGDLFIDCSGFGSLLLGKVLAEPFVDFSRWLPVDSAWACPCERSGSELTPYTRSTALEGGWAWRIPLQNRTGHGHVFSSRHIDADRAREQLLQQLDGKPLAEPRLLRFTTGHRERFWVHNVVALGLSSGFLEPLESTSIFLIQSGLGHLMERLTSGQPVDDASVDDYNSRAVREFSRIRDFIVLHYCLTARRDSALWRDMAALELPDTLAFKLEAWRRLGLLHLQGDEGFDEHSWLAVLTGLQHWPERTDPVLEELAPEQARQALLQRRQAIAQSVARLPSHDAFLAQVLQEPRRTT

SEQ ID NO: 84497 - protein, 511 aa, Pelomonas sp.
  misc_feature (1)..(511): tr|A0A0Q7B613|A0A0Q7B613_9BURK Tryptophan halogenase OS =Pelomonas sp. Root405 OX=1736529 GN=ASC81_20065 PE=4 S V=1
MDDRLREVVVLGGGSAGWLVAGLLAAEHPDLRITLIESSDVPTIGVGEGTWPSMRDTLRRIGLSEPEFIRRCQVSFKQGSRFDGWARGAAGSEGDRYYHPFMLPVGYGDADLVQTWLATQGQRPFADVVSPSVQVCEAGRAPKQVQTPGFGAVANYAYHFDAGLFGQMLREHAIAKLGVHHVIDHVDAVLSHENGDIAALQTRSHGELKADLFIDCSGLTSRLIGTHFGIPLKSERDVLFNNAALPVQVAYAQAEAPLAPVTIATAWAKGWIWDIGLPTRRGVGCVYSRAHASDDEAQAALQAYLDATGAPTDRPEPRSIRFDPGYREQFWVRNCVAIGLSSGFIEPLEASALALVELSAQRLCDELPMTRASMDAVARRFNDDFSYRWARVIDFLKLHYALSSRDDSDYWRAHRDPASWPERLRELLPMWKLRAPARHDFGRIDEVFPSASYQYVLYGMGFRPDAQSLSAAKLQAAQACFDEAARQARRFVGALPGHRSLIDHIKNHIET

SEQ ID NO: 84498 - protein, 505 aa, Sandarakinorhabdus cyanobacteriorum
  misc_feature (1)..(505): tr|A0A255YJB9|A0A255YJB9_9SPHN Tryptophan halogenase OS =Sandarakinorhabdus cyanobacteriorum OX=1981098 GN=CHU9 3_07985 PE=4 SV=1
MRDDNIRSVCIVGGGSAGWMAAAALARNLPHGVAIHLVESEEIGTVGVGEATIPPIKLFNQMLGLNEADFVRATQGSFKLGIEFVGWGKAGHRYFHPFGTFGADFDSVAMHHWWNRQRLAGDPTPLDDYSMAWVAAKSNRFAPPAQDRRLVQSTFDYAYHFDAGLYARALRALAENLGVTRHEGRITGVARDGETGQVTAITLADGRQIDAEFWIDCSGFRGLLIAETLETPFIDWTHWLPCDRALAVPCAHANGTDGAGFTPYTRSTAHAAGWQWRIPLQHRIGNGHVFSSAFMGEDEAAAILMANLDGPALADPRLLRFTTGRRAQSWAHNVVAIGLAAGFMEPLESTSLHLVQSGLMRLLALWPTRAMDAHVRDEFNRMSATEWERIRDFLILHYHLNSRDEPMWRHCAAMPIPDTLANKIAHFASHGRLVSDGPELFLNASWLAVHVGQFNLPRRHDPLADARATNVDAPRLLSGLARVMREAAAEMPTHAAFIARHCAAN

SEQ ID NO: 84499 - protein, 495 aa, Pseudoalteromonas neustonica
  misc_feature (1)..(495): tr|A0A558IWR7|A0A558IWR7_9GAMM Tryptophan 7-halogenase OS=Pseudoalteromonas neustonica OX=1840331 GN=FQP85_015 95 PE=4 SV=1
MNIIIVGGGTAGWMAANLLNHSLTNTHVTLIESPTIAPIGVGEGSTPQLKQFFDTLNISESEWMPQCNATYKLGIEFKNWSTHPGHEQYFHSFYGQTDLHTQQQFIKSCLLKRQGIAIDAHPDSYFLAAYLAKQQRGPHTQADFPFQQSYGYHFDSGLLGLFLANRATSKGVKHLKSTIAQVELDSAGNIKQLVLDENSDGQQCIAADFFIDCSGFKGLLIQQALAVPWLSFKENLFNDSAIVLPTTSNQLQAPQTTSTALKYGWQWAIPLTNRIGNGYVYSQDFCSADEAETELRTKLGLLNCDVPARKLTMKVGRVKQHWYKNCLAVGLSQGFIEPLEATALHLVQQTIESFIACFEHNQPSEAKRDSFNTQINNRIEGIRDYIVCHYRASNRRDTEYWQANGQNEMLSASLKNIFQCWLSRNDLTGEIAHQGIENYYSSLSWHTLLSGYGVFPPSVAKPSYTQQQQIKELYNFNHQCASHFRALTPIIPQQK

SEQ ID NO: 84500 - protein, 496 aa, Colwellia psychrerythraea
  misc_feature (1)..(496): tr|Q487M4|Q487M4_COLP3 Putative tryptophan halogenase O S=Colwellia psychrerythraea (strain 34H / ATCC BAA-681) OX=167879 GN=CPS_0992 PE=4 SV=1
MNSPVKKVVVLGGGTSGWISAALLKKILGSAIQLELVESDAIGTIGVGEATIPPIKHLNNVLGINEAEFLRETKATIKLGINFENWKSQGHSYLHSFGAAGKSLAFCHFHHLLKRANQLEDDSHLWQYDLNYLCAKAGKFAQIKSKDPIIELPYAYHFDAGLYAKFLRKFSEKIGVIRTEGLVEHVEQCPNSGHITSLKLKSGQTVTGDLFIDCSGFKGVLIQEKLRTGYEDWSHLLQCDRAIAVPSERLEKTLPYTRSIAHAAGWQWRIPLQHRNGNGLVYSSSHCSEQQAMDTIMGNLDSKAIADPKVIKFQTGRRYQQWNKNVIAIGLSSGFLEPLESTSIHLVQSAVVRLAHLFPHQGINSSLVDEFNKQSATEFEQIRDFLVLHYHATERTDSDFWQDMRHMKIPDSLAHKIEIFKQSGRLFREQNDLFTDSSWLQVMLGQGIVPQDYHPIANIMSDEKLAEMLRKVKEIKQAPIDKLPSHDEFLRIFCQQ

SEQ ID NO: 84501 - protein, 431 aa, Sphingobium sp.
  misc_feature (1)..(431): tr|A0A2D8TB22|A0A2D8TB22_9SPHN Tryptophan halogenase (F ragment) OS=Sphingobium sp. OX=1912891 GN=CMN63_04340 P E=4 SV=1
  misc_feature (12)..(12): Xaa can be any naturally occurring amino acid
  misc_feature (47)..(47): Xaa can be any naturally occurring amino acid
  misc_feature (140)..(140): Xaa can be any naturally occurring amino acid
  misc_feature (161)..(161): Xaa can be any naturally occurring amino acid
  misc_feature (175)..(175): Xaa can be any naturally occurring amino acid
  misc_feature (196)..(196): Xaa can be any naturally occurring amino acid
  misc_feature (265)..(265): Xaa can be any naturally occurring amino acid
  misc_feature (288)..(288): Xaa can be any naturally occurring amino acid
MKQPSLPRRIVXAGGGTAGWMTAAALARTLGPVAQVTLVESEQIGTXGVGESTIPPLVAYNRILGIDEADFMRATQATFKLGINFEHWRVPGESYFHSFGGTGKDHWSAGFQHFWMHGRAQGHDAPYGDYCLELQAAQAXRFSHLPDDRMNYAYQLDSGLXAKFLRAMAEGDGAXRIEGRIVAVDLDGTSGDIAAXRLDGDRRIEGDLFIDCTGFRALLIEGALHAGYDDWTHWLPCDGAVAVQTASVRPPVPYTRAIAHDAGWXWRIPLQHRQGNGIVYCSAFMTPXAALQMLLDSVEGETLVQPNPIRFRTGARRRQWHRNCVAVGLSGGFMEPLESTSIHLIQRAVLRILRMLPAGAISPRDIAEFNDQQMADMEQIRDFLILHYKATDRRDTPFWRHCASMSVPDSLTHRIELFRETGRIFRKNEEL

SEQ ID NO: 84502 - protein, 517 aa, Sphingobium sp.
  misc_feature (1)..(517): tr|A0A2G1YID6|A0A2G1YID6_9SPHN Tryptophan halogenase OS =Sphingobium sp. OX=1912891 GN=COC10_07035 PE=4 SV=1
MAKSILIVGGGTAGWLTAGYLARRLGSDLPGGVSIRVVESAEIGILGVGEGTFPTIRRTLATIGIDEAEMIRRCGASFKQGAKFVHWRHAPGQAGPDHYSHPFQVAESPDGMELLPYWLLGQGGTDNWDEVCGPQKKAADAHRAPKLPDHPDYVAPLNYAYHFDAVALAEMLRDKAVENGVAHLSDRVTEVLVGGDGAIDGVRTAQYGLLKADLYIDCTGFRAELIGKALDMPYRSCRDVLFCDSAVAMQVPYATIDDPIASCTIATAQDAGWIWDIGLEKRRGIGHVYSSAHMDDASAEARLRAYVGPASDRLEFRKLRFEAGYRETNWHKNCVAVGLSSGFFEPLEATGIVFSEIAAGMIANLFPWGGDFESSARQYNANMRKRYERALDFIKLHYCISERRDTDFWRDNVAQSSIPDSLLELLDRWRFRPPNEMDFDLQVDIFSEMSWQYVLYGMGWRTDLTAKAGIYRYHDEARRAFAEVRRQASFAIANLPSNRELISNAHRRGFGTRPAAA

SEQ ID NO: 84503 - protein, 528 aa, Sphingobium sp.
  misc_feature (1)..(528): tr|A0A2G1YGQ2|A0A2G1YGQ2_9SPHN Tryptophan halogenase OS =Sphingobium sp. OX=1912891 GN=COC10_10150 PE=4 SV=1
MSVDIPSLLMVLFPMVQPVRNIVIVGGGTAGWLTAGIIAARHRSRIGSGFTVTLIESPNTPIIGVGEGTWPTLRTTLSRMGVSETDFFRECDAAFKQGARFARWTSGAADDGYYHPLMLPQNFGQVNLAPHWLAQDDPDSFCDAVCAQGRICDDGLAPKTMATAEYDALANYAYHLDAGKFAPFLQRHCCEKLGVRHILADVEQVLMHDNGDIRAVRTTQAGEVEGDLFVDCTGFKALLIEGAMGVPFRDCNDILFCDTALAMQVSYAAPDCPIASHTISTAQSAGWIWDIGTQARRGVGHVFSSSHISDDHAERELRAYIGPAADGLNARRIKIRSGHRETFWKGNCVAVGLSAGFLEPLEASAIVLIELSAKIIAEQMPACREVMDIVAARFNATAHYRWGRIIDFLKLHYVLTKRTDSDFWRDNVRIESIPDRLQELLLLWRYQSPWFHDEFDRAEEVFPAASYQYVLYGMGFRTEVDPPALARDAHLADRARRENAAATAKLCAGLPRHRELIDRIVAHGLQPV

SEQ ID NO: 84504 - protein, 517 aa, Paraglaciecola mesophila
  misc_feature (1)..(517): tr|K6Z056|K6Z056_9ALTE Uncharacterized protein OS=Parag laciecola mesophila KMM 241 OX=1128912 GN=GMES_0063 PE= 4 SV=1
MAQAIKSIVIVGGGTAGWITAGTIAAKLQSEHADGFNITLVESPDVKPIGVGEGTWPTMRRTLKAMGVRETDFIRQCNVSFKQGAKFAKWVTGAEDDFYYHPLVLPQDFDSTNLARHWMERPFEQSFSQAVSPQEAVCEVGLAPKSIATAEYTSIINYAYHLDAGRFSVFLQQHCTEKLNVRHVLDNVTAINAAENGDIASVSTTTNGDISGDLFIDCTGFKSLLLGEHFKVGFKSCKDVLFVDQALAIHVPYESEDAPIASHTISTGQSAGWVWDIGLQNRRGVGHVYSSAHTTEEQASEELLNYIAQTGGHVNEADIRRIPLNPGHRVKFWHQNCVAIGLSAGFLEPLEASSLLLVEISASMIADQFPATRDAMEIVAQRFNSTFLYRWDRIIDFLKLHYMLSKRNDSAFWIDNRDSASIPQSLQDQLTLWQYQPPWHNDFEHAIEVFPAASYQYVLYGMGFDTQASALGMSEVYKQKASSLRQKNTQQIQQMLKTLPSNRALINKIHQYGLQKV

SEQ ID NO: 84505 - protein, 495 aa, Pseudoalteromonas sp.
  misc_feature (1)..(495): tr|A0A2K9K222|A0A2K9K222_9GAMM Flavin-dependent tryptop han halogenase RebH OS=Pseudoalteromonas sp. NC201 OX=1 514074 GN=rebH3 PE=4 SV=1
MKTIQSLTILGGGTAGWMCAAYLAKHQPNLSVTVIESSSIGRIGVGEGSTPHLQLFMQSLGVKERDWMPACQASYKTGIYFDNWNGDNGSYFHPFFSEMDAKTAEVYFVNANARRRGSEYIDKPEHYFLAAVLADKQQAPQPQRPLPRALEYGYHFDAQKLADWLRAYSLARGVKHIQSTVSSVQHHAKEIIALTLESGEQVKSDFYVDASGFNALLIEKTLEVPFISFADQLLNDSAVAIAGAKINPLPSSTSAIAMPCGWRWQIPLQGRTGHGYVYSSAHTTPEEAEAQLRQAAQLDKGQAKHLTMKVGMMARSVEGNVFAIGLAQSFIEPLEATALMVTGYSIELLNRLLSQQLEAQAINQQLSELVLGIKEYVLAHYATSKRADSPYWQDAKVAALSLNELDELLTHWRSGGDFDAWLNQHRKHSPYIRPSWYCLLGGMDHRDSTCQMPFDQAPQHIEQAAKAYLTKLSDEHFTAHTTVLEQLQRAQAFRA

SEQ ID NO: 84506 - protein, 500 aa, Sphingobium sp.
  misc_feature (1)..(500): tr|A0A2D8TF47|A0A2D8TF47_9SPHN Tryptophan halogenase OS =Sphingobium sp. OX=1912891 GN=CMN63_11490 PE=4 SV=1
  misc_feature (424)..(424): Xaa can be any naturally occurring amino acid
  misc_feature (449)..(449): Xaa can be any naturally occurring amino acid
  misc_feature (473)..(473): Xaa can be any naturally occurring amino acid
  misc_feature (488)..(488): Xaa can be any naturally occurring amino acid
MKQPSLPRRIVIAGGGTAGWMTAAALARTLGPVAQVTLVESEQIGTIGVGESTIPPLVAYNRILGIDEADFMRATQATFKLGINFEHWRVPGESYFHSFGGTGKDHWSAGFQHFWMHGRAQGHDAPYGDYCLELQAAQAGRFSHLPDDRMNYAYQLDSGLYAKFLRAMAEGDGASRIEGRIVAVDLDGTSGDIAALRLDGDRRIEGDLFIDCTGFRALLIEGALHAGYDDWTHWLPCDGAVAVQTASVRPPVPYTRAIAHDAGWQWRIPLQHRQGNGIVYCSAFMTPGAALQMLLDSVEGETLVQPNPIRFRTGARRRQWHRNCVAVGLSGGFMEPLESTSIHLIQRAVLRILRMLPAGAISPRDIAEFNDQQMADMEQIRDFLILHYKATDRRDTPFWRHCASMSVPDSLTHRIELFRETGRXFRKNEELFAENSWVQVMMGQGVTPXSYHPVAAKLRPQELEHLLATLREXVSRTVAALPDHGAYXARYCGAQDVAAA

SEQ ID NO: 84507 - protein, 478 aa, Cribrihabitans marinus
  misc_feature (1)..(478): tr|A0A1H7A278|A0A1H7A278_9RHOB Tryptophan halogenase OS =Cribrihabitans marinus OX=1227549 GN=SAMN05444007_1053 16 PE=4 SV=1
MNNRLRKITIVGGGTAGWMTALILDTEFSRTSATKDRPHICLIESPNIATVGVGEATVPRMPKTLREAGISERAFFRETNASFKLGVKFCNWNTDAKGKRIDYVNPFAHGQMLGGLEAAEYFLRFGNGDRDFTQSISPHDDLGRLCKGARPLGQPEFEQRFGYAYHLDAVKFAGMLTDVCTKRGVEHIRDEVKSVELDEQGNVSHLMLEHKGRHDIEMVIDCTGFRGLIINKALGEPFKDYSDYLPNDRALALQIEHPDPEKIESLTRSTALGAGWTWRVPLYNRVGTGYVFSSAHRTDDQAADEYLEWLGDSGKGATPRVIPMRIGRVRNAWVKNCVAIGLSGGFIEPLESTAIHMIDHAVRWFAEHLPTRDIAPSLRSRYNRQMNKLYDEVLEFICLHYRLGNRTDDQYWIDARTEMKIPDRLAENLELWQHRLPMAHDVEFATLFDFRVFFRRFCWASRSMTRAMVPASGIACVR

SEQ ID NO: 84508 - protein, 504 aa, Erythrobacter aquimixticola
  misc_feature (1)..(504): tr|A0A419RQQ2|A0A419RQQ2_9SPHN Tryptophan 7-halogenase OS=Erythrobacter aquimixticola OX=1958945 GN=D6201_0099 5 PE=4 SV=1
MTESSPTRYVIAGGGTAGWMSAAALARFAPPGTSITLVESDAIGTVGVGEATIPQIHLFNRALGLDEGDFLRATKGSFKLGIEFDGWLREGEAYMHAFGSVGRGHGLMPFHQYWLRAQALGIAKPTAAYALNEQAARAIRMHRGPTQNGPPMPYAFHFDAGLYADFLRAFAEGRGVRRVEGKIANVAQHGESGDIAALELDGGERIEGDFFIDCTGFRGLLIEGALAAGFDDWSEYLPCDRAVAVPCENGGEFTPYTRATARAAGWQWRIPLQHRIGNGLVYCSRFMEDDAASEMLLANLDGKPLGDPRPIRFTTGTRRAHWKGNCLAVGLSAGFMEPMESTSIHLIQSAISRFLSVLPNGRGGAATRDWFNAQSRFEWERIRDFLVLHYTANAREGQPFWDHMRAIELPDTLQAKIEAWRANGHIHREHEELFTEVAWFQVFAGQGVEAQGRNPIADALPEPQLRQLLEQTETAIAAEVRPMAHHIDVIKSTIGTRTPQELPA

SEQ ID NO: 84509 - protein, 518 aa, Colwellia psychrerythraea
  misc_feature (1)..(518): tr|Q487J3|Q487J3_COLP3 Putative tryptophan halogenase O S=Colwellia psychrerythraea (strain 34H / ATCC BAA-681) OX=167879 GN=CPS_1023 PE=4 SV=1
MNEQVKQVVVVGGGTAGWLTAANLAQKFNSVESGAIQVTLVESPDIPTIGVGEGTWPTMRKTLAKLGISEADFLSKCNASFKQATKFVNWQQAPKNGINSHYYHLFTSINDPLDFNLAPYWKLGMIGDNNSYAETISMQAAICESGLAPKLITNREFEGVQNYAYHLDAGLFTDLLREHATTKLGVKHVSANVTDVNLDDDGYIINIHCDSVGVVLGEFFVDCTGFKSLLIGKALGIPFKSIDDTLLCDHALAIQVPYENEESSIASCTISTAQEAGWTWDIGLSNRRGTGYVYSSAHTSHERAEQVLRNYIGPQADQLESRLIKMNVGYREKFWHKNCFAIGLSAAFVEPLEASAIFLIEASANMLSELFPRDRHAMLAVEEKVNKSFKFRWDKTIDFIKMHYFLSKRTEPFWQDNKVLSTVPDTLLASLDSWKHQLITGYDFDNVYEPFPLDSYQYVLYGMGFDQTLTFNENSYTKQGFAQQQYNTVQDLTQKMQQQLPENRELLNKIAQYGFQKI

SEQ ID NO: 84510 - protein, 516 aa, Streptomyces natalensis
  misc_feature (1)..(516): tr|A0A0D7CM60|A0A0D7CM60_9ACTN Tryptophan halogenase OS =Streptomyces natalensis ATCC 27448 OX=1240678 GN=SNA_1 5345 PE=4 SV=1
MIKSVVIVGGGTAGWMSASYLKAAFGDRVDVTLVESDRVSTIGVGEATFSTVRHFFDYLGLDEREWLPECAGSYKLGIRFENWRKPGHHFYHPFERLRTAEGFTLADWWLLEGDRSEPFDRSCFITPALCEAQRSPRMLDGSLFAGDLDGSLGRSTLEDQRDQFPYAYHFDASLLAKFLTKYGTDRGVRHVVDDVVDVARDQRGWIDHVTTREHGEISGDLFIDCTGFRGLLINQTLEEPFESFQDVLPNNRAVALRVPQPDQATKGMRPYTTATAMDAGWIWTIPLFGRNGNGYVYSDEFCTPEEAERTLREFAAPGQDDLEANHIRMRIGRNRRSWVNNCVAIGLSSAFVEPLESTGIFFIQHGIEQLVKNFPDQHWDPALMKDYNDRVANVLDGVKEFLVLHYRAAERDDNAYWKEAKVRPIPDGLAARLETASSHILDEHTIYPAYHGFEQYSWITMLMGLGHEPVRPRPTLAHLDPAAARAELAALKADTERLVNSLPSCYEYLASINKAG

SEQ ID NO: 84511 - protein, 499 aa, Caulobacter vibrioides
  misc_feature (1)..(499): tr|A0A0H3C8I7|A0A0H3C8I7_CAUVN Tryptophan halogenase OS =Caulobacter vibrioides (strain NA1000 / CB15N) OX=5650 50 GN=CCNA_01054 PE=4 SV=1
MQPQTIRKVVIAGGGTAGWMAAAALGRQLGSLLDITLVESEDIGTVGVGESTIPTARTFNALLGIDEAEFMRATQATFKLGISFENWGEVDDRYIHSFGQVGKSTWMGGFHHFWLQALAHGFGGDLGDYCLELKAAEAQRFYTGENGPLNYAYHLDAGLYGQFLRRMAEADGVRRVEGKIASVRQRETDGFVDALVMESGQVVEGDLFIDCTGFRGLLIEQTLKAGYEDWSHWLPTNSALAVQTRSTEPAVPYTRAIAHRAGWRWKIPLQHRVGNGLVYCSDHMSDDEAMTMLTSEIEGETLIPPRLIRYRTGRRRRTWDKNVVALGLSSGFVEPLESTSIHLIMIGVSRLMQLFPFGGISQATIDRYNRQADDELEKIRDFIILHYKVTERTDSTFWDQVRTMDIPDSLAHRIALFQESGHVFQAPGELFQVDSWLQVMLGQRIMPRTYHHMGRMMPPQQLKQALDDLKRNIAGTVSRLPQHQAFLDHYCAPAVSKSA

SEQ ID NO: 84512 - protein, 436 aa, Rhodopirellula baltica
  misc_feature (1)..(436): tr|L7CEA1|L7CEA1_RHOBT Tryptophan halogenase OS=Rhodopi rellula baltica SWK14 OX=993516 GN=RBSWK_04092 PE=4 SV= 1
MSTPKMKDFYDCVVIGGGPAGGAAASIVADSGVSTLLIERDPVPRFHVGESLMPECYWPLERLGLIDQVKRSGWQTKKSVQFVTHTGKESAPFFFREHDERECSTTWQVERSEFDKMLYDRASELGADCFDQTRLIDVQTEPGETADQPIARAVVVRTADGTEKTIGCKVVVDATGQQAFLAGKMGLKEINPDLKKAAIWTYYRDAVRGEGDNDGATIILNTKSRDSWFWFIPQSRGITSVGCVGDNDYLLKGRGTPEEIFEEELANCPGLQPRLANSTRVGKITTAKEFSYMTRRHSGPGWVLIGDALGFIDPVYSSGVYFALEMGVRAGDAIVEGLKKDDLSAEQLGKWTDDFKEGASKVRQLVHAFYNKDFSIGRFMKEHPEYRGNVTDLLIGRVFHEDAGKMFPALDRSIEMARANAMSKADSMAETKPMST

SEQ ID NO: 84513 - protein, 439 aa, Massilia namucuonensis
  misc_feature (1)..(439): tr|A0A1I7M6T0|A0A1I7M6T0_9BURK Tryptophan halogenase (F ragment) OS=Massilia namucuonensis OX=1035707 GN=SAMN05 216552_10691 PE=4 SV=1
MSDKAIRTIVIVGGGTAGWMTAAPLALKLPKTCEVVLVESAEIGTVGVGEATLPTIRHFNLALGIDEADFVRKTQATFKLGIEFKDWGHVGNRFFHGFGDFGPAIENRPAYMYWLRLSRVFKDMPSYEQWSMATMMARGNRFMPPQDELPSITDAYSSAYHFDAGLYAAYLRDYATRRGVKRIEGMIEHVEQHPETGFITALKLRDGRRVEGDLFVDCSGFRGLLIEGVYQAGYEDWSAMLPCNSALALPCAKTLPLTPYTTSTAKAAGWTWRIPLQHRTGNGHVYCDGYTSDAEAERVLLEGLDGEAQGEPRQLRFTTGRRRKSWVKNCIAIGLSGGFLEPLESTSINFIENAVGWLLQYFPNRECRPELADEFNRLVAQRYEYVRDFIIMHYKLTDRTDSEFWRYCANMPIPDTLRHQIETFRETGRVVVYDKEGFN

SEQ ID NO: 84514 - protein, 510 aa, Pelomonas sp.
  misc_feature (1)..(510): tr|A0A0Q7BGK0|A0A0Q7BGK0_9BURK Tryptophan halogenase OS =Pelomonas sp. Root405 OX=1736529 GN=ASC81_09340 PE=4 S V=1
MTQKRRILIVGGGTAGWLTAAYLAKALRLPERSQLEVTVLESPDISSVGVGEGTFPTIRSTLQFLGIDEARFIRETSATMKQGIRFVDWARAPVGGSRHEFFHPFEAPFYAEDLNLVPYWLLQDEADRAPFAQAMTIQHRVAEGQRAPKRAGEAPYAAPLNYAYHFDAIKLAKLLAERARELGVRHVQATVTGVALDAAGAIAHLDTDRQGRFESDLYIDCSGFRAELIGRALGSPLKSARGHLFADRALACKIPLGAEAVMESATIATAHEAGWLWEIGLNGARGVGCVYSSDHLSDDRAADILRNYCGAGSEDLAMRSIPFAPGYREQQWMKNCVAVGLSAGFLEPLEATGLVLIEAAVGMIAEMLPHSGPIQAPARRFNELMTARFENIINFLKLHYCLSQREEPFWRDNAAPASIPDRLAGLLEEWKLRPPGRFDFLLDTETFAFFNYQYILYGMGFRTDLSAGRDDFTQVEDAQKLFAKIQRFADRAVADLPSHRTLIQQINAGR

SEQ ID NO: 84515 - protein, 487 aa, Pelomonas sp.
  misc_feature (1)..(487): tr|A0A0Q7AZQ8|A0A0Q7AZQ8_9BURK Uncharacterized protein OS=Pelomonas sp. Root405 OX=1736529 GN=ASC81_13160 PE=4 SV=1
MTALALTKRARPGRPLAVTLVDSAAIGSIGVGEATVPAILDYLTSVQADVPALIRDSRATLKAGIAFQDWRAIGQRYFHGFGLYGASAGGVGFHQVLAWLQAQDGGQDLRLEDFNLCAQMALRGRFAAPPAQPEADHDIYRWALHLDAGLFAQHLRRQALGSGVQHLDGVFEHADIGPDSGAITAITLTDGRRLEADLFIDCSGFRGLLIRQALRQPWVSWRHWLPCDRAVAQPTAGSGPATPYTLAQALPAGWRWRIPLQHRIGNGHVYASAFMSDEQALQLLQAHQDGEALAEPNWIRFDPGHIAQPWVRNVVAIGLSAGFLEPLESTGITLIHSAIDKLLALWPDDPQAPALAAEFNRASLLEMERIRDFLVLHYALSERRDSEFWRHITAAPLPDTLVHKLAVYRANGHFVRHEWETFQDHSWLAVYDGLGVRPQQLDARLARFQAADVRQGCEAMQAAILRRAEQAPLSDAEVLARALQVAP

SEQ ID NO: 84516 - protein, 517 aa, Erythrobacter sp.
  misc_feature (1)..(517): tr|A0A165R9C4|A0A165R9C4_9SPHN Tryptophan halogenase OS =Erythrobacter sp. HI00D59 OX=1822215 GN=A3711_03240 PE =4 SV=1
MADHTQPNRGRRPRPGRRIVIVGGGTAGWMTAAALSRFCGRDWGITLVESDAIGTVGVGEATIPMIRNFNAALGIDEAEFIAATNGTYKLGIEFVGWGAPDSRYLHAFGLVGRGLGLLPFQHYWLRARAEGFGGPIGDYVLNAIACREERFAHVERQPGSALPPMPFAYHFDAGLYAAFLRRYAETRGVLREEGRIDHVETRAEGGDITSVRIDGGRVIEGDLFIDCSGFRGLLIEDTLQTGWTDWSHWLPCDRAIAVPCEPSEPWHPYTRSTAREAGWQWRIPLQNRIGNGHVFSSAHMSEDTAQEALLANLDGEPTAEPRLLRFTTGMRKQAWNRNVVAIGLSSGFLEPLESTSIHLIQTGINRLLDYLPVSGFGPCDRENFNRRTAYEMERIRDFIILHYHANGREGQPFWDMLRTMAVPDTLAEKIEMFRAGGKIVRDQDELFDVPGWVQVMLGQGVEPQGWHPLADELPRDQLEQFLATVKSAYERDVARMPSHQDYVRRLARQGRSKLETA

SEQ ID NO: 84517 - protein, 507 aa, Caulobacter vibrioides
  misc_feature (1)..(507): tr|A0A0H3C7I5|A0A0H3C7I5_CAUVN Tryptophan halogenase su perfamily protein OS=Caulobacter vibrioides (strain NA1 000 / CB15N) OX=565050 GN=CCNA_01831 PE=4 SV=1
MQPLKKILIAGGGSAGWMTAALCSRLFQGLYEIVLVESEEIGTVGVGEATIPAIKKFNELLGLEEDDFLRKTQGSFKLGIQFKNWWRRGESYLHGFGVIGQDLGWLRCHQYWLRMRDLGRAGDFDNLSINNAMALSNKFMRARPDMAESPIGHIAHAFHFDAGLYAKHLSTFAQARGVTRREGKIVDVTLRAEDGFVQSVTMDDGEVLTADLFVDCSGFRGLIIEQALKTGYEDWTHWLPCDRAVAVPCDRSEHFTPYTRSTAHTAGWQWRIPLQHRTGNGHVYSSQYIDDDEAERVLLANLDGAQRADPLRIRFKTGKRKKIWNKNCVSIGLASGFLEPLESTSLHLIQSAVIRMVRLLPDAGFDQATIDEFNRQTDFEYERIRDFIILHYKATERDDSPFWRYCRDMEIPATLQRKMDLFRANGRVFREDDELFTEESWIQVFLGQGVIPRAYDPLVHVQSDDEIARFLGNIETVIGKCLNVMPSHAEFVAHACPAPPLAPVPTS

SEQ ID NO: 84518 - protein, 503 aa, Sphingomonas ginsenosidivorax
  misc_feature (1)..(503): tr|A0A5C6UHC1|A0A5C6UHC1_9SPHN Tryptophan 7-halogenase OS=Sphingomonas ginsenosidivorax OX=862135 GN=FSB78_107 70 PE=4 SV=1
MTEPRASHVVILGGGTAGWIAACLIAQRWRDARVTMIESPEIGIVGVGEGSTPQLKHLFDTLGIAEAEWMPACDATYKLGIGFEGWSDRAGYERYFHPFPSALDVHTAGQFFYHARARRTGRDVDAHPDRFLLPARLAAAARGPHPDPSFPFEVSYGYHFDAHKIGAFLARHATETLGVVHLQRRIAEIERSADGDVAGLVDADGERITGDLFVDSSGFRSMIHSALEVPFVSYADALFNDRAVVMPTPRAAGEAVPSQTRATALSAGWAWHIPLTTRDGNGYVYSSRHLSEGEAEAELRAHLGAEAGDARHLKFRIGRVRDSWSHNALAVGLAQGFLEPLEATALHLVIATVEAFLDMVDASGATPETRTAFNTRIAARYDGVRDYIVAHYRLNQRHDDPTGYWAQARAIDALSDDVKALMSAWFTGADLTAVIDRAGLSRYYSAISWHCLMAGYGTFPDDARLVPPGPDIDPVDMPRIDDFLNRCALNFRPHAPYSPEDAA

SEQ ID NO: 84519 - protein, 544 aa, Aliikangiella sp.
  misc_feature (1)..(544): tr|A0A545UK09|A0A545UK09_9GAMM Tryptophan 7-halogenase OS=Aliikangiella sp. M105 OX=2592383 GN=FLL46_02650 PE= 4 SV=1
MYTRRILIVGGGSSGWMTAAYLNGALNFQGNQKNVEIKLIESPDIPRISVGEATIPSIRHILSVIGVNEIDFMKATDASFKQSIKYVNWVNNNNTFYHHPFSRFRTQPIDRSGMNWLRSSRNIPFMETCSAQPIICEMGLSAQMLGQWELGPPLSYAYHFNAQLFADYLRDFSVARGVEHILANVTDIDMDESGDIKSVATDTGNHLEADLFIDCTGFKAKLIEEKMDVTFEDCSQWLLCDRAVTMHVPYDNFYPGMIRPYTTATALSNGWIWDIPMRSRRSVGYVHSSQFISEQDAEAEMRAYQGAGCEDLPARFVHFKVGRRQQNWKGNCIAIGLSGGFIEPLESTGLYLADLGAVMLAEHFPYRREHMKEMAFRYNRILSNRFYEILDFINMHYCMTRRTDTEFWREVQKPERITERLKAKLEYWKMKPPSATDFEDQCFPGMQQVGISTGGQCFDGRAAVDTAGLWNHESYECILYGMGFLDKEFDELFGTNRPPSQVHPHVLHRLQAAKQKIPPHAVWLKQKLGMEDYTIAQKPAGWVC

SEQ ID NO: 84520 - protein, 514 aa, Pseudoalteromonas piratica
  misc_feature (1)..(514): tr|A0A0A7EFB5|A0A0A7EFB5_9GAMM Uncharacterized protein OS=Pseudoalteromonas piratica OX=1348114 GN=OM33_09560 PE=4 SV=1
MQTKSIQSIIILGGGTAGWLAANHLAINLKPKEQHGIKITVIESPDTPTIGVGEGTVPLMRNTLKEFGISEEKFIKECDVSFKQGIQFDNWMKPVDGKMHSYYHPFDYPILDNDSVAAWLQNPVMPFAHAMSRQALLCDNHKSPKAITDPEFSGQAAYGYHLDAYKFSDLLKHHAIDNLGVEHLMAHIEDVTLSSDGTIDTLISLQGDVFKSDFYIDCSGFCSRLIGHALNVPFIGKSDVLFVDKALAIQVPHDNEMPELPSSTIATACDAGWIWDIALPTRRGIGHVFSSKHCSVDEAKATLANYLNKPVEEIQPRLIDMKIGHREKFWHKNCVAIGLSQGFVEPLEATGLLAFDATAKLLAKSFPTNTAQLAQAEKRYNNYVSGLWQGVINFIKMHYAVSDRDDTAFWRDNRDTASWPLELQEKLAHWRTHIPSLYDFERGFDAFRLENYLYVLYGMNFPTDIGDIAYRYQAPDIAQKQFGLIQRQAIQVADYLEDNLTVINKIKQFGLSKV

SEQ ID NO: 84521 - protein, 514 aa, Sphingobium sp.
  misc_feature (1)..(514): tr|A0A2E8ZF42|A0A2E8ZF42_9SPHN Tryptophan halogenase OS =Sphingobium sp. OX=1912891 GN=CMN60_15750 PE=4 SV=1
MVRPVRNIVIVGGGTAGWLTAGVIAARHRTRIGQDLSVTLVESPNTPIIGVGEGTWPTLRTTLSRMGISETDLFRQCDAAFKQGAWFARWTDGTASDGYYHPLMLPQNFGQVNLVPHWLAQDGDESFCDAVCAQGRICDDGLAPKTMATAEYDALANYAYHLDAGKFAPFLQRHCCEKLGVRHVLADVEQVVLHDDGDIAAVRTTQAGLVEGDLFVDCTGFKALLIEGAMGVPFRDYNDVLFCDTALAMQVPYAAPDSSIASHTISTAQSAGWIWDIGIQTRRGVGHVFSSSHISDEQAERELRAYVGPASDGLNVRKIKIRSGHRETFWKGNCVAVGLAAGFLEPLEASAIVLIELSAKIIAEQMPACREVMDIIASRFNATTHYRWGRIIDFLKLHYVLTQRTDSDFWRDNVRAETMPDRLRELLHLWRYQSPWFHDEFDRAEEVFPAASYQYVLYGMGFRTQVPTAALARDAHLAGRAMRENAAATARLRAGLPRHRDLIDRIVAQGLQPV

SEQ ID NO: 84522 - protein, 518 aa, Pseudoalteromonas neustonica
  misc_feature (1)..(518): tr|A0A558IJ47|A0A558IJ47_9GAMM Tryptophan 7-halogenase OS=Pseudoalteromonas neustonica OX=1840331 GN=FQP85_162 30 PE=4 SV=1
MKQQEKSINTVIVVGGGIAGWLTAGRLAAEHKSNTDVGVKVTLVESPNVPIIGVGEGTWPTMRSTLIALGISETDFIRECDASFKQGAKFAQWVDGGEDDYYYHPLVLPQGFTKTDMAGYWLNDGEQSSSFSNAVCFQEALCEQGLAPKTIRTPEYGAVANYAYHLDSAKFAVFLQKHCIENLGVTHILADVTKVNSIENGDIGSLTTKQAGNISGDLFVDCSGFSSLLLGGHYQVPFKSYRDVLFIDTALAVQVPYENDSSPIASHTISTAQEAGWIWDIGLQHRRGVGYVYSSKHSTESQARARLADYIGDKIDSLTIRKIPIESGHRSHFWQNNCVAVGLSAGFLEPLEASALVLVEMSAQMISEQLPPTREVMDITAKRFNDTFLYRWGKIIDFLKLHYILSKRTDNAFWIDNRDPQTIPQSLQDLMQLWQYRAPADYDFASNNEVFPAASYQYVLYGMGFKSDYSNSPHLLNDKTFAQSQFAKNKHMIQQAVSTLPSNRELLDKIKLHGLSAI

SEQ ID NO: 84523 - protein, 516 aa, Caulobacter vibrioides
  misc_feature (1)..(516): tr|A0A0H3C756|A0A0H3C756_CAUVN Tryptophan halogenase su perfamily protein OS=Caulobacter vibrioides (strain NA1 000 / CB15N) OX=565050 GN=CCNA_01023 PE=4 SV=1
MTTTHPNALRKIVIVGGGSAGWISAAMLSHYFQNGGCAVELIESEEIGTIGVGESTIPPFLQLLASLGVDEREFIQATQASFKLGIRFEDWKQKGQRYYHPFGAIGGPIGPHEFYQCWLRAKANGHPSNLQDFAPGTVMADQWKFIPPIKAQRTLIAGASYALHVDARLVAKFLRDYAEARGVKRTEGIVTDVVTHPDGSVAKVIMKDGREVEGDLFIDCTGFRSLLIGKTLDVPFNDWSDMLLCDRAVVVQTENVGAPHPYTVSKAEDAGWRWRIPLQHRAGNGYVFSSRHLSDDAARATLVQNVEGQMLMNPMFIAFKTGMRRRLWHKNVVAVGLAGGFIEPLESTALHLIYRGMDFLLRFFPDRDFDPALAAEYNRRMTADYEEIRDFIVLHYCTTQRDDTPFWRDVRNAPIPDSLKERMALFQAQGVLREGVDDMFRNPSWQSVMEGMGVRPRRYQQLVDTAPYDVIAQTLDQSAPILAAQVAGLPSHGEFLEKHCPAPKPEAVVAPFGAVA

SEQ ID NO: 84524 - protein, 496 aa, Erythrobacter aquimixticola
  misc_feature (1)..(496): tr|A0A419RQS8|A0A419RQS8_9SPHN Tryptophan 7-halogenase OS=Erythrobacter aquimixticola OX=1958945 GN=D6201_0102 0 PE=4 SV=1
MTEATPPHIVVLGGGSAGWITACLLHHRWRARGGRVTVVESPDIGIIGVGEGSTPQLKAMFDHLGIAEAEWMAACDATYKLGIRFTGWSEREGFDSYFHPFPGPVDLHSEPSFTHNCMLARRGFTVPAHPDDWFLATTLAETGRAPHPGENFPFAPSYGYHFDAYKLGAFLRDWAVARGVEHLSLKVEQVELAGVGEVAALLCEGGKRVNGDLFVDCSGFRALIAGEALGGEFLSFAANLFADRAVVAPTPRVETFRPQTEAVAMSNGWRWRIPLTTRTGNGYVYSSRYISDEDAAAELFAAVGLSPDEVAPRFLQMKVGRMANSWRGNCLAAGLAQGFIEPLEATALHIVIATALEFAEAFEQGGYTPQHRDTFNRNIAARYEAIRDYIVGHYRLNQRSDTQFWRDNAANQNLSDGLKAMFTAWFTHQDIADANAKNYKVQAYAPMSWHALFAGYGTFPPPTKMQPLPPGGSAADPAITQQMLAACATNFPKVDW

SEQ ID NO: 84525 - protein, 533 aa, Bdellovibrio bacteriovorus
  misc_feature (1)..(533): tr|K7YTV9|K7YTV9_BDEBC Tryptophan halogenase OS=Bdellov ibrio bacteriovorus str. Tiberius OX=1069642 GN=prnA PE =4 SV=1
MNTLSDHIDNAFDLSYLNFPKCPPTDIKTIGILGGGTAGYLAALALKKYHPEVEVTVIESSKIPVIGVGESTTTEIVPFLHRGLEIDPADFFREVQPTLKFGIRFDWGCPGDYKFNFSFFAGHQYESYYYENDIKNSNWPSVLMNENKIPIIRNKNGTLTSFLASIPFSYHIDNKNLIRFLNKEVKSRGIDILDAEVHEVKLDDRGYVASLESKEGHSLSYDLYIDCSGFRSKILGQALKTEFTPFTDTLVTDRALTFDLPNKDVVDCYTSVITMNNGWCWKIPMRTEDHYGYVFSSKFCDEETALAEARARFGHFEKYKMVEFRSGRHTQAWVKNVFSLGNSYGFIEPLESTAIQTAVHSINVLCRLMPKTLDDQISISGINNEIAVTWDTFRWFVGMHYKFNKKLDTPFWKHCREKTNIGHAQTIMDLFNQRPPLSAGNFGSNSQFTATEALVFNSYSYDTLIFGQKEVHKPLAAPEMSKEEYFGKLKSYQELTSRSLSLFELFKGDHLFEDEILEQLFNDTDTWIMEADV

SEQ ID NO: 84526 - protein, 517 aa, Novosphingobium sp.
  misc_feature (1)..(517): tr|A0A1W1Y567|A0A1W1Y567_9SPHN Tryptophan halogenase OS =Novosphingobium sp. B1 OX=1938756 GN=SAMN06272759_1013 79 PE=4 SV=1
MRIRCGRDTLPALHQRRIVIAGGGTAGWMTAAALGRLAAPHWQVTLVESEEIGTVGVGEATIPMVRLFNQMLGIDEAQFLRETHGTWKLGIAFEGWGGFDERYIHGFGLTGRSLGVLPFHHYWLRGRAEGMAGPLGDYVLNAVACEADKFAHIERPQGSALPPMPYAYHFDASLYAAFLRRYAEGCGVRRVEGRIVGFDRDPQNGDLAALRLDRGDVVEGDLFVDCSGFRSLLLGQEMGVDYVDWSQWLQCDRAVAVPCTRAEPLVPYTRSIAQPAGWCWRIPLQHRTGNGHVFCSDLMSEDEATARLIARLDGEQLAEPRTIRFKAGRRERFWERNVVAVGLSSGFIEPLESTSIHLIQTAISRLIDFLPNGPVQDADRDGYNRLATFEIERIRDFVILHYVANGRHGEPFWDGLRSMVGAGEVPAGLAQRLAMFRASGRIVREHDELFDVPGWVQVMIGQGIMPERWHPMADQVSPESLSAFLETVRSAYAKDVARMPSHAEYVAHVCGKVTANA

SEQ ID NO: 84527 - protein, 506 aa, Unknown
  misc_feature (1)..(506): tr|A0A2A5W8A7|A0A2A5W8A7_9GAMM Tryptophan halogenase OS =OM182 bacterium MED-G28 OX=1986256 GN=CNF02_12040 PE=4 SV=1
MDDSNLKNIVVLGGGTAGWMTASLLQKQWQHLGIKITVVESPDIGIIGVGEGSTPLLKVFFDSLEISESEWMPECNATYKNGISFNNWSTVSGYESYFHPFPCSLDFATFGLLYKYAALRRKGLDVLAHPNRFSLMAGLTEKKLAPIPSENFPFHFQYGYHFDSVLIGNFLRRRAKEIGVEHIEATVQDVEQNSNGDIKSLKLNNNQTLSGDFFIDCSGFASVLLQKTLKVPFLNFAENLFNDSAIAMPTEIEPNIPSETVSTALTNGWAWKIPLTNRFGNGYVYSSKYCSPDEAETELRAHLGVLDSDIEARHLKMKVGRAEESWRNNCVAVGLSQGFIEPLEATALQFVYATVDEFAKAFEQGEFTPQYRQEFNNRMNKNFEGIRDYIVLHYKTNSRSDSQYWIDNRENQNLSNNLKEMLNCWYGVEDIEAALTRLDIGTYYSQRSWACLLAGVGTFPREENLISADLENAQSLQDDLKYVDNFIEGCSLNFEPHENMLTSKTP

SEQ ID NO: 84528 - protein, 504 aa, Novosphingobium sp.
  misc_feature (1)..(504): tr|A0A5D0WQD6|A0A5D0WQD6_9SPHN Tryptophan 7-halogenase OS=Novosphingobium sp. BW1 OX=2592621 GN=FMM79_15135 PE =4 SV=1
MAEPQPVHFVIAGGGSAGWIAAAVLARFLPPPAARISLVESEDIGIIGVGEATVPLIGELNRFLGIHEPDFVAATNGTFKLGIEFADWGEIGNRHFHGFGDYGADIAGLPVHQHWLRLAREGKAPPLGALSIAEVLASQDRFVPHEALSGEAAQFRHAFHFDAALYAAYLRHLAEGMGVTRIEGRIEHVARDAQNGHVRALHLDGDRRIEGDVFLDCTGFASLLLGQAQGVGFEDWSQWLPCDRAAAVPCARASRFTPFTRSTAKSAGWQWRIPLQNRTGNGHVYSSAHISDDEAVAQLLDGLDGEALADPRLLRFTPGRRTRFWDGNVIAIGLAAGFLEPLESTAIQLIQTGVTRLVEFLPGKAPDPALAAEYNRQTALEYERIRDFIIAHYCRTRRTEPLWCQVAAMDLPDTLRAKLDAWDACGRVPMYDMESHQEPSWVAILLGQGVLPHAVNPRTQLLAEKDLRALLDQRRTRLARATERLPDHATFIAKTCAAKPAPAA

SEQ ID NO: 84529 - protein, 505 aa, Paraglaciecola hydrolytica
  misc_feature (1)..(505): tr|A0A136A4Z5|A0A136A4Z5_9ALTE Tryptophan halogenase OS =Paraglaciecola hydrolytica OX=1799789 GN=AX660_09930 P E=4 SV=1
MQNTLKSLCIVGGGTAGWMAATLLSSILRGSKIQITVIESPDIATIGVGESTVPSILEFIQASQINLKEFIQATSATFKLGIRFDDWHAPNQSYFHPFGKVGKDINGFDFYQAWLKSQADGQTIPWLAYSPAAVMAEHERFMLRPQQSQDWVLASYAHAFHLDAVLVARYLRELCQQRGVTRIEATVKNVIVDKKAFIRSVKLDNGATVESEFFIDCTGYSGLLIEKSLKVGFEDWSDYLPCDRAVALQTTNTANPVPYTVATAREAGWTWKIPLQNRTGNGYVYASRFCSDEEAINTLLKSVSGTLLNEPRIIPFTTGKRKKIWHNNCLTLGLASGFLEPLESTAIHLVYKTLVHFIKHFPDRDFDTDNEQRFNQLIDADYLEIRDFIILHYSTAGRDDTEFWRWCQTMPVPESLSEKIRLFKQRGLLDHTQGQFFSSDSWCSILEGMKIRPQKYHPLLDAFDSQSLATTLNKNVQDIQTAVLKMPNHHDYIQAHCSANSNMKT

SEQ ID NO: 84530 - protein, 502 aa, Caulobacter vibrioides; identical to SEQ ID NO: 83070
  misc_feature (1)..(502): tr|A0A0H3CBS9|A0A0H3CBS9_CAUVN Tryptophan halogenase OS =Caulobacter vibrioides (strain NA1000 / CB15N) OX=5650 50 GN=CCNA_02896 PE=4 SV=1

SEQ ID NO: 84531 - protein, 524 aa, Erythrobacter sp.
  misc_feature (1)..(524): tr|A0A165QDU5|A0A165QDU5_9SPHN Uncharacterized protein OS=Erythrobacter sp. HI00D59 OX=1822215 GN=A3711_06730 PE=4 SV=1
MTQVQGEGSGADPLRSICIVGGGTAGWSAAALLARVLRGSGCRITLVESSAIPTVGVGEATIPPIFDFLRNIGADEVEFIRRCQATFKLGIQFRDWLHRDHAYWHPFGNLGVTINQRPFHHYYCRNLAQGHGESLADLCPSVALAEDGKFAFPSPDGNWPGGAVAYALHFDAGLVAAFLREHAEAAGVERLDRRIVGATRGEGERIAAVQFDDGETLAADFYIDCSGFRGLLVEETLNAGFEDWKRWLPCDSAIAAPTAAQQQRAPYTVATARSAGWQWRIPLQHRTGNGLVYASDFVSDADAHEELLSGLDGEPLADARVLRFTAGLRKRAWVGNCLAIGLSAGFLEPLESTSIHLIHTGLNRLLDLFPDRGFDPALADAYNRDVWREYAHIRDFLLLHYVPNRREGEAFWDHMRGLDLPDTLAEKIELFTRTGRIMSKQRELFSDISWFYVMHGMGLEPAAIDPLVDVAPSAEVRKVIDQLSGAMKAFRSAAPTHDAILERLLDPSETRRPHFGTGGGWATR

SEQ ID NO: 84532 - protein, 561 aa, Phaeobacter sp.
  misc_feature (1)..(561): tr|A0A384GHA0|A0A384GHA0_9RHOB Tryptophan halogenase OS =Phaeobacter sp. S60 OX=1569353 GN=OO25_08725 PE=4 SV=1
MNNRLRKITIVGGGTAGWMTALILETELSRTSAPKDRPKICLIESPNIATVGVGEATVPRMPKTLRQAGISERAFFRETNASFKLGVKFCNWNTDAKGNRIDYVNPFAHGQLLEGLEPAEYFLRFGNGDRDYTQSISPHDDLGRLCKGARPLGQPEFEQRFGYAYHLDAVKFAGMLTKVCTKHGVEHIQDEVTSVELDEQGNVSHLMLEQRGRHDVEMVIDCTGFRGLIINQALGEPFMDYSDYLPNDRAMALQIDHPDPEKIESLTRSTALGAGWTWRVPLYNRVGTGYVFSSAHRTDDQAADEYLEWLGDSGKGATPRIIPMRIGRVRNAWVKNCVAIGLAGGFIEPLESTAIHMIDHAVRWLTEHMPTRDIAPSLRSRYNRQMDKLYDEVLEFICLHYRLGNRTDDQYWIDARTEMKIPDRLAENLELWQHRLPMPHDIEFATLFDYRVYQTVLLGKQVYDTGYGPGIRDRLRPLKKPIWFQWWKGAKVDLAQILKSMPDHKTLLRDIRGELDQPGFGMAAAMKPTVPMPCAEAVPCMIQNMPSFSEIENGQKDLQLF

SEQ ID NO: 84533 - protein, 498 aa, Shewanella sp.
  misc_feature (1)..(498): tr|A0A0Q0G224|A0A0Q0G224_9GAMM Flavin-dependent tryptop han halogenase PrnA OS=Shewanella sp. P1-14-1 OX=172376 1 GN=prnA_2 PE=4 SV=1
MNKNKIKDIVIVGGGTSGWMTAAMLIKLFKAQLNITLIESESIGTIGVGEATIPPLQIFNSVLGINEADFIKQTQASFKLGIQFENWGKDKDSYMHAFGNFGKDIGYTQFHHYWLKSSPQNAHSFWDYSLNYQAAAENKFAPIDTIKGSPLAGITHAYHFDASLYAQLLRQYSENLSVKRLEGFISSVQLKQEGDIRSVTLKDGQVINGDLFIDCSGFAALLIAQQLNVSYENWQHWLPCDSAYAVPCERSEPLVPYTRSIAHKAGWQWRIPLQHRTGNGVVYSSQHITDDEAKSLLLNNLDGKPLAEPKKISFTTGRREKQWHKNCVAIGLSSGFLEPLESTSLHLVQSAIIRLTKFFPHQGIQQSSVDEYNRQSKLEFEQIRDFIILHYHVNQRSSSSNKTDLWQQCRDMPIPASLQQKIDCFRTTGTVTRYQDELFTEAAWIQVLLGQGVTPKDYNPLANNINQSDLTEFLSNVKQIISGAVTNMPTHNDYIQRL

SEQ ID NO: 84534 - protein, 520 aa, Paraglaciecola mesophila
  misc_feature (1)..(520): tr|K6Z3Y0|K6Z3Y0_9ALTE ATPase OS=Paraglaciecola mesophi la KMM 241 OX=1128912 GN=GMES_2797 PE=4 SV=1
MSNRSIKNIVIVGGGSAGWLTAGIIAAEHQCGLQQSKVNVTLIESPDVNIIGVGEGTWPSMRNSLQRMGISETEFIRHCGAAFKQGSKFVGWKNGTDNDFYYHPFVIPSGYGKANQYSAWKTYASEHPFADVVCAQSHICQAGLAPKQNATPEYAGVLNYGYHLDAGKFGQLIQQHCVAKLGVRHIQDHVEGVISQDNGDIKALQTRQNGELAGDLFIDCTGARSLLLGQHFNVPFIDKSDVLFNNSAMALHVPYTNDDEPIVSATVSTAQEAGWVWDIGLQDRRGVGYTYSSKHADDEQAQRTLKAYVAQSIGPERANALEARKINFEPGHRSHFWHKNCVAVGLSAGFLEPLEASALALVELSATAIAENMPVTTEHMHIIRDNFNQRFLLHWENIVEFLKLHYVLSERNEPYWQQMRAPESISPRLKALLTQWRFQPPNRSDFVQNEIMFPSASYQYVLYGMGFETLNDVSSREFDTPQSAVKHLQENQQHVRKLMAGLKSNRLLLEHVKHYGFQKV

SEQ ID NO: 84535 - protein, 295 aa, Sphingomonas sp.
  misc_feature (1)..(295): tr|A0A520FSZ1|A0A520FSZ1_SPHSX Tryptophan 7-halogenase (Fragment) OS=Sphingomonas sp. OX=28214 GN=EOP66_01975 PE=4 SV=1
MAATLLARKLDRQSVTITVVESSDIRTVGVGEATVPGIRDFFREIGVTEQEVMATAQGTVKLGIEFVDWNRDGERFFHPFGLYGMRSRGVAFHHYWRKLNAAGQTTPLSDFCLATALAERNLFMQPTDSPVHDLLFFDWAVHFDAGLFAKFLAKKAGEWGVAHVDATITDVLVDQATGFISSVDTQCGKTIAGDLFIDCSGFRSLLLGDALGVPYEDWTNLLPCDRAVAMPSERAGPLTPYTRSTALTAGWQWRIPLQHRVGNGYVYASRHISDDEAVATLKGRLEGEALAEPNM

SEQ ID NO: 84536 - protein, 500 aa, Sphingomonas sp.
  misc_feature (1)..(500): tr|A0A326GFD3|A0A326GFD3_SPHSX Tryptophan 7-halogenase OS=Sphingomonas sp. OX=28214 GN=DI625_16465 PE=4 SV=1
MPHEPVRSIVIVGGGTAGWMAATYLARRLAHLNLSITVVDSAAIGTVGVGEATVPAIRDFLSAIELGEADVLRETGGTIKYGIRFDGWGGEGHRFFHPFGLYGVGAEGVAFHQYWLRLNALGKAGPLADYCLATQLARNGLFLPPVDRPANDIGVFNFALHFDAAAFAALLRRLALANRVAHVDGRIVSVATDQPRGLVTQVTLEDGRTIAGDLWIDASGFRSLLLGEALGVPYVDWRHWLPCDRAVAIPCRAAPGDPTPYTVATARKAGWQWRIPLRHRIGNGSVYCSSFQSDADAEDALLATLEGAPLADPNRLRFVTGHRARFWSGNVVGLGLASGFLEPLESTSISLIQSGLERFVALFPDRDCDPRLAATYNRQSVLEFERLRDFLFLHYLANGRDEPFWQAIRAVEPPAPLQIKLDAWRSGGEFVRNEWDTFQDPSWLSLYAGFGDLPDRHSPLADAIGEDALLESFGRMRAAIARTLSHAEPHGAFLARVAGA

SEQ ID NO: 84537 - protein, 511 aa, Sphingomonas sp.
  misc_feature (1)..(511): tr|A0A2E2ZPG0|A0A2E2ZPG0_SPHSX Tryptophan halogenase OS =Sphingomonas sp. OX=28214 GN=CMN73_00530 PE=4 SV=1
MTAAPAPIHTLVIVGGGTAGWMTAAAVSRLCQAGVSVTLVESDAIGTVGVGEATIPSLHDFNAAIGINEQQFVAATQGTFKLGIEFVDWGKAGDRYIHPFGKYGRQMFGIGFHQIWLRQHLLNDPASDPGPIDDYAIAAAAARRGRFARPSTNPEAVLSSLSYAYHLDAGLYAGYLRNYAEAQGVRRVEGRIGSVEQDGETGDITAVVLEDGRRIAGEFFVDCSGFRSLLLGETLGVPYRSWQHWLPCDSAIAIPTQHAGPPIPYTRSSAEASGWRWRIPLQHRVGNGHVFSSAHVDDETALERLLAGLDAKPIADPRTLRFTAGRRERLWEKNCVAIGLSGGFIEPLESTSIHLIQSGIFRLMSLFPDTGFSLREIDEYNHWLVEEYEHIRDFIILHYHATARDDSDFWNHCRTMEIPDSLAEKLALWREKGRLFPAHNSLFTAESWIAVLLGQNIVPQGSDPLVAALPVDETNRFMAHLRGVIAQTAEAMPAHQDFIAQHCAAQQAQPA

SEQ ID NO: 84538 - protein, 508 aa, Paraglaciecola hydrolytica
  misc_feature (1)..(508): tr|A0A136A3P7|A0A136A3P7_9ALTE Tryptophan halogenase OS =Paraglaciecola hydrolytica OX=1799789 GN=AX660_07520 P E=4 SV=1
MQPTQDPIKKIVIVGGGTAGWIAAATLGNIFKNSDLKIELVESEEIGIIGVGEATIPPFLAAIKSLGIDEVDFIQATQASFKWGIKFEDWRQKGEAFFHPFGSIGRSIDGHDFYQCWLKTQAEGDTTPLMAHSPEAMLSENGRFFLPFNAMNTPLANAQYALHLDSALVGQYLRRFAENLGVTRIEGKVERVECKPCGDINSVSLVSGHVLTGDFFIDCSGFQGLLIEQTLKSGYENWSEYLPCNRAVTVQTENVGPPPPYTVATARDAGWTWRIPLQHRTGNGYVYCDKYCTDQEAIDTLLSAVEGPTLTEPRVIPFVTGIRKKPWNRNCLALGLAQGFLEPLESTAIHLVSKTLALFVRMFPDNQQDPIQIDEFNRRVLLDYQEIRDFLVLHYCTTQRSDTPFWRHCASMPIPTNLQQKLAFFSVAGGLIPGVEELFQPNSWYSIFTGMGVQPQRYNPTLDALDYGKLHVSLQRGHQAIMQCVQQQPTHQAFLQQYCPAPKPSNKL

SEQ ID NO: 84539 - protein, 505 aa, Paraglaciecola mesophila
  misc_feature (1)..(505): tr|K6Z7X1|K6Z7X1_9ALTE FADH2 O2-dependent halogenase I OS=Paraglaciecola mesophila KMM 241 OX=1128912 GN=prnA PE=4 SV=1
MNSEKKQSTQNGRKLQKVQKVVIAGGGTAGWMAAASLSKLLGKSLDVTLVESDEIGTVGVGEATIPPIRTLHKLLNIDEQAFMRATNSTFKLGIEFNNWGQKGDSYIHSFGVTGKECWAGEFHHFWLRGKELGIDIPFGDYCYELQASKQGKFAFSANAPMNFAYHLDATLYAKFLRVFCTDSVTRIEGKIQQVNKHQESGFIQSLTLESGQIVEGDFFIDCTGFKGLLIEEALHTGYEDWSHWLPCDSAVAVQTQANSDPLPYTRATAHEFGWQWRIPLQSRVGNGMVFCSRYTSDDQAKATLLANLDGVPINEPRVIKFKTGRRRKGWNKNCVALGLASGFVEPLESTSIHLIMTGIVRLMRLFPFDGVRQSTIDEYNEKLTSELHSIRDFIVLHYKVTTRDDSPFWQHCQSMEVPASLAHKIRLFKETGRVFLDDGDIFRVDSWTQVMLGQGLEPEQYHRIVNEMNKDELTRFLAGMRSAIEQRVAQLPSHQQFIQRYCKAS

SEQ ID NO: 84540 - protein, 509 aa, Caulobacter vibrioides
  misc_feature (1)..(509): tr|A0A0H3CA91|A0A0H3CA91_CAUVN Tryptophan halogenase OS =Caulobacter vibrioides (strain NA1000 / CB15N) OX=5650 50 GN=CCNA_02898 PE=4 SV=1
MTSAPIRDVLIVGGGTAGWMTAAALAKALPKTIAVTLVESEQIGTVGVGEATIPPINTFNQVLGLDEAAFMRATKGSFKLAIEFVDWMGPGHRYLHPFGGFGLDIEALKFHQVWLRAHHEGWAPPIDAFNLSAQAAHLNRFAPPSKDPGQVLSSLKYAFHFDAGLYAKFLRDYAEPRGVTRVEGKVAGVQQHGETGFVTGVTLEDGRVLEADLFVDCSGFRGLLIEQTLQAGYDDWSHWLPNDRAVAMPCVTGGDGLTPYTRATADAAGWRWRIPLQHRTGNGYVYSSRDISDEDAVARLRATLDGEPLAEPNFLRFQAGRRKAAWVKNVVAIGLSSGFLEPLESTSIHLIQAGITKLLALFPDRGFDPVEIAEYNRLTALQVELIRDFIILHFKANARSEPYWVRARQMDIPETLQRKIDLFAASGRLFPSDLDLFAEPSWIAVLLGQGITPRRHDPLVDAFDEAFLKSQLSRLAGLIRQTAQALPTHEQFIARYCAAPHASRPEFKP

SEQ ID NO: 84541 - protein, 524 aa, Sphingobium sp.
  misc_feature (1)..(524): tr|A0A2E9CV61|A0A2E9CV61_9SPHN Tryptophan halogenase OS =Sphingobium sp. OX=1912891 GN=CMN64_25115 PE=4 SV=1
MRDEKNTLNPNAVRKVVIAGGGTAGWMTAAALSVDLADAGVEIELIESPEIGAIGVGEATVPFIHLFNKMLGIDQADFMKQCNATFKLGIEFINWGNLNESYFHSFAHFGPNFKDVSFYHMYLRQAELMAAKGVETVLEDSNVGAVAARNNRFRHPQTVEKSGLPSHFYAFHFDATLYASYLRDFATQRGVRHVSGRIIDVEQNPENGFIRSVRLQDGREFEADLFVDCTGLYGLLIEKVLKSPYEEWSHWLPCDRAVAVPSARVEAPVPYTKSTAEKSGWRWRIPLQHRTGNGMVYSGAFAESDDAVEAKLLDVLDGKALASPRRLRFTPGRRREVWVKNCVSIGLASGFLEPLESTNIHLVQSSILKLLSYFPDKNFAQAEIDAFNADMQKEIEQIRDFIILHYKVTGREDTPFWKYCKYMAVPDTLQRRIDMFKPHGRLFVKPDEFFNYNSWLSVMHGQGLRANGLVPQLDRLTDQEVLAYFEAFNGRVRSVVGAMPLHGDYLHAFAGASEQTPVPAFGEL

SEQ ID NO: 84542 - protein, 545 aa, Sphingobium sp.
  misc_feature (1)..(545): tr|A0A2W6WFY9|A0A2W6WFY9_9SPHN Tryptophan halogenase OS =Sphingobium sp. OX=1912891 GN=DI547_01995 PE=4 SV=1
MSGARSILIVGGGTAGWLTAAYLARFFGTGRPVRITLLESPDIGTIGVGEGAFPTIRATLRFLDIDESQFIRAVSGTFKQGIRFDDWLHAPAEGRRHRYLHPFEPPFHADGVDLVAHWLAQDPARRPPFAQAVTIQHRVAEAGRAPKQAGEGAFDGPLSYAYHFDAQRLGQVLGERARELGVRHLAGRLGHVALGPDGAIDHVLTDTHGALSADLYIDCTGFRAELIGGALGARFASARDRLFTNRALACKLPYARPDAPLQTMTIAAAHDAGWTWDIGLADARGIGTVYSDDHMDDDAALAVLARYTGVAPDRLEPRLLSFDPGHRPQQWVRNCVAVGLSGGFLEPLESTGLVLIEAAIAMIAELFPHRGPLDAPAARFNGLMAARYEAIADFLKLHYCLSRREEPFWRDNVAPGSVSGRLRDLLDQWRHRPPNRFDFTLDVESFAFFNYQYILYGMDFACDARDPAGTASATEPDRLFRRIAAFGEQAVAELPQHRALIDSSPDNRLPYRSPRRIGWAERARVTPMDRKQETDGCRSGTSRRS

SEQ ID NO: 84543 - protein, 506 aa, Erythrobacter sp.
  misc_feature (1)..(506): tr|A0A166GS08|A0A166GS08_9SPHN Tryptophan halogenase OS =Erythrobacter sp. HI00D59 OX=1822215 GN=A3711_03365 PE =4 SV=1
MTERAQAIRNVVIVGGGTAGWMTAAALARLLGGTGLAITLVESAVIGTVGVGEATLPQIRRFNSLLGIDEREMMARTAATIKLGIEFRDWGRVGDSYIHPFGRFGEEIGPVAFIDCWARMHARGKAAPIGEYCLPIVAAMKGRFEPPHGDGTRQPYDYAFQFDAGLYAAWLSELAQSAGVVRREGRIVDVARNSESGAISAVSLEDGAAIRGDLFIDCSGFRALLIGETLETPFEDWSHWLPCNRAFAVPCANGGDYGPYTRATARAAGWQWRIPLQHRVGNGLVYCDAFWDDADAAEALMANLEGEPGAEPRQLRFTTGRRSALWRSNCVAIGLAGGFLEPLESTSIDLIQSGILNLVELFPHTAIEETDRREYNRLMDLEFERIRDFLVLHYVANQREEEFWQAMRAMPLPDSLSARIEDFRERAILPDYADGLFQPVSWISVFLGQNVVPRRWDPRADAMNADELGKRLTAIHGKIADDAAAMPLHLDFLERAGARYGYGAGQ

SEQ ID NO: 84544 - protein, 503 aa, Sphingobium sp.
  misc_feature (1)..(503): tr|A0A2W6X2S0|A0A2W6X2S0_9SPHN Tryptophan 7-halogenase OS=Sphingobium sp. OX=1912891 GN=DI540_07090 PE=4 SV=1
MHADFPTSDRVVKRVVVAGGGTAGWVTATALVRHLGPLIDIILIESDAIGTIGVGESTVPTFRGFHQLMKIREDRFMAEAQATVKLGIEFKNWGRVGDRYIHPFGTIGLQWSWMADFHHFWLHARAQGFGGELGEYCLEWVAGEANRMSLSSSVAPSYAYHIDAARYARFLRSLAEPAGVKRVEGKIRNVELAPERGHIAALVLESGTRIEGDLFIDCTGFRSLLLGEALGVGFEDWGQWIRTDRAVAVQSTSDGPAQPYTSAIAHEAGWRWRIPLQHRDGNGFVFASDFMSDDEAHARLLAEIEGEPIVDPWLVRFKTGTRTKAWHKNCVGLGLAGGFIEPLESTSIHLMMAAVTRLIEDFPFNGFDDALLDHFNRKSRLEFENIRDFIILHYHVTQRDDSPFWDHCRTMEIPDSLKERLALWQENGRAYQLGHELFRVDSWSSVLLGQGMHPRGYHHVAAMMPEPQLREELARMRKDIAGVVAEMPSHREFLRRYCPAELV

SEQ ID NO: 84545 - protein, 503 aa, Pseudoalteromonas neustonica
  misc_feature (1)..(503): tr|A0A558IWW6|A0A558IWW6_9GAMM Tryptophan 7-halogenase OS=Pseudoalteromonas neustonica OX=1840331 GN=FQP85_015 90 PE=4 SV=1
MKAIEKIVILGGGSAGWMTAAMLAKVFSKQLSITLIESPDIPTVGVGEATIPAIQTFNNVLGLDEHVFLKRTQGTYKLGIQFENWGQQGDSYQHAFGDIGRGLGITPFHHFWLKSNQSKTTQTLWDFSVNAIAANHNKFHPNPQIGKTPLAGLTYAYHFDAGKYAKLLQEFAIAQGVEYLSGTMESVKLDDNGLIKTLELSDEQTIKGDFFIDCSGSSARLIEQALGVKYQSYQHWLFCDRAIAVQTKPLKNTPPFTRSIAKDAGWQWQIPLQNRVGNGLVYSSQFMSAEQAEQQLLNSLETETITAPKHIKFTPGRREQQWFKNCLSIGLSSGFLEPLESTSLHLIQTSIARFIKLFPAHPDCELSAHAYNLQAKNEFEKIRDFIILHYAVNQKQSPFWQRCGAMTLPDSLQQRIALFKRTGTLSIQADELFSEVAWLQVLIGQGIRPQSYHPLARAISDSELDEFLSNIATIQQQYVTHLPTHEQYLQRFCRCSELAKGQI

SEQ ID NO: 84546 - protein, 500 aa, Paraglaciecola mesophila
  misc_feature (1)..(500): tr|K6YKA3|K6YKA3_9ALTE Tryptophan halogenase OS=Paragla ciecola mesophila KMM 241 OX=1128912 GN=GMES_2120 PE=4 SV=1
MAQPFKIVILGGGTAGWMAANLFAHKWAGKLNDKSLRVTLVESPDIGIVGVGEGSTPTLKRFFSMLGIADGDWMPQCNATYKMNIAFEDFSPASGIKRYSHPFISQLDTFTQRAFMVNARTRRLGLDTHTNPDDFLLNGVLAKQNKGPQTPDNFPFNIEYGYHFDSHLLGAFLQQHAIGLSVEHVQANVESIKQHPNGDIAELHCKEGMVINGDLFVDCSGFSSALMQKTLGVKFNSYKDNLFNDSAVVVPTPISEHIPVETTSTALSAGWCWKIPLTNRFGNGYVYSSDFIDSSQAERELKQHLNLSEDSDCRHLSMKVGALAQQWQNNCLGIGLSAGFIEPLEATALHLTQISIEQFILEFEEGGFTNRLQGQYNAKMQHRTERTRDYIVAHYKLNTRNDSEYWRANRNNMHLSESLLQILDVWYKRGDLEAEIKRQDLSTHFNAVSWNCLLAGYGAFPPLATKQPGSGDLYLEQKIESFLHGCALNFEDHRTNLHNH

SEQ ID NO: 84547 - protein, 502 aa, Pseudoalteromonas neustonica
  misc_feature (1)..(502): tr|A0A558IG90|A0A558IG90_9GAMM Tryptophan 7-halogenase OS=Pseudoalteromonas neustonica OX=1840331 GN=FQP85_199 20 PE=4 SV=1
MAIINKLVILGGGSAGWMCAAYLSKQHPELAISVIESSKIGSIGVGEGSTPHLKNFMDSLGISEQQWMPKCDASYKAGIYFNNWNGDERCYFHPFYSDMDEKTAEVYFVNANARRRGNGDWQAPDEYFLTGHIAKQNLSPKVHTPMLKEQTYGYHFDAIKLAGVLKAYAQENGVEHIDGEFSHAHINNNGNIADITLVDGRQINGDMFIDASGFNALLIEQTLGTPFNSFADELLNDRAVAVATPISSDAVMPCATQSTALSAGWCWQIPLTSRIGNGYVYSSKHITDEQAQYELALQLNINPQNSAFRHLKMKVGCMQSAWQSNVMAIGLAQSFIEPIEATSLMVTQHSIKLFSQALTKLKNNEQSLKVAEHVNQQLHQLVYGIKDYVVAHYATSLRTDSEYWLTAKQLNHSSSALKSLLKAWLNGDDFDAYLSKLTQQQVYFRPSWYCLLGGMDYQSSRCQQSFEPACAAICNGAKMYLHELCNKHCKPHAEQLRAMKTA

SEQ ID NO: 84548 - protein, 419 aa, Caballeronia telluris
  misc_feature (1)..(419): tr|A0A158F360|A0A158F360_9BURK Tryptophan halogenase OS =Caballeronia telluris OX=326475 GN=AWB66_00462 PE=4 SV =1
MNTSTLDHRNVDVDVDVAIIGAGPSGAVAAAMLRKAGRSVRVLERQQFPRFSIGESLLPQSMAYLEEAGMLRAVVEAGFQYKNGARFVRRDETSAYDFRDKHSPGWGTTYQVERATFDDLLIRCAAAQGADVRFGHTVHAIETGERPALDVTDENGTPYRLQARFVLDASGFGRVLPRLLNLETPTGLPTRAALFTHVRDDMPLCAIDREKISVVVHPEHGDVWYWMIPLAGGRASVGCVAEGDFLQCAEDERESRLRSLIRQEPTLGAWFGDAPFLMPVRTIGGYSANVERLHGPGYALLGNAGEFLDPVFSSGVTIALRSAHLAARVLVRQLSGETVDWQVQYDDELRRGIDVFRAFVERWYSGELQAILFYPEQTPQIRRMVSAVLAGYAWDETNPFVRDAARRLDALYEVCKTNG

SEQ ID NO: 84549 - protein, 521 aa, Sandarakinorhabdus cyanobacteriorum
  misc_feature (1)..(521): tr|A0A255YDB0|A0A255YDB0_9SPHN Tryptophan halogenase OS =Sandarakinorhabdus cyanobacteriorum OX=1981098 GN=CHU9 3_10610 PE=4 SV=1
MGVTEDGAFRIVIAGGGTAGWLTACVLAARHPQLDITLVESPDIPTIGVGEGTWPTMRETLASIGRGEAEFMAACDASFKQGSRFDGWVTGAEDDICLHPFTLPPPGNMAALLHAWASTAPARRFAEVMTAQAAACAQDLAPRQRGMPDYAGALNYGYHFDAGKFAKLLTRHATGRLGVKHVPAEIVGTIAADNGDVAALVLADGRQLAADLFIDCTGQAARLIAGHCGVAWIDRSHVSFNDRALAVQGPVAQGSPIASQTIGTAHRAGWIWDIDLPTRRGIGCVYASRFMSDDEAHAVLCAHVAAKVPGADVTALAPRRLAFATGHRARFWQGNVVAVGLSAGFIEPLEASAIVLIELSARALADALPASRAAMDIHARRFDDMFHTRWDRIVDFLKLHYVLSRQSEPYWQAQRDPASLSPRLAEDLVLWREQPPSARDFPLHDEMFPPASQHYILYGMGHALPPAPPAPAIAAAAARLAEVQARSRQLGAALPENRIYLAAGAAQAACGPHASWPIIRS

SEQ ID NO: 84550 - protein, 507 aa, Pseudoalteromonas piratica
  misc_feature (1)..(507): tr|A0A0A7EKQ9|A0A0A7EKQ9_9GAMM Tryptophan halogenase OS =Pseudoalteromonas piratica OX=1348114 GN=OM33_16010 PE =4 SV=1
MNVADPIKRIVIVGGGTTGWMAAASLSRYVQDKDMTLTLIESPDINTVGVGEATIPNFVDFNRNLGINDAELIKATQATFKLGIEFEEWSQKGERFFHPFAAYGAPIENLDFHQYINKLNAEGKQLDIEDYSFPIQLAKKGGFAQPNPNQNNPLAQYSYAYHIDAVLYAKFLTEFSVKRGVDHILANVSEVKLNAENGFIQALTLDNGKHIEGDLFIDCSGFKGVLIEGAMGIGLDDLSHLLPCDSAVAVQTELVGEPTPYTRAIAKEAGWQWCIPLQHRMGNGYIYSSKFTSDEEAKQSLLNSVKGRTITDVKTFKFPLGRRKVSWHKNCFALGLAAGFLEPLESLGISLIQTALAKLMTFFPDMSFNQADIDEVNRLHNDELDRIVDFLLVHYKLTQRTDTAFWRYCQEMPIPKTLEHKIAMYKNRGHVVMYDNESFQQASWLSMFYGFNVSPSRYDVRLDHFNSSAIAESLAKMKAQITMAANNCLSHQAFIDKHCKANNDVKN

SEQ ID NO: 84551 - protein, 520 aa, Aliikangiella sp.
  misc_feature (1)..(520): tr|A0A545UHJ1|A0A545UHJ1_9GAMM Tryptophan 7-halogenase OS=Aliikangiella sp. M105 OX=2592383 GN=FLL46_05180 PE= 4 SV=1
MTESIDRVLVVGGGTAGWLSAAILARSFNSHLPGAVKVTLVESPDIPILGVGEGTWPTIRATLKKIGVDESEFMKECDATFKQGSEFVNWMATDDYTTHRYFHPLSAVFHSAYDFSLAPYWLSGSANDLPYDIAVASQTAICKMGLAPKKITTPAYEAIQNYSYHLNANKFAAFLTRHCVEKLGVEHLVANVTDVELDEAGFIRAVNTDNHTIESISADFFVDCTGGRSILLGGALGVPWKKIDDVIFNDTALAMQVPYQTSDAPIATHTIATAHDAGWTWDIGLSNRRGVGYVYSSQHTTDEKAEETLRRYVGESADQLEARKIKLNLGYRTQFWKSNCLALGMSAAFIEPLEASAIFLIDAGATMLAAQFPRTKNEIAFVEKQYNKTFSLRWNKTLDFIKLHYCITNRRDTEFWVDNCREETIPDSLKEKLSFWKKHPPGKYEFDNAFEPFVLDSYLFVLYGMNFETDIKSIKAVYDRHAEARKRFEEVTKLTQFLSRELPKQRELVEKVYQYGFPAI

SEQ ID NO: 84552 - protein, 447 aa, Caballeronia calidae
  misc_feature (1)..(447): tr|A0A158D0B5|A0A158D0B5_9BURK Tryptophan halogenase OS =Caballeronia calidae OX=1777139 GN=AWB78_04584 PE=4 SV =1
MSEATQTQAQQTWDVVVIGGGPAGATAATLLADRGYRVRVLEKARHPRFHIGESLLPANLRLFDKLGVADEVRAIGMVKLAAEFVSPQHDNRTQRFFFADAWDKSMPSAYQVRRSELDDILLRNAAKHGAHVSEGCRARDVAFAPDGSNATINAEHDDGRTEQVRARFVVDASGRDTLLANHFKTKRRNERHNSSALYGHFRNAQRNEGANEGNITVFWFEHGWFWFIPLADGATSVGAVVWPAYLKQRPKGTSVEAFFRETIALCAPLAGRLKDAELISDVHATGNYSYTGDMTHERNFLLLGDAFAFIDPVFSSGVMLAMQSAFAGAEAIDKALANPAHAQAALAKFDRDMRHGPREFSWFIYRMTSPTMRNLFMGPKNPLRMKEALLSLLAGDIFGTTPIWHSLRAFKSVYYIAAALDWRNSLRAYRQRRRNLSDAERAEPSAN

SEQ ID NO: 84553 - protein, 498 aa, Pseudoalteromonas translucida
  misc_feature (1)..(498): tr|A0A0U2V4I5|A0A0U2V4I5_9GAMM FADH2 O2-dependent halog enase I OS=Pseudoalteromonas translucida KMM 520 OX=131 5283 GN=prnA PE=4 SV=1
MNNKITNVVIAGGGTAGWITAALLNKVLGNVINITLVESDQIGTIGVGEASIPPILHLNGALGINEQEFINATQATIKLGIEFENWREQNHKYMHAFGSIGKDFPFCEFHHFWLKAKQQNRAPDLWDFSVNYQAAKAGKFAHLRNLPNTQLLGLHYAYHFDATLYAKLLKKLAQQRGVKRVEGKIKSVQQCQQSGDIQALTLESGSVIKGDLFIDCTGLSALLIEKTLNTGFEDWSHWLPCDRAVAVQSESANEPVPYTRSIAQNAGWQWQIPLQHRVGNGLVFSSRHLTDDEAKQQLLANLPGKAITEPRVIRFKTGRRRLQWHKNVVAIGLSSGFLEPLESTSIHLIQTAAIRLIKMFPHNGIKHSQVTTYNLQSKTEIERIRDFIILHYKLTTRTDSAFWRQCQQMSIPETLQQKITLFKQTGKIIREDDELFAEPAWQQVMIGQGLAADDYHPLANALTDEQLLALFSDLKALINHTVEQLPSHSEFLSRMKNN

SEQ ID NO: 84554 - protein, 503 aa, Sandarakinorhabdus cyanobacteriorum
  misc_feature (1)..(503): tr|A0A255YJF4|A0A255YJF4_9SPHN Tryptophan halogenase OS =Sandarakinorhabdus cyanobacteriorum OX=1981098 GN=CHU9 3_08000 PE=4 SV=1
MPDQPFQRLVIAGGGTAGWMTAAALARFCGPAWQIHLVESDAIGTVGVGEATIPQVRLFNAGLGIDEADFLGATQGTLKLGIEFVDWWQPGHRYMHNFGEVGRGLGVVPFQHWWAAARAAGVAADYGHYSLNERAARMGRFAPFAGDNTLPPLVWAYHFDAGLYAAYLRRYAQQRGVTRHEGRIARVETQGETILALHMDDGRRLAGDLFIDCSGFRSLLLGETLASGWHDWSHWLPCDRAVAVPCAHAPGGPLAPYTRSTARAAGWQWRIPLQHRIGNGHVFSSAHLSEDEATAVLLANLDGPALAEPRSLRFQAGRRDRVWIGNCMAIGLSAGFLEPLESTSIHLIQSAIARLLALLPGDAGELPVLAAEANRQAAREMEWIRDFIILHYKATARADTPFWAKMQAMDVPPDLADRIALFQATGRIRRDHDELFTELAWAQVLIGQGLPPARPHPLTGGIGRDDLAGFMTSLDRAIAAGAAALPGHEDWLAKHAPAREVRS

SEQ ID NO: 84555 - protein, 504 aa, Pelomonas sp.
  misc_feature (1)..(504): tr|A0A0Q7BF65|A0A0Q7BF65_9BURK Tryptophan halogenase OS =Pelomonas sp. Root405 OX=1736529 GN=ASC81_13155 PE=4 S V=1
MNPTPAQPIQRIVILGGGSAGWMAAAALSHAFHSKRSIHVVESEAIGTVGVGEATIPQMRAFNHALGLDESEFLRRTQGTFKLGIEFVDWGQRGERYMHTFGGVGRDLGLASFHHFWVRMRNEGKALPLDAYALNSLMGEANRFSREARPVQGDGPGSPVSYAYHFDAGLYAATLRQISEARGVRRTEGKVVRALQRPADGFVTALLMENGEQIEGDLFIDCSGFRGMLIEDTLHTGYEDWTHWLPCDRAVAVPCGSVAPLTPFTRATARTAGWQWRIPLQHRIGNGHVFSSAHISEDEATAQLLANLDGPALADARTLRFRTGKRKKMWHKNVVAMGLASGFLEPLESTSLYLIQSSLSRLIQFFPDTDFHQPDIDEHNAQADEEFERIRDFIILHYHLTRREDSAFWRQVRTMAIPESLSRKVQAFAHAGRLHPAQRDLFSDPSWLQVMVGQGLVPQRNHPLADHLSGAECEFFLQHVGRQLQAIAMKLPDHADYVRNYCTA

SEQ ID NO: 84556 - protein, 520 aa, Cellvibrionales bacterium; identical to SEQ ID NO: 83680
  misc_feature (1)..(520): tr|A0A1Z8TSU4|A0A1Z8TSU4_9GAMM Tryptophan halogenase OS =Cellvibrionales bacterium TMED49 OX=1986842 GN=CBC09_0 6725 PE=4 SV=1

SEQ ID NO: 84557 - protein, 410 aa, Caballeronia calidae
  misc_feature (1)..(410): tr|A0A158CY84|A0A158CY84_9BURK Tryptophan halogenase OS =Caballeronia calidae OX=1777139 GN=AWB78_04444 PE=4 SV =1
MNATVDVAIIGAGPSGAVAAALLRRAGRSVLVLERQHFPRFSIGESLLPQSMAYLEEAGMLRAVVEAGFQYKNGAHFVYRDQASAYDFRDKHSEGWGTTYQVERAVFDDLLIRCAAEQGAEVRFGHSVLAMNPGDAPTLEVADEAGTRYRVNARFVLDASGFGRVLPRLLNLEAPTRMPTRAAIFTHVRDGIPAGVHDRNKITVAVHPDHRDVWFWMIPLANGRSSVGCVAEAAFLDVPEAAREDKLRSLIRSEPTLNRLIGDAPFLMPVRHIGGYAANVERLHGAGYALLGNAGEFLDPVFSSGVTIALRSAHLAVETLERQLEGESVDWNAQYDVPLRKGIDTFRAFVEGWYTGKLQDIIFSREQTPVIRRMISALLAGYAWDETNPYVVEPVRRLNALRQACVQREC

SEQ ID NO: 84558 - protein, 502 aa, Sphingomonas sp.
  misc_feature (1)..(502): tr|A0A2E1YVQ6|A0A2E1YVQ6_SPHSX Tryptophan halogenase OS =Sphingomonas sp. OX=28214 GN=CMN72_03115 PE=4 SV=1
MTDHAIRDVVIVGGGTAGWMTAAALSRFLGGGGTRIRLIESEQIGTVGVGEATIPTIATFNQMLGIDENDFLRHTQGTFKLGIEFVEWRQIGERYFHPFGQFGRDIEGANFHQLFLKLASRGLAADIWHYAPCAMAAAAGRFNRTVDPTFGPMPYAFHFDASLYARYLRGYAEARGVERIEGRISDVALRGEDGFVDTLTLDDGRSVTGELFIDCSGFRGLLIEEALESGYEDWRHWLPCNRAVAVPTANIGDPPPYTRATARSCGWQWRIPLQHRTGNGYVYTNEYLSDEDACAALLNSVEGEPLGEPRFLSFVTGRRNRFWNRNVVAIGLSGGFLEPLESTSIHLIQTGIAKLLALFPDTRFLEVEAGEYNRLMRAAYDGVRDFIILHYHATTRDDSPFWNHVRTMDVPETLARKIDLFRAKGRFFRYDDELFSLASWVAVLLGQGIIPKGHDPLVGAMDENSLAHRVEELRQSVRRSVAAMPSHAEFLRAHCAAAPLQR

SEQ ID NO: 84559 - protein, 515 aa, Novosphingobium sp.
  misc_feature (1)..(515): tr|A0A1W2ASI6|A0A1W2ASI6_9SPHN Tryptophan halogenase OS =Novosphingobium sp. B1 OX=1938756 GN=SAMN06272759_1056 3 PE=4 SV=1
MIGSVEQVVIVGGGTAGWLSACLLAARRPELAITLAEAPDIPTIGVGEGTWPTMRETLATIGIAEAEFLSECDASFKQGSRFDGWVDGSAQDSYLHPFTPPPPGDMAAMLQAWRTEAPGLPFARAMTPQALVCDENLSPRQRAMPDYAGALNYGYHLDAGKFAALLKRHATTRLGVTHVSAQVTAIADDEQGKIASLCLHDGRELAGDFFIDCSGLASILIGRHCAVPWVDRSDVSFNDSALAVQVPVEHGTAIASQTIGTAHEAGWIWDIALPTRRGIGCVFSSRFMDDARAEEVLRSYIAVKVPGADIAALRPRKLTFSTGHRERFWQGNCLAVGLSAGFIEPLEASAIVTIELSIKALAENFPRRAETMGLLADRFNQLFRYRWDRIVEFLKLHYVLSRRTEPYWQAQRDPATVPARLAEVLELWRDQPPSVWDFPRMDELFCAASQQYVLYGMGFPVPAGAADPAAAQAFADVRQRSRALAAALPSNRTYLDALRPVADADPIAMHGAAAK

SEQ ID NO: 84560 - protein, 494 aa, Paraglaciecola hydrolytica
  misc_feature (1)..(494): tr|A0A136A6M3|A0A136A6M3_9ALTE Tryptophan halogenase OS =Paraglaciecola hydrolytica OX=1799789 GN=AX660_04725 P E=4 SV=1
MQNNEVKKVVIAGGGTAGWVAAAALSKKLGQFVEVILVESDQIGTVGVGEATIPPMKVFHSLLGIDEQEFMAATEATFKLGISFKNWGQIGDHYIHPFGTTGQSSFLADFQHFWLHGKSKGINAEFGEYSFEIQAAKAGKFATSKNSSINYAYHLDATRYAQYLRQFSEKLGTKRIEGKIQLVQQHANGDIKALQLESGQVIDADLFIDCTGFAGLLIDKTLKTEYEDWSHWLPCNSAIAIQTESVGAAAPYVTCTAHHAGWQWHIPLQHRVGNGNVFCDKFMSDVEAKKHLLDNVQGAVLTEPRVIKYKTGRRKVFWNRNCVALGLSSGFVEPLESTSIYMFMNGIVRLMKIFPFNGVTKSSIDEYNQQSIAELENVRDFIILHYHATSREDSEFWRYCKNMQVPDSLSHRMELFRENALAFQGERELFRLESWTHVMLGQGIMPKHYHSIFKTMTDQELMGHLSNTRNTINTAVAKLPSHQDFVNHYCKAPR

SEQ ID NO: 84561 - protein, 504 aa, Pseudoalteromonas sp.
  misc_feature (1)..(504): tr|A0A2K9JWK0|A0A2K9JWK0_9GAMM Flavin-dependent tryptop han halogenase RebH OS=Pseudoalteromonas sp. NC201 OX=1 514074 GN=rebH2 PE=4 SV=1
MKNQKIVILGGGTAGWMAANMMAKSWADKAIEITVVESSSIGTIGVGEGSTPQFKGFMDYLGISEAEWMPACNATYKNGIRFIDWSTKPGFSSYFHPFPAQPDDYSAPAFFHNSFVRRKAIDVEGHPDHFFLATHLADLNKSPIAAESFPFEINYGYHFDSALLGQLLARKAAEFNVKHIDATITDVRKHVDGDIAALITSDGTEIAGDIFIDCSGFKSLLLQHTLGVGFESFESNLFNDAAVVIPTKQLDTIRSETQSVARQFGWSWHIPLTNRIGNGYVYSQRYCNADQAETELRAALGLLDSEVEARHIKMKVGQVKAHWSKNCIAIGLSQGFIEPLEATALHIVQETVQSFIECYQDADFTDGNRDKHNRALSERYQAIRDYIVAHYRVNSRTDTNYWLDNANNNHLSRSLYQILQTWVSGNNLSDELVRQNVDQYYPSVSWHCLLAGYGIYPEQAQLKSGNALANQHSIEKVNDFIRRCGLNFKDHRMELESFAANVHK

SEQ ID NO: 84562 - protein, 561 aa, Shewanella sp.
  misc_feature (1)..(561): tr|A0A0Q0IY40|A0A0Q0IY40_9GAMM Flavin-dependent tryptop han halogenase RebH OS=Shewanella sp. P1-14-1 OX=172376 1 GN=rebH_3 PE=4 SV=1
MTSTAIKNIVIVGGGTAGWLTAAILASKITHDAVTITLIESPDIATIGVGEGTWPSMRQTLQDIGISEAEFLTECDASFKQASKFINWNVSDTSCSDNSVTHSYYHPFSLISFPFTDAFKQYQTIKNNLPFDIKFADAMGYQTQLCQQNLAPKQISTPEYQFVCNYGYHLDAAKFANLLKQHCVNRLKVSHIAANVVGINNVNQGVDVQISDTEYSENNSVTCRHGHIESVTIKDSSNRDRKIQGDLFIDCSGQHSLLLGQHYKIPLACQKSILFNDSAIAVQIPNDTAASINSSTLSTAVSAGWIWDIGLQTRRGVGHVYSSSHQTKDEALTEIKRYIATSTPNLSEQQLETLSFKHLGFSPGFRRQFWHKNCVAVGMSAGFIEPLEASAIALVEQSAIEIAQQFPTDLAILPIVTERFNKRMKLHWQQIIEFLKLHYVLSKRRDSQYWCEHQTLSSVPDSLKTLLNLWQHQLPSAADITHVNPLFPSASYQYVYMGMKETTTANTPDPKVNLLSPNLGITPRYIAFLEDVMSKRQTLSQRMKSNRELLDLVRQQGFSAI

SEQ ID NO: 84563 - protein, 504 aa, Novosphingobium sp.
  misc_feature (1)..(504): tr|A0A0N0KD49|A0A0N0KD49_9SPHN Tryptophan halogenase OS =Novosphingobium sp. AAP93 OX=1523427 GN=IP83_00525 PE= 4 SV=1
MTAARRFVILGGGTAGWMAAALIAHRCRDHPISVTLVESPEIGIIGVGEGSTPQLKVFFDELGIAEREWMPACHATYKTGIRFAGWSDAPGFESYFHPFQSALDGHTAPAFYFHTRARRTGRDVVAHPDRFFLGARLAEARLGPVPGENFPFDLGYGYHFDATLVGQFLAAHATTKLGVRHVPRRVAGVRRGASGAIAALVLEGGEEEIAGDFFIDASGFRASLIGEALGEPFESFAGNLFNNAAVALPGARDEGATSCETVSTALSCGWAWRIPLTGRTGNGYVYSSDFISADAAETELRRHLGLLDADVEARHLAMRVGQVRRSWVANCLAIGLAQGFIEPLEATALHIVHATLSGWIEALLADGFGPAHRDQFNAAIHARYEGIRDYIVCHYRMNRRDGDYWRANAEHDVLSDNLKAVMTCWFRGGELDAEVARLGIDRYYAPLSWHCLLAGYGQFPEAARLQPPEPDLPLADMAKIDRFIAGCALNFPAHDDLLAQLEEA

SEQ ID NO: 84564 - protein, 501 aa, Paraglaciecola hydrolytica
  misc_feature (1)..(501): tr|A0A136A0N5|A0A136A0N5_9ALTE Tryptophan halogenase OS =Paraglaciecola hydrolytica OX=1799789 GN=AX660_11405 P E=4 SV=1
MNKPYQLVIVGGGTAGWMFATAASHLYSAKQLQIILIESEQIGSVGVGEATLPQLQEFNKFVGIDEQDMMQKTNATVKLGIKFDDWGSIGNSYVHPFGQYGNKAKGNNIYQQWALANQDSAFLSLPQLSYAIQLCLNNKFELPAQDPNQIKSTYSYAYHFDATLYAQYLRSISEQFGVTRIEGMIQTVSNHVQSGDIKSVTLKDGQVISGDFFIDCSGFRSLLLGDNLQTEFEDWSKWLICDRAIAAPTEKLKTIPNYTLSTAKEAGWQWKIPLQHRTGNGYVYCSDMINEQAAMDSLLTNIEGKPLSDPKVLKFKAGRYAKTWNKNCVGIGLASGFLEPLESTSIYLIQTAITSFLRLFPLNNKEVIANEFNRNIDNEYDRIRDFLILHYHQNQRNDSELWRYCQNMSVPDSLKEKMTLFEQRGYIDTYKYGLFNHGSWLSVLHGQGLRPKEIDPFTRGMSALEIQKQLEEFAAEIEESVYKVPRHNIFLQNYCPAKVKE

SEQ ID NO: 84565 - protein, 514 aa, Saccharomonospora sp.
  misc_feature (1)..(514): tr|A0A1V9AC30|A0A1V9AC30_9PSEU Tryptophan halogenase OS =Saccharomonospora sp. LRS4.154 OX=1962155 GN=B1813_008 70 PE=4 SV=1
MVRNVVILGGGTAGWMTATYLQAAFGDRVSITLVESRRVATIGVGEATFSTIRHFFDYLGLAEEEWMPSCNASYKLAIRFENWRGPGHVFYHPFERPRLVDGYPLTEWWLKLGRDPFDRECLVLPALCENLRAPKHFDGDLFERSLHDGGDTKRRSTMAQQETQFPYAYHFDAALLAEFLAEFGTQRGIRRVLDDVREVTQDERGWISHLVTAEHGEIAGDLFVDCTGFRGMLINDLLGEPFESYQDFLPNNRAVALRVPADMERDGIKPYTTATAQDSGWIWTIPLFHRIGTGYVYADDYCSPEEAERTLREFVGSAAEEAEANHIRMRIGRNRNSWVRNCVAIGLSSGFVEPLESTGIFFIQHGVEQLVRHFPDENWDPTRITAYNTAVARCLDGVRDFLTLHYRGTARADTPYWKATKERVLPDTLAERLDLWSAQLPDPGTVYPYYHGFEPYSYHLMLLGLGGQAPRRHRPALDLVPDGAARQELRRVRAQSEELVNALPSQHDYLARLH

SEQ ID NO: 84566 - protein, 500 aa, Sphingomonas sp.
  misc_feature (1)..(500): tr|A0A430DVR9|A0A430DVR9_9SPHN Tryptophan 7-halogenase OS=Sphingomonas sp. ABOLF OX=1985879 GN=CA235_01200 PE= 4 SV=1
MIGGKRMRRIVVAGGGTAGWMAAAAIARTMGRAVEVTLVESDAIGTVGVGESTIPPLINFNRLLGIDEAAFMAATQATFKLGIQFENWKLPGHRYFHSFGFTGKDHWSAGFQHFWLYGRTRGHDAPYDAYCVELIAALEGKFGHLPGDRANYAYQLDATLYARFLRTMAEGDGARRVEGKIAQVELDGESGDIAALVLESGTRVEGDLFLDCTGFRALLIEQTLHTGYDDWTHWLPCDSAIAMQTDNVGPPVPYTRAMAHDAGWQWRIPLQHRTGNGLVYCSRYLGREAALDRLLANLEGAVRTEPNHLRFTTGVRRRQWVRNCVAIGLAGGFAEPLESTSIHLIQRAVLRLIRMLPLSEVSPRDVAEFNEQQLQDMTQVRDFLILHYKATERRDSAFWRHCADMEIPDSLTQKIELFRETGRVFRKNEELFAENSWVQVMMGQGIEPRAWHPIAEKLRDEELARLLTTLRENVARTVAAMPRHADYVASYCGAAREQAA

SEQ ID NO: 84567 - protein, 504 aa, Paraglaciecola arctica
  misc_feature (1)..(504): tr|K6YZN6|K6YZN6_9ALTE Tryptophan halogenase, putative OS=Paraglaciecola arctica BSs20135 OX=493475 GN=GARC_52 83 PE=4 SV=1
MNTTLTANKHIVILGGGTAGWMAANLMAAKWQKIGIQITLVESPAIGTIGVGEGSTPQLKSFFDQIGVEEHEWMPACNATYKNGIRFNGWSSRPGFESYFHPFASRIDAFSAPALFYNSIHRRKGINVDCHPDRFYLSAKLAEQHKTPIPDHNFPFPIGYGYHFDANLLGQFLANKGIAKGVKHIQGKVLNVGMQTNGDIANLQLDDGNTIIGDIFVDCSGFNGVLIQKALKVPFVSFKDNLFNDSAVAIPSPTSQPLRSQTISTTMKYGWAWDIPLTNRVGNGYVYSSQHCTAEQAEIELRTKLNLLDSEVAARHLKMKVGRVEKHWYRNCLAVGLSQGFIEPLEATALHFVQETIEGFIEANEKSNFSNTHQDEFNQQINQRFEGIRDYIVAHYRLSSRDDTDYWRENSANPHISNQLKRIVKGWMAAEDITQTIQQAKIQSYYPPFSWLCILSGYGIFPEQLSDVPQDNVAHKYDLDYVDDFIQRSSLNFNDHKTFLDLHY

SEQ ID NO: 84568 - protein, 497 aa, Sphingomonas melonis
  misc_feature (1)..(497): tr|A0A175XZ98|A0A175XZ98_9SPHN Tryptophan halogenase OS =Sphingomonas melonis TY OX=621456 GN=AVM11_10350 PE=4 SV=1
MNAVTPRRIVIAGGGTAGWMAAAALTRTLGRTATVTLVESDAIGTVGVGESTIPPLITFNRLLGINEAEFMAATQATFKLGIQFDGWKGPDDSYFHAFGLTGKDHWAAGFQHFWLDGQARGHTESYDDYCLELVAAREGKFAHLPDDRMSYAYQLDSTLYGRFLRRMAEGDGATRIEGKIARVELDGESGDIAALVLDGGTQVEGDLFLDCTGFRALLIEQALHVGYDDWTHWLPCDAAIAVQTESVRPPVPFTRAMAHDAGWQWRIPLQHRVGNGIVYCSRYLSQDAALDRLLGNVEGAVLTEPNRLRFVTGARRKQWHRNCIAIGLAGGFMEPLESTSIHLIQRAILRLIRLLPPAGAISAHDIAEFNDQQLTDMDQIRDFLILHYKVTERRDSPFWRQCAAMDIPDSLAQKIGLFRETGRVFRRNDELFAENSWIQVMLGQGIVPQTHHPIAAKLPDDELARFLGGLRQGVATTVRGLPAHADYVARYCGAAPA

SEQ ID NO: 84569 - protein, 501 aa, Sphingomonas sp.
  misc_feature (1)..(501): tr|A0A430DUH7|A0A430DUH7_9SPHN Tryptophan 7-halogenase OS=Sphingomonas sp. ABOLF OX=1985879 GN=CA235_02240 PE= 4 SV=1
MTPTDVPQRRRVVIAGGGTSGWLAAAALAQQLGALLDVTLVESEEIGTIGVGESTIPTARAFHRLIGLDEQRFMSETGATFKLGIAFEDWAQKGDRYIHAFGETGQSTWMGAFHHFWLQARDEGFGGDFGEYCLELQAADAGRFGIGAKLPELSYAYHLDAGRYARHLRGIAEQAGVRRIEGMIERVEQQGDGADITALVLHSGQRIEGDLFLDCTGFRALLIGQTLGSPLEDWGHWLPTDRAVAVQTRAVEPARPYTRAIAHGAGWRWRIPLQHRVGNGFVYDSRHLSDDEARAQLLREVEGEIVAEPRLIRFRAGRRAEAWRGNCVALGLAGGFVEPLESTAIHLVMIAITRLLQLFPFAGDCAAAARRFNAQAAAELDGIRDFIILHYVLTEREDTPFWRDMRAMEIPESLRDRIALFRDGGIAYQDGADLFRVDSWAQVMIGQRLLPHQHHRMAEIMGAPRLRQVLADMKARVAQQVSLLPTHAAFLRDYCPAKDAA

SEQ ID NO: 84570 - protein, 409 aa, Cupriavidus sp.
  misc_feature (1)..(409): tr|L2ED66|L2ED66_9BURK Tryptophan halogenase OS=Cupriav idus sp. HMR-1 OX=1249621 GN=D769_20024 PE=4 SV=1
MKKETVDVLIVGAGPAGSVAAGLLRKRGIGVLVIEKETFPRFSIGESLLPQSMAYIEEAGMLQAVVEAGFQYKNGAAFARGDRYTDFDFREKFSPGWGTTYQVQRAHFDDVLIREAQKQGAEVRFRHVVEAVDVSGAAPVVTVRDPDGNVYQVESRFLLDASGFGRVLPRLLDLESPSNFPVRAAIFTHVADRIPGGSFDRNKIRVSVHPEHVDVWYWTIPFSNGRCSQGVVAEKSFLDQYEGDEMTRLRQLVAEEPGLAKLLKDAEWDTPARQIVGYSANVRSLWGNGYALLGNAGEFLDPVFSSGVTIAFKSASLATACVARALAGETVDWETEYARPLKAGVDCFRAFVEAWYEGSFQKLIFHPNAPTDIRDMISSILAGYAWDLNNPFVTESRRRLSVLEQFCDD

SEQ ID NO: 84571 - protein, 492 aa, Sphingomonas melonis
  misc_feature (1)..(492): tr|A0A175Y024|A0A175Y024_9SPHN Tryptophan halogenase OS =Sphingomonas melonis TY OX=621456 GN=AVM11_10315 PE=4 SV=1
MSDTRIRRIVILGGGTAGWMTAAALSRALAGQGVAITLVESDAIGTIGVGEATIPTIHWFNQIIGLDERQFMAETKATVKLGIEFVGWNGEGSRYFHPFGTFGPPGDGAMFLHRLIRARADGDTASTEAYSLTAQAARAGRFTRPVPDRRSLLSTLGYAYHFDAGLYARYLRGLAERAGVTRIEGMVASVERHDDSGHVRSLTLADGQVVAGDLFIDCSGLRGLLIGETLGVGYDDWSHWLPCDRAWAAPSAAEVGRTPFTRATAAEAGWRWRIPLQHRVGNGYVFASRFQDEEAARASLIAGMDGPPLADPRLIRFTPGMRREAWRANVVAIGLSSGFLEPLESTSIHLIQSGIAKLLSLFPAADCSPLLARQFNRVFGQEMLDVRDFLILHYHATTGRTEPMWQERQAMAIPDTLAEKIAHFRASGRIVLSSDELFRDASWFAVLDGQGVRPGDHNPLIEAVGRDDNLRQLAALRADIAKVTATLLPLPA

SEQ ID NO: 84572 - protein, 505 aa, Streptomyces rimosus
  misc_feature (1)..(505): tr|A0A0N0S727|A0A0N0S727_STRRM Tryptophan halogenase OS =Streptomyces rimosus subsp. rimosus OX=132474 GN=ADK43 _29785 PE=4 SV=1
MSASYLKAAFGDRLSVTVLESKRIKTIGVGEATFSTVRHFIDYLGLPEHVWMPKCNATYKLGIRFENWHRKGSYFYHPFERLRVVDGFPLTDWWLHRKPGDSERFDQDVFLMSAICDAERSPRYMDGTLFEQDFKEQADPKGRKPERSTLTEQDTQFPYAYQFDASLLADYLCAYSTERGVRHIEDDVVEVARDDRGWISHLRTREHGEVTADLFIDCTGFKGLLLNEALEEPVISFQDTLPNDRAVALRVPVDMEKRGLRPCTTATAQDAGWIWTIPLFGRIGTGYVYASDYTTPEEAERTLREFVGPDAKDVEANHIRMRIGRSRNAWVNNCVAVGLSSGFVEPLESTGIFFIQQGIEQLVKHFPGADWNPQLRDSYNRAIGNTIDGVREFLVLHYRGAGRNDNQYWKDAKTRALPDGLAERLDMWRSKLPTTESIFPNYHGFEPYSYHSMLLGLGGVDLKAPPALALMDDSAAQAEFKLLRAQSQELAKRLPSQYEYLAQMH

SEQ ID NO: 84573 - protein, 516 aa, Massilia eurypsychrophila
  misc_feature (1)..(516): tr|A0A2G8TBY1|A0A2G8TBY1_9BURK Tryptophan halogenase OS =Massilia eurypsychrophila OX=1485217 GN=CR105_18780 PE =4 SV=1
MDHRTLNKPQRIVIVGGGSAGWLSAAIIAADHQRGGVQVTVIESPDVAPIGVGEGTWPSMRDTLRRIGVRESDFLTACDAAFKQGSRFDGWVDGGPGDSYYHPFVLPQGFGETDLVAHWQSRHGEVPFADLVSFQPHLCAQGKAPKQASTPQFAAVANYGYHLDAGKFGAFLKTHCVEKLGVRFIADHVDGVRSDAAGDIASLSTREHGELAGDLFIDCTGVRSLLLGQHFGVPLVKQKHVLFNDTALAVQLPYPDADSPIASQTTATAQRAGWIWDIGLPTRRGVGHVYSSAHCSDADAETALRAYIDATSGGVDVRQPRKISFTPGYRERFWQRNCVAVGLSSGFIEPLEASALALVEMAAIAISDDLPADRATMDIIARRFNDSFTYRWERVIEFLKLHYVLSRRNDSDFWRDHREAASIPERLRELLQLWRHRAPSRSDFPRTGEVFPAASYQYILYGMRFDGAATLRGSDSADLADQYFREAATLTRRMLPALPDNRSLLAHIARHGLPSI

SEQ ID NO: 84574 - protein, 517 aa, Sphingobium fuliginis
  misc_feature (1)..(517): tr|A0A4Q4IUA8|A0A4Q4IUA8_SPHSA Tryptophan 7-halogenase OS=Sphingobium fuliginis (strain ATCC 27551) OX=336203 GN=EWH10_14690 PE=4 SV=1
MTADIPSPGRIVIVGGGTAGWLSAATFSRTLGMRDVTLVESSEIGIIGVGEGTFPTIRSTLAGLGVGEGEFLRSADATFKQGVLFDGWATGADSYFHPFNMPIGGEDEALLPHWLAMEGQRASWADSVTVQERVIRAGRAPKRVQDPDFSGPMNYAYHFDAARFADYLRTISLAAGVRRIEGMVAHVEQREDGDIAALTLRDGRRVEGDIFIDCSGFRALLIGKTLGSGFVGCGDTLFNDRALAMQVPHDRPDAPIRPYTLATAHEAGWTWDIGLPERRGIGYVYSSRHCSDDEAETVLRRYVRPGGEALTPRQLRFATGYRERQWIGNCIAIGLSAGFFEPLESTGIMLIEAALRMVGDFLLPAGSASDTAARNAAARRFNRLMTARFERIVRFLKLHYCITRRTDTAYWRDNADPASIPADLQDLLAQWRHRPPSRFDFTVDLETFLPPSYHYILYGMGFETRLAGGIGRYPGGQEARAAFARVAGASGAAVSHLPDHRALLDHLRGRQPSARVS

SEQ ID NO: 84575 - protein, 421 aa, Amycolatopsis sp.
  misc_feature (1)..(421): tr|A0A428Y5E7|A0A428Y5E7_9PSEU Tryptophan halogenase OS =Amycolatopsis sp. WAC 01376 OX=2203195 GN=DMH03_12170 PE=4 SV=1
MSATLHGMPERFDVIVIGGGPAGATCAALLAKEGRTVLVLERERFPRYHIGESLIPVGMRPLQELDLLERMEARGFERKYGGSLVWGNRDVPWNFSFMKAAEGTYAYHTRRADLDTLILDRARELGAYVVEETTVKDVLQSDTGRVTGVRFTLRGSAGDYEASASLVVDASGQSRVIGRKFSDITWHNELRNVAVWTYYDNCDRLPGDEWTNILIEGTADGWFWGIPIDKGTMSVGYVTKSDLANADDQSLEQLFLSERDKTTRLKGLLANARQHAGYRTARDWSYTNETFYGDGWVLVGDAAAFVDPLFSTGVALATLAGSSLSKVVHQILEHPAIEEKALDRYAGNYRAFFDEIRNFVERFYDRTKYKEYYYDLAQEVVDPEQLHAPSVDFVTLVSGLSGKHPLLKISLDDLIANVTEP

SEQ ID NO: 84576 - protein, 510 aa, Pseudoalteromonas atlantica
  misc_feature (1)..(510): tr|Q15QQ5|Q15QQ5_PSEA6 Tryptophan halogenase OS=Pseudoa lteromonas atlantica (strain T6c / ATCC BAA-1087) OX=34 2610 GN=Patl_3277 PE=4 SV=1
MARLVLNNEKTQSTQNGQKRQRVQKVVIAGGGTAGWMAAASLSKLLGKSLDVTLVESDEIGTVGVGEATIPPIRTLHKLLNIDEQAFMRATNSTFKLGIEFNNWGQKDDSYIHSFGVTGKECWAGEFHHFWLRGKELGIDVPFGDYCYELQASKQGKFAFSANAPMNFAYHLDATLYAKFLRNFCADSVTRIEGKIQQVNKHQESGFIQSLTLESGQVVEGDFFIDCTGFKGLLIEEALHTGYEDWSHWLPCDSAVAVQTQANSDPLPYTRATAHESGWQWRIPLQHRVGNGMVFCSRYTSDDQAKTTLLANLDGVPINEPRVIKFKTGRRRKGWNKNCVALGLASGFVEPLESTSIHLIMTGIVRLMRLFPFDGVCQSTIDEYNEKLTSELHSIRDFIVLHYKVTTRDDSPFWQHCQSMEVPASLAHKIRLFKGTGRVFLDDGDIFRVDSWTQVMLGQGLAPEQYHHIVNEMNKDELTRFLAGMRSAIEQRVAQLPSHQQFIQRYCKAS

SEQ ID NO: 84577 - protein, 582 aa, Xanthomonas translucens
  misc_feature (1)..(582): tr|A0A0K2ZYI2|A0A0K2ZYI2_XANCT Tryptophan halogenase OS =Xanthomonas translucens pv. phlei OX=487906 GN=XTPLMG7 30_2961 PE=4 SV=1
MAQIRKVVIAGGGTAGWIAACALAHQFRDLLDITLIESEQIGTVGVGESTVPPIRSFHRFLQIDEQEFLRAVAGTFKLSISFENWRRPGERYLHPFGLTGQSTLACAFHHFWLEAQRRGMLSELGDYCLETVASRVDRFALQQSPPVNYAYHLDAGLYARLLRRHAERYGLKRVEGKIQQVRQHAESGFVEALLLEDGTLVEGDLFIDCTGFRGLLIEQTLHTGYEDWKQWLPCDRAVAVQTEAVAAPVPYTRAIAHAAGWRWHIPLQHRVGCGLVFSSAHLSDDEARAKLLHDAAAAPIKEPWLVPFRTGRRRKAWNKNVVALGLASGFIEPLESTSIHLTIAAVMRLITLFPSEGIAPSMVDLYNAVSCAEMEHVRDFIILHYHANQRDEPMWQACREMALPDSLQQRLRAWRERAHAWQGADELFRVDSWIHVLLGQGIVPAQHPRWRARCRTSSCSSSSTRSASPSTARWRRCRRSRTSSRAIARPGRRSGRGGLLSRHPHEGQCDGSPPCRQEPCCSARCSRHAAWIWLTGIARSSPDRSKRTASATRMRAPTRRAGSRRAWHGYDRTTPLFEDCCA

SEQ ID NO: 84578 - protein, 501 aa, Pseudoxanthomonas sp.
  misc_feature (1)..(501): tr|A0A1H7TMM1|A0A1H7TMM1_9GAMM Tryptophan halogenase OS =Pseudoxanthomonas sp. GM95 OX=1881043 GN=SAMN05428989_ 2701 PE=4 SV=1
MTHSQIRDIVIVGGGTAGWMTAAALSKVLGGYAKITLVESEEIGIVGVGEATIPMIKLYNQALDLDEDDFIRQTRGSFKLGIEFVDWGRKGESYIHGFGKIGRDLGIVSFHHYWLKMFAQGKAAPLEQYSINTAACHDNRFMRATLDRPNSPLADIAYAYHFDAALYARFLRQYAERRGVVRVEGRVVHAQQRGEDGFITAVQLDNGQSLEGQLFIDCSGFRGLLIEQTLKAGYEDWTHWLPCDRALAVPCASAGPLTPYTRSTAREAGWQWRIPLQHRTGNGYVYSSAHISDDEAAATLLANLDGEALADPKPLRFVTGKRRKFWDKNVIAIGLSSGFMEPLESTSIHLIQSSIARLTAFFPHAGFDPVDIATFNAHADFEFDRIRDFLILHYHATDRDDTPFWNQCRTMAIPDSLQQRMDLFRSSGRIFRDANEMFAEVSWLQVMHGQGMRPASYHPLVDVYPEAKIGPYLDNIRGVIHACVQSMPTHEQFIAANCAIG

SEQ ID NO: 84579 - protein, 506 aa, Xanthomonas arboricola
  misc_feature (1)..(506): tr|A0A2S6ZV06|A0A2S6ZV06_9XANT Tryptophan halogenase OS =Xanthomonas arboricola pv. guizotiae OX=487867 GN=Xarb CFBP7409_16300 PE=4 SV=1
MIPAPLRNIVIVGGGTAGWMAAAAFARVLGPTFTVQLIESEQLGTVGVGEATVPHIKAFNNLLGIDEAEFVRQTQGSFKLGIEFVDWQRPGSTYVHGFGTQIGHPLGLLPFHQYWIKQHARGKAQPLGAYTLNTVAATRGKFMTSAGDVPPTSPLANIAYAYHFDATQYARFLRSYSEQRGVTRIEGMVERVRLHPETGHVQSLQLASGQVVHGDLFVDCSGFRGLLIEEALHTGYHDFTHWLPCDRALAVPCEKVGPPTPYTRSTARAAGWQWRIPLQYRTGNGYVYCSAHISDDEAAATLLANLDGKPLADPRPLHFTTGRRKQCWNRNVVALGLASGFLEPLESTSIHLIQSGISKLLELFPREGISPMLVQRYNDRLAFEFDRIRDFLLLHYHATERDDSAFWRHCRNMPITPELRTTLDLFRDSGRFYRNAEEMFAEISWVQVMVGQGILPQGYHPLVDQVPDRDAEGFLASVAQTIGHCVDVMPTHQQFIDRYCKAAAPR

SEQ ID NO: 84580 - protein, 544 aa, Melittangium boletus
  misc_feature (1)..(544): tr|A0A250IS48|A0A250IS48_9DELT Uncharacterized protein OS=Melittangium boletus DSM 14713 OX=1294270 GN=MEBOL_0 08074 PE=4 SV=1
MNTNQIPDDNDGRVRNLIIVGGGSSGWIAAAYLSKALNFNVNITLIESANIGRIGVGEATIPTIKEELFDFLGVPEEEWMTECKASYKLGIRFQNWKKPASEGGDHYYHNFGEMPVVKGVPLSHVWMYKHQQQGFAKTLDYSCYSASPICDAMKSPRYMDGTKALHYAYHFDALLVSEFLKKWSIARGLTHITDDIIGTDLSETGDIQALRGASGRKYEADLYIDCTGFAGLLIEKALGEPKVTFHDCLLTDRAVAINIPSDSAAEGIRPFTTASAFSSGWTWEIPLNNRSGNGYVYSSAFQTAEDAEREVRAWFGKKADKVDVRHIKFISGRRRRSWVKNCVSIGLSSSFLEPLESTGLYFVYAALYQLMACFPNKDIDPALRNKFNERVSYMVDDVRDFIVLHFCTSPRTDTPYWRANQNELKLPDTLKEALELQKAGIPIRKSYHSNNSLYDSFEAGFDRFWTNSNFQSIFAGVNYLPKQPMPLLRHRPDILLEAERVFDDIQKKTDQMMAQLPSQYDYLASLYTKGKTGEQAVRSVQQAG

SEQ ID NO: 84581 - protein, 503 aa, Xanthomonas melonis
  misc_feature (1)..(503): tr|A0A2S7DF99|A0A2S7DF99_9XANT Tryptophan halogenase OS =Xanthomonas melonis OX=56456 GN=XmelCFBP4644_10655 PE= 4 SV=1
MNRIRKVVIAGGGTAGWIAACALSHQFRELLEITLVESEQIGTVGVGESTVPPIRTFHRFLQIDEQEFLRAVAGTFKLSISFEHWLRQGDRYIHPFGITGQSTLVCAFHHLWLESQRRGMPGSFGDYCLETVASRVDRFGIPREPAVNYAYHLDAALYARFLRARSEACGVRRIEGRIQRVVLQPESGDVASLVLEDGQVLEGELFIDCSGFRGLLIEQALQTGYEDWSHWLPCDRAVAVQTEALGPPVPYTRAIAHEAGWRWHIPLQHRVGNGLVFSSKHLSDDEAHAKLLREVAAPAVKEPWMVPFRTGRRLKAWNRNVVSLGLASGFIEPLESTSIHLTISAVVRLLTLFPADGIAPSQVQLFNDVSRAEMEHVRDFVTLHYHATRRDEPLWRQCREMELPESLALRLRAWRERAHAWQGTDELFRVDSWTHVLMGQGLMPEQHHPLTRAFSDHDLQRLLDGIAVPIRQAVDQLPSQQAFIERYCKAGAQVWGARAPVPA

SEQ ID NO: 84582 - protein, 512 aa, Rhodobacter lobularis
  misc_feature (1)..(512): tr|A0A0J9H433|A0A0J9H433_9RHOB Tryptophan halogenase OS =Candidatus Rhodobacter lobularis OX=1675527 GN=AIOL_00 0614 PE=4 SV=1
MGKPIKSVTIVGGGTAGWLTAALLQAFGRAQSKDAKPLQINVIESPDIPTVGVGEATTPGIVRTLQNAGLSEKEFFKRCNASFKLGVSFDGWNVDAKGKPISYINPFVKAPNIRGIEIANYFAKFGAGDQDYVGSYAITNDLVRGLKGPRTLGSKEYDQSTGFAYHLDAGRFAGLLTEHCKARGVRHIAENVLEVKQDESGNISELILDKTGSHAVELVIDCTGFRGLIINQVLKEPFIDYSKYLANDRAMAVQIKHKDQTKIEPVTRSTALGAGWSWRVPLYNRIGTGYVYSSAHRTDDEARDEFLAHLGNPEGAEPRIIPMRIGRNRNAWVKNCVAIGLSGGFIEPLESTAIYMIDLAVRWLLTYFPEADYADPLRDRYNKLVDNLYNEVRDFICVHYRLGNRTDSQYWIDAREELELPDGLAENLELWRYNLPSYYDVPFNTIFDAQVYAAVLMGKQVYKTGYAKGNIGAGLNLDQKLWREAHKQIRQNNLARAQRAADHRTLLAELRG

SEQ ID NO: 84583 - protein, 514 aa, Sphingobium fuliginis; identical to SEQ ID NO: 82987
  misc_feature (1)..(514): tr|A0A4V1W8T1|A0A4V1W8T1_SPHSA Tryptophan 7-halogenase OS=Sphingobium fuliginis (strain ATCC 27551) OX=336203 GN=EWH10_14915 PE=4 SV=1

SEQ ID NO: 84584 - protein, 538 aa, Burkholderia sp.
  misc_feature (1)..(538): tr|A0A4S5D5F5|A0A4S5D5F5_9BURK Tryptophan 7-halogenase OS=Burkholderia sp. LS-044 OX=1459967 GN=E9536_23165 PE =4 SV=1
MSNPIKNIVIVGGGTAGWMAASYLVRALQQHTSITLVESAAIPRIGVGEATIPSLQKVFFDFLGIPEREWMPQVNGAFKAAIKFVNWRKSPERSRDDHFYHLFGTVPNCDGVPLTHYWMRKREQGFQQPMEYACYPQPGALDAKLAPCLSDGTRQMSHAWHFDAHLVADFLKRWAIERGVKQVIDEVEQVHLNERGYIASLSTKEGRTLEADLFIDCSGMRGLLINQALKEPFIDMSDYLLCDSAVASAVPNADARVGVEPYTSAIAMNAGWTWKIPMLGRFGSGYVFSSKFTSRDQATADFLNLWGLSDKQPLNQIKFRVGRNGRAWVNNCVAIGLSSCFLEPLESTGIYFIYAALYQLVKHFPDTSFDPRLADAFNAEIVHMFDDCRDFVQAHYFTSSRDDTPFWLANRYDLRLSDAIKEKVQRYKAGLPLTTTSFDDSTYYETFDYEFRNFWLNGNYYCIFAGLGLLPDRSLPLLQHRPESIDKAEAMFARIRREAERLRTSLPTNYDYLRSLRDGGAGLSRSQPGPTLAAPEIL

SEQ ID NO: 84585 - protein, 491 aa, Sphingomonas melonis
  misc_feature (1)..(491): tr|A0A154NDP4|A0A154NDP4_9SPHN Tryptophan halogenase OS =Sphingomonas melonis TY OX=621456 GN=AVM11_01840 PE=4 SV=1
MTPPPSSIAILGGGTAGWMAACLMAKAWPQARITVIESPDIGIVGVGEGSTPQLKALFDALGLAEADWMPAADATYKAGIAFHGWSDDTPAYFHPFAGQIDLHTQGAFFASTRARRHGADVPAHPDRFFLNARLAEAGRAPIAPAHFPFRIGYGYHFDAHKVGHVLRDAAVARGVVHLPRRVHDVVVDTAGQVVALTLDEGDALHAELFVDASGFASAIAQQALGVPFRSFANTLFADRAVVMPTPRQAALPVQTKATALSAGWAWGIPLTSRTGNGYVYASRYLSSDAAETELRRHLGLLDADVAARHLSMKVGRVETSWTANCLAIGLAQGFIEPLEATALHIVQATIEGFIGAYQAGSRDAFNAAIARRYDGIRDYIVAHYRLNRRSGPFWRDVAANDDLSDDLKAIMTAWFTGGDVAAVVEGRGLAGYYAPMSWEVLLAGYGTFPDATRLRTAPPVADLAAIDTLLSGCLLNFPDHQAALDGHRRMP

SEQ ID NO: 84586 - protein, 491 aa, Amycolatopsis sp.
  misc_feature (1)..(491): tr|A0A428XIX0|A0A428XIX0_9PSEU Tryptophan halogenase OS =Amycolatopsis sp. WAC 01376 OX=2203195 GN=DMH03_34415 PE=4 SV=1
MSVEEFDVVVAGGGPGGSTVASLVAMQGHRVLLLEKEAFPRYQIGESLLPSTVHGICRMLGVTDELAAAGFPVKRGGTFRWGARPEPWTFHFSVSPRITGPTSFAYQVERARFDEILLNNARRKGVVVREECTVTGVLEEGERVTGLRYTDPDGDQREVSATFVIDASGNKSRLYSQVGGTRNYSEFFRSLALFGYFEGGKRLPAPYSGNILSVAFDSGWFWYIPLSDTLTSVGAVVRREDAEKIQGDQEKALKALIAECPLISEYLSDARRVTSGKYGELRVRKDYSYHQTSFWRPGMILVGDAACFVDPVFSSGVHLATYSGLLAARSINSVLGGDIDEKTALTEFEARYRREYGVFYEFLTSFYQMNVNEDSYFWQAKKVTNNQHTEIESFVDLVGGVSSGEAALTPADRIVERSAEFSAAVDQMAGGDEDSMVPLYKSQVVKQVMQEAGQEQMRAVLGEDAEPELPLFPGGLVTSPDGMKWLPYHPA

SEQ ID NO: 84587 - protein, 509 aa, Planctomycetes bacterium
  misc_feature (1)..(509): tr|A0A517SXQ5|A0A517SXQ5_9BACT Tryptophan halogenase OS =Planctomycetes bacterium SV_7m_r OX=2528025 GN=SV7mr_3 4590 PE=4 SV=1
MSEAVNKAAKPAGKGNHPTRSQVAIIGGSFSASILARILSLKGYSVVLIDAGQHPRFAIGESSTPIADLLLRRLGEEYGLPDLVAMSSYGAWQTSHQRLACGLKRGFSYFDHRGTAQGDAMVESKKGQRSLLVAASPTDQRSDTHWFRSDVDAFLFDQAKRSGVRCLPGSSVVAIDTSPAGRHMLMLQNKASVQADFVIDASGRSAVTAQLLGGQSLLPRLQTNSVSAFSHFTSVASFGDHFNDLHQDQRASHPFHADAAAQHHLLDRGWVWMLRFNNGVTSVGVTAPCDDQPASQVALGEILAAELQGRFSRYPALRPCMRHAKLAEVPGQVLVTGRLQRLNDPVVSDSIVMMPTTAVTIDPLHSTGIAHALSGVQRMAHLLDAGVSTQSLETYRQAVLDEAALIDQMVSLAYHCMSDFPRFCMASMLYFAAAIQCEEQLLAGQWPNAYWMAQDQPFLDAMQICYQLLRSTEEPARILSQMQSVLAPWNQAGLLDPAALNRYAYTATK

SEQ ID NO: 84588 - protein, 517 aa, Pseudoalteromonas atlantica
  misc_feature (1)..(517): tr|Q15UI1|Q15UI1_PSEA6 Tryptophan halogenase OS=Pseudoa lteromonas atlantica (strain T6c / ATCC BAA-1087) OX=34 2610 GN=Patl_1939 PE=4 SV=1
MCESGLRLQIPCFNLVRRSMSQPFNIVILGGGSAGWMAANLFAHKWADKLVDKSLTITLVESPDIGIVGVGEGSTPTLKRFFSMLGIGDSDWMPQCNATYKMNIAFENFSPASGNTRYSHPFISQIDTFTQRAFMVNARTRRLGLDTHTNPGDFLLNGVLAKQNKGPHTPANFPFSIEYGYHFDSHLLGAFLQQHAIGLGVDHVQANVESIKQHPNGDIAALHCKEGIEISGDLFVDCSGFSSVLMQKTLGVKFNSYKDNLFNDSAVVVPTPISEHIPVETTSTALSAGWCWKIPLTNRFGNGYVYSSDFVSKHDAERELKNHLQLNENTECRHLSMKVGALEKQWHNNCLGIGLSAGFIEPLEATALHLTQISIEQFILEFEEGDFSNRLQGQFNAKMQFRTERTRDYIVAHYKLNTRNDSEYWRANRNNMHLSESLLQILDVWYKRGDLEAEITRQDLSTHFNAVSWNCLLAGYGAFPALAAKQPGTGDLYKEQNIETFLQGCALNFTSHAGQLF

SEQ ID NO: 84589 - protein, 495 aa, Sphingomonas melonis
  misc_feature (1)..(495): tr|A0A154NB56|A0A154NB56_9SPHN Tryptophan halogenase OS =Sphingomonas melonis TY OX=621456 GN=AVM11_01815 PE=4 SV=1
MTTIVIAGGGTAGWMAAAAFGGLLESGYRIRLVESEEIGTVGVGEATIPQIRLFNQALGLDEDAFLRATGGTFKLGIAFDGWREPGHSYMHAFGDVGRDVGLIAFQHYWLRARQLGLAKPLDAYALNEVAARAGRMHRGGPITAQTLPTMPYAFHFDAGLYAAYLRRFAVNRGVERTEGTIDRVERNGGTGDIAALVLASGERVAGDLFLDCTGFRGLLIEGALETGYDDWTHWLPCDRAVAVPSANVGAPLPYTRAIAREAGWQWRIPLQHRTGNGYVYCSRHLSDDAAAAALLANIEGEAQAEPRHLRFVTGRRKRAWNRNVVALGLASGFLEPLESTSIHMIQSAIARLVKLLPALPIADALRDEYNRQTDFEIERIRDFLILHYWANGRSEPFWKERREADLPDTLRAKIGLWQQAGTITREHEELFTEDGWLQVLAGQGVQAAAYHPLADQIGVEDLGEYMETLELLYRREAQAMPSHADLIARHCAVRA

SEQ ID NO: 84590 - protein, 489 aa, Streptomyces toyocaensis
  misc_feature (1)..(489): tr|A0A081XYT8|A0A081XYT8_STRTO Tryptophan halogenase OS =Streptomyces toyocaensis OX=55952 GN=BU52_01290 PE=4 S V=1
MSVETFDVVVAGGGPGGSTVAALVAMQGHRVLLLEKEVFPRYQIGESLLPSTVHGVCRLLGVTDELAAAKFPVKRGGTFRWGARPEPWTFSFAVSPRMTGPTSFAYQVERARFDEILLNNAKSKGVTVREGCSVTAVVEEGDRVTGLRYTDSDGGEHEVGARFVIDASGNKSRLHASVGGTREYSEFFRSLALFGYFENGKRLPEPYSGNILSVAFDSGWFWYIPLSDTLTSVGVVVRREMAEKIQGDREKAYNALIAECPLIAEYLSDARRVTTGNYGELRVRKDYSYHQTKFWRPGMILVGDAACFVDPVFSSGVHLATYSALLAARSINSVLAGDLDEKTAFDEFEGRYRREYGVFYEFLVSFYQMNVNEESYFWHAKKVTNNEHTEFESFVDLVGGVASGETALAASRLAERSAEFAGAVDQMAGGDDGDMVPLFKSHVVKQVMQEGGQVQMKAVLGEDAAPEEPVFPGGLVSSPDGMKWLPYRG

SEQ ID NO: 84591 - protein, 492 aa, Sphingomonas melonis
  misc_feature (1)..(492): tr|A0A175Y297|A0A175Y297_9SPHN Tryptophan halogenase OS =Sphingomonas melonis TY OX=621456 GN=AVM11_07150 PE=4 SV=1
MSGEPIGRVVIVGGGTAGWMAAAAAARFLDDGRRTITLIESEAIGTVGVGEATIPPIRGFNARLGLDEATFLRATGGTPKLGIEFVGWTDGADRYFHPFGTHGRDIEGLNFHQLWLKLRHREGIGGIDDYAMSAVAARAGRFVPPSPDPRSPLSGLEYAYHFDAGLYAALLRRHAEAQGAIRVEGRIVGAERDLRGHVAAVRLEGDRRIEGDLFIDCSGFRSLLLGDTMGVAFEDWSHWLPCDRAIAVPTERTSPLRPFTRATAHGAGWQWRIPLQHRTGNGHVYASAFTGDYEAERVLIANLDATPTADPRGLSFTAGRRRQLWAGNVVALGLAGGFLEPLESTSIHLIQAGISKLFGLFPDMRFTDVERDEYNRLMADQYAAIRDFIILHYAATRRDDTPFWRYVRTMALPDTLARKIALFREKGRIFRYDDELFGIPSWVAVMLGQGIVPDGYDPVVDALDEDRTADALRRMRASNLAMAQQMPMAGSG

SEQ ID NO: 84592 - protein, 511 aa, Sphingopyxis bauzanensis
  misc_feature (1)..(511): tr|A0A246JVS9|A0A246JVS9_9SPHN Tryptophan halogenase OS =Sphingopyxis bauzanensis OX=651663 GN=CDQ92_08875 PE=4 SV=1
MNEAIERIVIVGGGTAGWLAASRLASSPRATAGHLSVTLIEAPDIPTIGVGEGTWPTMRATLAAIGIGEAEFLAACDGSFKQGSRFDGWVTGEAGDRYLHPFTSPPTAPIGGLLAAWQTSAPDLPFAAAMTAQAQVCDLDLAPRQRAMPEYQGAANYAYHLDAGKFAALLASHAVRKLGVRHISDHVVGVARGVDGGIASVATRQHGDVAGDLFIDCSGHASLLIGGELGVEWIDRSDILFNDRALAAQVPVAPGSPIASQTVSTAHAAGWIWDIGLPGRRGIGCVYASRFMDDDAAEAALRAYIARVLPGAPEVSARRLSFPTGHRARFWQGNCLAIGLSAGFIEPLEASAIVLIELSLNALIDNFPASRAAMPIHADRFNELFRYRWDRIVEFLKLHYALSRRPEAYWLEQRNPAHIPPRLAGMLELWRDQPPSIWDFPRVDEIFSAESHQYILYGMGYPVPANMTANDRATGLLAETRQRGRSLAAALPANRDYLDALHPAVSTAAAR

SEQ ID NO: 84593 - protein, 508 aa, Paraglaciecola arctica
  misc_feature (1)..(508): tr|K6XK41|K6XK41_9ALTE Tryptophan halogenase, putative OS=Paraglaciecola arctica BSs20135 OX=493475 GN=GARC_40 87 PE=4 SV=1
MNHEKLKIVILGGGTAGWMTANLMAARWKDRNIHFTLIESPDVGIVGVGEGSTPSMQNFFHEIGVEESEWMPECNATYKNGITFEGWTSIPGFEKYCHPFPSQMDIHTFPKFDNNCQLRRHNFDVEAHPDRFFLGSYLSQNQRSPKANHNFPFDHPNGYHFDSNLLGSFLRKKAKQRGVEHLQRHVSGVIQKENGDISSLKFREGEIIEADFFVDCTGFAGLLLQKTLKVPFINLDKVLFNDTAVVVATPVNKDDLNSQTKSTALKYGWAWDIPLTNRTGNGYVFSSRYCSVNDAETEFRTHLGLLDADVNVRTVKWKQGRLEKSWSKNCLAIGLSQGFIEPIEAMALHLVYNSIGHFITEFESGNFSNQNQQQYNSINDRAFDGVVDYILAHYRMNSRRDTDYWRDNAENQNITPSFLAIVQSWLGASQNNLADEIKKYDTGSFFPLASWQILFAGYGVFPPPENVKPQNIGNQSVNMDELDNFIQRCGSNYSSHLESLNTLKQLAK

SEQ ID NO: 84594 - protein, 506 aa, Sphingomonas melonis
  misc_feature (1)..(506): tr|A0A154NDA2|A0A154NDA2_9SPHN Tryptophan halogenase OS =Sphingomonas melonis TY OX=621456 GN=AVM11_02220 PE=4 SV=1
MAGERQRTTRVVIVGGGTAGWMTAAAIARLLPHRAEVHLIESEAIGVVGVGEATLPHIRAFNERLGIPEAEFMARTRATFKLGIEFRDWGAIGDSYIHPFGTFGTGSGAVDFHHYYTRLLREGAELPPLDRLSYACALAREGRFAMPEMDRRSLAGTFGYAYQFDALLFAPYLRGLAEEMGARRSEGIVVDVERDGESGDIVAVTLADGTRIEGDLFVDCSGFRSLLLGEALGEPFEDWSRWLPADRAVAMPCRTETAVTPYTSAIAMPAGWRWRIPLQHRTGNGYVYASDFLSDDAAAAALRGVVEGEALADPRPLRFKAGRRRQSWSHNCVGIGLASGFLEPLESTSIYLVQQAITLLIELFPDGRTSAADRDEFNRVIDLEYDRIRDFLILHYHATTRSDSPFWDYVRTMPIPDSLSEKLELWRRRGRVVKYREGVFLDASWIAVYMGQGIVPQGWDPRADAAPGGDLRRGIGNLAEQIAAEVGRRPGHRAFIDGYCPMADAA

SEQ ID NO: 84595 - protein, 491 aa, Amycolatopsis bartoniae
  misc_feature (1)..(491): tr|A0A557Z6T4|A0A557Z6T4_9PSEU Tryptophan 7-halogenase OS=Amycolatopsis bartoniae OX=941986 GN=FNH07_15130 PE= 4 SV=1
MSVEEFDVVVAGGGPGGSTVAALVALQGHRVLVLEKEVFPRYQIGESLLPSTVHGVCRLLGVADELANAGFPVKRGGTFRWGARPEPWTFSFAVSPRITGSTSFAYQVERSRFDEILLNNAKRKGAVVREGCTVTGVLEAEGRVTGVHYTDPGGDRHEVSAKFVIDASGNKSRLYSTVGGTRNYSEFFRSLALFGYFSGGKRLPAPYSGNILSVAFDSGWFWYIPLSDTLTSVGAVVRREDAEKIQGDQEKALNALIAECPMISDYLSGAQRITAGKYGEIRVRKDYSYHQTVFWRPGMILVGDAACFVDPVFSSGVHLATYSGLLAARSINSVLAGDVDEKTALTEFEARYRREYGVFYEFLTSFYQMNVNEESYFWQAKKVTNNQHTEIESFVDLVGGVSSGEAALTPSDRILERSAEFAEAVDRMAGADDGSMVPLYKSHVIRQAMQEGGQVQMTAALGEDAEPETPLFPGGLVTSPDGMKWLPHHPA

SEQ ID NO: 84596 - protein, 501 aa, Alteromonas sp.
  misc_feature (1)..(501): tr|A0A4P6AK61|A0A4P6AK61_9ALTE Tryptophan 7-halogenase OS=Alteromonas sp. KUL17 OX=2480796 GN=KUL49_10185 PE=4 SV=1
MTVSGLDSSKNQTPVKNVVIAGGGTAGWMAATALSRLLGKSIKVTLVESRDIGIVGVGEATIPPIRTFHKLLGIDEKAFMRATQATFKLGIKFENWREQGHSYIHSFGITGRECWAGEFHHFWLRAKEYGFGGEFGDYCPELIAAKQSKFATSEVMPLNFAYHFDAVAYGRFLKSLACDAGVTHKEGDIEKVLVCPQSGNIQSLRLASNEVIDGDFFIDCTGFKGLLIEQALHTGYDDWRHYLFCDSAVAMQTELTAPPVPYTKSVAHKAGWRWQIPLQERMGNGLVFCSRFMSDEDAIDTLKSQVTGAAINEPRVIRFTPGKRRRGWNKNCVALGLSSGFIEPLESTSIHLIMTGLIRLMRLFPFDGITQSAMDEYNNKFDSEMSAILDFIVMHYKVTQREDSPFWQQCQRMEIPPSLEHKLALFAESGRVFLDDGDIFRVDSWTQVLMGQGMTPSQYHRVADEMSEQSLKQFMAGLKQQVDNHVAKLPSHEAFLTQYLR

SEQ ID NO: 84597 - protein, 505 aa, Xanthomonas arboricola
  misc_feature (1)..(505): tr|A0A2S6ZWK3|A0A2S6ZWK3_9XANT Tryptophan halogenase OS =Xanthomonas arboricola pv. guizotiae OX=487867 GN=Xarb CFBP7409_14815 PE=4 SV=1
MSRAPIRKVVIAGGGTAGWIAACALSHQFRELLEITLVESEQIGTVGVGESTVPPIRSFHRFLQIDEQEFLRAVAGTFKLSISFEHWRRPGERYLHPFGIAGQSTLVCAFHHLWLESQRRGMPGSFGDYCLETVASRVDRFALLREPAVNYAYHLDAALYARFLRTRSEACGVRRIEGRIQQVTLQPDSGDVASLLLEDGQVLEGDLFIDCSGFRGLLIEQALHTGYEDWSQWLPCDRAVAVQTEALGPPVPYTRAIAHEAGWRWHIPLQHRVGNGLVFSSKHLSDDEAHTKLLRDVAAPALKDPWLVPFRTGRRLKAWNKNVVSLGLASGFIEPLESTSIHLAIAAVVRLISLFPADGIAPSQVQLFNDISRAEMEHVRDFIILHYHATQREEPLWRQCRAMELPDSLALRLRAWRERAHAWQAADELFRVDSWTHVLMGQGMLPEQHHPLARALSDRDLRRLLDGIAQPIRHAVEQMPSQQAFIDAYCKAGASVWGLGSPVVA

SEQ ID NO: 84598 - protein, 521 aa, Xanthomonas melonis
  misc_feature (1)..(521): tr|A0A2S7DDY4|A0A2S7DDY4_9XANT Tryptophan halogenase OS =Xanthomonas melonis OX=56456 GN=XmelCFBP4644_13460 PE= 4 SV=1
MDHAPLFDPRQRPVRRVVIAGGGTAGWMAAAALSKLLGRHLQITLVESDEIGTVGVGEATIPSLVTFHRLLEIDEAAFMAATQATFKLGIAFEHWRDVDRHYIHSFGHTGTDHWSAGFHHFWLKGCQRGVARAFGDYCLELRAAEEGRFAHLPNGGMNYAYHLDAGLYARFLRRFSEGFGVRRIEGRIGEVDTDPESGFLTALTLRDGTRVEGDLFVDCTGFAGLLIGKTLGVGSEDWSQWLFADSALAVQTESVGPPVTYTRARADQSGWMWRIPLQHRVGNGIVYSSRYTDQDSARAVLERNLQGRALTEPRALRFTPNQRHRVWEKNCVALGLASGFLEPIESTNIHLIQRGIVRLLQTFPQVIHPVDVAEYNRQAAEEIAHIRDFVILHYHATDRRDTPFWRDCAAMDIPDSLRHRMQLFRESGRVFHRGNELFAENSWVQVMLGQGITPRQHHPVADLMGDTELSQFLQGIRGRVEAALVRLPAHADFLHRYCPAAPPQGTATPLPSPAALGSPAG

SEQ ID NO: 84599 - protein, 498 aa, Sphingomonas melonis
  misc_feature (1)..(498): tr|A0A175Y3J6|A0A175Y3J6_9SPHN Tryptophan halogenase OS =Sphingomonas melonis TY OX=621456 GN=AVM11_07160 PE=4 SV=1
MHGDKRIDVVVVGGGTAGWMTAAALATLVPAAASVHLVESAEIGIVGVGEATLPHLRAFITRLGINEAAFMAETHATFKLGIEFRDFAAIGDRYIHPFGTYGRPLAGVGFHHYWLRRHHAGAARPIGDYATGVMAAEALRFAPPGADPDDLANAYGYAYQFDATRFAPFLRAHAESRGARRTEGKVVAVDRDPETGDVAAVTLDDGSRIAGDLFIDCSGFRALLIGGAMGEDWEDWSHWLPCDRAVAAPCASPPGGIEPYTRATAMAAGWRWRIPLTHRVGNGYVYASDYLSDDAATDALLTALEGLPLAEPRHLRFRAGRRRRSWVGNVLSVGLASGFLEPLESTSIYLAQMAVTQLIEHFPDTRVTDADRDGFNRLVDAEYDRIRDFLILHYHATTRDDSPFWNHVRTMTIPDSLADKMALWRRTAQVSRYSHGLFLEPSWIAVYLGQGIVPDGWDPRADLPDAAALDRALAGLHRGIAAAVAAMPDHKTYLAGAA

SEQ ID NO: 84600 - protein, 514 aa, Streptomyces sp.
  misc_feature (1)..(514): tr|A0A255PEY5|A0A255PEY5_9ACTN Tryptophan 7-halogenase OS=Streptomyces sp. FBKL.4005 OX=2015515 GN=CFC35_09880 PE=4 SV=1
MLGSVVIVGGGTSGWMTAAYLRRALGDKVSVTLVESKRIKTIGVGEATFSTVRHFFDYLGMAEHEWMPRCNATYKLGIRFENWREKGHYFYHPFERLPVVDGFPLTDWWLAKQPGPRFDQDVFLMSSIVDNERSPRFLDGTLFEQEFVERAGDPARTTLSEQSTQFPYAYQFDASLLADYLCEYATERGARHIEDDVLDVVRDERGWISHVVTKEHGDLTGDLFIDCTGFRGLLINQALEEPFVSYQDTLPNDSAVALRVPVDMEKRGLRPCTTATAQDAGWIWTIPLYGRIGTGYVYASDYCGPEEAERTLREFVGPEAGDLEANHIRMRIGRTRQSWVNNCVAIGLSSGFVEPLESTGIFFIQHGIEQLVKHFPDAGWDPGLRSSYNTAVARVMDGVREFLVLHYHCAARADNAYWRDAKTRALPDGLAERLEQWRSKLPSTDTIYPHYHGFEPYSYLSMLLGLGGLELKPANAVSLMDDSRAADEFRRIKDLSHDLVKRLPSQYEYLSQMR

SEQ ID NO: 84601 - protein, 507 aa, Shewanella xiamenensis
  misc_feature (1)..(507): tr|A0A073KJV2|A0A073KJV2_9GAMM Tryptophan halogenase OS =Shewanella xiamenensis OX=332186 GN=SXM_2904 PE=4 SV=1
MTIRKIAIIGGGTSGWLAANHLGRALKGRSGLSISVIESPDIPIIGVGEGTVPSIRKSLQSFGISESEFIRTCDVTFKQSIKFVNWLDQTRHGKHNFYHHLFDIINLHQGDAVSTWLAEKSGHFADFISPQHLACEAAKAPKLITTPEYVGILGYAYHLNAAKFAKLLAKNAIEKFNVEHILTTVHDVCLGVDGAIESLQTERGNLSFDLYIDCSGFESILLAKALKVPFISKAQQLFIDTALVAQIPTQPADVIPPYTKATAHQAGWIWDIALTQRRGTGFVYSSVHMNQTEAEQKFDRYLGGKLADIPHRKIPMKVGYRQQFWVKNCVALGLAQGFLEPIEATSILLTDFSARFLAERFPANKDEVDYLSMRFNRTVNHAWERVVEFAKLHYCLSDRTDSAFWLDNQREETIPEPLKERLNMWKSFSPIAEDFPSKFEVFNLDNYLYVLYGMKYPTQPHDRGLVAKANLNAYMSNMSNVKRQMFEGLPEHRELIDKICTYGLQAI

SEQ ID NO: 84602 - protein, 506 aa, Pseudoalteromonas atlantica
  misc_feature (1)..(506): tr|Q15XQ7|Q15XQ7_PSEA6 Tryptophan halogenase OS=Pseudoa lteromonas atlantica (strain T6c / ATCC BAA-1087) OX=34 2610 GN=Patl_0803 PE=4 SV=1
MRTSLPFKKIIIIGGGTAGWMSACYLAKMWHQHDVEIKIIESDAIGTIGVGEGTTPSIKGFFEQLGIAAKEWMPACNATYKTGIRFVNWSSDPNYKSYFHPFYSQLDEYFQHEFFQNIQLKHRGFDVHAHPDQYLLASELATQRKAPIEPEHYPFDMAYAYHFDATLLAQFLKKKALEWNVTHQVATISEVKQKDDGSIASVATEAGEEFEADFFVDCSGFRSLLLGKTLNVPYNSFADSLLNDSAVTIVTDREDTTPSMTLSTALSSGWAWRIPLTNRFGNGYVFSSRFQSPEEAEEEFRQHLGLPEGTQFNHLKMRVGHFAKGWDKNVLAVGLSQGFIEPLEATALHFATQSVVDFVSAIDNSTDHDGCSNQAAYNNKLMDRFSCVRDYIELHYLANSRNDTAYWKAARSHTPSPRLQRILQTWHQGQSVPRVLDEESVSLQLFGHESWLCLLAGKGVFPKSEQPLEALPAPMRIDMQKIKHFVETSAKHYPPHDDALAELTLG

SEQ ID NO: 84603 - protein, 538 aa, Pseudomonas sp.
  misc_feature (1)..(538): tr|A0A3G7A308|A0A3G7A308_9PSED Thioredoxin reductase OS =Pseudomonas sp. CMR5c OX=658630 GN=C4K40_3865 PE=4 SV= 1
MNKPIKNIVIVGGGTAGWMAASYLVRALQQQVDITLIESAAIPRIGVGEATIPSLQKVFFDFLGIPEREWIPQVNGAFKAAIKFVNWRKSPDPSRDDHFYHLFGNVPNCDGVPLTHYWLRKREQGFQQPMEYACYPQPGALDGKLAPCLPDGTRQMSHAWHFDAHLVADFLKRWAVERGVNRVVDEVVEVQLNDRGYISTLLTKGGRKLEADLFIDCSGMRGLLINQTLKEPFIDMSDYLLCDSAVASAVPNDDARDGVEPYTSAIAMNSGWTWKIPMLGRFGSGYVFSSKFTSRDQATADFLKLWDLSDNQSLNQIKFRVGRNKRAWVNNCVSIGLSSCFLEPLESTGIYFIYASLYQLVKHFPDTSFDSRLRDAFNAEIVYMFDDCRDFVQAHYFTTSREDTPFWLANRHELRLSDAIQEKVQRYKAGLPLTTTSFDDSTYYETFDYEFKNFWLNGNYYCIFAGLGMLPDRSLPLLQHRPESIEKAEAMFASIRREAERLRSSLPTNYDYLRSLRDGDAQVSGNQRGPTLATREGR

SEQ ID NO: 84604 - protein, 513 aa, Pelagibacterium sp.
  misc_feature (1)..(513): tr|A0A1E4DZJ0|A0A1E4DZJ0_9RHIZ Uncharacterized protein OS=Pelagibacterium sp. SCN 63-126 OX=1660123 GN=ABS74_0 7055 PE=4 SV=1
MDIPAHFVIVGGGTAGWIAAFIIQDEARRRGLNFRISVVESSRIPTVGVGEATTAAFRVLLKHFGIDEFEFFRKTDASFKLGIRHEDWRRKGFTYYGPIDDPHQVVQSPPGAPSDYLNVYAVAAGRAVQDMHLFQPLLEQKKAPYGRKADGSLIPLGPFHHAFHFDQALVGKFFASKSKGVDKVDAQVEGVERDGETGDITALVLDDNARLEGDFFIDATGFRKQIIVKALEAPWVSYAHELPVNRALPFWVDVKPGEELANYTRAWAQSSGWMWQIPTRTRYGCGYVYSDEFSTPEQAKDEVERVLGHEIEVRGDIRFQIGRLEKAWIGNCVAVGLSSSFLEPLESTSIHGTIVQMMLFAQRYMDHPNRISPAARDDYNARVGRQVDDFRTFVNTHYVTERDDTPFWREVRANRIHPETRERLARWSREMPRNDHFPNYLGGLPHIETQLHYPVLNGLGLLDQNLARREMEADPKLRRFAQQTFDGLVKEYRAAAKQALGHAEFLRIVQEMG

SEQ ID NO: 84605 - protein, 494 aa, Acinetobacter sp.
  misc_feature (1)..(494): tr|R9ATW4|R9ATW4_9GAMM Uncharacterized protein OS=Acine tobacter sp. CIP 110321 OX=1217699 GN=F896_03054 PE=4 S V=1
MLNLRGIQRVCIVGGGTTGWFSALRLRQIFNQSVEVVVISAPEIPIVGVGEGGVVNLLDILAKLEINIKDFIDNTGSTLKLGFRYEQWNTGKKEDYYYHLFPNIDTPEMWDENGYYPFLSLLLNNGLNINSYMEALELCENKVPFNKVIDLLISGNHNFTASLHFDTFKVGQYLKEIALQRSIIHVEDKVEDFCLDAEKGSVTSIQCQNRKIDCDFVIDASGFSRLLIGGKFKTDWISFADTLIMNRALPFHLSHKKEIELVTRATALSSGWVWQIPLQERIGAGYVFNDQFLSDDQAHDEVEKWLGEKIDPIRVIKFEAGYFQKVWVKNVVALDLASGFVEPLEATSIGQMVTQLETLSNFILHNHGVISEQNINYFNKQNGQYWRGIGDFIRMHYDTPREDTPFWKEMKNVPISPEYKELKECWKHRTPRLIDFAEYSLSGTLMFGVPNWFAVGVGTGVIKPESTAAELYALSIDQKRKLAQHLHKMKQKLS

SEQ ID NO: 84606 - protein, 503 aa, Massilia timonae
  misc_feature (1)..(503): tr|K9DI63|K9DI63_9BURK Uncharacterized protein OS=Massi lia timonae CCUG 45783 OX=883126 GN=HMPREF9710_01720 PE =4 SV=1
MENQAIKDIVIVGGGTAGWMTAAALSSMLNGRYHIRLVESDEIGIVGVGEATIPMIQRFNRVVGIDENEFMRETMGSFKLGIEFVNWGRIGERYMHGFGRMGQDLATVPFEQYWHKMRGLGKAAPLEEYSITRMAAKAGKFMPARQDVPNSPLRDIAYAYHFDASLYAKYLRKLSEARGVVRIEGKIARATRREPDGFVDAVELDNGQRIEGELFIDCSGFRGLLIEQALETGYEDWTGWLPADRALAVPCESAPAITPFTRATAHKSGWQWRIPLQHRTGNGHVYCSRFISDDEAAATLLANLDGRALAEPRLIKFQTGMRKRAWNRNVVAIGLSSGFLEPLESTSIHLIQSSIARLVELFPDRRFSDVDRDEFNRQSRFEYERVRDFIILHYHLNQRTDSAYWTECANMAIPDTLRQKMDLYRSRGKVVRVDNELFSEVGWLQVFEGQNMPLDGYHPLADTQSEADIAEYMESVREVIRKCVDVMPSHDEYIARHCAARKA

SEQ ID NO: 84607 - protein, 515 aa, Sphingomonas melonis
  misc_feature (1)..(515): tr|A0A175Y043|A0A175Y043_9SPHN Tryptophan halogenase OS =Sphingomonas melonis TY OX=621456 GN=AVM11_10420 PE=4 SV=1
MLSEPSMTDAHPNPPLKTITIVGGGTAGWMAAALLSRLTLGAYTIRLIESEEIGTIGVGEATIPAIRTFNGLAGIDEFEMVRATQATFKLGIEFRNWGAPGDSYIHGFGKIGQDLYWLHCHQFWLKERAAGRAKHLDHYALNTLAARMNRFAMPDPSNPQSPIADIDYAYHFDASLFARFLRGRAEAAGVERIEGRIVAANRRGSDGFLDHVVLADGSRVDGDLFVDCSGMRGLLIGDAMGVGYEDWSEWLLCDRALAVPSARGTGPLTPYTRATAHGAGWQWRIPLQHRTGNGHVYASRFVSDEAAAATLLEHLDTPALGDPRPVRFRPGKRHRAWEKNVVALGLAGGFLEPLESTSIHLIQTGILRLIALFPGRGFNAADTDEYNRQTDFEYRDVRDFIIAHYKVTAREDTEFWRYLKHMPVPDSLTERLELFRSSGRFFMHAKAELFREESWVQVLLGQGLQAHHDPMVDMIPAEHTTAFLKDVEDVVADVAAGLPTHEAFIARHCQAPKVG

SEQ ID NO: 84608 - protein, 516 aa, Streptomyces noursei
  misc_feature (1)..(516): tr|A0A1B2GPI1|A0A1B2GPI1_STRNR Tryptophan halogenase OS =Streptomyces noursei ATCC 11455 OX=316284 GN=SNOUR_126 10 PE=4 SV=1
MLSSVVIVGGGTSGWMTAAYLRAALGTSVNVTVIESKRIKTIGVGEATFSTVRHFFDYLGLSENDWMPKCNATYKLGIRFENWRAKGHYFYHPFERLRVVDGFPLTEWWLNKKPSDRFDQDVFLMSEICDTMRSPRYLDGTLFEQDFVEHGGSMDPERSTLSEQATQFPYAYQFDASLLADFLTEYATTRGARHIEDDVVEVVRDERGWISHLKTREHGELAGDLFVDCTGFAGLLLNKTLGEPFVSYQNTLPNDSAVALRVPHDAERTRLRPCTTATAQEAGWIWTIPLFERIGTGYVYASDYTTPEEAERTLREFVGPQAADVEANHIRMRIGRSRHSWVNNCVAIGLSSGFVEPLESTGIFFIQQGIEELVKHFPDAKWDPKLRDSYNRVVANTMDGVREFLVLHYRTAARNDNAYWRDAKTRELPDGLAARLEAWQSKLPTEETVFPHYHGFEPYSYHAMLLGLGGLDVKPAPVLAHMDDSRAAQEIQRLKDQARDIAKRLPSQYEYLAQMH

SEQ ID NO: 84609 - protein, 261 aa, Streptomyces sp.
  misc_feature (1)..(261): tr|A0A3R9W7B3|A0A3R9W7B3_9ACTN Tryptophan 7-halogenase (Fragment) OS=Streptomyces sp. WAC06614 OX=2487416 GN=E F918_34710 PE=4 SV=1
MEESTPPAVVVIGGTLTAWIAATRLATAFDGTVPITVLDTAHRPSSQVTILRPGLQRALFDPLGVPEATWMRACDASFSAAVKYTARPGSETPVYLPHHPEIPSCEGFPLFDAWALDRACGRTVEPLDRACFREPPLMDAKKSPRWLDGRAAIPYGWHADTTMLVHFLRRKAVRDRGVRLVGGDLLGGLRAPDGTLTAVHTTRGTLPGTLFLDCTGEDRLLIDGLLAEPFLDDSCRVPTDSSVTLTSPHDTTHAIAPYTTV

SEQ ID NO: 84610 - protein, 494 aa, Sphingomonas melonis
  misc_feature (1)..(494): tr|A0A154NBI6|A0A154NBI6_9SPHN Tryptophan halogenase OS =Sphingomonas melonis TY OX=621456 GN=AVM11_02215 PE=4 SV=1
MPDGGRGVTQDRAIRSILVAGGGIVGWLAAAALKRRAPFLAVTLLDAAPSPNALADRIAYTLPSLAGFHADLGIGDEDAVVRTGAGYRLGTRFVGWGRDDADYVHAYDHYGQAFGATAFHLHWLRAEREGAVPRYDAFAPAAALGRAGRYAPPTPGTIFARHQPGLTLDLPRYTRMIRAFAAHVGVDVVAGEIGDIARDGRRGIAAVALADGRQLAADLYVDATGPEARLRDAIDTARDDWGAWLPCDRVMLADGPPAEPPLLTPVTAHAAGWSWNGGTQRGIVYAADRLADDDAVAMLGTAGAAPVIIRPGTRREPWRGNCVAIGDAATAIDPLEWCNLHLALSAIDRLIAMLPDRDMAPVEAADFNRQTLAEAERVRDMLALHYRATARPEPMWRAVAFAAPPDSLAHTLRQFEERGRLPFYGEETFTRDGWAAVLIGQGIRPRRIDPLADAVPLADAHAAMHGITDAIAAALPHAPTHAAWLAAQARRLAR

SEQ ID NO: 84611 - protein, 497 aa, Pseudoalteromonas atlantica
  misc_feature (1)..(497): tr|Q15P71|Q15P71_PSEA6 Tryptophan halogenase OS=Pseudoa lteromonas atlantica (strain T6c / ATCC BAA-1087) OX=34 2610 GN=Patl_3817 PE=4 SV=1
MAAPIRKVVIAGGGTAGWMTAAMLSKVLKEQVEVVLVESEEIGIIGVGEATIPPIHTFNTYLGLDEKEFLRETKATIKLAIKFENWRVKDESYYHTFGAPGTNMGFCSFQHYWLRAKQAGMTTPLWDFDLNYLCCEQQKFNKINTQNPVYEMQYAYHFDSGLYGQYLRKLSEKAGITRIEGKIEHVQRDEPSGFITGLQLHSGQQIEGDLFIDCTGQRGLLIKGAMGVEFESWKDYLPADTALAVPSERFERTLPYTRSIAHASGWQWRIPLTHRNGNGIVYSSSYLSDEDAHQTLMSNLDSKPLDEARKIQFQTGRTTQQWHKNVVSVGLSSGFLEPLESTSIHLIQSAIVRLLKMFPNETIEQSVIDAYNEESKAEFATIADFIILHYHVNERNDSDFWKDRREMPIPERLKQKIALFKSSGAIFNEPLDIFRDASWLQVMLGQGIEPQGYHPAANVPSKKELLAVMQKIQTAKQQPLGQMLSHDEFLARYTKQG

SEQ ID NO: 84612 - protein, 503 aa, Massilia eurypsychrophila
  misc_feature (1)..(503): tr|A0A2G8TD14|A0A2G8TD14_9BURK Tryptophan halogenase OS =Massilia eurypsychrophila OX=1485217 GN=CR105_18765 PE =4 SV=1
MTTNRNAIVPKPIRRVVIAGGGTAGWMAAAGISKVLGKRLDIKLIESDEIGTVGVGEATIPTLLNFHGLLEINEQEFMAATQATFKLGISFENWRAAGEDYIHSFGSTGIDHWTAGFQHFWHKGRERGLAGDYGDYCLELKAAQANRFAHLPKSGMNYAYHMDASRYAKYLRKFAEGFGVERIEAKIARALRDPASGDITALLLDSGTLVEGDLFIDCTGFRALLIGQAMGQPYQDWSHWLYCDSAIAVQTEAVREAVPYTRSIARESGWQWQIPLQHRVGNGIVFSSRYIDDDAAQASLMANIDGAVLTQPRVIKFQPGQRQQTWTGNCVALGLASGFLEPIESTSIHLIQRGIVRLMQMFPTDGIFQSDIDEYNRQTTTEIEHIRDFIILHYHVTNRRDTPFWRDCAGMEVPPALRRRIDLFADSGRVFRVPNELFAENSWVQVMLGQGIHPRQHHQSADLMGDDELHGFLAGIKGSVDRTVAQLPGHEAYVARYGSSNPT

SEQ ID NO: 84613 - protein, 514 aa, Sphingobium sp.
  misc_feature (1)..(514): tr|A0A013VSN8|A0A013VSN8_9SPHN Tryptophan halogenase OS =Sphingobium sp. Ant17 OX=1461752 GN=BF95_05485 PE=4 SV =1
MVHPVRNIVIVGGGTAGWLTAGIIAARHRTRIGQGFSVTLVESPNTPIIGVGEGTWPTLRTTLSRMGVSESDFFRECDAAFKQGARFDRWTTGAVDDGYYHPLMLPQNFGQVNLAPHWLASNQGESFCDSVSAQGRICDDGLAPKTIATAEYDALANYAYHLDAGKFAPFIQRHCCEKLGVRHVLADVEQVLMHENGDIRAIQTAQAGEIEGDLFVDCTGFKALLIEGAMHVPFKDCNDILFCDTALAMQVPYERPDSPMASHTISTAQTSGWIWDIGIQTRRGVGHVFSSSHISDEEAERELRAYIGPAADGLNARKIKIRSGHRETFWKGNCVAVGLAAGFLEPLEASAIVLIELSAKIIAEQMPACREVMDIISSRFNATTHYRWGRIIDFLKLHYVLTKRTDSDFWRDNVRDETIPDRLKELLLLWRYQSPWFHDEFDRAEEVFPAASYQYVLYGMGYHTEVDPASLSRDHRLADRARRENAALTDKLCAGLPRHRDLINKIVAHGLPPV

SEQ ID NO: 84614 - protein, 508 aa, Shewanella loihica
  misc_feature (1)..(508): tr|A3QBY6|A3QBY6_SHELP Tryptophan halogenase OS=Shewane lla loihica (strain ATCC BAA-1088 / PV-4) OX=323850 GN= Shew_1113 PE=4 SV=1
MDIKRILILGGGTAGWLAANHLGKALEHRQDVTITLVESPDIPIIGVGEGTVPAIRQSLKRFGISESEFIRRCDVTFKQSIKFVNWMDKDRHGAGNFYHHLFDMPSPLGEDLTQHWLDNTNTAYGDMVSPQHKVCEAGRAPKRITHSEYEGALGYAYHLNAAKFAKLLAENAIRRFNVEHIMANVQEVTLRENGEIASLETDCRGSIGADFFIDCSGFESLLIDKTLKVPFVDKSHQLFADKAIAVQVPIDENEAIPPYTLATAHQAGWIWDIALTHRRGVGFVYSSKYMDDDTALNKLSRYLGQDIAQYQYRVLPMKLGYRREFLHKNCLSLGLAQGFLEPLEATSILLTDFAAGFVANRMPKDSEALALLSEQFNQVMTYAWERVVEFIKMHYCLSDRSDAPFWVDNRDSETIPSELATRLKLWQNHYPIRQDFFSKFEVFDLENYLYVLYGMHYPTAPQVAAKDRREAWQAQARQIASVGEHLMKELPEHRELLEKIAVYGLQKC

SEQ ID NO: 84615 - protein, 510 aa, Alteromonas sp.
  misc_feature (1)..(510): tr|A0A4P6A4U4|A0A4P6A4U4_9ALTE Tryptophan 7-halogenase OS=Alteromonas sp. KUL17 OX=2480796 GN=KUL49_12605 PE=4 SV=1
MNHSSHTSQKQRIVIIGGGTAGWLTAAIVAAKHKVAVGECGLDITLVESSDIPTVGVGEGTWPTMRNTLKDIGLSEKEVFRRCSAAFKQGGKFVNWVNGDGDFYYHPFTVPLGYGRVEMAPYVGDIANFANATNFQQHVCERNMAPRTLSEQEYSSAQSNYAYHLDAGAFADMLRDFSKTELGVKHIVATVESVAATSNEHIESVTLNNGMVLHADLFVDCSGFRSLLLGETLGESVISTDDVLFNNSALALHVPHEEDFEIKPYTQATAQEAGWIWDIGLSSRRGVGHVYSTDFTTDERAEEVLRQYVGDKHGDLKARTIRFNSGYKKRIWKGNCIGVGLSAGFVEPLEATALMLIEISARYIAEQMPLPESAMPIVSQRFNKQMNYRWQRIIDFLKLHYIFNQRSEPYWVANRDAASIPDSLKEDLEIWKYRGPQIADFSAAIELFPAASYQYVLYGMGFSPDFSLQSHFYNERDLADKVIQQNQLITQQKLSSLPNHRDYIEQWLAS

SEQ ID NO: 84616 - protein, 491 aa, Alteromonas sp.
  misc_feature (1)..(491): tr|A0A4P6AG01|A0A4P6AG01_9ALTE Tryptophan 7-halogenase OS=Alteromonas sp. KUL17 OX=2480796 GN=KUL49_02315 PE=4 SV=1
MDTSVMKVTILGGGTAGWMAAALLSKTFRSIEITLVESEDIGTIGVGEATIPSLHFFNDIMHIRSTEFAKATAGTFKLGIQFENWKAKGEHYFHGFGTTGAGMWAAGFHEYWKRGLSLGISQPFGAYNLEGVAAKQGKFAHVQGGPNFAYHLDAGLFAQKLRIEAQKLGVRRIEGKVSSVAKSEENGYLTHLVLETGELISGDLFIDCSGFAGLLIKGALDTPYVDWSHYLPMNRAIPLQTSLTSPPAPYTRAIAHEAGWQWRIPLQQRMGNGIVYCDDYLSDDEALKRLINDVEGEILTEPRVIKFVTGHREKLWTKNCIALGLAGGFIEPLESTAIHLIQQGLMQLIKYFPANGINPLEVDLYNDYMLNDYRDIRDFIVLHYCQTERDDSDFWRYCKNLTLPESLSHRMKLFSETGRFVQRKEEIFSDSWLQVMIGQGLIPLQHHPLADEMSEQDLAQFLKATESTIIEQVNKLPSHEEYIRRFCLSQY

SEQ ID NO: 84617 - protein, 519 aa, Pseudoxanthomonas sp.
  misc_feature (1)..(519): tr|A0A1H7W704|A0A1H7W704_9GAMM Tryptophan halogenase OS =Pseudoxanthomonas sp. GM95 OX=1881043 GN=SAMN05428989_ 3268 PE=4 SV=1
MLDKVVRHVVIVGGGSAGWLTAAVLAAEHRNADGPTLQVTLLESPDVPTIGVGEGTWPTMRDTLRKIGVRESDFVRECDATFKQGSRFARWTHDEASDAYDHPFVLPTGYGETNLVAGWLPHAGQVGFAECVSFQPHLCAAGRAPKQLATPEYAAVANYAYHLDAAKLGVFLRRHCIEVLGVRHVSDHMLGVNAHDNGDIASLQTRDHGALEADLFVDCTGMRALLIGEHYGVPRVSCSEVLFNDRALAVQVPYATPDAAIACQTLSTAQRAGWIWDIGLSARRGVGHVYSSAHTSDDEAEATLRRYIEASGGPRAEQVGSPARLMIQPGYRQTAWHRNCVAIGLSSGFVEPLEASSLVLVELAATMLSEQLPATRAAMEPLARRFNDSFAYRWQRVIDFLKLHYVLSQREDSDYWRDHRRDDTLTDSLRTLLALWKQQPPSRYDLPRIEEVFPSASYQYILYGMGFRPEPRAARRDDDPARAEGYFREAAELARRMLPALPTHRALVDHIKAHGLSTL

SEQ ID NO: 84618 - protein, 516 aa, Sphingomonas sp.
  misc_feature (1)..(516): tr|A0A4R2RXY2|A0A4R2RXY2_9SPHN Tryptophan halogenase OS =Sphingomonas sp. PP-CE-1G-424 OX=2135658 GN=C8J43_1035 43 PE=4 SV=1
MRKRILIVGGGTAGWLTAGYLAKRLGADLAGGVSITLVESRDIGILGVGEGTFPTIRRTLATIGIDEAELVRRCGATFKQGAKFVHWRHEPGKGRTDHYLHPFQIADASDGLDLLPYWLLGYGGPDNWDEVSNPQKKAADQMRAPKLATNPDYVGPLNYAFHFDAVALAGLLREQGVKNGVRHLTDTVTEVLLDTDGAIGGVRTEQNGLLDADLYIDCTGFRAELIGKAMKIPYRSCRDVLFCNRAITAQLPYARRDEPIASFTISTAQEAGWIWDIGLDRRRGIGHVYSSDHSDDETAERVLRGYLGDGGDEADVRHFKFDAGYREVNWYKNCVAVGLSSGFFEPLEATGIAFAEVSAGMIANLFPWGGDYETSARQFNANMLRRYERALDFIKLHYCISERRDTAFWRDNVADSSVPDSLLELLDRWRFRPPNELDIDGQVDIFTDASWQYVLYGMGWKTDLSAKAGALRYPDDARRAFAEVQRQAQYAIANLPSNRTLVDYAQTHRFGARAPA

SEQ ID NO: 84619 - protein, 518 aa, Pseudoalteromonas elyakovii
  misc_feature (1)..(518): tr|A0A558I2H8|A0A558I2H8_9GAMM Tryptophan 7-halogenase OS=Pseudoalteromonas elyakovii OX=81037 GN=FQP81_09265 PE=4 SV=1
MNQQNKEIKTVVVVGGGIAGWLTAGRLAADHKSNTPDGLNVVLVESPNVPIIGVGEGTWPTMRSTLIALGISETDFIRECEASFKQGAKFAKWVDGSDDDFYYHPLVLPQGFSKTDMAGHWLNNTAESTSFSNAVCYQEAICEQGLAPKTIRTPEYAAIANYAYHLDSAKFAVFLQKHCTQQLGVKHILADVTQVNSAKNGDIASVTTKQQGEISGDLFIDCTGFSSLLLGEHYKVPFQPCDDVLFIDTALAVQVPYEDENDSIASHTISTAQEAGWIWDIGLQHRRGVGYVYSSKYSTESQAREKLREYVGDKIESLTIRKIPIKSGHRSHFWQNNCVAVGLSAGFLEPLEASALVLVEMSAQMISEQLPHTRDIMDITAKRFNETFTYRWGKIIDFLKLHYILSTRDDNAFWSDNRDPKTIPQSLQDLMKLWQYRAPADHDFTSNNEVFPAASYQYVLYGMGFRSDYSTTAYMLEDTVFAKSQFDKNKSMINQAVTNLPSNRELLNKVKNHGFSTI

SEQ ID NO: 84620 - protein, 514 aa, Pseudoalteromonas luteoviolacea
  misc_feature (1)..(514): tr|A0A167B2N0|A0A167B2N0_9GAMM Uncharacterized protein OS=Pseudoalteromonas luteoviolacea NCIMB 1942 OX=136525 3 GN=N482_02290 PE=4 SV=1
MIKKIVIVGGGTAGWLAANHLAKKLKPYNTSQVEITLIESPDIPTIGVGEGTVPMMRSTLQYFGISETQFIRECDVTFKQGIKFVNWLNNPEVRQHAYYHPFDYPFLEKFDLSAYYLLGAFEDFGSYSELVGFQSHVCNASLAPKSITHTEFQGVSNYAYHLDAGKFSSMLQKHATEVLGVNYISATMKHANLGVNGEITSIETLEAGEIEGDFFLDCTGFSAKLSSDVLNVPFVDKKDTLFVDRALAIQVPYDKENDSIPSYTVSTAQKNGWIWDIGLTSRRGIGHVYSSSHTSDEQALLDLSKYLKMPAEQVDARKISMRIGYRQEAWTKNCVAMGLAQGFVEPLEATGLLVFDITARMLAEQFTFEHKAMEANAKAFNRRVCHMWDKVIDFIKLHYCISKRSDSQFWLDNRSTSSIPESLQEKLTLWRYQIPKAYDFSSTLEVFNLENYLYVLYGMEFDTDISALSCIYQQKELARKEVAEISRYAQSLDKQLEPNRALLEKINQFGLSKV

SEQ ID NO: 84621 - protein, 405 aa, Sinorhizobium sp.
  misc_feature (1)..(405): tr|A0A249P538|A0A249P538_9RHIZ Tryptophan halogenase OS =Sinorhizobium sp. CCBAU 05631 OX=794846 GN=SS05631_a45 620 PE=4 SV=1
MFGGSGIPEIECRVGGFFPLLSARIAAGENLHTCIPGFELITKKASQVEIDELLATGESGLYPSFHFNHAGFERYLRRVGLARGITSRRAVVHGMRLDDRGHVNAFQLGGEELEVDFAVDASGFARLGLGKVFNTRWCSFANVLPTDRAIIFELEPRASSPVTRATAMKAGWMWEAPLNRSISAGYAFSSRYADAAMAIAEVENHYGFRVEAKHELSLDQGYFSTAWVNNFVALGTASGCVEPLEAALAAYTFEALRNLERILANGSGIVPARAIEGYNSANARCWTGVRDFLRLHYDSKRIDTPFWRDLAAAELPEGYANLRACFQKRTPRFIDIQPYVGSGWQSLFHEIDWISVAVPLGVVPQAAACAELRRLSTESRSEVQAYVDRLKGTIAKISSTRGCMH

SEQ ID NO: 84622 - protein, 409 aa, Cupriavidus pinatubonensis
  misc_feature (1)..(409): tr|Q46PG8|Q46PG8_CUPPJ Monooxygenase, FAD-binding:FAD d ependent oxidoreductase:Tryptophan halogenase OS=Cupria vidus pinatubonensis (strain JMP 134 / LMG 1197) OX=264 198 GN=Reut_B5621 PE=4 SV=1
MEDQFADVLIIGAGPAGSVAAGLLRRRGIGVLVLEKETFPRFSIGESLLPQSMEYIEAAGMLRAVVEAGFQYKNGAAFARGDRYVDFDFRDKFSAGWGTTYQVQRADFDHVLIREAEKQGAEVRFRHLVTGVDVSGARPVVTVLDPDGNSYRVTSRFLLDASGFGRILPRLLQLESPSGFPVRSAIFTHVEDRVMPGTFDRNKIRIGIHPQHVDVWYWTIPFSNGRCSLGVVAEKAFLDGYAGNDTERLQALVNEDPALAGLLAHAVWDTPARHIAGYAANVKSLWGNGYALLGNAGEFLDPVFSSGVTIAFKSASLAADCIAREFAGESVNWEADYAQILKSGVDCFRAFVDAWYAGGFQKLVFHPNATPEIRRMISAILAGYAWDRSNPFVRDPQRGLNVLEQYCDD

SEQ ID NO: 84623 - protein, 503 aa, Sphingomonas sp.
  misc_feature (1)..(503): tr|A0A0Q4QAV4|A0A0Q4QAV4_9SPHN Tryptophan halogenase OS =Sphingomonas sp. Leaf67 OX=1736230 GN=ASE90_02510 PE=4 SV=1
MSEANIRGIVIVGGGTAGWMAAAALSHMLAGSGMAIRVVESEAIGTVGVGEATIPHIQYFNRLLGIDEDEFVRRTCATFKLGIEFVDWGQIGERYIHPFGTYGQEMEGIHFHHFWYRHAQAGGTLPLDRFSIGVGAARAGKFMRPDPSRRGSPLAGISYAFQFDAALYAKYLRERAEAAGVVRTEGRIVDVTLNGANGHVDHVVLDDGSSVAGDMFIDCSGFRGLLIEGALNAGYDDWREWLPCDRAVARPCARVGDPTPYTRATATSVGWRWRIPLQSRTGNGHVYCSDYVDDDTALAMLNDGLDGAPLSDPNFLRFTAGVRRKAWDRNVVALGLAAGFLEPLESTSIHLIQTGIARLLTNFPDRSFNQPDIDYYNRRTRLEYEQVRDFLILHYKATARNDSPLWRRCRDMAIPASLEERIAIFRENARLYRHDNELFSETSWLAVLHGQNVHPKRHHPIADILSAEELDRRMTHIAGAMDAGVRAMPDHMAFIDRFCRSPS

SEQ ID NO: 84624 - protein, 604 aa, Hapalosiphon sp.
  misc_feature (1)..(604): tr|A0A0M0SFK2|A0A0M0SFK2_9CYAN Tryptophan halogenase OS =Hapalosiphon sp. MRB220 OX=1704290 GN=AMR41_28365 PE=4 SV=1
MNNTQSQVYDVVIMGAGMAGICQARHLLLNIPNIKIALVDPRPEERAEKDMKVGESTVEISTLMICKELGLYDYMIENHPPKFGLNFHWPKDPAKTKNTDDYFHLWATRQPPLASVLINRPKFERDVLKMNKEMGVEFYNGRVVDVDLTSGDELNTVQVKLGDQQLELKTKHIVDAAGRKFIIGRKTDNLVFGSENLYGVNNGSAWMRVRNVDRTIFHSGYDPANATCSHYYATNHWMGHGHWVWMIPTDTESMELSIGLVHHHEVIPAQSVNTKEKFSAFLEANHNVVYQLLKSGEEVDFHYLPRLAHKSKQMYSRDNWYVIGDAAAMFDPFYSMGMTMMSFQIENVTEIIRAKFAGEADVEKKRIVYNNFAVNMIARNNHLVSHHEKQLGNASVMSWRIFLENMWWFGVLIPMYIGKWHLDLPFLHKFGKQGRGAVVAETLEEAYELFDKLLEKKQNLGFMYTHRTDELPFGYSITKDVSKYIGLSKYEPQHCNIYAEMRNTYFFVALWYLKLLWKGFGLPGLLAPKNFKRVLTLLKISAQSYVDELIFDYQTRRIPTNSTVAKQREEFKTYQPQTELQSWQNLATVDANDTKLPELVEVGS

SEQ ID NO: 84625 - protein, 521 aa, Kutzneria buriramensis
  misc_feature (1)..(521): tr|A0A3E0HLK9|A0A3E0HLK9_9PSEU Tryptophan halogenase OS =Kutzneria buriramensis OX=1045776 GN=BCF44_10679 PE=4 SV=1
MGAQGPDQVVIVGGGTAGWMTASYLKAAFEDRISITLVESGKIGTIGVGEATFSDIRHFFEFLNLREEDWMPACNATYKLAVRFQDWRRPGHHFYHPFEQLRSVNGFPLTDWWLNGGPGERFDQDCFVMASLCDAGRSPRYLDGTLLDQEARAVTDEPSGLTMSEHQGKTQFPYAYHFEAALLAKYLAAYAVDRGVRHIVDEVQDVRLDSRGWIDHIVTKEHGEIRGDLYIDCTGFRGVLLNKALEVPFMSYQDTLPNDSAVALQVPLDMKKLGVRPYTTATAQRAGWIWTIPLFGRIGTGYVYAKDYCTPEEAERTLREFVGPEAESVEANHIRMRIGRSAQSWKNNCVAVGLSSGFVEPLESTGIFFIHHAIEQLVKYFPAADWNPKTRDMYNAAVAHVMDGVREFLAVHYRSAARDDTQYWKDAKTRPVPDALEERLERWKAQLPDSENIFPYYHGLPPYSYMCILLGMGGIPLRSSPAVGLSDDTAAQKEFQAIRGKAQHLVDALPTHYDYFAEMRS

SEQ ID NO: 84626 - protein, 506 aa, Xanthomonas citri
  misc_feature (1)..(506): tr|A0A2D2RJU0|A0A2D2RJU0_XANCI Tryptophan halogenase OS =Xanthomonas citri pv. phaseoli var. fuscans OX=473423 GN=XcfCFBP6989P_18870 PE=4 SV=1
MIPAPLRNIVIVGGGTAGWMAAAAFARVLGPTFKVQLIESEQLGTVGVGEATVPHIKAFNNLLGIDEAEFVRQTQGSFKLGIEFVDWQRPGSTYMHGFGTQIGHPLGLLPFHQYWIKQHARGKAQPLGAYTLNTVAATRGKFMTSAGDVPANSPLANIAYAYHFDATQYAHFLRRYSQQRGVSRIEGLVEQVQLHPESGHVQSLQLASGQVVHGDLFIDCSGFGGLLIEQALHTGYHDFTHWLPCDRALAVPCEKVGPPTPYTRSTARAAGWQWRIPLQHRTGNGYVYCSAHISDDEAAATLLANLDGKPLADPRPLRFTTGRRKQCWNRNVVALGLASGFLEPLESTSIHLIQSGISKLLELFPREGISPVLVQRYNDRLAFEFDRIRDFLLLHYHATERDDSAFWRHCRHMPITPELQATLDLFRDSGRFYRNAEEMFAEISWVQVLVGQGILPQGYHPLVDQVPDRDAEGFLASVAQTISHCVDVMPSHQQFIDRYCKAATLP

SEQ ID NO: 84627 - protein, 505 aa, Xanthomonas pisi
  misc_feature (1)..(505): tr|A0A2S7CTM2|A0A2S7CTM2_9XANT Tryptophan 7-halogenase OS=Xanthomonas pisi OX=56457 GN=XpiCFBP4643_21570 PE=4 SV=1
MTQARIRKVVIAGGGTAGWIAACALSHQFRDLLDITLVESDQIATVGVGESTVPPIRTFHRFLQIDEQEFLRAVAGTFKLSISFEHWRRQGERYIHPFGITGQSTLVCAFHHLWLESQRRGMSGAFGDYCLETVASRVDRFALPREPAVNYAYHLDAALYARFLRTRSEAHGVTRVEGRIQQVTLQPDSGDVAALVLEDGQVIEGDLFIDCTGFRGLLIEQTLHTGYEDWSHWLPCDRAVAVQTEAVGPPVPYTRAIAHEAGWRWHIPLQHRVGNGLVFSSQHMSDDQAHAKLLRDTAATPVKDPWMVPFRTGRRLKAWNRNVVSLGLASGFIEPLESTSIHLTIAAVVRLITLFPADGIAPSQVEVFNDISRAEMEHVRDFVILHYHATQRDEPLWQQCRDMELPESLRLRLRAWRERAHAWQGTDELFRVDSWTHVLLGQGIVPQQHHPLAAAVSDADLRRLLDGIAQPIQRVVEHMPSQQAFIERYCQAGEQVWGGRSRVAM

SEQ ID NO: 84628 - protein, 505 aa, Pseudoalteromonas luteoviolacea
  misc_feature (1)..(505): tr|A0A167B2M3|A0A167B2M3_9GAMM Uncharacterized protein OS=Pseudoalteromonas luteoviolacea NCIMB 1942 OX=136525 3 GN=N482_02280 PE=4 SV=1
MSEQSIKSITIVGGGSSGWMTAAYLNQLYNSKSHKIDITLIESKDIGILGVGEATVHSIRYFFAAMGINEQELMRETQATYKSGIMFKNWMKPSESGETHEYFHPFEQQQLGSNIDIATAWLLSDRNKQERYDEGVCLSSHTIKHALSPKLPNSTGYKAPTPYGYHLDATQMARFLKAKCTSAGVRHVEATVTDISVVDGNIDTVHTEKGNFSADVFIDCTGFKGLLINKVSSDNWESFEEALPCNKAVAIQRKLPANKTPTPYTVATALSNGWVWQIDLANRQGTGYVYDGNRLTKKEAEEELKSFLGEESEIIKTTHIDMQIGRRKEFWVGNCICIGLSGGFIEPLESTGLHLINLGARLLSTHLTGTQVPLSVKDSYNRLMRHAYDDLKQFIVLHYCLTDRDDSEFWVQARKSVEHCPELTEKLALWRNKPCEFADIGSAGTSCFTDENYRYILYGMGYAPKLNIEYDYSEHEAVFEELQNRVNRLISSVMTHEEALQRINS

SEQ ID NO: 84629 - protein, 514 aa, Asticcacaulis sp.
  misc_feature (1)..(514): tr|V4NN15|V4NN15_9CAUL Tryptophan halogenase OS=Asticca caulis sp. AC402 OX=1282361 GN=ABAC402_12580 PE=4 SV=1
MQDMRIRKVVIVGGGTAGWMAAAGMSKLLPANQVAFQVVESEAIGTVGVGEATIPHILYFNRLLGLDENEFVRKTNATFKTGIEFVNWGRLGQSYIHPFGPYGAPMDGIHFHHFWLRYAAMGKAPPLERYSLMIQAARAAKFQRPDLSKANSALSLIAYAFHFDASLYARLMRECAEARGVTRTEGRITNVVQDPHSGNVQSVVLETGEVIEGDLFIDCSGFRGLLIEQTLKAGYDDWSHYLPCDRAVARACERVADPIPYTRATAKSSGWQWRIPLQSRTGNGHVYSSAYISDEAALDSLNADLDGAPLTEPNFLRFTAGIRRTPWKNNVVSLGLASGFLEPLESTSIHLIQTAIARLMTNFPDKTFNQPDIDYYNRRTRLEYEQVRDFIILHYNATARDDSPFWNYCRTMAIPQTLADRLAIFRENARQYRHDNELFNEVSWLAVMHGQNIEPKRYHPIADMISEEELVRRMTHFEDDVTRSLAMMPGHQAYINRHCSSSSAINHDKHPLKL

SEQ ID NO: 84630 - protein, 497 aa, Pseudoalteromonas elyakovii
  misc_feature (1)..(497): tr|A0A558I7P2|A0A558I7P2_9GAMM Tryptophan 7-halogenase OS=Pseudoalteromonas elyakovii OX=81037 GN=FQP81_04860 PE=4 SV=1
MKPIKHVVIAGGGTAGWITAALLNKVLGKVIKITLIESSTIGTIGVGEATIPPIMQLNNALGINEQEFINATNASIKLGIEFENWKTTSHSYMHAFGSFGKDFPFCDFYNFWVKGHISGTEESLWDFSLNYQAAKQHKFAPLNTIPNTQLPGLSYAYHFDATLYAEFLKKLAMSRGVDHIDAKIEQVEQCPLSGNIKSLTLDNTQQINGDLFIDATGQRALLIEQTLNTGFVDWSHYLPCDSAVAVQSQGTSELKPYTRSIAHSAGWQWQIPLQSRIGNGLVYRSRYLSDDAATQLLLNNLPAEPITAPRVIKFKTGRRLKQWHKNVVSVGLASGFLEPLESTSIHLIQSAVTRLIKLFPHNGISETLVTEFNKQSVIEIEHIRDFIILHYKLTEREDSAFWRQCKQMDIPHSLAHKLKLFKETGKVVRENDELFAEVAWQQVFIGQGLIPDDYNSIVDSLSSEQLNDLFSTLKTLITSTLDQLPTHKDFLAKIKKA

SEQ ID NO: 84631 - protein, 505 aa, Vulcaniibacterium tengchongense
  misc_feature (1)..(505): tr|A0A3N4VJI5|A0A3N4VJI5_9GAMM Tryptophan halogenase OS =Vulcaniibacterium tengchongense OX=1273429 GN=EDC50_10 65 PE=4 SV=1
MSEGRIRKVVIAGGGTAGWVAGAALAHQFRDLLDITLVESEQIGTVGVGESTVPPIRNFHRLLQIDEQEFLRAVAGTFKLSISFEDWRRPGDRYFHPFGITGQSTLVCAFHHFWLDSLRRGMRSELGDYCLETVASRADRFALLPQPQVNYAYHLDAGLYARFLRRRAEAHGLRRVEGRIREVRQHPENGHVAALVLEDGQAIEGDLFIDCTGFRGLLIEQTLQTGYEDWNRWLPCDRAVAVQTESIGPPVPYTRAIAHEAGWRWHIPLQHRVGCGLVFSSRHMSDDEARAKLLRDVGAPPIREPWLVPFRTGRRLKAWNKNVVALGLASGFIEPLESTSIHLAMTAMVRLLELFPLDGIAPALVERYNELGRVEMEHVRDFIILHYHANRRDEPMWRQCRETAPPESLAIRLRAWRERAHAWQGANELFRVDSWTHVMLGQGIVPEQHHPLARGLADEDLRRLLDGLRRSAARPVETMPSQQAFLEGYCRADAAVWGAARALPA

SEQ ID NO: 84632 - protein, 431 aa, Streptomyces sp.
  misc_feature (1)..(431): tr|A0A0N0B353|A0A0N0B353_9ACTN Tryptophan halogenase OS =Streptomyces sp. NRRL F-7442 OX=1519498 GN=ADL09_11020 PE=4 SV=1
MPSSLTGIPTEFDVIVIGGGPAGATTAGLLAKRGHQVLILDRERFPRYHVGESLIPVVMAPMKEMGLTERLEQRGFERKYGGTFVWGNEQAAWDFSFVDGGDYPFAYHTRRADLDSVILDRARELGAYVVEDATVKEPVEEDGRVTGVRFTVRGGKETYEARSAMVVDASGQARVLTRKYSEIDWHDKLRNVAVWTYFDNCERLPGDQYSNILVEGIENGWFWGIPLDKGTISVGFVTPSTVAGESDQGLEQLYRDEIEKTTKLKHMLRDARQSAGFRSARDWSYTNQTVYGKGWAAVGDAAAFVDPLISTGVALATTAGSILSRVIDKVLQYPEIEETALKRYATAYLSFFNEVRSFVERFYDRSLMKEDYHKLAQSVIDPEQKNTPANDFVTLLAGLRGKHLALDITVDDLVPETPASAAASASASAEN

SEQ ID NO: 84633 - protein, 513 aa, Sphingomonas sp.
  misc_feature (1)..(513): tr|A0A4R2RS20|A0A4R2RS20_9SPHN Tryptophan halogenase OS =Sphingomonas sp. PP-CE-1G-424 OX=2135658 GN=C8J43_1044 62 PE=4 SV=1
MHQIRNIVIVGGGTAGWLTAGVIAARHKGQREHGFTVTLVESPNIPTIGVGEGTWPTLRATLRKMGVSETELFRHCNAAFKQGARFNRWTTGAVDDGYYHPLMLPQQFGSLNLAPHWLAENGDDSFCDAVTPQGRICDEGLAPKTMATPEFDGVANYAYHLDAGKFSHFLQRHCCDTLGVRHVLADVTEVILDETGDIARVETAQGVSIEGDLFVDCTGFAARLIGDAMDVPFRSCTDTLFCDTALAVQLPYERPDDPIASHTISTAQSAGWIWDIGLPHRRGVGHVFSSSHIDVDAAERELRAYIGPAGKDLPVRKLSIRAGHRETFWKGNCVAVGLAAGFLEPLEASAIVLIELSAKMIAEQMPVCREVMDVVANRFNATTTYRWGRIIDFLKLHYTLTKRTDTDFWRDNVRPESIPDRLRGLMELWQYQSPWIHDEFDRAEEVFPSASYQYVLYGMGARTAVMPGTIEADAELARRARRENNVQTQRMMSSLPGHRDLIDRIVKHGLHPI

SEQ ID NO: 84634 - protein, 514 aa, Asticcacaulis sp.
  misc_feature (1)..(514): tr|V4QCQ6|V4QCQ6_9CAUL Tryptophan halogenase OS=Asticca caulis sp. AC402 OX=1282361 GN=ABAC402_02585 PE=4 SV=1
MIQDARPMPNPLEHIVIVGGGTAGWMAAAMLAKLIVAKAPKPPRVTLIESDDISTVGVGEATIPAIKKYMALLGLNEADFMKYTQGTFKLGIEFVDWDRLGESYIHGFGKIGQDLGWMRPHQYWLKMRNSGKVSPRFDDYAVNPTACRNNKFAKARGDGRKSPVNDIGYAYHFDAGLMARYLRRIAVPLGVKRVEGTIVDVRLKPDNGHVESVVLKDGQVVSGDFFFDCSGFRSLLVGGALGVAYESWSHWLPCDRALAVPCAGVTPMTPYTRSTARTAGWQWRIPLQHRIGNGHVYSSRFTSDDEAARVLMDNLDGKALADPRPIRFETGKRKKLWEKNVLAVGLSGGFIEPLESTSIHLIQTTVLRLLNLFPDKDFDPATAAEYNAQADSEIEHIRDFVIAHYKMTSRDDSEMWRYCRNMAVPDTLARKLDGFSASGRVFKANDELFSEDSWIQVLMGQGLMPRGYDPIVDNYPEETIVAYLNNISSVVAKSVAAMPTHDQFVAAYCAAESL

SEQ ID NO: 84635 - protein, 507 aa, Sphingomonas sp.
  misc_feature (1)..(507): tr|A0A4R2RX71|A0A4R2RX71_9SPHN Tryptophan halogenase OS =Sphingomonas sp. PP-CE-1G-424 OX=2135658 GN=C8J43_1032 69 PE=4 SV=1
MSDRALRSIAIIGGGTAGWMAAAALARVLGTHNVAITLVESEEIGTVGVGEATIPPIQAFNALLGIDEDAFVKATMGSFKLGIEFVDWLRPGTRYFHPFGVYGTDIGAVPFEGLWHRLRTQGLADPLEAYSICAQAAKDGRFMRPLADGGNTPLHRIGYAFHFDASLYARFLRTHAEAAGVVRREGRVVDVSLRAADGFVEAVTLASGARIEADLFVDCSGFRSLLLGETLGTGFEDWSHWLPNDRAIAVPTASNGPPTPFTRSTARAAGWQWRIPLQHRTGNGYVFSSAHLSEDEATATLFANLDGEPLADPRTLRFRTGRRDAFWVKNCVGLGLSSGFLEPLESTSIHLIQAGIARLLEMLPNRDFEAADIRRYNRLMTAEYDSIRDFIILHFHATERADTPYWDHVRTMAVPETLAERIRIYQATGRVFRESDDLFSKTSWLAVMDGQGLRAEGCDPLAASLSVDDAQARLARIAAVTAAAAARMPPHAEFIARHCAGAIASRT

SEQ ID NO: 84636 - protein, 223 aa, Rhizorhabdus sp.
  misc_feature (1)..(223): tr|A0A521TCM6|A0A521TCM6_9SPHN Tryptophan halogenase (F ragment) OS=Rhizorhabdus sp. OX=1968843 GN=EPO38_00775 PE=4 SV=1
NGYVYCSAHIGDDAALDTLLANLDGAAQAEPNQLRFVSGKRRRMWNRNVVALGLASGFMEPLESTSIHLVQAGISRLVKMLPSGASDPAVAAEFNRQSDFEWERIRDFIILHFKATERRDTPYWRDRAEMDIPDTLAAKIDLFRAQGLIFREHEELFTESGWLQVLVGQAVEPRRWHPLADSLEPAELAQFMAGISLTIEREVAQMENYDAFLAAARPAGVAA

SEQ ID NO: 84637 - protein, 505 aa, Xanthomonas citri
  misc_feature (1)..(505): tr|A0A2D2RXE5|A0A2D2RXE5_XANCI Tryptophan halogenase OS =Xanthomonas citri pv. phaseoli var. fuscans OX=473423 GN=XcfCFBP6989P_02510 PE=4 SV=1
MTQAQIRKVVIAGGGTAGWIAACALSHQFRNLLDITLVESEQIGTVGVGESTVPPIRTFHRFLQIDEQEFLRAVAGTFKLSISFEHWRRQGERYIHPFGITGQSTLVCAFHHLWLESQRRGMPGSFGDYCLETVASRVDRFALHGEPAVNYAYHLDAALYARFLRARSEACGVKRVEGRIQQVIVQPHSGDVASLVLEDGQTIEGDLFIDCSGFRGLLIEQTLHTGYEDWSHWLPCDRAVAVQTEALGPPVPYTRAIAHEAGWRWHIPLQHRVGNGLVFSSKHLSDDEAHAKLLRDVAAPAVKEPWMVPFRTGRRLKAWNKNVVSLGLASGFIEPLESTSIHLTISAVVRLLALFPAGGIAPSQVQLFNDISRAEMEHVRDFVILHYHATQREEPLWQQCRQMELPESLALRLRAWRERAHAWQGADELFRVDSWTHVLMGQGIAPEQHHPLTRAFSDHDLRRLLDGIAQPIQHAVQQMPSQQDFIERYCKAGEQVWGMRSPVPA

SEQ ID NO: 84638 - protein, 500 aa, Pseudoalteromonas luteoviolacea
  misc_feature (1)..(500): tr|A0A166Z787|A0A166Z787_9GAMM Tryptophan halogenase OS =Pseudoalteromonas luteoviolacea NCIMB 1942 OX=1365253 GN=N482_17850 PE=4 SV=1
MNSRKIVILGGGTAGWIAANLIAKSWCDKDIHVGVVESPDIGIIGVGEGSTPQFKAFMDFIEVPESQWMPKCNATYKNGIRFVNWSTRPGFEQYFHPFPAQPDDYSAPAFFHNSFVRRKGIDLEGHPDLFFLSTYLAEHAKAPIAAENFPFEINYGYHFDSGKLGQLLAEKAREFGVEHIQARVTDVRKNTDGTIAALVCEEGQEICGDIFIDCSGFSGLLMQQHMQVGFESFENNLFNDSAVVLATEQGNVIASETTSVARKFGWSWHIPLTNRIGNGYVYSSKYCGKDQAETELRAALGLLDSDVEARHLNMKVGQVKEHWHKNCVAIGLSQGFIEPLEATALHIVQETVQSFIECYQEQNFSCKGQDKHNQMMSQRYQAIRDYIVAHYRVNSRTDTAYWRDNANNNQLSKSLFDVLNTWVQGKNLSDELDRQDIDKYYPSASWHCLLAGYGIYPEQRQLVAASQSTNKHDLSQIRDYIRRCGLNFADHRAQLARFID

SEQ ID NO: 84639 - protein, 528 aa, Parvularculaceae bacterium
  misc_feature (1)..(528): tr|A0A520R6N0|A0A520R6N0_9PROT Tryptophan 7-halogenase OS=Parvularculaceae bacterium OX=2510335 GN=EVA70_07075 PE=4 SV=1
MADRIDSIIIVGGGTSGWLTAAYLARRLGTHRPDGVKITLIEASDIPVIGVGEGSFPSLRTTMATIGVDEAEFMRESSCAFKQGIKFVNWEHAPEDGRDRHYYHLFNFPRMMGGAIDLSPYWLMGCAGEGVSFADAVTLQEEVCEASLGPKRLDDKPYSSPMNHAYHFDAGHFGKLLKKTAIRYGVKHVIGRVESVNVAANGAIESLDVDSIGKLSAGLYIDCSGFFGAMISKTLNAPRRDLSDILFVDRALAIQVPCESDTDQIASATISAAQEAGWIWDIGLDTRRGVGHVFSSRHTDENRAEEIIRNYIGDASDGLNVRMLKMPTGYCETPWVKNCVAVGLAGGFLEPLEATGIAMAEAAIRLIADYFPRDGETEPVAKLFNRAMNERYENAVEFIKMHYYLTKRTDTEFWRDNARPETAPASLLEKLHLWRTRAPTMTDFSSVHDMFKRESYQYVLFGMGFRPDLTGRESEFPYVKEAKLEFQRIRAAAKKATAAMPDHRALLTDVYKNGFTPQHRAAEIGRVS

SEQ ID NO: 84640 - protein, 521 aa, Xanthomonas citri
  misc_feature (1)..(521): tr|A0A2R2WPM3|A0A2R2WPM3_XANCI Tryptophan halogenase OS =Xanthomonas citri pv. aurantifolii OX=76802 GN=TP45_19 300 PE=4 SV=1
MPDTTPSDPHQHPVRRVVIAGGGTAGWMAAAALSKLLGRHLHITLVESDEIGTVGVGEATIPSLVTFHRLLEIDEAAFMAATQATIKLGIAFEHWRDVDQHYIHSFGHAGTDHWSAGFQHFWLKGRQRGVARDFGDYCLELRAAQEGRFAHLPNGGMNYAYHLDAGLYARFLRRFSEGFGVTRVEGRIGQVETDAQSGFLTALTLQDGMRVEGDLFLDCTGFAGLLIGKTLGVGSDDWSRWLFADSALAVQTESVGPPVTYTRSRADQAGWMWRIPLQHRVGNGIVYSSRYMDQDGARAVLERHLAGRALTEPRPLRFTPNQRHRVWEKNCVALGLASGFLEPLESTNIHLIQRGIIRLLQTFPQVINAVDIAEYNRQAAQEITHIRDFVILHYHATDRRDTPFWRDCAAMDIPDSLRHRVELFRQSGRVFHQANELFAENSWVQVMLGQGVVPQQHHPVADLMGDAELSRFLETIRTRVEAALVRLPAHADFLQRYCPAPPLPEPAARVPAPPVMATPAG

SEQ ID NO: 84641 - protein, 505 aa, Xanthomonas citri
  misc_feature (1)..(505): tr|A0A2R2WMT8|A0A2R2WMT8_XANCI Tryptophan halogenase OS =Xanthomonas citri pv. aurantifolii OX=76802 GN=TP45_15 610 PE=4 SV=1
MTQAQIRKVVIAGGGTAGWIAACALSHQFRNLLDITLVESEQIGTVGVGESTVPPIRTFHRFLQIDEQEFLRAVAGTFKLSISFEHWRRQGERYIHPFGITGQSTLVCAFHHLWLESQRRGMPGSFGDYCLETVASRVDRFALHGEPAVNYAYHLDAALYARFLRARSEACGVKRVEGRIQQVTVQPHSGDVASLVLEDGQTIEGDLFIDCSGFRGLLIEQTLHTGYEDWSHWLPCDRAVAVQTEALGPPVPYTRAIAHEAGWRWHIPLQHRVGNGLVFSSKHLSDDEAHAKLLRDVAAPAVKEPWMVPFRTGRRLKAWNKNVVSLGLASGFIEPLESTSIHLTISAVVRLLALFPAGGIAPSQVQLFNDVGRAEMEHVRDFVILHYHATQREEPLWQQCRQMELPESLALRLRAWRERAHAWQCADELFRVDSWTHVLMGQGIAPEQHHPLTRAFSDHDLRRLLDGIAQPIQHAVQQMPSQQDFIERYCKAGEQVWGMRSPVPA

SEQ ID NO: 84642 - protein, 504 aa, Oleiagrimonas sp.
  misc_feature (1)..(504): tr|A0A328T7C7|A0A328T7C7_9GAMM Tryptophan halogenase OS =Oleiagrimonas sp. MCCC 1A03011 OX=1926883 GN=BTJ49_031 05 PE=4 SV=1
MSASPIRTVVILGGGTAGWITAALLGRAFGPNLAIRLVESDAIGTVGVGEATIPQIQHINRFLGLDEREVLKASQGTYKLGIQFNDWGRVGDSYLHAFGDIGLPLGLIPFQHYWLRDRRRDGAPDLWAYSINAHACQAGRMAQMERVGDSPLTGLRHAYHLDAGLYARYLRKQCDPAVVQRVEGKVVDVSLRDTDGFIESVRLENGDVIEGDLFVDCSGFRGLLIEQTLHAGYDDWNHWLPCNRATAVASSRMAPLRPYTQANARAAGWQWRIPLQHRNGNGHVYASDFISDDEAAATLLANLEGKALTEPRLLRFNTGCRRRFWHRNCIAIGLSAGFMEPLESTGIHLIQSAVSRLLSMFPDRSFDPALIDEYNRQTRFEYERIRDFLILHYRATERRDTPFWRHCSHIEIPDSLQRKLDVFRASGQIYRDSEELFTDVGWLQVLIGQHIEPQRYHALADAVSPQQLDEFLAHIRTLLNRATDQMPTHEAFIERHCKAPPPPR

SEQ ID NO: 84643 - protein, 483 aa, Asticcacaulis sp.
  misc_feature (1)..(483): tr|V4Q667|V4Q667_9CAUL Tryptophan halogenase OS=Asticca caulis sp. AC402 OX=1282361 GN=ABAC402_12570 PE=4 SV=1
MVCGSGLAAQQVCAALAPYLCDSLGVTWIAGISSADSDFLYGNLAPPTAYDFNLSLGVSEPELILNSDTTFSYGTHVTNWGALKLNWVQAFHQPLPVLEGATFQHYLTQQGQAALEPFLVSAVAARRGVFAHPPEDPAHPLSRAEYGYHFDATAYGALFELAAANGGVRKVAADVSAIDAVDGAIKAIHLSNGQTLTADLWIDATGPQATLLSQIGGVRHSADLRQKRRLCVSLTRMEAETPGPAVTTVNGTSYGWQAKTALRTSTLMLTTSDPDSDLEAQAVPETAPVRSATVDIGFRDIAWVGNCVGIGHAACVAEPLTIAPILLLQRDIERLLPLLPVSDDLSVERREYNRQALADYVHADLFMRALFETQPVEGSLYWRDATRTPADERLARKIEQFESRGLHVAYDLEPFGPEDWLILHYGMGRRPLRYDRIVDGADNARIRQYFESLRSNIDSVIRSMPPHGTYLNGLTNYLRQTQG

SEQ ID NO: 84644 - protein, 513 aa, Devosia sp.
  misc_feature (1)..(513): tr|A0A024KFU0|A0A024KFU0_9RHIZ Tryptophan halogenase OS =Devosia sp. DBB001 OX=1380412 PE=4 SV=1
MAQPSHFVIVGGGTAGWLAAFIIQDSARRMKLDAKISVVESSRIRTVGVGEATTAAFRVFLQHFKIDEFEFFRETEATFKLGIRHQDWRRKGYTYYGPIDDPHQVVAPPPGAPSDYLNVYAVSAGKKVQGMHLFGPLLERKKAPYARKADGSLLRLGPFHHAFHFDQSLVGQFLKRKSRGVEIVDAVVEGVERDGQTGDIRALKLDSGELLAADFFIDATGFRKRLIVQELQAPWISYARELPVNRALPFWLDIKEGDEINNYTLAWAQENGWMWQIPTQTRYGCGYVYSDEFTTPEQAKREVERAIGREIEVRDDIRFSIGRLEKAWIGNCVAVGLSSSFLEPLESTSIHGTIVQMMLFAGHYLKEPGKMTQVERDDYNRRVGRQVDDFRTFVNTHYVTERDDTPFWRNVRAERLHPETKERLARWRREMPRTEHFPNYLAGLPHIETQLHYPVLDGLGLLDPAVAKAEMARDPKLRAFAKKTHDALVKEYKQAATQAMGHAEFLEAVREMG

SEQ ID NO: 84645 - protein, 511 aa, Chondromyces crocatus
  misc_feature (1)..(511): tr|A0A0K1EKT7|A0A0K1EKT7_CHOCO Tryptophan halogenase OS =Chondromyces crocatus OX=52 GN=CMC5_053840 PE=4 SV=1
MSGGSMDEAFDVIVLGGGPAGSTVASFVAMAGHRVLLLEKERFPRHQIGESLLPATIHGICSLLGVKEEIERSGFPRKNGGTFRWGKSADPWTFRFTKQANDPYGHAYQVERAKFDDILLRNARRKGVDVREGHETLGMLYEGERVVGVRFRDAEGKERTASARYVADTSGHKSHVAPTVGQRVFSKFFQNVALYGYYEHGKRLPAPNSGNILCAAFPSGWFWYIPLSDTLTSVGAVVAKDAAGRIRESADEAMRSYIDECPIIRDYLSTATRVTEGIYGEYRIRKDYSYCNTRFWAPGVVLVGDAACFIDPVFSSGVHLATYSAMLAARSINTSLLDDELMTEEECFEEYEFRYRREFGKFYQFLIAFYDMNQDESSYFWSARKILNTEERDNDAFVRLVAGISEADEPLFEGGADRFFADRQGFGAYFADVVAGPGAEEKASAAPRPAAAHRPDPVKFDADKFMQGFTSEVAQLQLLALMGERRPKERPLVPNGLVASGDGLHWAVAPE

SEQ ID NO: 84646 - protein, 512 aa, Solemya pervernicosa
  misc_feature (1)..(512): tr|A0A1T2L3V7|A0A1T2L3V7_9GAMM Uncharacterized protein OS=Solemya pervernicosa gill symbiont OX=642797 GN=BOW5 3_10590 PE=4 SV=1
MIDMNERIDDITIVGGGAAGWLMALSLVTMLNKGESKVKVTLIESPNIPTIGVGEGTVTGFPRLLRQLGIKERDFLRRSDATYKCAGKFVGWSVDKQGNDRSFYNPFNNGGYINGFESSYYYHKFGPHGDAKSYVDNVLPTQMMVENALGPKEIGQGDYDSVMPYTYHLHAHAFSKQMAHIAQKRGVVHILDDFVDADLDEKGWITALNLKEKGKVPVKLVIDCTGFKGLILQQIMKEPYQEFGNHLLCDRAIPVPHPHRDIEKMRPCTTATAKSAGWIFDVPIYSRMGSGYVYSSQFKSEDEALHELLTHINDPELKDVTPQVIKMKVGRVRNTWVKNCIATGLAAGFVEPLEASAIYTIEMTARMLITYFPEKGITDPIINRFNQVMNRMYDEILNFIVMTYYTSNRPEPFWQAARNDIDIPPLLQENLELWKEFMPSAHDVEGKFLFDHWDYISLLNGQGYFEGVQFPTEKYLAKPDWVKYSQKMAETKRQLRRHLPSHYELLKHMHGG

SEQ ID NO: 84647 - protein, 501 aa, Asticcacaulis sp.
  misc_feature (1)..(501): tr|V4NHQ3|V4NHQ3_9CAUL Tryptophan halogenase OS=Asticca caulis sp. AC402 OX=1282361 GN=ABAC402_12575 PE=4 SV=1
MTSYIKKIVILGGGSAGWMTAAALSSQLDPKFVSITLVESDQIGTIGVGEATIPEIINFNRHLGIREDEFMKATHATFKLGIEFVDWGRKGDAYIHPFGGHGVDMNGYEFHQYWLRSRADGNAYPIDAYSMSAVASRQNRFDLPGTTNSPRSHIRYAYHFDATLYARYLRTYAEARGVRRVEGKVEEVLQAPESGDITALRLDTGETINGELFFDCTGFSALLIGKTLGVGYHDWSHWLPCDSAQAVPCAHAGPLLPYTRSTARTAGWQWRIPTQTRTGNGHIYSSAFMEDDEATAILLTNLDGEAMASPRQIRFKAGHRHAFWKNNCVAIGLSAGFLEPLESTSIYLIQEGISRFIALFPDASLPEVVRKEYNQHMRTEFEQVRDFIILHYSATERDDTPFWNYCRTMSIPDSLSHKIELFRTAGRTYAYREELFGRPSWIAVFLGQGIMPRSFDPVIAMLPSDTVMDSLDSMRRAMHAEAGRMPTHAAFLQSYCPAARA

SEQ ID NO: 84648 - protein, 520 aa, Asticcacaulis sp.
  misc_feature (1)..(520): tr|V4NJX3|V4NJX3_9CAUL Tryptophan halogenase OS=Asticca caulis sp. AC402 OX=1282361 GN=ABAC402_18305 PE=4 SV=1
MTTPRKVLIAGGGTAGWLTAAYLARVLGHGKPNSPEITLIESPEIGTIGVGEGSFATIRTTLQTLGLDEETFLREATATFKQGIRFADWEKTGDWYFHPFDAPYPVEGAGLLPYWLLQDQATRVPFAQAVALQKKVAENRRAPKRLYENRFGGALNYAYHFDAGKFAKLLSRHSVSMGVTHLQGRITDVRLATDGSIAGVTSDSHGELSADLYIDCTGFAAVLIGKALGSPYRSVRKHLLTDRAIACQVPYATPDAPIESYTVSTGHEAGWTWDIGLDVRRGVGYVYSSDHTRDDRAEEVLRAHVGPTATEFSTRVIKFDTGYREQQWIKNCVAIGLSGGFFEPLEATGIMLIEVAIGMLTDYFPHAGPIDANAAIFNRLMTLRNEKLVNFLKLHYCVSKRPESFWRENCDPATIPDELNELLEMWKYRMPSRFDVLDDIDTFAFFNYQYILYGMGFKTNLSAQRDSHPKGAEARAIFDKVALIGDQAARDLPTHRALIDQVYNHGYAEPPAQRFMSVKR

SEQ ID NO: 84649 - protein, 512 aa, Asticcacaulis sp.
  misc_feature (1)..(512): tr|V4N1R3|V4N1R3_9CAUL Tryptophan halogenase OS=Asticca caulis sp. AC402 OX=1282361 GN=ABAC402_06990 PE=4 SV=1
MHTNSLIKSVTIVGGGTAGWMTAALLSKLLLGRFDITLIESEEIGTIGVGEATIPAIKVFNQFLDLNETEFIQATQGTFKLGIEFVNWREAPSKNGGHSYIHGFGKIGSDLMWLHTHQFWLKMHEKGEVKDFDHYALNTLAARKNRFRPRQPNEGPPMADLDYAYHFDASLYARFLRKQAEGRGVKRIEGRITNVVLRPEDGYIEKVVLESGQAVGGDLFIDCSGMRGLLIGDALSVGYEDWSHWLLNDRAWAVPCESAPVLTPYTRSTAQGSGWQWRIPLQHRTGNGHVFSSSHIGDDEAAAILLANLDGKALADPRLVKFRPGKRHRAFEKNCVAIGLAGGFLEPLESTSIHLIQTGILRLLALFPGQSFDARDIREYNDQTDFEYRDVRDFIIAHYKVTDREDTPYWAYVKHMSVPDSLTQRLDLCRSSARFFKHSAAELFHEESWVQVLLGQGIRARYDPMVDMIPEEQIRGYLKDIEEVIEDYANALPTHGDYIEQNCKAPPLMEMA

SEQ ID NO: 84650 - protein, 503 aa, Oleiagrimonas sp.
  misc_feature (1)..(503): tr|A0A328SUB4|A0A328SUB4_9GAMM Tryptophan halogenase OS =Oleiagrimonas sp. MCCC 1A03011 OX=1926883 GN=BTJ49_116 10 PE=4 SV=1
MSDRHIQNIVIVGGGTAGWMAAAAFAKVLGSQVSVRLVESEAIGTVGVGEATVPHLKLFNDLLGVGDVEFVRNTSGTFKLGIQFNDWGRLGDSYIHGFGSLGHKVGLLPFHQYWIKARQKGIAADLGAYAIHTAAAPRGKFMTSAQDAPAHSPLADIPYAYHFDAGSYARFLRGYAEKRGVQRTEGRVAEVRQHPESGFVESVVLESGETIAGDLFIDCSGFRGLLIEQALKTGYIDYTHWLPCDRAVAVGCESAGDPPPFTRATARKAGWQWRIPLQHRIGNGYVYASPHLSDDEAAATLLAHLDGKPLGDPRVLRFVTGMRRKFWNKNVVALGLSSGFMEPLESTSIFLIQSGIARLLNLFPRAGFSPVLVDEYNAQAQFEFERIRDFLILHYKLTERDDSAFWNDCRTMSIPDTLREKIELFRDSGRFFRTAEEMFAEVSWVQVMIGQGLMPRSYHPLVDQLPEADLRQFMDGAAKVIDSCVDLMPPHQAFIDRHCAVGA

SEQ ID NO: 84651 - protein, 496 aa, Sphingomonas sp.
  misc_feature (1)..(496): tr|A0A4R2S6R6|A0A4R2S6R6_9SPHN Tryptophan halogenase OS =Sphingomonas sp. PP-CE-1G-424 OX=2135658 GN=C8J43_1028 68 PE=4 SV=1
MTSPTAPVSLKTIVIVGGGTAGWIAAAMLARFVPRTTKIRLIESDAIGTVGVGEATIPQIRLLTAALGIDENAMLAATQGTFKLGIEFVDWTGPGSRYMHAFGAVGRGLGVVPFHHHWLRARASGTAAPLGEYIASAQAAADARFDRHPDLAYAYHFDATMLARWLRGLAEASGVERIEGRIVTAQRDGETGDLTGVTLDDGRAVEGDFFLDCSGFRSLLLGEAQGVAFEDWSHWLPCDRAMAVACETTAPLLPYTRATARPVGWQWRIPLQHRTGNGLVYAAAHLSDDEATARLLANLDGAAIGDPRPLRFATGKRATFWKRNVVALGLASGFMEPLESTSIHMVQSAVARLLSLFPSAGDNAAARTAYNHQTHVEYDTVRDFLILHYHANRRPEPFWQRCRDMPLPDRLAEKIAQFRAAAILTQDVADLFTEPAWLQVMIGQGINPVTWSPLAEALSPDQLAGFLADIRDRHAATARALPAHADTVARHCMARR

SEQ ID NO: 84652 - protein, 508 aa, Pseudoalteromonas elyakovii
  misc_feature (1)..(508): tr|A0A558HWD3|A0A558HWD3_9GAMM Tryptophan 7-halogenase OS=Pseudoalteromonas elyakovii OX=81037 GN=FQP81_13655 PE=4 SV=1
MNKTIKTIAVIGGGTAGWLSAAIIASYHQGKNGDGLKVMLVESSDIPTIGVGEGTWPTMKNTLQQIGLREVDVFKACNATFKQGGKFVNWTHGNNDFYYHPFTVPLGYGRIDLAPYLDNVEDFAQQTNFQHDICEASLAPRGIAQGEYQGNCNYAYHLDAGAFAEMLKQHCKSKLGVEHIIGTVDQVKLDDDGAINELTLKDQTRIISADLFIDCTGFSSLLLGQALNVPFKKMDHVLFNDSALAMQVPYDENDDSLASHTIATAQNAGWIWDIGLTHRRGVGHVYSSKFLSDDEAEQNLRNYLGDAANGLTARKISFESGYREKFWHKNCVAVGMSAGFVEPLEATAIMLVEISARFVAEHMPADTQVMPIVAKRFNEQMDYRWQRIIDFLKLHYMLTKRPEPYWQAHVQPNTIPQTLQEDLLLWGSRGPLIQDFHGALELFPAASYQYVLYGMGFKPDFTKQAYLYSQDAQAKQIIERNSQLTQQMLQTLPPHRAYIEQWLAANPV

SEQ ID NO: 84653 - protein, 501 aa, Hyphomonadaceae bacterium
  misc_feature (1)..(501): tr|A0A3D3Z0W5|A0A3D3Z0W5_9RHOB Tryptophan halogenase OS =Hyphomonadaceae bacterium OX=2026748 GN=DIU09_03415 PE =4 SV=1
MAIETIVIVGGGTAGWMAAAALSRLRAGKPVNVIVIESEQIGTVGVGEATIPPFLDFNRLLEIDEREMLSAVQGSFKLGIQFVNWGKIGDSYIHPFGNYGYQVDGISFHHIWHKYKVAGDKRPIQIFNIETMAAHYGRFARTEDYQRDDLPPINYAYHLDAGRYAKYLRAYAEKRGAIRIEGKVNDVALDGETGFVTSVTMDNGVVIEGDLFVDCSGFRGLLIEQTLKTGYDDWSNFLPCNRAVALPCKRDDGSPPPPYTRATAHRAGWQWQVPLQHRNGNGHVYCSEFMSDDEALDILVNNIAGKPQAEPNFLRFVTGRRKKFWNKNVVALGLAAGFMEPLESTSIHLINTGINKLIALLSLDGVTQAQEDAFNRLTGKEYARIRDFLILHYNATTRDDSPFWNYCRNMAVPESLTEKTDLFRLNGQIFREDDELFTETSWAAVMMGQGITMQGHNAMADALMEPKTGDELRGIEQSIQFVVQHMPTHSDYLKRYCPAPM

SEQ ID NO: 84654 - protein, 516 aa, Pseudoalteromonas elyakovii
  misc_feature (1)..(516): tr|A0A558HVK6|A0A558HVK6_9GAMM Tryptophan 7-halogenase OS=Pseudoalteromonas elyakovii OX=81037 GN=FQP81_14095 PE=4 SV=1
MTKPITKIVVLGGGTAGWLSAGLLAAEHPHLNVTLVESANVPILGVGEGTWPSMRNTLQRIGIKEIDFITQCDASFKQGSKFINWRNLSEGENYYHPFMNPQGYEQTNLHASWQRIAPDQKFADVVNMQSFVCQAALAPKQLQTPEYAAVTNYGYHLDAGKFAEFLKNHCVKNLNVTHIIDDVTEVINDEHGYIASLKTNNNGDITGDLFIDCSGSRARLIDEHFNNEFIAQDHILFNNSAVAAQIPNAHINQPIASATLSTAQSNGWIWDIALPTRRGTGYVFSSKYQSDESATNTLKSYIAKTTSEQQAEQLNYRVLKFSPGYRQKFWIKNCVAVGMSAGFLEPLEASALAMVELSISMISEQLPQNRTHMSQLETRFNERFSTRWQRVIEFLKLHYVLSERDDTPYWQDISNLNTAPERLQNLLKLWQFQPPSRFDFIENEEVFSSSSYQYVLYGMGFDTQTVSAQNTFNDPRAGDYYYQQNREKIAQCLNGLPSNRALLNHLLSNNGQPHND

SEQ ID NO: 84655 - protein, 523 aa, Asticcacaulis sp.
  misc_feature (1)..(523): tr|V4Q9L8|V4Q9L8_9CAUL Tryptophan halogenase OS=Asticca caulis sp. AC402 OX=1282361 GN=ABAC402_08085 PE=4 SV=1
MLIVGGGAAGWLTACYLATHLGTERAGGPRITLLESPDIGIIGVGEGTFPTTRNILRTLGIEEAEFMRESQAAFKQGIRFDDWETSPEGGVHNHFFHPFEAPYLGKEELDLLPYWLIQDPATRPPYAEAVTFQKRIADARLAPKRTYQGHYCGPLNYAYHFDAARFANVLARRAKVLGVHHLQGILREAVLDETGAIDHVISQEYGRMTADLYIDCTGFRAELLGKAMQVPFKSASDTLFADRAVTCQVAYPNPNAPLESYTIAAAHEAGWTWDIALANRRGVGYVFSSRHTTDVRAEEVLQAYLARSGGNAKALDLRHIRFEAGFRTSQWVRNCVAIGLSAGFLEPLESTGMVLIEAAVNKVAEFFPHNGPVDASAGLFNDLMVKRYEAIINFIKLHYCLSRRQEPFWRDNSAPESVPERLRMLLDIWQYRPPSRYDFVIDHETFAHFNYQYILYGMNFQTDYQAAGRALPMQDRAEQIFARIHTFGEQAAKDLSAHRATLKAIYDNGFVERGPTAPPALVR

SEQ ID NO: 84656 - protein, 538 aa, Burkholderia sp.
  misc_feature (1)..(538): tr|A0A1B4FMA6|A0A1B4FMA6_9BURK Tryptophan halogenase OS =Burkholderia sp. BDU6 OX=1385591 GN=WS70_23855 PE=4 SV =1
MSNPIKNIVIVGGGTAGWMAASYLVRALQQQANITLIESAAIPRIGVGEATIPSLQKVFFDFLGIPEREWMPQVNGAFKAAIKFVNWRKSPGRSRDDCFYHLFGSVPNCDGVPLTHYWLRKREQGFQQPMEYACYPQPEALDGKLAPCLPDGTRQMSHAWHFDAHLVADFLKRWAIERGVNRVVDEVVEVHLNDRGYISSLSTKEGRTLEADLFIDCSGMRGLLINQALKEPFIDMSDYLLCDSAVASAVPNADARVGIEPYTSSIAMNSGWTWKIPMLGRFGSGYVFSSKFTSRDQATADFLDLWGLSDKQPLNQIKFRVGRNGRAWVNNCVAIGLSSCFLEPLESTGIYFIYAALYQLVKHFPDTSFDPRLTDAFNAEIVHMFDDCRDFVQAHYFATSREDTPFWLANRHDLRLSDAIKEKVQRYKAGLPLTTTSFDDSTYYETFDYEFKNFWLNGNYYCIFAGLGMLPDRSLPLLRHRPESIDKAEAMFARIRREAERLRTSLPTNYDYLRSLREGDAGLSRSQPGPTLAAPEIL

SEQ ID NO: 84657 - protein, 511 aa, Asticcacaulis sp.
  misc_feature (1)..(511): tr|V4NQZ4|V4NQZ4_9CAUL Uncharacterized protein OS=Astic cacaulis sp. AC402 OX=1282361 GN=ABAC402_01265 PE=4 SV= 1
MKIVILGGGTAGWMTAATLSKAFKPEFCTVRLIESDEIGIVGVGEATLPQIHDFNKFLEIDEPEFMRATNATFKLGIDFRNWARIGDSYIHPFGIHGQAINGVPLFQYWLRALQNGHVSDLQDYSFAISACRHLKFDFPVEDDNSVRSTFAYAYHFDAVLYARFLRKWATARGLERTEGKVVDVTLRPEDGFIQSLTLASGEVVEGDLFIDCSGFRGVLISQALKMGWEDWTQWLPCDRALAVPCDRAGDFTPYTRATSREAGWTWRIPLQHRTGNGYVFSSQFSTQDRAAEVLLGGLDGAAQAEPRLLKFQAGRRQQSWHKNCLAIGLASGFLEPLESTSIYLAQIASNFLMRLFPGKNIDPKLVAEFNRLVDIEYERVRDFLILHYHANEKPAEEDPTGLWRYVREMPVPDSLTAKMETFRHRGHIHRYKDGLFAPPSWIAVYVGQRVLPNHYDRQVDNMDLATILEQMADVRQRVLVNVAALPTHEQFLNDYCFDPTAKVMLEDAVHG

SEQ ID NO: 84658 - protein, 503 aa, Litorimonas taeanensis
  misc_feature (1)..(503): tr|A0A420WJT6|A0A420WJT6_9RHOB Tryptophan halogenase OS =Litorimonas taeanensis OX=568099 GN=DES40_0476 PE=4 SV =1
MTFNCDDIRKIVIAGGGTAGWMSAAALARLVCPLGIEVTLIESEQIGTVGVGEATLPHLRFFNQTLGIDEKELIKATQATIKLGIEFCNWGQIGDHYIHPFGDYGREIQNIDFHHFWTHLRRSGFDSRACNYSLPVIMAEQNKFGLPSQDPTQLMSSFSYAYQFNATDYALFLRRFAEKLGVKRVEGKIEKVNLAPETGDILSLQLETGHIEEGDFFIDCTGFRALLLKEALGVGYDDWTQYLPCDRAVAVPCEGDSAPEPYTRATAQKAGWTWRIPLQHRVGNGHVYCSEYMSDEQAAEILLNGLEGKPTNNPLFLKFDTGWRKKSWEKNCVAIGLSSGFLEPLESTSIYLIQAAITHFIELLPNRRNSPKDRTEFNRVMALEVERIRDFLILHYHATKRDDSPFWNYVRTMQVPDSLKEKMDLFKQTGTIQDYKTGLFLYASWLSVYLGQGIIPDSSHPIVKTFNAKQIMGFMETLQSNIQSTVAALPPHREFLNQYVRPS

SEQ ID NO: 84659 - protein, 497 aa, Sphingomonas sp.
  misc_feature (1)..(497): tr|A0A4P6X9K3|A0A4P6X9K3_9SPHN Tryptophan 7-halogenase OS=Sphingomonas sp. AAP5 OX=1523415 GN=E2E30_16765 PE=4 SV=1
MTAAPSPDQTIKRVVVAGGGTAGWIAAAALAKHLGPLLEIVLVESDEIGTVGVGEATIPTIRTFHRLLELDERDFLRATQATFKLGIAFENWARDGDRYIHSFGRVGQSIWMGDFQHMWLRGRAAGIADELGAYCFELAAAEAGKFATADDAKINYAYHFDAGLYAHYLRDFSEKRGVTRIEGKIGGVVQNAESGFIEALELDDGRRIDGDLFVDCSGFRGLLIEQTLNAGYEDWSHWLPTNRALAVQTKAVAPPRPYTRAIAHEAGWQWQIPLQHRVGNGLVYCSDYLSDDAAREKLLAQVDGETITEPRAIRYVTGRRKRVWDKNCVALGLASGFVEPLESTSIHLIMIGITRLIQSFPFAGIKDSVVRRYNDLAETELERVRDFIILHYHLNERREPFWQRCATMEIPDTLAQRIALFAESALTPQTADDLFQADSWLQVMLGQRLEPGGYHHMGHVLSDAHLARAFADLKCNIAGAVGRMPTHQAFLDGYCAR

SEQ ID NO: 84660 - protein, 194 aa, Parvularcula sp.
  misc_feature (1)..(194): tr|A0A357LD85|A0A357LD85_9PROT Tryptophan halogenase (F ragment) OS=Parvularcula sp. OX=1979207 GN=DEA50_08540 PE=4 SV=1
MGPAIKPGFRIVILGGGAAGWMTACLMAKRWAPSGVSISVVESPEIGIIGVGEGSTPQLKAFFRDLGVSENEWMPRCNATYKNGISFHGWSQRPGCERYFHPFPSPIDAHTAPAFHFNSFGRRRGIDLVAAPGRFFLSAKLAEKRLAPIAAHNFPFEIAYGYHFDAHLAGAFLRRHAEGRGVRHIEGKVTGIAL

SEQ ID NO: 84661 - protein, 501 aa, Streptomyces curacoi
  misc_feature (1)..(501): tr|A0A124H6L1|A0A124H6L1_9ACTN Tryptophan halogenase OS =Streptomyces curacoi OX=146536 GN=AQI70_05465 PE=4 SV= 1
MTAAYLRAALGDSIDVTLVESRRIKTIGVGEATFSTVRHFFDYLGLPETEWMPKCNATYKLGIRFENWRHKGHYFYHPFERLRVVDGFPLTDWWLQKKPSDRFDQDVFLMSAICDAERSPRYLDGRLFEQDFVEQREVSELERTTLAEQNTQFPYAYQFDASLLADFLTEYATERGARHIEDDVLEVVRDERGWISHLRTREHGDIAGDLFIDCTGFRGMLLNQALEEPFISYQDTLPNDSAVALRVPVDMEVKGLRPCTTATAQEAGWIWTIPLFGRIGTGYVYAGDYITPDEAERTLREFVGPEADELEANHIRMRVGRSRNSWVNNCVAIGLSSGFVEPLESTGIFFIQHGIEELVKHFPDATWDPRLRDAYNQAVANVMDGVREFLVLHYRCAARSDNAYWRDAKTRAIPDGLAARLEAWQAKLPTQETVFPHYHGFESYSYLSMLLGLGGLDLKPAGALALMDDTRVTKEFQLIKDQARELVQRLPSQYEYLAQMH

SEQ ID NO: 84662 - protein, 498 aa, Pseudoalteromonas aliena
  misc_feature (1)..(498): tr|A0A1Q2H1D4|A0A1Q2H1D4_9GAMM Tryptophan halogenase OS =Pseudoalteromonas aliena OX=247523 GN=B0W48_16180 PE=4 SV=1
MKPIKYVVIAGGGTAGWITAALLNKVLGKVINITLIESSSIGILGVGEATIPPIIQLNNALGINEQEFINETNATIKLGIEFENWKTPTHRYMHAFGSIGKDFPFCDFYNFWLKGHITGCEDELWDFSLNYQAAKQHKFAPLNTIPNTQLPGLSYAYHFDATLYAEYLKKLAISRGVKHIDAKISDVTQCLTTGNVKTLILDDNKQINGDLFIDCTGLRALLIEKTLNTGFVDWSHYLPCDSAIAVQTKSNDELKPYTRSIAHSAGWQWQIPLQSRIGNGLVYCSRYLSDEDAKQLLLDNLPAEPITEPRFIKFKTGRRVKQWHKNVVAVGLSSGFLEPLESTSIHLIQSAVTRLIKLFPHHGISDALASEFNKQSVIEIEHIRDFIILHYKLTEREDSAFWRQCMQMDIPDSLNHKLNLFKQTGKVMREDDELFAEIAWQQVMIGQGLMPDDYSTIVDSLTNEQLSDLFISLKTLVNSTVEKLPTHKEFLASIKRAS

SEQ ID NO: 84663 - protein, 505 aa, Parvularcula sp.
  misc_feature (1)..(505): tr|A0A357LCX7|A0A357LCX7_9PROT Tryptophan halogenase OS =Parvularcula sp. OX=1979207 GN=DEA50_05240 PE=4 SV=1
MTFSPPPNRDPLRSVVIVGGGTAGWMAASVLSKAFGPALSITLIESEEIGIVGVGEATIPQIRHINNFLEIDENAFLKATNGTFKLGIQFNDWGRLGDSYMHAFGDIGMALGLTPFHHYWLRAVAAGKGGSLWDYSVNHQIAIRDRFAIMERIGSSRLTGTRHAFHFDASLYARFLRGRAEAAGVRRVEGKIVEVRRRAADGFIEGVTLEGGARIDGEFFIDCSGFRGLLIEGALAAGYEDWTHWLPCDRAVAAPCAHGAAIRPYTQASARKSGWQWAIPLQNRVGNGHVYCSRHISDDEAAAVLKENLEGELLGEPRLLRFVTGMRKRQWVKNCVSLGLASGFLEPLESTSIHLIQSGVSRLVSMFPDRHFDAALIDEFNRQSRFEFERIRDFIILHYHANERTDSPFWIERREMAVPEVLAAKLDLFRSTGRIYREHEELFTEQGWLQVMIGQRIAPLRYHPLADGLSESQLDEFLANIRTLIDRAAAAAPGHADYVKANCAA

SEQ ID NO: 84664 - protein, 537 aa, Streptomyces formicae
  misc_feature (1)..(537): tr|A0A291QLN3|A0A291QLN3_9ACTN Tryptophan halogenase OS =Streptomyces formicae OX=1616117 GN=KY5_7454 PE=4 SV=1
MNGPGTNGTAGHDPAANGAAAAVRDVVIVGGGTAGWMTAAYLTAAFGNRVKITLVESADVGTIGVGEATFSDIRHFFEFLGLAERDWMPACNATYKLAVRFENWREPGHHFYHPFEQLRSVKGFPLTDWWLRYPTSKRFDTDCFVMASLIDANRNPRYLDNRLLEQEFVESDDLPNTIAEYQGAQFPYAYHFEAHLLAKYLTKYATERGVRHVVDNVVDVGLDERGWLSHVTTAEHGRLTGDLFVDCTGFRGLLINKALAEPFVSYQDTLPNDSAVALQVPMDMDKDPLRPCTTATAQDAGWIWTIPLISRIGTGYVYASDYIDAEEAERTLREFVGPAAADASANHIRMRIGRSRRSWVNNCVAIGLSSGFVEPLESTGIFFIHYAIEQLVKYYPAADWDQSLRDQYNGAVMNVMDGVREFLVLHYRGAKRADNQYWRDTKIRTVPDPLAERLEQWESKVPDAGTVYPRYHGLPPYSYNCILLGTGGIDVRPSPALDLIDEKDALAEFQAVRDKARHLVRTLPTQNEYFRRMREGV

SEQ ID NO: 84665 - protein, 506 aa, Duganella sp.
  misc_feature (1)..(506): tr|A0A4Q7XCL0|A0A4Q7XCL0_9BURK Tryptophan halogenase OS =Duganella sp. BK054 OX=2512136 GN=EV297_4166 PE=4 SV=1
MNLHNRIGKITIVGGGSAGWMAAAALATYLGKGASVRLIESEEIGIVGVGEASVPHIRLFNGQMLGIDESEFIKRTQGTIKLGIEFEDWSRIGDSYIHGFGTIGRSVGPLPFHQFWLKLFQSGRAAPIGEYSPQTVMAPQGKFAPGDRSAAPGSLLADIAYAYHFDATLYARFLRELGEQRGVQRIEGRIVGVNQRADDGFIESVTLESGQVVDGELFIDCSGFRGLLIEQTLKTGYVDWTHWLPCDRAMAVPCEGVAPIMPYTRSTARKAGWQWRIPLQQRTGNGYVYSSRYISDDEAATTLLANLDGKALAEPRALRFTTGMRKKFWNKNVVALGLASGFLEPLESTSIYLAQSGITRLLGLFPKRDFNPLLAERFNRESAFEYERVRDFLILHYNATERNDSPFWDYCRTMPIPDSLRETIELFRCDGRYFRNGEDFFALPSWVQVMLGQRIVPKSYHPVVDDMPEEKLLDVVESMRAMLAKAVTAMPSHQDWIERHWKASAP

SEQ ID NO: 84666 - protein, 501 aa, Sphingomonas sp.
  misc_feature (1)..(501): tr|A0A0Q4KF81|A0A0Q4KF81_9SPHN Tryptophan halogenase OS =Sphingomonas sp. Leaf33 OX=1736215 GN=ASE86_13205 PE=4 SV=1
MPDAIGSILIAGGGTAGWMTAAALAHALPRGCTITLVESEEIGTVGVGEATIPPIRLFNETLGIAEGDFLKATKGSFKLGIEFVGWGRADARYFHPFGTFGKPFDLIAVHQHWLAARAQGSTVPLDDLSMAWGAASRGRFAAPHADPRSVASTFDYAYHFDAGLYARFLRDYAEARGVVRVEGRIADVARDGESGDVAAITLADGRRLAADLFVDCSGFRGLLIEGALATGYEDWTHWLPCDRAVAVPCATGGDGLTPYTRSTARAAGWQWRIPLQHRTGNGYVFSSAHLSDDDAAATLMANLDGPALGEPRFLRFVTGRRRQFWNRNVVAIGLASGFMEPLESTSIHLIQAGIAKLLAFFPTRERDPTAVAEYNRVAIAEFERIRDFLILHYKLNAGRSERLWQDCTAMDVPDSLAVKIEHFRQRGRLVQRENDLFGPASWLAVHIGQGNVPKSGDPLLAHIADPRASRAFVDKLAGAIAGMGASMPTHSDWIARTIATA

SEQ ID NO: 84667 - protein, 507 aa, Duganella sp.
  misc_feature (1)..(507): tr|A0A4Q7XHN7|A0A4Q7XHN7_9BURK Tryptophan halogenase OS =Duganella sp. BK054 OX=2512136 GN=EV297_2546 PE=4 SV=1
MRDEQSRRRPVRRVVIAGGGTAGWMVAAAISRNLGKVLDIKLVESDEIGTVGVGEATIPSLLNFHRLLEINEQEFMAATGATFKLGISFENWRNVGEDYIHSFGMTGTDHWTAGFNHFWHKGRERKVAGDYGDYCLELKAAQLNRFGHLPRDGINYAYHLDASAYARYLRKYSEGYGVQRIEGKIAKVHTDTASGHITALQLDSGALLEGDLFIDCTGFRALLIGETLGESFEDWSHWLHNDSAIAVQTSSTGAAVPYTRAIAHEWGWQWRIPLQHRVGNGIVFSSRFVDDDTARARLLSKITGEQLVQPRVIRFKPGQRRKVWVRNCVAIGLASGFLEPIESTSIHLIQRGIIRLMQMFPSAGIFQSEIDEYNRQAWSEIEHIRDFIILHYKVTHRRDAPFWRHCADMDIPPSLQHRIDLFRETGRVFRLSNELFAENSWTQVMLGQGVMPLQHHPSADLMGDAELSSFLNSIRDHVARTVAQLPPHQQYVENYCAEYMAEYFAPK

SEQ ID NO: 84668 - protein, 530 aa, Streptomyces agglomeratus
  misc_feature (1)..(530): tr|A0A1E5P4W6|A0A1E5P4W6_9ACTN Tryptophan halogenase OS =Streptomyces agglomeratus OX=285458 GN=AS594_08815 PE= 4 SV=1
MSDNLIKKILVLGGGTAGWMTASYLGKALGSTVRITVLEAPAIPKIGVGEATIPNLQRVFFDYLGLTEEEWMPECNASYKMGIRFINWRTPGTGTARPRPYGQYGDQFDHLFGLLPNHDNLPLSHYWTYQKLNGLTDEPFDRACYPQPALFDRKLSPRFPDGRRVASYAWHFDADLVADFLRRFATARQGATHIEDKFIAAETDQRGHLVAVTTESGRRLEADLFIDCSGFRSLLINQVMKEPFLDMSDHLLNDRAVATRLEHDDEEHGVEPYTSAIAMSSGWAWKIPMLGRFGTGYVYSSRFTSQEEATREFCQMWGISPDTHPMNHVRFRVGRNRRAWVKNCVGIGLSSCFLEPLESTGIYFTYAALYQLVKHFPDKRFDPMLTKSFNSEIEAMFDDTRDFIQGHFSFAPRDDTPFWRACKELELAPEFVRKVEMYKAGLGVDLPVTDESTYYGNFEAEFRNFWSNANYYCVFAGLGMMPEHDPTPLDYRPESVKSAEAVFAQVQRRRDELLDTLPPMHTYLRRLHGK

SEQ ID NO: 84669 - protein, 515 aa, Streptomyces hygroscopicus
  misc_feature (1)..(515): tr|A0A0S2PCT9|A0A0S2PCT9_STRHL Tryptophan 5-halogenase OS=Streptomyces hygroscopicus subsp. limoneus OX=264445 GN=SHL15_7526 PE=4 SV=1
MTQSVVILGGGTAGWMTASYLRAAFADRVDITVVESRRIGTIGVGEATFSTVRHFFDYLGLSEADWMPECNGTYKLAVRLENWRAPGTYFYHPFERMRVVDGVPLTDWWQKVGGTGSFDRDCFLIPWLCDAKASPRYLDHRLFEQDFDEDPDRPLYRTTLAEQNTQFPYAYHFDASLLADFLCRYAVGRGVHRIIDDVVDVRLDERGWIDRLVTREHADLTADLYVDCSGFRSRLLGDALGEPFVSFQDSLPNDRAVALRVPVDTAVRGIRPCTTATAQDAGWIWTIPLYDRIGTGYVYAADYCEPEEAERVLRDFVGPAAADLEANHIRMRIGRSHRAWVNNCVGIGLSAGFVEPLQSTGIFLIQHAIEQLVRYFPGTDRDPVLRDTYNLSTARAIEGVREFLILHYRGAARADNDYWRDAKKRPVPEDMAVRMEQWQSKLPDNDTTYPYYHAFEPYSYVCMALGLGGIPLRHPPALDLLDTRAARAELTRVREQARKLVDTLPSQVEYLSGLR

SEQ ID NO: 84670 - protein, 514 aa, Streptomyces spectabilis
  misc_feature (1)..(514): tr|A0A516R376|A0A516R376_STRST Tryptophan 7-halogenase OS=Streptomyces spectabilis OX=68270 GN=FH965_05605 PE= 4 SV=1
MTLPDSEEFDVVVVGGGPAGSTLAALVAMRGHRVLVLEKEHFPRHQIGESLLPSTVHGVCRLTGVADELAAAGFPRKRGGTFRWGANPEPWTFSFAVSPRMSGPTSYAYQVERSTFDHILLKNARRVGADVREGCAVLDVVADDERVRGVRYTDADGHERRALASFVVDASGNKSRVYQGVGGTRAYSEFFRSLALYGYFEGGKRLPEPNSGNILSVAFESGWFWYIPLSDTLTSVGAVVRRELADKIRGDQDKALRALIAECPLISEYLADAHRVTTGQYGKLRVRKDYSYHHTTFSRPGMVLIGDAACFVDPVFSSGVHLATYSALLAARSINSVLAGTVDEPRALREFEARYRREYGVFYEFLLSFYEMHHDEDSYFWQAKKVTEADRPELQSFVELIGGVSSGERVLTDADVVAKRFRAGSAEFADAIDEVAGSADGSMVPLFKSSVVREVMQEGGQVQMRALLGEDAEAEAPLYGDGLVPSADGMLWCEPRGTGASDPAAGDAPGRAGE

SEQ ID NO: 84671 - protein, 533 aa, Streptomyces sp.
  misc_feature (1)..(533): tr|A0A0M9Y993|A0A0M9Y993_9ACTN Tryptophan halogenase OS =Streptomyces sp. WM6368 OX=1415554 GN=ADK51_04660 PE=4 SV=1
MTSSDTRLQKVVILGGGTAGWMTAAYLGKALQGTVDITVLEAPSIPRIGVGEATVPNLQRSFFDYLGIAEDEWMRECNASFKMAVRFVNWRTDGQGESTARELPGGGPDHFYHPFGLLPDYDQTPLSHYWFKRKYEGRTTEPFDYACFREPPVMDAMKAPRWLDGRPATRYAWHFDAQLVADFLRRFSTEKQGVNHVQDEMVRVEQDGRGYVTTLHTKGGLALDADLFVDCSGFRGLLINQAMEEPFIDMSDHLLCDSAVATAVPHDDEANGVEPYTSAIAMTSGWAWKIPMLGRFGTGYVYSSKFADQDTATREFADMWGLDVEETKFNHIRFRVGRNRRAWVKNVVSIGLSSCFLEPLESTGIYFITAAIYQLAKHFPDKTFNEGLVNSFNHEIEVMFDDTRDFIQAHFFYAPRNDTPFWQANKKLVLPENIQQKISAYKAGLPINSPITDESTYYGNFEAEFRNFWTNGSYYCIFAGLGLEPDAPLPSLAHRPDSVASAEPLFDAVKRQQQNLLETLPSAYDYLRQLHGA

SEQ ID NO: 84672 - protein, 507 aa, Shewanella sp.
  misc_feature (1)..(507): tr|A0A2R3EQE7|A0A2R3EQE7_9GAMM Tryptophan halogenase OS =Shewanella sp. WE21 OX=2029986 GN=CKQ84_02085 PE=4 SV= 1
MTIRKVAIVGGGTSGWLAANHLGLVLKNNPELSITLIESLDIPIIGVGEGTVPSIRKSLSSFGISESDFIKSCDVTFKQSIKFVNWLDRAKHGNNNFYHHLFDMPSPLGEDLTPYWLTHPREHFADLVSPQHAVCEENKGPKFITTPEYGGVMGYAYHLNAAKFAKLLAKNAIERFNVEHIYATVNDISLEKDGSICSLLTDKGELFFDLYIDCSGFESILLAKGFDVPFIDKSHQLFINTALVAQVPTQALDQIPPFTIATAHQAGWIWDIALTQRRGTGFVYSTDYMSNAEAEDTFDQYLGGQLADLSHRKIAMKVGYRQQFWVKNCVALGLAQGFLEPIEATSILLTDFSARFLAERFPSDKDDIDYLAKRFNETVSQAWERVVEFAKLHYCLSDRSDSAFWRDNRTDETIPEGLKQRLKMWQDFIPIAEDFPSKFEVFNRENYLYVLYGMKYSTRPTYSNAEVDQRVVQHLAKMTLLKSKMISELPDHRELLDKIRLYGLQSI

SEQ ID NO: 84673 - protein, 521 aa, Xanthomonas vasicola
  misc_feature (1)..(521): tr|A0A2P5ZUJ0|A0A2P5ZUJ0_XANVA Tryptophan 7-halogenase OS=Xanthomonas vasicola OX=56459 GN=FQJ88_10835 PE=4 SV =1
MPHTMPSDPQQRPVRRIVIAGGGTAGWMAAAAMSKLLGRHLQITLVESDEIGTVGVGEATIPSLVTFHRLLEIDEAAFMAATQATIKLGIAFEHWRDVDRHYIHSFGHAGTDHWSAGFQHFWLKGQQRGVARDFGDYCLELRAAQEGRFAHLPNGGMNYAYHLDAGLYARFLRRFSEGFGVTRIEGRIGQVETNAESGFLTALTLQDGTRVEGDLFLDCTGFAGLLIGKTLGVGSDDWSRWLFADSALAVQTESVGPPVTYTRSRADQAGWMWRIPLQHRVGNGIVYSSRHMDQDSARVVLERNLTGRALTAPRPLRFTPNQRHRVWEKNCVALGLASGFLEPLESTNIHLIQRGIIRLLQTFPQVINAVDIAEYNRQAADEITHIRDFVILHYHATDRRDTPFWRDCAAMDIPDSLRHRVELFRQSGRVFHQANELFAENSWVQVLLGQGIVPQQHHPVADLMGDAELSRFLETIRTRVEGALVRLPAHADFLQRYCPAPPPPEPAARVPAPTVMATPAG

SEQ ID NO: 84674 - protein, 480 aa, Burkholderia pseudomallei
  misc_feature (1)..(480): tr|A3N9R2|A3N9R2_BURP6 Putative tryptophan halogenase O S=Burkholderia pseudomallei (strain 668) OX=320373 GN=B URPS668_2048 PE=4 SV=1
MHLPNRTQVLVIGGGPAGATGAAFLAREGVEVTLVDKEVFPRYHIGESLLPSCLEILTLMGARDTFDRHGFQRKPGAYFNWKGETWKLDFGELGGTYRYSYQVRREEFDHLLLQHARAVGAQVHEGVSVREILFDDGRPCAALCVAQGTEEASTVEFDYLVDASGRNGLMSTRYLDNRKFHEIFRNVAAWGYWEGLSWPDDCAPGSILVSSIPDGWWWAIPLADRPTSVGVVMHRDAFVAARRTGTLEQVYAQALALSPVMANLTEHARLVTPLKTEQDYSYTCDSFAGNGYFLSGDAACFLDPLLSTGVHLAMYSGMLAAASLASILRAEVTEREAAAYYRDSYRQAYLRFLVFVQTFYEAHGKLGYYSKADELSHYMIEAGDIRRAFLNLVSGLEDIADAEQATSHLMGEMSRRIDQNLALRKDKRALSSAIGSTQVEDNARFFDAIEGLPCLSANMALDGLYVSTRPRLGLQRVAAM

SEQ ID NO: 84675 - protein, 510 aa, Sphingomonas sp.
  misc_feature (1)..(510): tr|A0A4V1ACH2|A0A4V1ACH2_9SPHN Tryptophan 7-halogenase OS=Sphingomonas sp. AAP5 OX=1523415 GN=E2E30_04530 PE=4 SV=1
MTGQSERIHGERAIRSIVIVGGGTAGWMAAAMLARRLEKQPVAITVVESSAIGTVGVGEATVPGIRDFFREIGVTEREVMAASHGTVKLGIEFADWKRPGHSFFHPFGLYGMRSRGVAFHHYWQKLRAAGEPVELADYCLATAMAKQNVFMLPTDRPVHDLLFFDWAVHFDAGLFAKFLATRAVSDGVTRVDATISTVRINAQTGLIDGVDTNCGKAIDGDLFIDCTGFRSLLLGAALGSGYEDWSNLLPCDRAVAMPCERAGPLTPFTRSTAFAQGWQWRIPLQHRVGNGLVYASRHLSDDEAVATLRSRIEGAPLAEPNLIRFRTGHRRDFWRGNCVGFGLAAGFMEPLESTSITLIQTGVEKLLALFPDRDFDPALASEYNRSTTLEYERIRDFLLLHYWANDRRGEPMWDQCRDTALPEALANKLRLFRARGHLVRYEWESFQDPSWLSMYAGFEIAARTYDPAADYFSIPDLQSALARMRESIGKAVALAEPHDAFLKAYAVASA

SEQ ID NO: 84676 - protein, 506 aa, Sphingomonas sp.
  misc_feature (1)..(506): tr|A0A4P6XCW2|A0A4P6XCW2_9SPHN Tryptophan 7-halogenase OS=Sphingomonas sp. AAP5 OX=1523415 GN=E2E30_06895 PE=4 SV=1
MSDSAKDLARDGAIVILGGGTAGWIAACLIAQRWPSARVTLVESPEIGIVGVGEGSTPQLKGFFDRLGIAEAEWMPACDATYKLGIGFAGWSDRPGFERYFHPFPTALDSHTAGAFFYNTRARRTGRDVAAHPDQFLLPARLAAAGCAPQPDESFPFEVSYGYHFDAYKVGAFLGRHAVTKLGVTHLQRRVESVERRADGGIAALLCDDGARIAGDLFLDSSGFRSLLFEGTLSVPFVRYGDSLFNDSAVVMPTPRDPAAPLASQTRATALSAGWVWNIPLTSRTGNGYVYSSRHISRDQAEAELRAHLKVGDEGTARHLSMRVGRVAESWSHNALAVGLAQGFLEPLEATALHIVIATVEAFLDAVDADGFTEKARAPFNARIAARYDGVRDYIVAHYRLNQRHADPHRYWAAARAVEPSDTLKHVMSAWFTGADLTATIDQLDITRYYNAISWHCLLAGYGTFPDDARLVPPGPDIERIDMVRIEDFLRRCAHNFRPHTDHLPR

SEQ ID NO: 84677 - protein, 503 aa, Sphingosinicella sp.
  misc_feature (1)..(503): tr|A0A4P6FP91|A0A4P6FP91_9SPHN Tryptophan 7-halogenase OS=Sphingosinicella sp. BN140058 OX=1892855 GN=ETR14_09 110 PE=4 SV=1
MSEAALDQSAEGPIRSIVIVGGGTAGWMSAAYLARKLRHLPIAITVVDSAQIGTVGVGEATVPAIRDFLAAVELKDVDVLRETEGTVKLGIRFVDWARPGHQFLHPFGLYGVPARGVAFHHYWLKLLAAGDALPLSDYCLCTQLAENGLFLAPPDRPTSDLGIFDFALHFDASRFAAMLKRLSLANGVRHIDGVIEQVAQDPERGDVTSVALADGNRIEGDLWIDCSGFRGLLIAGALETPFLDWRHWLPCDRAVAIGCREAQPHKPVTTAAAREAGWQWHIPLQHRIGNGYVYCSDHIGDDEAEAALRSRLEGDPVSAANRLRFTAGHRAETWHRNVVAIGLSAGFLEPLESTSITLIQSGLERFVQLFPDRSCDPRLAATYNRQSTLEFERIRDFLLLHYLGNARIGEPFWDRMRGMALPDTLQAKLDAWRARGEFVRYEWESFQNPSWLSLYAGFGDLPRRYSPLADQFTEAELRDTFARMRAAIAGTVKLGVPHRSILA

SEQ ID NO: 84678 - protein, 506 aa, Xanthomonas campestris
  misc_feature (1)..(506): tr|A0A517GTX2|A0A517GTX2_XANCG Tryptophan 7-halogenase OS=Xanthomonas campestris pv. glycines OX=473421 GN=FPL 04_21375 PE=4 SV=1
MIPAPLRNIVIVGGGTAGWMAAAAFARVLGPGFKVQLIESEQLGTVGVGEATVPHIKAFNNLLGIDEAEFVRQTQGSFKLGIEFVDWQRPGTSYIHGFGTQIGHPLGLLPFHQYWIKQHARGKAQPLGAYTLNTVAAVRGKFMTSAGDVPANSPLANIAYAYHFDATQYARFLRTYAEQRGVTRIEGLVEQVQLHADSGHVQSLQLASGQVVSGDLFIDCSGFRGLLIEEALHTGYHDFTHWLPCDRALAVPSENVGPPTPYTRSTARAAGWQWRIPLQHRTGNGYVYSSAHISDDEAAATLLANLEGKPLSDPRPLRFTTGRRKQFWNRNVVALGLASGFLEPLESTSIHLIQAGISRLLELFPREGISPVLVQRYNDRLAFEFDRIRDFLVLHYHATERDDSAFWRHCRTMPITPELQTTLDLFRDSGRFYRNAEEMFAEISWVQVMVGQGILPRAYHPLVDQVPDHDAERFLASVAQTIGHCVDVMPTHQQFIDRYCKAAAPR

SEQ ID NO: 84679 - protein, 514 aa, Sphingosinicella sp.
  misc_feature (1)..(514): tr|A0A4P6FXG8|A0A4P6FXG8_9SPHN Tryptophan 7-halogenase OS=Sphingosinicella sp. BN140058 OX=1892855 GN=ETR14_01 435 PE=4 SV=1
MTKEVIVVGGGTAGWVTAAYLAKRLNAASQGGIRLTVIESPDIPVIGVGEGSFPSIRKTLSAIDIDEADLIREANATFKQGIRFADWRAPGPDGPHHYFHPFQISDQSDGLDLLPYWLMGAAGDAAWAEVNTVQKSAADACLAPKLPGHPPFAGPLTYAYHFDAVLLGRLLRKRAVALGARHVEDKVTGVELGEDGSIAALLCREGGRVAADLYVDCTGFRAQLIGEALGIPFHSRRGELFVDSAVALQVPYEQPGGPIASQTIATARSAGWIWDIGLHERRGTGYVYSSAYTDDEAALRTLRAYVGPGADAIEPRLLEFEAGYRQIQWHKNCVAIGLSSGFIEPLEATGIGFAEIAALMLVNLFPWGGDQEVSARQFNAIMVKRYDHVVDFIKLHYCLSDRADSAFWIDNRDPATWSDGLSERLERWRYRAPDFIDVDLNHDIFLAANWQYVLYGMGYKSDLGAQAGAFRYHAEARRAFADIRAQQANAQRLLPSHRALIEQARRPDFRFPKR

SEQ ID NO: 84680 - protein, 505 aa, Xanthomonas vasicola
  misc_feature (1)..(505): tr|A0A2P5ZT76|A0A2P5ZT76_XANVA Tryptophan 7-halogenase OS=Xanthomonas vasicola OX=56459 GN=FQJ88_01965 PE=4 SV =1
MTQAQIRKVVIAGGGTAGWIAACALSHQFRDLLDITLVESEQIGTVGVGESTVPPIRTFHRFLQIDEQEFLRAVAGTFKLSISFENWLRQGDRYIHPFGITGQSTLVCAFHHLWLESQRRGMPGSFGDYCLETVASRVDRFALHGEPAVNYAYHLDAALYAKFLRARSEACGVKRIEGKIQQVTVQPHSGDVASLVLEDGQVIEGDLFIDCSGFRGLLIEQTLHTGYEDWSHWLPCDRAVAVQTEAVGPPVPYTRAIAHEAGWRWHIPLQHRVGNGLVFSSKHLSDDEAHAKLLHDVAAPAVKDPWMVPFRTGRRLKAWNKNVVSLGLASGFIEPLESTSIHLTISAVVRLLALFPAEGIAPSQVQLFNDVSRAEMEHVRDFVTLHYHATQRDEPLWQQCREMELPDSLALRLRAWRERAHAWQGADELFRVDSWTHVLMGQGIAPEQHHPLTRAFADHDLRRLLDGIAQPIQHAVQQMPSQQAFIERYCKAGAQVWGMRRPMPA

SEQ ID NO: 84681 - protein, 492 aa, Sphingomonas sp.
  misc_feature (1)..(492): tr|A0A4P6XCD5|A0A4P6XCD5_9SPHN Tryptophan 7-halogenase OS=Sphingomonas sp. AAP5 OX=1523415 GN=E2E30_05245 PE=4 SV=1
MIASPRRIVVAGGGTAGWMAAAAIARTMGRTAEVTLIESDAIGTVGVGESTIPPLVTYNRLLGIGEADFMRATQATFKLGILFDGWKDGTDRYFHSFGTTGQDHWSAGFQHFWMNGRERGHDASYDAYCLELVAAMEGKFAHLPDERMNYAYQLDSSLYAQFLRRMAEGDGTRRIEGKIARVALDGETGDVAALHLESGVVVEGDLFLDCTGFRALLIEQALHAGYDDWSHFLPCDSAIAVQTENVRPPVPYTRAMAHDAGWQWRIPLQHRTGNGIVYCSRYLDRDAALERLLGNVEGTVLTEPNNIRFVTGARRRQWHRNVVAIGLSGGFMEPLESTSIHLIQRAILRLIRMMPGGAISPRDVAEFNDQQFADMEQIRDFLILHYKATNRRDSPFWRQCAAMEVPESLAQKIALFRETGRVFRRNEELFAENSWVQVMLGQGIEPAAYHPIADKLPDEELARFLGTLRENVARTVAGLPAHADYVAQYCGG

SEQ ID NO: 84682 - protein, 504 aa, Sphingomonas sp.
  misc_feature (1)..(504): tr|A0A0Q4KT19|A0A0Q4KT19_9SPHN Tryptophan halogenase OS =Sphingomonas sp. Leaf33 OX=1736215 GN=ASE86_01645 PE=4 SV=1
MTTNPPIRIVIAGGGSAGWMCAAAFGRFLGPGVIVTLVESDEIGIVGVGEATIPQIRLFNQALGIDEDAFVRATGATFKLGIEFVGWGAAGERYMHAFGDIGRDSGLTPFHHLWLRGRSEGVAGPLSAYSLNNQAALAGRMQRGKPRTAPVLPDMPYAFHFDASLYAAYLRRFAEARGVTRVEGRIVAVERDGASGDVAALMLDHDRRIEGDLFLDCTGFRALLIEGALGAGYEDWTHWLPCDRAMAVPSARATDFTPYTRASAHRAGWQWRIPLQHRTGNGVVYSSAHMSDDAARDQLLANLDSAPLAEPRPLRFTTGRRRELWKANVIAIGLASGFLEPLESTSIHMIQSAIERVLKLLPGRRIAPALRDEYNRQAVFEYERVRDFILLHYVANRRDEPFWRERRETALPDTLRAKLDLWKAAAQITRDREELFTEVGWLQVLIGQGVMPDAWHPLADAMPAAQVAEFLDILPRLTAREVAQMPGHADFIARYCAAAEGVAA

SEQ ID NO: 84683 - protein, 514 aa, Sphingobium lucknowense
  misc_feature (1)..(514): tr|A0A081T0H3|A0A081T0H3_9SPHN Tryptophan halogenase OS =Sphingobium lucknowense F2 OX=1450518 GN=AL00_13725 PE =4 SV=1
MIHPVRNIVIVGGGTAGWLTAGVIAARHRSRIGNGFTVTLVESPNTPIIGVGEGTWPTLRTTLSRMGISETDLFRECDAAFKQGARFARWTTGTPDDGYYHPLMLPQNFGQVNLAPHWLAGDGDESFCDSVCSQGRICDDGLAPKTIATAEYDALANYAYHLDAGKFAPFLQRHCTEKLGVRHVQADVEQVLMKEDGDIRAIRTTQAGEIEGDLFVDCTGFKALLIEGAMKVPFRDCNDVLFCDTALAMQVPYDRPDSPMASHTISTAQSAGWIWDIGLPTRRGIGHVYSSNHISDEEAERELRAYIGPPAEGLSARKIPIRSGHRETFWKGNCVAVGLAAGFLEPLEASAIVLIELSAKIIAEQMPACREVMDIVASRFNATTHYRWGRIIDFLKLHYVLTKRTDSDFWRDNVREETIPDRLQELMLLWRYQSPWFLDEFDRVEEVFPAASYQYVLYGMGFRTEVDRPALARDAHLADRARRENAAMTAKLRAGLPRHRDLIDKIVTHGLQPV

SEQ ID NO: 84684 - protein, 410 aa, Paraburkholderia graminis
  misc_feature (1)..(410): tr|B1G2K1|B1G2K1_PARG4 Tryptophan halogenase OS=Parabur kholderia graminis (strain ATCC 700544 / DSM 17151 / LM G 18924 / NCIMB 13744 / C4D1M) OX=396598 GN=BgramDRAFT_ 3646 PE=4 SV=1
MKHLAADVVIIGAGPAGAVAAALLRKAGRSVLVLERQHFPRFSIGESLLPQSMAYLEEAGMLQAVVEAGFQYKNGAQFVYRDRSSSFDFRDKHSAGWGTTYQVERAAFDDILIRCAAAQGADVRFGHTVQAVHTDSVAPRVDVTDEASHAYQIEARFVFDASGFGRVLPRLLNLEAPTRMPTRAALFSHVYDGLPAGAHDRNKICVATHPERRDVWFWMIPLAGGRSSVGCVAESSFLDVPENEREAMLRALIQKEPTFNRLIGDAPFLMPVRHIGGYSANVERLHGPGYALLGNAGEFLDPVFSSGVTIALRSAHLAVQTLNRQLDGEQVDWSAQYDVPLRKGIDTFRAFVERWYTGELQDIIFYPDQTPSIRRMISSVLAGYAWDESNPYVADPVRRLNALHEVCTQR

SEQ ID NO: 84685 - protein, 496 aa, Sphingomonas sp.
  misc_feature (1)..(496): tr|A0A0Q4KDU5|A0A0Q4KDU5_9SPHN Tryptophan halogenase OS =Sphingomonas sp. Leaf33 OX=1736215 GN=ASE86_01665 PE=4 SV=1
MTEPAPTIVILGGGTAGWMTACLMAQAWPAAAITVIESPDIGIVGVGEGSTPQLRAFFRDLGIAETDWMPACSATYKAGIRFAGWSQDPGFDSYIHPFASDVDLHTEPAFHAAALARRTGHDVPAHPDAFFLNSWLIEHRRAPLPTDNFPFDAAYGYHFDAHLVGAYLRDHAVGRGVAHLPRTVTDVVVGADGDVRHLLFDDGHTLTADLFVDCSGFRSVIAQEALGVPFVSFASNLFNDRAVVMPTPSDPTGTDVHTTATALSAGWAWAIPLTSRVGNGYVFSSRYLDAHDAEAEFRAHLGVGDAGTARHLTMKVGWVATSWTGNCLAVGLSQGFIEPLEATALHIVQATVEGFIAAWDSAGFTPARRDEFNRVIARRYDGIRDYIVGHYRLNRRTDTPYWRDAATMDTLSDSLKSLFTAWFTGRDLVEEVARQDIAKYYAPLSWGCLFGGYGTYPDAARLRTGTSVDTGRIAHFLTACGRNFPAHDAVLALRRG

SEQ ID NO: 84686 - protein, 575 aa, Rhodopirellula sp.
  misc_feature (1)..(575): tr|M5TAB5|M5TAB5_9PLAN Tryptophan halogenase OS=Rhodopi rellula sp. SWK7 OX=595460 GN=RRSWK_06749 PE=4 SV=1
MTAPIEFNPTTLRPLGGLNAANAGVDRDCHIVIVGGGTAGWMSAATLKRRVGCRVSVVESDRLPPIGVGEATIPAMVDWIENMGIDEDEFIRRTGATYKLAIRFDDWIESSHRYWHPFGICGCPINGSDLIHTWQRGVREGWLPSDSQYTDHSFQRELCEQGCAPREPDCPSVAQNYAFHLDAGKLAGFLKEVALDEGVRHYVGDVDGATVDERGNIACLHLDGEPALAADLYLDCSGFASVLIERELQSPWEDWSDQLICDRAITLRLPSRHGTNERCVKDHDSGQRHARLPPYTISKGMDAGWSWQIPLAASTGCGYVFSSKHITDDAARRELCELVGVDPETIQTKTVPMRVGMRRNQWIGNCVALGLAAGFVEPLESTGIFLVQRALDELVECLPPATPLAFHADHFDQETFNDRMTDVYHQVRDFVLMHYVVSRRRDTPFWTDAASVVLPESLSTLMEEYVTTGRVLLPARDPTFAEANHHFILSPAGIEPGVCPPSGQDSVSFSPQMHADSAAALLTAIRSRHQEICTRLPTHGDLIHAIHGSAPASDARVGAHRLPPQPTLHRVNVLS

SEQ ID NO: 84687 - protein, 502 aa, Parashewanella spongiae
  misc_feature (1)..(502): tr|A0A3A6UBD1|A0A3A6UBD1_9GAMM Tryptophan 7-halogenase OS=Parashewanella spongiae OX=342950 GN=D5R81_03305 PE= 4 SV=1
MKMLPFGSIFFRGYNMKKKIDVKKVIIVGGGTAGWMTAAMLSKLLGTQIEITLVESTTVGTVGVGEATIPSIQLFNSTLGINETDFVKATQASFKLGIQFEGWGNEDSDYMHAFGVIGKDLGLSSFHYYWLQQAESAKKFWDHSLNYQTAKANKFSLTKTQNEELAYAYHFDANLYAQYLKKISLSQGVKCVEGFISEVRLNDESGFIQEIELETGEILSADLFIDCSGFKGLLIEQALNTGFDDWSDYLPCDHAWAVPSEKIDSIKPYTRSIARDAGWQWQIPLQHRVGNGLVFSSTYMSPDTAKKKLIASLPSKPLAEPKLIKFKTGMRKKQWNKNCVAIGLSSGFLEPLESTSIHLIQSAILRLIQLFPKTITTEIEDEFNHLSRMEFEEIRDFIILHYHLNNRRTSFWKYCREMDIPESLSRRIRLFTKHARTNIGNQELFSATAWQQVMIGQGIIPENNHPISNVANEKQTKAFMQHNKLRIREIVKGYESHESFFI

SEQ ID NO: 84688 - protein, 501 aa, Duganella sp.
  misc_feature (1)..(501): tr|A0A4Q7XTE7|A0A4Q7XTE7_9BURK Tryptophan halogenase OS =Duganella sp. BK054 OX=2512136 GN=EV297_1842 PE=4 SV=1
MPAKPIRKIVIVGGGTAGWMSAAPLALRLGNACEIVLVESAEIGTVGVGEATLPTIRYFNHALGLDNADFVRKTQATFKLGIEFKDWGHIGNRFFHGFGDFGPAIENRSPVTYWLRLAREYRDMPSYEEWSTATAMARNNRFMEPYGDQPAVTNAFSYAYHFDASLYAAYLRDYAMERGVQRVEGMINEVEQHPETGFITALKLKDGRRVEGDLFIDCSGFRGLLIEGVYQAGYDDWSAMLPCNSAQAVPCEKVEPLTPYTTSTARSAGWTWRIPLQHRTGNGHVYCNGFTSDEEAGRVLLDGLDGTALDSPRQLRFTTGRRRKSWIKNCVAIGLSSGFLEPLESTSINIIENSVGWLLQFFPDLAFRPELADEFNRRVSQRYEYVRDFIILHYKVTQRSDSEFWRYCANMAIPDTLRHQIDLFRATGHVTLYDPDGFGVASHISILMGLGIVPEAYDPLVDLMDLARLREHFSRVRDSINRAVAMMPGHGQLLAQLAGGK

SEQ ID NO: 84689 - protein, 445 aa, Accumulibacter phosphatis
  misc_feature (1)..(445): tr|C7RKA4|C7RKA4_ACCPU Tryptophan halogenase OS=Accumul ibacter phosphatis (strain UW-1) OX=522306 GN=CAP2UW1_0 338 PE=4 SV=1
MQDEAGGTDRRECDVLVIGGGPAGSTVAPLLVEKGYRVVLLEKARHPRFHIGESLLPANLPLFERLGVAGDVRAIGMEKWGAEFVSPQHAMPQAFHFADAWDKSMPYAYQVKRAEFDTILIRNAAKKGVEVHEGCKARAVDFPRDDKAVVRARYDDGREVEWTARFVVDASGRDTFLANRFQIKHRNPRHNSSAVYGHFSGALRNDGQAAGNITIFWFEHGWFWFIPMKDDVTSVGMVTWPYFMKTRGERSIERFLMDGIATCPALARRLAGAQLIHQVEATGNFSYVSERTHGANYLLLGDAYAFIDPVFSSGVLLAMHSGVIGSAAIDTCLKTPAEATAALKRFDQLMQHGPKQFSWFIYRVTNPIMRDFFMGPKNIFRVKEALLSVLAGDIFGKTPIWRSIHMFKLLYYIANAIQPRRAFMGWRRRRFNIRRVDDPALSSAP

SEQ ID NO: 84690 - protein, 505 aa, Xanthomonas campestris
  misc_feature (1)..(505): tr|A0A517GR02|A0A517GR02_XANCG Tryptophan 7-halogenase OS=Xanthomonas campestris pv. glycines OX=473421 GN=FPL 04_15100 PE=4 SV=1
MSQAPIRKVVIAGGGTAGWIAACALSHQFRELLEITLVESEQIGTVGVGESTVPPIRSFHRFLQIDEQEFLRAVAGTFKLSISFEHWRHQGERYIHPFGITGQSTLVCAFHHLWLESQRRGMPGSFGDYCLETVASRVDRFALLREPAVNYAYHLDAALYARFLRTRSEACGVRRIEGRIQQVTLQPDSGDVASLLLEDGQVLEGDLFIDCSGFRGLLIEQALHTGYEDWSHWLPCDRAVAVQTEALGPPVPYTRAIAHEAGWRWHIPLQHRVGNGLVFSSKHLSDDEAHAKLLRDVAAPALKDPWLVPFRTGRRLKAWNKNVVSLGLASGFIEPLESTSIHLTIAAVVRLISLFPADGIAPSQVELFNDISRAEMEHVRDFIILHYHATQREEPLWRQCRAMELPESLALRLRAWRERAHAWQAADELFRVDSWTHVLMGQGIVPEQHHPLARALSDRDLRRLLDGIAQPIRHAVEQMPSQQAFIDAYCKAGAGVWGLRSPVVA

SEQ ID NO: 84691 - protein, 494 aa, Duganella sp.
  misc_feature (1)..(494): tr|A0A4Q7XVQ3|A0A4Q7XVQ3_9BURK Tryptophan halogenase OS =Duganella sp. BK054 OX=2512136 GN=EV297_1838 PE=4 SV=1
MNTAYKRIVVVGGGSAGWMAAIALATALPASSVELVESEEIGIVGVGEATFPSIRTFHRLLGIDEARFLRATNGTYKLGIEFRDWRAAGEHYFHTFGDIGGLSGSRSLWGQYRRVGDAGLGALGEQCLPSVMAREGRFQLAASEEQQQFSYAYHFDAMLYADFLRTLALQRGVRRTEGRIVHVERGADGSISQLKLPDGRVVEGELFVDCSGFASLLLGRTLEEPFVDFGRWLPVDRAWACPSERSGPELAPYTRATALEAGWAWRIPLRSRTGHGHVFSSRYIDEERAREQLMQQLDGAPVAEPRLLRFATGHRQRFWVHNVVALGLSSGFLEPLESTSIFLVQSGLGRLIEVLLAGARPAPAEVAAYNTGMQRQFERVRDFIILHYCLTARRDSQLWRDMASMALPETLAFKIHAWRQSGTLHQYDEEGFDATSWLAIHAGMGHWPERADPSLHDISHEDALLALRFRRDSIAATVAAMTTHQDYLQSVLAR

SEQ ID NO: 84692 - protein, 506 aa, Pseudoxanthomonas sp.
  misc_feature (1)..(506): tr|A0A1H1GQG4|A0A1H1GQG4_9GAMM Tryptophan halogenase OS =Pseudoxanthomonas sp. CF385 OX=1881042 GN=SAMN05428982 _3358 PE=4 SV=1
MDGNSIREVVVVGGGSAGWMAAAALVRHLDRTCKVRLVESDEIGIIGVGEATVPHIRTFNAQALGLEEAEFVRATQGTFKLGIEFRDWARIGDRYMHGFGTVGHDPGPAAFHHYWLRLRLAGKDVGDIGAYQLQTVASREDRFLPGASDVPPTSPLASVAYAYHFDATLYARYLRGFAEGQGVERIEGKVVDVELRPEEGFVSAVVMADGRKVEGDLFIDCSGFRGLLIEQALKTGYEDWSHWLPCDRAVAVPCARVGDPTPYTRSTARTAGWQWRIPLQHRTGNGLVYCSRFLSDDEAAGTLLANLDGEAQAEPRPLRFVTGKRKQFWNRNVVAVGLASGFMEPLESTSLLLIQTAILRLLDMFPRQGIDPGLVARYNERTHFEYDHIRDFLILHYKAVERDEPFWRKCREMAIPDTLRANIDLFRNSGRFYRDGEEFFALQSWIQVMLGQRIVPKAYSPLVDRLSEAEVEAFVANVRQTIERCVQAMPKHQAFIERHCRAPAVG

SEQ ID NO: 84693 - protein, 435 aa, Rhodopirellula sp.
  misc_feature (1)..(435): tr|M5TF59|M5TF59_9PLAN Tryptophan halogenase OS=Rhodopi rellula sp. SWK7 OX=595460 GN=RRSWK_05025 PE=4 SV=1
MILRTGVKTMKTSYDCVVVGGGPAGGTAASIVASAGLSTLLIEREAVPRFHVGESLMPEAYWPLERLGLIDKMKTSGWQQKKSVQFVTHTGKESEPFFFREHDERECSTTWQVERSEFDKMLFDRAAELGADCRDRTRLVEVKFDPTDSPDTPPRASGVVIRDAAGQDHTIECRVVIDATGQQSFIAGRLGLKEVNPNLKKAAIWTYYKDAIRGDGDNEGATIILNSENKNAWFWFIPQSRGITSVGCVADHEYLLKGRGTPEEIFGEELASCPGLIPRLSSATRVGKFTTAKEFSYMTRQHAGPGWALVGDAFGFIDPVYSSGVYFALEMGVRAGDAVVEGLQNNDLSGDQLGKWAPEFKAGAERIRKLVHAFYDKDFSIGRFMREFPQYRGNVTDLLIGRVFTDDAGRMFPDMQQSIENTRQQKLAAAKEMNA

SEQ ID NO: 84694 - protein, 509 aa, Pseudoxanthomonas sp.
  misc_feature (1)..(509): tr|A0A1H1GAL4|A0A1H1GAL4_9GAMM Tryptophan halogenase OS =Pseudoxanthomonas sp. CF385 OX=1881042 GN=SAMN05428982 _3102 PE=4 SV=1
MLTPDAPEGHIRNVVIAGGGTAGWLAACALSHQFRDRLRITLVESEQIGTVGVGESTVPPIRTFHRFLQIDEQEFLRAVAGTFKLSISFENWRRPGERYIHPFGITGQGTWAAAFHHFWLDSQRRGMSSELGDFCLETVASRGDQFSLQTQPQVNYAYHFDAGLYAKFLRRIAEGYGLLRVEGKIREVRQHVGEGSLQSLVLEDGQVIEGDLFIDCTGFRGLLIEQTLQTGYEDWNEWLPSDRAVAVQTESIGPPVPYTRAIAHEAGWRWHIPLQHRVGCGLVFSSRHMSDDEARAKLLRDVGAPAIRDPWLVPFRTGRRLKAWNKNVVALGLASGFIEPLESTSIHLAISAVVRLVQMFPFDGIAPSLVELYNDVSRAEMEHVRDFIILHYHATQRDEPMWKACREMALPESLEIRLCAWRERAHAWQDPDELFRVDSWTHVLLGQGISPGPPHPLARALADNDLRSLLSSIRQPIERAVATMPSQQAFIDRYCKAGPDVWGNRSMPR

SEQ ID NO: 84695 - protein, 520 aa, Duganella sp.
  misc_feature (1)..(520): tr|A0A4Q7XG15|A0A4Q7XG15_9BURK Tryptophan halogenase OS =Duganella sp. BK054 OX=2512136 GN=EV297_2690 PE=4 SV=1
MVPIPTRRILIVGGGSAGWLCAAYLAKMFGDSKEITLVEAPEIGAIGVGEGSFPSLRATLAALGIPEAEFVRESSATFKQGITFHNWLYGGDHYFHPFSMPSQRPGAPELLPYWLQGLAGEVPFAEAVTMQKRVVDAQRAPKRAGDSDYNGPMNYAYHFDAARFAGLLARHARKLGVRHVQDHVDGVQLGHDGAIASVDTRGHGALTADLYIDCSGFRALLIGGALGSPFRSVSDVLLCDTALAVQVPHPAPDTPIASATISTAHEAGWTWDIGLQERRGIGYVYSSRHTSDERAERILRAYAGPAADGLNVRKIPMRVGYREQHWIKNCVAIGLAGGFLEPLEASGIGLVETAVHMLGALFPHNGDMAPLARHFNQFMTERYARIVDFIKLHYCLSQRREQFWIDNCDPATWTDSLRDKLAMWRCRPPQRMDFLTDFEMYPPTSWQYVLYGMGFPTAMPALPGLPPLAEAARREFANIAAVSARAVADLPDHRALVAQLCQHENAFRNDFHAIRATASH

SEQ ID NO: 84696 - protein, 521 aa, Xanthomonas campestris
  misc_feature (1)..(521): tr|A0A517GU67|A0A517GU67_XANCG Tryptophan 7-halogenase OS=Xanthomonas campestris pv. glycines OX=473421 GN=FPL 04_20465 PE=4 SV=1
MTDTASSDPQQRPVRRVVIAGGGTAGWMAAAALSKVLGRHLQIVLVESDEIGTVGVGEATIPSLVTFHRLLEIDEAAFMAATQATIKLGIGFEHWRDVDRHYIHSFGHTGTDHWSAGFQHFWLKGRQRGLARDFGDYCLELRAAQEGRFAHLPNGGMNYAYHLDAGLYARFLRRFSEGFGVQRIEGRIGSVETDAHSGYLTALTLDNGTRVEGDLFLDCTGFAGLLIGKTLGVGTDDWSQWLFADSALAVQTESVGAPVAYTRSRADQAGWMWRIPLQHRVGNGIVYSSRYMDQDSAAQVLQRNLSGRALTQPRALRFTPNQRHRVWEKNCVALGLASGFLEPLESTNIHLIQRGIIRLMQTFPQVINDVDIAEYNRQAAAEITHIRDFVILHYHATDRRDTPFWRDCAAMDIPDTLRHRVELFRQSGRVFHQANELFAENSWVQVMLGQGITPKQHHPVADLMGDAELRHFLETIRTRVDAALVRLPAHADFLRRYCPAPPLPEPATRLPADAALATGVR

SEQ ID NO: 84697 - protein, 507 aa, Pseudoxanthomonas sp.
  misc_feature (1)..(507): tr|A0A1H1GYI9|A0A1H1GYI9_9GAMM Tryptophan halogenase OS =Pseudoxanthomonas sp. CF385 OX=1881042 GN=SAMN05428982 _3455 PE=4 SV=1
MTASHHRIRSVVVVGGGSAGWMAAAALATYLGKQASIRLVESEEIGIVGVGEASVPYMKQFNSGVLGIDEFEFVARTQGTFKLGIQFNDWGSLGESYVHGFGKIGQGVGPLPFHQFWLKLFLAGHARPIGEYSLPTLAAPRGKFMASPANAPPESPLADIAYAYHFDAALYAGFLRELSERRGVQRTEGKITGVLQRSEDGFIEAVVLDSGEQVTGDLFIDCSGFRGLLIEQTLKTGYVDWTHWLPCNRAMAVPCATVGPPTPYTRSTALAAGWQWRIPLQSRVGNGYVYSSEHISDDEAAATLLANLDGRALADPRPLRFTTGMRRKLWNKNVVALGLASGFMEPLESTSIYLVQSGIQRLLGLFPGRNFDPLLERQFNEESAFEYESTRDFLILHYCATRRSDSAFWDYCRTMRIPATLQRKIEMFREGGRYFRTGDEFFALPSWVQVMLGQGIVPTGYHPIVDDMPEQALIEHVARVHRAIAGSVEAMPLHQDFIDRHCRAPAV

SEQ ID NO: 84698 - protein, 251 aa, Parvularcula sp.
  misc_feature (1)..(251): tr|A0A355BXE1|A0A355BXE1_9PROT Tryptophan halogenase (F ragment) OS=Parvularcula sp. OX=1979207 GN=DDZ68_01950 PE=4 SV=1
KDGLNSETRAIAMNAGWRWDIPLTNRSGNGYVYSSDFISADAAERELRTALGLLDADAPARHLKMKVGRVDRHWERNCLAVGLAQGFIEPLEATALHLVQATIEGFIETFEKTGFEDAGRRRFNERINARFEGVRDYIVCHYQASFRDDAEYWRANAANSKRSPSLQSMMNCWRAGSDIREEVRRQDIGKYYTDMSWTCLLGGYGDYPRELRAPAPEERRFDMGVIDDFIERASLNFPDHRAALSSLQAAE

SEQ ID NO: 84699 - protein, 512 aa, Sphingosinicella sp.
  misc_feature (1)..(512): tr|A0A4P6FYJ7|A0A4P6FYJ7_9SPHN Tryptophan 7-halogenase OS=Sphingosinicella sp. BN140058 OX=1892855 GN=ETR14_16 025 PE=4 SV=1
MVVNEPLKIVIVGGGTAGWMAAAALSRILGPRICSVQLIESDEIGTVGVGEATLPHMKSFNDSIGLDEAEMMRATNGTFKLGIEFVDWGAMGRRYVHPFGDHGRPLAGLPFHQHWLRAAQSGAEFDIGDFSYAIVASRLNRFDFPSADPDKIEHTYSYAYHFDASLYARLLRRLSEASGVRRTEGKIQDVVLDPESGDIAALRLQSGETITGDFFIDCSGFRSLLLGEALGSQWDDWSKWLPCDRAFAVPSERATDFTPYTRSTARAAGWQWRIPLQHRTGNGHVFSSAFISEDEAADTLMRNLDAKALGEPRMLRFKAGRRLKSWTRNCVALGLASGFLEPLESTSIYLVQVAIVNLLPLLPRGPRDPVLADEFNRRTDIEYERIRDFLILHYHANTREDSELWRYCRAMEVPESLERRLALYRHSGFIEQYRDGLFTLPSWVSLYAGQDVRPTGHHPMADVLPRDRLIEQLGVLRDQVRTRVEQMPDHADFVARYASADGLQAGAGTVRS

SEQ ID NO: 84700 - protein, 513 aa, Sphingosinicella sp.
  misc_feature (1)..(513): tr|A0A4P6FXW6|A0A4P6FXW6_9SPHN Tryptophan 7-halogenase OS=Sphingosinicella sp. BN140058 OX=1892855 GN=ETR14_01 045 PE=4 SV=1
MVVGGGTAGWLAACLVAARAERAPAGRLQVTLIESPDVPTIGVGEGTWPTMRRTLQRIGIAEAEFLLCCDAAFKQGSRFDGWVSGEPDDQYFHPFTPPVEADPDAVVQAWQALDARSFAETVSPQARACGLNLAPRQRTMADFAGALNYAYHLDAGKLVDLLRSHATQRLGVRHLRDHVVSVDAASNGDIAGVRTRSTGIVEGDLFLDCSGHSALLLGEHYGVPFVDRSDVLFNDRALAVQVPVAPESPIASQTCATAHAAGWIWDIGLPTRRGVGCVYASAHASDDAAAAALEAYLRKTAPDVSVDPGAFRRLSFRSGHRQRFWERNCLAIGLSAGFLEPLEASAIVLIELSLDALLDNFPVTRDVMDIHARRFNALFLYRWDRIVEFLKLHYVLSRRSEPYWRAHRDPASIPARLSELLQIWRHQAPSRADLPMADEIFPAASYQYVLYGMGFPAPAHAPVKADAAGTVEPLLRQAEQRGRALFASLPTNRAYLDALRAQATSSPPLVTTC

SEQ ID NO: 84701 - protein, 503 aa, Parvularcula sp.
  misc_feature (1)..(503): tr|A0A357LG45|A0A357LG45_9PROT Tryptophan halogenase OS =Parvularcula sp. OX=1979207 GN=DEA50_10970 PE=4 SV=1
MTDHPRAIRKILIAGGGTAGWMTAAALSSTLSQGCEIVLVESEEIGTIGVGEATIPPIRLFNDTLGIDERDFVRETQGSFKLGIEFVNWSRKGHRYFHPFGPHGRPFDIVAVHQHWLRARAEGEQASFDDHSMAWAMAKAGRFNKPAADPRSVLSTFDYAYHFDAGLYARYLRRYSEERGVMRVEGKIGGVEQNAESGFVERILMQDGRILEAELFIDCTGFRGLLIEGALKAGYEDWTRWLPCDRAAAAPCAKSGAFTPYTRSTALDAGWQWRIPLQHRTGNGYVYSSNFISDEAALETLLGGLDGAPLAAPNQLRFVTGMRRKFWDRNVIAIGLASGFMEPLESTSIHLIQAGISKLLALFPDRDFDPLIIAEYNRIAVTEFERIRDFLILHYKLTERDDAELWRYCQSMSVPDTVQFKIDHFRRYGRHIAREMDLFGAPSWHAVHIGQFNMPERTDPVAGYRTVNSREWLAKLRAAMTAEAQRQPEHQAFIDQHCKAAAR

SEQ ID NO: 84702 - protein, 512 aa, Sphingosinicella sp.
  misc_feature (1)..(512): tr|A0A4P6G4K9|A0A4P6G4K9_9SPHN Tryptophan 7-halogenase OS=Sphingosinicella sp. BN140058 OX=1892855 GN=ETR14_17 390 PE=4 SV=1
MRNTRARNAPLKDIVIVGGGTAGWMTAALLSKLLSRHYVIRLVESDEIGTIGVGEATIPSIRTFLQLAGIDQVEMIKATQATFKLGIEFVDWRDLGTSYIHGFGKIGQDMLWLHPHQLWLKMTAKGQARHFDHYALNCMAARKNRFCPPDPRQTGSPLADIDYAFHFDASLFAAFLRKESEKRGVERIEGHILSAERDGESGLLSRLLLADGRTIAGDLFIDCSGMRGLLIGDILGVGYEDWGHWLPCNRAFAVPSESAPVLTPYTRSTARPAGWQWRIPLQHRTGNGIVFSSDHWSDDEAAAALLANLDGKALGEPRLVRFRPGMRARSWDRNVVAIGLASGFLEPLESTSIHLIQTAILRLVALFPGTAFNPTDIAEYNRQTAFEYCDVRDFIIAHYKVTDREDTAFWRYVKHMEVPDSLAERLALFRDSARFFVHGKAELFREESWVQVLIGQGLDMHYDPMVDMIPEAEVANHLRDIEEVIADVAERMPRHEDFIARQCRAPAILATG

SEQ ID NO: 84703 - protein, 521 aa, Parvularcula sp.
  misc_feature (1)..(521): tr|A0A355C417|A0A355C417_9PROT Tryptophan halogenase OS =Parvularcula sp. OX=1979207 GN=DDZ68_13565 PE=4 SV=1
MDAEASTQDAPVSSVTIVGGGTAGWMTAAALSKLLTRVKVRLIESDEIGAIGVGEATIPHIRNYMALAGVDQLRMLHASKATFKLGIQFVDWGAPEESYIHGFGRIGRDMLWLHTHQLWLAARERGVKVSHFDQYSINCRAALDNRFRFQDPRLSNTPLADLDFAYHFDASLFAAFLRGECEKRGVERIEGLVVNVTTDSETGFVRSVDLKDGRSVGGDLFVDCSGMRALLIDGAQGVGYEDWSQWLLCNRALAAPSESVSPLAPYTRSTAKKAGWQWRIPLQHRIGNGLVYCADLVSDDEAAATLLSGLDSAPLADPRPVRFRPGRRREAWRNNVVAIGLSSGFLEPLESTSIHLIQTAVHRLIALFPARGFNMADIDEFNLQTKLEYEDIRDFIIAHYKVTRRRGDPFWDHVREMTVPESLARRIALFQSSGRFFGHSKLELFAEESWVQVLLGQGLAACADPVSRFVSDADLAEFLNDIVDTIAKTAAQMPDHAAFISRLPEKEGRLDSAIIAPIKRG

SEQ ID NO: 84704 - protein, 514 aa, Shewanella sp.
  misc_feature (1)..(514): tr|A0A2R3EQ08|A0A2R3EQ08_9GAMM Tryptophan halogenase OS =Shewanella sp. WE21 OX=2029986 GN=CKQ84_00720 PE=4 SV= 1
MKVKQAIRKIIILGGGTAGWMAAAALANNPVFAAIELCLLESDNIGTIGVGEGSTPHLKRFMDNLGISEKDWMEQCHASYKTGIDFINWNGDGQQYFHPFYFQMDVKPAEVFFINANARRRGHGSAVKPDAFFSSGVLAKRNLSPRPNKALPYANEYGYHFDATELANYLKEYACQRGVKHLIGDVIEVSTTQNQHIDALMLANGERLNADFFIDASGFSAKLIHKTLGVPFQSFANELLNDSAVTVPALMDTTQTQQTHDLQNHALQTQAQQAKYHTRATALSAGWLWQIPLTHRLGNGYVYSSRHLSANAAAKELLHSVNLPESTQVRFLKMRVGVSDKAWHNNVLAIGLAQSFIEPLEATSIMMTQFTLEKFMSLFERYQLNKQAETLSRQTLNQAVMQLVLGIKDYIQAHYVTSQRSEPYWLAARKVTISQRLTQRLQAWYQGEDFDLLLYQYDQQLAYFRPSWYALLAGMDYRDPKLKRPFEPISAEITAQAIRYSQTLVEQYFQPKHP

SEQ ID NO: 84705 - protein, 516 aa, Sphingosinicella sp.
  misc_feature (1)..(516): tr|A0A4P6FJ36|A0A4P6FJ36_9SPHN Tryptophan 7-halogenase OS=Sphingosinicella sp. BN140058 OX=1892855 GN=ETR14_08 605 PE=4 SV=1
MESKRRILIVGGGTAGWLAAAYLARSLGLPDNQHVEITLLESAEIGIIGVGEGTFPTIRNTLKFLGIEEARFIRETSATFKQGIRFADWARTPENGVHDHFFHPFEAPFYAEDAELVPYWLLQDPRTRRPFAEAMTIQNRVAEAKRAPKRPDESDFSGPLNYAYHFDATSLAHVLAERAGELGVGHVEDRIEGVETDDRGIARVLTRRHGAIEADLYVDCTGFRAELIGRALGEPLKSIRSVLFTNRALTCKIPYASAAAPLESYTIATAHEAGWIWDIGLRGARGIGCVYSADHVDDDRAADILRAYVGAAADDLSPRRIEFEPGYRERQWIGNCVAVGLAGGFLEPLESTGVVLIEAAIAMVAEMFPHSGPIDAPARRFNQLMAARYDNIITFLKLHYCLSQRQEPFWRDNRDPASIPERLQELLEQWRYRPPGRFDFILDLESFAFFNYQYILYGMGFRTDLSPGRGDFPNVRAADRIFARIRNFGERATQDLPAHRALIEQINAEGEPAFAL

SEQ ID NO: 84706 - protein, 488 aa, Actinoplanes missouriensis
  misc_feature (1)..(488): tr|I0H626|I0H626_ACTM4 Putative tryptophan halogenase O S=Actinoplanes missouriensis (strain ATCC 14538 / DSM 4 3046 / CBS 188.64 / JCM 3121 / NCIMB 12654 / NBRC 10236 3 / 431) OX=512565 GN=AMIS_32430 PE=4 SV=1
MNSESYDVIVIGGGPAGSTVATLTAKKGHRVLLLEKEKFPRYQIGESLLPATVHGIANLLGVADRLGEAGFMRKNGGTFRWGANPEPWTFSFAVSPRLAGPTSHAYQVERMKFDQILLDNARKNGVKVQELCTVTGIVETGGRVTGVRYADADGTPYEATAAYVVDASGNMSRTYKSVSPQRHYSPYFQNLALFGYYEGGKRLPAPNQGNILCAAFDEGWFWYIPLTDQLTSVGAVVRRDSADRVQGDPEAALRKLIDDCPLIKEYLADASRVTTGPYGEIRVRKDYSYCNAPFWRSGMVLIGDAACFVDPVFSSGVHLATYGALLAARSINSCLEGTVDETAAFTEFERRYRREYGVFHEFLASFYSMQADEDSYFWQAKKVTQQNASNLEAFVELVAGTSSGEEALATAHRTSEAIAAGAGALAAATYELDTRPSALHSSGVVAAAMSEGARIQSHALLGGDAGVESPLFDDGLIATDDSLGWTRP

SEQ ID NO: 84707 - protein, 61 aa, Parvularcula sp.
  misc_feature (1)..(61): tr|A0A355C0C5|A0A355C0C5_9PROT Tryptophan halogenase (F ragment) OS=Parvularcula sp. OX=1979207 GN=DDZ68_08595 PE=4 SV=1
MTFSPPRNRDPLRSVVIVGGGTAGWMAASVLSKAFGPALSITLIESEEIGIVGVGEATIPQ

SEQ ID NO: 84708 - protein, 503 aa, Sphingosinicella sp.
  misc_feature (1)..(503): tr|A0A4V0YID8|A0A4V0YID8_9SPHN Tryptophan 7-halogenase OS=Sphingosinicella sp. BN140058 OX=1892855 GN=ETR14_16 035 PE=4 SV=1
MTDDRRIRSIVVVGGGTAGWMAAAALARSAGTHSLSITLVESEDIGTVGVGEATIPPIQAFNKLIGIDEDAFVRETQATFKLGIEFVDWRRHGHHYLHPFGLAGADLKTGVSFSHYWLRWVKEGGNPDNILFSAEGEAARLGRFGRTPPTGGALPNINYAFQFDAARYAAFLRRFAEARGVVRCEGRVVDVRRDPENGFIADVALADGRRVAADFFIDCSGFRSLLLGETLGVAYDDWSRWLPANRAVAVPCASAGDPAPITRATAREAGWQWRIPLQHRTGNGYVFSDAFLGEDEATSLLLSRLDGAAQADPRLLRFKAGRRTSSFVGNCLAIGLSSGFLEPLESTSIHFIQVAITKLLDMFPDRDFHPAILRRFNAEMDSLYEAVRDFLIAHYRLTERDDTDFWRYCRAMEIPASLQDKFDLFRTRGQVLVEAHDVFAETNWFAVLYGQGLTPQGYHPLADAMPDDDLRLALAQIRAAIRERVDGLPSHRAFLDRIVARAN

SEQ ID NO: 84709 - protein, 506 aa, Sphingosinicella sp.
  misc_feature (1)..(506): tr|A0A4P6FRV8|A0A4P6FRV8_9SPHN Tryptophan 7-halogenase OS=Sphingosinicella sp. BN140058 OX=1892855 GN=ETR14_25 205 PE=4 SV=1
MEPDSGRADPRTIVIAGGGTAGWMTAAALGRFLGKAMRIRLVESDEIGTIGVGESTIPQIRVFNQALGIDEDSFVRATQATFKLAIEFVGWLRPGHRYMHAFGDIGRDSGLAPFHHSWLRGRREGVARDLACYSLNNMAALGERMQRGPARTAAMLPDMPYAFQFDAGLYAAFLRRFAEERGVVRTQGRIAQVERDAQSGDVSALILADGQSIRGDMFIDCTGFGGLLIARTLGSEFEDWSHWLPCDRAMAVPSGRTDAFTPYTRATAHGAGWQWRIPLQHRTGNGIVYASGHLSDDEAASRLLANLDSEPLGDPRPLRFTTGKRKEMWKANVIAVGLSAGFLEPLESTSIHLIQTAISRLLKLLPGDRPTQAQRDRFNRESDFEYARIRDFLILHYRANARNELFWQERRAATVPEALADRIALWEADGHIVREQDELFTEVAWLQVFAGQGLVPAGNHPLADVPSRAGLAEYLDLIEKLIAREVAQMPTHAGFIAAHCAARAAA

SEQ ID NO: 84710 - protein, 504 aa, Sphingosinicella sp.
  misc_feature (1)..(504): tr|A0A4P6FJA2|A0A4P6FJA2_9SPHN Tryptophan 7-halogenase OS=Sphingosinicella sp. BN140058 OX=1892855 GN=ETR14_01 060 PE=4 SV=1
MTIASSAEPRLRRIVVAGGGTAGWMAAAAIARTMGRAVELTLVESDAIGTIGVGESTIPPLVNYNRLLGINEAEFMRATQATFKLGIAFEGWKEVGHSYFHSFGITGKDHWSAGFQHFWLAGRERGHDAPYDEYCLELKAAMQGKFAHLPDNAMNYAYQLDSTLYARFLRAMAEADGAKRIEGKIARVELNGESGHVAALVLENGSRIEGDLFLDCTGFRALLIEDALHAGHDDWTHYLPCDSAIAIQTESVGPAFPYTKAIAHDAGWRWRIPLQHRTGNGLVYCSRYLDRDAALERLLGTVEGQTLTKPNFLKFGAGARRRQWHRNVVAIGLSGGFMEPLESTSIHLIQRAVLRLIRMMPLREISDRDIAEFNEQQHADMLQIRDFLILHYKATERRDSAFWRYCGDMEIPDTLVQKIELFRETGRVFRKNEELFAENSWVQVMMGQGIMPHAYHPIAEKLNDDELARLLETLREQVSKTVAGLPAHAAYVERYCGAARAAAA

SEQ ID NO: 84711 - protein, 506 aa, Parvularcula sp.
  misc_feature (1)..(506): tr|A0A357L0J3|A0A357L0J3_9PROT Tryptophan halogenase OS =Parvularcula sp. OX=1979207 GN=DEA40_03070 PE=4 SV=1
MGPAIKPGFRIVILGGGAAGWMTACLMAKRWAPSGVSISVVESPEIGIIGVGEGSTPQLKAFFRDLGVSENEWMPRCNATYKNGISFHGWSQRPGCERYFHPFPSPIDAHTAPAFHFNSFGRRRGIDLVAAPGRFFLSAKLAEKRLAPIAAHNFPFEIAYGYHFDAHLAGAFLRRHAEGRGVRHIEGKVTGIALDARGAVASLTREDGDMIEADLFVDSTGFRSMILQERLGVPFHSYKENLFNDSAVVMPTPPGKDGLNSETRAIAMNAGWRWDIPLTNRSGNGYVYSSDFISADAAERELRTALGLLDADAPARHLKMKVGRVDRHWEKNCLAVGLAQGFIEPLEATALHLVQATIEGFIETFEKTGFEDAGRRRFNERINARFEGVRDYIVCHYQASFRDDAEYWRANAANSKRSPSLQSMMNCWRAGSDIREEVRRQDIGKYYTDMSWTCLLGGYGDYPRELRAPAPEERRFDMGVIDDFIERASLNFPDHRAALSSLQAAE

SEQ ID NO: 84712 - protein, 538 aa, Burkholderia pseudomallei; identical to SEQ ID NO: 82926
  misc_feature (1)..(538): tr|C4I9N1|C4I9N1_BURPE Tryptophan halogenase PrnA OS=Bu rkholderia pseudomallei MSHR346 OX=536230 GN=GBP346_B21 72 PE=4 SV=1

SEQ ID NO: 84713 - protein, 505 aa, Xanthomonas oryzae
  misc_feature (1)..(505): tr|A0A0C5V1W7|A0A0C5V1W7_9XANT Tryptophan halogenase OS =Xanthomonas oryzae pv. oryzicola OX=129394 GN=BE73_163 15 PE=4 SV=1
MIQAQIRKVVIAGGGTAGWIAACALSHQFRGLLDITLVESEQIVTVGVGESTVPPIRTFHRFLQIDEQEVLRAVAGTFKLSISFEHWRAQGERYIHPFGITGQSTLVCAFHHLWLESQRRGMPGSFGDYCLETVASRVDRFALHSEPAVNYAYHLDAALYATFLRARSEACGVKRIEGKIQQVTVQPHSGDVASVVLEDGHVIEGDLFIDCSGFRGLLIEQTLHTGYEDWSHWLPCDRAVAVQTEAVGPPVPYTRAIAHEAGWRWHIPLQHRVGNGLVFSSKHLSDDQAHAKLLHDVAAPAVKDPWMVPFRTGRRRKAWNKNVVSLGLASGFIEPLESTSIHLTISAVVRLLALFPGEGIAPSQVQLFNDVSRAEMEHVRDFVILHYHATQRNEPLWQQCRAMELPESLALRLRAWRECAHAWQGADELFRVDSWTHVLMGQGIEPEQHHPLTRAFSDHDLRRLLDGIAQPIQHAVQQMPSQHAFIERYCKAGAQVWGMRSPVPA

SEQ ID NO: 84714 - protein, 538 aa, Burkholderia pseudomallei
  misc_feature (1)..(538): tr|A3NNF6|A3NNF6_BURP6 Tryptophan halogenase PrnA OS=Bu rkholderia pseudomallei (strain 668) OX=320373 GN=BURPS 668_A2885 PE=4 SV=1
MSNPIQNIVIVGGGTAGWMAASYLVRALQQQANITLIESAAIPRIGVGEATIPSLQKVFFDFLGIPEREWMPQVNGAFKAAIKFVNWRKSPDRSRDDYFYHLFGSVPNCDGVPLTHYWLRKREQGFRQPMEYACYPQPEALDGKLAPCLPDGTRQMSHAWHFDAHLVADFLKRWAIERGVNRVVDEVVQVHLNERGHISSLSTQEGRTLEADLFIDCSGMRGLLINQALKEPFIDMSDYLLCDSAVASAVPNDDARVGVEPYTSAIAMNSGWTWKIPMLGRFGSGYVFSSKFTSRDEATADFLNLWGLSDKQPLNQIRFRVGRNRRAWVNNCVAIGLSSCFLEPLESTGIYFIYAALYQLVKHFPDTSFDPRLTDAFNAEIVYMFDDCRDFVQAHYFTTSREDTPFWRANRHDLRLSDAIKEKVQRYKAGLPLTTTSFDDSTYYETFDYEFKNFWLNGNYYCIFAGLGLLPDRSLPLLRHRSESIDKAETMFARIRREAERLRTSLPTNYDYLRSLREGDVGLSRSRPGPTLAAPEIL

SEQ ID NO: 84715 - protein, 498 aa, Hyphomonas atlantica
  misc_feature (1)..(498): tr|A0A3B9KZM8|A0A3B9KZM8_9RHOB Tryptophan halogenase OS =Hyphomonas atlantica OX=1280948 GN=DCG65_06045 PE=4 SV =1
MVQSVLIVGGGSAGWITANLLNAHCRRTGRDTRIVLVESPDIPTIGVGEATVPTIRRTLNDIGLPEQDFLESTEATFKTLIRFKDWNLGETYDHPFDRRPRPQSDTAAIAWSAQNGLPFDRHFSVLTQLADFNTAPKSPRHPQYQASFPYAYHLDAIKLAARLSSFGQANGIEYRLGNVVDVIVSPEGLIAGVKTDRGDDLTANLYIDCTGFRSVLLGGALDVPVRSFEKHLLCDRAVTMRVPYDVYRPERILTYTKATAREAGWQWDINLQSRRGIGYVYSSQFLDETAAEAALRQYEGAHSDELEARHIRFASGKREVSWKGNCVAVGLSDGFLEPLESSGLYLIEFAGLAIANMLADFESAPQATMRYYNRITNDLYDEILGFLNLHYVISNRRDTAFWRAATSDEVIVDDLRDRLELWKHRGPGQFDFPGADRLFARDSYEFILHGMRYVKGATHSRASIPDLSQVVMKARAELPDHEAFLSLVERAAEARKLS

SEQ ID NO: 84716 - protein, 521 aa, Parvularcula sp.
  misc_feature (1)..(521): tr|A0A357L3V3|A0A357L3V3_9PROT Tryptophan halogenase OS =Parvularcula sp. OX=1979207 GN=DEA40_08555 PE=4 SV=1
MDAEASTQDAPVSSVTIVGGGTAGWMTAAALSKLLTRVKVRLIESDEIGAIGVGEATIPHIRNYMALAGVDQLRMLHASKATFKLGIQFVDWGAPEESYIHGFGRIGRDMLWLHTHQLWLAARERGVKVSHFDQYSINCRAALDNRFRFQDPRLSNTPLADLDFAYHFDASLFAAFLRGECEKRGVERIEGLVVNVTTDSETGFVRSVDLKDGCSVGGDLFVDCSGMRALLIDGAQGVGYEDWSQWLLCNRALAAPSESVSPLAPYTRSTAKKAGWQWRIPLQHRIGNGLVYCADLVSDDEAAATLLSGLDSAPLADPRPVRFRPGRRREAWRNNVVAIGLSSGFLEPLESTSIHLIQTAVHRLIALFPARGFNMADIDEFNLQTKLEYEDIRDFIIAHYKVTRRRGDPFWDHVREMTVPESLARRIALFQSSGRFFGHSKLELFAEESWVQVLLGQGLAACADPVSRFVSDADLAEFLNDIVDTIAKTAAQMPDHAAFISRLPEKEGRLDSAIIAPIKRG

SEQ ID NO: 84717 - protein, 504 aa, Sphingosinicella sp.
  misc_feature (1)..(504): tr|A0A4P6FKZ9|A0A4P6FKZ9_9SPHN Tryptophan 7-halogenase OS=Sphingosinicella sp. BN140058 OX=1892855 GN=ETR14_01 440 PE=4 SV=1
MSGPIETVIIVGGGTAGWMTAAAMARLLGRTVSIKLVESDAIGTVGVGEATIPTIRDFNRLLGIDEDDFVRRTQGSFKLGIEFVDWLRLGHRYIHPFGTIGRDTQTVRFSQLWLKLVQQEDSENADPLGAFSASTLAAEMGRFGRPETSPNHPLSTLAYAFHFDAALYARYLRGWSEDRGVERIEGRIISVERDPENGFIRTLHLEDGSMLSGDLFVDCSGFRSLLLGETLHEPFVDWSHWLPCDRAIALPCTPAGALLPYTRSTADGAGWRWRIPLQHRTGNGYVYSSAHLTDDDAHRRLLETLDGAPAGEPRRLRFLAGHRRKLWHGNVVAVGLSGGFLEPLESTSIHLIQTAISRLMLLFPDKDMDVAERDEFNRQSALEYAQIRDFLILHYHATERRDTSFWSDCAAMTLPDSLREKLDLFRSKGRVFRSGDELFSEDSWLSVLIGQGVRPRGHDPVADTIDPDALRGQMNGLREALRRAVETLPSHAEFVARCCAATQT

SEQ ID NO: 84718 - protein, 503 aa, Polymorphobacter sp.
  misc_feature (1)..(503): tr|A0A4Y9EQN3|A0A4Y9EQN3_9SPHN Tryptophan 7-halogenase OS=Polymorphobacter sp. DJ1R-1 OX=2511025 GN=EUV02_0251 0 PE=4 SV=1
MTDNRQSDFVIVGGGTAGWMTAAALARFAVKGTRIRLVESDAIGTVGVGEATIPQIKLFNAALGIDEADFLRATQGTYKLGIEFVDWTRPGHRYMHAFGPVGRDLGLVPFHHYWLRAGASAGPLGQYSLNEAAARAGHFGNAPPAAGSVIPPLAWAYHFDAGLYAAYLRKFAETRGVVRHEGRITQVPLRADDGHIEAVVLEDCTRIDGDLFIDCSGFRGLLIEEALGAGYDDWSHWLPANRALAVPCARANGEITPYTRSTARPAGWQWRIPLQHRTGNGYVYASDFISDDDAAATLLANLDGKALAEPRPLRFVTGKRRKQWHRNCVAIGLASGFLEPLESTSIHLVQSSISRLLALLPGKVIHDADRDEYNRQADFEFERIRDFIILHYRANGRTGEPLWDYCRNMGIPDTLAAKIELFQASGRIFREHEELFTEVGWAQVLIGQGVQAAAYHPLANAISDADLGDYLGKLRTVAARGAASMPGHADFIAGFCRAPSAEA

SEQ ID NO: 84719 - protein, 506 aa, Xanthomonas vasicola
  misc_feature (1)..(506): tr|A0A2P5ZM60|A0A2P5ZM60_XANVA Tryptophan 7-halogenase OS=Xanthomonas vasicola OX=56459 GN=FQJ88_13375 PE=4 SV =1
MIPAPLRNIVIVGGGTAGWMAAAAFARVLGPTFNVQLIESEQLGTVGVGEATVPHIKAFNNLLGIDEAEFVRQTQGSFKLGIEFVDWQRRGSAYMHGFGTQIGHPLGLLPFHQYWIKQHARGKAQPLGAYTLNTVAAARGKFMTSAGDVPANSPLANIAYAYHFDATQYAHFLRRYSEQRGVTRIEGLVEQVQLHPESGHVQSLQLASGQTVHGDLFIDCSGFRGLLIEEALHTGYHDFTHWLPCDRAFAVACEKVGPPTPYTRSTARAAGWQWRIPLQHRTGNGYVYCSAHISDDEAAATLLANLDGKPLADPRPLRFTTGRRKQFWNRNVVALGLASGFLEPLESTSIHLIQSGISKLLELFPREGISPVLVQRYNDRSAFEFDRIRDFLLLHYHATERDDSAFWRHCRSMPITPELQTTLDLFRDSGRFYRNAEEMFAEISWVQVMVGQGILPQGYHPLVDQVPDRDAEGFLASVAQTIAHCVDVMPTHQQFIERYCKAAVLA

SEQ ID NO: 84720 - protein, 472 aa, Hyphomonas atlantica
  misc_feature (1)..(472): tr|A0A059E206|A0A059E206_9RHOB Uncharacterized protein OS=Hyphomonas atlantica OX=1280948 GN=HY36_03740 PE=4 S V=1
MLGPLLDITLVESDAIGTVGVGEATIPTHRTFHHLLGIDEREFMRATKATFKLGIAFENWGGVGDRYIHSFGQVGKPSWMGEFYNIWMYAQERGIGDALDAYCFELQAAEEDRFYTSEKANINFAYHLDASLYAKFLRTFSEAKGVKRVEGLIDTVEQDGESGFITALKLQSGERIEGDLFIDCTGFRGLLIEQTLKTGYEDWTHWLPTDSALAVQTRSVGPAIPYTRAIAHHAGWQWRIPLQHRVGNGLVFCSENMQPDEAQEFLLNNVDGEPLTEPRLIRYKTGRRRKVWNKNCVALGLSSGFVEPLESTSIHLIQIGATRLVQQFPFSGISEAIANHYNEQAERELEKIRDFIVLHYKLTERDDSDFWRARRDMPVPDTLSQRIALFRENGLVYQASDDLFRVDSWLQVMMGQRLKPKGYHHMGHMMTDDQLTRALGGLKASIAQAVSKLPKHQDFIDTYCAAPETETA

SEQ ID NO: 84721 - protein, 513 aa, Sphingosinicella sp.
  misc_feature (1)..(513): tr|A0A4P6FIV2|A0A4P6FIV2_9SPHN Tryptophan 7-halogenase OS=Sphingosinicella sp. BN140058 OX=1892855 GN=ETR14_08 050 PE=4 SV=1
MTPVQNIVIVGGGTAGWLTAGLIAAKHKGRQAHGFTVTLVESPNVPTIGVGEGTWPTLRTSLRRIGISETELFRRCDAAFKQGARFARWTTGDEDDGYYHPLMLPQSFGQVNLAQHWLADAEGESFCDAVTPQGRLCDAGLAPKTIATPEYEAVANYAYHLDAGKFATFLQHHCCEILGVRHVRADVGEVLLSDNGDLKGLVTEQAGTINGDLFVDCTGFSALLIGKALGVPFRSCSDILFCDTALAVQVPYEHPHDPIASHTISTAQSAGWIWDIGLPTRRGVGHVFSSSHTSAEEAEQALRAYLGPRGADLPVRRLSIRSGHREQFWKGNCVAVGLAAGFLEPLEASAIVLIELSAKMIADQLPPCREVMDVVARRFNETTTYRWGRIIDFLKLHYALTKRTDSDFWRDNVRPETIPDRLHDLMTLWRYQVPWNIDEFDRAEEVFPSASYQYVLYGMGHRTDLVPGSVDADAEAARRAKRENRAQTQRMVAGLPGHRALIAKIVERGLQPV

SEQ ID NO: 84722 - protein, 501 aa, Stenotrophomonas acidaminiphila
  misc_feature (1)..(501): tr|A0A2W5NN23|A0A2W5NN23_9GAMM Tryptophan halogenase OS =Stenotrophomonas acidaminiphila OX=128780 GN=DI562_127 15 PE=4 SV=1
MQSQEAIATPRPVKRVVIAGGGTAGWMAAAALSKTLGKVLDITLVESEEIGTVGVGEATIPTLVVFHRLLDIKEQDFMAAVQGTVKLGISFENWKDVNHRYIHSFGISGKDHWSAGFQHFWLRGRAEGMASEYSDYCIELQAALQDRFSHLPRYHVNYAYHMDAALYARFLRDFSARHGCKRVEGKIVDVVTDAEGCISSIKLERGETIEGDLFIDCTGFRALLIGKALGVGYTDWSQWLFNDSALATQTTAVRDAVPYTRAIAGSAGWQWRIPLQHRVGNGIVYSSRHMSDDQAREEFLGSVEGEVIKQPWPIRFKPGQRQQCWAKNCVALGLAGSFIEPLESTTIHLIQRGIVRLLQTFPHTITQPAIDEYNARLDEELQHVRDFVVMHYKVSNRRDSPYWREIAEMEIPSTLRHRIDLFRETGTVFHVPGELFGENSWIQVMMGQGIVPKRYHPTADVMSPADLQRFLDDIRRNVLDTARQMPAHMDYLRSYCPAPKP

SEQ ID NO: 84723 - protein, 507 aa, Sphingomonas sp.
  misc_feature (1)..(507): tr|A0A4P6XBA2|A0A4P6XBA2_9SPHN Tryptophan 7-halogenase OS=Sphingomonas sp. AAP5 OX=1523415 GN=E2E30_06880 PE=4 SV=1
MATLSDPTGPIRIVIVGGGTAGWMAAATFARFLETGFEIDLIESEEIGTVGVGEATIPQIRLFNDALGLDEDAFLRATQGTYKLGIEFVDWLRPGHRYMHAFGAVGRDVGLLPFHQYWLRAQKLGSARDLAAYSLNNQAALADRMQRGSARTARVLPDMPSAFHFDAGLYARHLRRYSETRGVTRIEGKVVRVDQDERGDISTLLLEDGTTLGADLFIDCTGFRGLLIEQTLKTGYDDWTHWLPADRAIAVPSERSTAFTPYTRSTAKAAGWQWRIPLQHRTGNGLVYSSQHLSDDEATATLLAGLDGEALADPRPIQFRTGKRRQMWNRNVVAIGLSGGFMEPLESTSIHMIQSAIARLMKLLPGRTIAQADRDEFNRQSDFEYERIRDFIILHYHANNRSEPFWQMCREATLPETLAAKIDLWRGNGHITREHEELFTEVGWLQVFAGQGVMPAGHHPLADAIPAADLAEFLDTIDQLNAREVAQMPSHADFIARHCAAPTPVAA

SEQ ID NO: 84724 - protein, 521 aa, Parvularcula sp.
  misc_feature (1)..(521): tr|A0A357LD91|A0A357LD91_9PROT Tryptophan halogenase OS =Parvularcula sp. OX=1979207 GN=DEA50_05855 PE=4 SV=1
MDAEASTQDAPVSSVTIVGGGTAGWMTAAALSKLLTRVKVRLIESDEIGAIGVGEATIPHIRNYMALAGVDQLRMLHASKATFKLGIQFVDWGAPEESYIHGFGRIGRDMLWLHTHQLWLAARERGVKVSHFDQYSINCRAALDNRFRFQDPRLSNTPLADLDFAYHFDASLFAAFLRSECEKRGVERIEGLVVNVTTDSETGFVRSVDLKDGRSVGGDLFVDCSGMRALLIDGAQGVGYEDWSQWLLCNRALAAPSESVSPLAPYTRSTAKKAGWQWRIPLQHRIGNGLVYCADLVSDDEAAATLLSGLDSAPLADPRPVRFRPGRRREAWRNNVVAIGLSSGFLEPLESTSIHLIQTAVHRLIALFPARGFNMADIDEFNLQTKLEYEDIRDFIIAHYKVTRRRGDPFWDHVREMTVPESLARRIALFQSSGRFFGHSKLELFAEESWVQVLLGQGLAACADPVSRFVSDADLAEFLNDIVDTIAKTAAQMPDHAAFISRLPEKEGRLDSAIIAPIKRG

SEQ ID NO: 84725 - protein, 500 aa, Polymorphobacter sp.
  misc_feature (1)..(500): tr|A0A4Y9EQN1|A0A4Y9EQN1_9SPHN Tryptophan 7-halogenase OS=Polymorphobacter sp. DJ1R-1 OX=2511025 GN=EUV02_0257 5 PE=4 SV=1
MPESRNIRRVAVIGGGTAGWMAAAALANALQHGVAIELIESDDIGTVGVGEATIPPIKLFNAQLGIDENDFLKCTYGSFKLGIEFVDWGWTGNRYFHPFGTFGADFDAVTLHHYWLRERQRGDTTPLSDYSMAWAAARANRFDKPTSDRRLVQSTMDYAYHFDASRYALYLRGYGEKRGVTRHEGKVATVEQDARGFVSAVQLEDGRRIEADLFIDCSGFRGLLIQGALDSGYDDWTHWLPCDRAVAVPCASSDDFTPYTRSTARDAGWQWRIPLQHRTGNGYVYASSFLDDDVAQATLLANLDGEALAEPRRLAFTTGRRKQFWNRNVVALGLASGFLEPLESTSIHLIQSGINRLLALWPDRDFDPLVAAEYNKLTAREFERVRDFIILHYKATTRADTPLWRHVAAMDIPDELANKIAHFAAHARVVADPGELFVNVSWLAVFLGQGIIPARYDPLADARNVDAPRLLSGLKRVIGEAADAMPTHRDYIARHCSSPR

SEQ ID NO: 84726 - protein, 496 aa, Sphingosinicella sp.
  misc_feature (1)..(496): tr|A0A4P6FPU0|A0A4P6FPU0_9SPHN Tryptophan 7-halogenase OS=Sphingosinicella sp. BN140058 OX=1892855 GN=ETR14_06 770 PE=4 SV=1
MNGREVKKVVIAGGGTAGWIAAAALSRQLGRLIEIVLVESDEIGTVGVGESTIPTARSFNALLGLDEPEFMRATQATFKLGIAFEDWARVGDRYVHSFGQVGTSTWIAEFHHFWLEARARGLAGEIGDYCFELQAAEAGKFATGSDTTINYAYHLDATLYGRFLRARSESHGVTRVEGRIASVEQDPENGFIRALAMESGERVEGDLFIDCTGFRGLLIEQTLRAGYEDWGQWLATDSALAVQTGSVGPALPYTRAIAHRAGWQWRIPLQHRVGNGLVYASAHMEDDDARALLIEKLEGEAITEPRLIRYRTGRRRKTWDKNCIALGLASGFVEPLESTSIHLIMIAVTRLMQLFPFSGISDAVVNRFNEQARSELESIRDFIILHYKLTERDDSAFWRQCRDMAVPDSLAERIGLFREAGFAYQASEDLFRVDSWVQVMLGQRLQPLGHHRVGELMGSERIQQSLADLKGKIAAAVQRMPTHQAFIDRYCAPASA

SEQ ID NO: 84727 - protein, 543 aa, Shewanella sp.
  misc_feature (1)..(543): tr|A0A2K9AEI0|A0A2K9AEI0_9GAMM Tryptophan halogenase OS =Shewanella sp. Pdp11 OX=2059264 GN=AYJ58_08490 PE=4 SV =1
MQQATHTAINNIVIVGGGTAGWITAALLAAEHNVDKGQLAHSPKLNITLIESPDVATIGVGEGTWPSMRNTLDKIGISETEFIRQCDASFKQGSRFIHWQHDDTEHTNPFGSNQYIHPFSLPHGHQELDLCPFWLPHSDKVSFAQAVSNQDALTQLGLAPKTIATPEYHFQNNYGYHLDAGKFSQLLMQHCTEKLGIKYVRDHVTHVHSHANGDIESLATKEHGVILGDMFVDCSGTKSLLLGEHFNVPFLCQKAVLFNDSALAIQVPYAEENSPIASCTLSTAQPNGWIWDIGLPTRKGVGYVYSSAHCSDDEAEQTLRAYLANDTSTNPQSASNNAVDCRKQEYRKLNINPGYHAKCWQNNCIAIGMAAGFIEPLEASALALVEWTANTLATQLPTHRGVIDTIAQRVNERYERHWQQIIDFLKLHYIVSRREVDGYWRDHRDTASIPERLQQQLDLWRYQAPSSHDISYKEPLFPAASFQYVLYGMGFNTALPTHIKPSQQQVAQRLFSENQKKINALSQSLPSNRDLLNKVRQFGFPKI

SEQ ID NO: 84728 - protein, 251 aa, Parvularcula sp.
  misc_feature (1)..(251): tr|A0A357LBB9|A0A357LBB9_9PROT Tryptophan halogenase (F ragment) OS=Parvularcula sp. OX=1979207 GN=DEA50_05250 PE=4 SV=1
KDGLNSETRAIAMNAGWRWDIPLTNRSGNGYVYSSDFISAEAAERELRTALGLLDADAPARHLKMKVGRVDRHWEKNCLAVGLAQGFIEPLEATALHLVQATIEGFIETFEKTGFEDAGRRRFNERINARFEGVRDYIVCHYQASFRDDAEYWRANAANSKRSPSLQSMMNCWRAGSDIREEVRRQDIGKYYTDMSWTCLLGGYGDYPRELRAPAPEERRFDMGVIDDFIERASLNFPDHRAALSSLQAAE

SEQ ID NO: 84729 - protein, 543 aa, Robiginitomaculum sp.
  misc_feature (1)..(543): tr|A0A2G2LTY9|A0A2G2LTY9_9RHOB Tryptophan halogenase OS =Robiginitomaculum sp. OX=2030823 GN=COA85_06095 PE=4 S V=1
MMKKVVIVGGGSAGWMAAAYLNGALNKTGKEKTIDITLIESPTTPRISVGEATIPSIGHILSVIGIDELDFMKATDATFKQSIKYVNWLENNGTFYHHPFSRVRPGPIDYSGPEWMRSQRNIAFSECVCAQTMICEWNMAPKMLGEWSFGAPMKYAYHMNASKFADYLRDFSVARGVHHILADVTDVNVKDPNIITSVKLNDDREISGDLFIDSTGFTSLLIGKTLKVPHDDYSQWLLCNQAIVAQFPYEDYFPGIVRPYTTATALSAGWVWDIPMQNRRSLGYVHSSHFINETDARKELLSYQGISENDDKVETRIIKFKVGQRRKAWVGNCIAIGLAGGFIEPLESTGLYLADLSAVMLAEHFPYETEHMEALAFRYNRILSNRYLEILDFINMHYCLTRRTDSAFWKAVQQPEHINERLQSKLEYWQIKAPSNADFEDQAFAGYHYKSNSFDPIIDNRPPVDTAGLWNHESYESILYGMDFRGPEFKEKYGDKRPPSRVFPFIIDRLREAPKKLPPHHIWLHQVMGMKAYEEKMVPAGWV

SEQ ID NO: 84730 - protein, 521 aa, Xanthomonas oryzae
  misc_feature (1)..(521): tr|A0A0U4VWG5|A0A0U4VWG5_XANOO Tryptophan halogenase OS =Xanthomonas oryzae pv. oryzae OX=64187 GN=BCR61_01980 PE=4 SV=1
MPDTLPSDPQQRALRRVVIAGGGTAGWMAAAAMSKLLGRHLQITLVESDEIGTVGVGEATIPSLVTFHRLLEIDEAAFMAATQATIKLGIAFEHWRDVDRHYIHSFGHAGTDHWSAGFQHFWLKGQQRGVARDFGDYCLELRAAQEGRFAHLPNGGMNYAYHLDAGLYARFLRRFSEGFGVTRIEGRIGQVETDAESGFLTALTLQDGTRVEGDLFLDCTGLAGLLIGKTLGVGSDDWSRWLFADSALAVQTEAVGPPVTYTRSRADQAGWMWRIPLQHRVGNGIVYSSRYMDQDSARAVLERNLTGRALTEPRPLRVTPNQRHRVWEKNCVALGLASGFLEPLESTNIHLIQRGIIRLLQTFPQVINAVDIAEYNRQAAQEITHIRDFVILHYHATDRRDTPFWRDCAAMDIPDSLRHRVELFRQSGRVFHQANELFAENSWVQVMLGQGIVPQQHHPVADLMGDAELSRFLDTIHTRVEAALVRLPAHADFLQRYCPAPPPPEPAARLPAPPVMAPPAG

SEQ ID NO: 84731 - protein, 548 aa, Robiginitomaculum sp.
  misc_feature (1)..(548): tr|A0A2G2GEQ4|A0A2G2GEQ4_9RHOB Tryptophan halogenase OS =Robiginitomaculum sp. OX=2030823 GN=COA47_08500 PE=4 S V=1
MGNTHKTEFKKRLLIVGGGSAGWITAAYLNGALNARGAEKNVEITLIESPDIPRISVGEATIPSIGHILSVIGLDEMEFMKATEATFKQSIKYVNWLHNDGSFYHHPFSRYRAGPIDRSAQDWIGTNRGIPFTETVSAQVQICEMGLAPQMLGQWDFGARLKYAFHMNAQKFADYLRDFSVERGVKHIQANVTKTNVGKNGHIRSVETDHETELSADLFVDCTGFSAHLIEKALGVGFEDCSQFLFCDRAAVMQIPYEDYFPSQVRPYTTATAQSAGWIWDIPMSTRRSIGYVHSSSFISKDQAEREVHAYEGKHAEKYPIRFVNFKVGRRKQSWKGNCIAIGLSGGFIEPLESTGIYLADLASVMLAEHFPFTDNSMDAMAFRFNRIMSNRFYEILDFINMHYCLTRRTDTEFWKTVQRPEHITDRLAAKLEFWKLKLPSSADFEDQFFPGQSMTSSVAAADGRPAVDTAGLWNHESYEAILYGMDFRGPEFKTLLGDKRPPSRMPEFMIQRLQGARQKLPPHHIWLNRVLGMKPYEMHPPPPGWSA

SEQ ID NO: 84732 - protein, 509 aa, Xanthomonas oryzae
  misc_feature (1)..(509): tr|A0A346M9S0|A0A346M9S0_XANOO Tryptophan halogenase OS =Xanthomonas oryzae pv. oryzae OX=64187 GN=BCR61_01240 PE=4 SV=1
MIPAPLRNIVIVGGGTAGWMAAAAFARVLGPTFTVQLIESEQLGTVGVGEATVPHIKAFNNLLGIDEAEFVRQTQGSFKLGIEFVDWQRPGTAYMHGFGTQIGHPLGLLPFHQYWIKQHARGKAQPLGAYTLNTVAAARGKFMTSAGDVPANSPLANIAYAYHFDATQYAHFLRRYSQQRGVTRIEGLVEQVQLHPESGHVQSLQLASGQTVHGDVFIDCSGFRGLLIEEALHTGYHDFTHWLPCDRALAVPCEKVGPPTPYTRSTARAAGWQWRIPLQHRTGNGYIYCSAHISDDEAAATLLANLDGKPLADPRPLRFTTGRRKQFWNRNVVALGLASEFLEPLESTSIHLIQSGISKLLELFPREGISPVLVQRYNDRSAFEFDRIRDFLLLHYHATEREDSAFWRHCRSMPITPELQTTLDLFRDSGRFYRNAEEMFAEISWVQVMVGQGILPQGYHPLVDQVPDRDAEGFLASVAHTIAHCVDVMPPHQQFIDRYCKAAALPCGG

SEQ ID NO: 84733 - protein, 543 aa, Robiginitomaculum sp.
  misc_feature (1)..(543): tr|A0A2G2J5Q6|A0A2G2J5Q6_9RHOB Tryptophan halogenase OS =Robiginitomaculum sp. OX=2030823 GN=COA69_02925 PE=4 S V=1
MPDVKKVLIVGGGSAGWIMAAYLNGALNKKGTEKNIDITLVESPDIPSISVGEATIPSIGHILGVIGLNEREFMKATNATFKQSIKYANWLNNEGEFYHHPFSRYRPGPIDRSAQDWIGSDRKIPFTETVSAQAMICEMGLAPQMLGEWDFGTKLKYAYHMDAAKFANYLRDFSVPKGVKHLLANVTKTNIQENGHIKSVQTACGKTLSADLFIDCTGFSAHLMEKALGVGFEDCSQWLLCDRAAVMHIPYDDYFPSQVRPYTTATAQSAGWIWDIPMSIQRSIGYVHSSAFITEEQAQKELHAYEGAHSGAYETKFINFKVGRREQAWKGNCIAVGLSGGFIEPLESTGIYLCDLAAVMLAEHFPFTQNAMEAMAFRFNRILTNRFYEILDFINMHYCLSRRTDTDFWKEVQKPEHITDRLQAKLEFWKLKLPSTADFDDQFFPGQTSASLSGHGDVRRPIDTAGLWNHESYEAILYGMDFRGPEFENKPGHVRHPVRVPEFIIQRLHGARQKLPPHHIWLNQVMGMHQYEMHTPPPGWGKA

SEQ ID NO: 84734 - protein, 505 aa, Robiginitomaculum sp.
  misc_feature (1)..(505): tr|A0A2G2J629|A0A2G2J629_9RHOB Tryptophan halogenase OS =Robiginitomaculum sp. OX=2030823 GN=COA69_06190 PE=4 S V=1
MAENTIQKVVIVGGGSAGWMTAAALSKFIKNQYTSVQLIESEQIGTISVGEATIPPINTFNQLLGIDENEFVKATKATFKLGIEFTNWSKIGQSYMHPFGEFGQDIEAVKFYQFWLKLRSQQDMPYIDQYSLSAVAAKMGKFTKPGNDPRAVMSSLAYAFHFDATLYAKYLRTYSEKRGVQRTEGRVVDVNLRSEDGFIRSLTLEGGQIIEGDLFIDCSGFRALLIEGALKTGYEDWSHWLPCDRAVALPTSLKDEDNPAPLPYTRAIAHSAGWQWRIPLQHRTGNGHVFCSSYMSDQEATDILLNNVDGTPTAEPRILKFTTGRRKKFWNKNCVTIGLSGGFMEPLESTALHLIQAGISKLIALFPDKTFNPVERAEYNKLTCMQFDQIRDFLILHYQATQRDDSDFWNYVRTMDVPDTLASKIELFRSKGRIFRFEDELFGVSNWLAVLLGQGIYPQNWDPMVDTFDMDAVKNNLDGMQDIIRKTAEHMPTHQAYIDRFCAAK

SEQ ID NO: 84735 - protein, 493 aa, Robiginitomaculum sp.
  misc_feature (1)..(493): tr|A0A2G2J3E7|A0A2G2J3E7_9RHOB Tryptophan halogenase OS =Robiginitomaculum sp. OX=2030823 GN=COA69_05580 PE=4 S V=1
MENQTIKKVVIAGGGTAGWTAAAALSRQLGSLLDITLIESDQIGTVAVGEATIPTIRTFHHLLGIDEKAFMRATQASFKLGIAFEDWGGLDERYFHAFGQIGKSTWMGDFHHIWMMAKANGLAGELGDYCFELQAAEAGKFATSEHSKLNYAYHLDAGLYARFLRQMSEGNGVSRVEGKITKVEQVADTGYIEALVLESGERVEGDLFIDCTGFRGLLIEETLKTGYEDWSEYLPMDSALAVQTEATDPALPYTRSIAHESGWQWRIPLRHRVGNGLVYCSKYISDEDARTALFDNIQGKTLTEPRVINFKTGCRRKVWTKNCVALGLSTGFVEPLESTSIHLIQNGIIRLIQLFPFNGMDDALIRHYNEQSKEELVSIRDFIILHYKQTARDDSAFWRDQQAMDIPDTLAQRIALFKENAHAYQAPDDLFRVDSWVQVMMGQGLVPKGYHHMGALMSTEQMQKALGGIKSNIAKAVESMPPHQQFLDQYCAD

SEQ ID NO: 84736 - protein, 499 aa, Sphingomonas sp.
  misc_feature (1)..(499): tr|A0A0Q4KWR9|A0A0Q4KWR9_9SPHN Tryptophan halogenase OS =Sphingomonas sp. Leaf34 OX=1736216 GN=ASF00_00980 PE=4 SV=1
MNDTPEPPRTRVVVAGGGTAGWIAAAAIVRQLGSLVAVTLVESDEIGTVGVGESTIPTARSFHAFLGIDEAAFMRATQATFKLGIAFENWRQIGDRYFHPFGSVGRSVAIADFQHFWLEARARGFGGAYGDYSLEQQAAGAGLFGHDEQHSLAYAYHLDATAYARFLRNLAEPWGVRRVEGRIERVERDGEGGDIAALVLASGERIAGDLFIDCTGFRALLTEATLGTGYEDWSEWLATDRALAVQTETVAPPVPYTRAIAHAAGWRWQIPLQTRTGNGLVYSSRHMSDDEAHATLIGALDGRPLFEPRPLRFRSGMRRQAWNRNCIALGLAAGFIEPLESTSIHLIMNAVIRLIQLFPFRGDDHNALAARYNVQSRHEWEHVRDFIILHYHVTQRDDSDFWRDCARMTVPDSLAERISLFTATAGAWQGQDDLFRIDSWVSVMLGQGVVPRAHHRIASIIKAHDLQTSFDDLSRGIAGTVRTLPRHHDFLAHYCPASG

SEQ ID NO: 84737 - protein, 536 aa, Streptomyces sp.
  misc_feature (1)..(536): tr|A0A370REW4|A0A370REW4_9ACTN Tryptophan halogenase OS =Streptomyces sp. HB202 OX=767398 GN=DER30_4721 PE=4 SV =1
MTVDGAGKQRAGDPGRTKRVVVVGGGTAGWMTASYLAAAFGERIDVTVVESARVGTIGVGEATFSDIRHFFEFLKLSEPDWMPACNATYKLAVRFENWREPGHHFYHPFEQLGSVDGFPLSDWWLRNPTTSRFDKDCFVMASLCDAERSPRYLDGKLIDQGFVEQQREETSARSTIVEYQGTQFPYAYHFEAALLAKFLTTYATQRGVRHITDDVTDVVLDQDGYIAHVQTAEHGRLEGDLFVDCTGFRALLLNKALDEPFVSYQDTLPNDSAVALQVPLDMDREPMRPCTTATAQEAGWIWTIPLISRIGSGYVYASDYTTPEEAERTLRAFIGPGAEDVEANHIKMRIGRSRRSWVKNCVGIGLSSGFVEPLESTGIFFIHHAIEQIVKYFPSGREDHRLRDLYNESIAHVQDGVREFLVLHYVGAKRADNQYWKDTKTRRVPDELAERIENWKYKVPDAQTVFPHYHGLPPYSYNCILLGTGGIEVRHSPALDMADERAAIAEFERIRLKADKLVQELPTQNEYFAAMRADAV

SEQ ID NO: 84738 - protein, 506 aa, Sphingomonas sp.
  misc_feature (1)..(506): tr|A0A0Q4KY26|A0A0Q4KY26_9SPHN Tryptophan halogenase OS =Sphingomonas sp. Leaf34 OX=1736216 GN=ASF00_04305 PE=4 SV=1
MNEHSIREVVIVGGGTAGWMAAAALSKFLGSRQGGAGQPRIRLIESEEIGTVGVGEATIPTIATFNQMLGIDEDDFVAKTQGTFKLGIEFVDWRRIGERYFHPFGQFGHDIEGLSFHQFFLKLAKQGQCADIWHYAPCAVAAAAGRFARQSPDPRSPFGTLPYAFHFDAGLYARYLRAYAEARGVERIEGRIVDVGLRSEDGFVESLTLDGGRRVEGELFVDCSGFRGLLIEGALKTGYEDWRHWLPCDRAVAVPTANIGDPVPFTRSTARSAGWQWRIPLQHRTGNGYVYSSAHISDEDAEATLLSTVEGPPIADPRRLAFVTGRRKRFWNRNVVALGLSGGFLEPLESTSIHLIQTGIAKLLALFPDRRFLEVEAGEYDRLMSSAYDGVRDFIILHYHATTRDDSPFWNHVRTMTVPDSLRRKTELFRAKGRFFRYDDELFSLASWVAVMLGQGITPEGYDPIVDGLDESKLVEAVERMRLGIRQTIAQMPSQSDYIRANCAAI

SEQ ID NO: 84739 - protein, 503 aa, Sphingopyxis sp.
  misc_feature (1)..(503): tr|A0A2Z5UKP9|A0A2Z5UKP9_9SPHN Tryptophan halogenase OS =Sphingopyxis sp. FD7 OX=1914525 GN=SPYCA_0791 PE=4 SV= 1
MIGMVASAPKLRIVIAGGGTAGWMAAAALSSALGAAIDLTLIESDAIGTIGVGESTIPPILLFNRLIGVNEAEFMRATQATFKLGIRFENWKDIGESYFHSFGTTGKDHWSAGFQHFWLHGLTCGHDRTYDDYCLELKAALEGKFAHLPDDRMNYAYQLDSSLYAAFLRKRAEGDGARRIEGRIAAVEIDGASGSIAALMLDGERRIEGDLFIDCTGFRALLIEGALHAGFDDWTHYLPCDSAIAVQTASVAPPVPYTRAIAHDAGWQWRIPLQHRQGNGIVYCSRYLAREEALDRLLGSVEGDVITAPNFIDYRTGVRRRQWYRNCVAIGLSGGFMEPLESTSIHLIQRAILRLIRMLPAGPVSERDIAEFNDQQFADMEQIRDFLILHYKVTERRDSPFWRQCAAMPIPASLEQKIELFRETGRVFRRNEELFVENSWVQVMMGQGIIPQRYHPIAAKLRREELDAFLSMLRDGVERTVASLPAHEAYIAQYCAAGGRHET

SEQ ID NO: 84740 - protein, 504 aa, Caulobacter sp.
  misc_feature (1)..(504): tr|A0A2R7L5E3|A0A2R7L5E3_9CAUL Tryptophan halogenase OS =Caulobacter sp. HMWF025 OX=2056860 GN=DBR10_17390 PE=4 SV=1
MTEHPPRKFVVVGGGTAGWMAAAALVHALRDRVGTVELVESEEIGTVGVGEATIPPIQFLNSLLGIDEFDFIRKTQATFKLGIEFRDWTRKDHSYFHPFGPHGTSIEGVSFHHYWMRLREQGDTSSIDDYSMATVAARMGKFAVPPKELPPGVPGLGYAYHFDAGLYARYLRGYAEARGARRTEGKIQSVALRASDGHVEALDLEGGRRIEGDFFIDCSGFRGLLIEEALRTGYEDWSAWLPCDRALAVPCEGVSPLTPFTRSTAREAGWQWRIPLQHRIGNGYVYSSGFISDDEAAATLMANLDGAPLGDPRPLKFTTGRRKKAWNRNVVALGLAGGFMEPLESTSIHLVQTGVMRLLSLLPVSGHDPATEVEFNRLSQIEYEQIRDFLILHYHATERDESPLWNYCRTMAIPDSLQHKIDLFRSRARVARFDDQLFAEPSWLAVFLGQGIEPRTYDRLADAPALADVSARLSGIRSVIHNLASRLPSHEQFIAATCKADPAP

SEQ ID NO: 84741 - protein, 505 aa, Caulobacter sp.
  misc_feature (1)..(505): tr|A0A2R7L557|A0A2R7L557_9CAUL Tryptophan halogenase OS =Caulobacter sp. HMWF025 OX=2056860 GN=DBR10_18025 PE=4 SV=1
MTADKAIRSIIILGGGTAGWMAAAALRTALGRTCEIQLIESAEIGIVGVGEATIPAIRQFNAMIGLKEAAFMRNTKASLKLGIEFVGWGDRDRRYMHPFGVYGLEAELGDFHQIYLRLREQGLADDLEAYSVCVQAAYRGRVGQVSTDPASPMSRLFSAYHFDAVLYGRHLRRFSEQMGVRRVEGQVVEVVKAPDESRVESLILKDGHSVAADLFIDCSGFKGLLIEETMKAGYEDWSHWLPVDRAVAVPCAKTGPITPYTTSTAREAGWQWRIPLQHRTGNGYVFSSRYTDEDTATATLMANLDGEALAEPRLLRFVTGRRREAWKGNVVALGLASGFIEPLESTSIHMVHSGLVKLLQHFPDRDFSPVNIATYNGRVREEAERIRDFIILHYHVTQRRDTPFWEYVATMPIPDSLAERVEIFRDRGLILSRPDELFSASSWLAVMIGQGIAPRGYNPLVNRQTTAQLDAGFKAIKSRISSLIDPLPEHEAFLAEQKMLDLEEA

SEQ ID NO: 84742 - protein, 480 aa, Burkholderia pseudomallei; identical to SEQ ID NO: 83829
  misc_feature (1)..(480): tr|A0A498TFD7|A0A498TFD7_BURPE Tryptophan halogenase OS =Burkholderia pseudomallei OX=28450 GN=SAMEA1968934_018 02 PE=4 SV=1

SEQ ID NO: 84743 - protein, 541 aa, Flavobacteriaceae bacterium
  misc_feature (1)..(541): tr|A0A349NW13|A0A349NW13_9FLAO Uncharacterized protein OS=Flavobacteriaceae bacterium OX=1871037 GN=DCS66_2069 0 PE=4 SV=1
MEINNITIVGGGTAGWMTATTLLSQFPNKKVTLVESPNISTIGVGESTVAAGQGGSGGIVNWLNMVGINEEFMPHTDAVYKLSIGFEDFYHKDSGRFHYPFGKPYIFNNKSKMNDWYYKKIRYPETPSSDYAECLYPSMALINQNKSLFSKNFTSGSGREDLEKDFDNNQVRLLSEYSYQFDATKFGIWLRDHVCKSKYGKNFTHVLAEVKDIPVNDAGIKHLQLDNGQKLTGDLFIDCTGFKALLLGQVLKVPFDSLEKVLPNNHAWATKIPYMNPEKQIVNYTNCTAIENGWIWEIPLWSRMGSGYVFSDKFVSVEDALKEFKRGLLKKGYKNVEDLEYRLMPMKCGIHSELWAKNVCAIGLSAGFIEPLQSNGLHCVHEFLFNLTRILAQDRINQWDRQCFTASCHYIFNTFTALINLTYTLSHRDDTEYWRQLENRKLPDVLQFKMNWDYPSAFYQKMIRGEFEEGAFPCTAAGLNWNPLDIHTLKYRANGRNVLNDLDNNYGFYINQLNMRKKKWSKEVKGFMSPYQYLKNYIHDK

SEQ ID NO: 84744 - protein, 533 aa, Streptomyces sp.; identical to SEQ ID NO: 83428
  misc_feature (1)..(533): tr|A0A286FLG8|A0A286FLG8_9ACTN Tryptophan halogenase OS =Streptomyces sp. Ag109_G2-15 OX=1938850 GN=SAMN0627276 5_1413 PE=4 SV=1

SEQ ID NO: 84745 - protein, 522 aa, Erythrobacter marinus
  misc_feature (1)..(522): tr|A0A0H0XMX2|A0A0H0XMX2_9SPHN Tryptophan halogenase OS =Erythrobacter marinus OX=874156 GN=AAV99_11840 PE=4 SV =1
MTMDKGIVNINAVDRVVVVGGGTAGWMTAAAMSRYFNNGRRKVTVVESDAIGTVGVGEATIPPIKNFNAMLDIPENEFLKATRGTFKLGIEFVNWGQQGDRYFHPFGTYGQDLHGIQFHQLFLREAARGTAGSISDYSMSTVAAALGRFGRPAPGAKSLVSQMAYAFHFDAGLYAAYLRKMAEQQGAGRVEGRIVQVHRNGESGDVTSVELESGVIVEGDLFVDCSGFRGLLIEEALETGYEDWSHWLPMDSALAMPTANVGSPPPFTRATAHTAGWQWRIPLQHRTGNGHVFSSAYMQAEEAERILRDHVEGEPLADPRLLRFTTGMRKKAWNHNVISLGLSAGFIEPLESTSIHLIQNGIARLFALFPEKAISPVERDEYNRGMRELYEDVRDFIILHYKATQRGDSEFWRYVRDMDVPESLARKIELWRLHGRIFRENAELFTMPSWTAVMLGQNIWPERYDPIADTLDEQRVASAMAQMREGYRATAQALPSQEEFLRQSGAWYDEKSTVAAMPGGFR

SEQ ID NO: 84746 - protein, 480 aa, Burkholderia pseudomallei
  misc_feature (1)..(480): tr|B1HJB4|B1HJB4_BURPE Putative tryptophan halogenase O S=Burkholderia pseudomallei S13 OX=320374 GN=BURPSS13_P 0725 PE=4 SV=1
MHLPNRTQVLVIGGGPAGATGAAFLAREGVEVTLVDKEVFPRYHIGESLLPSCLEILTLMGARDTFDRHGFQRKPGAYFNWKGETWKLDFGELGGTYRYSYQVRREEFDHLLLQHARAVGAQVHEGVSVREILFDDGRPCAALCVAQGTEEATTVEFDYLVDASGRNGLMSTRYLDNRKFHEIFRNVAAWGYWEGLSWPDDCAPGSILVSSIPDGWWWAIPLADRPTSVGVVMHRDAFVAARRTGTLEQVYAQALALSPVMANLTEHARLVTPLKTEQDYSYTCDSFAGNGYFLSGDAACFLDPLLSTGVHLAMYSGMLAAASLASILRAEVTEREAAAYYRDSYRQAYLRFLVFVQTFYEAHGKLGYYSKADELSHYMIEAGDIRRAFLNLVSGLEDIADAEQATSHLMGEMSRRIDQNLALRKDKRALSSAIGSTQVEDNARFFDAIEGLPCLSANMALDGLYVSTRPRLGLQRVAAM

SEQ ID NO: 84747 - protein, 426 aa, Maricaulis maris
  misc_feature (1)..(426): tr|Q0AL35|Q0AL35_MARMM Tryptophan halogenase OS=Maricau lis maris (strain MCS10) OX=394221 GN=Mmar10_2722 PE=4 SV=1
MAEPIRSICILGNGLEAWLTAHVLYKALGGEAVSIHIQPLDSRIHDDCAYTILRPSALVALDQFGLNLQGLLRLPATLPSLGQVLRSASGVDTLLPYGGQGVDWAGTSFHHHWLRARQAGLRHPYFAFSPGYHAMASDRFAPPDRRNAIGPMQHESGLHVSTRELTENLRLNLQANIIVLDPTANCEQADLVIHAPGAPDRNSTLDPVHAGPPKPYAVRVEAGGESRLQIPLRSGWLDLPTPAGPAKRHCGNSPWGEDGLVVGLAAAHLPGLEDRSMDRLLFELETLLELWPRSGVHSAEALEYNRLWAQEADEWTALSALSADQEDQRCQARKAVFRRRGYIEPLESRTITPEDWVEAFIGRGVIPAHYDRLSERLTDPQLKSELQKFTDAVGRTVREFPSFPSYLRAIDRAVGPATDAKTEPSA

SEQ ID NO: 84748 - protein, 421 aa, Amycolatopsis sp.
  misc_feature (1)..(421): tr|A0A429E5W3|A0A429E5W3_9PSEU Tryptophan halogenase OS =Amycolatopsis sp. WAC 04197 OX=2203199 GN=DMC64_17415 PE=4 SV=1
MSATLHGMPERFDVIVIGGGPAGATCAGLLAKEGRTVLVLERERFPRYHIGESLIPVGMRPLQELDLLDRMEARGFERKYGGSLVWGNRDVPWNFSFMKAAEGTYAYHTRRADLDTLILDRARELGAYVVEETTVKDVIQSDTGRVTGVRFTLRGSAGDYEAGASLVVDASGQSRVIGRKFSDITWHNELRNVAVWTYYDNCDRLPGDEWTNILIEGTADGWFWGIPIDKGTMSVGYVTKSDLANADDQSLEQLFLRERDKTTRLKGLLANARQHAGYRTARDWSYTNETFYGDGWVLVGDAAAFVDPLFSTGVALATLAGSSLSKVVDRILDHPAIEEKALDRYAGNYRAFFDEIRSFVERFYDRTKYKEYYYDLAQEIVDPEQLHAPSTDFVTLISGLSGKHPLLKINLDDLVANVTEP

SEQ ID NO: 84749 - protein, 497 aa, Pseudoalteromonas sp.
  misc_feature (1)..(497): tr|A0A317FVK5|A0A317FVK5_9GAMM Tryptophan halogenase OS =Pseudoalteromonas sp. meg-B1 OX=2203192 GN=DK924_07260 PE=4 SV=1
MKPIKHVVIAGGGTAGWITAALLNKVLGKVINITLIESSSIGTIGVGEATIPPIIGLNNALGINEQDFINATNASIKLGIEFENWKTPGHSYMHAFGSFGKDFPFCDFYNFWVKGHINGSEDSLWDFSLNYQAAKQHKFTLLNTIPNTQLPGLSYAFHFDATLYAEYLKNLALSRGVKHIDAKIERVEQCPETGNISNLTLDDNSQIQGDLFIDCTGQRALLIEQTLNTGFVDWSHYLPCDSAVAVQSTGSNELKPYTRSIAHDAGWQWQIPLQNRTGNGLVYCSRYLSDESATALLLNNLPGEPTTSPRLIKFKTGRRLKQWHKNVVAVGLSSGFLEPLESTSIHLIQSAVTRLIKLFPHNGVSDALVTEFNKQSTSEIEHIRDFIILHYKLTEREDTPFWRQCKQMEIPQSLAHKMDLFKQTGKVVRENDELFAEVAWQQVFIGQGLIPDDYNSIVDSLSSEQLTDLFATLKTLINSTVDKLPTHKEFLAKLKTN

SEQ ID NO: 84750 - protein, 509 aa, Pelomonas sp.
  misc_feature (1)..(509): tr|A0A397S329|A0A397S329_9BURK Tryptophan halogenase OS =Pelomonas sp. BT06 OX=2135721 GN=C8K28_1072 PE=4 SV=1
MNKRRILIVGGGTAGWLTAAYLAKALKLSERSHLEVTVLESPDIGSVGVGEGTFPTIRSTLQFLGIDEARFIRETSATLKQGIRFVDWARTPTAGQHQQFFHPFEAPFYAEDLNLVPYWLLQDAAGRMPFADAMTLQVRVAEAHRAPKRAGEAPYAAPLNYAYHFDALKLAKLLAARALELGVRHVQGTVTEVALDAAGAISHLDTAQHGRFQAELYIDCTGFRAELIGRAMGASFKSVRHQLFADRALACKVPLDANGVMESSTIATAHEAGWLWEIGLNGARGIGCVYSSDHLSDDRAADILRAYCGAGQEDLGMRSIPFTPGYREQQWVKNCVAVGLSAGFLEPLEATGLVLIEAAVGMIAEMLPHSGPIHAPARRFNELMTARFENIINFLKLHYCVSQRQEPFWRDNAVASTIPDRLAGLLEEWKLRPPGRFDFVLDTETFAFFNYQYILYGMGFATDLSAGRADFPQVEEANKLFAKIQRFADRAVADLPSHRALIQQINSGR

SEQ ID NO: 84751 - protein, 506 aa, Sphingopyxis sp.
  misc_feature (1)..(506): tr|A0A2Z5UIM2|A0A2Z5UIM2_9SPHN Tryptophan halogenase OS =Sphingopyxis sp. FD7 OX=1914525 GN=SPYCA_0239 PE=4 SV= 1
MADQMSPMRIIIIGGGTAGWMAAACFIRFLPPGWSVTLVESDAIGTVGVGEATIPQIRLFNQALGIDEDEFLTATQGTIKLGIEFADWTRPGHRYMHAFGAVGRGLGLLEFQHYWLRARAAGVAGELGAYSLNECAARARRMQRGAPRTSPHLAEMPYAFHFDAALYAAYLRRRAEAGGAQRVEGKVVDVRMEGDSGNVAGITLEDGRRIDGDLFIDCSGFRGLLIEGALATGYDDWSHWLINDRAIAVPCAHGDTPQLPWTGATARDAGWQWRIPLQHRIGNGYVYSSHHITDEDAERTLLAHLDGVPQAAPNRLRFVSGKRRKLWNRNVVALGLASGFMEPLESTSIHLVQSGISRLLKMLPVGAADPAVAAEYNRQSDFEWERIRDFLILHFKATERRDTPYWRDRAAMPIPDTLAAKIEQFRAQGLIFREHEELFTESGWLQVLVGQGVEPRAWHPLAHGIGEGDLAKYMAGISLMIEREVATMQSYDDFLAATRPAAGVAA

SEQ ID NO: 84752 - protein, 511 aa, Pseudoalteromonas issachenkonii
  misc_feature (1)..(511): tr|A0A290SG31|A0A290SG31_9GAMM FADH2 O2-dependent halog enase I OS=Pseudoalteromonas issachenkonii OX=152297 GN =prnA PE=4 SV=1
MDIKKVAIVGGGTAGWLAANHIGKEMLNRKGISVTLIESPDIPPIGVGEGTVPDIRNTLKSFGIREDEFIRQCDATFKQSIKFINWMDKKKHGEGNFFHHLFDVPSPYDAKHLTSYWLNNKEKSQSYAQGLSSQHVICEAGLAPKNITNAQYEGELAYAYHFNAGKFAQLLACNAKEKFSVEHIHTHVTQVKLGDDGAIAALITDNNEELEFDFYIDCSGFESLLMSKALKVPFVDVSESLLINSALVVQVPTKADDAIPPYTLATAHQAGWIWDIALTNRRGVGFVYSDNHMTDEQAHEKLDRYLGDSKQDLTYRKIPMRVGYRKKFWHKNCIALGLAQGFLEPLEATSILLTDFSAKFLTLRFPSSTTQLEQLEERFNHAMGYAWERVIDFIKLHYCISDRTDSAFWIANKNQDTISTSLKEKLNLWKEFTPVRDDFFSQFEVFYLENFLFVLYGMNYNTKASNSPDKEQAHCLARLKQRAEIDHYLINKLPDHRALLNKIKQYGLQSI

SEQ ID NO: 84753 - protein, 480 aa, Burkholderia pseudomallei
  misc_feature (1)..(480): tr|A0A3B6W4S2|A0A3B6W4S2_BURPE Tryptophan halogenase OS =Burkholderia pseudomallei OX=28450 GN=ERS013345_03932 PE=4 SV=1
MHLPNRTQVLVIGGGPAGATGAAFLAREGVEVTLVDKEVFPRYHIGESLLPSCLEILTLMGARDTFDRHGFQRKPGAYFNWKGETWKLDFGELGGTYRYSYQVRREEFDHLLLQHARAVGAQVHEGVSVREILFDDGRPCAALCVAQGAEEATTVEFDYLVDASGRNGLMSTRYLDNRKFHEIFRNVAAWGYWEGLSWPDDCAPGSILVSSIPDGWWWAIPLADRPTSVGVVMHRDAFVAARRTGTLEQVYAQALALSPVMANLTEHARLVTPLKTEQDYSYTCDSFAGNGYFLSGDAACFLDPLLSTGVHLAMYSGMLAAASLASILRTEVTEREAAAYYRDSYRQAYLRFLVFVQTFYEAHGKLGYYSKADELSHYMIEAGDIRRAFLNLVSGLEDIADAEQATSHLMGEMSRRIDQNLALRKDKRALSSAIGSTQVEDNARFFDAIEGLPCLSANMALDGLYVSTRPRLGLQRVAAM

SEQ ID NO: 84754 - protein, 536 aa, Sorangium cellulosum
  misc_feature (1)..(536): tr|A0A150PAE4|A0A150PAE4_SORCE Tryptophan halogenase OS =Sorangium cellulosum OX=56 GN=BE08_05175 PE=4 SV=1
MSDLIESIVILGGGTAGWMAASYLSKALQHKVKITLVESKAIPKIGVGEATIPNLQKSFFDYLGIPERQWMKHVNGAFKAGIKFVNWKKTPAPGRENAFYHLFGNLPSCDGVPLAHYWVKKHKEGFAEPMEYACYPQPEALDAKHAPCLLDGTRQMYYAWHFDAHLVADYLKQWSIERGVTHIVDDMVDATLDDRGHIASVSTKEGRTLRADLFIDCSGFRGLLINKTMKEPFLDMSDHLLCDSAVASAVPNDDARVGVEPYTSAIAMNAGWTWKIPMLGRFGSGYVFSSKFASREQATADFRALWGLPESHPLNHIKFRVGRNARSWVKNCVGIGLSSLFLEPLESTGIYFIYAALHQLVKHFPDTSFDQRQIDSFNKEIAYMFDDCRDFVQAHYFTTSRDDTPFWRANQHELRISDSIKEKIERYKAGLPVTATNLDEASYYDNFDYEFRNFWQDGNYYCILSGMGWQPDRVLPVIRYRQSSLDKAEAMFRDIKRRSEELKSSLPTNYHYLQSLQNGRASAHRQPHQTEPSSFS

SEQ ID NO: 84755 - protein, 504 aa, Maricaulis maris
  misc_feature (1)..(504): tr|Q0AL23|Q0AL23_MARMM Tryptophan halogenase OS=Maricau lis maris (strain MCS10) OX=394221 GN=Mmar10_2734 PE=4 SV=1
MKPNRIKSVLIVGGGTAGWMAAAALSRFLGPSLSITLVESDQIATVGVGEATIPQIKHLNAALGIEERDFVARTNGSFKLGIEFIDWHRKGAAYLHNFGSIGLNLQQVPFHHYWLRERSEGATTSLWDYCLNTAAARDMRFAPMEKVGSSPLSGIGYAYHFDATLYGRFLREYAEQRGVSRIEGLIETCRQDPQTGDVSKVCLQDGRELAADLFIDCSGFRGLLIEQALETGYEDWTHWLPCDRAIPVPSSNEAAPIRPYTQSIAHKAGWQWRIPLQHRTGNGHVFSSAHMSEAEATDTLLDNLEGKPLAEPRMIRFVTGRRKQFWNRNVVALGLASGFLEPLESTSIHLVQSGISRLIAMFPDGDIAAADRTEYNRQMVLEYERVRDFIILHYHLNERTDSDFWQDCAAMSVPDSLTAKMDLFRANGRLYHREEDLFTDSSWLQVMLGQGLMPRGYHPIADALPSDQLAGFLGDILKIVGQAAATLPPHADYLARHCPAAADA

SEQ ID NO: 84756 - protein, 508 aa, Pseudoalteromonas agarivorans
  misc_feature (1)..(508): tr|A0A290RLB8|A0A290RLB8_9GAMM Uncharacterized protein OS=Pseudoalteromonas agarivorans DSM 14585 OX=1312369 G N=PAGA_a0247 PE=4 SV=1
MNKAIKTIAVIGGGTAGWLSAAIIASYHQGNKGDGLKVMLVESSDIPTIGVGEGTWPTMKNTLQQIGLREVDVFKACNATFKQGGKFVNWTHGNNDFYYHPFTVPLGYGRIDLAPYLDNVENFAQQTNFQHDICEANLAPRGIAQGEYQANCNYAYHLDAGAFAELLKQHCKSKLGIEHIIGTVDQVKLDESGAIDTLTLTDQTRTINADLYIDCTGFSSLLLGQALNVPFKKMDHVLFNDSALAMQVPYDEGDESLASHTIATAQNAGWIWDIGLTHRRGVGHVYSSKFLSDEEAEQNLRNYLGDAAKGLSARKISFESGYREKFWHKNCVAVGMSAGFVEPLEATAIMLVEISSRFVAEHMPADTQVMPIVAKRFNEQMDYRWQRIIDFLKLHYMLTKRPEPYWQAHVQPQSIPQSLQEDLLLWGTRGPLIQDFHGALELFPAASYQYVLYGMGFKPDFTKQAYLYSNDAQANQIIERNSQLTQQMLQTLPPHRAYIEQWLAANPV

SEQ ID NO: 84757 - protein, 502 aa, Erythrobacter marinus
  misc_feature (1)..(502): tr|A0A0H0XRQ2|A0A0H0XRQ2_9SPHN Tryptophan halogenase OS =Erythrobacter marinus OX=874156 GN=AAV99_05955 PE=4 SV =1
MAIEHIVIVGGGTAGWMAAAPLSRMKKGRKLAVTLIESEAIGTVGVGEATIPPFREFNQALEIDDREMLSEVQGSFKLGIQFVNWGALGDSYIHPFGNYGYTIGGLSFHQVWHHMKVAGDKRPLQVFNVETMAAYFGRFMRSKDMEREDLPPVNYAYHLDASQYAKYLRKYAESRGVVRREGKICDVQLDGESGDVKSVKLEDGTVIEGDLFVDCSGFRGLLIEQALETGYEDWSHWLPCNRAVAMPCQRDDGTPPPPFTRATAHAAGWQWQVPLQHRNGNGHVYCDSFMSADEATDILVKNMAGKPTADPNHLRFVTGRRKKFWNRNVVALGLSAGFMEPLESTSIHLVHTGINKLIALLTLDDITDAARNTFNRLTGREYARIRDFLILHYNATSRDDTEFWNYCRTMSVPDTLSEKVELFRTTGQIFREEDELFTETSWAAVMLGQGVEMQAHNAMASSLDKAATKSEFDEIERTIRTMVQHMPGHGDYLAKYCPAAPA

SEQ ID NO: 84758 - protein, 506 aa, Sorangium cellulosum
  misc_feature (1)..(506): tr|A0A150SRZ1|A0A150SRZ1_SORCE Tryptophan halogenase OS =Sorangium cellulosum OX=56 GN=BE18_13000 PE=4 SV=1
MTQATAQQDEQFDVIVLGGGPGGSSVASFVAMQGHSVLLLEKEKFPRHQIGESLLPATTYGICGLLGIRDRIERAGFTRKQGGTFRWGKSPEPWTFRFAENPRVPGGYAFQVERSVFDKMLLDAAREKGVDVREEHPVVRVEQEDGRFSRVRFRDDRGSERTATAKYIVDSEGHRGQTYALVGERVFSQFFQNVALYGYYLDGKRLPAPSSGNILCAAFRDGWFWYIPLSDRLTSVGAVVSREAAQRIQDGPEQAFQSFVDSCPIIAEYLASATRVTEGVYGEFRVRKDYSYCNTRFWKPGLVLIGDAACFIDPVFSSGVHLATYSALLAARSINSCLAGDIDEEEAFDEFEFRYRREFGNFYQFLLSFYDMHQEADSYFWKARKVLNTDEKANDAFIRLVAGASSVDEPVFNHAEDFFRSRQGLGQWFEGMLSNQLATQVDGLPGQSAPATLEGGPSAEQFMEGFTAEVRQIQTQAMFGHRRARESSVRPQGLIPSTDGFAWQRG

SEQ ID NO: 84759 - protein, 522 aa, Pseudoalteromonas agarivorans
  misc_feature (1)..(522): tr|A0A290RUB2|A0A290RUB2_9GAMM Uncharacterized protein OS=Pseudoalteromonas agarivorans DSM 14585 OX=1312369 G N=PAGA_a1717 PE=4 SV=1
MNDTLKSIVIVGGGTAGWLSAGIIAAYLKKHHSLNYHITLVESAGIATVGVGEGTWPTMRRTLQNMGVDEAQFINQCNVSFKQGAKFANWHSTKENDFYYHPLMMPQGFADNDLAAAWLRQDIDSAAPHNHFANFVCPQHALCEHNLAPKALTTPQYSGVANYAYHLDAGLFATFLKNHCINHLNVTHVVASVLSVNNNANGDIHSLSLDNNTALCGDLYIDCSGFKSLLLGENLKIGFKSCKDILFADSALAVHMPYDDETQAISSHTISTAQTAGWIWDIGLQTRRGVGYVYSSRHISEQEAKEQLFDYLNISPAERADFNVKKISFEPGHREKFWHKNCVAIGLSAGFLEPLEASALLLVEISANFIAEQLPANRQVMDITAARFNRTFSYRWQRIIDFLKLHYMLSERTDSLFWQQHCAEQSIPQSLQDNLALWRTHIPNDNHFDYSVEVFPAASYQYVLYGMGFKTATTHYGNHPRAIKKARNLAAKNTKDTAELVSKLPDNRTLLKQIKQYGLQKI

SEQ ID NO: 84760 - protein, 497 aa, Pseudoalteromonas issachenkonii
  misc_feature (1)..(497): tr|A0A290SJ10|A0A290SJ10_9GAMM FADH2 O2-dependent halog enase I OS=Pseudoalteromonas issachenkonii OX=152297 GN =prnA PE=4 SV=1
MKPIKHVVIAGGGTAGWIAAALLNKVLGKVINITLIESTHIGTVGVGEATIPPIMQLNNALGINEQHFINATNATIKLGIEFENWKSSAHSYMHAFGTLGKNFPFCDFYNFWLKGQTQGNKDDFWDFSLNYQAAKNNKFAPLNTISNTSLPGLSYAYHFDASLYAEFLKHLATERGVKHLDAKINEVMQCPTSGNIQSLTLDDGSSISGDLFLDCTGLRALLIEQTLNTGFVDWSHYLPCDSAIAVQTASNDELKPYTRSIAHSAGWQWQIPLQHRMGNGLVYCSRYISDDDAKQLLLNNLPAEPITEPRLIKFKTGRRLKQWHKNVVAIGLSSGFLEPLESTSIHLIQSAVTRLIKLFPHHGVSDALVTEFNKQSITEIEHIRDFIILHYKLTEREDTPFWRQCKQMEIPQSLTHKMDLFKQTGKVVRENDELFAEVAWQQVMIGQGLIPDDYNSIVDSLSSEQLTDLFLTLKTLINSTVEQLPSHTVFLSSLKPK

SEQ ID NO: 84761 - protein, 475 aa, Sorangium cellulosum
  misc_feature (1)..(475): tr|A0A150P2A9|A0A150P2A9_SORCE Tryptophan halogenase OS =Sorangium cellulosum OX=56 GN=BE04_23050 PE=4 SV=1
MQGHSVLLLEKEKFPRHQIGESLLPATTYGICGLLGIRDRIERAGFTRKQGGTFRWGKSPEPWTFRFAENPRVPGGYAFQVERSVFDKMLLDAAREKGVDVREEHAVVRVEQEDGRFSRVRFRDDRGSERTATAKYIVDSEGHRGQTYALVGERVFSQFFQNVALYGYFLDGKRLPAPSSGNILCAAFRDGWFWYIPLSDRLTSVGAVVSREAAQRIQDGPEQAFQSFVDSCPIIAEYLASATRVTEGVYGEFRVRKDYSYCNTRFWKPGLVLIGDAACFIDPVFSSGVHLATYSALLAARSINSCLAGDIDEEEAFEEFEFRYRREFGNFYQFLLSFYDMHQEADSYFWKARKVLNTDEKANDAFIRLVAGASSVDEPAFNHAEDFFRSRQGMGQWLEGMLSNQLAMQVDGLPGQSAPATLEGGPDAEQFMEGFTAEVRQIQTQAMFGHRRARESSVRPQGLIPSTDGFAWQRG

SEQ ID NO: 84762 - protein, 514 aa, Rheinheimera sp.
  misc_feature (1)..(514): tr|A0A437JJF7|A0A437JJF7_9GAMM Tryptophan 7-halogenase OS=Rheinheimera sp. YQF-1 OX=2499626 GN=EMM73_07565 PE= 4 SV=1
MMEAKQRIVILGGGTAGWMTAAALSRFLPPHSYSIQLLESAQIGTVGVGEATIPHIRQFNQWIGLDESEFLKATGASYKLAIRFRGWGQANSDYYHPFGLSGEDLYGLPFHQHWLWLQQQKTTSLKDYGQYSLAVLMAQQGKFSRPAADLKDPSSSFNYAYHLDATLYAALLRQHSIAQGVEWLDGKVTAVTQHQNGDIAQLILEDGRQIAGDLFIDCSGFSALLINKTLQTGYDNWQHWLPCDKALAVPSEKAPAPPSYTSSKAMAAGWQWRIPLQHRTGNGLVYCSSYLTDSAAEQALMTGLEEQALAPARALQFVTGRRKQSWVNNCIAIGLSSGFLEPLESTSLYLVQIAIESLLQYFPSHPVGDIERELFNQKMQLEYLRVRDLLILHYKLNSRPEPFWQYCAQMAIPDSLAQRLEMFKETGHALEYRQGLFQPASWLALYLGQGLQPKQLDTRLGALDPNQLESWFSRYQYQLQQVVNAMPEHHQVLQRTELAGAAVAPAFSLYGHRG

SEQ ID NO: 84763 - protein, 515 aa, Streptomyces sp.
  misc_feature (1)..(515): tr|A0A4R2E188|A0A4R2E188_9ACTN Tryptophan halogenase OS =Streptomyces sp. BK387 OX=2512128 GN=EV289_11257 PE=4 SV=1
MTQSVVILGGGTAGWMTASYLRAAFADRVDITVVESRRIGTIGVGEATFSTVRHFFDYLGLSEADWMPECNGTYKLAVRLENWRAPGTYFYHPFERMRVVDGVPLTDWWQKVGGTDRFDRDCFLIPWLCDAKASPRYLDHRLFEQDFDEDPDRPLYRTTLAEQNTQFPYAYHFDASLLADFLCRHAVGRGVHRIIDDVVDVRLDERGWIDRLVTREHGDLTADLYVDCSGFRSRLLGDALGEPFISFQDSLPNDRAVALRVPVDTAVRGIRPCTTATAQDAGWIWTIPLYDRIGTGYVYAADYCEPEEAERVLRDFVGPAAADLEANHIRMRIGRSHRAWVNNCVGIGLSAGFVEPLQSTGIFLIQHAIEQLVRYFPGTDRDPVLRDTYNLSTARAIEGVREFLILHYRGAARVDNDYWRDAKKRAVPEDMAVRMEQWQSKLPDNDTTYPYYHAFEPYSYVCMALGLGGIPLRHPPALDLFDTRAARAELARVREQARKLVDTLPSQVEYLSGLR

SEQ ID NO: 84764 - protein, 499 aa, Robiginitomaculum sp.
  misc_feature (1)..(499): tr|A0A2G2J3Q6|A0A2G2J3Q6_9RHOB Tryptophan halogenase OS =Robiginitomaculum sp. OX=2030823 GN=COA69_09260 PE=4 S V=1
MSIKNIVIVGGGTAGWMTAAAFSHATGDRAQITLIESEQIGTIGVGEATIPPFVGFNNLLGIDEATLMANVQGTFKLGIQFVNWGQKGDSYFHPFGDYGYSIDGNDFHSIWMKFRKNGDPRPLYAFSPETIAAMHRKFERTPEGQRGDLPPINYAYHMDASQYAKYLRKYAEPRGVKRVEGLVEDVTLNSENGFVDSVTLKGGQIIEGDFFIDCSGFRGLLIEGALKTGYEDWTHWLPCDRAIAVSCAQDDAPLPYTRSTAWSAGWQWRVPLQNRLGNGHVFCSEYMSDDEAQDILMSNLDGEPLTEPKTLRFKTGQRKKFWNKNVVAIGLSAGFMEPLESTSIHLINTAITKLIATFSLDGISPIQENIFNRLTQKEYRRIRDFLILHYHVNQRDDGEFWKYCQNMDIPDTLQEKLDLFKWNGQFFREEDELFTATSWVAVMMGQGIEPQTYNPVVDAMDAEKTKKEFDEIEKSIQFLVQEMPTHEEFLHQYCEASKS

SEQ ID NO: 84765 - protein, 528 aa, Undibacterium parvum
  misc_feature (1)..(528): tr|A0A3Q9BP27|A0A3Q9BP27_9BURK Tryptophan 7-halogenase OS=Undibacterium parvum OX=401471 GN=EJN92_04270 PE=4 S V=1
MKPISSILIVGGGTAGWLTAAFLAKSLGVASSKTLSISVVESPEIGIIGVGEGSFPSIRGTLAAIGIDEARFVKECNASFKQGIKFVDWVRPKGSAGIDHYFHPFSQPSQRQGGPELLPYWLLGAAGNHTPFAQAATMQKRIADASHAPKRNEDGDFLGPMNYAYHFDASLFAKLLETHAKSLGVQHISATIEQVQLAEDGAIAAVITHTTERLTADLYVDCSGFRARLIGQALGSAFTAVDEVLFVDRALAVQVPYPASDTPISSYTIATAQEAGWIWDIGLQQRRGVGHVYSSRHTDDVRAEQVLRDYLRDHLGPDNAQLTPRMLKLKVGYREVHWIKNCVAIGLSGGFLEPLEASGIGLIETAVYLLSYLFPHDGNTAPVAKLFNSMMKDRYERIVDFVKMHYCISQRKDSQFWLDNTESRSIPESLQEKLAMWRCRPPHRLDFITDLEMYPPSSWQYVLYGMEFKTALHANALAYPRMEEARQEFQMIEQMARRALDNLPTHRALIAQFCARYQQQLLGKQAEA

SEQ ID NO: 84766 - protein, 501 aa, Sphingomonas pokkalii
  misc_feature (1)..(501): tr|A0A2U0SDD0|A0A2U0SDD0_9SPHN Tryptophan halogenase OS =Sphingomonas pokkalii OX=2175090 GN=DD559_08705 PE=4 S V=1
MSAPLSHIAIIGGGTAGWMAAAALARVLDTKAIAITLVESEAIGTVGVGEATIPPIQAFNALLGIDEAEFLRATKGTYKLGIEFVDWRAHGTRYFHPFGTHGVDFGAIPFEALWQRARMAGAAAPLEAYSICAEAARLGRFQRPATTGNNPLAHIGYAYHFDAALYAGFLRARAEQWGVRRQEGRVTSVERASDGAIAGVVLEDGARIAADFYIDCSGFRALLLGEALGIPFEDWGRWLPNDRAVAVPCALGLEGRTPFTRSTARGAGWQWRIPLQHRVGNGLVYASAQCSDEDAQALLLSTLEGEPLAEPRVLRFRAGRRARFWERNCVALGLSSGFLEPLESTSIHLVQAGIARLLEMLPVGGGTPADIRRYNRLMATEFETIRDFLILHFHATARDDTDYWRQLRTMELPDTLADRLAIYRASGRLYREADELFSKTSWLAVLHGQGVDPIGYDPIADGMARDEARTRLARIAEVTALAASRIPAHDAFLRESGAMVE

SEQ ID NO: 84767 - protein, 510 aa, Caulobacter sp.
  misc_feature (1)..(510): tr|A0A2R7L6D4|A0A2R7L6D4_9CAUL Tryptophan halogenase OS =Caulobacter sp. HMWF025 OX=2056860 GN=DBR10_17020 PE=4 SV=1
MPAPLKVVIVGGGTSGWMSAAALVAGLPPGLCEVRLVESDEIGIVGVGEATLPQIKDFNDHIGVDEADFMRQTQATFKLGIEFVDWGFKGSSYIHPFGVHGKPLGGVPFYQYWAKARLNGRVDDLGDYSLPIVASRQNRFAFPSTDEDGLSSNFAYAYHFDAHLYARFLRGFAEARGLRRTEGRIVDVTLKPEDGHIASIRLESGEVIAGDLFIDCSGFRSLLMGQALGVGYEDWTPWLPCDRAYAVPCERAGALTPYTRSTAREAGWQWRIPLQHRTGNGYVYSSRFISDDEAAATLLANLDGEAQGDPRPLRFQAGRRETSWSRNCIAIGLASGFLEPLESTSIYLIQVAITNLLKLLPGRAIDPALVSEFNRLIDVEYGRVRDFLILHYHLNGRDDAPLWRYCREMPVPDSLTSRMALFEHRGHIAKYKDGLFQPPSWLAVFVGQGLLPAGYDPLVDNVPQEHILRELDQFRADVAQTVEAMRDHGGFVADFCAAPANRPLSSRVAS

SEQ ID NO: 84768 - protein, 504 aa, Sphingomonas pokkalii
  misc_feature (1)..(504): tr|A0A2U0SF51|A0A2U0SF51_9SPHN Tryptophan halogenase OS =Sphingomonas pokkalii OX=2175090 GN=DD559_12265 PE=4 S V=1
MAGVKPVRVVIVGGGTSGWMTAAALARLLPGRVSIHLIESEAIGVIGVGEATLPHIRGFVEKLGIREADFMAWTRGTFKLGIEFRDWGKIGDSYVHPFGTFGRGKGEVDFHHYWTRLRLAGTDVPPLEQFSYGCMLARANRFDLPLDDPDHLASTYGYAYQFDALLFAPYLRTIAEGLGAQRTEGKVVEVLRDAERGTISAVRLDDGALIEGDLFIDCSGFRSLLLGEALEEPFEDWNHWLPADRAVAMPCRTATAVTPYTSAIAMPAGWRWRIPLQHRTGNGYVYASAFTSDDDAARALTHAVEGAPLADPRVLRFRAGRRRRSWVKNCVAIGLASGFLEPLESTSIYLVQQAITALIELFPETADAPVERDEFNRLIDLEYDRIRDFLILHYHATTRTDTDFWNYVRTMTIPDSLSEKIELFRRAGRVVKYREGVFLDASWIAVYVGQGILPEGYDPRADAPDSGALIQGMQALHREITATVERVPEHLRYIDRYCAMAAAA

SEQ ID NO: 84769 - protein, 434 aa, Frankia torreyi
  misc_feature (1)..(434): tr|A0A0D8B9Y1|A0A0D8B9Y1_9ACTN Tryptophan halogenase OS =Frankia torreyi OX=1856 GN=FF36_04593 PE=4 SV=1
MTQKVLVLGGGTAGLLSGIALLQLAPGAEVTVVRSSALSHIMVGEGTFADTPRMLHGPLGVPRDEFLASTNPTVKLGIRFEWGPRPYFDYPFEEDFDNQILPGPDKPWGYYHLTDARDESPFPATTRRTRVGYHVENQRFVEYLEGFFEQLGGDLVEGKVIGAERSDAGLDCVLIEGGARMSADLYVDASGFRGELIHRTLGEPYVSMRDHLFCDRAVVGGWQRGDEPIQLYTTVETMDSGWAWQIEHEHLVNRGYVYCSAFADDEEASAEFLRKNPLVAPATLRVIRFETRRIRRSWVGNVVAVGNSCGFIEPLEATNLQLICQQAMRLAETVATSGPSGAEAIDAYNEAVTEQWIDIQDFLAMHYRFNTRLNTPFWKMARNDTPLGNLEPYIEEYKRSGPVLMGQRNSMFGVDGHLAILLGMRVPWRETGVR

SEQ ID NO: 84770 - protein, 650 aa, Legionella massiliensis
  misc_feature (1)..(650): tr|A0A078KXL7|A0A078KXL7_9GAMM Tryptophan halogenase OS =Legionella massiliensis OX=1034943 GN=BN59_03473 PE=4 SV=1
MKNIVIAGGGPIGLYTAIRISKLIEKYGLKATVTVVEPKLNLYSRPGIVAKNVLDVIERNVELDHNLLPDGDDSGSSIFIMDLEKALYKEAQNHGIKFVRGKVAAIEGKALVLEDGRKIPCEIVIDSTGPRRTLINQVNQQSTSEKKPFTIRQVADNPIKNHFVAYVHMDGENAKLIAGKMVKDPLKHALALEKLRTEFGWPHFKEPELSIRKYTPKGENKDDDMQRFYFYFEIPPELAESEPSEQLAWLKALLYLKTENDDIEFTVEDGAMKFLPFGVNPHEVTEPVYTSSGLPVVIPCGDAQIEPDYRPGIGIRSGAFRADTLVDSFMRDLDGGLVLNQEAYEHSLQGPLGLHRTTLKDEYKNNRERLDSALLEKGKIYSEALALAETPEQGEIILKGLRQIVSEIERLGVQAYRDSCQKGTPSQKVPQFKIDNYGHLAEVTSLEQSKTLLATALELLPETEVELRTQIKNNIDDLAMSYKAFAALKFSSKEYGFAHKFYNEALSLLTSNMPGEHKDEIAKIYSNLALIAKAQKKYDLVKDYVDKGLQELGSMLSEDRNTPDMKTIYAKLLNTQCNALFDEVEANITKLDSRDHPLNAKLQQGKDLCNTLIENSLIHSSSAKILSERLAKVERAVSEKLEPLVTVQIK

SEQ ID NO: 84771 - protein, 500 aa, Sphingomonas sp.
  misc_feature (1)..(500): tr|A0A4Y8ZR32|A0A4Y8ZR32_9SPHN Tryptophan 7-halogenase OS=Sphingomonas sp. 17J27-24 OX=2555898 GN=E2493_09545 PE=4 SV=1
MADGAVRSIVIVGGGTAGWMAAAAFARFLGPPFDIRLVESDEIGTVGVGEATIPQIRLFNDGLGIDEDEFLRATQGTFKLGIAFDGWRAPGQSYIHAFGSIGRPLGLIAFHHYWLRARAEGAAEGLWDYSPSALAANANRFARPNESGLPSGIAYAFHFDASLYAAYLRSYAEARGARRIEGRIADVARRGEDGFVEAVTLAGGQRIEGDFFVDCSGFRSLLLGEALETGFEDWSRWLPCDRALAVPCAPVRPLTPCTRATAKAAGWQWRIPLQHRTGNGYVYSSRHVSDDEAEATLLAGLDGEALAEPRRLRFVAGRRREAWRGNCVALGLAAGFLEPLESTSIHLVQAGIARLLQLLPGGAIDPSYAAEFNRQTAREWESIRDFLILHYHANGRDEPLWRACREMEIPASLTEKIALFRAGGRIFRTEEELFTEVGWLQVMLGQGIDPVSYHPLADRLAPEQLREFLSLASSHAGHVAGRMVDHADYVAQRCAAAPRR

SEQ ID NO: 84772 - protein, 534 aa, Flavobacteriaceae bacterium
  misc_feature (1)..(534): tr|A0A2E8DGL1|A0A2E8DGL1_9FLAO Uncharacterized protein OS=Flavobacteriaceae bacterium OX=1871037 GN=CMC55_0019 0 PE=4 SV=1
MTNKIIIVGGGSAGWMTAATLSKFFSHKSITLIESPDIPTIGVGESTLGQINRWLSMLDIKDEDFMKACDATYKLSIRFQDFGRIGDGGFHYPFGDPYIKENSAEMNDWYFKKILYPQTPNWDYAECLYPSMGLVFQNRLTDRDDLFPDCWSFQKDTAYHLDATKFGIWLRDHYCIPKGVKHIKEEIKSVEVSHKEGIISLNKKYKADLYIDCTGFKSLLLGKTLLEPFESFDYLPNNSAWATKIPYRNRTNEVKNYTNCTAIQNGWIWTIPLWSRIGTGYIYSDKFVSDETALKEFKHWLANPTMNFFPLPSFFSDEKGQWDPKWVDQLEFKKFKFKGGMYKKPWVKNVCAIGLAAGFIEPLESNGLLSVHEYLQLLLRCLGREEISQFTRDNFNFGVRKLSKSFSEFVALHYALSSRTDTKYWKAIQERAYPFDFDYPTLNSDFQLATISKMENHHYRPTGGLHCIATGMDWYPTDLPTLMSFSYKNTYKELKKMWQPSINKLNLRSLDWKRLAITCPSALKFTKDKIYRDS

SEQ ID NO: 84773 - protein, 507 aa, Robiginitomaculum sp.
  misc_feature (1)..(507): tr|A0A2G2J3Z5|A0A2G2J3Z5_9RHOB Tryptophan halogenase OS =Robiginitomaculum sp. OX=2030823 GN=COA69_06180 PE=4 S V=1
MSQETGAVKKIVIAGGGTAGWMAASGLAKLLGDQNLEIELVESEQIGTISVGEATLPHIRFFNQKLGLDEADFIAKTQATIKLGIEFKDWGRIGDSYIHPFGDYGRDFNEVDFHHYWLKLNQMHKAGRIDDYSLPIVMAEMNKFGFPDPDERSVMSSFSYAFQMDASLYAKYLRGFAENLGVKRTEGRIVDVTQHAETGFIKSLVLEDGTSVEGDIFLDCTGFRALLIDKTLKIGFEDWSNYLPCDRAIAVPCEGSDTPIPYTRATARGAGWQWRIPLQHRIGNGYVYCSEFISDDEACADILANLDGKPLNDPLFLKFQAGKRKTQWEKNCITIGLSSGFLEPLESTSIYLIQAAITNFIEMFPQKDCAETDVKEFNRIMDLEYERVKDFLILHYYATERDDTPFWNHVRNMEIPDSLEYKMSLFRERGIVVEYKDGLFLHPSWVAVYLGQRIVPKRYDPLVDAIPTDALIQRLDEMKGQIAQVVGALPSHPEFLRSNCPAPPVSM

SEQ ID NO: 84774 - protein, 538 aa, Burkholderia pseudomallei; identical to SEQ ID NO: 84273
  misc_feature (1)..(538): tr|A0A3B6WKQ7|A0A3B6WKQ7_BURPE Tryptophan halogenase OS =Burkholderia pseudomallei OX=28450 GN=ERS013345_04634 PE=4 SV=1

SEQ ID NO: 84775 - protein, 561 aa, Marinibacterium profundimaris
  misc_feature (1)..(561): tr|A0A225NI01|A0A225NI01_9RHOB Tryptophan halogenase OS =Marinibacterium profundimaris OX=1679460 GN=ATO3_12265 PE=4 SV=1
MNNRLRKITIVGGGTAGWMTALIMETEFSRTSAPKDRPRICLIESPNIATVGVGEATVPHMPRTIRKAGITERDFFRETNASFKLGVKFCNWNKDARGNRIDYVNPFAHGQILEGLEAAEYFLRFGNGDRDFTQSVAPHDDLGRLCKGARELGQPEFEQRFGYAYHLDAVKFAGMLSRVCTRRGVEHIQDEVQSVELDEQGNVSHLMLERKGRHDVEMVVDCTGFRGLIINQALGEPFLDYSDYLPNDRAMALQIEHPDPEKIESVTRSTALGAGWTWRVPLYNRVGTGYVYSSAHRTDDQAADEYLEWLGDSGKGATPRVIPMRIGRVRNAWVKNCVAVGLSGGFIEPLESTAIHMIEHAVRWFTEHLPTREIEPALRSRYNRQMNRLYDEVLDFICLHYRLGNRTDDQYWIDARTEMKIPDRLAENLELWQYRLPMDHDIGFATLFDFRVYQTVLLGKQVYDTGYGPGIRDRLRPVKKPIWFHYTKGAKAHLAQILKTMPDHKTLLRDIRGELEQPAYARVAAMKPTVPMPGEAPEPVKIQNMPNHAEIRSGAKDLQLF

SEQ ID NO: 84776 - protein, 511 aa, Erythrobacter marinus
  misc_feature (1)..(511): tr|A0A0H0XN46|A0A0H0XN46_9SPHN Tryptophan halogenase OS =Erythrobacter marinus OX=874156 GN=AAV99_11845 PE=4 SV =1
MNGDPIRKIVIVGGGTAGWMAAAAISKIMGNFPRLTITLVESEAIGTVGVGEATIPQIAAFNKLLELDEREFVRETCATYKLGIEFVDWLRPNHSYVHPFGSYGLDMLGIEFHHFWLRARTLGQDIPLDDFSIAVAAGKAGKFFWPRPDQPNSPLSRLSYAFQFDAGRYARYLRKIAETCGVLRVEGKVTQVLQNSENGHVTAVKLEDGQSVEGELFIDCSGFRSLLLGQTLGIGFTDWTKWLPCDRAVAIPCELGGKREPLTRSTARPAGWQWRIPLQHRIGNGHVYSSAHMEPDEATEMLLANLDGTPLAEPNHLRFTAGHRDKAWDRNVVALGLAGGFLEPLESTAIHLVQSGIARLMSLFPTTAFAQKEIDRYNRETASDYADIRDFLLLHYMASERNDSEFWRYCRALDPPDALKEKLEMFRSSGRVIREHNELFTETSWLSVMVGQGIDPQGYHPVAGMLDEEETRRRVSHIRDVIQTTVGQMPTQEEFLAQNGAAIPASERLNA

SEQ ID NO: 84777 - protein, 557 aa, Methyloligella halotolerans
  misc_feature (1)..(557): tr|A0A1E2RXA4|A0A1E2RXA4_9RHIZ Flavin-dependent tryptop han halogenase RebH OS=Methyloligella halotolerans OX=1 177755 GN=A7A08_02496 PE=4 SV=1
MGEPLRSITIVGGGTAGWLTATFLNRYCSSKDGRGGPEITLIESPNIPIVGVGEASLPGMVVLLNQLGVSESEFLKLTDATFKVAAHFINWNHDDKGRPTEFLNVLNAAGQIDGRKLADYFVTFDAAHRGPEAGLDYVRLFSPAVEIVRRNLAPRRPGAPDFSGELGYTYHFDATKLAAFLKDVATNRGVNHILADVDEVNLDERGFVKSLSLRDRGEHPVDLVIDCTGFRGSILQQALGEPFESYGDHLLNDRAAVVQIPHEDERVMAPTTRATGFKAGWNFNIPLTTRVGTGYIYSSKFISDDEAVDELLAFYGDQAKGHEPRIIPMRTGRVRNAWVKNCVALGLSCGFIEPLEATAIFMTDLGARWLHHYLPTQDFEPELAAAYNRQVSKVYEEVRDFVQAHYHLNNRQDSEYWRVAREEMKLSDRLQENLKVWQHTTPEMMDLDTAYLFSAPVYTLLLIAKGFYKDREIAKAGSLSRSAYERYRTEMRKARPGQLEGLVGQAEFLKAAGRPPAGPLAQPAPADFASFTASSTKIKLGGAPKTVKGRRRKLKRR

SEQ ID NO: 84778 - protein, 507 aa, Erythrobacter marinus
  misc_feature (1)..(507): tr|A0A0H0XST9|A0A0H0XST9_9SPHN Tryptophan halogenase OS =Erythrobacter marinus OX=874156 GN=AAV99_11860 PE=4 SV =1
MPQPDQKRCRVVVLGGGTAGWMTAAGLAKLLPDLASVDLVESEDIGIVGVGEATLPHIRGFVERLGIDEAAFMKATHATYKLGIDFRDFGAIGTSYIHPFGSFGEEVAGVGFHHWWLELQRQGLAAELGQFSLAVAAAKANRFAPPAQDTSLASTYGYAYQFDATLFGPFMRDFGTGLGVTRHEGRVTRVERDAETGNVTALLLEDGRRIEGDLFVDCSGFRSILLGQELEEDWEDWTHWLPCDRAAAMPCTHFTPDIRPYTTATAMPAGWRWQIPLQHRMGNGYVFSSAFLSEADACDAIRNAAEGEPLAEPRILRFRPGRRSRSWSHNVIGVGLASGFLEPLESTSIYLAQMAITYLIELFPEGGEIDPRDRDEFNRLVDMEYDRVRDFLILHYHATTRDDSDFWNHVRTMTVPDSLSEKMELWRKAGRIEKYSDGLFYDASWIAVYLGQGVFPETHDARAAMADPARVKAALDRLQQAISAHVDSMPGHVDYLRAESARLAEQM

SEQ ID NO: 84779 - protein, 506 aa, Sorangium cellulosum
  misc_feature (1)..(506): tr|A0A4P2QSU3|A0A4P2QSU3_SORCE Tryptophan halogenase OS =Sorangium cellulosum OX=56 GN=SOCE836_052790 PE=4 SV=1
MTQATVQQDEQFDVIVLGGGPGGSSVASFVAMQGHSVLLLEKEKFPRHQIGESLLPATTYGICGLLGIRDRIERAGFTRKQGGTFRWGKSPEPWTFRFAENPRVPGGYAFQVERSVFDKMLLDAAREKGVDVREEHPVVRVEQEDGRFSRVRFRDDRGIERTATAKYIVDSEGHRGQTYALVGERVFSQFFQNVALYGYFHDGKRLPAPSSGNILCAAFRDGWFWYIPLSDRLTSVGAVVSREAAQRIQDGPEQAFQSFVDSCPIIAEYLAPATRVTEGVYGEFRVRKDYSYCNTRFWKPGLVLIGDAACFIDPVFSSGVHLATYSALLAARSINSCLAGDIDEHEAFEEFEFRYRREFGNFYQFLLSFYDMHQEADSYFWQARKVLNTGERANDAFIRLVAGASSVDEPVFNHAEDYFRSRQGMGEWFEGMLSNQLAMQVDGLPGQSAPATLEAGLSAEHFMEGFTAEVRQIQTQAMFGHRRARESSVRPQGLIPSTDGFAWQRG

SEQ ID NO: 84780 - protein, 538 aa, Burkholderia pseudomallei; identical to SEQ ID NO: 82926
  misc_feature (1)..(538): tr|B1H9D1|B1H9D1_BURPE Tryptophan halogenase OS=Burkhol deria pseudomallei S13 OX=320374 GN=BURPSS13_X0871 PE=4 SV=1

SEQ ID NO: 84781 - protein, 475 aa, Sorangium cellulosum
  misc_feature (1)..(475): tr|A0A150TA50|A0A150TA50_SORCE Tryptophan halogenase OS =Sorangium cellulosum OX=56 GN=BE21_56480 PE=4 SV=1
MQGHSVLLLEKEKFPRHQIGESLLPATTYGICGLLGIRDRIERAGFTRKQGGTFRWGKSPEPWTFRFAENPRVPGGYAFQVERSVFDKMLLDAAREKGVDVREEHAVVRVEQEDGRFSRVRFRDDRGSERTATAKYIVDSEGHRGQTYALVGERVFSQFFQNVALYGYFLDGKRLPAPSSGNILCAAFRDGWFWYIPLSDRLTSVGAVVSREAAQRIQDGPEQAFQSFVDSCPIIAEYLASATRVTEGVYGEFRVRKDYSYCNTRFWKPGLVLIGDAACFIDPVFSSGVHLATYSALLAARSINSCLAGDIDEEEAFEEFEFRYRREFGNFYQFLLSFYDMHQEADSYFWKARKVLNTDEKANDAFIRLVAGASSVDEPVFNHAEDFFRSRQGMGQWLEGMLSNQLAMQVDGLPGQSAPATLEGGPNAEQFMEGFTAEVRQIQTQAMFGHRRARESSVRPQGLIPSTDGFAWQRG

SEQ ID NO: 84782 - protein, 538 aa, Burkholderia pseudomallei; identical to SEQ ID NO: 82376
  misc_feature (1)..(538): tr|A0A5K1LIM7|A0A5K1LIM7_BURPE Tryptophan halogenase OS =Burkholderia pseudomallei OX=28450 GN=BGI47_23915 PE=4 SV=1

SEQ ID NO: 84783 - protein, 501 aa, Pseudoalteromonas agarivorans
  misc_feature (1)..(501): tr|A0A290RVI2|A0A290RVI2_9GAMM FADH2 O2-dependent halog enase I OS=Pseudoalteromonas agarivorans DSM 14585 OX=1 312369 GN=prnA PE=4 SV=1
MKPIKHVVIAGGGTAGWITAALLNKVLDKVIKITLIESSTIGTIGVGEATIPPIIQLNNALGINEQDFINATNASIKLGIEFENWKTPSHSYMHAFGSFGKDFPFCDFYNFWVKGHISGAEESLWDFSLNYQAAKQHKFAPLNTLPNTQLPGLSYAYHFDATLYAEFLKKLATSRGVEHIDAKIEQVEQCPLSGDIKSLTLGNTQQINGDLFIDATGQRALLIEQTLNTGFVDWSHYLPCDSAVAVQSQGTSELKPYTRSIAHSAGWQWQIPLQSRIGNGLVYCSRYLSDDAATQLLLNNLPTEPMTEPMTEPRVIKFKTGRRLKQWHKNVVSVGLASGFLEPLESTSIHLIQSAVTRLIKLFPHNGISDALVTEFNKQSVIEIEHIRDFIILHYTLTAREDSPFWRQCKQMDIPESLAHKIKLFKQTGKVVRENDELFAEVAWQQVFIGQGLIPEDYNSIVDSLSSEQLNDLFSTLKTLITSTVDQLPTHKNFLAKIKKA

SEQ ID NO: 84784 - protein, 505 aa, Sphingopyxis sp.
  misc_feature (1)..(505): tr|A0A2Z5UKS2|A0A2Z5UKS2_9SPHN Tryptophan halogenase OS =Sphingopyxis sp. FD7 OX=1914525 GN=SPYCA_0788 PE=4 SV= 1
MDRSIHNVVIVGGGTAGWLSACVLAARRPDLSIMLIEAPNIAPIGVGEGTWPTMRETLATIGIEESEFLRECDASFKQGSLFVGWVNGAPDDRYLHPFSAPPPHDMRDLLAAWRADEDATSFAAAMTPQAAICERNLAPRHPAMPDYAGTVNYAYHLDAGKFARLLARHATERLGVTHIAAEVAGIIGGSDGDIAALGLRDGRSIEGDLFVDCSGQAALLIGGHYGVEWIDRADVSFNDRALAVQVPTQAGSAIASQTIGTAHRAGWIWDIALPTRRGIGCVYAARFMSDGEADATLRDYIAANMPEVHARDLTPRALAFRTGYRARLWHKNCVAVGLSAGFIEPLEASAIVMIELSLRALADNFPAGRAAMDIHARRFNALFHYRWERIVDFLKLHYVLSQRDDPYWKAHRAPATIPPRLAEQLALWRDQPPSAWDFPQMDEVFPAASQQYILYGMRPGETVSPCRPRSHVAARLADISERARALAAALPENAAYFAALRARAA

SEQ ID NO: 84785 - protein, 515 aa, Sphingomonas spermidinifaciens
  misc_feature (1)..(515): tr|A0A2A4B3P7|A0A2A4B3P7_9SPHN Tryptophan halogenase OS =Sphingomonas spermidinifaciens OX=1141889 GN=COC42_127 90 PE=4 SV=1
MTGPVQKIVIVGGGTAGWLAAGVIAARHKTRIDAGQFSVTLVESPNVPIIGVGEGTWPTLRSTLAKMGVSETDFFRECDAAFKQGARFQRWTTGAPDDAYYHPLMLPTNFQHLNLVPHWLAANDDESFCDAVCPQGRICDDGLAPKTIATREYDAVANYAYHLDAGKFADFLTRHCTQKLGVRHILADVTQVCQAEDGDVTHLVTEQAGTIPGDLFVDCTGFKALLIGGAMGVPFRPLKDVLFCDTAMAVQVPHERPDSPIASHTLSTAQSAGWIWDIGLPTRRGLGYVYSSAHVDDETAERELRAYAGAAADGLSVRKIPIRAGHREQFWKRNVVAVGLAAGFLEPLEASAIVLIELSAKLIAEQMPARREVMDTIARRFNETTAYRWGRIVDFLKLHYVLTKRTDTDFWRDNVRTESIPDRLADLIDLWRWQSPWFHDEFDRAEEVFPAASYQYVLYGMGFRTEVEPVTLGDDARLAERARRENRMQTEKLRAGLPRHRDLIDRIKVQGLSAI

SEQ ID NO: 84786 - protein, 370 aa, Vitiosangium sp.
  misc_feature (1)..(370): tr|A0A2T4VEB7|A0A2T4VEB7_9DELT Tryptophan halogenase OS =Vitiosangium sp. GDMCC 1.1324 OX=2138576 GN=DAT35_2930 0 PE=4 SV=1
MLSHCDVAILGGGPAGAAAALLLRQHTGLSVALVERSTYQPPRIGETVSPDSRRLLQQLGIWEAFVKDQHLPSQGTCSCWGSATPGYNDYLFSPWGPGWHLDRERFDRMLATEARARGAHVLMDTEPVRWEPHSQGGYTLHLATGETPFTLQARFVVDATGRRAVFASSRGARRHMADRALGFYGFFHIPPGKTFDTYTLVETCREGWWYSARLPGDRVAVGLMGDGESLRGLKQHEPKPWLSLLKQTQMTQQRLAGCAFADASLLALPASVSLLDPVQGQDWIAVGDAACTYDPLSSQGILKALRSAVMATEALERAARGDSAGLHAYAARVREQFQEHLAIRRGFYRQETRWSEAPFWKNRGRTEVTA

SEQ ID NO: 84787 - protein, 493 aa, Rheinheimera sp.
  misc_feature (1)..(493): tr|A0A437JJF0|A0A437JJF0_9GAMM Tryptophan 7-halogenase OS=Rheinheimera sp. YQF-1 OX=2499626 GN=EMM73_07530 PE= 4 SV=1
MQQVKKVVIAGGGTAGWVAAAALSKRLKGLVEVVLIESEEIGTVGVGESTVPPVLLFHNLLGINEQEFMQATDATFKLAISFENWGQTGDQYFHPFGVTGKGSFLTDFQHYYLHALQQGVDAPFGDYCYELQAAKLHKFGKSDKSSINYAYHLDAGRYARFLRKFSEDLGAVRIEGKIAQVQQHVNGDIRSLVLESGQEISADLFIDCTGFKALLIEQTLKTGYEHWDHWLPCNKAVVVQTESAATLPPYTRAMAHDSGWQWRIPLQHRVGNGLVYASDYLSDEKAQQRLLGNLETAPLMEPRMLSYQTGRRKKLWNKNCIAIGLSSGFIEPLESTSIFLFMSGIIRLLRLFPFNGVTPALTDEYNQQSITEVEKIRDFIILHYHQTERTDSPFWNYCRTMSIPDTLAHRIELFKESAHAFQTGDEMFRLESWSHVMLGQRLQPKGYHQLVAALAQGELSSHLHNIRQTIQGAVDRLPSHRDFIRHYCPSNLS

SEQ ID NO: 84788 - protein, 422 aa, Vitiosangium sp.
  misc_feature (1)..(422): tr|A0A2T4V8K2|A0A2T4V8K2_9DELT Tryptophan halogenase OS =Vitiosangium sp. GDMCC 1.1324 OX=2138576 GN=DAT35_4155 5 PE=4 SV=1
MDSMSWDVVVVGGGPGGSTVGGLLARRGYRVLLIEREKFPRYHIGESLVPGIMPVLKELGLYEKALQQGFTRKYGVTLLWGRHREPWSVYFGEAGPFAYTFQVCRSEFDSMLLKHARALGATVLEETKVSEFLFEDGRCVGVRYAASGGEPPREARARFVIDASGQSHLLGRALDLIEWDEDLKNLAVWTYFSGARLYEGRDAGNILVENLPDGWLWLIPLHDGTQSVGWVTPHENARAHEGRLGQLLLDRIEQSVEARRMLAPAQRVAAFHSMRDWSYRCRRFHGPGFLLVGDAAGFVDPLFSTGVFLAMNGGSLAATVLDHLLRHPKDEERMRQRYEAIYRQFLDVVFSFVHYFYDASKDKEVYWAHAQELVDPLRQMSARQDFIHLISGLGGLHTLKELSEPLPAARPEPRRRAASRRR

SEQ ID NO: 84789 - protein, 510 aa, Sphingomonas spermidinifaciens
  misc_feature (1)..(510): tr|A0A2A4B3N7|A0A2A4B3N7_9SPHN Tryptophan halogenase OS =Sphingomonas spermidinifaciens OX=1141889 GN=COC42_150 55 PE=4 SV=1
MRDDALRKLVIVGGGTAGWMAAAGISRVAGELPGLEIELVESEEIGTVGVGEATIPQICLYNAMLGFDEAEFVRETHATYKLGIEFVDWTRIGHRYVHPFGFYGIDMGGIQFHHHWLKARMLGDRTPLDAYSLSCVGGLAGKFAHPRPDQPNSPLSKIGYAFQFDAALYARYLRKLAERWGVKRTEGRIVDVLKDGESGHVTAVVLADGRRVEGELFVDCSGFRGLLIEGAMGAAFEDWSSWLPCDRALAVPCETGGDRLPLTRATARPAGWQWRIPLQHRIGNGYVYSSAHISDDEAAATLLANLDGAALAEPRPLRFKAGHRREAWKGNVVSLGLAGGFLEPLESTSIHLVQSGIARLMTLFPARGLDPLEIARFNAETEQEYVDIRDFLILHYTATERDDTPFWDYCRTLTPPEGLAYKLDMFRRNGRIFREHEELFTETSWLSVMVGQGIEAGGYHPVADLLPDEETLRRVAHIREVVAQTAAAMPDHEGFLRRIGCDLTPLKRAS

SEQ ID NO: 84790 - protein, 496 aa, Rheinheimera sp.
  misc_feature (1)..(496): tr|A0A437J832|A0A437J832_9GAMM Tryptophan 7-halogenase OS=Rheinheimera sp. YQF-1 OX=2499626 GN=EMM73_18730 PE= 4 SV=1
MQTPVKKLVIAGGGTAGWMAAALLKKVFAHQLEVELVESEDIGIIGVGEATIPPIQIFNQYLGLDEKEFLRETNATIKLAIKFENWRVKGESYYHTFGAPGATLGVANFQHYWLRAKELGLTQSLWDFDLNYLCCEQGLFNKIKTPNPVYDMPYAYHFDSALYGKYLRKLAEQAGVVRTEGLIEHVKQNCENGFVQSLLLKDGREVTGDLFIDCTGLRGLLIRKTLGLAYERWDHYLPANSALAVPTERFEQTLPYTRSIAHSAGWQWRIPLTHRNGNGIVYSSSYLSDEQAYQTLMNNLDSKALAEPKKISFETGRTTEQWHKNVVAVGLSSGFLEPLESTSIHLIQSAIVRLMKMFPNQGISEAQVSAYNAESKDEFETIRDFIILHYHVNERDDSDFWQDMRNMAIPHRLQEKLALFKETAGIFNDANDIFRDSSWLQVMLGQGLLPIDYHPSARTYTKEQLLEMMQKIRIAKQQPLAKLTSHDEFLALYTGQ

SEQ ID NO: 84791 - protein, 498 aa, Sphingomonas spermidinifaciens
  misc_feature (1)..(498): tr|A0A2A4B8H6|A0A2A4B8H6_9SPHN Tryptophan halogenase OS =Sphingomonas spermidinifaciens OX=1141889 GN=COC42_065 00 PE=4 SV=1
MMPKRIVVAGGGTAGWMAAAAIARTMGGAATVTLVESEAIGTVGVGESTIPPLVTYNRLLGIDEASFMRATNATFKLGILFDGWRDGHDRYFHSFGVTGKDHWAAGFQHYWLSGLERGQHASYDDYCLELVAALQGRFAHLPDNALNYAYQLDSNAYARFLRSMAEGDGTIRIEGRIREVELDGETGDIVALILDGGRRIEGDLFLDCTGFRALLIEKALHAGYDDWSHWLPCDSAIAVQTENAAPPVPYTRAMAHDAGWQWRIPLQHRTGNGIVWCSRYLSREAALERLLGNVEGRVLTEPNHLSFQTGARRKQWHRNCIAIGLSGGFMEPLESTSIHLIQRAILRLIRMLPLGPVNPSDVAEFNDQQLTDMVQIRDFLILHYKATDRRDSPFWRQAAAMDVPETLAQKIALFRETGRVFRRNEELFAENSWVQVMLGQGIVPQSWHPIAAKLSDDELARFLGGLREQVARTVATLPSHAAYVARYCGAAVPAERAA

SEQ ID NO: 84792 - protein, 495 aa, Sphingomonas spermidinifaciens
  misc_feature (1)..(495): tr|A0A2A4B3W0|A0A2A4B3W0_9SPHN Tryptophan halogenase OS =Sphingomonas spermidinifaciens OX=1141889 GN=COC42_134 65 PE=4 SV=1
MRTVILGGGTAGWMTAAGLARLLGRETEVTLVESAEIGIVGVGEATLPHIRAFNQRLGIDEAAFMAETLGTFKLGIDFHDFGAIGEAYIHPFGSFGAPIGDVGFHHYWLRAGAPAPLERFSLPCLMARAARFAHPDPTETADHAGYGYAYQFDATRFAPFLRARAEADGAVRIEGRVVGVERHGESGDVAALILADGRRVVGDLFVDCSGFAARLIEGALAAPWEDWSRWLPCDRAVALPCTAPAGRVEPYTRATAMAAGWRWRIPLQHRVGNGYVYSSAHLADEAAADAIAAALDGPALAEPRLLRFRAGRRRASWVGNVVSVGLASGFLEPLESTSLYLAQMAITELVELFPDGAIDPRDRAEFNVRVDHEYDRIRDFLILHYTATRRDDSDFWRDMRALTLPDTLAERIELWRATGRVAQYSHGLFLEPSWIAVLIGQGILPHGIDPRAAAADPARLGRAMAALDADLAARVAAMPDHAAALGLHARAADAA

SEQ ID NO: 84793 - protein, 515 aa, Rheinheimera sp.
  misc_feature (1)..(515): tr|A0A3S2TM55|A0A3S2TM55_9GAMM Tryptophan 7-halogenase OS=Rheinheimera sp. YQF-1 OX=2499626 GN=EMM73_03295 PE= 4 SV=1
MQTEAIRSVLVVGGGTAGWLTAANLAQSFNSAEPGAIQVTLIESPDIATIGVGEGTWPTMRATLQKLGIKEEDFLRSCNATFKQGTKFVDWQHSDLPASYHHLFTSVSDPTQFNLAPYWLQGRAGQHKSYASAVSAQGVIAELGLAPKKITNKAYEGVLNYAYHLDAGKFADLLKNHAQQKLGVHFISANVLDVSLAIDGSIAAVITDSAGRQQADFYVDCTGFQSLLLGKAMGVGFRPVSDTLLTDHAVTIQVPYPTPDSPINACTHSTAQAAGWIWDIGLTNRRGVGYVYSSNYVSHEQAEQCLRRYIGPAADTLEARKLAMQVGYREKFWHKNCVAIGLSAAFVEPLEASAIFLIEAAANMLADQLPALKENLPLAESKFNKSFLFRWQRTIDFIKLHYALSGRTEPFWQAARAKQLIPQSLQDVLQSWQTQPVSPYDFAHVYEPFPMESYQYVLYGMGFKQQLADLQRYQQGGKAALYFQRVQQLTHQLQQELPAQRELLAKIYRYGFSAL

SEQ ID NO: 84794 - protein, 504 aa, Halioglobus japonicus
  misc_feature (1)..(504): tr|A0A2N5YCU2|A0A2N5YCU2_9GAMM Tryptophan 7-halogenase OS=Halioglobus japonicus OX=930805 GN=C0029_07065 PE=4 SV=1
MNNNDSRTITIVGGGSSGWMTALYLNTLFNKEQLNYQIRVIESPDIGIIGVGEATVHSVRFFFAAMGLDENELLRETNGSLKLGILFRNWMKPVDGKTHEYFHPFEQQRLGRGMDISSMWHMSGRGTRERYDEAVSLSSELVAHRHVPKTANSQAYQGVVPYGYHIDATLLARFLRRKAVAEGVEHIEATVTSATTEGEMIQSVETDKGSFTADFFIDCTGFRGLLIDQLKQDNWESFADALPCNKAVAIQRELPDDLGAKPYTTATALSNGWAWQIDLQNRQGTGYVYDGNRLSKEEAEQELRDFLGPDAAVLKCAHLNMKVGCRKEFWVGNCVAIGLSAGFIEPLESTGLHLINLGAGLLATHQPNREVDQSIRDSYSRLMRGFYQDLKQFIVLHYCLTDRDDTDFWRAAPATVEHTPWLQSQLQIWKHKICEFHDLAGSFSTTFNDENYRYILYGMHHNPALTQSVDAAASEQLFAQANANAERARQLTSAQGDYLSQLNL

SEQ ID NO: 84795 - protein, 497 aa, Rheinheimera sp.
  misc_feature (1)..(497): tr|A0A3S2UKJ8|A0A3S2UKJ8_9GAMM Tryptophan 7-halogenase OS=Rheinheimera sp. YQF-1 OX=2499626 GN=EMM73_04535 PE= 4 SV=1
MNNEQNRIKKVVIAGGGTSGWMTAVALTKLLGKNLEVVLVESDDIGTVGVGEATIPTLHIFHRLLNIKESEVMAATNATFKLGIQFENWKTLGEDYIHSFGFLGKDCWACGFQHFWVKGRQKGIATEIGDYCVEHLGARQGRFAVMPNQDLNHAYHMDASLYAGFLRRLSEQHGIKRIEGKIREVQQHMDGAISALLLESGELVEGDLFIDCTGFRALLIEQTLNTGFEDWSHWLPCDSAYAVQTKTTQEPLAYTRAIARGAGWQWKIPLQSRVGNGLVFCSKFMTEAEAKQTLIDNVEGEMLFEPRLIKFKTGTRRQHWNKNCVAIGLSSGFLEPLESTSIHLIHRSIIRLLQMFPSNGIVSADVAEFNRQTKIEMDNIRDFIILHYKATERTDTRFWRYCKNMDIPETLTHRMELFKQSGKVYKFAQELFGESSWLQVLIGQGLMPQQYHPIVDLMPDSELNDFLMSIKHNVRRTVSQFPTHQEFIQHYCKSSLV

SEQ ID NO: 84796 - protein, 506 aa, Sphingomonas spermidinifaciens
  misc_feature (1)..(506): tr|A0A2A4B453|A0A2A4B453_9SPHN Tryptophan halogenase OS =Sphingomonas spermidinifaciens OX=1141889 GN=COC42_152 65 PE=4 SV=1
MVQQRSIVIVGGGTAGWLTAAYLARALGSRATITLLESPGIGIIGVGEGAFPTIRSTLRFIGIDEARFVREAGATFKQGVRFDDWRREAVGDRRHRYLHPFDAPYQADDADLVAHWLAKDPATREPFAEAMTIQNRVADAVRAPKQPSEGDYDGPLAYAYHFDAHRLAALLRARAVELGVRHLQGELTGVETGEQGIACVHTDAHGALTADLYVDCSGFRAELLGRALRVGPRSAKAHLFTDRALACKIAYAGPDAPIESVTTATAHEAGWIWDIGLQNARGLGCVYSSAHLSDARAAEILCGYVGHDRFEARIIPFEPGWRETQWVGNCVAVGLAGGFLEPLESTGIVLIEAAAAMIADFLPMAGPVDASAGRFNQLMNARYAAITNFLKLHYCLSQRQTAFWRDNADAASIPDALAALLAEWRHRPPSRFDFQGGVESFAAFNYQYVLYGMGFETDLGPSTPPRGEQAHAERLFERIRSFGRQAVAELPEHRALIREIGQRMPA

SEQ ID NO: 84797 - protein, 517 aa, Sphingomonas spermidinifaciens
  misc_feature (1)..(517): tr|A0A2A4B6R2|A0A2A4B6R2_9SPHN Tryptophan halogenase OS =Sphingomonas spermidinifaciens OX=1141889 GN=COC42_044 30 PE=4 SV=1
MGRRVVIVGGGTAGWLTAGYLAKRLAADLPGGVAITLVESTEIGILGVGEGTFPTIRKTLATIGISESDLVRHCGASFKQGAKFAHWRHAPGAAGPDHYTHPFQVAAQDDGLELLPYWLLGHGGTANWDEVCSPQKKAADAHRAPKLPSHPDYVAPLNYAYHFDAVALAALLRDRAVASGVTHIVDTVTEVIVDGDGAIGGIDTAAHGRLTADLYIDCTGFRAELIGRALGIPYRSCRDVLFCDSALAMQVPHRDAQEPIVSYTVATAQEAGWVWDIGLDRRRGVGHVYSSAHTDDAAAEAKLRAYIGPASADLDMRKIRFEAGYREVNWHKNCVAIGLSSGFFEPLEATGIVFSEVAAGMVANLFPWGGDYETSARQFNAVMLKRYERARDFIKLHYCISERRDSDFWHDNVAAASIPDSLHELLDRWRFRPPTEIDVDANIDIFTEASWQYVLYGMGWTTDLSARAGTYRHAEAARRAFAAVDRQAAYAIANLPSNRQLIEHARHHRFGPEGMAA

SEQ ID NO: 84798 - protein, 521 aa, Xanthomonas gardneri
  misc_feature (1)..(521): tr|F0CD45|F0CD45_9XANT Tryptophan halogenase OS=Xanthom onas gardneri ATCC 19865 OX=925777 GN=XGA_4899 PE=4 SV= 1
MSDTHASDPRQRPVRRVVIAGGGTAGWMAAAALSKVLGKQLQITVVESDEIGTVGVGEATIPSLVTFHRLLEIDEAAFMAATQATIKLGIGFEHWRDVDRHYIHSFGHTGTDHWSAGFQHFWLKGRQRGVARDFGDYCLELRAAQEGRFAHLPNGGMNYAYHLDAGLYARFLRRFSEGFGVQRIEGRIGHVETDAHSGYLTALTLENGTRVEGDLFLDCTGFAGLLIGKTLGVGADDWSHWLFADSALAVQTESVGAPVPYTRSRADQAGWMWRIPLQHRVGNGIVYSSRYMDQDSAAQVLQRNLTGRALTEPRALRFTPNQRHRVWEKNCVALGLASGFLEPLESTNIHLIQRGIIRLMQTFPQVINDSDIAEYNRQAAEEITHIRDFVILHYHVTDRRDTPFWRDCAAMEIPDTLRHRVELFRQSGRVFHQANELFAENSWVQVMLGQGITPKQHHPVADLMGDAELNHFLENIRTRVDAALVRLPAHADFLRRYCPAPPLPEPATRLPATPVLATPAA

SEQ ID NO: 84799 - protein, 516 aa, Alteromonadales bacterium
  misc_feature (1)..(516): tr|A0XZU3|A0XZU3_9GAMM Putative tryptophan halogenase O S=Alteromonadales bacterium TW-7 OX=156578 GN=ATW7_0797 9 PE=4 SV=1
MTKPIKKIVILGGGTAGWLSAGLLAAEHPHLSVTLIESANVPILGVGEGTWPSMRNTLQRIGIKEIDFITQCDATFKQGSKFINWCNLSKGENYYHPFMDPQGYEQTNLHANWQRIAPNQKFADVVNMQSFVCQAALAPKQLQTPEYAAVTNYGYHLDAGKFAEFLKNHCVKHLNVTHNTDDVTHVINDEHGYIASLKTNKNGDITGDLFLDCSGSRARLIGEHFNSEFIAQDHILFNNSAVAAQVPNAHINQPIASATLSTAQSNGWIWDIALPTRRGTGYVFSSKYQSGESATDTLKSYIAKSTSEQQAEQLNYRVLKFSPGYRQKFWIKNCVAVGMSAGFLEPLEASALAMVELSISMLSEQLPQNRTHMSQLANRFNDRFSTRWQRVVEFLKLHYVLSERDDTPYWQNIRDLTTAPEHLQNLLKLWQFQPPSRFDFIENEEVFSSSSYQYILYGMGFNTQTPQAHNAFTSAQAGDYFYQQNREKIAQYLKSLPSNRALLNDLLSNNRQPHND

SEQ ID NO: 84800 - protein, 469 aa, Sphingomonas spermidinifaciens
  misc_feature (1)..(469): tr|A0A2A4B512|A0A2A4B512_9SPHN Tryptophan halogenase OS =Sphingomonas spermidinifaciens OX=1141889 GN=COC42_150 65 PE=4 SV=1
MRSVVVAGGGITGWAAAAALKRRLPMLEVTVLPIAPPADALADRFPATLPSILAFHGDLGLSEADAIVRTRAGFRLGSRFVGWGEGLPDYVHSYGTHGPAIEGTAFHQHWLRARDAAPFDRHAPAAMLGREGRFVPAGEAPIDGYEYGLVLDLPAQTAMLRAFALHLGVREAAGAFRTLTLEDSGFARAIDTNAGPLAADLFVDATGPAAQLRSAMGGARDDWRRWLSCDRFVIAAEAAAAPPGSLDTVEAQPTGWRFRIEGLNETTTGACWSSAHDAREGIAFEAGSFAEPWLRNVVAIGDAATVVEPLEWTNLHLALSGIDRLVTMMPGRDCAPVEIAEFNRQAAAEAVRVRDFLMLHYVTARRPEPFWREMAAAELPDTLAHTLTQFAERGRLPFYEEETFARDSWLAVLFGQGVRPRRLDPLVEAIDPAPIAAGMARHRDAIAAAAARAPTHAAFLQALHRQALR

SEQ ID NO: 84801 - protein, 511 aa, Pseudoalteromonas sp.
  misc_feature (1)..(511): tr|A0A317FT22|A0A317FT22_9GAMM Tryptophan 7-halogenase OS=Pseudoalteromonas sp. meg-B1 OX=2203192 GN=DK924_047 40 PE=4 SV=1
MDIKKVAILGGGTAGWLAANHIGKELLKRKGVSVTLIESPDIPPIGVGEGTVPDIRNTLKSFGIREDEFIRQCDATFKQSIKFVNWMDKKKHGEGNFFHHLFDVPSPYDTKHLTQYWLNDKQTTKSHAQFLSSQHAICEAGLAPKNITNAQYEGELAYAYHFNAGKFAQLLACNAKDKFSVSHVHTNVTQVKLANDGTIAALMTNSEGELEFDFYIDCSGFESLLIDKALKVPFVDVSDSLLINSALVVQVPTKEDEDIPPYTLATAHQAGWIWDIALTNRRGVGFVYSNNHMTDEQAHEKLDRYLGASKQDLSYRKIPMRVGYRKKFWHKNCVALGLAQGFLEPLEATSILLTDFSAKFLTLRFPSSTKQLEQLETRFNHAMGYAWERAIDFIKLHYCISDRTDSAFWVANKNDDTTSESLKEKLSLWEEFIPVRDDFFSQFEVFYLENFLFVLYGMNYNTKASACSKAEHEHCLVRLQQRAEIDQYLLNKLPNHRALLDKIKQYGLQTI

SEQ ID NO: 84802 - protein, 506 aa, Alishewanella sp.
  misc_feature (1)..(506): tr|A0A1C2C4F4|A0A1C2C4F4_9ALTE Tryptophan halogenase OS =Alishewanella sp. HH-ZS OX=1856684 GN=A9165_07280 PE=4 SV=1
MTEQQLVKEVVIVGGGTAGWISAALLVKMLGKSLKITLVESEEIGIVGVGEATIPPVIHFNEGLGLDEATFLKETFGSIKLGIQFENWGQQGDSYMHAFGNFGKDYPFCTFHHFWLKAKQLGLSDNFWDYSFNYQAALQNRFTKLDSIPNVNLQGLVYAYHFDAALYAQFLRRWCETLGVVRVEGKIEQVHTRPDDGFISAVQLQSGEQIKGDLFIDCSGMHALLIEKTLNTGYEDWSHWLPCDRAWAVPTESVKPIVPYTRSIAHQAGWQWRIPLQHRTGNGLVFSSKYWSEEDARAHLLANLDAPALAEPRLIKFRTGRRLKQWHRNVVSIGLSSGFLEPLESTSIHLIQSGIIRLVKNFPHLGIKAAEVAEYNRQSQLEFEHIRDFIILHYKLTQRTDSKFWRDCQQMEIPERLARKMELFQATGKVYREQDELFSPIAWIQVMLGQGMVPQDYHPIVNALPAEQLSELLSYLKTIYSATATKLPQHDEFLKQFCQSDAMNTA

SEQ ID NO: 84803 - protein, 512 aa, Pelomonas sp.
  misc_feature (1)..(512): tr|A0A397QRZ0|A0A397QRZ0_9BURK Tryptophan halogenase OS =Pelomonas sp. BT06 OX=2135721 GN=C8K28_4881 PE=4 SV=1
MNDRLREVVVLGGGSAGWLVAGLLAAEHGELKITLIESSDVPTIGVGEGTWPSMRDTLRRIGLSEPEFIRRCQVSFKQGSRFDGWARGAAGSDGDGDRYYHPFMLPVGHGDVDLVQPWLATQGQRPFADVVSPSVQVCEAGRAPKQVQTPDFAAVANYAYHFDAGLFGQLLREHAITRLNVHHVVDHVEAVIPHENGDIAALQTRGHGELKADLFIDCSGLASRLIGQHFGVALKSERDVLFNDAALPVQVPYATPEAPLASVTIATAWAKGWIWDIGLPSRRGVGCVYSRAHASDDEAHAALTAYLDATGAPTERPEPRSIRFDPGYRERFWVRNCVAIGLSAGFIEPLEASALALVELSAQRLCDELPMTRASMDTVARRFNDDFSYRWARVIDFLKLHYALSQRDDSPYWRAHRDPATWPERLRELLPQWQLRAPARHDFGRNDEVFPSASYQYVLYGMGFRPDVQPLSNAKLQAAQAAFDEAARQARRFVPGLPGHRSLIEHIHKTET

SEQ ID NO: 84804 - protein, 505 aa, Xanthomonas sacchari
  misc_feature (1)..(505): tr|A0A2P5Z6V0|A0A2P5Z6V0_9XANT Tryptophan 7-halogenase OS=Xanthomonas sacchari OX=56458 GN=XsacCFBP4641_06000 PE=4 SV=1
MIAAPLRNLVIVGGGTAGWMAAAALARVLGPDYRITLIESEQIGIVGVGEATVPHIKAFNNLLGINEAEFVRHTQGSFKLGIEFADWQRPGTSYVHGFGTEIGHPLGLLPFQQYWFKQALAGKAKPLGAYTLNTVAAKRDRFMTSATDVPPNSPLANIAYAYHFDAALYAGFLRRYAEQRGVTRREGIVEEVQLHPESGDVRAVRLASGEAIAGDLFIDCSGFRGLLIEQALHTGYHDFSHWLPCDRALAVPCAKVGPPTPYTRATARAAGWQWRIPLQHRTGNGYVYCSAHISDDEAAATLLANLDGPALADPRPLRFVTGRRKQVWNRNVIALGLASGFMEPLESTSIHLVQSGISKLLELFPREGISPVLVRRYNERIAFEFDRIRDFLLLHYHATERDDSAFWRHCRTMPITPELQETLDLFRDSGRFYRNGDEMFAEISWVQVMVGQGILPRAYHPLVDQVPQADLERFMASVEQTIGHCADAMPPHQAFIDRYCAARPA

SEQ ID NO: 84805 - protein, 496 aa, Streptomyces qinglanensis
  misc_feature (1)..(496): tr|A0A1E7KD84|A0A1E7KD84_9ACTN Tryptophan halogenase OS =Streptomyces qinglanensis OX=943816 GN=AN217_00675 PE= 4 SV=1
MSSTETYDVVVVGGGPGGSTLAALVAKQGHSVLLLEKEFFPRYQIGESLLPSTIHGICRLSGATDELLRAGFPVKRGGTFRWGANPEPWTFSFSVSPRMAGPTSTAFQVERSRFDKILLDNARRCGAEVREGCAVTEVLEEGERVTGVRWTDDGGAQREAAARFVVDSSGSKSRLNQRIGGHREYSEFFRNLALFGYFENGKRLPEPDRNNILCVAFDSGWFWYIPLSDTLTSVGAVVRRDLAEKVQGDPEKALQALIDECPMISDCLAPARRVTEGQYGEVRVRKDYSYHHTSFWRPGMVLVGDAACFVDPVFSSGVHLATYSALLAARSINSTLAGTVGEEAAMNEFEARYRREYGVFYEFLMSFYDMHHAEGSYFWEAKKVTRNSRSEMESFVDLVGGVSSGESALTGADGIEQRLHTQNREFASAVETIADGGNDNWAPLLGSSVVREAMTESSKVQMHAALGEDAEEETPLFDGGLIPSADGMTWVRAAAD

SEQ ID NO: 84806 - protein, 522 aa, Sphingomonas naasensis
  misc_feature (1)..(522): tr|A0A4S1WEN3|A0A4S1WEN3_9SPHN Tryptophan 7-halogenase OS=Sphingomonas naasensis OX=1344951 GN=E5A74_13720 PE= 4 SV=1
MRAPLFRHWRADAIIAYTRARRGGEVNQPRKRVIIVGGGTAGWMAASAIAKLLPHAVEVTLIESAEIGIVGVGEATLPHLRAFIETLGLDEAEFMAATHATWKLGIEFRDFGKPGDRYLHPFGDFGRPLHDIPFLHWWLRMHALGQGGDIADYSVANVMAAQRRFARPAEDPDALLASYGYAYQFDATRFGPFLRSFAEEQGVTRIEGRIVSVERDGATGDVAALLLESGTRIEGDLFVDCSGFRSLLLGDALGEEWEDWSHWLPCDRAMALPCAAPPGEIEPLTRATAMPAGWRWRIPLQHRVGNGYVYSSAHLSDDAASAAILAAVEGEPLADPRVLRFRAGRRKRSWSHNVVAVGLASGFLEPLESTSIYLVQVAIQQLIALFPIGGIAEVDRDAFNDQVDYEYDRIRDFLILHYHASTRDDSEFWRAVRHMAIPDSLAEKIELFRRAGRIQRYSRGLFFAPSWIAVMIGQGLVPQGWDQRVDAADPRALGQALDRLRSQIAAEVATLPGHRAALGLPA

SEQ ID NO: 84807 - protein, 502 aa, Sphingomonas naasensis
  misc_feature (1)..(502): tr|A0A4S1WJA4|A0A4S1WJA4_9SPHN Tryptophan 7-halogenase OS=Sphingomonas naasensis OX=1344951 GN=E5A74_08870 PE= 4 SV=1
MSAAAIRSVVIVGGGTAGWMTGAALARLVRAGVQVTLVESEAIGTVGVGEATIPPIRTFNAMLGIDENHFLAHTQGSMKLGIEFVDWNASGHRYLHPFGDYGFDIEGVKFHQVWQRLHAAGNAAPLDDYSLCAVAARANRYAAPANDPSSPLSRLVQAYHFDASLYARYLRGYAEARGVVRREGKITEVSLRGADGFVEAVMLEDGSRLEGELFIDCSGFRGLLIEEALHTGYEEWTHWLPCDRALAVPTANAGPLTPYTRCTARAAGWQWRIPLQHRMGNGYVYSSAHVSDDEAAATLLANLEGAPLADPRPLRFTTGRRKQAWNRNVIAIGLSGGFLEPLESTSIHLIQAGISRLLALFPDRGWGDAERDSYNDFTRTQYEQVRDFVILHYKANGRDEPLWRQVREMDVPDSLARRIDLFRNRGRVFRREDELFAETSWIAVMLGQGITPQGWDPLADALDAGQLAAMLERIRSTFRRAAEGMPDHAAYLARHCSARGPQ

SEQ ID NO: 84808 - protein, 505 aa, Sphingomonas taxi
  misc_feature (1)..(505): tr|A0A2W5AM80|A0A2W5AM80_9SPHN Tryptophan halogenase OS =Sphingomonas taxi OX=1549858 GN=DI640_13350 PE=4 SV=1
MTDSKIRRVVIAGGGTAGWMAAAAIARTMGGTIDLTLIESDAIGTVGVGESTIPPMITFNRLLGINEAEFMRETQATFKLGILFDDWKVRGESYFHSFGITGKDHWSAGFQHFWLHGLTKGHDQPYDDYCLELRAALQGKFAHLPDERMNYAYQLDSTRYAKYLRGMAEADGTRRLEGKIAQVELNGESGDIAALVLESGTRIEGDLFLDCTGFRALLIEGALHAGFDDWTHYLPCDSAIAIQTESVRPALPYTRAMAHDAGWQWRIPLQHRTGNGIVYCSRYLDRDAALDRLLGNIEGKTLTEPNMIRFVTGARRQQWHRNCIAIGLSGGFMEPLESTSIHLIQRAVLRLLRLFPSGAVSPRDVAEFNDQQHTDMLQIRDFLILHYKATERRDSVFWRHCAAMPIPDSLEQKIELFRETGRVFRKNEELFAENSWVQVMLGQGIVPRSYHPIATKLRDEELARLLGGLRDGTNATVAGLPDHAEYVARYCGTASAPAPSPAVAA

SEQ ID NO: 84809 - protein, 499 aa, Sphingomonas naasensis
  misc_feature (1)..(499): tr|A0A4S1WPK7|A0A4S1WPK7_9SPHN Tryptophan 7-halogenase OS=Sphingomonas naasensis OX=1344951 GN=E5A74_06755 PE= 4 SV=1
MQQLKRILIVGGGSAGWMTAALLAKLFEGLYEVTLIESEQIGTIGVGEATIPAIKKYNELIGLDENDFMRRTQGSFKLGIQFVDWWRRGHSYIHGFGVIGQDLGWLRCHQYWLKAQAAGKASDFSAYSINTAAALANKFMRADPKLAESPIGHIAHAFHFDAGLYAQYLRGLAEARGVRRREGKVAGVALRSEDGFVESVTMDDGEVIAADLFIDCSGFRGLIIEEALKTGYEDWTHWLPCDRAMAVPCARTEPFTPYTRATARTAGWQWRIPLQHRTGNGHVYASSFIDDAEAEAQLLANLDGAQLAEPNRLRFTTGKRNRTWNRNCVAIGLAAGFMEPLESTSLYLIQSAIVRMVRLLPDTGFDPATIAEFNRQTDFEYERVRDFIILHYKATERDDTPFWRHCRDMEIPATLQRKIDLFAANGRVFREDEELFTEESWIQVFLGQGVIPRGYDPLVDIRSEVQVDQFLDNIEKVIAKCVAVMPGHAEFVAKTCPAS

SEQ ID NO: 84810 - protein, 503 aa, Sphingomonas taxi
  misc_feature (1)..(503): tr|A0A097EKZ1|A0A097EKZ1_9SPHN Tryptophan halogenase OS =Sphingomonas taxi OX=1549858 GN=MC45_13060 PE=4 SV=1
MSGQDGAIRRIAIIGGGTAGWMAAAALARVLGPHGPAITLVESEEIGTVGVGEATIPPIQAFNALLGIDEDDFVRATGGTFKLGIEFVDWRALGQRYFHPFGVYGIDLGAVPFEALWRRLHAEGAAGPLSDYSICAAAAATGKFMRPQPGNTPLAHIGYAFHFDAALYARFLRGRAEAAGVVRREGRVVDVVLRGADGFIEAVTLADGGRVEADLFVDCSGFRSLLLGDTLGAGFEDWSAWLPNDRAVAVPSAVTRPPPPYTRATARTAGWQWRIPLQHRVGNGYVFAADHISEDEATATLLANLEGEALAEPRTLRFRAGRRSALWVRNCVALGLSGGFLEPLESTSIHLIQSGIARLLEMLPTRAFEPADIRRYNRLMATEFDSIRDFVILHFHATGRRDTAYWRRLAEMPIPDTLAERIAIYRRTGRVFRETDELFTKTSWLAVMDGQGLTASGYDPLGAALPLADARAALDRIGKVTAAAAAHMPPHQDFIARHCRAPR

SEQ ID NO: 84811 - protein, 506 aa, Nitrospirillum amazonense
  misc_feature (1)..(506): tr|A0A560HKY2|A0A560HKY2_9PROT Tryptophan halogenase OS =Nitrospirillum amazonense OX=28077 GN=FBZ90_101329 PE= 4 SV=1
MSASTVTRLVIVGGGTAGWMSAAFLSSLFPARQLSLTVVESAEIGTIGVGEATIPPIQVFNKAAGIDEAAFLRATEGTYKLGIEFVDWLRPGHRYMHPFGQPGQAINGASFHAWWLRLRAAGYPHPLSDFWMSEVLARKNRFDFPSSDPRTPKSNLAYAYHFDAGLYAQFLRRIAESRGVRRIEATVANVALDGADGTVSHLDLADGRRVEGDFFIDCTGFRALLIGQALGQGYEDWSHYLPANRAVAVPSQRVAAPVPYTSATARTAGWQWRINLRHRTGNGYVYVSDLISDDEAAATLLANLDAPALDDPRFLRFTTGRRRSRHKNVLAVGLSSGFLEPLESTSIHFIQHALIKFAATFPLAKDDPVSAGIFNRIMAEELEQVRDFLVFHYHANDRVGEPLWDRARAMPLPDSLVEKMALFRARGFAIFPSQTLFQEPNWLAVMLGQGLEPQSYDPLTDGAPLEEVRGGFDAMRRTIAQVADGCHPHEAFLDDGAAVPMARARA

SEQ ID NO: 84812 - protein, 551 aa, Nitrospirillum amazonense
  misc_feature (1)..(551): tr|A0A560H8R7|A0A560H8R7_9PROT Tryptophan halogenase OS =Nitrospirillum amazonense OX=28077 GN=FBZ90_106327 PE= 4 SV=1
MRMTVAEGARRRILIVGGGTAGWLTAAYLAKTLGTGLSGGTDITLIESTDIGIIGVGEGTFPTIRSTLAAIGIDEARFLRESSATFKQGVHFVDWAEAPAPDAAPTQALGAVPGHSHYFHPFNFPHQVKGPELLPYWLLGAAGDLPFAEAVTLQKAVADACRGPKRAIDPPYHAPLNYAYHFDANRLAVLLRTVAVELGVHHLVGTVDGVVLDGSGAVARLDTREHGGLTADLYIDCTGFRAQIIGQALKVPFKPWGDVLFNDRAVALQVPYDRPDAPIPSYTVATAHEAGWTWDIGLNDRRGTGYVYSSRHTDDARAEEVLRRYIGPMAAGRDVRLLKFESGCRNRHWVGNCVAVGLSGGFFEPLESTGIMLIEVAAHMIAQFFPWGPSGLDSAQTAAAMAATARTYNALMGARYDRIVDFLKLHYCLTRRTDSAYWRDNADPATVPDSLRDRLALWAHRPPGRFDFVADHETFLPASYQYVLYGMGFKTDLEPARALYRRMEEARHEFQGLRTVTPQALSSLPSHRDLVEEVYRNGFRPPPAAQAGSRR

SEQ ID NO: 84813 - protein, 511 aa, Nitrospirillum amazonense
  misc_feature (1)..(511): tr|A0A560H4B8|A0A560H4B8_9PROT Tryptophan halogenase OS =Nitrospirillum amazonense OX=28077 GN=FBZ90_10825 PE=4 SV=1
MDRPIQHIVIVGGGTAGWLTAGIVAARHKARMAAGFKVTLVESPNVAIIGVGEGTWPTMRTTLEKMGVSETEFFRHCDTAFKQGGKFVGWTTGAADDAYYHPLMLPHGWSQVNLAPHWLQDARGRTFSAAVCPQESICEEGLAPKTIATPEYRGLANYAYHLDAGKFASFMQRHCTEKLGVHHILADVTEVRQDENGDITSLVTVQSGEIAGDLFVDCTGFHALLIGKTLGVGFKECRDVLFCDTALAVQVPYETADAPMASQTIATAQSAGWIWDIALPTRRGLGYVYSSDHIDEEAARAELARYAGTQAEARKIPIRGGHRETFWKNNCVAVGLAAGFLEPLEASAIMLIELSAKIIAEQLPARRSVMDIVARRFNEVTRYRWGRIIDFLKLHYVLTQRTDTAFWRDNVDPASVPARLQDLLRLWKYRAPWFLDEFDRLEEVFPAASYQYVLYGMGFRTEVDPAENGADTTLASRILEENAAMAQKMRANLPKNRDLVRKIRDHGMQSI

SEQ ID NO: 84814 - protein, 514 aa, Novosphingobium sp.
  misc_feature (1)..(514): tr|A0A257GFS1|A0A257GFS1_9SPHN Tryptophan halogenase OS =Novosphingobium sp. PASSN1 OX=2015561 GN=CFE35_02380 P E=4 SV=1
MSSTETSGSAGPSGPLRIVVAGGGTAGWMTAAALGHFLDRGFTVTLVESEEIGTVGVGEATIPQIRMFNQALGIDEDAFSRATQATFKLAIEFVGWGRPGERYMHAFGDVGRDVGLCAFHHYWSRGRRLGLAGPHGDYAINDIAARAGRMHRGAPLTSRNVPEMPHAFHFDAGLYAAFLRQFAEARGVVRREGKIGEVRQDAQSGDITALVLASGEEIAGDLFIDCTGFRGLLIGGAMGSGYVDWSHWLPCDRALAVPSARVENFTPYTRATAHDAGWQWRIPLQHRTGNGRVYCSAFTTDEAAAESLLAHLDAPALADPRPIRFTTGRRAEAWRGNVIAVGLASGFLEPLESTSIHLIQTAISRILKLLPGKEQTQAARDEYNRQFTFEMERIRDFIVLHYHVNQRPEPFWQAMRDMALPDTLKDRIELFRTNGHIFRHGDELFGEVGWFQVMAGQGIVPERSHGLAETIDEADLKGYLETLNGLYRREVERYPAHADFIARHCGAPALGGAA

SEQ ID NO: 84815 - protein, 789 aa, Methylobacterium sp.
  misc_feature (1)..(789): tr|A0A5C8UCB2|A0A5C8UCB2_9RHIZ Tryptophan 7-halogenase OS=Methylobacterium sp. WL9 OX=2603898 GN=FV217_02600 P E=4 SV=1
MLEPSRTAPPRLVIAGGGLAAWTAAAYLRRMLRRVGWTVTVVGPVPPAGPSVGLATRPILTRFLRGLGIDEAIFMRRCGATYRVASRFDDWFEAGQGHWHPFGVCGPRINGRDLFHYWLKHRNEGGSGAAYADYAPQALMAAAGRGPRNETGVSSAVEAGSYGYHLDRTALVRFLREIALSEGVRAVPARVLGASRDFSGNIRSLDLEGGASVEGDLFLDCTGAAALLIGETLGEAWIADSAACDSLVSLSLPPAPDPPPFTTYAGLPEGWTASLPLAGRTEAVLAYDGETTTPEAAEAALQAAFGLGEHIVHRSLPSGRRNPWLRNVVALGAAARAVEPLAGFGLDLDLVALEAFVAHLPRGEGAEILSRSYTARMNRLHDDALEALAAHYVLGRRPEPVWAAARAKLPEGLADRLDLYEVAGHVVPREEAVFGETDYYLLFTGADFLPRRAFAPVDVADGREIGGYLAEIRARAAQVADATALHASLLEPLHGTAPAAGPVARITVAATASGPASLRRTPEGTRLADLVAGLGQPYGYERSVKATPGGLQVERFLVSLHRTSLGLQPGQTLDTLAEKLGLPERERAEAAGLIGEADVLHLGYEDGPSGALYKLYVEWSADTDTAWQKAETKGEPLLVHRAYKWSSHAATPPVVTLYHWPRVRAAAEIGARLTRMGADWGEAGSGVIGLAHAVLGLAQERGRGAIHYLEAREEPGPRLSYDLNLYACGLMVADVEPLLAPAFADLGIAPQAVAAVLGERRDEALGHVAGGLGRDGRPFLTVYSGMAGS

SEQ ID NO: 84816 - protein, 513 aa, Sphingomonas taxi
  misc_feature (1)..(513): tr|A0A097EHR4|A0A097EHR4_9SPHN Tryptophan halogenase OS =Sphingomonas taxi OX=1549858 GN=MC45_12650 PE=4 SV=1
MHQIRNIVIVGGGTAGWLTAGVIAARHQGQRPHGFTVTLVESPNVPIIGVGEGTWPTLRSTLKRMGVSETEFFRQCDASFKQGARFNRWTTGAVDDGYYHPLMLPQQFASVNLAPHWLTGDGDGSFCDTVTPQGRICDEGLAPKTMATPEYEGQANYAYHLDAGKFSHFLQRHCCETLGVRHVRADVTDVRKDESGDIVGLDTEQGIAIDGDLFVDCTGFAALLIGKAMGVPFRSCADTLFCDTALAIQIPYAQPDDPIASHTISTAQSAGWIWDIGLPTRRGIGHVFSSSHIDVDAAERELRAYIGPAGDDLPVRKLSIRAGHRTRFWERNCVAVGLAAGFLEPLEASAIVLIELSAKMIAEQLPPCREVMDVVARRFNDTTQYRWGRIIDFLKLHYALTQRTDTDFWRDNVRPETIPDRLRGLMELWQHQSPWLHDEFDRAEEVFPSASYQYVLYGMGARSAVLPGTIEADAELARRARRENAVQTQRMVASLPRHRDLIERIVRHGLQPI

SEQ ID NO: 84817 - protein, 503 aa, Sphingomonas naasensis
  misc_feature (1)..(503): tr|A0A4S1WU42|A0A4S1WU42_9SPHN Tryptophan 7-halogenase OS=Sphingomonas naasensis OX=1344951 GN=E5A74_03670 PE= 4 SV=1
MSDQAIRSILIVGGGTAGWISAAVLARFLDPARCTITLIESEEIGTIGVGEATVPLMQHLNGLLGIDEREFVRATQGSFKLGIEFRDWGRIGDRFFHGFGDYGDAIEGVAPHQHWLKLRGEGDPTPIDAYSLPWAMAERGRFAPPSSDPAKQQHYYRYAFHFDALLYARFLRNYCEQRGVRRIEGRVVDAALDGESGRIAAVITADGERHAADLFIDCSGFRGLLIEEALGTGYEDWRHWLPCDSAVVAPSALAGPPAPYTLSTAREAGWQWRIPLQHRMGNGYVYASGFTDDARARDLFTANVEGALLADPRLLRFTTGRRKRFWNRNCVAIGLAGGFMEPLESTSIQLIQTAIARLIEYFPDRNWDPRVAEEYNRVTTSEFERIRDFLILHYCLTRRDDAPLWDHCRAMALPDTLAHKIATFRATGRVPLLSEESYQEPSWVAIFAGNGLLPDRYDPLVDRIDRDRLRAGLAHRRQQIAEAAEATPPHGLFLNRCCRAEAA

SEQ ID NO: 84818 - protein, 501 aa, Sphingomonas taxi
  misc_feature (1)..(501): tr|A0A2W5P1M6|A0A2W5P1M6_9SPHN Tryptophan halogenase OS =Sphingomonas taxi OX=1549858 GN=DI544_11315 PE=4 SV=1
MGDPIRSIVIVGGGTAGWMAATYLARRLAHLRLSITVVESSAIGTIGVGEATVPAIRDFFAAIELGEADVLRETEATIKYGIRFASWKAPGHDFFHPFGLYGVAARGVAFHHYWLKRRAAGDATPLGAYCLATQLAERGLFLPPVERPANDLGVFNFAVHFDASKFAALLRRLALANAVAHIDARITTVARDEADGRITAVTLNNGQQVTGDLWIDCSGFRSLLLGEALDVPFLDWRQWLPCDRAIAIPCRAARVHPPFTAATATGAGWRWHIPLRHRVGNGHVYCSDFMTDAVAEETLIAALEGEPLHEPNRIRFTPGHRARFWERNVVGLGLSSGFLEPLESTSITLIQSGLERLIPLFPDRDFDPRLADTYNRQSVLEFERIRDFLMLHYSGNRRIGEPFWDHVRGIAPTDGLRGKLDAWRAAGEFVRREWDTFQDASWLSMYAGFDDLPARYAPLADQVADADLRDSLSRMRAAIDATLAHAEPHADFLARVHAGRA

SEQ ID NO: 84819 - protein, 481 aa, Sphingomonas sp.
  misc_feature (1)..(481): tr|A0A3R9Z8E9|A0A3R9Z8E9_9SPHN Tryptophan 7-halogenase OS=Sphingomonas sp. HMF7854 OX=2315330 GN=HMF7854_12260 PE=4 SV=1
MLARSLPRDRVRITLLESEEIGTVGVGEATIPPIRELNAMLGIDEDAFVRATQASFKLGIAFEDWHSVGERYFHPFGRFGASLGTLPFQSYWHELSRRDADRAGPLLAYSLPGMAAAAGRFCRPSPDPRNALSNISYAFHFDASLYARFLRSVAEGGGVERVEGRAVATRMTADGAIEAVVLSDGRTLDADFFIDASGFRGLLIEEALKTGYEDWRHWLPCDSAIALPTSAHEPPRPYTRSIAGPAGWQWRIPLQHRTGNGHVFCSAFLSADEAEAQLRSSVAGRPLAEAKRLRFTTGRRRVAWNRNVLAVGLAAGFLEPLESTSIHLVQSAITRLLALFPDRGFAPADLAYYNHATAREYERIRDFLVLHYHATERRDSAFWEHCRAMAIPDTLRERLDLYRSRGRFFPAEFDLFLEPSWVAVMEGQGVRPAAPDPLAAVHAERLAELLPRIRGTIAAAVTAMPPHERFIAEHCRAPAAA

SEQ ID NO: 84820 - protein, 485 aa, Pelagibacter sp.
  misc_feature (1)..(485): tr|A0A1Z9LTL9|A0A1Z9LTL9_9PROT Uncharacterized protein OS=Candidatus Pelagibacter sp. TMED197 OX=1986808 GN=CB D57_02770 PE=4 SV=1
MKKNFVILGGGTAGWFTALFIQKVRPNDNVSIIESTKIGTIGVGEATTPNVINFFTYLNIPIEDVIKNTNGTIKNGISFENWNGDGKKYFHAFFEHLTPFKVHPMFSNDCFEFYLKHLIHENKNLEDYQYSPLISYQNKVDTKHTSYALHFDAGMLAAFLKKTAIERGINHIDAEFESLSTNDKNDITKITLNNDQSVDVDFVFDCSGMARKIIGEHYKQKWISYRDHLPMKKAIIIPKEKEDLFPYTKAIAMKYGWIFEIPLQHRVGRGYIFDSDYINEEQALKECEEYYGEKINVKKVIDFDAGRFEKVWVNNCVAVGLSSTFIEPLESTSLFLTIEQLMMFNHFHNTWFESNEDDRDMYNLICGNNMKETLSFVYLHYITKRKDSQFWIDFPTKHKPPKHFEKKLHKLKQNNIRHYDCVDTMLTAQFRMSSYVQVAQGLGVADVPINIKGFENIEPSVDNYKKLIDYNAKYADTMSDYLKKL

SEQ ID NO: 84821 - protein, 504 aa, Sphingomonas taxi
  misc_feature (1)..(504): tr|A0A097EF54|A0A097EF54_9SPHN Tryptophan halogenase OS =Sphingomonas taxi OX=1549858 GN=MC45_07135 PE=4 SV=1
MERAERQRVVVVGGGTSGWMAATALAKLLPSRCTVALIESEAIGIIGVGEATLPHIRAFNERLGIVEAEFMAATRATFKLGIEFRDWGRVGDSYIHPFGTFGRGSGEVQFHHYYTRLLRAGVPLPPIEHYSMACSLARANRFGQPARDPQQIASTFGYAYQFDAVAFAPYLRRIAEGLGVRRTEGKVVAVERDAQSGDVTALVLADGRRVEGDLFVDCSGFAALLIGQELAEPFEDWSRWLPADRAVAMPCRTATAVTPYTSAIAMPSGWRWRIPLQHRTGNGYVFASDFLSEGAATDALLAAVEGTPLADPRVLRFKAGRRARSWVNNVVAVGLASGFLEPLESTSLYLVQQAITALIELFPEKRIAPVDRDEFNRLINMEYDRVRDFLILHYHATERDNSPFWTYVRTMPIPDSLAEKMALFRRRGRVVKYREGAFLDASWVSVYLGQRVVPTGADPRAAAPSTDSLVAGLERMRGEIAAAVGAMPAHAAFLADYCPMPAAA

SEQ ID NO: 84822 - protein, 511 aa, Nitrospirillum amazonense
  misc_feature (1)..(511): tr|A0A560IZ47|A0A560IZ47_9PROT Tryptophan halogenase OS =Nitrospirillum amazonense OX=28077 GN=FBZ92_102159 PE= 4 SV=1
MDRPIQHIVIVGGGTAGWLTAGVIAARHRARMASGFKVTLVESPNVAIIGVGEGTWPTMRTTLEKMGVSETEFFRHCDTAFKQGGKFVGWTTGAPDDAYYHPLMLPHGWSQVNLVPHWLQDGRGRTFSAAVCPQEAICEEGLAPKTIATPEYRGLANYAYHLDAGKFASFMQKHCTEKLSVRHVLADVTQVKQDESGDITSLVTEQAGEITGDMFVDCTGFRALLIEKTLGVGFKDCRDVLFCDTALAIQVPHDSDDAPMASQTIATAQSSGWIWDIALPTRRGLGYVYSSDHIDEEAARAELARYAGTQAEARKIPIRSGHREMFWKNNCVAVGLAAGFLEPLEASAIMLIELSAKIIADQLPARRSVMDVVARRFNEVTHYRWGRIIDFLKLHYVLTQRTDTAFWRDNVDPASTPERLQDLLRLWKYRAPWFLDEFDRLEEVFPAASYQYVLYGMGFRTEVDPAENNADALLASRIMEENAAMAQKMRANLPKNRDLVRKIRDHGMQSI

SEQ ID NO: 84823 - protein, 505 aa, Nitrospirillum amazonense
  misc_feature (1)..(505): tr|A0A560GYE2|A0A560GYE2_9PROT Tryptophan halogenase OS =Nitrospirillum amazonense OX=28077 GN=FBZ90_11150 PE=4 SV=1
MSDRRIRKVVILGGGTAGWMTAAALAKVNAPPQFEVTLIESEEIGIIGVGEATIPTIHWFNTLIGLDEARFLRETKATFKLGIEFVGWNGTPGGNPSRYFHPFGRYGGPADAQMFVHRWVRARQDGLPHSHEDYSLATLAARTGKFGPPAPDPHSLFSTLGHAYHFDAGLYAAHLRQLAEARGVRRVEGKVERIERHPETGFVTRLTTHRGDVIAGDLFVDCSGLRALLIGGVMESGFEDWSHWLPCDRALAVPCERVADTPPYTRATAHAFGWQWRIPLQHRTGNGMVYSSQVASDDAAADALMANLDGKALAEPRLIRFQTGRRRQAWVKNVVAIGLSSGFLEPLESTSIHLIQSGIAKLLSLFPSRECPEETAGQFNQVFATDMESVRDFLVLHYSRTQGREEQLWRHCQAMAVPEGLTWKERHFTRTGRIVLSTDELFRDASWFAVMMGQGLRAADYNPLLDTLPAAENIAYLQRLREQMAKAMATLPSHDAYLRRVMAPA

SEQ ID NO: 84824 - protein, 513 aa, Nitrospirillum amazonense
  misc_feature (1)..(513): tr|A0A560FNW7|A0A560FNW7_9PROT Tryptophan halogenase OS =Nitrospirillum amazonense OX=28077 GN=FBZ89_10266 PE=4 SV=1
MAEAMRNGDGCCGRRIVIVGGGTAGWMAAAVLARVLKGKYGTIDLVESAEIGTVGVGEATIPPIQFLNHLLGIDEIDFVRKTQATFKLGIEFVDWTRLNHRYFHPFGPHGHAIDAVSFHHYWLRQRAKGDTSDIGDYSPSTVAARMGKFQPPAPDTRSGGPVIAYAYHFDAGLYARYLRGIAERNGVKRTEGKIVQVTQRGPDGFIDSLVLDNGTRVAGDLFIDCSGFRGLLIGETLKAPYEDWSHWLPCDRAVAVPCEGVAAITPYTRSTARAAGWQWRIPLQHRIGNGHVYSSRFISDDEATATLLANLDGKPLADPRPLRFTTGRRKNSWTKNCISLGLASGFMEPLESTSIHLVQSGLFRMVSLLPRDGFEQATVDEYNRLTNIEYEQIRDFLILHYHAVERDDSPLWNYCRTMEIPDSLRHKIDLFRARGRIARFDEQLFAEPSWVAVFLGQGIQPHSYDPVADVMPEAEVAARLARIREAIRRMADALPAHAEFINRHCRADRPVAA

SEQ ID NO: 84825 - protein, 501 aa, Nitrospirillum amazonense
  misc_feature (1)..(501): tr|A0A560JN90|A0A560JN90_9PROT Tryptophan halogenase OS =Nitrospirillum amazonense OX=28077 GN=FBZ87_10860 PE=4 SV=1
MSDRRIRKVVILGGGTAGWMTAAALAKVNTPPQFEVTLIESDEIGIIGVGEATIPTIHWFNRLVDLDEAQFLRETKATFKLGIEFVGWNGGDSRYFHPFGRYGGPADAQMFFHRWIRATLGGFPHGHQDYSLATLAAMANKFGPPATDPNSLFSTLGYAYHFDAGLYAAHLRRRSEARGVKRIEGKVEQIEQDPETGFVTRLTTHRGEGVEGDLFIDCSGLRALLIEGVMNSGFEDWSHWLPCDRALAVPCERVAAPVPYTRATAHAFGWQWRIPLQHRTGNGIVYSSRFASDDEAASTLMANLDGKALADPRLIRFQTGRRRRSWVKNVVAIGLSSGFLEPLESTSIHLIQSGIAKLLSLFPTRDCPEETAGQFNQVYGADVESVRDFLVLHYSRTQGRDEPLWRHCQAMAVPEGLSLKERHFTRTGRIVLSTDELFREASWFAVLMGQGLRATDYNPLLDTMPADENLAYLLRLRDQMAKAAATLPSHEGYLHRVMGPA

SEQ ID NO: 84826 - protein, 507 aa, Sphingomonas taxi
  misc_feature (1)..(507): tr|A0A097EK96|A0A097EK96_9SPHN Tryptophan halogenase OS =Sphingomonas taxi OX=1549858 GN=MC45_04520 PE=4 SV=1
MAGVSGSHPNPPLKTITIVGGGTAGWMTAALLSRLLLGAYTIRLIESAEIGTIGVGEATIPAIRTFNGLAGIDEFEFVRATQATFKLGIEFRNWGGVGDSYIHGFGKIGQDLYWLHCHQFWLKARSMGEGRPLDHYALNTLAARMNRFALPDPAHPNSPIADLDYAYHFDAALYAAFLRGRAEAAGVQRIEGRIVAANRRGQDGFLDHVVLADGRTVDGDLFVDCSGMRGLLIGDAMGVGYEDWDHWLLCDRALAVPSARQGPLTPYTRSIAHDAGWQWRIPLQHRTGNGHVYASRFVSDEAAAQTLLAHLDSPAIGDPRPVRFRPGKRQRAWEKNVVALGLAGGFLEPLESTSIHLIQTGILRLIALFPGRGFQDADIAEYNRQTDFEYRDVRDFIIAHYKVTDREDTEFWRYVKHMDVPDSLTERLALFAASARFFMHGKAELFREESWVQVLLGQRLRAAYDPMVDMIPAAQAAAFLGDVEEVIAEVAAGMPTHEAFIARHCQA

SEQ ID NO: 84827 - protein, 507 aa, Sphingomonas sp.
  misc_feature (1)..(507): tr|A0A429V8A5|A0A429V8A5_9SPHN Tryptophan 7-halogenase OS=Sphingomonas sp. HMF7854 OX=2315330 GN=HMF7854_04685 PE=4 SV=1
MIGDPVRRIVIVGGGTAGWMAAAALAKVIGALPGLTIELVESDEIGTVGVGEATIPQINLFNQLLEIDEAEFVSRTQATYKLGIEFRDWTRLGHRYIHPFGFYGVDMGGIEFHHHWLKGRSLGDDSELDDYSLAAVAARQGRFSHPRPDQPKSPLARIAYAFQFDAALYARFLRSRAEAGGVRRTEGRVVDAEQDGESGFVRALHLADDRRVEGDLFIDCSGFRALLIGQTLGVGFEDWSRWLPCDRALAVACESGEDRRPLTRSTARPAGWQWRIPLQHRTGNGYVYSSAHVSDDAAAATLLGSLDGAALGDPRALRFRAGHRREAWNRNVVALGLAGGFLEPLESTSIHLVQTGIARLLTLFPTLAFDPAEIARYNALTVQEYVDIRDFLVLHYKATERDDSEFWNYCRTLEPPPALAEKLAMFRSNGRVFREQHELFTETSWLSVMVGQGIAAGGYHPAADLLADDETLARLGHIRGVVEHTASLLPTQQQWIRQLGAGIPTAA

SEQ ID NO: 84828 - protein, 490 aa, Sphingomonas sp.
  misc_feature (1)..(490): tr|A0A3R9X9T3|A0A3R9X9T3_9SPHN Tryptophan 7-halogenase OS=Sphingomonas sp. HMF7854 OX=2315330 GN=HMF7854_02765 PE=4 SV=1
MAACLLQQRWGSRGTRITLIESSAIPIIGVGEGSTPQLKAFFDALGIAEREWMPRCHATYKTGIQFRGWSDRPGFDQYFHPFPTALDVHTAGDFFHHCRLRRLGVDVPAHPDLFFLPARLAAAAKAPLPAADFPFDTSYGYHFDAALMGSFLREVATSRGVVHADARIVETVLAPDGDVEALLGDDGRRFEADLFVDASGFRALILEGALGEPHRSFAENLFNDRAVVAPTPLPAEGPGVCTRSTALSAGWAWHIPLTSRIGNGYVYSSRHCSDEAAASEFRSHVGLAADAEVRHLEMKVGRLERSWVRNALAVGLAQGFVEPLEATALHVVLATVEDFIAAFEQEGATDRTRADFNRGCASRIEGIRDYIVAHYRAAPRGDTRYWQEATGHDQLSDSLKALFTCWFTGRDMVEEIDRQGIAAYYPAISWHCLFGGYGNFPSVLSPVPDNVRAADMARVEHFLTACAGHYPAHSAALERLDRAERVGSPG

SEQ ID NO: 84829 - protein, 534 aa, Sphingomonas taxi
  misc_feature (1)..(534): tr|A0A097EF93|A0A097EF93_9SPHN Tryptophan halogenase OS =Sphingomonas taxi OX=1549858 GN=MC45_07125 PE=4 SV=1
MNEHTIRSVVILGGGTAGWMAAAAMARFLNNGVTRVTLIESEEIGTVGVGEATIPPLRTFNSMLGIDEHAFIRETGGTYKLGIEFVGWGDIGERYFHPFGAHGHDLGGVHFHQLYLRERQRRVLPDISAWSMSAVAAQAGKFAPPAPQAQSAVKDLFYAYHFDAVRYAGFLRRFAERNGVQRIEGKVVAVAQRPEDGHVTALKLDDGQTVGGDLFIDCSGFRGVLIEETLETGYEDWRHWLPCDRAVAVPSAYSGDPDPFTRATARGSGWQWRIPLQQRMGNGLVYCSDFQQADDAERELLANLEGAPLAAPRHLAFTTGRRKLAWNRNVVALGLASGFIEPLESTSIHLVQSGIARLIALFPDRRFDPVERDEYNAQMHELYADVRDFVILHYKATRRRDTPFWDRCRTMDIPDSLARKIALFRGKGRVFRENRELFATTSWVSVCLGQDIVPQEYEPAVDALDEERVAGALEEMRREYLDIAGRLPSHGDFLRHISGQPAAPAVAPAAPAAAAGPTFSFASESPFDFSADPL

SEQ ID NO: 84830 - protein, 510 aa, Sphingomonas naasensis
  misc_feature (1)..(510): tr|A0A4S1WS90|A0A4S1WS90_9SPHN Tryptophan 7-halogenase OS=Sphingomonas naasensis OX=1344951 GN=E5A74_03665 PE= 4 SV=1
MSDAAIRTILIAGGGTAGWMAAAALSVAFQPHQCRIVLVESDEIGTVGVGEATIPPIQLFNKILGIDEREFVRATQGSFKLGIEFVGWLREGQRYFHPFGRYGDDFGLTAFHQQWLRAQTLGSTTPLDGYSLNHQAAYRGRFEIPTPQSNPVFSTFSWAYHFDAGLYARYLRGFAERRGVERVEGKIAEVVLRPGDGFVDRLILGDGRALEAELFLDCTGFRGLITEALGTGYEEWTHWLPCDRALAVPCARVADPVPYTRATARQAGWQWRIPLQHRTGNGHVYCSGAISDDAAAATLLANLDGAPEADPRMLRFTTGRRRKAWNRNCIALGLASGFLEPLESTSIHLIQTGISKLLSWFPDRHCDPLLAAEYNRLVDAEMESIRDFLILHYQANERDEPFWRQCAAMPIPDTLAAKIEMFRANGRLIERPHDLFHPTSWLAVLLGQGVAPAAHDPLADTVPPEELAAVLGGMRHVIDQAAARMSTHQQFIDRNCRAAPASAITQEPHP

SEQ ID NO: 84831 - protein, 492 aa, Planctomycetes bacterium
  misc_feature (1)..(492): tr|A0A518HQL4|A0A518HQL4_9BACT Tryptophan halogenase OS =Planctomycetes bacterium Enr13 OX=2527979 GN=Enr13x_29 450 PE=4 SV=1
MNKRFDVAIIGSGFSGSILARILASRGRRVALLDAARHPRFAIGESSTPIADLLLRRLGQQYGLADLENLSAYGRWRQTLPELACGMKRGFSYFDHRRWNVESQLGERSLIVAASPTDSNSDTHWYRSDVDAYLFRKALDAGVDAREDVSVTSLDLSDSAQSRIHLASGDPITAAFVVDASGAAAVSARLLGVAPITERLTTKTCAAYAHFRGVESYSELFNSIHGDRRASQPFDADAAAQHHLIDDGWVWMLRMNNGITSVGVVSPLPGDASTHHDTLQRATRALNDRFSGDATLNRVFRDSVLVAPGSAVATIGRIQRLHDPVVATNCLMTPTTAATIDPLHSTGIAHALAGVGRLADILLANHPGERIGRYRASILAEACHVDQMIAMAYRAMKYSSLHSFPRFVASCMVYFAAAIACEERIGRGEMPGRLWQADDEAFVAAVKQSANVIDSDADDGEVVDQLRNLIAPWNTAGLFEGDGNRYAYTATK

SEQ ID NO: 84832 - protein, 505 aa, Pseudomonas sp.
  misc_feature (1)..(505): tr|A0A1B8TJW4|A0A1B8TJW4_9PSED Uncharacterized protein OS=Pseudomonas sp. AU12215 OX=1860123 GN=A9513_025380 P E=4 SV=1
MLNLSNCRRVAVVGGGSAGWFAALELRKLFLHKVEVVLVEAESLGIIGAGEGSLPNFNRALEHYGLDRTEFMRETHSTHKLGLALEGWRSGAPDDIFLHQFSYSHDGVDLTSWVEPNGSYPLASILINQGYQLQHYPATWKMWQEGASQATAEAFLQSLPAKTPMAYHFDARKLASYLRDIAIKRGVQHINATVESVRLDEKRHVTALVLPDREIEVDFVIDASGLHRLIIGKTLNASWQSYADHLLLNRALPFFIPSQTEHPPLVTRAIAMRHGWMWCIPTLERLGVGYVYCDRYTDREAAVKEVQDYWGMDIEPANDFAFEPGHYDQVWLGNVMAVGLSSGFVEPLEATSIGQTLDQLARFGELIVACDGIIPQQLIDQFNHEIGRYWDGIRDFLFLHYDTPRNDTEFWRAASNAAAPSTYKELKRTLAHRPPRLMDMEQYQGGPFRMFGVPNWMSVAAPLGILSREATALDLRSLSQEKRQRLGSFLAKVESRMKAESGASN

SEQ ID NO: 84833 - protein, 516 aa, Chlamydiales bacterium
  misc_feature (1)..(516): tr|A0A212KP74|A0A212KP74_9CHLA Flavin-dependent tryptop han halogenase RebH OS=Chlamydiales bacterium SCGC AB-7 51-O23 OX=1871322 GN=rebH PE=4 SV=1
MEEKIQEVVIVGGGTAGWLSALFLKKHLGKEANITLIESPNIPTIGAGEATIPGIISFIEALGIDEEDFLISCNATFKFGIEYTHWTNPNEKNPIWHPFYSTKKLSPSIADLYFYKEKMGLTEENIASFWNPDMPFILENKAPRDFTESPYYWNIPYAYHFDSHLLAKFLTNLGEKKGIKHISDTVIDVQMQDKENIHSVHTRSNGSFKADLFIDCSGFKRIMIKEKLNSPYVSVQDKILCDRALALKLPYKNKSEEMTPYTTVKGMKSGWMWRIPLQEEIGYGYVHSSRHSSKEEATEEMSQHLGFSPEKYPLNHIFMENGYLEKPWIGNCIAIGLSAGFIEPLESTGLYFITYTLDTLLKYFPCKGNFKHQAKPYNLELQNLTKSVLTFIYLHYHLNSRDDTPFWQDNKNNPVKDPDLEAVYQNYLENYGKPLILSTFKKSSVFTGPSYIFFLHGLGIKPKEFPPIAKHPNFNRIAELEHQQSILQSKQLEKLPTMEVFLKHLKEKKMSSNLKT

SEQ ID NO: 84834 - protein, 500 aa, Sphingomonas naasensis
  misc_feature (1)..(500): tr|A0A4S1WMS6|A0A4S1WMS6_9SPHN Tryptophan 7-halogenase OS=Sphingomonas naasensis OX=1344951 GN=E5A74_08865 PE= 4 SV=1
MTDHRIRNIVIVGGGTAGWMAAATFARILGPEYAKVTLIESDEIGIVGVGEATIPQMATFNRMLGLDENEFMRATQGSFKLGIQFVNWGRQGHTYFHPFGKYGIDMKGVSFHAYFLRLHQLGEAPDIDDWSLQAAASRTNKFMRPIDAGNSPLSEIPYAFHFDAGLYARFLRGYAEERGVVRREGKIVEVRLRGADGFVESVVMEDGAAIEGDLFVDCSGFRGLIIEQALKAGFTDWSHWLPCDRAIAVPCESVDAWTPYTRSTAHKAGWQWRIPLQHRTGNGHVFCSKYISDDEATATLLANLDGKPLADPRTVPFRTGHRNKLWIKNCVSLGLAGGFIEPLESTAIWLIQSGLSRFLTMFPDKRFNQADIDRYNRIMITDYEEIRDFIILHYHATERDDSPFWDYCRTMEIPERLAEKMRVFRSHGRAFRENEELFNDTSWFAVMHGQLMRPQGFDPVAEIMSLDETRSRLAHIREAIANSADYMPSHRDFVREHCAA

SEQ ID NO: 84835 - protein, 508 aa, Nitrospirillum amazonense
  misc_feature (1)..(508): tr|A0A560GCX0|A0A560GCX0_9PROT Tryptophan halogenase OS =Nitrospirillum amazonense OX=28077 GN=FBZ88_101138 PE= 4 SV=1
MAEAMRSGRKIVIVGGGTAGWMAAAVLARVLKGKYGTIELVESAEIGTVGVGEATIPPIQFLNHLLGIDEVDFVRKTQATFKLGIEFVDWTRLNHRYFHPFGPHGHTIDAVSFHHYWLRQRAQGDTSDIGDYSPSTVAARMGKFQPPAPDARPGGPVIAYAYHFDAGLYAQYLRGIAERNGVKRTEGKIVRVAQRDPDGFIDSLVLDNGTRVQGDLFVDCSGFRGLLIGETLKAPYEDWSHWLPCDRAVAVPCEGVAAITPYTRSTARAAGWQWRIPLQHRIGNGHVYSSRFISDDEATATLLANLDGKPLADPRPLRFTTGRRKNSWTKNCVSLGLASGFMEPLESTSIHLVQSGLFRMVSLLPRDGFEQATVDEYNRLTNIEYEQIRDFLILHYHAVERDDSPLWNYCRTMEIPDSLRHKIDLFRARGRIARFDEQLFAEPSWVAVFLGQGIQPHSYDPVGDVMPEAEVTARLARIREAIRRMADALPTHAEFINRHCRADRPVAA

SEQ ID NO: 84836 - protein, 496 aa, Gammaproteobacteria bacterium
  misc_feature (1)..(496): tr|A0A2N1Y9N8|A0A2N1Y9N8_9GAMM Tryptophan halogenase OS =Gammaproteobacteria bacterium HGW-Gammaproteobacteria- 15 OX=2013797 GN=CVV11_17585 PE=4 SV=1
MTNHTVKQVLIVGGGTAGWMTAAMLSKLMGPQLSIRLIESDAIGTVGVGEATIPAIQHFNAALGINEAEFLQSTQGTIKLGIQFENWGKAGDSYMHAFGPVGRPLGFTAFHHYWLAAQARGDNSSFWDYSLNYQAAHTGKYAPLSHIPNTPLQGLVHAYHFDASLYAAFLRRYSEQLGVVRTEGTIGAVVKTPAGDIASVTLKDGQSFSADLFIDCSGLRALLIGGELGGGYEDWRHWLPCDSALAVPTAATLPVMPYTRAIAHSGGWQWRIPLQHRTGNGLVYSSRFLDDNAARQTLMSNLDAEALAEPRKISFVTGRRKQQWLQNCVAIGLSSGFLEPLESTSIHLIQSAVVRLVQCFPQQADMAALRREYNRQSQQEFEAIRDFIILHYHLNQRNDNGLWQYCRTMALPDSLAQRIELFRQSGAVFRQQDELFTEVAWQQVMLGQHLRPQHYHPLADSLTDAQLNGFLADLKAIISRTAEQLPAHQQFLQQGR

SEQ ID NO: 84837 - protein, 498 aa, Sphingomonas taxi
  misc_feature (1)..(498): tr|A0A097ECS8|A0A097ECS8_9SPHN Tryptophan halogenase OS =Sphingomonas taxi OX=1549858 GN=MC45_01980 PE=4 SV=1
MTASVTTIVIAGGGTAGWMAAAALGGFLETGYRIRLIESDEIGTVGVGEATIPQIRLFNQALGLDEDAFLRATGGTFKLGIAFDGWREPGHSYMHAFGDVGRDVGLIAFQHYWLRARRLGLAKPLDAYCLNEVAARAGRMHRGGPLTAATIPAMPYAFHFDAGLYAAYLRRFAVNRGVERTEGRIAGVERDSLTGDVAALTLDSGERVAGDLFLDCTGFRGLLIEGALATGYEDWRHWLPCDRAIAVPSANVGAPLPYTRAIAREAGWQWRIPLQHRTGNGHVYCSAFTSDEAAADTLLATIEGEAQGDPRQLRFVTGRRKRAWSHNVVAMGLASGFLEPLESTSIHLIQSAIARLIKLLPALPVAPALRDEYNRQTGVEIERIRDFLILHYWANGRDEPFWQACRAMDLPDTLRAKIALWQEAGTIVREQEELFTEDGWLQVLAGQGVAARAHHPLADQIDDGDLGEYMETLELLYRREAGAMPTHAAFIDRHCKAR

SEQ ID NO: 84838 - protein, 484 aa, Sphingomonas sp.
  misc_feature (1)..(484): tr|A0A3S0EPE8|A0A3S0EPE8_9SPHN Tryptophan 7-halogenase OS=Sphingomonas sp. HMF7854 OX=2315330 GN=HMF7854_02750 PE=4 SV=1
MSAALLSNFVAGGDFRIELVESEAIGTVGVGEATIPQINLYNQALGIDEDEFLAATQGSYKLGIEFVDWSRRGHRYMHAFGEVGRDIGVVPFHHYWHRARELGLAGELAAYSLNETAARAGRMQRGPLKTTNVVPPMPYAFHFDASLYAAYLRRLAEQRGVVRREGRIVSVERDGESGDVTEVRLESGEAIAADLFLDCSGFRGLLIEETLSTGFHDWSNWLPCDRALAVPCAAAAELTPYTRSTALEAGWQWRIPLQHRTGNGHVYCSGFTSDEAAAELLLAGLDGEALAEPRPLRFTAGMRRKAWNHNVIAVGLASGFLEPLESTSIHLVQSALSRLVKMLPRGKGDAAVAAEFNRQAAEEYESIRDFIILHYKATERDDSAFWRHCAAMPIPDSLAERISLFREAGHIFRRGEELFTVVGWLQVLVGQGVLPASHHPLADHVEPADLESYMQTFEALMRREAAQMPRHADFIARHGAAQAA

SEQ ID NO: 84839 - protein, 499 aa, Sphingopyxis sp.
  misc_feature (1)..(499): tr|A0A1P8WXX3|A0A1P8WXX3_9SPHN Tryptophan halogenase OS =Sphingopyxis sp. QXT-31 OX=1357916 GN=BWQ93_10745 PE=4 SV=1
MIDPVRTVVIVGGGTAGWMAAAAAARFLNDGQRRILLVESDAIGTVGVGEATIPPIRDFNRMLGIDEAEFLRETGATFKLGIEFVDWGALGERYLHPFGDPGHNFEGIAFHQFWLKHRDDPRIRPFTDYFITGAAVRHGGYAPQSGDPRSPLHQMAAAYHFDAALYAAYLRRRAEAGGVTRIEGRIERVSRDPASGHVAALHLTDGRAVAGDLFIDCSGFVSLLLGKEMGVGYRDWSRWLPCDRALAVPSARVDPLIPATRATAHGFGWQWRIPLQHRTGNGIVYSSAYAGEEEARATLLAHLDSEPLAEPRGLRFTAGVRERLWDGNVVALGLAGGFIEPLESTSIHLIQTGINKLFWLFPDMRFSAAERDEYNRLMIDQYEYVRDFIVLHYKATARSDTPFWRDMAAMEIPDSLAQKIELFRTKGRIRRFDHDLFGIANWAAVMLGQNIMPEGYDPLVDATDDERIVAAMERIASVFETQARAMPKHADHIARLVSR

SEQ ID NO: 84840 - protein, 498 aa, Sphingopyxis sp.
  misc_feature (1)..(498): tr|A0A1P8WWY3|A0A1P8WWY3_9SPHN Tryptophan halogenase OS =Sphingopyxis sp. QXT-31 OX=1357916 GN=BWQ93_08540 PE=4 SV=1
MTQPIQRIVIAGGGTAGWMAAAAIARTMGRAVSVTLVESEAIGTIGVGESTIPPLVNFNRLLGINEADFMRATQATFKLGILFDNWKEEGHRYFHSFGLTGKDHWSAGFQHFWLHGRTRGHEQSYDDYCMELVAAMAGKFAHLPNDGTNYAYQLDSGLYARFLRQMAEGDGTVRVEGKIGHVELDPESGDIAALILDGERRIEGDLFLDCTGFRALLIEGALHAGFDDWTHWLPCDSAIALQTPNVRPPVPYTRAMAHDAGWQWRIPLQHRTGNGLVYCSRYLGRDEALERLLGNVEGEVLTEPNFLRFTTGIRRRQWMRNCVAVGLSGGFMEPLESTSIHLIQRSVLRFIRMLPLGRPSVRDIAEYEEQQLQDNLQIRDFLILHYKATNRRDSAFWRQCADMEIPDSLAQKIELFRETGRVFRKNEELFAENSWVQVMMGQGIEPQSYHPVATKLSDDELDRLLGMIRQQVADTVAKLPDHHAYVARYCGADVSQAA

SEQ ID NO: 84841 - protein, 516 aa, Sphingopyxis sp.
  misc_feature (1)..(516): tr|A0A1P8X1E5|A0A1P8X1E5_9SPHN Tryptophan halogenase OS =Sphingopyxis sp. QXT-31 OX=1357916 GN=BWQ93_17785 PE=4 SV=1
MTAEQVYRIVILGGGTAGWMCAAGLSRLLPAADYDITLVESDEIGTVGVGEATLPHIKTFNDMLGIDEAEFMRETMGSFKLGIEFVGWKAHGARYIHPFGTFGDRWAGSDFQHAWARARLAGTDTRSLQDYSFAVAAARANGFEHPNEDPKSIRSTYAYAYHFDAGLYARFLRQWATARGIRRIEGKVVDVARDPENGDVASVTLESGAVVAGDLFVDCSGFRSLLLGQTMGVPWIDWSEWLPCDRALALPCTGVAPLTPYTRATAQKGGWTWRIPLQHRAGNGYVFSSHFCGEEEARETLLGAIDGEAMDEPRLLRFQAGRRASGWAGNVVAIGLSSGFLEPLESTSIFLIQAATTDLAALMPRRGEKVDPRLVAEFNRLFEIHYDRTRDFLVLHYTANARAGEPLWDHVRHMALPDSLAHKIALFRESAIAPDYKLGLFSRDSWLSVLEGQGVLPSATNLLTHRQPDTELQARLDDLAERIAVNAADMTPHAEFIAGYCAAAGIAAPGATASAA

SEQ ID NO: 84842 - protein, 575 aa, Prauserella shujinwangii
  misc_feature (1)..(575): tr|A0A2T0M3U8|A0A2T0M3U8_9PSEU Tryptophan halogenase OS =Prauserella shujinwangii OX=1453103 GN=B0I33_101533 PE =4 SV=1
MIGNNSAFDALVSSLGEPEATALRAWLRGRAGDQDGGWDPLTFLRDRERTSRPLARPVDDDPNAIRRIGVIGGGTAGYLTALALKARRPWLDVTVVESSSIPVIGVGESTVQSIVPFLHHYVGIDPVELYRRVQPTWKLGIRFDWGPDPAGFMAPFDWSANSVGMLGSLATQGNINAFTLQSLLMAADRTPVYRVDDRLVSLMPYLPFSYHLDNQPLVAFLTDLARGRGIGYVDAKIADVVLRGDEWVDHLRADDGRRLDFDFYVDCTGFRSMLLGTAMRTPFHSYADSLVNDSAVIGNVGHGGLLKPYTTASTMNAGWCWTIPTVPSDHLGYVYCSAAISDERAAEELAGRFPGVTAPEFVRFRTGRHARAWRGNVMAIGNSYAFVEPLQSSSLLMITLMVMMLTQTLPASWDDAGTRTAFNMSIAKKWDALRWFIAVHYRYNTRLDTPYWRDARANVEVSGIEPLVEAYVEGAPLQLRDAYTRGAVRAAVRTFYDLQAYDCVLAGQKLPARMMPMAEDVETWRERKRAADSLVTRALPQHEALAAYHEHPSLHKELIDGADSWTGPRQPIRLV

SEQ ID NO: 84843 - protein, 511 aa, Sphingopyxis sp.
  misc_feature (1)..(511): tr|A0A1P8X2I3|A0A1P8X2I3_9SPHN Tryptophan halogenase OS =Sphingopyxis sp. QXT-31 OX=1357916 GN=BWQ93_20150 PE=4 SV=1
MAKRSILIVGGGTAGWLTAAYLARFFDLPRNPRLAITLIASDEIGSIGVGEGAFPTIRSTLQFIGIDESQFVRSTTATFKQGIRFDDWVRTPAPGKSSHFLHPFEPPYHGDGHSLVSYWLLQDPATRPAFAEAMTIQNRVAEARRAPKRSGEGAFDGPLNYAYHFDAARLADVLSAQARALGVEHLQGTLTDVALDGASGAIDHVVTAEHGTLSADLYIDCSGFRAELIGALGAPFHSVRHQLFTDRALACKLPYVDPATPLDSYTIAAAHAGGWTWDIGLAGARGIGCVYSSAHLSDDRAAEILAAYTGGRSHDVKVRSIPFEAGYRTTPWIKNCVAVGLSGGFLEPLESTGIVMIEAAAAMIAEMFPLGGPVGAPARRFNELMSARYANIVNFLKLHYCLSRRDEPFWRDNGDPASIPDRLKELLEEWRYRPPGRFDFILDLESFAFFNYQYILYGMEYRTDLSPVREEFPDVAEAERIFARIRNFGDRAASELPAHRTLIDQINAAAA

SEQ ID NO: 84844 - protein, 501 aa, Sphingomonas adhaesiva
  misc_feature (1)..(501): tr|A0A2A4IA32|A0A2A4IA32_9SPHN Tryptophan 7-halogenase OS=Sphingomonas adhaesiva OX=28212 GN=COA07_05655 PE=4 SV=1
MSTDRRISRIVILGGGTAGWMTAAALSRSFGRSVAITLLESDEIGTVGVGEATIPTIHWFNDLIGLDEAEFLRETKATFKLGIEFVDWTRPGHRYFHPFGQYGAPLPGVAFHHRWLKARAQGSDVPLSGLSLAARLAAEGRFAKPVGDARSILSTLGYAYHFDAGLYARYLRRLAEAAGVVRVEGRLRDVVRDGDDGQVTALLTERGETLAGELFVDCSGFRALLIDGAMGEGLEDWSHWLPCDRAVAVPCARVAATTPYTRSTARAAGWQWRIPLQHRTGNGYVYASAHLSEDEATATLLANLDGEALAEPRTLRFTAGTRRRPWRGNVVAIGLSSGFLEPLESTSIHLIQSGIAKLLTLFPDRDMDPALADRFNQLFGRDMDGIKDFLILHYHATSGRDEPLWRHCRTMALPDTLSARVAQYRRSGRLILDSDELFREASWLAVLDGQGVIASGYNPLTDAIDADTNRAQVEQIAQVIARAAPTLPMHDDALAQLIGAP

SEQ ID NO: 84845 - protein, 502 aa, Shewanella sp.
  misc_feature (1)..(502): tr|A0A516G1C7|A0A516G1C7_9GAMM Tryptophan 7-halogenase OS=Shewanella sp. YLB-06 OX=2593655 GN=FM037_21315 PE=4 SV=1
MAKEAIKSITIVGGGSSGWMTAMYLQRLYNQSGGRVKIRLVESKDVGTIGVGEATVHSIRFFFAAMGLDENELLRETNATLKSGIMFRNWMKPKDGQTHEYFHPFEQQRPAGPLDNATAWIQSPKRVSYAQATSISSELISNANCPKAATSPQYQGIVPYGYHLDAILMGKYLRKKACAAGVEHIEANVEHVKTNGETITSIITDKGEFTSDIFIDCTGFKGLLIESLRENNWQSFEQELPCNKAVAIQRKPLLGQPPKPYTLATALTNGWAWEIDLSNRQGTGYVYDGNRLTKEEAEAELLEHLGDSQEILRTVHLDMKIGCRKEFWIGNCISIGLSGGFIEPLESTGLHIVNLGARLLATHLSSNAPTQPVRDSYNKTLNGIYQDLRQFIILHYCLSDRDDTEFWKQAAKTAAYAKGLPEKLELWRNKTCEFMDLAGGYGTIFNDENYRFILYGMDHTPDLSQPASGYEIQNILQRLAQQQEQAVKSTMLHSEFLKQVSR

SEQ ID NO: 84846 - protein, 491 aa, Sphingopyxis sp.
  misc_feature (1)..(491): tr|A0A1P8X3U7|A0A1P8X3U7_9SPHN Tryptophan halogenase OS =Sphingopyxis sp. QXT-31 OX=1357916 GN=BWQ93_17780 PE=4 SV=1
MSALHIALLGRDAPLWLAAAALRRALAPAGVAVTAVALPGEAGPADLHATLPAIEALHNQIGIDEAALLRTTGGAFTLGQNFTERSGAGRASFLHSYGGFGSAIDGGDFFPHWVKARRHGLGVGLDDFSLTASAAHQGRLFFPDDESERYARADYGYHLPAAAYAKSLRAIALHLGVEIVEATSIDVAHGEDGITALLLDGGPRIEAGLFVDVTREGQLLRRTPGAAFDPTPLPGDRLLVARAPRFAALPVYSEVRASADGWTALYPAMAHTHVTHIFSSAVTNDDDALAAAQAASGLPLESVAIRPLATGMAAAPWAQNVVALGEAAAAFDQLHGLPMHALQLGIVHLIAAYPGAAACDVRRAEYNRLMRSHFDRVADFQTAHFALQTYSGRYWDAARAVPRSAELEHLLAFFRARGELAPHEDESLPPDSWRALLTGHGILPEGWRPSVDRTPPDTVKAHLRKMLGTVREQVLRQPTHDAALARIMQRA

SEQ ID NO: 84847 - protein, 491 aa, Sphingopyxis sp.
  misc_feature (1)..(491): tr|A0A1P8WWT6|A0A1P8WWT6_9SPHN Tryptophan halogenase OS =Sphingopyxis sp. QXT-31 OX=1357916 GN=BWQ93_08360 PE=4 SV=1
MTAIRRIVIVGGGSAGWMTAAAFGRALSPQTHQITLVESEAIGTVGVGEATVPPIHEFNRFLRIDTADFLRATHGTIKLGIQFEGWSGVGHSYFHPFGYLGIEMAGIHFHHHWLRHLAEGGDADHEPYNLETMAARAGRFAPATRHGPVHHAVQFDAAAYARYLRAYAEAKGVTRIEGKVADVQLRSEDGHISALNLDDGRTIEGDFFIDCSGFRGLLIEGALRTGYTSWQHWLPCDSAVAMPCARTGDPMPYTVSTAREAGWQWSIPLQHRDGNGYVYSSTHLAHDEAESLLRSRLPGEPLADANRLRFVAGHRKAIWNRNCVAIGLAGGFLEPLESTSIHLIQTTIIRLLSLFPRDAIDPNVVSRFNRDALHEYATIRDFVIAHYATANRTDTPFWRDLAAAGMPDSLAERIAAFRATGNILFEPGDLFGPTNWYAVLTGQGVQPQSHHPIADTLPADELAKRLAILRTRVAEQLAELPPHADFLRSLG

SEQ ID NO: 84848 - protein, 536 aa, Luteibacter sp.
  misc_feature (1)..(536): tr|A0A1T4ZRJ2|A0A1T4ZRJ2_9GAMM Tryptophan halogenase OS =Luteibacter sp. 22Crub2.1 OX=1283288 GN=SAMN05660880_0 0028 PE=4 SV=1
MARLKKVLVVGGGTAGWLTACYLARAVNAVDPRSVQVHLVESPDIGLLGVGEATFPSIRGTLAAIGLDERRFLVGATATYKQGIHYRHWVRPPGAPGADHFFHPFNAPSQRPGGPELLPYWLLGAAPAGMPFADAVSMQTALVDHSRAPKRVKDADYQGPMNHAFHFDAACFARVLAEHGQETLGVVRHTATVERAELDEHGAIARVVTKEEGELTADLYVDCTGLRGMLIGGAMQSPFRSRADVLFADRAVAMQVPYDAPDTPIPSYTISTAQEAGWIWDIGLQKRRGVGYVYSSRHTDDERAEAVFRKYLGEAGKGGRAMQIKFETGYRPEHWRKNCVAVGLAGGFVEPLESTGIALIELATYLLTHLLPGDTDDMESAARHYNEMMVARYDRIIDFIKMHYCLSQRRDSAFWLENADPSSIPQTLREKLEKWKTRPPHRLDFVSDLEMFMTSSWQYILYGMEFRTDLEPMRSAYPDVEVARREFGMIQQAAVRALDDLPDHRGLVEQLCAEHRPRSPATHAGHRDRIAERSRV

SEQ ID NO: 84849 - protein, 498 aa, Sphingopyxis sp.
  misc_feature (1)..(498): tr|A0A1P8X1D9|A0A1P8X1D9_9SPHN Tryptophan halogenase OS =Sphingopyxis sp. QXT-31 OX=1357916 GN=BWQ93_17885 PE=4 SV=1
MTDNPPFRIVILGGGTAGWMTACLFAKQWAGRAAITVIESPEIGIIGVGEGSTPQLKAFFDALGIAERDWMPACDATYKIGIGFEGWGGAVAPGYFHPFPAPLDVHTQSAFIRNAALRRGGVDVPAHPDAFYLAPRLAAAGQGPHPAESFPFELSYGYHFDAYKVGAFLCDHAVGLGVTHLTRKVEDVRVGSEGAVEALLLEDGEAVEGDFFVDCSGFRALIAEQALGTKFLPFADNLFNDRAVVMPTPHAEGAPLPIATGSRAMAAGWRWTIPLTTRIGNGYVYSSRYIDPEAAAIELRTALGVGDEVAARHLSMKVGRLAESWTGNCLAMGLAQGFIEPLEATALHIVIATAQEFIAAFESGGFSPKHRAVFNARIAARYEGIRDYIVAHYRMNRRADAGDYWRDAAAMETLSDDLKAMITAWFTRSDIDAVIAERGIGAYYGSISWHCLFAGYGVFPDAARMRAAAPGDGAADMAAIDDFLRRAALNFGAHRPPT

SEQ ID NO: 84850 - protein, 519 aa, Nitrospirillum amazonense
  misc_feature (1)..(519): tr|A0A560FGX5|A0A560FGX5_9PROT Tryptophan halogenase OS =Nitrospirillum amazonense OX=28077 GN=FBZ89_106267 PE= 4 SV=1
MTVERTILIVGGGTAGWLAAAYLARYLGVREGGAIGITLLEAPDIGIVGVGEGTFPTIRGTLRFLGLNEAQFMRDTSATFKQGIRFARWVDGGEGDSFFHPFEAPFPTDGAGLVPYWLLQDGDRRPPFAQAMTFQQQVTDARRAPKRGPEGDFEAPLNYAYHFDAAKAAQALAARARELGVRHLRGTVTDVALAADGAIAHLVTREYGAIAADFYVDCSGFRAELIGRALGVAQKSVKPILFTDRALSCKVPYGAADGPLESCTLATAHAAGWTWEIGLEGARGVGCVYSSDHMSDDEAEGVLRAYVAPHLGPGVEPPAPRKTAFDAGYRETPWVKNCVAIGLAGGFLEPLESTSVVLIEVAVGMLAELFPHDGNWAAPAARFNELMTRRFENIVNFLKLHYCLSRREEPFWRDNRDPATIPAALRDLLAQWRTRPPSRFDFALDLEAFAFFNYQYILYGMGFATDLSAARAAFPQAEAAQKTFARIRAYGDHATRDLPAHRALIRRMNQISALGKVGT

SEQ ID NO: 84851 - protein, 511 aa, Nitrospirillum amazonense
  misc_feature (1)..(511): tr|A0A560FFB6|A0A560FFB6_9PROT Tryptophan halogenase OS =Nitrospirillum amazonense OX=28077 GN=FBZ89_10713 PE=4 SV=1
MDRPIQHIVIVGGGTAGWLTAGVIAARHKARMASGFKVTLVESPNVAIIGVGEGTWPTMRTTLEKMGVSETEFFRHCDTAFKQGGKFVGWTTGADDDAYYHPLMLPHGWSQVNLVPHWLQDGRGRTFSAAVCPQEAICEEGLAPKTIATPEYRGLANYAYHLDAGKFANFMQKHCTEKLGVRHVLADVTQVKQDEAGDITGLVTEQAGEITGDMFVDCTGFRALLIGKTLGVGFRECRDVLFCDTALAVQVPHESEDAPMASQTIATAQSSGWIWDIALPTRRGLGYVYSSDHIDEEAARAELARYAGTQAEARKIPIRSGHREMFWKNNCVAVGLAAGFLEPLEASAIMLIELSAKIIADQLPARRSVMDVVARRFNEVTHYRWGRIIDFLKLHYVLTQRTDTAFWRDNVDPASTPERLRDLLRLWKYRAPWFLDEFDRLEEVFPAASYQYVLYGMGFRTEVDPAENSADALLASRIMEENAAMAQKMRANLPKNRDLVRKIRDHGMQSI

SEQ ID NO: 84852 - protein, 504 aa, Sphingomonas taxi
  misc_feature (1)..(504): tr|A0A097EGC1|A0A097EGC1_9SPHN Tryptophan halogenase OS =Sphingomonas taxi OX=1549858 GN=MC45_09815 PE=4 SV=1
MRGERPVRAEQRIRVVIVGGGTAGWMTAAALATLAPGAATVHLVESQEIGIVGVGEATLPHLRAFVARLGIDEAAFMAATHATFKLGIEFRDFGAIGDSYIHPFGSYGRPLDGVGFHHYWLRRHHAGATAPIGDYSTAVVAAAAQRFTRPGSDPHDLASAFGYAYQFDATRFAPFLRAHAEARGALRTEGLVTGVDRDADSGDVVAITLADGQRIEGDLFIDCSGFRALLIGGAMDEAWEDWSHWLPCDRAVAAPCASPAGGIEPYTRATAMAAGWRWRIPLTHRIGNGYVYSSAHLSEGAATDALVDALESPPLAEPRHLRFRAGRRRRSWVGNVLSIGLASGFLEPLESTSIYLVQMAITQLVEHFPAARVTDADRDGFNALVDAEYDRLRDFLILHYHATTRDDSPFWDHVRTMTIPDSLAEKMALWRQTAQVSRYSHGLFLEPSWVAVYLGQNVVPDGWDPRADLPDGAALDRALAALRGGIAAAVATMPDHAAYLQAAA

SEQ ID NO: 84853 - protein, 511 aa, Sphingomonas naasensis
  misc_feature (1)..(511): tr|A0A4S1WJU8|A0A4S1WJU8_9SPHN Tryptophan 7-halogenase OS=Sphingomonas naasensis OX=1344951 GN=E5A74_08935 PE= 4 SV=1
MVNGGSAADAIERVVIVGGGTAGWMAAAALSAHLAGAGVAITLIESSDIGTVGVGEATIPTIRRFYAALGMSDAEVMQACQATAKLGIRFVDWLRPGHSFVHPFGRFGQDLKGLDFHHYWLKARAAGEPAPLDDYSLGALLAREGHATLPASDPGSQLGIFDWALHFDAALFAQHMRRFAEKMGVTRIDARIVEVRQRPEDGFLDSLVLDSGASIAGDLFVDCSGFRSLLLGETLGIDYADWSHWLLCDGAFAVQSERAGPPPACTTVTARSAGWQWRIPLRTREGNGLVFSSRFQSDDDARKELLAAMPGKPVMEPRRLRFTPGRRAVAWAKNCVGLGLASGFLEPLESTSIALIETGIERLKQLFPDKSFDPAVIAEYNEQSAEEIERVRDFLILHYKLNGRSGAFWQACRAMDVPDSLNAKLALWRARGAFVRYRWEMFSPASWLAIYAGFEDLPTRLDPAVAGIDSDQLARSLAAMRRALRETVADTPTHQEFLEIMDGAAAQGRAA

SEQ ID NO: 84854 - protein, 513 aa, Nitrospirillum amazonense
  misc_feature (1)..(513): tr|A0A560IRH6|A0A560IRH6_9PROT Tryptophan halogenase OS =Nitrospirillum amazonense OX=28077 GN=FBZ92_10787 PE=4 SV=1
MAEAMRNEDGRGGRKIVIVGGGTAGWMAAAVLARVLKGRYGTIELVESAEIGTVGVGEATIPPIQFLNHLLGIDGVDFVRKTQATFKLGIEFVDWTRLNHRYFHPFGPHGHTIDAVSFHHYWLRQRAKGDTSDIGDYSPSTVAARMGKFQPPAPDARPGGPVIAYAYHFDAGLYAQYLRGIAERNGVKRTEGKIVQVTRRDPDGFIDSLVLENGTRVAGDLFVDCSGFRGLLIGETLKAPYEDWSHWLPCDRAVAVPCEGVAAITPYTRSTARPAGWQWRIPLQHRIGNGHVYSSRFISDDEATATLLANLDGRPLADPRPLRFTTGRRRNSWTKNCISLGLASGFMEPLESTSIHLVQSGLFRMVSLLPRGGFEQATVDEYNRLTNIEYEQIRDFLILHYHAVERDDSPLWNYCRTMEIPDSLRHKIDLFRARGRIARFDEQLFAEPSWVAVFLGQGIQPHSYDPVADVMPEAEVTARLGRVREAIRRMADALPTHAEFINRHCRADRPVAA

SEQ ID NO: 84855 - protein, 499 aa, Sphingomonas adhaesiva
  misc_feature (1)..(499): tr|A0A2A4IAT8|A0A2A4IAT8_9SPHN Tryptophan 7-halogenase OS=Sphingomonas adhaesiva OX=28212 GN=COA07_04990 PE=4 SV=1
MTALPVREVVIVGGGTAGWMAAAALSRFLPRARTRIRLVESEEIGTVGVGEATIPTIQTFNRMLGIDEDAFVAATGGTFKLGIQFEHWRAVGDRYFHPFGQFGQDIDGLSFHQLFLKLAGQRRCADLWHYAPCAVAASAGRFARVAEGEAPFPLPYAFHFDAGRYARFLRDYAEARGVERIEGRVADVAQHADTGFVQAVRLADGRRVDGELFVDCSGFRGLLIEGALASGYEDWRHWLPCDRAVAVPTARDGAPVPYTRAIAQGAGWQWRIPLQHRTGNGYVYSSAHVDDDAAQAALLDAVEGEVLAEPRRLSFVTGRRRRFWNRNVVALGLAGGFLEPLESTSIHLIQTGIAKLLALFPDAGFSPVEAEEYDRLMRGAYDGVRDFIILHYHATQRDDTPFWRHVRTMEVPDSLRRKIELFRVHGRFFRYDDELFSLASWTAVLLGQGIVPAAYDPVVDVLDEDRLAGTLERLRHAILAQTRAMPSHADFIARHCAAR

SEQ ID NO: 84856 - protein, 551 aa, Nitrospirillum amazonense
  misc_feature (1)..(551): tr|A0A560K2K2|A0A560K2K2_9PROT Tryptophan halogenase OS =Nitrospirillum amazonense OX=28077 GN=FBZ87_103293 PE= 4 SV=1
MADTNAPDGTRANGAPVRNVLIVGGGTAGWLAAAYLARTLSIGQPGGARITLVESADIGILGVGEGTFPNIQRTLRRIGIDESVFMRESEATFKQGIRFDHWQHAPGSGERDHYFHPFQSAISRQDLDLVPYWLLGAAGEGVPLDTALTMQKRVADAALAPKRSGDADYAAPLNYAYHFDAVKFARLLRVVATDLGVRHVIDTVDAVPLDEAGAIAGVVTRENGTLTADLYIDCTGFRAQLIGQALKSPYQSCRKWLFCDRAVALQVPYDQPDAPIPSYTISTAHGAGWTWDIGLETRRGIGHVYSSDHTDDARAEQVLRDYIGPAAAGKTARTFRFEAGYRPEPWVRNCVAIGLSSGFFEPLESTGIVLIEVASVLLTSLFPWAGNMDTAARQFNRIMRQRYERALDFLKLHYCLTRRTDTAFWRDNADAATAPDTLHDLLDRWRHRPPEGLDFDLNLDTFSEASWQFVLYGMGYHTDLSAQAGAFRHMDEARQQFAAIRASTEQALGALPRHRDLITQIYRHGLRPRTPFGGPPSGRASLSSGMAGLSR

SEQ ID NO: 84857 - protein, 519 aa, Novosphingobium sp.
  misc_feature (1)..(519): tr|A0A1E4MKU1|A0A1E4MKU1_9SPHN Tryptophan halogenase OS =Novosphingobium sp. SCN 66-18 OX=1660121 GN=ABT11_0041 0 PE=4 SV=1
MHAVRDVVIVGGGTAGWLTAAIIAAKHRPRMGHDFSVTLVESPNVPIIGVGEGTWPTLRSTLKSVGISETDFFRECDAAFKQGALFAKWTTGADDDAYYHPLVLPQRFGQLNLAPHWLAGTMVEDGDADETFCDAVCPQGRICDENLAPKTMTDAEFEGQANYAYHLDAGKFAPFMQRHCTEKLGVRHVLADMRQVLQDESGDIRAIVTEQAGEIAGDLFVDCTGMRSLLLGETMGVGFKDCNDVLFCDTALAVQVPYPDPDAPIATHTISTAQSAGWIWDIGLPTRRGVGHVYSSRHISREQAEAELRAYIGPAADGLAVRKIDIRSGHRELFWKGNCVAVGLAAGFLEPLEASAIVLIELSAKMIADQMPPAREVMDIVARRYNEKTLYRWGRIIDFLKLHYVLSQRRDTAFWRDNMDPATIPERLRELLALWRWQPPYMHEEFDRVDEVFPSASYQYVLYGMGFRSEVSARALEPEVRDARRARGQNADVTARMLTALPRHRDLINRIVEYGLQPV

SEQ ID NO: 84858 - protein, 533 aa, Nitrospirillum amazonense
  misc_feature (1)..(533): tr|A0A560HH35|A0A560HH35_9PROT Tryptophan halogenase OS =Nitrospirillum amazonense OX=28077 GN=FBZ90_101110 PE= 4 SV=1
MREAMAEAPSGKSENHAIRRVVVVGGGSAGWIAAARIAARNADPEGGPELDRVAVVLVESPTEPSIGVGEGTWPTMRNTLAKIRLSETDFIRSADAVFKQGARFVGWTWGGDDAYYHPLNPPVGAGEVNLSPHWQERAAAGPAGEDFAHSVDFQGALCDAGLAPKAITHPEYAGLANYAYHLDAGKFATLLRDHAVSRLGVRHVVGDVVAADQTAEGDIQALRLADGTVIEGDLFVDCTGFKGVLIDRVYGVPLKSCRQYLFADKALALQIPYSAEDAPIACHTVATAQTAGWIWDIGLWSRRGVGYVYSSAHTSADQAEATLRAYAGAGADALSVRSIDINAGHRETFWIRNCVAVGLSAGFIEPLEASALMLIELSMDTIADRLPATRRAMDHIARQFNADFHHHWARVIEFLKLHYILTRRQEPFWRDNLDPATVPGELAERLELWRHHPPCAADFPRHREVFSWPSYQYVLHGMGFPTRYAGHPTLGPERKAAARLFARAAAQRSDAMTRLPPHRSLIRAIRQHGLQRL

SEQ ID NO: 84859 - protein, 519 aa, Nitrospirillum amazonense
  misc_feature (1)..(519): tr|A0A560FS40|A0A560FS40_9PROT Tryptophan halogenase OS =Nitrospirillum amazonense OX=28077 GN=FBZ89_10169 PE=4 SV=1
MTFAPLRDIVIVGGGTAGWMTAALFSHILGPGDHRIHLVESEEIGTVGVGEATIPPIAIFNRALGLDENDFLRQTQGTIKLAIEFVDWLRPGHRYLHSFGAFSRSLGLGHFQDFWLRAHRLGMTDDWESYILNSVAARRGRFLRPDPRRQSPLEPLAHAFHIDAGLYARYLRRFAEQRGVRRTEGKIVRTVLRAHDGFVDAVEMADGTRVAGDLFIDCSGFRGLLIEQALNTGFEDWTHWLPCDRAWAVPSAHDGSAAALTPYTRSTARPAGWQWRIPLQHRTGNGYVYSSRHVSDDEAAATFMANLDGEALAEPRQLRFTAGRRRRFWNRNVVAVGLAGGFMEPLESTSIHLVQSALSRLITLLPNREFDPAVAEEFNRASAIEYERIRDFIILHYAATERADSPFWRECRDRPVPEELARRMRIFRALGRVARDHDELFSEVSWLHVFLGQGVWPRDHHPLADQLSEEDLRRFLADIKSAVAREVDAMPTHADFVARHCSAPPWPRHHQADSLTRTA

SEQ ID NO: 84860 - protein, 522 aa, Nitrospirillum amazonense
  misc_feature (1)..(522): tr|A0A560GUG1|A0A560GUG1_9PROT Glycine/D-amino acid oxi dase-like deaminating enzyme OS=Nitrospirillum amazonen se OX=28077 GN=FBZ90_114164 PE=4 SV=1
MTRTRTILIVGGGTAGWLAAAYLARYLGVREDGPIRITLLESQDIGIVGVGEGTFPTIRGTLKFLGIDETRFMRETAATFKQGIRFDRWVTGAEDDSFFHPFEAPFPMEGAGLVPYWLLQERDARPPFAQAMTFQPRVAEARRAPKRGPEGDFEAPLNYAYHFDAAKAAAALARCARDLGVLHLQGTVTDVMLGPDGAIDHVLTREQGPLSADFYLDCSGFRAELIGRALGVPQKPVKPILATDRALSCKVPHGMPDAPLESVTLATAHAAGWTWDIGLEGGRGIGCVYSSDHMSDDAAEAALRAYLAPMLGRDAAPPPLRRIAFDPGYRETPWVKNCVAIGLSGGFLEPLESTSVVLVEVAVGMLAELFPHDGDWQAPAARFNELMTRRFENIVAFLKLHYCLSRREEPFWRDNRDPATIPPGLRDLLARWRTRPPSRFDFALDLEAFAYFNYQYILYGMGFETDLSAARGAYPDVDAARKTFARIQAYGDHAIRDLPAHRALIRRLNQTSAPEDRVALRR

SEQ ID NO: 84861 - protein, 364 aa, Methylovulum psychrotolerans
  misc_feature (1)..(364): tr|A0A2S5CI05|A0A2S5CI05_9GAMM Tryptophan halogenase OS =Methylovulum psychrotolerans OX=1704499 GN=AADEFJLK_03 848 PE=4 SV=1
MTQPTLFDVFIVGAGPAGCAVALSLAQTVPGLRVAIADPGRSTPFRIGESVPPLIKPFLDQLGVGAAFLQDNHCPSFRTVSAWGSPELVSNEFFLNVHNTGWRLDRARFDQTLLNAARQQGAQRLPAQLHTLSHHAPYWHIGCGDAGDYRATYLIDASGRTALPSRLAGLKPINHDRLVASAVFFGQTDPDLPNADAVLTEACPDGWWYTAALPEGRRVVALMTDADLTRRLKAKQLAAWQQQLAQTRHVQPLIGNARPLAPPQLWPANSRYLHGPARPDLLAVGDALSCFDPLSSQGIIKALRSGLFAAYALTDYIRRQDSSGFTRYQALMQREFAAYQTTLSDYHRQEQRWPDAPFWQRRLG

SEQ ID NO: 84862 - protein, 506 aa, Porphyrobacter neustonensis
  misc_feature (1)..(506): tr|A0A192D7J8|A0A192D7J8_9SPHN Tryptophan halogenase OS =Porphyrobacter neustonensis OX=1112 GN=A9D12_01490 PE= 4 SV=1
MDRPDVTRLVIVGGGTAGWITAAAFAKLLGKRLKIELVESEAIGTVGVGEATIPQILRLNAILGLDENAFLSATSGTFKLGIEFVDWGAKGSRYLHTFGETGMSLGRVPFHHYWRRAAMIGQAGSLWDYSLHQMAADQARFGKMDRVGNTAMTGLAYAYHFDASRYALFLRSHAEANGVTRTEGIVESVARDGESGDITAITLKGGKTVAGDFFIDCTGFRSLLLGEALGVGYQDWSKWLPCDRALAVPSERLPTLVPYTRATAKDAGWQWRIPLQHRTGNGHVYSSGFKSDEAAADTLMAGLDTRPLGDPRPIRFTTGRREAFWAHNCAAIGLSSGFLEPLESTSIHLIQSHVSRLVQLFPRHGDPASLRAEYNARCAAEVAQIRDFLILHYHQTAREDTEFWRYCKHMDVPDSLTHKLALFAASGRVGRDVNDLFRDASWVQVMLGQGVMPADYDAMADQLAPAQLTEFLANVKTITARAVATLPTHADYLARHCPVDAALLAA

SEQ ID NO: 84863 - protein, 533 aa, Gammaproteobacteria bacterium
  misc_feature (1)..(533): tr|A0A2N1YAM6|A0A2N1YAM6_9GAMM Tryptophan halogenase OS =Gammaproteobacteria bacterium HGW-Gammaproteobacteria- 15 OX=2013797 GN=CVV11_18375 PE=4 SV=1
MQSTDSLAPDNLATANAQSFAVGQVNIVVVGGGSAGWLTAALLAAEHQTDPLITITLIESASVPTIGVGEGTWPSMRATLARIGISETEFLLSCDASFKQGSVFRQWRSADPQDCYYHPFTAPVAANDLDIAEHWFSHHQQVEFAPAVSSQPAVIAAGLAPKRIATPEYAFLQNYGYHLDAGKFVALLSQHAKRLGVKHVVDDVVAVHSHIDGRIAALQTGQQGSLAGDLFVDCSGLQSLIIGRHYQTPLVSVQHCLLNDSALAVQVAYDDEHTPLASATLATAQAQGWVWDIGLPTRRGVGFVHHSGHTNEAQALATLAQYLRLSEQEFSARYQPRLIRFTPGYREQFWRHNCVAVGMAAGFIEPLEASALVMVELSAKFISEQLPRNLSQLAIVAERFNQIFSYRWQQIVEFLKLHYVLSARDDSDYWLAQRAEASIPSSLQEKLLMWHQFVPSRYDLPMAEELFPAASYQYILYGMRHLPRSGRPIKPGSDLRARQAFAEVQQKTQQLRAGLVSNRELLNQIKAHGLQKI

SEQ ID NO: 84864 - protein, 599 aa, Microcystis aeruginosa
  misc_feature (1)..(599): tr|A0A3E0M5P7|A0A3E0M5P7_MICAE Tryptophan halogenase OS =Microcystis aeruginosa TA09 OX=2060472 GN=DWQ58_08440 PE=4 SV=1
MVTTDTKVYDVVIMGAGFAGVCQARHLLLNVPNIKIALIDPRPEERTDKDLKIGESMVEIATLFVCKELGLYEYMIENHPPKYALNFHWAKDADKTDTIDDYYHIWANRQFPLGTFQMNRAKFERDLLKMNKKMGASFYQGRVVDVDITPTDEMHTVKVKMIDGNYHELRAKHLVDAAGRKFIIGHKTDNVIVGADNLFGVDTGSAWVRVKNIDRTIFHDGYDPYGATCSHYYATNHWFGHGHWLWMIPTEKDSQEISIGIAQHRSVIANGQINTQEKFYAFLKANHNLLYRLVTSGENVDFHYLPRVSHTSKTMFSQDNWYVVGDAACIFDPFYSLGTSMIAFAIESITEIIRSQLAGEADTEEKRAAYNDFNLTYTRLNNHLIEHHDKQLGHASIMSWRIYAEYMWWFGIQIPLYVGKWHLDTGFISRYVPKVQADIKGYWHHLYEQFNQLVEQNKNIGFMDAHRTDQLIWGYHTLKHFDDFIENTKFEPRRCNVFAGIKATSFYTAVWYAKFLWKGFGFSAFLNRKNLSYLFGHLNGALQSAITEMVYKYLTCKLPDNSQIEQTRQEFTNYRYRPQLNTWLTETATNSPKKVPVNV

SEQ ID NO: 84865 - protein, 413 aa, Methylovulum psychrotolerans
  misc_feature (1)..(413): tr|A0A2S5CGW1|A0A2S5CGW1_9GAMM Tryptophan halogenase OS =Methylovulum psychrotolerans OX=1704499 GN=AADEFJLK_04 177 PE=4 SV=1
MPSIKNVAIIGGGPASSALAIHLCRQGCKVAIFAMPERASILVGESLVPMIVPLLQELDVEAEVASYSQYKPGACFTYNADEVFEFRFADTPSDLPSYSYNVPRDRFNATLLAAAQRAGAKLIAHHVQLSRVADTDWLTFDAQSLAAAAGCWDAAEPDLIVDAAGRANLIGRLLNIPMQKGLRQDVALFAHVDKTELVDPGYVHNDRMDQGWCWRIPLPGRVSFGFVVPEAYAFQHGETPEEQYEQLLKTDTVLRRLAPEAKRVTEVLCFRNYQSISDRICGENWVMLGDAGGFVDPVFSSGMLIALDSAKKLSAILLANKPLADYETVTRRHLAAWFEIVSYYYDGRLMGSIKAGQTMPVNRFTRWLLAWVSARVSRIFSGAAASNPFCLNLLRFLVKYTLIGLSPERYKIN

SEQ ID NO: 84866 - protein, 511 aa, Leptothrix cholodnii
  misc_feature (1)..(511): tr|B1Y1M4|B1Y1M4_LEPCP Tryptophan halogenase OS=Leptoth rix cholodnii (strain ATCC 51168 / LMG 8142 / SP-6) OX= 395495 GN=Lcho_3228 PE=4 SV=1
MSNPERHLRDIVIIGGGSAGWMAAAALSSALSQRCRVTLVESDEIGTVGVGEATIPPIRIFNQTLGLDEAEFLKRTQGTFKLGIEFVDWARLGQRYFHPFGPHGVQFDLSPQHQYWLRSRGREGMPGIDEHSMAWVMASRGRFDRPSSDPRSVLSTFDYAYHFDATLYARYLREVSEARGVRRIEGQVVGVALRPTDGFVASVRLADGRDIAGELFIDCSGFRGLLIEQTLHTGYEDWSHWLPCDRAMAVPCSHPESPEGGELTPYTRSTARAAGWQWRIPLQHRIGNGHVYSSQFLDDDEAAAVLLDNLDGAALAAPRALRFTTGRRKQFWNRNVVALGLASGFMEPLESTSLHLVQSGISRLLALFPDRDFDPLTAAEYNRIGVQEFERIRDFLILHYKLTERDDAPLWRYCAAMPIPDTLQYKIEHFRRYGRLVSEGMELFGNASWLSVHIGQLNWPQRHDPLVDLRDVDGDAVLARLRQAMVSAAHGLPGHADFIRRHCAARAACPA

SEQ ID NO: 84867 - protein, 512 aa, Nitrospirillum amazonense
  misc_feature (1)..(512): tr|A0A560H423|A0A560H423_9PROT Tryptophan halogenase OS =Nitrospirillum amazonense OX=28077 GN=FBZ90_10822 PE=4 SV=1
MATSHASNDTATNAPLRRIVIVGGGTAGWMAAASLARFLRNLKCDIQLVESEQIGTIGVGEATIPPIMNFIRVLGIDEDDLIRQTNATFKLGIRFQDWTRVGHSYFHPFGRTGFEMEGIGFPAYWMRQRLAGDAAPLEEYSLQAMAAAHNRFMRPVQAPGSPLEGITYALHFDAALFARYLRGYSEARGVTRVEGRVVRVDLRPEDGFIEALRLEDGRRIDGDFFIDCSGFRGLLIEEALQAGYENWQRFLPCDSAVAVPSERAGPPPSYTLAAARSAGWQWRIPLQHREGNGVVYARDFLSDEAARETLLSNLAGKPLADPRVLRFVTGRRRESWKRNCLSLGLASGFLEPLESTSIHMVHRGLALFIQMLPDRHCEPADIARYNRMLAFEYERIRDFLVLHYATGQRRDSDFWRHCAGIEWPDSLRAKIELFQGYGRIQREDTELFPEQSWLYVFTGQDIRPRRPDPMTDLLDPDKIRGGLANIHDVIGRVVQTMPHHQAFIDRHCAAAG

SEQ ID NO: 84868 - protein, 519 aa, Nitrospirillum amazonense
  misc_feature (1)..(519): tr|A0A560I5U4|A0A560I5U4_9PROT Glycine/D-amino acid oxi dase-like deaminating enzyme OS=Nitrospirillum amazonen se OX=28077 GN=FBZ92_11569 PE=4 SV=1
MTVERTILIVGGGTAGWLAAAYLARYLGVREGGPIGITLLEAPDIGIVGVGEGTFPTIRGTLRFLGLNEAQFMRDTSATFKQGIRFARWVDGGEDDSFFHPFEAPFPTDGAGLVPYWLLQDGDRRPPFAQAMTFQQQVTDARRAPKRGPEGDFEAPLNYAYHFDAAKAAQALAARARELGVRHLRGTVTDVALAADGAIAHLVTREYGAIAADFYVDCSGFRAELIGRALGVPQKSVKSILFTDRALSCKVPYEAADTPLESCTVATAHAAGWTWEIGLEGARGVGCVYSSDHMSDDEAEEVLRAYVAPHLGPGIEPPAPRKTAFDAGYRETPWVKNCVAIGLAGGFLEPLESTSVVLIEVAVGMLAELFPHGGNWDAPAARFNELMTRRFENIVNFLKLHYCLSKREEPFWRDNRDPATIPPALRDLLAQWRTRPPSRFDFALDLEAFAFFNYQYILYGMGFETDLSAARAAFPQAEAAQKTFARIRAYGDHATKDLPAHRALIRRMSQISALGKVGT

SEQ ID NO: 84869 - protein, 498 aa, Cellvibrio sp.
  misc_feature (1)..(498): tr|I3I8P1|I3I8P1_9GAMM Tryptophan halogenase OS=Cellvib rio sp. BR OX=1134474 GN=O59_002756 PE=4 SV=1
MGGGTAGWLCANHLGKRFSASTEFSPQITLIDSNEIPPIGVGEGTVPAIRQSLKYLGISETELIRHCDATFKQSVKFIGWNQQSAPNYYHHVFDFPELRSPDQIYSWLASARPEIPFTDIVSIQGHLCDVGLGPKLITQPEYAGVANYAYHFDAAKFSQLLMKNATEKYAVKHLKADVEQVKITEMGDIESLVTKQLGQLRADLYIDCSGFSSLLLGKSLGVPFVDKSGVLFVDTALAYQTPYESAEAPIPCSTLATAKKAGWIWDIGLSSRRGAGYVYSSSHTTDSAAEQDFARYLGLQENDVNFRKIPMRVGYREKFWQKNCVAIGLSQGFVEPLEATGLLMFDATAKMLAELIPSSSSTFPVVAKQFNKIVRAAWDNVVDFIKLHYCISDRTDSDFWNDNRELRGVPDSLQEKLESWRWRTPNIYDFPNKLGIFHWENYLYVLYGMDFKTSSVHRESENPDLTGQCSRRFTELNLKLDKHRDLINKIKQYGLKKI

SEQ ID NO: 84870 - protein, 505 aa, Rhodanobacter sp.
  misc_feature (1)..(505): tr|A0A1V3Q8X4|A0A1V3Q8X4_9GAMM Tryptophan halogenase OS =Rhodanobacter sp. B05 OX=1945859 GN=B0E47_02655 PE=4 S V=1
MTDHRIKNIVIVGGGTAGWMAAAALSKSLGRECSIRLIESEEIGTVGVGEATVPHLSTFNQLLGIDEADFVRSTMGTFKLGVRFVDWSRIGHSYVHGFGTRIGLDFGSLPFHQYWLKAFKAGHAKDIGAYSLNTLAAPLGKFMVSAVDAPANTPLANIPYAYHFDAGLYGRYLRRLAEAQGVRRTEGKIKETVLRPLDGFVDAVVLESGERIGGELFIDCSGFRGLLIEQALKTGYEDWTHWLQNDRAVAVGCERVGPPAPYTRATAQPSGWQWRIMLQNRTGNGHVYSSQYISDDEATATLLRNIDGKPLGDPRLLRFTSGTRKKFWNKNVVALGLASGFLEPIESTSIYLVQSAIARLLALFPQQDFSDVLIDRYNAQSRFELERVRDFLILHYYATERDDSPYWNYCRNMDIPEPLRDTIALFRKSGAFFRNGEEFFGPVSWVQAMLGQGIMPENHHFAVDQMSPKDLHEFVAHVEQVIASCVDAMPPHQAFIDRYCKAPGV

SEQ ID NO: 84871 - protein, 478 aa, Cellvibrio sp.
  misc_feature (1)..(478): tr|I3I8A4|I3I8A4_9GAMM Tryptophan halogenase OS=Cellvib rio sp. BR OX=1134474 GN=O59_003370 PE=4 SV=1
MNTLLDSDISGAYKDPLNSTPSKRQNLVDKPLTNIPTLTKNVQKHTVVIIGGGPAGSVAATRLAQTGVDVLVLEREQFPRFHIGESLLPNGNRILQAIGVWDKIAAAGFIEKRGAQFTLADRSRTVRNVFAQGWVKGLEMTYQVERARFDEILLRHAESCGAQVWEQCPVTKVTRTESGWQLEASRAGQPQVINAEWVIDASGRHCVMGRAMKLAKAALPYPGRMAVFNHFEHMQRDSGEPAGDVIVLRLEQAWFWAIPISPTVTSVGVVLQKNGGREKDESWEQLFWRKVKESPFLSDALAQAKPLGEYRIESDYSFSHETFGAERCLLVGDAASFIDPVFSSGVYLALESGLLAADQIAAQLKVKLPLLAAHREARLYTRYTKTLKSQIGTMRQLIDAYYDNSACEVFMSPRPTLSLPQAINSVLAGSLKPGFAVRWRLWLFQQICKLQKKRPLVPPIEWRSPGDSAATRSAESPH

SEQ ID NO: 84872 - protein, 502 aa, Cellvibrio sp.
  misc_feature (1)..(502): tr|I3I5T8|I3I5T8_9GAMM Tryptophan halogenase OS=Cellvib rio sp. BR OX=1134474 GN=O59_003821 PE=4 SV=1
MNSIKKIVILGGGVSGWIAASMLAAQVRRDLCEIELIESEDIGSVGVGESTIPPVVRLITSLGIDEEDFIRETQACYKLGIKFVDWRSKNQSYFHPYGALGQRIGTQDFYQCWLKATMAGGDYPLQDFSPCSVMAAQGRFFLPAQAMNTPIGGAGYAIHLDAKLVAAYLRRYAEARGVVRSEGNYVAVERRDNGFISALVLADGRKIEGDFFVDCSGFRALLIDGAMAAGFEDWAQYLPCDRAIVVKTGAAGSRMPYTTATARKAGWSWRIPLRNATGHGYVYSSRFCSDTEAKSTLLGNLDAPRINDPRLISFKAGRRLEFWKNNCLALGLAGGFVEPLESTAIHLIARGMDYFLRFFPDLECEPSLRREYNRRMAADYQEVRDFIVLHYCTSERSDSDFWRWCQTMPLPDSLRERIELFKGHGIVREERDELFRSASWQSVFEGMGIRPAKYSPRVDNIELAQINENLKLARSAILNMVKTLPTHDDYLAGRFGVPVVDQ

SEQ ID NO: 84873 - protein, 526 aa, Dyella sp.
  misc_feature (1)..(526): tr|A0A2N7QT99|A0A2N7QT99_9GAMM Flavin-dependent tryptop han halogenase PrnA OS=Dyella sp. AD56 OX=1528744 GN=pr nA PE=4 SV=1
MARLKKVLIVGGGTAGWLAACYLAKAVNAVDPQSVQVHLVESPDIGLLGVGEATFPSIRGTLAAIGLDERRFLVGATATYKQGIHYRHWVRPPGAPGADHFFHPFNAPSQRPGGPELLPYWLLGAAPEGMPFADAVSMQTALVDRSRAPKRFNDPDYQGPMNHAFHFDAACFARLLAEHGQETLGVKRHVATVERTELDEHGAIARVVTKELGELTADLYVDCTGLRGMLIGNVMQSPFRGRADVLFADRAVAMQVPYEKADTPIPSYTISTAQEAGWIWDIGLQKRRGVGYVYSSRHTSDERAEEVFRGYLGAAAEGLKAMHIKFETGYRPEHWRKNCVAVGLAGGFVEPLESTGIALIELATYLLTHLLPNDTDEMERAARHFNEMMVARYDRIIDFIKMHYCLSQRRDSSFWIDNAEATSIPLTLQDKLAQWKHRPPHRLDFVSDLEMFLVSSWQYVLYGMEFKTDFSAMRSAYPRVDEARQEFRNIQLAASQALHDLPDHRSLVERMCREYRERAGMDSALA

SEQ ID NO: 84874 - protein, 497 aa, Sphingomonas sp.
  misc_feature (1)..(497): tr|A0A0Q4K1H8|A0A0Q4K1H8_9SPHN Tryptophan halogenase OS =Sphingomonas sp. Leaf28 OX=1735695 GN=ASE79_05050 PE=4 SV=1
MAEQRVKKVVIAGGGTAGWLAAAALSRQLGQLLDITLVESEEIGTIGVGEATIPTMRSFHAILGLDEREFMRATQATFKLGISFENWARDGDRYIHSFGDLGKSTWMGEFHHFWLAAKAAGDPSEIGDYCLELQAAKAERFALPSEGEIHYAYHLDAGLYARFLRARSEANGLKRIEGRIASVDRDGETGFIRALVLDSGARVEGDLFIDCTGFRGLLIEGTYAAGYEDWSHWLPTNSALAVQSAATGPAHPYTRAIAHDAGWRWRIPLQHRVGNGLVYASEHLSDDEAHARLLGAIDGAPLTEPRLIRFRTGRRRQVWMGNCVALSLASGFVEPLESTSIHLVMTGVTRLMQAFPFGGIAAAVVTRFNDQAQAELERVRDFIILHYHLNQRPEPFWAARRDMPIPDTLVERIALFAEAAQAYQGGEDLFRVASWVQVMLGQRLMPRDHHRLGTIMGGPQLTGVLAKMRSDITDVVAAMPTHQQFLDRHLLRPPRAA

SEQ ID NO: 84875 - protein, 506 aa, Xanthomonas hortorum
  misc_feature (1)..(506): tr|A0A248YC62|A0A248YC62_9XANT Tryptophan halogenase OS =Xanthomonas hortorum OX=56454 GN=XJ27_14990 PE=4 SV=1
MIPAPLRNIVIVGGGTAGWMAAAAFARVLGPGFNVQLIESEQLGTVGVGEATVPHIKAFNNLLGIDEAEFVRQTQGSFKLGIEFVDWQRPGTSYIHGFGTQIGHPLGLLPFHQYWIKQHLRGKAQPLGAYTLNTVAAVRGKFMTSAGDVPANSPLANIAYAYHFDASHYARFLRSYSEQRGVTRIEGLVEQVQLHADTGHVQSLQLASGQVVSGDLFIDCSGFRGLLIEEALHTGYHDFTHWLPCDRALAVPCENAGPPTPYTRSTARAAGWQWRIPLQHRTGNGYVYSSAHISDDEAAATLLANLDGKALADPRPLRFTTGRRKQFWNRNVVALGLASGFLEPLESTSIHLIQAGISRLLELFPREGISPVLVQRYNDRLAFEFDRIRDFLVLHYHATERDDSAFWRHCRTMQITPELQFTLDLFRDSGRFYRNAEEMFAEISWVQVMVGQGVLPQGYHPLVDQVPDHDAERFLASIAQTIGHCVDAMPTHQQFIDRYCKAAAPR

SEQ ID NO: 84876 - protein, 505 aa, Pseudoxanthomonas sp.
  misc_feature (1)..(505): tr|A0A2S6B8Z4|A0A2S6B8Z4_9GAMM Tryptophan 7-halogenase OS=Pseudoxanthomonas sp. KAs_5_3 OX=2067658 GN=C0063_12 635 PE=4 SV=1
MSEHAIKTVVIVGGGTAGWMTAAALSKVLGESCDIRLVESEAIGTVGVGEGTIPHIRLFNSLLQIDEADFVRKTQGTFKLGVQFNNWGRIGETYVHGFGNGIGQSVGLLPFHQFWIKAARAGKAEGIGSYVLSSQAAPQGKFMVSANDVPQTSPLANIAYAYHFDAGLYARYLRSYSESRGVKRIEGIVTRVALDAESGHVDAIELDSGETIRGDLFVDCSGFRGLLIEEALGTGYVSFKHWLPCDRALAVPCENVGPPTPYTRATAREAGWQWRIPLQHRTGNGYVYSSAHISDDEAAATLLKNLDGRALDDPRPLRFVTGRRKRFWNKNVVAIGLSSGFVEPLEATSIYSIQSGIMRLLSLFPRDGFNPTLIDRYNAQMVFDFERIRDFLILHYHATQRDDTAFWRQCRDMPIPQELDDVIALFRDSGRFYRNGEEMFAEMSWVQVMLGQGIVPQSYHPLVDQLSDEDLSGFVSGVGRVVANCVDAMPSHQAFIDRYCKAALM

SEQ ID NO: 84877 - protein, 510 aa, Alteromonas sp.
  misc_feature (1)..(510): tr|A0A495UMQ5|A0A495UMQ5_9ALTE Flavin-dependent dehydro genase OS=Alteromonas sp. TK-46(2) OX=1276890 GN=CLW98_ 3068 PE=4 SV=1
MNHSSDTSKKQRIVIVGGGTAGWLTAAIVAAKHKVAMGECGLDITLVESSDIPTVGVGEGTWPTMRNTLKDIGLSEKEVFRRCSAAFKQGGKFVNWVNGDGDFYYHPFTVPLGYGRVEMAPYVGDIVNFANATNFQQHVCERNMAPRTLSEQEYSSAQSNYAYHLDAGAFADMLRDFSKTELGVKHIVATVESVAASSSEHVESVTLNNGMVLDADLFVDCSGFRSLLLGETLGESVVSADDVLFNNSALALHVPHEEDFEIKPYTQATAQEAGWIWDIGLSSRRGVGHVYSTDFTTDERAEEVLRQYVGDEHGDLKARTIRFNSGYKKRIWKGNCIAVGLSAGFVEPLEATALMLIEISARYIAEQMPLPTSAMPIVSQRFNKQMNYRWQRIIDFLKLHYIFNQRSEPYWVANRDEASIPDSLKEDLEIWKYRGPQIADFSAAIELFPAASYQYVLYGMGFSPDFSLQSHFYNERDLADKVIKQNQLITQQKLSSLPNHRDYIEQWLAS

SEQ ID NO: 84878 - protein, 506 aa, Xanthomonas cynarae; identical to SEQ ID NO: 84875
  misc_feature (1)..(506): tr|A0A2S7B226|A0A2S7B226_9XANT Tryptophan 7-halogenase OS=Xanthomonas cynarae OX=109214 GN=XcyCFBP4188_17155 P E=4 SV=1

SEQ ID NO: 84879 - protein, 506 aa, Cellvibrio sp.
  misc_feature (1)..(506): tr|I3IB03|I3IB03_9GAMM Tryptophan halogenase OS=Cellvib rio sp. BR OX=1134474 GN=O59_001916 PE=4 SV=1
MVHAMNYLTKVKKVVIVGGGTAGWMAAASFAKLLGKSVAVILVESDEISTVGVGEATVPPLILLNRYLGINEQELLTFVKGTIKLGISFENWKNINDRYIHSFGHTGKDTWAASFQHFWRRGLDIGVDDPLGDYSLEYAAALHNKFAHMSNPPLTYAYHIDAGFYAKFLRRIAENAGALRIEGKVENVVLDDSGYIKNIRLASGTVVEGDFFIDCSGFRGLLIEEALHTGYEDWSHWLPCDSAIAVQTESVREPVPYTRAIAHHAGWQWQIPLQHRVGNGFVYCSQYMSDEDARTLLLEKIDGQLISEPRVIKFKTGQRLKHWNKNCVALGLASGFIEPLESTSIHLIQRGITRLIQMFPYDGIRACDMDEYNNQMKTEILTIRDFVIMHYHLTEREDSGFWRYCKNMPIPESLEHRIRLFRETGKLFVESPYKLFAESSWLQVMVGQGLVPERYHAVANEMTDAELKTFLSDIRSQVKHSVQKMPGHHDYLQYYCKAAVWGDACE

SEQ ID NO: 84880 - protein, 501 aa, Burkholderiales bacterium
  misc_feature (1)..(501): tr|A0A1F4JP97|A0A1F4JP97_9BURK Uncharacterized protein OS=Burkholderiales bacterium RIFCSPLOWO2_02_FULL_57_36 OX=1797562 GN=A3I66_10000 PE=4 SV=1
MLNLLGAKRIVVVGGGTAGWLSALEMRHSFPLSVEVLLIESAQLGILGAGEGSIPNLDLALKRYQIDRTTFMSATQSTYKLGVCFEGWRSGGEEKYHHMFSTIREDLGLMEWQEHGFYPLSSTLLNRGMALDRFPDAAHLMQRKASQAEVAAHIQRSDKEVFAYHFDARRLATFLREKAESRGIKRVDALVQAVTVDLQGNVTTVNTDKGNFDGDFFIDASGFSRLILGKGLGIEWESFQKYLILDAALPFLLPQKDKNPSLITHSKAMNSGWMWTIPTQGRLGCGYVYSSAHISETEVLRELELHWKQEIVPVNRLRFSPGRLKKCLHSNVMAVGLASGFVEPLEATSIAQTLYQLAFFGNLMRENQRVIPERVLNIFNADVANFWDGIVDFLVMHYDTSRADTPFWMDVGKAARPDRYLELKEAFSARTPRIADLVPYQMGGVILFGVASWETVGSAMGIVSPESTVAQLALLEQSAHITLENFIERYQRSVSSNTTML

SEQ ID NO: 84881 - protein, 507 aa, Croceicoccus naphthovorans
  misc_feature (1)..(507): tr|A0A0G3XJ22|A0A0G3XJ22_9SPHN Tryptophan halogenase OS =Croceicoccus naphthovorans OX=1348774 GN=AB433_11085 P E=4 SV=1
MSGTVDHVVIAGGGTAGWLAACTIAARGPRDVARPLAVTLVEAPDIPTIGVGEGTWPTMRATLAAIGIAEEEFLTACDASFKQGSRFDGWRDGSAGDSYLHPFTSPVGDAPRDAVAAWTAAGGGFADAVTPQAEVCEQGLAPRQKAMPGYAGALNYGYHLDAGKLVDLLKRHALGLGVRHVAARIEGVDRAANGDIAALVLDSGEVLSGDLYIDCTGMRGLLIAGEMGAGRIDRSDVLFNDRALAAQVPTAPDSAIASVTVGTAHDAGWLWDIALPTRRGIGCVYASRFCSDDRALATLRDYVARALPGVPVPEPRLLRFESGHLDRFWIGNCLAIGLSAGFVEPLEASAIVMIELSLRALMDGFPETRAEMDIHARRFNQLFRTRWDRIVDFLKLHYVLSDRGGAYWQAHRETVPDNLADLLTLWRNHVPTSADFPMADEIFPAASWQYVLYGMGAPAPRLPTWQSAGGEVSRRARQLASALPTNRAYLDTLRNTAPVRQATGCPA

SEQ ID NO: 84882 - protein, 503 aa, Sphingobium sp.
  misc_feature (1)..(503): tr|A0A2G1LJP3|A0A2G1LJP3_9SPHN Tryptophan halogenase OS =Sphingobium sp. IP1 OX=2021637 GN=CG471_26540 PE=4 SV= 1
MHADFPTSDRVVKRVVVAGGGTAGWVTATALVRHLGPLIDITLIESDAIGTIGVGESTVPTFRGFHQLMKIREDRFMAEAQATVKLGIEFKNWGRVGDRYIHPFGTIGLQWSWMADFHHFWLHARAQGFGGELGEYCLEWVAGEANRMSLSSSVAPSYAYHIDAARYARFLRSLAEPAGVKRVEGKIRHVELVPESGHIAALVLESGTRIEGDLFIDCTGFRSLLLGEALGVGFEDWGQWIRTDRAVAVQSTSDGPAQPYTSAIAHEAGWRWRIPLQHRDGNGFVFASDFMSDDEAHARLLAEIEGEPIVDPWLVRFKTGTRTRAWHKNCVGLGLAGGFIEPLESTSIHLMMAAVTRLIEDFPFHGFDDALLDHFNRKSRLEFENIRDFIILHYRVTQRDDSPFWDHCRTMEIPDSLKERLALWQENGRAYQLGHELFRVDSWSSVLLGQGMHPRGYHHVAAMMPEPQLREELARMRKDIAGVVAEMPSHREFLRRYCPAELV

SEQ ID NO: 84883 - protein, 506 aa, Cellvibrio sp.
  misc_feature (1)..(506): tr|I3ICT0|I3ICT0_9GAMM Tryptophan halogenase OS=Cellvib rio sp. BR OX=1134474 GN=O59_001504 PE=4 SV=1
MLKSHSKKIIVLGGGTAGWVTGAILSKKWETHGYQIVVVDTAEIPTIGVGEASIPTIYDLLNYIEISDQDLVKHCQATFKYGIQFENWSRPGERYMHGFGNMGHNLGQAEFFKIWLSTARYFKNPDLTPFIPSAVAAYSDKFSRGSKAPENTNGLLYPLSNLLYALHFDASLLARLLREKALHNGATHISKHIVKVETDENGISALIAEDGETLSADLYVDCSGMHGALNKQALKANFDNWQAYLPCDTAIAVQTTLDKTPRLYTRSIAHAAGWRWEIQLQNRTGNGIVYCSKHMDYDTAKQHLLEGVEGELLTTPRKIEFTTGRLSSPWMLNSVAIGLSAGFLEPLESTSIHLICAYARKLRDSIDNNELNAVGRDKFNQSWRAETEGVRDFLMVHYLCNQRDEDSFWQERKSGPRPESLAQLLDELSKTGWISPPEASIFGTDSWLEVLIGQKFFLNYEKFSMPADKAPHYIQFLQNVSYAIKNEVNKIPDSHQSILGTLRAEI

SEQ ID NO: 84884 - protein, 504 aa, Duganella sacchari
  misc_feature (1)..(504): tr|A0A1M7QXP5|A0A1M7QXP5_9BURK Tryptophan halogenase OS =Duganella sacchari OX=551987 GN=SAMN05192549_108225 PE =4 SV=1
MRDTNNRQPVRRVVICGGGTAGWMAAAGISKVLGKLLDIKLIESEEIGTVGVGEATIPTLMNFHNVLEINEQEFMAETQATFKLGISFESWRDVKQDYIHSFGTTGIDHWTAGFQHFWHKGVERGVASDYGDYCLELKASLENRFAHLPNNGMNYAYHLDASRYAKYLRRLSEPRGVQRIEGKIVSYAKHDNGDVRSVTLASGQVIEGDLFIDCTGFRALLIGDAMQEDVEDWSQWLFCDRAIAVQTSSVGDAVPLTRSMAHQAGWQWRIPLQHRVGNGIVYSSRHLDEETAHKQLLANVEGKTLIEPRVIKFKPCQRRNTWKGNVVAIGLSSGFLEPIESTSIHLIQRSVIRLMQSFPSDGIQQADIDEYNAQCNREIDHIRDFIILHYHVNNRTDAQFWIDAREMRIPESLKHRIDLFKETGRVFRIPNELFAENSWIQVMLGQGIMPKSHHQTADLMADEELKAFLGGIKGRIDRTVVQLPTHQAYVERYCGRADAGAKAA

SEQ ID NO: 84885 - protein, 514 aa, Pseudoalteromonas luteoviolacea
  misc_feature (1)..(514): tr|A0A167JPK2|A0A167JPK2_9GAMM Uncharacterized protein OS=Pseudoalteromonas luteoviolacea S4060-1 OX=1365257 G N=N478_05160 PE=4 SV=1
MIKKIVIVGGGTAGWLAANHLAKKLQPYNTSQVEVTLVESPDIPTIGVGEGTVPMMRSTLQYLGISETQFIRECDVTFKQGIKFVNWLNNPDVKQHAYYHPFDYPFLEKFDLSAYYLLGAFEDFNSYSELVGFQSHVCNANLAPKSITHTEFQGVSNYAYHLDAGKFSSMLQKHATEVLGVNYISATMKQANVGANGEITSIETLEAGEIEGDFFLDCTGFSAKLSSGVLNVPFVDKKDTLFVDSALAIQVPYGKENESIPSYTLSTAQKNGWIWDIGLTSRRGIGHVYSSSHTSDEQALRDLSDYLKMPDEQVDARKISMRIGYREEAWTKNCVAMGLAQGFVEPLEATGLLVFDITARMLAEQFTFEHKAMEVNAKAFNRRVSHMWDKVIDFIKLHYCISKRSDSQFWLDNRCKNSIPESLQEKLTLWRYQIPKAYDFSSTLEVFNLENYLYVLYGMEFDTDISALSCIYQQKELARKEVAEITRYAQSLEKQLEPNRALLEKINQFGLSKV

SEQ ID NO: 84886 - protein, 538 aa, Burkholderia reimsis
  misc_feature (1)..(538): tr|A0A365R2M9|A0A365R2M9_9BURK Tryptophan 7-halogenase OS=Burkholderia reimsis OX=2234132 GN=DPV79_01065 PE=4 SV=1
MSNPIKNIVIVGGGTAGWMAASYLVRALQQHTSITLVESAAIPRIGVGEATIPSLQKVFFDFLGIPEREWMPQVNGAFKAAIKFVNWRKSPERSRDDHFYHLFGTVPNCDGVPLTHYWMRKREQGFQQPMEYACYPQPGALDAKLAPCLSDGTRQMSHAWHFDAHLVADFLKRWAIERGVKQVIDEVEQVHLNERGHIASLSTKEGRTLEADLFIDCSGMRGLLINQALKEPFIDMSDYLLCDSAVASAVPNADARVGVEPYTSAIAMNSGWTWKIPMLGRFGSGYVFSSKFTSRDQATADFLNLWGLSDKQPLNQIKFRVGRNGRAWVNNCVAIGLSSCFLEPLESTGIYFIYAALYQLVKHFPDTSFDPRLADAFNAEIVHMFDDCRDFVQAHYFTASRDDTPFWLANRHDLRLSDAIKEKVQRYKAGLPLTTTSFDDSTYYETFDYEFRNFWLNGNYYCIFAGLGLLPDRSLPLLQHRPESIDKAEAMFARIRREAERLRTSLPTNYDYLRSLRDGGAGLSRSQPGPTLAAPEIL

SEQ ID NO: 84887 - protein, 518 aa, Cellvibrio sp.
  misc_feature (1)..(518): tr|I3ICR9|I3ICR9_9GAMM Tryptophan halogenase OS=Cellvib rio sp. BR OX=1134474 GN=O59_001493 PE=4 SV=1
MTNNLIQSVVIVGGGTAGWLTAGIIAAEHQHKIKQGELQITLCESPSTPIIGVGEGTWPTMRATLKKIGVSETAFIRECDVAFKQGSKFLRWKDGSEKDFYYHPFSVPQGQSSINLAEHWLNTNDPMSFSTAFHPQEAICEASLAPKTITTAEYDAIVNYGYHLNAGRFAEFLRKHCLTNLHVDHILAEVTEITQQENGHIQSLITDRAGIITGDLFVDCTGFTAMLLGETLGVEKISISDILFTNCALATQIAYPYEDSPIASATLSSAQTAGWIWDIGLPTRRGVGHVFAKEYQSIDHATQQLINYIDETGGDSSHISIREIHFNSGYRKEFWKHNCVAVGLSAGFLEPLEASALVMVELSALMIAEQLPRTTSAIPIIAKRFNERFSYRWERAVDFLKLHYLLNQRNDSPFWQDNRQPSTTPLDLSERLLLWQNTSPQHYDFDRTGEIFHALSYQYVLYGMGFKTNLVFSTPAEIQKMAAELVMKNKMITRQLLDILPTQRKLLQKINLYGLSSI

SEQ ID NO: 84888 - protein, 502 aa, Rheinheimera tuosuensis
  misc_feature (1)..(502): tr|A0A285JNR9|A0A285JNR9_9GAMM Tryptophan halogenase OS =Rheinheimera tuosuensis OX=1323745 GN=SAMN06297280_014 3 PE=4 SV=1
MTNNSSAIQRICILGGGTAGWMTAAALSKVFAEQSIQIELVESESIGTVSVGEATIPQIRAFNHLLGLDEMDFIRHTQGTFKLGIEFIDWYKPGTAYLHPFGPYGANMAGVPFHHYWLKHGCQRPLEDYCLEAMAARAGKFIPVLKRAGAPPRQVNYAFHFDAVAYADYLRKFAEQRGVKRSEGRMQNVVLDPVTGFVQALLMQNGQKIEADFFIDCSGFKGLIIEKALHSGFEDWSHWLPCDRAIAQPCAATEAPKPYTQSIAQAAGWQWRIPLQNRVGNGHVYSSHYVDDDEALRVLHNTMLGAPLAEPNLLRWQTGRRREPWKKNCVAIGLSAGFLEPLESTGIQLIQSAISRLLSLFPDKSFAAETIDTYNRYSSLEMEQIRDFIILHYKANERQDADFWRYCRTMKVPDSLKDKIQLYRQTGRIFRENNELFSEISWLSVLNGQGIFPESYHPLADQFPAAKLDAQLAMLQQQVADSVAEMPGHADFIAHNCQANSS

SEQ ID NO: 84889 - protein, 506 aa, Sphingomonas sp.
  misc_feature (1)..(506): tr|A0A0Q4JUS8|A0A0Q4JUS8_9SPHN Tryptophan halogenase OS =Sphingomonas sp. Leaf28 OX=1735695 GN=ASE79_09245 PE=4 SV=1
MDMRKTRVVVVGGGTAGWMTAAALVRLLPVACSVHLVESADIGIVGVGEATLPHIRAFVERLGLDEADFMRATHATFKLGIDFRDFGAIGDSYIHPFGSFGRPLDDIGFHHYWLRLAAAGRAGPIGDYSVAVAAAKRHRFAIPDGAPDDLAASFGYAYQFDATLFGPYLRHFAEAHGARRTEARIVSVDRDPLNGDVRALRLDSGEAVEGDLFVDCSGFRSLLLGDAMTEPWEDWSRWLPCDRAVAMPCTSPDGPIEPYTRATAKPAGWQWRIPLQHRVGNGYVYSSAHLSDQAAADALVTSVEGAPLADPRVLKFRAGRRRSSWVGNVVAIGLASGFLEPLESTSIYLAQMAITQLIELFPQNMRADGIAAADRIEFNRMVDMEYDRIRDFLILHYHATTRDDSDFWNHVRTMEVPATLADKIDLFRRAGRVTQYSEGLFLEPSWIAVYLGQGIVPQAWDQRADRPGLDGLDRAIASLRDRVAATATAMPDHGTFIARRNATIAA

SEQ ID NO: 84890 - protein, 493 aa, Cellvibrio sp.
  misc_feature (1)..(493): tr|I3IDW0|I3IDW0_9GAMM Tryptophan halogenase PrnA OS=Ce llvibrio sp. BR OX=1134474 GN=O59_000266 PE=4 SV=1
MSEKMMKVVIAGGGTAGWITASALAHQMGEILDITLIESEDIGTIGVGEATIPPMRTFHRLIGINEKEFVAATNATFKLGIQFENWKQIGEKYFHSFGVTGKQTIVTDFIHFWLRGQRLGIAQPFGDYCLEFKAALEERFAITDQIKMNYAFHLDAGRYARFLRERAEVRGVKRIEGKIAEVRVNSETGFISTIVLESQQEIEGDLFIDCTGMRGLLIEQTLQTGYEEWRQWLPCDRAIAVQTESTSPALPYTRSIAHHAGWRWKIPLQHRVGNGIVYSSPYLSDDEATQMLLNAVDGKVLTEPKVIKFKTGRRKKAWNKNCIAVGLSSGFLEPLESTSIHMIMTAVTRILQLFPHGKINQSTVDEYNAQAESEFARIRDFIILHYKATERDDSPFWRYCKEMSVPEDLRHRIQLFKENGRSNQVEGELFRLDSWTQVMLGQGILPDGYHPIVDLMPEVQLRAFLGGLANDINNQLAVLPSHQEFIEEFCRRA

SEQ ID NO: 84891 - protein, 504 aa, Cellvibrio sp.
  misc_feature (1)..(504): tr|I3I5N9|I3I5N9_9GAMM Tryptophan halogenase, putative OS=Cellvibrio sp. BR OX=1134474 GN=O59_003772 PE=4 SV=1
MQDNNIRRIAIVGGGTSGWMTAAALSKLIKPDYCQIQLIESEEIGTVGVGEATIPQIQLFNKLLDLDENEFIRKTQGTFKLGIQFVNWKKIGHKYIHAFGEVGKDMEGVQFYHYWLKMAELGKAEELGNYTIGGLASDRGKFMRPFDAGNSPLSNIAYAFHFDAGLYARFLREYSEARGVIRTEGKVVDTILRASDGFIESVQLESGERIEADFFIDCSGFRGLLIEQALKTGYEDWSHWLPCDRAWAVPCERVGEPTPYTRSTAHSAGWQWRIPLQHRTGNGHVFSSKFMSEDEACSILLNNLDGKPLAEPRLLKFVTGKRKKIWNKNCLAVGLASGFMEPLESTSLHLVQSTIARLMSFFPNKYFDQEDIDEFNRQAGFEVEKIRDFLILHYHATERNDSVFWNYCRNMSIPKELTQKIEQFKKNGRIYRNNVEMFNELSWLEVMHGQGIYPRTYHPLVDRMTDDEITKRLEGIRSVIEKSVEYMPTHAQYIAENCRAEKIY

SEQ ID NO: 84892 - protein, 498 aa, Alteromonas sp.
  misc_feature (1)..(498): tr|A0A2K8Y599|A0A2K8Y599_9ALTE Tryptophan halogenase OS =Alteromonas sp. MB-3u-76 OX=2058133 GN=CW735_08015 PE= 4 SV=1
MTNNTVTNVVVVGGGTAGWISAAVIKRLLGSQVNVNLVESEDIGTVGVGEATIPPIALLNNMLGLDEKEFLRETNATMKLAIRFENWKTQGDSYYHTFGAPGKSYAFCHFHHYFKRAQQLGLKDSIWEYDLNYLACEAGKFAHIKTPDPVIEMPYAYHFDASLYARFLRKKCEAMGVARTEGVIERVEQHPENGFIKGVCLKNGQMINGDLFIDCSGFKGLLTQQTLNTGYEDWSHWLPCDRAVAMPSERFEKTVPFTRSIAHSAGWQWRIPLQHRNGNGLVYSSNYYSDDEALGILSANLETKPLADPNFIRFKTGRRRKQWNKNVIAVGLASGFLEPLESTSIHLIQSAIVRLIHLFPHHGVKQKQVDEYNEQSRIEYEQIRDFIILHYHVNERTDSQFWRDVREMDVPDSLTHKIELFRDSGNLFREQNDLFLESSWLQVLMGQGVSPNDYHPLANGISEQKLMDLMENIKRIKREPVSKIASHDEFLKQFCAQQ

SEQ ID NO: 84893 - protein, 548 aa, Hyphomicrobium sp.
  misc_feature (1)..(548): tr|A0A3S0TL99|A0A3S0TL99_HYPSQ Tryptophan 7-halogenase OS=Hyphomicrobium sp. OX=82 GN=EKK38_17620 PE=4 SV=1
MGKPIRKITIVGGGTAGWLAAAFLNRYCTSEDPRKSIEITLIESPDIPIVGVGEASLPGMVVLLHQLGISESEFFKATNATFKVAAHFVNWNHDRRGNSTEFLNILNAPPILDGHHLADYFITFDPARSDPSAGMSYVRAFSPVVEIVKGDLSPRAPEDPEFSGEIGYTYHFDATKVAEFLKELATRRGVIHILDTVDSIALDEKGFVKSLDLREHGEHAIDLVVDCTGFRGSILQKTLGEPFISYADHLLNDRAAVIQIPHNDVTRISPATKATGFSAGWNFNIPLTSRVGTGYIYSSRFISDEDAADELLRHYAGQVKGAEPRVIPIQTGRVRNAWVKNCVALGLAGGFIEPLESTAIFMTDLAVRWLRRFMPTKDFEPEFTTAFNRQVHRLYDEVRDLVQLHYHLNNRQDSKYWRAAREELKLSDRLQENLSIWRTRSPEDLDLASTFLFGGPVYALLLISKGYYSDAHLANAHHLKRSVYDRYRQAIRAARANQLRKLVPQSEFLRGNHFVWGERASRPPPIPAFFPAATKIKLPLHPPKPKKN

SEQ ID NO: 84894 - protein, 493 aa, Alteromonas mediterranea
  misc_feature (1)..(493): tr|S5CEN6|S5CEN6_9ALTE Tryptophan halogenase OS=Alterom onas mediterranea UM7 OX=1300258 GN=I635_19700 PE=4 SV= 1
MNKSVKTIVIAGGGTAGWTAAAAIAKQMGPTVNITLVESDEVGTVGVGEATIPPMRVFHKLLGIDEKDFMRATSATFKLGIQFENWGQKGDNYIHSFGVTGRESFVAPFHHFWLYGKEQGVANDFGNYCFELEAAKQDKFATSQNANIQYAYHLDSSLYATLLRNYSETRGVTRKEGKIEQITQNKETGFIESLKLASGDVIHGDFFIDCTGFRGLLIEEALKTGYEDWSHWLPCDSAVAVQTESDSAPRPITKAIAHDSGWQWKIPLQHRTGNGLVYCSKYLSDEHATQRLLDNITGNTITKPRIIKFKTGRRLKAWNKNCLALGLSSGFVEPLESTSIHLIIMGIIRFLKLFPNGGVSELIADEYNRQTLEEVVKIRDFIILHYHATYRKDSPFWQYCHDMEVPDTLKHRMQLFKEFGHAFQEDGELFRVDSWTQVMLGQGIMPESYHASVKGMPAKELQRFLQGIELSVLKGLENMPSHETFLKHYCSSR

SEQ ID NO: 84895 - protein, 512 aa, Duganella sacchari
  misc_feature (1)..(512): tr|A0A1M7QXZ9|A0A1M7QXZ9_9BURK Tryptophan halogenase OS =Duganella sacchari OX=551987 GN=SAMN05192549_108228 PE =4 SV=1
MLRRIVIVGGGSAGWLTAGLIAAEHRAAPAALHITLIESPDVAPIGVGEGTWPSMRDTLRRIGVAESDLFRACDAAFKQGSRFNGWVDGSADDSYFHPFSLPQGYGEVDLPAQWQAQHPQRAFADLVSYQPLLCVQGRAPKQVVTPEYAAVANYGYHLDAGKFGLFLRQHCQEKLGVHYVADHVLSVVSHDNGDIAALRTQQHGAIEAELFIDCTGMQSLLLGQHYGVPLVPQQHVLYNDAALAVQVPYPADDDPIASHTCSTAQSAGWIWDIGLPTRRGVGHVYASRYISDDQAEAELRAYIARTSGQTDIATPRKLRFTPGYREKFWHRNCVAIGLSAGFIEPLEASALAIVEMSAAMVSEELPATRAAMDIVAKRFNEAFTYRWERVIDFLKLHYVLSQRRDTAYWRDNTDPAKVPERLQELLTLWQHRAPSRSDFYRIEEVFPSASYQYILYGMGFRSDFSRAPKPQEAAMADGYFHEAASLARKMLGALPDNRALIHHIKRHGLQKI

SEQ ID NO: 84896 - protein, 490 aa, Asticcacaulis sp.
  misc_feature (1)..(490): tr|A0A2T5XJQ1|A0A2T5XJQ1_9CAUL Tryptophan halogenase OS =Asticcacaulis sp. CF398 OX=2135738 GN=C8K45_1836 PE=4 SV=1
MQPVKKVVIAGGGTAGWCAAAALSKLLGQVLDITLIESEEIGIVGVGEATIPTARTFHHFLGIDERAFLKATNATYKLGIAFENWAREGDRYIHSFGEIGKSNWMAPFHHVWMAARDKGFAGDLGDYCFELQAAEQGRFFTSDTARINYAYHFDAVLYGRFLRQFSEANGAKRIEGRIRHVRQDAESGFITGLELESGEVVEGDLFIDCTGFKGLLIEETLKTGFEDWSHWLPTDRALAVQTAPAGQLDPYTRAVAHGEGWRWRIPLQNRVGNGLVYSSAHLTDEAARERLLRLLDAEPLIEPRLIRYRTGRRKKIWNKNCLTVGLSSGFIEPLESTSIHLFQVAVTRLIQMFPFGGITEAVTDHYNDIARREIEKVRDFVVLHYKLTQRDDTDFWRERREMSVPDSLTERLEMFREQAHAWQAADDLFRVDSWVQVLLGQRLEPKSHHAIGSLMSDAQLRQALDGLKSHIARTVAAMPTHEAFLKSYLA

SEQ ID NO: 84897 - protein, 503 aa, Asticcacaulis sp.
  misc_feature (1)..(503): tr|A0A2T5XHY2|A0A2T5XHY2_9CAUL Tryptophan halogenase OS =Asticcacaulis sp. CF398 OX=2135738 GN=C8K45_3085 PE=4 SV=1
MNRPLQVVIVGGGTAGWMTAAAFAGVISPRQAEVRLIESDEIGTVGVGEATLPQIKEFNDRIGIDEAEFMRATNASFKLGIEFVDWGKRGNRYVHPFGAFGQPMGGVDFHQCWLRAQASGLDSPLEAFSYPIVASYAQKFDFPAKDQTSVAAAYAYAYHFDAFLYARFLRGFAEARGIVRKEGRIVDVALNPQNGHVQSVTLASGEMIEGDLFIDCSGFRSLLLGQALETPYEDWTPWLPCDRAVAVPCARNEAAFTPYTRSTAREAGWQWRIPLQHRTGNGYVYASSFISDDEAIRTLMDNLDGAPEAEPRPLKFKAGRREKCWNRNVIGVGLASGFLEPLESTSIYLIQIAVINLIRLLPRDGQIDPVIEAEFNRLVDLEYERIRDFLILHYKANTRDEPLWRQTRGMAVPDSLAARMERFRHRGLVPNYRDGLFAPPSWISVMFGQDLRPEGYDPLADNIDLERLIGRMRDMERQIHQHVEKMPSHADFVREFASAREVA

SEQ ID NO: 84898 - protein, 506 aa, Duganella sacchari
  misc_feature (1)..(506): tr|A0A1M7R294|A0A1M7R294_9BURK Tryptophan halogenase OS =Duganella sacchari OX=551987 GN=SAMN05192549_109196 PE =4 SV=1
MNVTSTPRKIIIVGGGTAGWMTALMYGDALIKQGVEITVLESPTVGVIGVGEGSTPALKRYFDSLGIQESEWMPACNATYKSGIGFDGWSTKPGYDNYFHQFATMVDNLTLPNFMENVHARQRGVHIDARPNRYFLSARLSEDCLAPKSSENFPFFTNYGYHFDATLLGQFLHKRAVALGVQYKSCHVTHAVMNERGDIAAVATKEGEHLAADFFVDCSGFSALLIGKALETPFVSYADNLFNDSAIAMPSEIGDKIPTKTVSSAMRHGWAWKIPLTNRYGNGYVYSSSFVSADEAEHELRSKLGLLESDTQARHLKMKLGRVTKHWNRNVLAVGLSQGFLEPLEATALYLTQMTAAIFLLFLEKGDLSDQARDVYNQQIHDYFDSHRDYIVAHYKTNSRTDTPYWRANAENLDSVSDSLKHIFQTWIEGRDLAAEIRRQNIEHFYPVGSWYSLLAGMGSFPDIGPATGPDLVAPLDDFMRRCALNFRDHRTVLNEMAEQAKASSM

SEQ ID NO: 84899 - protein, 518 aa, Cellvibrio sp.
  misc_feature (1)..(518): tr|I3I722|I3I722_9GAMM Tryptophan halogenase OS=Cellvib rio sp. BR OX=1134474 GN=O59_002938 PE=4 SV=1
MSESIKKIIIVGGGTAGWLAAGLLAAEFRHNEAGVSITLIESPDVNTIGVGEGTWPSMRATLRKIGISETDLIRECFASFKQGSKFVGWKTGAADDIYHHPFSIPHGYAECNLAAAWQAQFADRPFAEVVSSQFVVAEQGCAPKQITTPEYAGVLNYGYHLDAGKFAALLQRHCTTALGVIHVLDHVTQVAADDSGDITGVDTKASGVIYGDLFVDCSGLSCLLLGQHFGVPFVDKKHLSLNDTALAMQVPYPEQSSPIESCTVATAQSAGWTWDIGLSSRRGVGYVFSSSYLSEEKAEIELRAHIAKSVGQSVANSLSSKKLSIRAGHRQEFWHRNCVAVGMSAGFIEPLEASALALVELSMNMICEEFPADKVAMKIAAKRFNEVFSYRWDRIIDFLKLHYALTERNDSDYWRDMSAPEALPEHLRELLLLWKHRPPHRSDFIQVEEIFPSASYQYVLYGMGFSMDASRLPRTSDNLPMATARIRETVEKTRKYLSGLPSNRALIDHVMKHGMPLI

SEQ ID NO: 84900 - protein, 522 aa, Streptomyces sp.
  misc_feature (1)..(522): tr|A0A1C6PCF2|A0A1C6PCF2_9ACTN Tryptophan halogenase OS =Streptomyces sp. WMMB 714 OX=1286822 GN=H181DRAFT_0353 4 PE=4 SV=1
MAKSVVIVGGGTAGWMTASYLKASFGDRLAVTLVESRNVPTIGVGEASFSTIRHFFAYLGLEERDWMPECHATYKLAIRYDDWRAEGHHFYHPFERPRVVEGVSLADWWLHKKPSADYDRDCTVIAALCDAKRSPRGMDGQWLGPEFGEHGSGAMARSTMAEQTTQFPYAYQFDATLLAKLLTRYGTDRGVRHVLDDVVAAELDEGGNITHVRTKESGDLAGDLFIDCTGFRGMLLNKKLGVPFVSYQDTLPNDSAVALRVPREMADQGMGPYTRSTAKEAGWIWTIPLVGRIGTGYVYASDYCTPDEAERTLREFVGPAADDLEANHIRMRIGRSENSWVNNCVAIGLSSGFVEPLESTGIFFIQNGIEQLVKHFPGGRDDDQLRRSYNRQVAHVMDGVREFLVLHYVAAKRNDNDYWRDAKTRAKPDGLAERLEQWKVKLPDENTVYPYYHGFEPYSYTAMILGLGGLEVRSLPGLAMMDDVAATKELRLIRDQAKAQVERLPSHWDYLEHVLDSKAARS

SEQ ID NO: 84901 - protein, 532 aa, Actinomadura sp.
  misc_feature (1)..(532): tr|A0A372GFL1|A0A372GFL1_9ACTN Tryptophan 7-halogenase OS=Actinomadura sp. LHW52907 OX=2303421 GN=D0T12_18690 PE=4 SV=1
MDDTRIRKVVILGGGTAGWMAACYLGKALGPTVSVTVLEAPAVPRIGVGEATVPNLHKVFFDFLGLSEDEWMRECNASFKLGIRFLNWRTPGAGEALARRGSDGRPDRFDHLFGLLPDHENLPLSHYWAYRKLTGATDEPFDRACYPQPAVMDANLSPRFLDGTKWANYAWHFDANLVAEFLCRFATGKLEVAHVQDLYTHAEFDHRGFVTAINTETGRRLEGDLFVDCSGFRSLLMNQAMREPFLDMSDYLLNDSAVATAVKNDDAADGVEPYTSAIAMSSGWTWKIPMLGRFGTGYVYSSRFQSQDEATVEFCRMWGLDPEDQPLNQIRFRVGRNRRAWVRNCVGIGLSSCFLEPLESTGIYFTYAALYQLVKHFPDKRFEPILIDRFNHEIEKMFDDTRDFIQAHFGFAPRDDTPFWRTCKELEFADDFKEKVAMYKAGLPVETPVADENNYYGNFEAEFRNFWNNSNYYCVFAGLGVLPDHPLPALSLRPDAADTAEAVFTDVKRRQAELSESLPSTYEYLRRLHGGE

SEQ ID NO: 84902 - protein, 503 aa, Sphingomonas adhaesiva
  misc_feature (1)..(503): tr|A0A2A4I956|A0A2A4I956_9SPHN Tryptophan 7-halogenase OS=Sphingomonas adhaesiva OX=28212 GN=COA07_09275 PE=4 SV=1
MSDRPMRIVIAGGGSAGWMCAAALIHLLGDGFAVTLVESDDIPTVGVGEATIPQIRLFNQALGIDEDELIRATGATFKLGIEFAGWGAPDDRYMHAFGDVGRDSGTLAFHHLWLRGHRAGVARPLGDYALNAVAAKADRMRRGAPRPASMLPDMPYALHFDAALYAAFLRRRAEAGGVTRVEGRIVDVVRDGGSGDVAALMLAGDRRVDGDLFVDCTGFRALLIGGALGVGYEEWTRWLPCDRAMAVASAPIVQAGPYTRAIAHDAGWQWRIPLQHRTGNGIVYSSRHLDDAAAAERLLANLDSAPVGDPRPLRFTTGRRQVAWHANVVAMGLSSGFLEPLESTSIHMIQSAIERLVTLLPGRATAPALRDEYNRRTAFEAERIRDFIILHYIANRRDAPFWRERRDGDIPDTLRAKLELWRGAARILRDRDELFTEAGWLQVLVGQGVIPAAHHPMADAPTPAQLAEFLDILPRLNLREVAQMPRHDDIIARHCAAPAGLAA

SEQ ID NO: 84903 - protein, 523 aa, Cellvibrio sp.
  misc_feature (1)..(523): tr|I3ICS9|I3ICS9_9GAMM Tryptophan halogenase OS=Cellvib rio sp. BR OX=1134474 GN=O59_001503 PE=4 SV=1
MGGGTAGWMTAMLFQHAFQDCTITLVESAVTGIIGVGEGSTPALKAFMDALGISESEWMSVCQATYKSGISFRGWSTRNGFEEYFHPFFSHFDRDHIKALIFNSELRRAGKRAHAHPNLFSYASYLAANSLCPITPYAFPFEVQYGYHFNAAMLGSFLKEKAIERGVVWKSAHVENIALNAEGDIAHLAFEGGAILEGDFFVDCTGFASLITGKTLGTPFIPYSDVLFNDRAVTLASPVEEVISTQTVATALNNGWAWKIPLQNRVGNGYVYSSAFCSEAEAEEELRAYLNMNNGEGESRHLKMRVGRAKTMWNKNSLAVGLSQGFLEPLEATALALVQLTLVRFVKLYKAGAYTNQYAEQLNSEIAEAFDNVKDYIHTHYLTSDREDTPYWRACRHNSAAASNRLKLVLQTWLSGADISEALQSTGLNRHYKVNSWVYLLSGMGIFPPEHQLVQASPDDLAKVPLDSIVDFFERCALNHMPQAEALNILRTGASPFSVEGRNKASKEQALARLLGLSFAVSS

SEQ ID NO: 84904 - protein, 522 aa, Nitrospirillum amazonense
  misc_feature (1)..(522): tr|A0A560KGQ5|A0A560KGQ5_9PROT Glycine/D-amino acid oxi dase-like deaminating enzyme OS=Nitrospirillum amazonen se OX=28077 GN=FBZ87_101120 PE=4 SV=1
MTVERTILIVGGGTAGWLAAAYLAKYLGVREGGPIGITLLEAPDIGIVGVGEGTFPTIRGTLRFLGLNEAQFMRDTSATFKQGIRFARWVDGGEDDSFFHPFEAPFPTDGAGLVPYWLLQDGDRRPPFAQAMTFQQQVTDARRAPKRGPEGDFEAPLNYAYHFDAAKAAQSLAVRARELGVRHLRGTVTDVALAADGAIAHLVTREYGAITADFYVDCSGFRAELIGRALGVPQKSVKSILFTDRALSCKVPYEAADAPLESCTVATAHAAGWTWEIGLEGARGVGCVYSSDHMSDDEAEGVLRAYIAPHLGPHIEPPAPRKTAFDAGYRETPWVKNCVAIGLAGGFLEPLESTSVVLIEVAVGMLAELFPHDGRWDAPAARFNELMTRRFENIVNFLKLHYCLSKREEPFWRDNRDPASIPPALRDLLAQWRTRPPSRFDFALDLEAFAFFNYQYILYGMGFETDLSLARAAFPQVEAAQKTFARIRAYGDHATRDLPAHRALIRRMNQISAPDGRVASRR

SEQ ID NO: 84905 - protein, 517 aa, Cellvibrio sp.
  misc_feature (1)..(517): tr|I3ICV8|I3ICV8_9GAMM Tryptophan halogenase, putative OS=Cellvibrio sp. BR OX=1134474 GN=O59_001532 PE=4 SV=1
MTTTIKSIVIVGGGTAGWITAGTLAAKIRKHYSEGINICLVESPKTPIIGVGEGTWPTMRNTLKKMGVRETDFIRECNASFKQGAKFVHWCTGQKNDFYYHPLVLPLGFSEINLAPHWLADSNNQSFSNAVCVQETLCEEGLAPKLITTPEYAAVANYAYHLDAGAFAEFLKKHCTTKLGVTHLLADVINVNAADNGDIASITTDTQGDIAGDLFIDCSGFISLLLGKHYEVPFVSCKDVLFIDTALAVHLPYENDNSPIASHTISTAQDSGWIWDIGLPTRRGIGHVFSSAHTSTEQAEEKLHQYLKQHSSKTDQLSVRKIPITPGHRAKFWEKNCVAVGLSAGFLEPLEASALVLIEISAAMIADQLPATRIAMDIIAKRFNETFLYRWQRIIDFLKLHYTLSKRDDSDFWRENKHPNSIPESLQELMTLWRYQSPWHMDFDRAVEVFPAASYQYLLYGMGHTTAASPQGMSSRNRQLAQELFNKNTTLAQQLKNQLPSNRELINKIKDYGLQPV

SEQ ID NO: 84906 - protein, 517 aa, Mitsuaria sp.
  misc_feature (1)..(517): tr|A0A1A9HSS5|A0A1A9HSS5_9BURK Tryptophan halogenase OS =Mitsuaria sp. 7 OX=1658665 GN=ABE85_25300 PE=4 SV=1
MQPIQDILIVGGGTAGWLTAAFLARQLGTAHGGVRITLVESSDIGIIGVGEGTFPSIRGTLSAIGIGEAEFLDACSATYKQGIRFEHWVRPPGTPGADHYFHPFSQPSQRPGAPELLPYWLMGDAGKGRAFAEAVTLQKAVADARHGPKRASDGDFLGPLNYAYHFDAGRFAALLAEHGQALGVKRVIATVDRVDLDEQGAIAAVHTKEAGTLTAGLYVDCSGFRARLIGEALGSPFKSMRDVLFVDSALAMQVPYARPDAPIASYTIANAQDHGWIWDIGLQERRGIGHVYSSRHCDDEEAERALRRYIGPASDALTPRKLALNIGYRETQWVKNCVAVGLSGGFLEPLESSGIGLIETAAYLIGQLFPFNGDTAPVANHFNAFMKERYARIVDFIKLHYGLTQRTDTAFWRDNADPASFTESLKEKLAMWRCRPPQRLDFITDVEMYLPASWQYVLYGMEFETQLGSGAAALRRGEEARREFATIAQLGAHALRDLPPHRVLIEQLLARTGRRVA

SEQ ID NO: 84907 - protein, 497 aa, Cellvibrio sp.
  misc_feature (1)..(497): tr|I3I4S1|I3I4S1_9GAMM Tryptophan halogenase OS=Cellvib rio sp. BR OX=1134474 GN=O59_004160 PE=4 SV=1
MLMSNKPVNHIVIAGGGTAGWMTAAYLARWLEPTNIQVTLVESELIGTVGVGEATVPGIHQFIKHLGVKESEFIAATHATFKLGIEFEGWVAPEQTFFHPFAGYGVPIEDRPFHKTWWSAKQQGYSASLAEFCLCTQLAGAGKFAQPSFDPDSRLAWYNYAYHFDASLFAKYLRGYAEQRRVTRIEGKIQQVTLDPDSGFIQSLQLESGQVIGGDLFVDCSGMSALLIEKALGVGYEDWSQWLLSDSALAVQTRTVAEPDPFTRSTARSAGWQWHIPLQHRVGNGYVYSSQFISEDQARAELLANIEGERLTEPRLIRFTTGMRDHFWHKNCVAIGLSSGFLEPLESTSISLIQTGISKLAAFLVNFEINDQHVTEANRLNRLEYERIRDFIILHYKLNGRPEPLWQHVQAMDIPASLTEKIARFKATGDIQLLEQESFVEESWISMFAGFGLSPAALTPSRDSAKMHTVMDKMRAAIVKGREYAPSHADFLRTLGS

SEQ ID NO: 84908 - protein, 544 aa, Rheinheimera tuosuensis
  misc_feature (1)..(544): tr|A0A285I696|A0A285I696_9GAMM Tryptophan halogenase OS =Rheinheimera tuosuensis OX=1323745 GN=SAMN06297280_059 9 PE=4 SV=1
MQQRKVLIVGGGSAGWMTAAYLNGALNKQGTEQNVLIELLESPDIPRISVGEATIPSMRHLLAVVGVDEREFMQATDATFKQSIKYCNWVHNDNSFYHHPFTSMRVQPIDRAGSDWLQSDRSIPFMETCSAQPIICEMGLAPLMLGKWDMGSPLNYAYHMNAQKFADYLRDFSTARGVVHTLANLTDVEMQGDDKIVAVITDQQQRLTADLFVDCTGFKAKLIEEKMGVGFEDCSQWLLCDRAVIMHLPYDKFYPGMVRPYTTATALSAGWIWDIPMQNQRSVGYVHSSQFISKQQAEQEMRAYQGPGTEGLTARFVDFKVGRRQGNWRGNCVAIGLSGGFIEPLESTGLYLSDFGAVLLAEHFPYDDDSMQVLAGRYNRLMANRFYEVLDFINMHYCMTKRTDTAFWREVQKPERITERLKAKLAFWRIKPPSAHDFQDQWYPGMATSGTDTTSSQTADSRAAVDTGGLWNHESYECILYGMGFLEQECQQRYGPELAPSGVHPAIIQRLQMARQKLPPHAIWLNRVLDMPQYPTAYRPKGWV

SEQ ID NO: 84909 - protein, 532 aa, Alteromonas sp.
  misc_feature (1)..(532): tr|A0A2K8Y5F1|A0A2K8Y5F1_9ALTE Tryptophan halogenase OS =Alteromonas sp. MB-3u-76 OX=2058133 GN=CW735_18205 PE= 4 SV=1
MHDNFEDNETAIQSIVVAGGGAAGWLTAAVIAAEHNVKSNHNISVTLVESPDVKILGVGEGTWPTMRDTLRKIGVDENEFLVACDASFKQGTRFTDWRYAPSNQRTDVYDHPFSLPAGFFEGNIGAWWLLNQHNDSGAPSFSHVVSAQSFLCDSHKAPKQAQTPPFAAVANYGYHLDAHKFAEFLRNHCVNVLGVAHVRDHIKAVTVDGIGNISALECTNGNITGDLFVDCTGFAATLIGGYYHSEFTDVSCGLKNDSAVAIQATYKNENEDIASATLSTAHKNGWIWDIGLPHRKGVGCVYSSEFCSEEKAVETLLSYVSSCDKLSSISGDAIRKISFNPGYRKKAWVNNCVAVGTSAGFVEPLEASALVMVELSAKFIAQNLPAHRDLLKAVAKQFNANFSQRWERIVDFLKLHYVLSERRDSEYWRYMSSLETASDQLQEWLMQWRYRPVSTSDFIYADELFPAASYMYVLYGMKPPSAFHLERLRYSTSLMSSTYNAVRQTQKYGQQQLSALPSNRTLINSIRSVNRA

SEQ ID NO: 84910 - protein, 508 aa, Sphingomonas sp.
  misc_feature (1)..(508): tr|A0A0Q4JPB7|A0A0Q4JPB7_9SPHN Tryptophan halogenase OS =Sphingomonas sp. Leaf28 OX=1735695 GN=ASE79_09255 PE=4 SV=1
MTDANPGPIRKVVIVGGGTAGWMAAAAAARYLDDGQRQIVLIESDAIGTVGVGEATIPPILGFNALIGVDEREFLRATGATFKLGIEFVGWDTGDDRYMHAFGGHGRDIQGLAFHQLWLKLRDRPGIGGIDAYAPSAVAAYLNRFGLPTGPQTAPLAYAYHFDAGLYAAFLRRRAEAGGVTRIEGRITRVDRDPDTGHVRAVRLDDGRSVDGDLFIDCSGFRSLLLGETMGVPFEDWSHWLPCDRAVAVPTEPSAPLLPYTRATARTAGWQWRIPLQHRTGNGHVYSSAHISDDEATAVLLANLDSRPTAEPRQLRFKAGRRTSMWQGNVVALGLAGGFLEPLESTSIHLIQTGISKLFALFPDRGFSAVERDEYNRLMGDAYTSVRDFIILHYHATRRDDSAFWRHVRTMPIPDSLTRKLALFREKGRVFRYDDELFGISSWVQVLLGQNVIPVGHDPIVDALDADRVADAIRQIRAATIRGAQSLPNHADLVAHHGPFDRKNEFAK

SEQ ID NO: 84911 - protein, 135 aa, Erythrobacter sp.
  misc_feature (1)..(135): tr|A5PC89|A5PC89_9SPHN Tryptophan halogenase, putative OS=Erythrobacter sp. SD-21 OX=161528 GN=ED21_30679 PE=4 SV=1
MNEPRPPHVVILGGGNSGWIAACLLHHAWGTRGGKITVVESPSIGIIGVGEGSTPQLKMTTWFTHEDIAAANRSIYGQQPAYAPMSWHCLFAGYGCFPPREKLQPVPQGMPRGDVEAVRATLTPCATNFGGYAPL

SEQ ID NO: 84912 - protein, 538 aa, Pseudomonas sp.
  misc_feature (1)..(538): tr|A0A2K4JBR6|A0A2K4JBR6_9PSED Tryptophan halogenase OS =Pseudomonas sp. FW507-12TSA OX=2075552 GN=C1889_07340 PE=4 SV=1
MNKPIKNIVIVGGGTAGWMAASYLVRALQQQVDITLIESAAIPRIGVGEATIPSLQKVFFDFLGIPEREWMPQVNGAFKAAIKFVNWRKSPDPSRDDHFYHLFGNVPNCDGVPLTHYWLRKREQGFQQPMEYACYPQPGALDGKLAPCLPDGTRQMSHAWHFDAHLVADFLKRWAVERGVNRVVDEVVEIQLNDRGYISTLLTKGGRKLQADLFIDCSGMRGLLINQTLKEPFIDMSDYLLCDSAVASAVPNDDARDGVEPYTSAIAMNSGWTWKIPMLGRFGSGYVFSSKFTSRDQATADFLKLWDLSDNQSLNQIKFRVGRNKRAWVNNCVSIGLSSCFLEPLESTGIYFIYAALYQLVKHFPDTSFDSRLRDAFNAEIVYMFDDCRDFVQAHYFTTSREDTPFWLANRHELRLSDAIQEKVQRYKAGLPLTTTSFDDSTYYETFDYEFKNFWLNGNYYCIFAGLGMLPDRSLPLLQHRPESIEKAEAMFASIRREAERLRSSLPTNYDYLRSLRDGDAQVSGNQRGPTLATREGR

SEQ ID NO: 84913 - protein, 503 aa, Cellvibrio sp.
  misc_feature (1)..(503): tr|I3IFM3|I3IFM3_9GAMM Tryptophan halogenase OS=Cellvib rio sp. BR OX=1134474 GN=O59_000879 PE=4 SV=1
MNDNAKRRIKKIIIVGGGTAGWMTAAAFSKVLGTSCYDIVLIESDDIGTVGVGEATIPLITSFNQILGLDESQFMKKTQATFKLGIEFVNWGNIDDRYIHPFGVYGKGIGSLAFYNFLLKQQKIKPDTDVGDYSINIQAARHNKFMRAPNLPNSPLADIRYAYHFDAGLYALYLRNYAEQQGAIRVQGEITNVSLDDDSGCITSVTLKDGQTHSADFFIDCSGFRGLLIEQALKTGYEDWSHLLLSDTAVTVPSEVIHPLPSFTRSTAHSAGWQWCIPLQHRTGNGHVFSSRFMSEDEATSLLLQHLPTPALAGPRTVKFKTGIRRKLWNKNCVAIGLSSGFIEPLESTSIHLIHSAIHKLLTFFPTGALSQVDIDKYNDVMRTDIEFIRDFILLHYKATSRTDSAFWNHCRTMDVPDGLRKKMELYIKSGRLYRDNNELFTEDSWFAVMEGQGVKVEDYHPLVDSVEQVKFDAMLGDIARAIRESTDVIPSHAEYIARYCKA

SEQ ID NO: 84914 - protein, 493 aa, Cellvibrio sp.
  misc_feature (1)..(493): tr|I3I724|I3I724_9GAMM Putative tryptophan halogenase O S=Cellvibrio sp. BR OX=1134474 GN=O59_002940 PE=4 SV=1
MRLVKNLVIVGGGTAGWLAAAAIGKIYQGKVNVTLVESEEIGVVGVGEATIPTMLAFHKLIGINEADMMRATHATFKLGINFKNWGEIGEDYIHAFGQVGRIFWAGEFQHFWARAKALGLDIPFGAYCLEHEAARAERFGISESPALNYAFHFDAGLYAKFLRQFSEGLGVVRHEGKIEHVELNPDTGFIECLHLHGGMKIEADFFIDCSGFRGLLIEQALQTGYENWQHWLPCDSALAVQTAKVKPATPYTTSTAREFGWQWRIPLQNRTGNGLVYSSQFTDQTWAEKTLTNNVEGTMLNNPRLIQFTTGRRKFGWNKNCIALGLASGFLEPLESTSIHMVTSGLIRFLRLFPLRGVQPVLVDEYNRQSKEEAESIRDFIILHYHATRRSDTEFWNYVRTMQIPDTLRHRMDMFTQSGMVFLGGDELFRTNGWTQVLIGQGFAPANYQPIVDNMSNTEFSQYMTGFRDHISRNLALLPSHEQFIAQYCAMEK

SEQ ID NO: 84915 - protein, 510 aa, Rhodanobacter sp.
  misc_feature (1)..(510): tr|A0A1V3PSL6|A0A1V3PSL6_9GAMM Tryptophan halogenase OS =Rhodanobacter sp. B05 OX=1945859 GN=B0E47_14035 PE=4 S V=1
MRRIVVVGGGTAGWMTALTLANSAYGSRLQVTVIESPQVGTIGVGEGSTPYLRRFFQDLGIEEAEWMPACNATYKNGITFDKWSTRPGFESYFHAFASMLDNLTMTQFINNVHARLNHADVHAHPDRFFIANRLARDCRAPKPVRSFPFDIWHGYHFDASLLGAFLLKKALERGVRHVPRHVNEVILKENGDIDSLRLEGGETLDADFFVDCTGFASLLIGKALKVPFVPYAENLFNNAAVALPTPLDGPIMSQTISTALKHGWAWKIPLTNRYGNGYVYSTDFCSPEQAETELRTHLGMLDADAPARHLKMRVGRVTESWHRNCVAIGLSQGFVEPLEATTLLFAQRTANMLVAVLEKGDLGESARTTFNQTINGQLEGTRDYIVTHYKTNTRTDTDYWRANAANTNLSHPLKQLLATWLSSKPIIPGLKRGVFGQGYPTLSWYSLLAGMGLFPEPQDLRPPTPEEAQHDLTQIDNLLERSALNYPDQRELLQRIPLRSTEPSLQVYLW

SEQ ID NO: 84916 - protein, 495 aa, Oceanicola granulosus
  misc_feature (1)..(495): tr|Q2CK16|Q2CK16_OCEGH Tryptophan halogenase OS=Oceanic ola granulosus (strain ATCC BAA-861 / DSM 15982 / KCTC 12143 / HTCC2516) OX=314256 GN=OG2516_10936 PE=4 SV=1
MTGPARHIVIVGGGTAGWLAALILARRDDLRVTVVESSRIPTIGVGEGTTAVFRQMLQHLGLDERAFLAATGATIKYGIRHRDWRRVGHSYDGPIDDTAQVAGPGLDLYAVASGRPVAEVHLFGTLMDRRRAPVAEVGGREVPAGPFHWAYHFDQARAGAWLKRQATGVTVVDDVVAGLERDGEGGDITALRLESGARLEGDLFIDCTGFRRALIGPMGAEWVSYGDVLPVNRAMPFWIDLQEGEEIDPFTLAHAQGAGWMWKIPTTERYGCGYVYSDAHTTPDAAQAEIEAALGRAIEPRNDIRIDAGRLREAWIGNCVAIGLASSFLEPLEATSIHGTIVQLMWLDSLLAAPDGAARYNAAVARQVDDFRDFIRLHYVSERRDTAFWRDVAASHPPEVRARLDLWRHRLPERRDFAPVPLDLPHVQEQLYTPVLDGLGLLDRASARAALADHPHRRARLRKTHEQLTKDHRRAAGRCRPHRAWLSSLREEIPA

SEQ ID NO: 84917 - protein, 522 aa, Alteromonas mediterranea
  misc_feature (1)..(522): tr|S5C7N5|S5C7N5_9ALTE Tryptophan halogenase OS=Alterom onas mediterranea UM7 OX=1300258 GN=I635_19205 PE=4 SV= 1
MTTANPITHIVVVGGGSAGWLTAGRIAAQHQCAIRKDIKVTLVESPNVPIIGVGEGTWPTMRSTLIALGISETTFIKECDATFKQGAKFAKWTTGEEHDFYYHPLMLPQGFSQTNLGPYWQTVAPELNESFSHAVCVQEAICEAGCAPKSIRHAEFAGTANYAYHLDAGKFTAFLTKHCTEKLGIHHVLADVNRVESNDNDDIKALHTEQGVIVEGDLFVDCTGFKSMLLGEHYKVPFIPCDDVLFIDRALAVHVPYDTPQSPIASHTISTAQDAGWIWDIGLQSRRGVGHVYSSRHQSKDEAYARLDSYVRQTSALNGIDGINVKDITIQSGHRQHFWQNNCVAVGLAAGFLEPLEASALVLVELSASMIAEQLPANRAVMDIVAKRFNETFSYRWQRIIDFLKLHYMLSKREDSAFWRDNRDSHTIPDSLKELLALWQYHPPSDKDFTSNNEVFPAASYQYVLYGMGFISDLATHQQWVDADFAKQQLMQNRKARGMAVEKLPKHRELINKIHQFGLQAV

SEQ ID NO: 84918 - protein, 523 aa, Duganella sacchari
  misc_feature (1)..(523): tr|A0A1M7Q3C0|A0A1M7Q3C0_9BURK Tryptophan halogenase OS =Duganella sacchari OX=551987 GN=SAMN05192549_106129 PE =4 SV=1
MKTLPNHGVKNVLIVGGGTAGWLTAAFLAKQLGAGAEGAVQITLVESKEIGIIGVGEGTFPSIRGTLATIGIDEARFVRECNGTFKQGIRFNHWVREPAAAGADHYFHPFSLPSQRPGGIELLPYWLQGAAGPDVGFAAAVTMQKRVADAARAPKRPGDADFMGPLNYAYHFDAGKFAALLSTHAQSLGVRHVQATVERVVLDADGAVGAVHTKEAGMLTADLYIDCTGFRAALIGEALGSKFRNINDVLFVDRALAMQVPYERPDAPIPSYTIATAHEAGWTWDIGLHQRRGIGYVYSSRHTDDTRAEQVLRNYIGKAADDLNPRQLKLNVGYREQHWVKNCVAVGLSGGFLEPLESSGIGLIETAAYLVSYLFPYDGDFAPVAKTFNEMMKARYERIVDFVKLHYCLTQRKDHAFWTDNADMASVPDSLQDKLAMWRQRAPHRMDFVVDYEMYPPSSWQYVLYGMEYPTTLYANAKTLPRMDEARKEFAMIEQVSQRALADLPGHRAMVEHLLRQGERKIA

SEQ ID NO: 84919 - protein, 503 aa, Sphingomonas sp.
  misc_feature (1)..(503): tr|A0A0Q4JAJ2|A0A0Q4JAJ2_9SPHN Tryptophan halogenase OS =Sphingomonas sp. Leaf28 OX=1735695 GN=ASE79_18705 PE=4 SV=1
MTEHPIRRVVIAGGGTAGWMAAAAIARTMGSTIALTLVESDAIGTVGVGESTIPPMITFNRLLGINEAEFMRETQATFKLGILFDDWKDRGESYFHSFGITGKDHWSAGFQHFWLHGLTKGHDQPYDDYCLELRAALQGKFAHLPDDRMNYAYQLDSTRYARFLRKMAEADGTRRVEGKIAQVELNGESGDIAALVLESGARIEGDLFLDCTGFRALLIEGALHAGFDDWTHYLPCDSAIAIQTESVRPALPYTRAMAHDAGWQWRIPLQHRTGNGLVYCSRYLDRDAALDRLLGNIDGKTLTEPNMIRFVTGARRQQWHRNCIAIGLSGGFMEPLESTSIHLIQRAVLRLLRLFPAGAVSPRDVAEFNDQQHTDMLQIRDFLILHYKATNRRDSAFWRQCAAMPIPESLDQKIELFRETGRVFRKNEELFAENSWVQVMLGQGIVPQSYHPIATKLRDEELARLLTGLRDGTNATVAGLPEHADYVARYCGAAPARPSTVVA

SEQ ID NO: 84920 - protein, 550 aa, Nitrospirillum amazonense
  misc_feature (1)..(550): tr|A0A560HWX2|A0A560HWX2_9PROT Tryptophan halogenase OS =Nitrospirillum amazonense OX=28077 GN=FBZ92_121109 PE= 4 SV=1
MTAAEGARRRILIVGGGTAGWLTAAYLAKTLGANLSGGTEITLIESSDIGIIGVGEGTFPTIRSTLAAIGIDEARFLRESTATFKQGVHFVDWAETPAPGASPTQALGAVAGHTHYFHPFNFPHQGNGPELLPYWLLGGAGDLAFAEAVTLQKAVADAARGPKRPIDPPYAAPLNYAYHFDANRLAVLLRTVAIELGVRHRVGTVTDVVLDGSGAVARVETCEHGSLSADLYIDCSGFRAEIIGRALKVPFKSYQDVLFNDRAVALQVPYDRPDAPIPSYTVATAHEAGWTWDIGLNDRRGTGYVYSSRHTDDARAEQTLRRYLGPAAEGRDVRLLKFDSGCRTAQWVGNCVAVGLSGGFFEPLESTGIMLIEVAAHMIAQYFPWGETGLDSAQTAASMAATARTYNALMGKRYERIVDFLKLHYCITRRTDSAYWRDNADPATIPESLRDRLAVWAHRPPGRFDFVADHETFLPASYQYVLYGMGFKTDLEPARALHRRMDEAQHEFRGLRTVTPQAVSSLPTHRELVEEVYRNGFRPPQAAPAVGGRR

SEQ ID NO: 84921 - protein, 494 aa, Rheinheimera nanhaiensis
  misc_feature (1)..(494): tr|I1E2W9|I1E2W9_9GAMM Uncharacterized protein OS=Rhein heimera nanhaiensis E407-8 OX=562729 GN=RNAN_3673 PE=4 SV=1
MQSVRKVVVLGGGTSGWIAAALLKKVLGPVVDIDLIESDDIGTVGVGEATIPPIRLLNNVLGVNEAEFLRETKATIKLAIKFENWRVPGEGYYHTFGAPGKSLAFCHFHHLWRRAQQLGDTTSLWQYDLNYLCAEAGKFASINSKDPVLELPYAYHFDAGLYARFLRKFSEQMGVVRHEGKVSGVTQHGNGDIQHLVLEDGRVLAGDLFIDCSGFRGLLIQQKLNTGYEDWSHWLPCDRAVAVPSERFEHTLPYTRAIAHSSGWQWRIPLQHRNGNGLVYSSSHYTEQQAAELLLSNLDSKALAEPKFIQFKTGRRRKQWHRNVVSVGLSSGFLEPLESTSIHLIQSGVVRLLQLFPHQGVTEALVNEYNRQSQIEFEQVRDFIILHYHVNERTDSPFWRDVRQMQVPDTLKRKIQLFAENGSLFREQNDLFLESSWLQVMLGQGIVPKDYHPLANSYSEAQLKQMLQTMLAIKRDPLDKLPSHDEFLRRICAA

SEQ ID NO: 84922 - protein, 507 aa, Shewanella oneidensis
  misc_feature (1)..(507): tr|A0A2W5DD61|A0A2W5DD61_SHEOE Tryptophan 7-halogenase OS=Shewanella oneidensis OX=70863 GN=DI594_19355 PE=4 S V=1
MTIRKIAIIGGGTSGWLAANHLGRALKGRSGLSISVIESPDIPIIGVGEGTVPSIKKSLQSFGISESEFIRTCDVTFKQSIKFVNWLDKSRHGKHNFYHHLFDIINLHQGDAVSAWLAEQSGHFADFISPQHLACEAAKAPKLITTPEYAGVLGYAYHLNAAKFAKLLAKNAIEKFNVEHILTTVHDVCLGVDGAIESLQTEQGNLSFDFYIDCSGFESILLAKALKVPFISKAQQLFIDTALVAQIPTQPADVIPPYTKATAHQAGWIWDIALTQRRGTGFVYSSAHMNQTEAEQKFDRYLGGKLADIPHRKIPMTVGYRQQFWVKNCVALGLAQGFLEPIEATSILLTDFSARFLAERFPANKDEVDYLSMRFNRTVNHAWERVVEFAKLHYCLSDRIDSAFWLDNQREETIPEPLKERLNMWKSFSPIAEDFPSKFEVFNLDNYLYVLYGMKYPTQPHDRGLVAKANLNAYMSNMSNVKRQMFEGLPEHRELIDKICTYGLQAI

SEQ ID NO: 84923 - protein, 530 aa, Sphingomonas sp.
  misc_feature (1)..(530): tr|A0A0Q4J0W8|A0A0Q4J0W8_9SPHN Tryptophan halogenase OS =Sphingomonas sp. Leaf28 OX=1735695 GN=ASE79_18690 PE=4 SV=1
MATDTGPGATNDQPITTIVVVGGGTAGWLAACLIAARAYRGAEQPLSVTLIESPDVATTGVGEGTWPTMRRTLERIGISETDFLLACDGAFKQGSRFDGWRTGAADDSYLHPFTAPVDGDPRDIVAAWAEHGGRFADTVGAQGAICHRDLAPRQRAMPDYAGTLNYAYHLDAGKLAAMLMRHATERLGVRHVRDHVVGIDGTADGDIAAVRTRESGAIAGDLFLDCTGHAALLIEGHYGIGTVDRGGTLFNDRALAVQVPVAANSPIASQTNATAHAAGWIWDIGLPTRRGVGCVYSSAHLSDDAAADTLTRYLRATAPDAALPSFRQLTFRSRHRETFWHRNCLAVGLSAGFLEPLEASAIVLIELSLEALLDNFPSHRGAMDIHARRFNTLFRYRWDRIVEFLKLHYVLSERDEPYWRDHRDPASIPPRLAELLQLWRHQPPSRADFPMVDEIFPAASYQYVLYGMGFPAPTRGPIATPDRARTQTLLAQVDQRRRMLAAGLPTNRAYLDALRHATAPAPAPAMEPIA

SEQ ID NO: 84924 - protein, 499 aa, Duganella sacchari
  misc_feature (1)..(499): tr|A0A1M7N007|A0A1M7N007_9BURK Tryptophan halogenase OS =Duganella sacchari OX=551987 GN=SAMN05192549_103409 PE =4 SV=1
MENIKQVVIVGGGTAGWMTAAALARVLGDKIKLTLIESDDIGTVGVGESTIPMIKLFNSVLGIDEDEFMRATQATFKLGIEFKDWGRIGDSYMHGFGIFGQDLATLPFYQYWLRMQHAGKAPDIEHYSINRMAAKAGKFMRADRSHGNSPLADIVHAFHIDAGLYARYLRHYAEAKGVRRIEGKVVDALTRASDGHVDAVRMENGELIGGELFIDCSGFRGLLIEQALHTGFEDWSHWLPCDRAYAVPCELGNELLPYTRATARPAGWQWRIGLQHRTGNGHVYCSKFMSDDEAAGILMSSLDGRALAEPKQLRFTAGKRKQVWNRNVVAVGLSSGFMEPLESTSIHLIQSTIARLIAFFPDQGFSAADVAEFNRQCDFEVERIRDFLILHYHATERNDTPFWDHVRTMDVPQTLRDKMALWRTRGRIVRVDNELFAEAGWLQVLQGQRVPVEGYHPLADLMDESEVAGYLRDIASVIGQCVSQMPSHAAYIKARCAAK

SEQ ID NO: 84925 - protein, 495 aa, Oceanicola granulosus
  misc_feature (1)..(495): tr|Q2CG82|Q2CG82_OCEGH Putative tryptophan halogenase O S=Oceanicola granulosus (strain ATCC BAA-861 / DSM 1598 2 / KCTC 12143 / HTCC2516) OX=314256 GN=OG2516_03645 PE =4 SV=1
MRVVILGGGTAGWMAAAALSRYFGDRLSVTLVESDAIGTVGVGEATIPQLRLFHEGLGIDEADFLRATGGTIKLGIEFIGWQREGTRYFHGFGDVGRKIALAPFHQYWLRYNAEGGELPLEAFSVNAEAARRGLYGVRPGAAAARLPASAYHFDATRYAAFLRRFAEAHGVVRREGRVRAPELTASGDIAALVLESGARLSGDLFLDCSGFRALLIEEALGAGWEDWSHWLPCDRALAVASAGDGRLDPFTRASARAAGWQWRIPLQHRTGNGHVYASAFTTDDAAHDALMTTLPGEAQGESRPLRFTTGRRRAFWRRNCIALGLASGFLEPLESTSIYLVQSGIARLLALFPPPGGDATALRAQYNRQMAFDFALTRDFLILHYHLTERPGALWEHCRTMALPDSLAEKIALFAERGEIVRFNGELFDVPSWLQVMWGQGLRPARHHPLVDAARPADLARYIDDTARDVAARLAPLDSHAAFIARRAAAPAPAL

SEQ ID NO: 84926 - protein, 509 aa, Gordonia sp.
  misc_feature (1)..(509): tr|A0A1A0IU02|A0A1A0IU02_9ACTN Tryptophan halogenase OS =Gordonia sp. 852002-51296_SCH5728562-b OX=1834101 GN=A 5766_23600 PE=4 SV=1
MSDATRSGRLISETADVVVVGGGPGGSTVATLLARSGHRVVQLEKESFPRYQIGESLLPSTIHGVCRLLGVDEKIKNAGFMHKRGGSFRWGKNPVPWNFLFAISPEFAGEGSYAYQVERMKFDQILLENAAEQGVDVRQRSRVNGTITDETGRVTGVRYVDAERVEHRIDAKFVVDASGNTTRLSKHAGGERIYSDFFQNVAVFGYFENGKRFPAPDSGNILCAAFDEGWMWYIPLSDTLTSVGAVISRDKAEHVLNAQEETLLHYVDRCEIVKDMLSDATRVTEGTYGEIRIRKDYSYANTRFWGNGMVLVGDAACFIDPVFSTGVHLATYSGVLAARSINSVLAGAMTEERAFTEFEGRYRREYAVFYEFLSAFYDMEQSEDSYFWKARKVTNFDRNDMTAFVSLVAGAYSGEQALTDPEQIIERFSASTAALTEAAERTGGMDTDSGQRMGHLFGTQVVRDVMEEMNAFQARGAVGTDGTEPPLLDGGLVPSADGLSWAEPAPATV

SEQ ID NO: 84927 - protein, 501 aa, Cellvibrio sp.
  misc_feature (1)..(501): tr|I3IF32|I3IF32_9GAMM Tryptophan halogenase OS=Cellvib rio sp. BR OX=1134474 GN=O59_000688 PE=4 SV=1
MKNIVIVGGGTAGWMSALVMAREWIQQGVSIRVIESPDIGIIGVGEGSTPALKLFFDRLNIAESEWMPACNATYKCGIRFDGWSTHAGFESYFHPFSAALDRQTLPMFMHNAQMRLRGADVYAQPDRFFIAARLAQQCLAPVAPEHFPFDVHYGYHFDSTLLGQFLRKKALALGVIHESAHVVAVQQRENGDIASVQLADERIIAADFFVDCTGFSSLLLQQTLQVPFISYANNLLNNAAVAMPSVIGEKIPSQTLATAMSCGWAWQIPLTNRYGNGYVYSADFCSADQAETELRAHLGLLDADVPVRHLKMKVGRVKQHWAHNCLAVGLAQGFIEPLEATALFLVQQTVAIFAECFARGEFTNRLQAEFNQRMNNHFDGVRDYIVTHYKTSSRRDTDYWCANTANQQDVSPVMLELYRSWYAGKDLAAEINRLQLGNYYPAPSWYSIFTGMGIVPKGEQLRRATAEEACFDIAAVDEFLRRCSLNFNDHRALLMRWQLSG

SEQ ID NO: 84928 - protein, 495 aa, Cellvibrio sp.
  misc_feature (1)..(495): tr|I3IE99|I3IE99_9GAMM Tryptophan halogenase OS=Cellvib rio sp. BR OX=1134474 GN=O59_000405 PE=4 SV=1
MDMSQKIKKVVIAGGGTSGWCTAVALSRQLGTLLDITLIESAEIGTVGVGEATFPTICSFHKIHGIDEQEFLSATLGSIKLGISFENWARKGDRYIHPFGSFGKASWIGDFYHYWLAAKARGYEGELEDTCFELQAAKAHKFSITENPKLNYAYHFDASLYAKFLRRLSEEKGVRRVEGKIVQVKQHADSGFIESVVLESGACIEGDLFIDCTGFRGLLIEETLKAGYEKWGHWLRNDSAVALQTEFSGDIPPYTRAIAHDSGWQWKIPLQHRQGTGHVYSSAYISDEAARNTLLENLDGDIRAELRLLKFNTGRRKQAWVKNCVAIGLAGGFVEPLESTSIHLIQIGVSRLLQLFPFEGCNEHLIRRYNKMSHAEYENVRDFIILHYKATERDDTPYWRDCRDMTIPDSLAERIELFKQTGHVHHETNEVFGVTSWLQVMIGQRITPQGYSHFPHVISDEQIVAGLMSMKSKIAKTLEKIPSHADFLKSYCAVK

SEQ ID NO: 84929 - protein, 411 aa, Marinobacter sp.
  misc_feature (1)..(411): tr|A0A139DH70|A0A139DH70_9ALTE Tryptophan halogenase OS =Marinobacter sp. T13-3 OX=1794906 GN=AWU57_2935 PE=4 S V=1
MTTKDLESDIIIIGAGPSGAVAAALLRKNGYQVTILEKQHFPRFSIGESLLPQCMEFLEEADMVSAIEEAGFQYKNGAAFHYDGRNSAFDFREKFSPGWGTTFQVQRAHFDHLLAKEAEKQGADIRYGHEITEVDFSGERPWLKVRTDEGQEYEARGKFVLDASGFGRVLPRLLDLETPSEFPVRMSLFTHIEDNIDHPRHDRDKILITVHPKRRDIWFWLIPFSNGRCSLGVVAKPEYIESREGEPLDILREIVAEDPNLSSLLENAKWDTPAREIRGYSCNVKHLAGRNYALLGNAAEFLDPVFSSGVTIAMKSASLAADTLHRQFSGEAVDWQEDYAAPLMVGVDTFRTYVDAWYEGTFQDVVFAENPNDSIKQMISSILAGYAWDSSNPYVSESRRRLGTLAELCRA

SEQ ID NO: 84930 - protein, 552 aa, Nitrospirillum amazonense
  misc_feature (1)..(552): tr|A0A560FP36|A0A560FP36_9PROT Tryptophan halogenase OS =Nitrospirillum amazonense OX=28077 GN=FBZ89_10264 PE=4 SV=1
MADTEAPTDGAHAKGAPVKNVLIVGGGTAGWLAAAYLARTLSIGQPGGARITLVESSDIGILGVGEGTFPNIQRTLRRIGIDESVFMRESEATFKQGIRFDHWQHAPGSGERDHYFHPFQSAIGPQDLDLIPYWLLGATGDGMPLDTALTMQKRVADAALAPKRSGDADYAAPLNYAYHFDAVKFARLLRVVATDLGVRHVVDTVDAVPLDETGAVAGVVTRENGTLTADLYIDCTGFRAQLIGQALKSPYQSCRKWLFCDRAVALQVPYGQPDAPIPSYTISTAHEAGWTWDIGLETRRGIGHVYSSDHTDDARAEQVLRDYIGPAAADKTARTFRFEAGYRPEPWVRNCVAIGLSSGFFEPLESTGIVLIEVASVLLTSLFPWAGDMTTAARQFNRIMRQRYERALDFLKLHYCLTRRTDTAFWRDNADAATVPDTLHDLLDRWRHRPPEGLDFDLNLDTFSEASWQFVLYGMGYHTDLSAQAGAFRHMDEARQQFAAIRAGTEQALAALPRHRDLITQIYRHGLRPRTPFGGAPSGRANLSSGMAGLSR

SEQ ID NO: 84931 - protein, 490 aa, Sphingomonas sp.
  misc_feature (1)..(490): tr|A0A0Q4JPS5|A0A0Q4JPS5_9SPHN Tryptophan halogenase OS =Sphingomonas sp. Leaf28 OX=1735695 GN=ASE79_01655 PE=4 SV=1
MTACLIAHRWRARGMRVTLVESPEIGIVGVGEGSTPQLKHFFDTLGIAEDAWMPACDATYKLGIGFEGWSDRAGYERYFHPFPTALDSHTASQFFYNARALRTGRDVEAHPDRFLLPARLAAAHCAPQPAASFPFEVSYGYHFDAYKVGAFLATHATETLGVDHLQCRIASVERTPTGQITALIDTDGGRISGDFFVDASGFRSTIFAALDVPFVSYADALFNDRAVVMPTAHTPGAPIPSQTRATALSAGWAWHIPLTSRAGNGYVYSSRHLTEAQAEAELRAHVGTEAGEARHLKMRVGRVHDSWSHNALAIGLAQGFLEPLEATALHLVIATVEAFLDGVDAGSATDAVRSAFNTRIAARYDGVRDYIVAHYRLNQRHDDPTGYWAQARGVEVLSDDLKMLMSAWFTGADMVASIDRAGLARYYSAISWHCLFAGYGTFPEPARLIPPGADIDPVDMTRIDDFLTRCAMNFGSHASRLRPADLKDFA

SEQ ID NO: 84932 - protein, 495 aa, Alteromonas sp.
  misc_feature (1)..(495): tr|A0A2K8Y3W3|A0A2K8Y3W3_9ALTE Tryptophan halogenase OS =Alteromonas sp. MB-3u-76 OX=2058133 GN=CW735_18190 PE= 4 SV=1
MTVSNQARQKQRIVIAGGGTAGWMAAAAFTRLLGKEVDVTLIESSDIGTVGVGEATIPTLVFFHKLLKISEQEFMSETNATFKLGINFENWKDVNDAYLHAFGVTGKDCWAAGFQHFWLRGLKEGLAGDFGDYCLERQAAEANKFAHLPNNGLNYAYHIDATKYALFLRKLAEKEGLRRIDSTICDVKLRESDGFIQSLTLSSGETIEGDFFIDCSGFRGLLIEKALHTGYEDWSHWLPCDSAVAVQTESVGDPIPYTRCIAHEAGWQWRIPLQHRVGNGMVFCSNYFSDEQVVEKLLANVEGKPLNDPRVIHFRTGRRRKQWNRNCLALGLASGFLEPLESTSIHLIQQGIVRFLRMFPTQGVIQEDIDEFNKQSEFDIEHIRDFIILHYHVTNRSDTPFWRHCRQMDIPDSLTHRIELFKKTGRVFREGNELFDDSWQQVMIGQGLMPQSYHPIVDTMSRQELASLLNGISDGISRSVDKLPPHQDYITRFCG

SEQ ID NO: 84933 - protein, 512 aa, Lysobacter sp.
  misc_feature (1)..(512): tr|A0A0Q8JTC6|A0A0Q8JTC6_9GAMM Tryptophan halogenase OS =Lysobacter sp. Root690 OX=1736588 GN=ASD86_03215 PE=4 SV=1
MHNDAERNASAARPIKRVVIAGGGTAGWMAAAAISKILGGSLEISLIESEEIGTVGVGEATIPTLTTFHRLLDIDEREFMASTQGTIKLGISFENWTTEQHRYIHSFGSTGKDHWSAGFQHFWRRGRELGLAGSYDDYCVELQAALQGKFAHLKNYRMNYAYHLDASLYARFLRTMSEGNGCRRIEGKIVEVLTDPDSGYITALRLERGEVIEGDLFIDCTGFRALLIDKTLGVGFEDWSHWLLNDSAIAVQTTSVCDPVPYTRAIAEKWGWQWRIALQHRVGNGIVYSSRHVGDDEAKQALLDSVDGEILKNPWPVRFRPGRRLQCWSHNCIALGLAGSFIEPLESTTIHLIQRGITHLIRSFPQVISQAGVDEYNTQMADELQHVRDFVVLHYHATERRDSPYWEYVSSMTLPDTLRRRIELFRETGTVFHVPGELFAENSWIQVMMGQGITPKTHHPTADTMSQADLRRFLDDIRTQVDATVRALPSHQAYLSQYCPSAPRVTVPANVA

SEQ ID NO: 84934 - protein, 500 aa, Xanthomonas cynarae
  misc_feature (1)..(500): tr|A0A2S7B8E4|A0A2S7B8E4_9XANT Tryptophan halogenase OS =Xanthomonas cynarae OX=109214 GN=XcyCFBP4188_13975 PE= 4 SV=1
MTQAPIRKVVIVGGGTAGWIAACALSHQFRELLEITLVESEQIGTVGVGESTVPPIRTFHRFLQIDEQEFLRAVAGTFKLSIFFEHWRRQGERYIHPFGITGQSTLVCAFHHLWLESQRRGMPGTFGDYCLETVASRVDRFALLREPAVNYAYHLDAALYAKFLRARSEAFGVKRIEGKIQQVTLQPDSGDVATLVLEDGQVLDGDLFIDCSGFRGLLIEQALHTGYEDWSHWLPCDRAVAVQTEAAGPPVPYTRAIAHQAGWRWHIPLQHRVGNGLVFSSRHLSDDEAHAKLLRDAAAPALKDPWLVPFRTGRRRKAWNKNVVSLGLASGFIEPLESTSIHLTIAAVVRLITLFPADGIAPSQVQLFNDISRAEMEHVRDFIILHYHATQRDEPLWRQCREMELPESLALRLRAWRERAHAWQGADELFRVDSWTHVLMGQGLIPAQHHPLARAVSDRDLHRLLDGIAQPIQRAVEQMPSQQAFIDAYCKAGASAWGAA

SEQ ID NO: 84935 - protein, 504 aa, Sphingomonas sp.
  misc_feature (1)..(504): tr|A0A0Q4K2A2|A0A0Q4K2A2_9SPHN Tryptophan halogenase OS =Sphingomonas sp. Leaf28 OX=1735695 GN=ASE79_01645 PE=4 SV=1
MANHPLRIVIAGGGTAGWMAAATFARFLETGYEIDLIESDAIGTVGVGEATIPQIHLFNDALGLDEDAFLRATGGTFKLGIEFVDWLKPGHRYMHAFGDVGRDVGLLPFHQYWLRARSLGLAGDLGAYSLNTHAALANRMQRGPARTARTLPSMPYAYHFDAGLYARYLRRYSETRGVNRIEGKIVRVTRDGDSGDVSRLVLENGTTVAADLYIDCTGFRGLLIEEALGTGYEDWTHWLPCDRAIAVPSARGEKFTPYTRSTAHAAGWQWRIPLQHRTGNGVVYSSAHMSEDEATATLLRGLDTPAMADPRTITFRTGRRKRMWNHNVVALGLAAGFMEPLESTSIHLIQSAIARLLKLLPGRVIAEADRTEFNRQSDFEYERIRDFIILHYNATERDDTPFWRQCRDMAVPDTLAAKIALWRGNGHIVREHEELFTEVGWLQVLAGQGIVPDGHHPLSDAISTADLGEFMDTIDKLNAREAHQMQDHAAFVAQHCAAAPSLAA

SEQ ID NO: 84936 - protein, 502 aa, Sphingomonas sp.
  misc_feature (1)..(502): tr|A0A0Q4IXQ9|A0A0Q4IXQ9_9SPHN Tryptophan halogenase OS =Sphingomonas sp. Leaf28 OX=1735695 GN=ASE79_19410 PE=4 SV=1
MKRVQRLVILGGGTAGWMTAAAMSATFGDLVNISILESDAIGTIGVGEATIPTIHWFNQLIGLDEEAFVAATKASFKLGIEFVDWARPGTRYFHPFGRYGVDLGLVPFHQHWLRGKGDGLDRPLSVYSLAAQLAAAGRFAKPVDDPRSILSTLGYAYHFDAGLYARHLRQLAEKRGVVRHEGLLRDIERHPKTGFVTALTSDRGERLEGELFIDCSGFRALLIGETMGARFEDWSHWLPCDRAVAVPCARIAATTPFTRSTLRPAGWQWRIPLQHRTGNGYVYASSFVSDDEAVATLLSNLDGEALADPRMLRFTAGFRREAWRGNVVAIGLSSGFLEPLESTSIHLIQSGIAKLITLFPDADCDPVLARQFNTLFARDMDGIRDFLILHYHATQGHDAPLWQHTRHMTPPPTLVDKIAQYTRAGRLMLSADDLFREASWLAVLEGQGVGALGHAPLADTLDAATNRRQLNQIETVIARATPTLPLHDAAIAALVAPQVAGR

SEQ ID NO: 84937 - protein, 526 aa, Dyella sp.
  misc_feature (1)..(526): tr|A0A3M0EMB3|A0A3M0EMB3_9GAMM Tryptophan halogenase OS =Dyella sp. YR388 OX=2135665 GN=C8J93_3766 PE=4 SV=1
MARLKKVLIVGGGTAGWLAACYLAKAVNAADPDGVQVHLVESPDIGLLGVGEATFPSIRGTLAAIGLDERRFLVGATATYKQGIHYRHWVRPPGTPGADHFFHPFNAPSQRPGGPELLPYWLLGAAPDGMPFADAVSMQTTLVDHGKGPKRFRDADYQGPLNHAFHFDAACFARVLAEHGQETLGVQRHIATVERAELDEHGAIARIVTKELGELTADLYVDCTGLKGMLIGNMMQSPFRSRADVLFADRAVAIQVPYAQPDSPIPSYTISTAQEAGWIWDIGLQKRRGAGYVYSSRHTDVERAEAVFRNYLGPVADGLKAFHIKFETGYRPEHWRKNCVAVGLAGGFVEPLESTGIALIELATYLLTHLLPNDTDTMEQAARHFNEMMIARYDRIIDFIKMHYCLSQRRDSKFWIDNADPASIPDSLQDKLAQWKHRPPHRLDFVSDLEMFLVSSWQYVLYGMEFKTDLSPMRNLYPRVDEARQEFRNIQVAASQALHDLPDHRALVEQMCREYRARAGIEDAVA

SEQ ID NO: 84938 - protein, 536 aa, Cellvibrio sp.
  misc_feature (1)..(536): tr|I3IFM1|I3IFM1_9GAMM Tryptophan halogenase OS=Cellvib rio sp. BR OX=1134474 GN=O59_000877 PE=4 SV=1
MQQNKTQQDAMQQQELQKKGLQKTVQSIVIVGGGTAGWMTAAALSHFLSAQHYHITLIESDQIGTVGVGEATVPHIRYFNQTLGIDENEFIRQTNATYKLGIEFIDWGKLGDAYIHPFGIYGRTINDVSFHHYWLKAKLAGDSRPIGDYSLAVQAALQSKFSYPSANPESLASKYSYAFHIDASRYAQFLRTYAEQKGITRREGKIQQVNQCTDSGCITSVILDDGSTIGGDLFVDCSGFRGLLIEQTLQVGYDDWSQWLPCDRAIAVPSEKISPPLPYTKATAKAAGWQWRIPLQNRNGNGQVYCSHYVTEEQVAENLLASLDGKPLANLNHIRFTTGCRKKTWYKNCVAVGLSSGFLEPLESTSIYLIQMAITKLVEYFPRTQNDITLAEEFNRDMRLEYERVRDFLVLHYTATTRDDTEFWRYMRNMKKPASLDEKIALFVEQGHVMQYKKGMFLEPSWVAVYLGQGIVPKGYHPAVERLNKTELDSHMANLRAEINNYCTDMPPHSLAIEKHTNAMSNVWPPAALSLYEVFS

SEQ ID NO: 84939 - protein, 501 aa, Rhodanobacter sp.
  misc_feature (1)..(501): tr|A0A1V3PVS0|A0A1V3PVS0_9GAMM Tryptophan halogenase OS =Rhodanobacter sp. B05 OX=1945859 GN=B0E47_11015 PE=4 S V=1
MNDARIRRLVIVGGGTAGWLTAALLAHALGSQLKILLVESAEIGTVGVGEATIPQILHVNRFLGIDEDDMLRAVHGTFKLGVQLNDFTRVGDSYLHAFGDLGLPLGLTPFHHYWLRSRGRPGAQSLWAHSLNAAAAAANRFARMDTVPNSPLGGIRYAYHFDASLYGQYLREHIKPGIVQRIEGKVVDVRLHADDGHIESLLLDGGATVEGDFFIDCSGFRGLLIEGALKTGYENWQHWLPCDRALAVASAPGGPMRPYTQASARSAGWQWRIPLQTRTGNGHVYCSRFISDDEAAAQLLANLETEALGDPRPLRFVTGMRKLAWNRNCLALGLAAGFMEPLESTSIHLVQSGVNRLLAMFPDRHCDPKLADEYNRQTRFEYERVRDFLILHYKATERDDTAFWRQCAAMEVPPELARKIALFRSRGQIFREHDELFTEIAWLQVMIGQRIEPQNHHPLADALDEAQLDGFLGDIRTLIGRASASMPDHARFVADHCRGGP

SEQ ID NO: 84940 - protein, 505 aa, Cellvibrio sp.
  misc_feature (1)..(505): tr|I3I6N3|I3I6N3_9GAMM Tryptophan halogenase OS=Cellvib rio sp. BR OX=1134474 GN=O59_003598 PE=4 SV=1
MKPVNNVVIVGGGTSGWMCAAAIARMAPPNASITLVESEAIGVIGVGEATIPPLLEFNQFLGLDEHEVLRECQGTYKLGIEFVDWLDLGKRYFHPFGFYGRDTPEFAFHQLWLRLRALSETGKAPAELAGDINDYNLCAMAARLGRFAQPQGGSDAILSTLRHAYHFDSMRYGQLLRRYAEQRGVRRVEGLVDSVQQHPDHGMIESVTLSDGQVLAGELFIDCSGFKSLLIEGAMNSEFIDWSRYLPCDRALALSTTGTGAPDPFTRATADNAGWRWRIPLQTRMGNGYVYSSAFADEDDVHRALLAGAEGEALGNPRPLRFRTGHRRLFWEKNCVAIGLAGGFIEPLESTSIHLAQIGIQRLINLWPGRGINAAEIAHYNRIMTADYERLRDFIVLHYSATQRRDTEFWRYVGHMKIPDTLASKLEIFRGSGRVIAAPDDLFTPHSWLAVMLGQGINPTHYDALVDRVPETALIQNMRHLKDAIGKTAAALPSHEAYLKRYCAA

SEQ ID NO: 84941 - protein, 498 aa, Croceicoccus naphthovorans
  misc_feature (1)..(498): tr|A0A0G3XIC8|A0A0G3XIC8_9SPHN Tryptophan halogenase OS =Croceicoccus naphthovorans OX=1348774 GN=AB433_11070 P E=4 SV=1
MTQQPIRIVIAGGGTAGWMTAAAMSRTLGRTAHVTLVESDMIGTVGVGESTIPPLVNYLRLLNIPEPDFMRATHATFKLGIQFDNWRVPGESYFHSFGGTGKDHWTAGFQHFWMEGKARGHDVSYDEYCTELVAARESRFAHLPDGRLNYAFQLDATAFARFLRGIAEGEGTQRVEGKIAHVEMDGESGDVAALTLESGTRIEGDLFIDCTGFRALIMGQALHIGYDDWTHWLPCDSAIAVQTSSVRPAVPYTRAMAHDAGWQWRIPLQHRVGNGIVYCSRYLDHDAAEERLLGNIEGETTTKTNRLRFVTGARRKQWHRNCVAIGLSSGFMEPLESTSIHLIQRAIMRVIRMLPAGRVSERDEAEFNAQQMQDMEQIRDFLILHYKATDRRDSAFWRHCASMEIPDSLAHKIALFRETGRVFRTNEELFVENSWIQVMMGQGIMPQSHHPVAGKLSDRELEHLLRGLRETVAKTVGSLPAHADYVAKYCGAQEAEAA

SEQ ID NO: 84942 - protein, 507 aa, Cellvibrio sp.
  misc_feature (1)..(507): tr|I3I6B7|I3I6B7_9GAMM Tryptophan halogenase OS=Cellvib rio sp. BR OX=1134474 GN=O59_003482 PE=4 SV=1
MKFMIKKIVILGGGTAGWMAANILAKRWAKYSVEIALVESSDIGIIGVGEGSTPQLKSFFDYMEIAEAEWMPACNATYKTGIRFCNWSTKPGFENYFHPFPAQPDDYSAPAFFYNCFVRRKGADVYAHPDKFFLATYLAKHQLGPKPAHHFPFQLGYGYHFDSSLVGLFLKQHAAKLGVAHIDARITEVKLDAQGYISHLLTENQQPLAADLFIDCSGFAGVLIQQALKVPFINFSSNLFNDSAVVMPTAAAMDITPQTTATALNAGWMWNIPLVNRIGNGYVYSSNYLSADMAETELRQKLNLLDKDVPVRHLKMKVGRLQHHWAKNCLAVGLSQGFIEPLEATALHLVQETVLGFAEAIELGDFTDREQANFNRSINQRFEAVRDYIVCHYRVNSRMDTQYWRDNANNNSLSDSLRELLQVWVGGGNLTQEIERQKIGCYYPSASWHCLLAGYGLFPTQDQLSVGNEVAHKYKMENIENFISRCALNFSSHREQLNDLVAKQQVM

SEQ ID NO: 84943 - protein, 503 aa, Cellvibrio sp.
  misc_feature (1)..(503): tr|I3IAH9|I3IAH9_9GAMM Tryptophan halogenase OS=Cellvib rio sp. BR OX=1134474 GN=O59_001738 PE=4 SV=1
MQQPFRIIIVGGGTAGWMTAAAISSVYKDRSRFQITLVESEEIGSIGVGEATLPSIKSFNDQLGIDEVEMMRRTQATFKLGIQFNDWGRLGASYIHPFGLYGSLKNSSDFYQYWSHVASKKTIPDISKYSFAVQLCERNQFTFPSKDSGQIESTFSYAYHFDAALYAAYLREISERAGVLRVNGIVEAINNDPDTGNITAVFLRDGKTLSGDFFIDCSGFRSLLLHKNLQSEFEDWSHWLLCDRAVAMQSEQPKDIPPYTMSTAKEAGWQWRIPLQHRAGNGYVYCSNLISDDQAHDSLLKGLAGKPLTDPRFIKFKAGRYKKSWQKNCVAIGLSSGFLEPLESTSIYLIHIAIICLLRVFSFQSNKNLSILSDEYNRLIDNEYERIRDFLILHYRLNDRTDSELWRHCQSMKVPDSLMQKMDLFKRRGYSESFKYGLFSTPSWLAVFHGQGLFQQGVDPFISSIPTEKIEPILAEVSGMIDKGLQAASTHEHFIKQYCNAAT

SEQ ID NO: 84944 - protein, 413 aa, Rheinheimera nanhaiensis
  misc_feature (1)..(413): tr|I1E0N1|I1E0N1_9GAMM Tryptophan halogenase OS=Rheinhe imera nanhaiensis E407-8 OX=562729 GN=RNAN_2872 PE=4 SV =1
MEHFDVVIIGAGPSGACAGALLRKAGKKVLCVEKQHFPRFSIGESLLPHCMQFLAEAGLEPALQQQAAAHGFQFKNGAAFLKNDFRTAFDFTDKFSPGPGTTFQVKRAAFDKILADAAAEQGLQIRYGVTVEQVDITGAAQALLQVSDDNGRQYQLSAGFVLDGSGFGRVLPKLLDLEQPSDFPVRQASFCHIRDNISDPRFDRNKILITVHSSLPDVWFWLIPFSDGSASLGVVGKQQRFDASRSAADNLWQHVQQTPELAQLLAQAEPVNEAQSLTGYAANVRSLHGNRFALLGNAGEFLDPVFSSGVTIALRSAAMAVPLVLRQLNGEQPNWDTEYSKPLRKGIDTFRAFVTAWYDGRFQDVIFSRQRQAKVTAMISSILAGYAWDQANPYVAEPERRLNVLRELCLDAE

SEQ ID NO: 84945 - protein, 494 aa, Massilia sp.
  misc_feature (1)..(494): tr|A0A0Q7G0P1|A0A0Q7G0P1_9BURK Uncharacterized protein OS=Massilia sp. Root418 OX=1736532 GN=ASC94_03310 PE=4 SV=1
MNTAYKRIVVVGGGTAGWMAATSLATALPGSTVELVESEAIGIVGVGEATFPMLRDFHKLNRIAEADFLRATNGTFKLGIEFRDWRAKGHRFFHTFGNFDDLAGPACLWGQYRRVDDPALGALGEQCLPSVMASQGRFVTPPADQAGLFNYAYHFDASLYAGFLRGIALSRGAGRTEGRIVEVRRRADGSVDHLKLEDGRVVAGDLYIDCSGFASLLLGRALEEPFVDFSRWLPVDRAWAVPSKPSGPGLAPHTVATALEAGWSWRIPLSSRVGNGHVFSSRYIDEDRARTQLLDQLDGPALAEPRLLRFTTGHRERFWVHNVVGLGLSSGFLEPLESTSILLIQRGLGKVIELLLPGARPAAAVVASYNRGMARVFERIRDFIILHYCLTERRDSALWRDMASMELPETLDFKLHAWRQTGSLNMYGEEGFEATSWLAIHAGMGNWPLRADPVLAEVPRAEALQALHQRRDHFAAVVAGMPTHEAFLRHVLGR

SEQ ID NO: 84946 - protein, 501 aa, Cellvibrio sp.
  misc_feature (1)..(501): tr|I3I495|I3I495_9GAMM NAD(FAD)-dependent dehydrogenase , putative OS=Cellvibrio sp. BR OX=1134474 GN=O59_00116 1 PE=4 SV=1
MQTAIPKSIAIVGGGTAGWMAASILLHAWKTHQVEITLVESEDIGIIGVGEGSTPALRKFFSYLHIAEKEWMPACNATYKAGIYFDNWGETPGYESYFHPFYTAWDQEGAYAFVAAANSQRLGNNQQAHPNPYFLAYHLAQANRAPLPVDPQLGNQVNYGYHFDSALLGKFLRDRAKQLGLTHLIDNVEQVTLTAEGDISSIQTRQHGSIGADFFIDCTGFASLLMGKTLLEPFLSFKENLFNDAAVTLPTAIDEEIVPATRSTALGYGWAWKIPLTNRYGNGYVYSRDFISPEQAEQELRNHLGDVAKDSPARHLTMRVGRIHNHWKKNCLAVGLSQGFIEPLEATALAIVQSTLENFVDCFDQPVSETTKENYNNYINELIDGIRDYIVTHYLLNTRTDTTYWRACREQAKPSTKLEALISCWDNQGDFMDLLFKQQRAKVYKPESWFCIFAGMGRFTHLRTTKANITPTNIELTLQEKLNNIGNLYFIDHKKRLNIHC

SEQ ID NO: 84947 - protein, 324 aa, Bradyrhizobium sp.
  misc_feature (1)..(324): tr|J3CXQ4|J3CXQ4_9BRAD Tryptophan halogenase OS=Bradyrh izobium sp. YR681 OX=1144344 GN=PMI42_01602 PE=4 SV=1
MSPLVQPVLRQLGLWPAFVAQGFSPSHRTLTAWDEAGLTSSELLLEARGPSWRVDRPAFDGCIAMEACRAAARVDAKVSQIEREEDGWSVACDDGNSHSARLVIDATGRARALADRRGSRAKVQDRLIAAYAEAVTSGPSAPELLVEAFEDGWWYTLALGEGRRAFACMTDSDLARGLRLSTPDGWRAALAKTQFVAAVASKVVQFEQPRLLPAGSRTAANATGFRFLCAGDAASAFDPISGHGVVKAMRSGVFAAYAASDCLARGDTTALDRYDSWVAREAAVYATTLSEHYGSVSRWDGRPFWQRRRADMSSSNSLSSLSGQ

SEQ ID NO: 84948 - protein, 502 aa, Asticcacaulis sp.
  misc_feature (1)..(502): tr|A0A2T5XCF5|A0A2T5XCF5_9CAUL Tryptophan halogenase OS =Asticcacaulis sp. CF398 OX=2135738 GN=C8K45_3946 PE=4 SV=1
MMQPVRKVVIVGGGSAGWMTAAALAKGLGDTVEIALIESEEIGIVGVGEATIPPILKYNAFLEMDEATFVRETHATYKLGIEFVDWRAKGHSYFHPFGHCGSEIESFPFHHYWLVDWKRRGGPCDLTRHNLETVAAYKGRFGHLAAEGDKPGMNYAFQFDAALYAGFLRRYSEDRGVTRLEGRITGVEQHPETGYVTAVVTADGRRLSGDLFIDCSGFRGLLIEQTLKCGYEDWSKWLPMNRAVAVPCTRVEPLTPFTRATAREAGWQWRIPLQHRTGNGHVFCDGFTSEEAATQRLMDSLDGAPLADPRPLRFVTGHRRRFWEKNVVALGLASGFLEPLESTAIHLVQSGALRLLSLFPKTGIFPSVVEQYNRDVLFDYNNIKDFLIAHYKVTERNDTPFWRWVQAMDIPDSLKERLDMFRETGLLVARDPELFREASWLAVLTGQGLIPHSHHPAVDKLEVADIGLHMSRWRKMLDARADALPRHEDHLRRFAPSASGIR

SEQ ID NO: 84949 - protein, 500 aa, Asticcacaulis sp.
  misc_feature (1)..(500): tr|A0A2T5XMR4|A0A2T5XMR4_9CAUL Tryptophan halogenase OS =Asticcacaulis sp. CF398 OX=2135738 GN=C8K45_1517 PE=4 SV=1
MVKPIRKVVIAGGGTAGWMTAAWLSKTLKGDLEEIVLVESDEIATVGVGEATTPYIQIYNQVLEIDEAAFLKATHGTYKLGIEFVGWGHEANRYFHAFGTYGRDFGALPFHAVWLRRALADEAERLEDYNLQALAAETDRFMRPSGRNSPLAEIAYAYHFDASLYARFLRTMSEQAGVRRVEGKIQDVVLDARGFISGLRLDHDRFIDGDLFIDCTGFRALLLGEAMGIGFEDWTHWLPCDRAYAVPSKSTGRLAPYTQSTAHEAGWQWRIPLQHRTGNGTVFSSAFIDETVAVERLMRNLDAKPLADPRRLSFTTGRRQKFWHNNCVAIGLASGFLEPLESTSIMLIQNGIARLQYLFPDTGFEAADIDAYNAEMTREYEEVRDFLILHYKLTQRNDSDFWRYCRSMSTPDSLAARMSLFESRGRIPAERGEQFKTPNWLAVMWGQGLRPRSADPLVASIPEGAMRQSLADIRDVIRTCRDCMPTQAEYLRHIGAGSIN

SEQ ID NO: 84950 - protein, 502 aa, Asticcacaulis sp.
  misc_feature (1)..(502): tr|A0A2T5XHZ5|A0A2T5XHZ5_9CAUL Tryptophan halogenase OS =Asticcacaulis sp. CF398 OX=2135738 GN=C8K45_3084 PE=4 SV=1
MQTDAIKHVVIAGSDAPAWLTALILLRALGQNRDQTGLTVEVVEIRSALRPADVTVTLPSLRAFHRMLGLDQAELIAATDATYSLGQRYAGFVGSRPAYLATYATAGVPQHNLGFLQFWLRARHEGLKIELDEFSLGAAAARVGRYAPPPPSAAGLDAAEHGFHMHTLSYVRWLRAHALQRGVKVTPGAAFEVMTGEAGIAGLKLTDGRVIEGDIYIDATGTEAKLISALDNSRDEAAHLPGDRLLVTAAAPLSPLPLHAQISAHRHGWLGLYPLRSQTGMVMGYDSTAFSDDEALQQIATLSGLKPASGAVAEVYRPGRLRRAWVQNTIAVGPAAAVLEPNDGLDLHMVQVALSHLVSLFPLSRLRMPEADLFNDYLASYYDRALDYQATRYHLNRRFGEPLWDRLRDVPVTETVRHRIDLFRRRGLVALYEHEATNEDGWVAHLLGMGIVPEDYDPQVDQAPEGEVIQRFQGILKYVADRVRQMPTHEELLARAAGKVGA

SEQ ID NO: 84951 - protein, 499 aa, Asticcacaulis sp.
  misc_feature (1)..(499): tr|A0A2T5XCL8|A0A2T5XCL8_9CAUL Tryptophan halogenase OS =Asticcacaulis sp. CF398 OX=2135738 GN=C8K45_3945 PE=4 SV=1
MSDAHPVKRVVIVGRDEALWLTANVLQRALRASGLTFTVVELPSLLRPGEVFPTLGNQAAFHSLLGLDEAILMDGLGATFTLGQRFVGWAAKSKPPFMLGYSSVGVPLERTAFHHHWVRARASGLTAAYEDFAINAVAAKNGRFVTSGSDLQGFAQSEYGYHLPALPYVEVLRDIALKRGVVHVKAHHISPDGTGEQMRAVVLSDGARVEGDLFIDATGAEARLLSQMPGTDFDSWRHWFPCDRLLTAYAAPMSPLPAYAQITAFRSGWLGLFPVRDYTALQQVYLSSDLSDDEAFEMAGMVASLPFNPQATVTPFEAGRRAQAWSGNVIALGDAAAVFDPLDSARMPALLTGLSHLISLFPLDTGCIEAAVYNRVVTQAYERLRDFQCLHYKLNQRRDQPLWDQLRGTEAPETLDHKLRLFAARGHMPMYDDEAFDESLWIAACIGHGLIPEVYDPMADQVPEPEVIAHFQKALGYLRQQVEALPPMEAVLKRQMQRA
